United States Patent Application Publication US 2022/0205049 A1 - sequence listing, part 3

SEQ ID NO: 20139 - DNA, 122 bp, Homo sapiens
  misc_feature (61)..(62): /note="This region represents a CpG dinucleotide"
  misc_feature (61)..(61): /note="Nucleotide may be methylated to form 5-methylcytosine"
tgccctgggaggagggctgatggctactggccttgctgatggtggcccccctggccagcacgccatctgacaggttccttgcagctaaaggtcttgctgggccacccaggtgtgactcactc

SEQ ID NO: 20140 - DNA, 122 bp, Homo sapiens
  misc_feature (61)..(62): /note="This region represents a CpG dinucleotide"
  misc_feature (61)..(61): /note="Nucleotide may be methylated to form 5-methylcytosine"
taaatttttttgaggccagtaggcattgtctgcgttaggatttctgtatcatcctcctaacgcagacaatgcctactggcctaagaaaaatttaccttcttgtgggtggagacaggacaaga

SEQ ID NO: 20141 - DNA, 122 bp, Homo sapiens
  misc_feature (61)..(62): /note="This region represents a CpG dinucleotide"
  misc_feature (61)..(61): /note="Nucleotide may be methylated to form 5-methylcytosine"
ggatgtaatccactcgatgcttcagtaagcatgactcaggccaagcctctgaacgtgttacgttatccctggagaaaggcatttaactcttacccacccccaacaatctattctgaataggt

SEQ ID NO: 20142 - DNA, 122 bp, Homo sapiens
  misc_feature (61)..(62): /note="This region represents a CpG dinucleotide"
  misc_feature (61)..(61): /note="Nucleotide may be methylated to form 5-methylcytosine"
gggacagctgacccaagggccctactgcatgggtcgcacggttcagccagtccttgctggcgggacctgcatccccatcctactggctggcagagtaggactggtttcctgggacatctcca

SEQ ID NO: 20143 - DNA, 122 bp, Homo sapiens
  misc_feature (61)..(62): /note="This region represents a CpG dinucleotide"
  misc_feature (61)..(61): /note="Nucleotide may be methylated to form 5-methylcytosine"
ctgtttgtattctcttaccacaagttatctgctgttcctactttcacttaagctttgtatcgtactctgtgagaaatgtttgagctggctggacacatttcctgaaatcatttctctagtct

SEQ ID NO: 20144 - DNA, 122 bp, Homo sapiens
  misc_feature (61)..(62): /note="This region represents a CpG dinucleotide"
  misc_feature (61)..(61): /note="Nucleotide may be methylated to form 5-methylcytosine"
ggtttggggtagggacaggcgagagtcaactttacaaagtcatgtgctcagtgttcctcccgcgtctcagggcactcacgtcccgcatctcagagcactcatctcctgctactcagcactca

SEQ ID NO: 20145 - DNA, 122 bp, Homo sapiens
  misc_feature (61)..(62): /note="This region represents a CpG dinucleotide"
  misc_feature (61)..(61): /note="Nucleotide may be methylated to form 5-methylcytosine"
actgaccggtccaacttcttcacctttgaaacgaggtgaggacattattaactccactggcgcagcatcgaggtcttgatttacttatgaaaatgtaatcaatccaaagaacagtggctgac

SEQ ID NO: 20146 - DNA, 122 bp, Homo sapiens
  misc_feature (61)..(62): /note="This region represents a CpG dinucleotide"
  misc_feature (61)..(61): /note="Nucleotide may be methylated to form 5-methylcytosine"
tgtgaaattttaaaaatgttgcatctctgcttctctccctgccccaggagccctcccaggcgctgagtccctgctgctgcagcatccagccaccgacccagctcctgctgaccacgatgtcg

SEQ ID NO: 20147 - DNA, 122 bp, Homo sapiens
  misc_feature (61)..(62): /note="This region represents a CpG dinucleotide"
  misc_feature (61)..(61): /note="Nucleotide may be methylated to form 5-methylcytosine"
ctcagcaataaaagggaatcaactattaatacatgcaacaactccaacggatctcaaggacgttatgttgagtgaaagccaatctcaaaggattacgtaatgtatcattccatttatatgcc

SEQ ID NO: 20148 - DNA, 122 bp, Homo sapiens
  misc_feature (61)..(62): /note="This region represents a CpG dinucleotide"
  misc_feature (61)..(61): /note="Nucleotide may be methylated to form 5-methylcytosine"
ttttagcccttgctatcttgtaaactccatgcagaagttatgtttactgtgaacataggccgcaggaggccttggggagcttctgcgggtggtaggagacacactttgctaggtctgcaatt

SEQ ID NO: 20149 - DNA, 122 bp, Homo sapiens
  misc_feature (61)..(62): /note="This region represents a CpG dinucleotide"
  misc_feature (61)..(61): /note="Nucleotide may be methylated to form 5-methylcytosine"
tccctactttcatgaatttatagtccagtgagggaaataagatgaataaaaagacccctacgtctttttgtttgaactctggtaaagaaatgtgtttatcagaggggctaggccaaacttta

SEQ ID NO: 20150 - DNA, 122 bp, Homo sapiens
  misc_feature (61)..(62): /note="This region represents a CpG dinucleotide"
  misc_feature (61)..(61): /note="Nucleotide may be methylated to form 5-methylcytosine"
gagaggtccaagttaaatcagaaagtttattttgccaaggtggaggatgtggccatgacacggtctcagaaagtccttgacaacatgtccccaagatggtcggggcacagcttggtttgtaa

SEQ ID NO: 20151 - DNA, 122 bp, Homo sapiens
  misc_feature (61)..(62): /note="This region represents a CpG dinucleotide"
  misc_feature (61)..(61): /note="Nucleotide may be methylated to form 5-methylcytosine"
ttcccctttggcccctggatcttctggttttccttctgatcatgtgtataatgactgctgcgtatacatttttgtctccaaaattctataatcatttttctccctccccgagtggcaaacaa

SEQ ID NO: 20152 - DNA, 122 bp, Homo sapiens
  misc_feature (61)..(62): /note="This region represents a CpG dinucleotide"
  misc_feature (61)..(61): /note="Nucleotide may be methylated to form 5-methylcytosine"
tgcctatcaaaataaacaaggcactgtgtgttagggctgaataagatgagcatctgccttcgaggaacttatggcctgataaataaaattcccaaataactaaaaacaagacagaaaacagt

SEQ ID NO: 20153 - DNA, 122 bp, Homo sapiens
  misc_feature (61)..(62): /note="This region represents a CpG dinucleotide"
  misc_feature (61)..(61): /note="Nucleotide may be methylated to form 5-methylcytosine"
tggggggcacatatggcagtgtcaccggctcctcacctgtgtccacaggtatccaggctccggagctttctcacggtgaaggtgattgagtgagccgccgagcggtggggacagaaatcttt

SEQ ID NO: 20154 - DNA, 122 bp, Homo sapiens
  misc_feature (61)..(62): /note="This region represents a CpG dinucleotide"
  misc_feature (61)..(61): /note="Nucleotide may be methylated to form 5-methylcytosine"
aactaatgtttgctgcatgaatatggccagtatcacaaatcctctagtaacactgcaatacgctgtctcagaacttcgatttctttctattatttgttgcagtgtttatttcttctatttaa

SEQ ID NO: 20155 - DNA, 122 bp, Homo sapiens
  misc_feature (61)..(62): /note="This region represents a CpG dinucleotide"
  misc_feature (61)..(61): /note="Nucleotide may be methylated to form 5-methylcytosine"
gattgctggctaattgtgaaaggagactcaggcttttaacactgcaggaatttcaaactgcggtctcagtggccagagtgtcttaccagggagcagacctaatgtatccagtttaaaagggc

SEQ ID NO: 20156 - DNA, 122 bp, Homo sapiens
  misc_feature (61)..(62): /note="This region represents a CpG dinucleotide"
  misc_feature (61)..(61): /note="Nucleotide may be methylated to form 5-methylcytosine"
ccagccctccccctcgccctgcgaaaactcctgagttctccgggtggactgctccactaccgcaaatcaggggagactcagcactgcgcgcggaaccggatcccagctctccctcctctgag

SEQ ID NO: 20157 - DNA, 122 bp, Homo sapiens
  misc_feature (61)..(62): /note="This region represents a CpG dinucleotide"
  misc_feature (61)..(61): /note="Nucleotide may be methylated to form 5-methylcytosine"
tgagctcggaagaggcaactctgggtgcagttgagcctctgggctggtgtcgttgagctccgccgcagccctgggagtggcagaggcagggagggcgcccatgttggggttgtgatggggga

SEQ ID NO: 20158 - DNA, 122 bp, Homo sapiens
  misc_feature (61)..(62): /note="This region represents a CpG dinucleotide"
  misc_feature (61)..(61): /note="Nucleotide may be methylated to form 5-methylcytosine"
cactcccatggggcctcagtttcctcatctgtagatggggtcagatcattgcctccacttcgcagggccagggcaacggccccaggaggagacacccgaacgcagcacctgctcacaggcgt

SEQ ID NO: 20159 - DNA, 122 bp, Homo sapiens
  misc_feature (61)..(62): /note="This region represents a CpG dinucleotide"
  misc_feature (61)..(61): /note="Nucleotide may be methylated to form 5-methylcytosine"
ttcacctatctgatgctgctcaaatgccagagtgctttaatgtgtctttcgcagtatagacggcccaggccctagcctgagattcagaccctgcccagttgagcaaaaggagaaagagatgc

SEQ ID NO: 20160 - DNA, 122 bp, Homo sapiens
  misc_feature (61)..(62): /note="This region represents a CpG dinucleotide"
  misc_feature (61)..(61): /note="Nucleotide may be methylated to form 5-methylcytosine"
cagaaacacaagcttttttaacacttctgggcaaaagccagtgtttcagataaacacacccgtggctgcttcatctgtaaattatgctttcttaaggccttcactttgttaaggcagtctat

SEQ ID NO: 20161 - DNA, 122 bp, Homo sapiens
  misc_feature (61)..(62): /note="This region represents a CpG dinucleotide"
  misc_feature (61)..(61): /note="Nucleotide may be methylated to form 5-methylcytosine"
gaagggaatgacaggagctgactcatgccctagcaggacttctctgtctgctgtgttgagcgctggtgatgggggcgtgggaagaagttaggagccattacagaggtcccggtgggccatga

SEQ ID NO: 20162 - DNA, 122 bp, Homo sapiens
  misc_feature (61)..(62): /note="This region represents a CpG dinucleotide"
  misc_feature (61)..(61): /note="Nucleotide may be methylated to form 5-methylcytosine"
gaaacaccaagttgttatgcaaagccacaggagttaagaatttagacaaggccaacacttcgctaacaagattcacttagagtccaccagttaattgtcaactaagatctgctgagaatccc

SEQ ID NO: 20163 - DNA, 122 bp, Homo sapiens
  misc_feature (61)..(62): /note="This region represents a CpG dinucleotide"
  misc_feature (61)..(61): /note="Nucleotide may be methylated to form 5-methylcytosine"
gaaatcttggctgagctattcctagaaactgtaacttctggactcagaccttaaacttttcgtggtatttctgcctcttggttagctgtattcagtttactatttttggaccttaaggctta

SEQ ID NO: 20164 - DNA, 122 bp, Homo sapiens
  misc_feature (61)..(62): /note="This region represents a CpG dinucleotide"
  misc_feature (61)..(61): /note="Nucleotide may be methylated to form 5-methylcytosine"
aaggaggcaggaaatccttccagctaaccaacttttacattctgttccttatggtcaaaacgttgaccacactgtggtagctctttttgactttatgaccttattactaagaccatcaatta

SEQ ID NO: 20165 - DNA, 122 bp, Homo sapiens
  misc_feature (61)..(62): /note="This region represents a CpG dinucleotide"
  misc_feature (61)..(61): /note="Nucleotide may be methylated to form 5-methylcytosine"
tgatgttagcctgcctcacgcaattcatccacagtccttcccagaagttttcaaaaaccacgatgttgttttcaatgaaggccgacactctccactgaggcatgacagtgacagccactgtg

SEQ ID NO: 20166 - DNA, 122 bp, Homo sapiens
  misc_feature (61)..(62): /note="This region represents a CpG dinucleotide"
  misc_feature (61)..(61): /note="Nucleotide may be methylated to form 5-methylcytosine"
agtgtctgtcatggaaacattacccttccttgttcctgctactgtcacctgggaagttagcgttagcttgcctttcagggtgaagcattacatagttcaaaagtgttctttttctccagata

SEQ ID NO: 20167 - DNA, 122 bp, Homo sapiens
  misc_feature (61)..(62): /note="This region represents a CpG dinucleotide"
  misc_feature (61)..(61): /note="Nucleotide may be methylated to form 5-methylcytosine"
gaggaaggcccagcagattaaaggcctctgttcaacaaatatttgctcgcccactccaggcggagtaacagtttcttacatgctgcatgcccacagtgacacttagagacttcaggaagctt

SEQ ID NO: 20168 - DNA, 122 bp, Homo sapiens
  misc_feature (61)..(62): /note="This region represents a CpG dinucleotide"
  misc_feature (61)..(61): /note="Nucleotide may be methylated to form 5-methylcytosine"
taaatcatgggaagttacagttatccaaaatcttactaattggaagatcatttcatcagacgtgtattgagcacctgcttcatgtcaggcattgtgccagatacaatggaaacaaatcaaga

SEQ ID NO: 20169 - DNA, 122 bp, Homo sapiens
  misc_feature (61)..(62): /note="This region represents a CpG dinucleotide"
  misc_feature (61)..(61): /note="Nucleotide may be methylated to form 5-methylcytosine"
cattataagcaaaggcaggttgagctgaaatccgcatagttatttcagagtaaaatgatacggagcacatggctggcagaaaaaacagtcacatgactgttaagaaccagacttgggctatt

SEQ ID NO: 20170 - DNA, 122 bp, Homo sapiens
  misc_feature (61)..(62): /note="This region represents a CpG dinucleotide"
  misc_feature (61)..(61): /note="Nucleotide may be methylated to form 5-methylcytosine"
gggctctgggaaggaccttcctggcctcttcccgcttctgctggcagccggcaatcctcccgagcctcagcctgcagccgcgtcactccaatctctgcctccgatgtcacgtggcctcctcc

SEQ ID NO: 20171 - DNA, 122 bp, Homo sapiens
  misc_feature (61)..(62): /note="This region represents a CpG dinucleotide"
  misc_feature (61)..(61): /note="Nucleotide may be methylated to form 5-methylcytosine"
tggaacttaaaatatttacttgggtttccccaggggccttattaaactgtgggcaggcagcggccatgactaacaatgggacgagcactcactgcctgctctgcaatccccagtgaccctgc

SEQ ID NO: 20172 - DNA, 122 bp, Homo sapiens
  misc_feature (61)..(62): /note="This region represents a CpG dinucleotide"
  misc_feature (61)..(61): /note="Nucleotide may be methylated to form 5-methylcytosine"
ctggcgaaggtacccaagaaatgtgcttccccaaaatgcttacagaaacacagcaggtggcgtgactccaacccacattccccgcagttcagcagacacttcctgggcatctccccggtgcc

SEQ ID NO: 20173 - DNA, 122 bp, Homo sapiens
  misc_feature (61)..(62): /note="This region represents a CpG dinucleotide"
  misc_feature (61)..(61): /note="Nucleotide may be methylated to form 5-methylcytosine"
cgggtgcccttgtcttttctttgtcttgtgactgacctggatttctggaggaactgtcctcgtcttagaatgatctgttgcttttcttctgagattagaggtattagattctctcccaagag

SEQ ID NO: 20174 - DNA, 122 bp, Homo sapiens
  misc_feature (61)..(62): /note="This region represents a CpG dinucleotide"
  misc_feature (61)..(61): /note="Nucleotide may be methylated to form 5-methylcytosine"
agccatgtatttgctgtgaaattcacactctgtgtgactactaaagacagttcagctactcgtacttcactccatttcctttgtgaaatctgaagaactctaggtgaatcaggtgatggttg

SEQ ID NO: 20175 - DNA, 122 bp, Homo sapiens
  misc_feature (61)..(62): /note="This region represents a CpG dinucleotide"
  misc_feature (61)..(61): /note="Nucleotide may be methylated to form 5-methylcytosine"
cttggccttttgccatgtgtgtaccatccactgggagctgttttcccttgtcctttaaagcgtatccgactctatctccagtgctcttctagcaagctgttacagtaagcataaaaacaagc

SEQ ID NO: 20176 - DNA, 122 bp, Homo sapiens
  misc_feature (61)..(62): /note="This region represents a CpG dinucleotide"
  misc_feature (61)..(61): /note="Nucleotide may be methylated to form 5-methylcytosine"
tctttcaactcacaggtttagatttgcagtcacactacctctcatgtggccacttctacacgtagcaggttccaggatatgtggtggcaaagaattgtttacttcaacatgcttaatttccc

SEQ ID NO: 20177 - DNA, 122 bp, Homo sapiens
  misc_feature (61)..(62): /note="This region represents a CpG dinucleotide"
  misc_feature (61)..(61): /note="Nucleotide may be methylated to form 5-methylcytosine"
tggctgtaacatcaagagaggtgaggaacaaattatagaaatcaaaggttaaatgcttttcggttatttcaaatattcaggctttccctaacccgtggccatagacggaattgggaactaga

SEQ ID NO: 20178 - DNA, 122 bp, Homo sapiens
  misc_feature (61)..(62): /note="This region represents a CpG dinucleotide"
  misc_feature (61)..(61): /note="Nucleotide may be methylated to form 5-methylcytosine"
tgattttttaatcaacagaagttaaatgttactcttaacataaaccatgggcggaagctccgagggcggcatcagaacacttggttgccctacagatggcaagggggtgggtttgtggcggg

SEQ ID NO: 20179 - DNA, 122 bp, Homo sapiens
  misc_feature (61)..(62): /note="This region represents a CpG dinucleotide"
  misc_feature (61)..(61): /note="Nucleotide may be methylated to form 5-methylcytosine"
ttcgctactttggcagcataataaatgactaagcacctgattatgcacctaatcatttctcgtcttcgactgttaattctttcatttaagtacttgtctccccagtaagtaaaataagccac

SEQ ID NO: 20180 - DNA, 122 bp, Homo sapiens
  misc_feature (61)..(62): /note="This region represents a CpG dinucleotide"
  misc_feature (61)..(61): /note="Nucleotide may be methylated to form 5-methylcytosine"
ctggacagcttccgggaaaacttcccaaagcaaagctttcaccagaattgcacatgaccacgatcacactggccacagggaactgctgagaatgtctctctccacctggttttcttgacctc

SEQ ID NO: 20181 - DNA, 122 bp, Homo sapiens
  misc_feature (61)..(62): /note="This region represents a CpG dinucleotide"
  misc_feature (61)..(61): /note="Nucleotide may be methylated to form 5-methylcytosine"
aaatgtccagagtgtttatctcctggggccctgccagctagtatttacagaaactcacctcgttccagcttcctcttccctcactctcacaccaaggcagggtcctcttgtcctgtaggggt

SEQ ID NO: 20182 - DNA, 122 bp, Homo sapiens
  misc_feature (61)..(62): /note="This region represents a CpG dinucleotide"
  misc_feature (61)..(61): /note="Nucleotide may be methylated to form 5-methylcytosine"
aattgccgagaagacagtggtagctgattcacatcaatgctaactgattcacctcaacgccgccagctcctgcctccctgctcagccttgagcgtgacaggagcaggccgggcctgctctgg

SEQ ID NO: 20183 - DNA, 122 bp, Homo sapiens
  misc_feature (61)..(62): /note="This region represents a CpG dinucleotide"
  misc_feature (61)..(61): /note="Nucleotide may be methylated to form 5-methylcytosine"
gcaccaccgaaagctcatttgaagtacaatccatcatctgtgtccaacatgacagggaaccgggcagcgcacacgctccatcagatgctgtgattaaagggagggacgctgcggtttgtcac

SEQ ID NO: 20184 - DNA, 122 bp, Homo sapiens
  misc_feature (61)..(62): /note="This region represents a CpG dinucleotide"
  misc_feature (61)..(61): /note="Nucleotide may be methylated to form 5-methylcytosine"
aatgttcgctcatgtgctgtggatgcactgtcacgtccatgggtgaggtcacattgcctgcgtgtggaagctgtcacctgacacacgcttacttaccttgcagggagccagcagggcaaaca

SEQ ID NO: 20185 - DNA, 122 bp, Homo sapiens
  misc_feature (61)..(62): /note="This region represents a CpG dinucleotide"
  misc_feature (61)..(61): /note="Nucleotide may be methylated to form 5-methylcytosine"
gaggcaagcagctgctgtggttgcacaaaccccagttatctttagttttcttgtttccgacgcttccatgtagtatgacatatgcccatcttagaaatgtgacatggggtttccttatggag

SEQ ID NO: 20186 - DNA, 122 bp, Homo sapiens
  misc_feature (61)..(62): /note="This region represents a CpG dinucleotide"
  misc_feature (61)..(61): /note="Nucleotide may be methylated to form 5-methylcytosine"
aaggccctcgagagagtggagggcaacagtggccacggttcctctgtacttcgtttcttccgtaagaaatgatcttcttgtccttcttaagtataaatggagcgatccatttccttttaccc

SEQ ID NO: 20187 - DNA, 122 bp, Homo sapiens
  misc_feature (61)..(62): /note="This region represents a CpG dinucleotide"
  misc_feature (61)..(61): /note="Nucleotide may be methylated to form 5-methylcytosine"
catatttagtgccctgcttcctgtgtttactctattttcataacctaggcagctatggtccgatgaatgatttaactgctttagctagttgcactattgcatgattttagcctgatttcatg

SEQ ID NO: 20188 - DNA, 122 bp, Homo sapiens
  misc_feature (61)..(62): /note="This region represents a CpG dinucleotide"
  misc_feature (61)..(61): /note="Nucleotide may be methylated to form 5-methylcytosine"
tatgctattgcttttctttaaacaattattttatgcaaccaataaaaattccaccttgctcggaaactctacctgaggatatctttataaattggatgattttgccttgtttgggttggtta

SEQ ID NO: 20189 - DNA, 122 bp, Homo sapiens
  misc_feature (61)..(62): /note="This region represents a CpG dinucleotide"
  misc_feature (61)..(61): /note="Nucleotide may be methylated to form 5-methylcytosine"
aatgagagcaatagcagtttattagtcacatatgctcatacctgggaggataacactgcacgccatgaactgcttcatgggagttgcactcagaaacaggtattaccaggagctgtgggagg

SEQ ID NO: 20190 - DNA, 122 bp, Homo sapiens
  misc_feature (61)..(62): /note="This region represents a CpG dinucleotide"
  misc_feature (61)..(61): /note="Nucleotide may be methylated to form 5-methylcytosine"
cctcactctcaggtctctttaccttggcttaccttgacattgggcatgtatttagagaagcgctcatattccttgctgatctgaaaagccaactcccgagtgtgacacatcaccagtacaga

SEQ ID NO: 20191 - DNA, 122 bp, Homo sapiens
  misc_feature (61)..(62): /note="This region represents a CpG dinucleotide"
  misc_feature (61)..(61): /note="Nucleotide may be methylated to form 5-methylcytosine"
aaacaaaatattatgtatgtatatttatacactgtttgtgtataaacacacacatatacacgaaggaatattatttagccattaaaaggcatgaaggatacatgctgcagtatgaatgaacc

SEQ ID NO: 20192 - DNA, 122 bp, Homo sapiens
  misc_feature (61)..(62): /note="This region represents a CpG dinucleotide"
  misc_feature (61)..(61): /note="Nucleotide may be methylated to form 5-methylcytosine"
ggaggtgaaagatctctacacaaggaaaactgcaaaacactgctgaaagaaatcattagacgacacaaatggaagcacatcccatgctcgtggatgggtagaatgaatattgtgaaaataac

SEQ ID NO: 20193 - DNA, 122 bp, Homo sapiens
  misc_feature (61)..(62): /note="This region represents a CpG dinucleotide"
  misc_feature (61)..(61): /note="Nucleotide may be methylated to form 5-methylcytosine"
aggcagcccccacaggaagtgagaggcagccacacacacctcggcttgcattctgggttgcgaaagaaaccatgtggggactgtggagacctcactcaccctccagcctgcccctacctggg

SEQ ID NO: 20194 - DNA, 122 bp, Homo sapiens
  misc_feature (61)..(62): /note="This region represents a CpG dinucleotide"
  misc_feature (61)..(61): /note="Nucleotide may be methylated to form 5-methylcytosine"
gaagaagtgaatgccggatagttttgttttgctcatttcagcacaggaacaggatacaaacggccagagctcaactggaacttgcagtggaatggcacatccataaatcactgggctggttc

SEQ ID NO: 20195 - DNA, 122 bp, Homo sapiens
  misc_feature (61)..(62): /note="This region represents a CpG dinucleotide"
  misc_feature (61)..(61): /note="Nucleotide may be methylated to form 5-methylcytosine"
cgggcgccgggaggggatgctgaggctgatggagctgcctccagggctagggccactcaccggaggagggcggggcctgcacttgaagtcaggccgcacctgtctgtttttggaagggtagc

SEQ ID NO: 20196 - DNA, 122 bp, Homo sapiens
  misc_feature (61)..(62): /note="This region represents a CpG dinucleotide"
  misc_feature (61)..(61): /note="Nucleotide may be methylated to form 5-methylcytosine"
ctgtggaatcgaaccaagtggaccaccggggccacggagcatgcaagagacacaagtgggcggtgtggggctgttgggttttcctgcccgtggaatgttcccgcacgtcttcccgctggtcg

SEQ ID NO: 20197 - DNA, 122 bp, Homo sapiens
  misc_feature (61)..(62): /note="This region represents a CpG dinucleotide"
  misc_feature (61)..(61): /note="Nucleotide may be methylated to form 5-methylcytosine"
ctgtgccagacggtgcctcagcagtgacagttatcagcagcagctaacctttactgagtgcgcacatgtggcagcgcttgtgatgagcattttgcatgcattgtttcacaacaaccctaagg

SEQ ID NO: 20198 - DNA, 122 bp, Homo sapiens
  misc_feature (61)..(62): /note="This region represents a CpG dinucleotide"
  misc_feature (61)..(61): /note="Nucleotide may be methylated to form 5-methylcytosine"
ggaaagcagatgccccaaaggcagctcttccacacaatcaatgggagccctggggagagccgtgaagtctttgagtctttgtcctggctcccatttctctccaagtaacagacacgagagaa

SEQ ID NO: 20199 - DNA, 122 bp, Homo sapiens
  misc_feature (61)..(62): /note="This region represents a CpG dinucleotide"
  misc_feature (61)..(61): /note="Nucleotide may be methylated to form 5-methylcytosine"
gcttcatttggagtcaggcctggctgttgctcaggtgaccagcttgtgtctctgggagggcgctgctttccccggccacccggcgcgatgatccagaatgtcggaaatcacctgcgacgggt

SEQ ID NO: 20200 - DNA, 122 bp, Homo sapiens
  misc_feature (61)..(62): /note="This region represents a CpG dinucleotide"
  misc_feature (61)..(61): /note="Nucleotide may be methylated to form 5-methylcytosine"
cctgtgcctcccgcagtaagtacttaagaaatacttgtgaaacacatgaataaaggttaacgaagggcaaaggaaacaagcctttattgatgatttttctctgtgcccagtaatacttgggt

SEQ ID NO: 20201 - DNA, 122 bp, Homo sapiens
  misc_feature (61)..(62): /note="This region represents a CpG dinucleotide"
  misc_feature (61)..(61): /note="Nucleotide may be methylated to form 5-methylcytosine"
gggaattaactgtacactatttaatccaccagttccggttcattagaaaaatgcagttctcgccggacatggtggctcacacctgtaatcccagcaattctggaggccaaggtgggcagatt

SEQ ID NO: 20202 - DNA, 122 bp, Homo sapiens
  misc_feature (61)..(62): /note="This region represents a CpG dinucleotide"
  misc_feature (61)..(61): /note="Nucleotide may be methylated to form 5-methylcytosine"
atttgaggagaatcttctcctcatgttgaatcttctaatccatagcaagatatttattgccgtttatctaggtattttttctttcattagcattttgtagattttagcatagaagttctaca

SEQ ID NO: 20203 - DNA, 122 bp, Homo sapiens
  misc_feature (61)..(62): /note="This region represents a CpG dinucleotide"
  misc_feature (61)..(61): /note="Nucleotide may be methylated to form 5-methylcytosine"
gtacataacattctgtacagggttgtaacccaggagtaataggctataccatacagcctacgtgtgtagtaggctgtgccatctaggtttgtgtaagtacactctacgatgtttgcataatg

SEQ ID NO: 20204 - DNA, 122 bp, Homo sapiens
  misc_feature (61)..(62): /note="This region represents a CpG dinucleotide"
  misc_feature (61)..(61): /note="Nucleotide may be methylated to form 5-methylcytosine"
agtcacagtttttcacagtgatcctaagtcttccatgctgtggtacagaccccaagttttcgcaactcagaggtgggccaagtgcaaggggacctgagtcagagccaggtttgatcctgacc

SEQ ID NO: 20205 - DNA, 122 bp, Homo sapiens
  misc_feature (61)..(62): /note="This region represents a CpG dinucleotide"
  misc_feature (61)..(61): /note="Nucleotide may be methylated to form 5-methylcytosine"
ctgtggtgtctcagtccaaggacactggcaggctcgccctcgggggaggaaggcaggcagcgcctgcagcgaggagtgtgccctagaagaatgcacgatcctcatatctcatcagcaggcag

SEQ ID NO: 20206 - DNA, 122 bp, Homo sapiens
  misc_feature (61)..(62): /note="This region represents a CpG dinucleotide"
  misc_feature (61)..(61): /note="Nucleotide may be methylated to form 5-methylcytosine"
tgacagatacccctcctgccggcgcttagaaatatttactctccccccgacgccctcaaacggtgctccccgcgcacccggcaggatctcgcctgaccttgttttccttgcgagttcgggca

SEQ ID NO: 20207 - DNA, 122 bp, Homo sapiens
  misc_feature (61)..(62): /note="This region represents a CpG dinucleotide"
  misc_feature (61)..(61): /note="Nucleotide may be methylated to form 5-methylcytosine"
atgatctctttaatatctacaaccggggctgtgagctgacaagtggcagcactgcacagccgtggggctgcctaagggaaatgctccaaccctcagaggagacgcacaatttgattattaga

SEQ ID NO: 20208 - DNA, 122 bp, Homo sapiens
  misc_feature (61)..(62): /note="This region represents a CpG dinucleotide"
  misc_feature (61)..(61): /note="Nucleotide may be methylated to form 5-methylcytosine"
ttaagccattcccttttgaaccaaaagagcagtcaggctctccctagagagagggaggtacggcagctcaaaagagatgccagtctcccagctggagaggaaagcagaggttgctgtccaaa

SEQ ID NO: 20209 - DNA, 122 bp, Homo sapiens
  misc_feature (61)..(62): /note="This region represents a CpG dinucleotide"
  misc_feature (61)..(61): /note="Nucleotide may be methylated to form 5-methylcytosine"
ttattaagtaaattaccactactggagcctaatctagctggaaactccaggagccagtgtcgactcaaaggtcaagaggagcagagaattaaaaaccaaccacaacaatcaaggtcagaact

SEQ ID NO: 20210 - DNA, 122 bp, Homo sapiens
  misc_feature (61)..(62): /note="This region represents a CpG dinucleotide"
  misc_feature (61)..(61): /note="Nucleotide may be methylated to form 5-methylcytosine"
gaggctctggcggctgtggctcaccttaggtgtggggtgaggactggcagccccagctagcggcacccacagagcctgaagcctgcacacattctgcctgggtgtgtggggtgggtccgggc

SEQ ID NO: 20211 - DNA, 122 bp, Homo sapiens
  misc_feature (61)..(62): /note="This region represents a CpG dinucleotide"
  misc_feature (61)..(61): /note="Nucleotide may be methylated to form 5-methylcytosine"
cctccgagctcctttgagtggtcaggctgggtgttgggggcctgggagtgaactgccacccggacagccagctacagggtgtgctcagaggcttaaggagacaaatgccaaaaactactggg

SEQ ID NO: 20212 - DNA, 122 bp, Homo sapiens
  misc_feature (61)..(62): /note="This region represents a CpG dinucleotide"
  misc_feature (61)..(61): /note="Nucleotide may be methylated to form 5-methylcytosine"
agagaaccagtgtgtgcagccaatgttaatgtgacaaaaagtgcagagttagtcccagagcgtgaagtcctccctgtcctaggcccaggtggaggccaggagctgctccccgggctgcctgg

SEQ ID NO: 20213 - DNA, 122 bp, Homo sapiens
  misc_feature (61)..(62): /note="This region represents a CpG dinucleotide"
  misc_feature (61)..(61): /note="Nucleotide may be methylated to form 5-methylcytosine"
gaagatcaaattcgtgatatctctatatctaatctttaaaaatcagaatgctaatgctgacgcaaataaaattttcatttattagcattcatgcagtcacaattgtttcctttgattccttt

SEQ ID NO: 20214 - DNA, 122 bp, Homo sapiens
  misc_feature (61)..(62): /note="This region represents a CpG dinucleotide"
  misc_feature (61)..(61): /note="Nucleotide may be methylated to form 5-methylcytosine"
cgatctgtcatccagcagaccgctgtcactcatgctgaattctgatgtgtccacaaataacggaagattgggcttttcccagctccatcattcgctaagcaatcttggggacaagccgcttc

SEQ ID NO: 20215 - DNA, 122 bp, Homo sapiens
  misc_feature (61)..(62): /note="This region represents a CpG dinucleotide"
  misc_feature (61)..(61): /note="Nucleotide may be methylated to form 5-methylcytosine"
aacccttactgtaccattgtaggcaggcaaaatgactcactagaaatcaccctataagtccgccaagtgctcagggcatctgcccatcaaatctgtattcatttcacccatactcttattct

SEQ ID NO: 20216 - DNA, 122 bp, Homo sapiens
  misc_feature (61)..(62): /note="This region represents a CpG dinucleotide"
  misc_feature (61)..(61): /note="Nucleotide may be methylated to form 5-methylcytosine"
tgattgtctttgtggtgctgaaagccgagtgagtcccacttcccgtggctgcacagacgccgtgggctcagaagccctgcaggctggtagccagactcccttccccaggcacgaactcagca

SEQ ID NO: 20217 - DNA, 122 bp, Homo sapiens
  misc_feature (61)..(62): /note="This region represents a CpG dinucleotide"
  misc_feature (61)..(61): /note="Nucleotide may be methylated to form 5-methylcytosine"
gacctctggatgaccctggtttcctgtttctgtggaccacaatgctctggggcagtgctgcgtatcagaggttcaagccatggctggagcagccacccctgaagtagacaccctaatatcct

SEQ ID NO: 20218 - DNA, 122 bp, Homo sapiens
  misc_feature (61)..(62): /note="This region represents a CpG dinucleotide"
  misc_feature (61)..(61): /note="Nucleotide may be methylated to form 5-methylcytosine"
gggctcggcccctcccggcccagctgccaatcatgcacgaccctgcccggagcagcctcccgcaggactccggacccagggtcaaggccagactcacccgaggcaaaggccgaacgctcccg

SEQ ID NO: 20219 - DNA, 122 bp, Homo sapiens
  misc_feature (61)..(62): /note="This region represents a CpG dinucleotide"
  misc_feature (61)..(61): /note="Nucleotide may be methylated to form 5-methylcytosine"
ctgccactccagagagatggctatgccggtccgcgtggcgcgcagggccggatggtttggcgctctctgcgaggcccgcaaggctgcacttgggagggcttcagtatggtgacctttcctaa

SEQ ID NO: 20220 - DNA, 122 bp, Homo sapiens
  misc_feature (61)..(62): /note="This region represents a CpG dinucleotide"
  misc_feature (61)..(61): /note="Nucleotide may be methylated to form 5-methylcytosine"
aggaacatccttaatgacccagatttcttttaaccttcaagatgcaagtcatcccttaaacgcagtcataagcccagaggcaaagttaatgacctgtagttccttctgtgcaggagtgagat

SEQ ID NO: 20221 - DNA, 122 bp, Homo sapiens
  misc_feature (61)..(62): /note="This region represents a CpG dinucleotide"
  misc_feature (61)..(61): /note="Nucleotide may be methylated to form 5-methylcytosine"
ctctacaaaaatttaaaaattagtcagatgtggtggcgtgcacctgtgctcccagcttctcgggaggctgaagtgggaggatggcttgagcctgggaggtagaggctgaagctaaatgtgtt

SEQ ID NO: 20222 - DNA, 122 bp, Homo sapiens
  misc_feature (61)..(62): /note="This region represents a CpG dinucleotide"
  misc_feature (61)..(61): /note="Nucleotide may be methylated to form 5-methylcytosine"
ctgtcatcttagaaaaagatgtagctgtgtcaaccatctcaaaatttgtcagaaagatcacgtttggtacttggggtttcagtggtctaggaggaagcccatcaatcctctgccgaagaagt

SEQ ID NO: 20223 - DNA, 122 bp, Homo sapiens
  misc_feature (61)..(62): /note="This region represents a CpG dinucleotide"
  misc_feature (61)..(61): /note="Nucleotide may be methylated to form 5-methylcytosine"
gccagactgacttcatttcctttttgataggattgcatgatagggagatgccataataatcgtatcttgagttcagaaaagcaaattgtgagactctctcatgatattcttgtagacaacaa

SEQ ID NO: 20224 - DNA, 122 bp, Homo sapiens
  misc_feature (61)..(62): /note="This region represents a CpG dinucleotide"
  misc_feature (61)..(61): /note="Nucleotide may be methylated to form 5-methylcytosine"
aggtctccaagaccacccacaggttcactgatttgctagggggacttaaaggactcaatacgtagttgtattctgtgctgtgatttattacagtgaaaagacaccgagcaaaatcagtagag

SEQ ID NO: 20225 - DNA, 122 bp, Homo sapiens
  misc_feature (61)..(62): /note="This region represents a CpG dinucleotide"
  misc_feature (61)..(61): /note="Nucleotide may be methylated to form 5-methylcytosine"
aacttagaaacatgtttatatttcttagctactagggtagatctaccagctcaatttacacgttaagcctaggaagtggaaattcttaaccctggatatggatctgcccaaacgtctgtctt

SEQ ID NO: 20226 - DNA, 122 bp, Homo sapiens
  misc_feature (61)..(62): /note="This region represents a CpG dinucleotide"
  misc_feature (61)..(61): /note="Nucleotide may be methylated to form 5-methylcytosine"
atcaggggaaggagggaagggaaaagtatacatcctgccaccttcttctccaattagctgcgttgacactctgggcttccattagctttctagaaagagtccttaggaaggagagagaggct

SEQ ID NO: 20227 - DNA, 122 bp, Homo sapiens
  misc_feature (61)..(62): /note="This region represents a CpG dinucleotide"
  misc_feature (61)..(61): /note="Nucleotide may be methylated to form 5-methylcytosine"
ggaaagtactgaatggcagagttactaatgacttctatcaaatcaccttttgctgactcccgtgttagtcctggatagcgtccttggcacacttgatttcagattttgacaggtgataaaag

SEQ ID NO: 20228 - DNA, 122 bp, Homo sapiens
  misc_feature (61)..(62): /note="This region represents a CpG dinucleotide"
  misc_feature (61)..(61): /note="Nucleotide may be methylated to form 5-methylcytosine"
ttgcctggtgcctttcctttttaccaattgtagacatccctccatttttggcaagtttttcgttgtgctccagtgccttcaggtagtggctttttacattgtccagaggttatcaacggtaa

SEQ ID NO: 20229 - DNA, 122 bp, Homo sapiens
  misc_feature (61)..(62): /note="This region represents a CpG dinucleotide"
  misc_feature (61)..(61): /note="Nucleotide may be methylated to form 5-methylcytosine"
ttgtcttcttatgaaaagaaaagtagtctcaacatgctctgagtaaacttgatgtgttcacgctccaagaaatagggaaggaagaaaaaggtgtgggcagtgtcataatggacttcattcat

SEQ ID NO: 20230 - DNA, 122 bp, Homo sapiens
  misc_feature (61)..(62): /note="This region represents a CpG dinucleotide"
  misc_feature (61)..(61): /note="Nucleotide may be methylated to form 5-methylcytosine"
tcagttggcagtttagctggggctgactggttccagatgacctcactcaaatgcctgacacgtgtcttggtgttggctgcagtgatgagatgactggactatgtttccctcctcatcaagaa

SEQ ID NO: 20231 - DNA, 122 bp, Homo sapiens
  misc_feature (61)..(62): /note="This region represents a CpG dinucleotide"
  misc_feature (61)..(61): /note="Nucleotide may be methylated to form 5-methylcytosine"
cgggcgtctggcactcgtcaatgtctgcagaagcagtggcggcacggggatgggttccagcgtgctcccttcctctctcccctccccatctcccaacatttccatcttcccagccattctat

SEQ ID NO: 20232 - DNA, 122 bp, Homo sapiens
  misc_feature (61)..(62): /note="This region represents a CpG dinucleotide"
  misc_feature (61)..(61): /note="Nucleotide may be methylated to form 5-methylcytosine"
accacgttgtggatcacctgaccccgcctttctcagcttcctggaggtgcattctaagagcgctccccataagccaacactcaagtctcttcgaggtgtgtttccagggagcctgatctaag

SEQ ID NO: 20233 - DNA, 122 bp, Homo sapiens
  misc_feature (61)..(62): /note="This region represents a CpG dinucleotide"
  misc_feature (61)..(61): /note="Nucleotide may be methylated to form 5-methylcytosine"
agagaggtccttccgcaccctcttgctgccaggtgcgcaacaatagctgggcgtccgccccgccctctctaccgcaggagccacagcgtccgccctcgcccccaagccgcgtctgccgggtg

SEQ ID NO: 20234 - DNA, 122 bp, Homo sapiens
  misc_feature (61)..(62): /note="This region represents a CpG dinucleotide"
  misc_feature (61)..(61): /note="Nucleotide may be methylated to form 5-methylcytosine"
gcctctcaacattttaaattagtgctgtcataaaccaggatatctggtcagaactgggcacggagactgcaaatgtgagctactactcacaggacagacaatagtgttaacaaacacaggct

SEQ ID NO: 20235 - DNA, 122 bp, Homo sapiens
  misc_feature (61)..(62): /note="This region represents a CpG dinucleotide"
  misc_feature (61)..(61): /note="Nucleotide may be methylated to form 5-methylcytosine"
tgttggccagagtacactagcaccagctggaactgagacagacacccagcaaccctgtcccgttctccactgggccaagggaagccacaagccctgccccactctcaagggctcagacctgg

SEQ ID NO: 20236 - DNA, 122 bp, Homo sapiens
  misc_feature (61)..(62): /note="This region represents a CpG dinucleotide"
  misc_feature (61)..(61): /note="Nucleotide may be methylated to form 5-methylcytosine"
gagatttgggtggggcacagccaaaccataacaggtggtgtctgtgtcgctgggttgctgcgtgagttaagcaggatgtccatggaaatgtgcaacctgtgctggccctgggcgagtgctca

SEQ ID NO: 20237 - DNA, 122 bp, Homo sapiens
  misc_feature (61)..(62): /note="This region represents a CpG dinucleotide"
  misc_feature (61)..(61): /note="Nucleotide may be methylated to form 5-methylcytosine"
ccattacctacaaactgtatgtaagacaaacaggatagtcacggcaccccatctcttaagcggaaacatatttatttgagtaacagtgtggaggaaaaaaaaaaagcagtgtttatttactt

SEQ ID NO: 20238 - DNA, 122 bp, Homo sapiens
  misc_feature (61)..(62): /note="This region represents a CpG dinucleotide"
  misc_feature (61)..(61): /note="Nucleotide may be methylated to form 5-methylcytosine"
gaaaaaaaatgatctcttatcaattagcactcactaatgtactactaattgagcaacctacgcactcagttgactacgtaaatctgtcaggtcttttgtgatttcctctgatgcaggagagg

SEQ ID NO: 20239 - DNA, 122 bp, Homo sapiens
  misc_feature (61)..(62): /note="This region represents a CpG dinucleotide"
  misc_feature (61)..(61): /note="Nucleotide may be methylated to form 5-methylcytosine"
cctccctagttacaaggaaacttgctgagtctcagctttctcaactgaagatgaggctaacgtcatccatggcagcgtaatgagggccggtggagcccagggtgaggtgcactggagacctt

SEQ ID NO: 20240 - DNA, 122 bp, Homo sapiens
  misc_feature (61)..(62): /note="This region represents a CpG dinucleotide"
  misc_feature (61)..(61): /note="Nucleotide may be methylated to form 5-methylcytosine"
cgcggggccggactctgaacgcctcgcccgccaattcaaagggttggccctaactttgaacgccccacccaccacgtggaatgttccaaacgccccgccccccgcactgtcactcaccgcaa

SEQ ID NO: 20241 - DNA, 122 bp, Homo sapiens
  misc_feature (61)..(62): /note="This region represents a CpG dinucleotide"
  misc_feature (61)..(61): /note="Nucleotide may be methylated to form 5-methylcytosine"
ctcagacttttctggttgtaaagttccacatcctgggatatctctcagtcccacagaagtcggaacaactgcccaacctacaaaggaatagaaagaagactacaaacgttgcctaagcacaa

SEQ ID NO: 20242 - DNA, 122 bp, Homo sapiens
  misc_feature (61)..(62): /note="This region represents a CpG dinucleotide"
  misc_feature (61)..(61): /note="Nucleotide may be methylated to form 5-methylcytosine"
atttgcggttagttcctgtaatatgttaaacatctgcagttttgtctcttcatcgggatgcggggttgtgctgtagtcacatcctgataacatctgcacattactgatagcttttgctttat

SEQ ID NO: 20243 - DNA, 122 bp, Homo sapiens
  misc_feature (61)..(62): /note="This region represents a CpG dinucleotide"
  misc_feature (61)..(61): /note="Nucleotide may be methylated to form 5-methylcytosine"
aaggcacaaaatttaaaaagtaactgctgtattgcccggcgactgctcaaatgcagtcagcgctttgctggctggcattttcctgaaactatatgccataaactgatggcatcaggaggaat

SEQ ID NO: 20244 - DNA, 122 bp, Homo sapiens
  misc_feature (61)..(62): /note="This region represents a CpG dinucleotide"
  misc_feature (61)..(61): /note="Nucleotide may be methylated to form 5-methylcytosine"
actggattcttttctaaacattttgaagtttttattccctgtcatcaggtcattccaaaacgataaagcactaacttaagctagctggaattagagattagggggaacagtacacaaaagag

SEQ ID NO: 20245 - DNA, 122 bp, Homo sapiens
  misc_feature (61)..(62): /note="This region represents a CpG dinucleotide"
  misc_feature (61)..(61): /note="Nucleotide may be methylated to form 5-methylcytosine"
gataagcatgttgacaacttacatttactgactgtttactgctttccacatactatgctacgtgcttgatgtgtcattcagtcctctcaacaactttactataattatcagcatttttttat

SEQ ID NO: 20246 - DNA, 122 bp, Homo sapiens
  misc_feature (61)..(62): /note="This region represents a CpG dinucleotide"
  misc_feature (61)..(61): /note="Nucleotide may be methylated to form 5-methylcytosine"
attttgttgattaagagggtgtattagttgtctttgacatgctacatcttgccctgcattcgtaactccagaattaacatgtccttaagttaaatgtgtttgaactgtgtgaaattacgcat

SEQ ID NO: 20247 - DNA, 122 bp, Homo sapiens
  misc_feature (61)..(62): /note="This region represents a CpG dinucleotide"
  misc_feature (61)..(61): /note="Nucleotide may be methylated to form 5-methylcytosine"
tatgtgagtcattctgggcaccgcaggaagggagaaaaactaacttattcttagaatttgcgctatatatcagtactcatagaggtgtgtggtctgaatacataccagtggtctaaaaaaac

SEQ ID NO: 20248 - DNA, 122 bp, Homo sapiens
  misc_feature (61)..(62): /note="This region represents a CpG dinucleotide"
  misc_feature (61)..(61): /note="Nucleotide may be methylated to form 5-methylcytosine"
agtaaaataaatggaaaatgtacagatctttctttaaataaagagtagctgctgttctatcgcaatgatatgatacattataaaagtatatagcctaacttgataaaggaatagggattgag

SEQ ID NO: 20249 - DNA, 122 bp, Homo sapiens
  misc_feature (61)..(62): /note="This region represents a CpG dinucleotide"
  misc_feature (61)..(61): /note="Nucleotide may be methylated to form 5-methylcytosine"
ataggtatcagccattcagcaaacatttgtctagacagtatggcactgtggcgttaaatgcggcctctggagttggtatcaccactcactgtgtgaccttgaactagctattcactgtttct

SEQ ID NO: 20250 - DNA, 122 bp, Homo sapiens
  misc_feature (61)..(62): /note="This region represents a CpG dinucleotide"
  misc_feature (61)..(61): /note="Nucleotide may be methylated to form 5-methylcytosine"
aggatcactcctacctttcatagcttcccataactagtctatttgtcaacctgaggcccacgtaacaccaaagccatgtgatctgtatcctagaaatcaagggaggtctgtcagcatatgga

SEQ ID NO: 20251 - DNA, 122 bp, Homo sapiens
  misc_feature (61)..(62): /note="This region represents a CpG dinucleotide"
  misc_feature (61)..(61): /note="Nucleotide may be methylated to form 5-methylcytosine"
atgttcccgcccacaatacctgccagagaactacatcacaagtgtcctttttccttatatcgtggaaatgcaactgtgatgcccattagaactgacagggaaactctggtcttcccttttta

SEQ ID NO: 20252 - DNA, 122 bp, Homo sapiens
  misc_feature (61)..(62): /note="This region represents a CpG dinucleotide"
  misc_feature (61)..(61): /note="Nucleotide may be methylated to form 5-methylcytosine"
tggagatgctgagtgcagctcatcacgaggactgacatcatcacatatgtaagggcctggcgtgtgccgggccctcaacaggtgtggctaatattagcatgcttgctcctccctcgactgct

SEQ ID NO: 20253 - DNA, 122 bp, Homo sapiens
  misc_feature (61)..(62): /note="This region represents a CpG dinucleotide"
  misc_feature (61)..(61): /note="Nucleotide may be methylated to form 5-methylcytosine"
tttcaggagagtcaggaatcttcccttaggacctgacatctgagtggagacctgaatgaacggagaatgaaccttcccagacatttcaggaaatgaacaggaagtgcaaagcccctgaggta

SEQ ID NO: 20254 - DNA, 122 bp, Homo sapiens
  misc_feature (61)..(62): /note="This region represents a CpG dinucleotide"
  misc_feature (61)..(61): /note="Nucleotide may be methylated to form 5-methylcytosine"
cctccatgccctgcctggactgagccttcagatcctgtggatgtcagttcctaactctgtcgagatagtgcccccttctctcaggacttccacagccccagcaaagccctggagatggagga

SEQ ID NO: 20255 - DNA, 122 bp, Homo sapiens
  misc_feature (61)..(62): /note="This region represents a CpG dinucleotide"
  misc_feature (61)..(61): /note="Nucleotide may be methylated to form 5-methylcytosine"
tgcaaggaatcaggtgtctgctttttccttcactttccgcaagtttactctgcagttgatcgtcgaaggtggtggaaggtttcattttcccggaaggggcatttggaagtaagtgcaccagc

SEQ ID NO: 20256 - DNA, 122 bp, Homo sapiens
  misc_feature (61)..(62): /note="This region represents a CpG dinucleotide"
  misc_feature (61)..(61): /note="Nucleotide may be methylated to form 5-methylcytosine"
agcaatgaacaacaaataccaattcctcaaagaaaaacccattcttacttttttccttggcgctctccaaagaaactaactgaacaacttatagaactgaggtgggtgagaggaacttagtg

SEQ ID NO: 20257 - DNA, 122 bp, Homo sapiens
  misc_feature (61)..(62): /note="This region represents a CpG dinucleotide"
  misc_feature (61)..(61): /note="Nucleotide may be methylated to form 5-methylcytosine"
cttctggggcttgagtcataatgaaaagctcactgtcttctttgccgctcttggtggcctcgtggcttctctaattccctggccttagcatggaagcctctttatcattctgctctgtatga

SEQ ID NO: 20258 - DNA, 122 bp, Homo sapiens
  misc_feature (61)..(62): /note="This region represents a CpG dinucleotide"
  misc_feature (61)..(61): /note="Nucleotide may be methylated to form 5-methylcytosine"
tgggaaggctgggagcttctgctgagggtggcaccagcagcagctccatgactgtgactgcggccagggcggctccacgacggtgactggggtcagggcaggagagtgtggaggccagtgag

SEQ ID NO: 20259 - DNA, 122 bp, Homo sapiens
  misc_feature (61)..(62): /note="This region represents a CpG dinucleotide"
  misc_feature (61)..(61): /note="Nucleotide may be methylated to form 5-methylcytosine"
tcagtgccctggggcactcgtggttcctttccagtcccaagtcgacagccctgtggttctcgggctccctggccagctcctgaaacccagtccccgtgccggctagcctcttgctgcctcct

SEQ ID NO: 20260 - DNA, 122 bp, Homo sapiens
  misc_feature (61)..(62): /note="This region represents a CpG dinucleotide"
  misc_feature (61)..(61): /note="Nucleotide may be methylated to form 5-methylcytosine"
ttttctctgtggtcacggtcttctgtcttcttctcctatgaaccatttttaagtttattccgtttcctgacaacttcttagttcccattgtgatagtaaatattaaaattaatgaatgcgct

SEQ ID NO: 20261 - DNA, 122 bp, Homo sapiens
  misc_feature (61)..(62): /note="This region represents a CpG dinucleotide"
  misc_feature (61)..(61): /note="Nucleotide may be methylated to form 5-methylcytosine"
aaggacaaggtcctgcctttggctccacattgccacatgacccttaaggcaagcaggtagcgtgtccatagtacttggttgcgacatttgcactacatccactttagttacttgatgagctg

SEQ ID NO: 20262 - DNA, 122 bp, Homo sapiens
  misc_feature (61)..(62): /note="This region represents a CpG dinucleotide"
  misc_feature (61)..(61): /note="Nucleotide may be methylated to form 5-methylcytosine"
ttctggtgggggaggactctgagtacagaatataaatcactcttggcttcccagagcttacgctgactcatttgagaaacagaaaaagtgactggcaggccaacatatacatacacatgcat

SEQ ID NO: 20263 - DNA, 122 bp, Homo sapiens
  misc_feature (61)..(62): /note="This region represents a CpG dinucleotide"
  misc_feature (61)..(61): /note="Nucleotide may be methylated to form 5-methylcytosine"
accatcacatgggagatgaggcttcaatatataaatttgggggggacacaacaatcagtccgtagcaagttccatgaatgaattaattacatcttgcgtatcttctatgtgcaaaacatggg

SEQ ID NO: 20264 - DNA, 122 bp, Homo sapiens
  misc_feature (61)..(62): /note="This region represents a CpG dinucleotide"
  misc_feature (61)..(61): /note="Nucleotide may be methylated to form 5-methylcytosine"
agaatcaacccgtctcctgcatctactccgaagtcaagagcattacaatacaatttacagcgcctttaacaactcgcaagtaaagcattaaaattcgctttaattgagaaaatattgatttt

SEQ ID NO: 20265 - DNA, 122 bp, Homo sapiens
  misc_feature (61)..(62): /note="This region represents a CpG dinucleotide"
  misc_feature (61)..(61): /note="Nucleotide may be methylated to form 5-methylcytosine"
aagataaggtgtgtgattaagaataaactcataatagaaaaaaagaattgtggaggttaacgtaagggaggatatcatcgtgaaagggaaattacactgaatttctgcaaaacaggaagagg

SEQ ID NO: 20266 - DNA, 122 bp, Homo sapiens
  misc_feature (61)..(62): /note="This region represents a CpG dinucleotide"
  misc_feature (61)..(61): /note="Nucleotide may be methylated to form 5-methylcytosine"
agcaggaaaatgatttggcaattagaagttccctggtgacctttgggagaccagctccagcgaagttgtgaggacagaaccaaaagtcaaagagttgaagagtgatgcaagtggagaaagaa

SEQ ID NO: 20267 - DNA, 122 bp, Homo sapiens
  misc_feature (61)..(62): /note="This region represents a CpG dinucleotide"
  misc_feature (61)..(61): /note="Nucleotide may be methylated to form 5-methylcytosine"
ttacgggatagcgatgagggcagaaaatatccagagttggtactggaccaatccctggatcgagaaaaggtgtctgagtttagtttaacgctaacagccgtggatggcgggtctccgcccag

SEQ ID NO: 20268 - DNA, 122 bp, Homo sapiens
  misc_feature (61)..(62): /note="This region represents a CpG dinucleotide"
  misc_feature (61)..(61): /note="Nucleotide may be methylated to form 5-methylcytosine"
ggacaaagcaatgactcacatcctgggcgggatgaagcaggatggcacaagattttattgcgctaccgagaacggtgtgcagcttaaaacttatagtttatttctagaattttccatggaat

SEQ ID NO: 20269 - DNA, 122 bp, Homo sapiens
  misc_feature (61)..(62): /note="This region represents a CpG dinucleotide"
  misc_feature (61)..(61): /note="Nucleotide may be methylated to form 5-methylcytosine"
gctgcacctaaacagttccacatttagtgatgaggccagatttcagccctgagtgcagatcgttgaggagagtgaagatcaaggtcatcagagttgaggttttcaggaaactgtgggaatag

SEQ ID NO: 20270 - DNA, 122 bp, Homo sapiens
  misc_feature (61)..(62): /note="This region represents a CpG dinucleotide"
  misc_feature (61)..(61): /note="Nucleotide may be methylated to form 5-methylcytosine"
ttgaagaggccatcgggttactaaatggcattttggtcaccttttctttcctcccaagatcgtgaagaacaacctcattgccctaatgactcccaacttctgtctgcacgtgggtttgattg

SEQ ID NO: 20271 - DNA, 122 bp, Homo sapiens
  misc_feature (61)..(62): /note="This region represents a CpG dinucleotide"
  misc_feature (61)..(61): /note="Nucleotide may be methylated to form 5-methylcytosine"
ttgtatgttatgagactctggatcttatttaagtctgttttagtgatcatcctttgacaccgcactagttgagcaaagagggtgctgcctcactgctgtcaggttgggggagaggcccaggt

SEQ ID NO: 20272 - DNA, 122 bp, Homo sapiens
  misc_feature (61)..(62): /note="This region represents a CpG dinucleotide"
  misc_feature (61)..(61): /note="Nucleotide may be methylated to form 5-methylcytosine"
gggtgggaagttagactctgcctcttaacaggaggagctgaagagtcacacgggaaaggacgcaaggaagggatggaaagtggggacatttttgcaatcaatccatcatgttcacattttac

SEQ ID NO: 20273 - DNA, 122 bp, Homo sapiens
  misc_feature (61)..(62): /note="This region represents a CpG dinucleotide"
  misc_feature (61)..(61): /note="Nucleotide may be methylated to form 5-methylcytosine"
ccaagttcataaccctgctgctgacagtgtcaacatccacctcctgctgagtgcctgctacgcaaccagtaccacccaagggctttccttccactttcatttaccccttcaggaaatcccat

SEQ ID NO: 20274 - DNA, 122 bp, Homo sapiens
  misc_feature (61)..(62): /note="This region represents a CpG dinucleotide"
  misc_feature (61)..(61): /note="Nucleotide may be methylated to form 5-methylcytosine"
tgaagaaattagaccccttaaaagttttcttttttttctttctttctttttttaatagaccgggtgtcactggctctgtcacccaggctggagtgcagtagtgtgatctcagctcactgcag

SEQ ID NO: 20275 - DNA, 122 bp, Homo sapiens
  misc_feature (61)..(62): /note="This region represents a CpG dinucleotide"
  misc_feature (61)..(61): /note="Nucleotide may be methylated to form 5-methylcytosine"
ccaaagggtgcctgcttccctctacctacccggctggtgaaccaggcttcagcatccttccggttctgctcggccatgacctcatattggcttcgcatgtcactcaggatcttggcgagatc

SEQ ID NO: 20276 - DNA, 122 bp, Homo sapiens
  misc_feature (61)..(62): /note="This region represents a CpG dinucleotide"
  misc_feature (61)..(61): /note="Nucleotide may be methylated to form 5-methylcytosine"
ctctcaggtgatccacccgcctcagcctcccaaagggctggggttgtaggcgtgagccaccgcccccagccagcatggcctctttgaacttgccagctgtgctgttgcctctagggacctgc

SEQ ID NO: 20277 - DNA, 122 bp, Homo sapiens
  misc_feature (61)..(62): /note="This region represents a CpG dinucleotide"
  misc_feature (61)..(61): /note="Nucleotide may be methylated to form 5-methylcytosine"
tgggacaggcgtcttccagggttcctgctcctgtccaggtggccgtgcttggctctagctcggatgggcccaagtcaggtgacatagctcctcccgatgtccctccagcccatgggaggtgg

SEQ ID NO: 20278 - DNA, 122 bp, Homo sapiens
  misc_feature (61)..(62): /note="This region represents a CpG dinucleotide"
  misc_feature (61)..(61): /note="Nucleotide may be methylated to form 5-methylcytosine"
attgactgcagcagtattcaggtaggagatgaacgggacttattttcccagcaccaatcacgagcctgatgatcaaaacaggatgcagtgaagaaaccggtggaaaccaccacatggtgaca

SEQ ID NO: 20279 - DNA, 122 bp, Homo sapiens
  misc_feature (61)..(62): /note="This region represents a CpG dinucleotide"
  misc_feature (61)..(61): /note="Nucleotide may be methylated to form 5-methylcytosine"
ccacactgttctatcattatccaggccagtattttctcactcttgaatactctcagtcagcgcccattgtaatccatttataattaaatagtaagaattagttcctttaaaatctaaaggta

SEQ ID NO: 20280 - DNA, 122 bp, Homo sapiens
  misc_feature (61)..(62): /note="This region represents a CpG dinucleotide"
  misc_feature (61)..(61): /note="Nucleotide may be methylated to form 5-methylcytosine"
tatgcacagttaagccatcatattcttgcaacaactgtatcaagtaggcactaatgtcagcgatagcaatggatgcagcatttcacatcaaggaaaccaaggcaaagagagattaagtagct

SEQ ID NO: 20281 - DNA, 122 bp, Homo sapiens
  misc_feature (61)..(62): /note="This region represents a CpG dinucleotide"
  misc_feature (61)..(61): /note="Nucleotide may be methylated to form 5-methylcytosine"
tggtgcccgaggttttcctaaagctatggaattccatcattttataaatgactccaatgacgaatcctactggcataacatctatggtttcaccaactcttagcagtgatctttggttccag

SEQ ID NO: 20282 - DNA, 122 bp, Homo sapiens
  misc_feature (61)..(62): /note="This region represents a CpG dinucleotide"
  misc_feature (61)..(61): /note="Nucleotide may be methylated to form 5-methylcytosine"
tgatgaggacagtcatagtgttgacaattactcaatgaatacttagagatttgaatgtatcgctagatttctgggaaatgaaaagaccaatgtaagctagttgaatgagaaaaccagaggtg

SEQ ID NO: 20283 - DNA, 122 bp, Homo sapiens
  misc_feature (61)..(62): /note="This region represents a CpG dinucleotide"
  misc_feature (61)..(61): /note="Nucleotide may be methylated to form 5-methylcytosine"
ccaccttctgactaatatgaacatgggtgtacacatttatatccactcttgcctcccctccgtagtccttccttctccacactgcatctagagtaacccctttacactctcaagtatggaca

SEQ ID NO: 20284 - DNA, 122 bp, Homo sapiens
  misc_feature (61)..(62): /note="This region represents a CpG dinucleotide"
  misc_feature (61)..(61): /note="Nucleotide may be methylated to form 5-methylcytosine"
tggatgattctcaaatatcctgtggagtttaattccaaaaggacaagttgaattatccttcggggagggaaatgtgaatgatggctggtaacaagggcttcattcaggtcctggagaggtgg

SEQ ID NO: 20285 - DNA, 122 bp, Homo sapiens
  misc_feature (61)..(62): /note="This region represents a CpG dinucleotide"
  misc_feature (61)..(61): /note="Nucleotide may be methylated to form 5-methylcytosine"
cattttcggttggtgaggagcacctattttgtttattactgtttcttccaggaaccctctcgccttcccaccttccctggttccttttatacaccacacttaaaattggaggcataaccttg

SEQ ID NO: 20286 - DNA, 122 bp, Homo sapiens
  misc_feature (61)..(62): /note="This region represents a CpG dinucleotide"
  misc_feature (61)..(61): /note="Nucleotide may be methylated to form 5-methylcytosine"
gcctttcaagtgattctgatgcatgctaaaatcaatgaaccactgaactccttcatgtgacggttaatgataggcctagagtatcagtatctatttcacccccaatgtaagagctagttttt

SEQ ID NO: 20287 - DNA, 122 bp, Homo sapiens
  misc_feature (61)..(62): /note="This region represents a CpG dinucleotide"
  misc_feature (61)..(61): /note="Nucleotide may be methylated to form 5-methylcytosine"
tgagatcatttgagaatcagagaaactggcagagaaaattatagtgagtcattttatgttcgcaacaaaacttgcataatttcaattccatgagagaatgtggaatgaactaaaatggaaaa

SEQ ID NO: 20288 - DNA, 122 bp, Homo sapiens
  misc_feature (61)..(62): /note="This region represents a CpG dinucleotide"
  misc_feature (61)..(61): /note="Nucleotide may be methylated to form 5-methylcytosine"
aatgaaggaagtgggttctgtcccgtagggttgaggagccgagatgcggggaccaagggacgtcagcgcgttggttctggccgcgggaaaacgggcggtcgctgtgaccgtctctgcgctct

SEQ ID NO: 20289 - DNA, 122 bp, Homo sapiens
  misc_feature (61)..(62): /note="This region represents a CpG dinucleotide"
  misc_feature (61)..(61): /note="Nucleotide may be methylated to form 5-methylcytosine"
tggggctggtcctggactgataagtacacacttgatctcagccaaagagcagagaagcgacggactgaccaagtataaggaggctccagacaacatgcagacacccagcagctggccctttt

SEQ ID NO: 20290 - DNA, 122 bp, Homo sapiens
  misc_feature (61)..(62): /note="This region represents a CpG dinucleotide"
  misc_feature (61)..(61): /note="Nucleotide may be methylated to form 5-methylcytosine"
taatcatagactgtttgaggttgatttggtctaagcgagggacaattttgaggattcaaacgacaaaaagaaggcagaagagttatctcttgagactgctctccggagacctgcccttgctt

SEQ ID NO: 20291 - DNA, 122 bp, Homo sapiens
  misc_feature (61)..(62): /note="This region represents a CpG dinucleotide"
  misc_feature (61)..(61): /note="Nucleotide may be methylated to form 5-methylcytosine"
agagctgctggggagtagcccctgtagcaagtaccatgctcttgacaggcagcatgagagcgtgactcccatgacccacctgtgctcaaaaaaaaaaaaaaaaaaaagcaaaccaggaaaac

SEQ ID NO: 20292 - DNA, 122 bp, Homo sapiens
  misc_feature (61)..(62): /note="This region represents a CpG dinucleotide"
  misc_feature (61)..(61): /note="Nucleotide may be methylated to form 5-methylcytosine"
ttgcacagcatgggccacttaatctgctgggccaaggcgaggcctatgtgacaggaattccgtgaaaggcctgaatgataatccaacctccccctcctccattcagtctccctcacagacag

SEQ ID NO: 20293 - DNA, 122 bp, Homo sapiens
  misc_feature (61)..(62): /note="This region represents a CpG dinucleotide"
  misc_feature (61)..(61): /note="Nucleotide may be methylated to form 5-methylcytosine"
tgatctttcattgacttctgtgtgaaccaaatccctaagaatctcagacatggacacttacgcatcatcatagttatactgtttctacattatgcaggtttcccagaagaaaataaattcct

SEQ ID NO: 20294 - DNA, 122 bp, Homo sapiens
  misc_feature (61)..(62): /note="This region represents a CpG dinucleotide"
  misc_feature (61)..(61): /note="Nucleotide may be methylated to form 5-methylcytosine"
tatgtcatttaatagatcatgctttgggtgtcaagtctaagaattctttggctagtcctacgtcccaaagaatatgttctccagttttgttttgtttttttaagttttatagttttactttc

SEQ ID NO: 20295 - DNA, 122 bp, Homo sapiens
  misc_feature (61)..(62): /note="This region represents a CpG dinucleotide"
  misc_feature (61)..(61): /note="Nucleotide may be methylated to form 5-methylcytosine"
actaaacccactgatcaatgtcatagtcactgagggtggcaaccagacttaggtgtctctcgggctgatgcaatcggaaatacatggcaccacctaggaagtaatcttgcatgcatgcatgc

SEQ ID NO: 20296 - DNA, 122 bp, Homo sapiens
  misc_feature (61)..(62): /note="This region represents a CpG dinucleotide"
  misc_feature (61)..(61): /note="Nucleotide may be methylated to form 5-methylcytosine"
acaatgcctagggagatctttgtccagaaaggtgagttcagagagcctgctgtctgaccacgcttccccttccctgggcgcagatccttaaaagtgttaagtgaacactgctgagttcactt

SEQ ID NO: 20297 - DNA, 122 bp, Homo sapiens
  misc_feature (61)..(62): /note="This region represents a CpG dinucleotide"
  misc_feature (61)..(61): /note="Nucleotide may be methylated to form 5-methylcytosine"
attcctggcattgccggttttcttcattcagaatctgtttatctatcaagtgactgtcctcgtaaaaagcagatgtttgttaaagtatttttataagcagcttaatataaaacattatagat

SEQ ID NO: 20298 - DNA, 122 bp, Homo sapiens
  misc_feature (61)..(62): /note="This region represents a CpG dinucleotide"
  misc_feature (61)..(61): /note="Nucleotide may be methylated to form 5-methylcytosine"
gatgagtcattcattctttcaacctttcattcattcaacctttcattcattcattgagtacgctaagcttattcccgcctccaggcctttgcccttgcagttccctccacctggaatgctct

SEQ ID NO: 20299 - DNA, 122 bp, Homo sapiens
  misc_feature (61)..(62): /note="This region represents a CpG dinucleotide"
  misc_feature (61)..(61): /note="Nucleotide may be methylated to form 5-methylcytosine"
tccatggggccactgaccccacagttaccccagaaccctttcctggcacagcttgtgacccggggcatgtagcccttaaggcacgttcattgtgaagggcaggttttgtctcctccaaaccc

SEQ ID NO: 20300 - DNA, 122 bp, Homo sapiens
  misc_feature (61)..(62): /note="This region represents a CpG dinucleotide"
  misc_feature (61)..(61): /note="Nucleotide may be methylated to form 5-methylcytosine"
ccaaccaacccaatgcctcccttcctcccaagacccttcctcccaactctgaataaactccgcaagttcaacattagtgggtgaggagcagagcacctggacagacctgcacaggaaggagc

SEQ ID NO: 20301 - DNA, 122 bp, Homo sapiens
  misc_feature (61)..(62): /note="This region represents a CpG dinucleotide"
  misc_feature (61)..(61): /note="Nucleotide may be methylated to form 5-methylcytosine"
gagggaaatttcctcttctttctttccaattagaatgctggcctttcattgcttgctcttcgcagtgctgttactacttgaaaatacagctccctgatcataacctgctgcagatacatttt

SEQ ID NO: 20302 - DNA, 122 bp, Homo sapiens
  misc_feature (61)..(62): /note="This region represents a CpG dinucleotide"
  misc_feature (61)..(61): /note="Nucleotide may be methylated to form 5-methylcytosine"
ctagagcatggaggctttttcactgaaatctgtttgctcttctcagagcgtagcccaaggcgtgcaaatgtaaacacctgtaatgtaatgagaagtgagttggagatgagaaatgtgtcact

SEQ ID NO: 20303 - DNA, 122 bp, Homo sapiens
  misc_feature (61)..(62): /note="This region represents a CpG dinucleotide"
  misc_feature (61)..(61): /note="Nucleotide may be methylated to form 5-methylcytosine"
aggtttcagtgagggtggttggagagcgaggaggatgaaatggagactctctattctggacgtggcaggtttgctatggccattgtaccttccggctgacatgtcagttagcaggtggataa

SEQ ID NO: 20304 - DNA, 122 bp, Homo sapiens
  misc_feature (61)..(62): /note="This region represents a CpG dinucleotide"
  misc_feature (61)..(61): /note="Nucleotide may be methylated to form 5-methylcytosine"
aggcacatggcaggcactgggtgtgcagcaatgaaccggacagtccctaatttcacggaacgtaccttctagaaggcaaggcagacaatcgttttacaacaaagatgaaagacatacaacat

SEQ ID NO: 20305 - DNA, 122 bp, Homo sapiens
  misc_feature (61)..(62): /note="This region represents a CpG dinucleotide"
  misc_feature (61)..(61): /note="Nucleotide may be methylated to form 5-methylcytosine"
aagatgctaatctggcatccattacaagttcatctttcagttttggttttcttactcatccgcaccttagttctgggcctctaccactcatcagctgtgtgccttaaaaacaggccattaaa

SEQ ID NO: 20306 - DNA, 122 bp, Homo sapiens
  misc_feature (61)..(62): /note="This region represents a CpG dinucleotide"
  misc_feature (61)..(61): /note="Nucleotide may be methylated to form 5-methylcytosine"
aaatagtactgagtgtcagcaagggtgggagcaactgtcattctacactggggaggcaggcgtgtaatctgtacaaccagtttggaaaactgtggctgcgtaccttatgactcagcagtttc

SEQ ID NO: 20307 - DNA, 122 bp, Homo sapiens
  misc_feature (61)..(62): /note="This region represents a CpG dinucleotide"
  misc_feature (61)..(61): /note="Nucleotide may be methylated to form 5-methylcytosine"
cagtagtttgggtgccttaccagctttcttacttgaagagtgccctcttatttttgttttcgtttttttttttttttttttttttgagacagagtttctctcttgttgcccaggctggagtg

SEQ ID NO: 20308 - DNA, 122 bp, Homo sapiens
  misc_feature (61)..(62): /note="This region represents a CpG dinucleotide"
  misc_feature (61)..(61): /note="Nucleotide may be methylated to form 5-methylcytosine"
aactcttagtagggagaagtgaaaacattcctaacccagtaggtgcagggtttgtagccccgcagccccacatgcactcctggtatttgtaatttgcagtgatgacaaactgtgcctctggc

SEQ ID NO: 20309 - DNA, 122 bp, Homo sapiens
  misc_feature (61)..(62): /note="This region represents a CpG dinucleotide"
  misc_feature (61)..(61): /note="Nucleotide may be methylated to form 5-methylcytosine"
ccccccaccgccacaagacaggcagaggaggaggaggtgaggatgtgggaaggaaattctcggtttaaaaaaaccacattgtggttctaaatgtcatcaaaggtgaaacttgcttccttagc

SEQ ID NO: 20310 - DNA, 122 bp, Homo sapiens
  misc_feature (61)..(62): /note="This region represents a CpG dinucleotide"
  misc_feature (61)..(61): /note="Nucleotide may be methylated to form 5-methylcytosine"
agcatcagagatctcagtaataatcccatgactcatatcacacatggcaccagcatgaatcgggttattgaagaagatggaaccagtgcttaatttgtcttgtctaaggtggaaatcttgtg

SEQ ID NO: 20311 - DNA, 122 bp, Homo sapiens
  misc_feature (61)..(62): /note="This region represents a CpG dinucleotide"
  misc_feature (61)..(61): /note="Nucleotide may be methylated to form 5-methylcytosine"
atgacaatggacggccacaataaatgttacccagctggtcattctaggaaaagctgataccgcccttcccttcctgttctagtttatggccagccaggctctgaaggttcgacagtctgact

SEQ ID NO: 20312 - DNA, 122 bp, Homo sapiens
  misc_feature (61)..(62): /note="This region represents a CpG dinucleotide"
  misc_feature (61)..(61): /note="Nucleotide may be methylated to form 5-methylcytosine"
tgagaattacagctttgtagcttcgtatcccttttcagcaggagccagcataccactcctcgctcatttccccgtgtgctggcctcgctcattttcttttgcagggacttgttctgctgaga

SEQ ID NO: 20313 - DNA, 122 bp, Homo sapiens
  misc_feature (61)..(62): /note="This region represents a CpG dinucleotide"
  misc_feature (61)..(61): /note="Nucleotide may be methylated to form 5-methylcytosine"
ctgtctttcaaaatgacaggcacaagacctgtccctttcactcctgctggtactcagtgacgtacagtcatgcatctttcaacatcaagaatatgttctgagaaatgtgtcatttggtgatt

SEQ ID NO: 20314 - DNA, 122 bp, Homo sapiens
  misc_feature (61)..(62): /note="This region represents a CpG dinucleotide"
  misc_feature (61)..(61): /note="Nucleotide may be methylated to form 5-methylcytosine"
ttcagattctgctgcaactaacctttaagaaactacctcttggctgggtgcagtggctcacgcctgtaatcctagagctttgggaggccaaggctggcagatcacctgaggtcaggagttcg

SEQ ID NO: 20315 - DNA, 122 bp, Homo sapiens
  misc_feature (61)..(62): /note="This region represents a CpG dinucleotide"
  misc_feature (61)..(61): /note="Nucleotide may be methylated to form 5-methylcytosine"
tggacgcacagccctgggcttcagccccgactgtcccagtggactgagcagggcagctggcgaggcaggaccctacccccaacctcggagctcggggctggggagggagacaggtgccagcc

SEQ ID NO: 20316 - DNA, 122 bp, Homo sapiens
  misc_feature (61)..(62): /note="This region represents a CpG dinucleotide"
  misc_feature (61)..(61): /note="Nucleotide may be methylated to form 5-methylcytosine"
gtgtgaagagatattatttacattcattacaagggtaaataaaaactgttactgtgaatacgactgagctgtacaaacacaaagtcaaaaatgtcctgtctgctgggatgattctgtaaaca

SEQ ID NO: 20317 - DNA, 122 bp, Homo sapiens
  misc_feature (61)..(62): /note="This region represents a CpG dinucleotide"
  misc_feature (61)..(61): /note="Nucleotide may be methylated to form 5-methylcytosine"
cccggagacttggaggtgggatcaatcctgccagtcctggatcaggaggcctctgtcgggcgccgccccccttcctcctccatcagcaacaggcggcgccggccagcctcatagtcagcctc

SEQ ID NO: 20318 - DNA, 122 bp, Homo sapiens
  misc_feature (61)..(62): /note="This region represents a CpG dinucleotide"
  misc_feature (61)..(61): /note="Nucleotide may be methylated to form 5-methylcytosine"
tgaaagcctccaggattttgagcttcttctctgccagaagtggtaagtcctcctgagccccgacctccctttggttgacggccctttatttattctgatctactatttctttttctttctag

SEQ ID NO: 20319 - DNA, 122 bp, Homo sapiens
  misc_feature (61)..(62): /note="This region represents a CpG dinucleotide"
  misc_feature (61)..(61): /note="Nucleotide may be methylated to form 5-methylcytosine"
ggcaagatatcttacttaatttaatttactctgaactcccaatattcaggtaagaagctacgtgggtacaggaattctctgtgccttgctcacttctctaatctctgcctccaggccaggtt

SEQ ID NO: 20320 - DNA, 122 bp, Homo sapiens
  misc_feature (61)..(62): /note="This region represents a CpG dinucleotide"
  misc_feature (61)..(61): /note="Nucleotide may be methylated to form 5-methylcytosine"
tattcgttttctaagctgcttattcacaaatgactgcaaatttagtggttctaagcaacacgtttattgccttgcaatttctgtgggtcaagaggctgggcacaacttagctgtgtcctctt

SEQ ID NO: 20321 - DNA, 122 bp, Homo sapiens
  misc_feature (61)..(62): /note="This region represents a CpG dinucleotide"
  misc_feature (61)..(61): /note="Nucleotide may be methylated to form 5-methylcytosine"
gaagctgctcgcagacagcccatcctccctcctttctcccccactccatctggttgttaacgagaatgagaaaagcagattagaagtgtcacccctgcagctggttcaaggctgtacaaccg

SEQ ID NO: 20322 - DNA, 122 bp, Homo sapiens
  misc_feature (61)..(62): /note="This region represents a CpG dinucleotide"
  misc_feature (61)..(61): /note="Nucleotide may be methylated to form 5-methylcytosine"
caggaaggaatcatactcacaaagaaagtcttcactctgctgaaggcatctcggagatctcgaagcatgttaggcaggttgcctgggaagtgggtgcagctgttctcagactgggtgccctg

SEQ ID NO: 20323 - DNA, 122 bp, Homo sapiens
  misc_feature (61)..(62): /note="This region represents a CpG dinucleotide"
  misc_feature (61)..(61): /note="Nucleotide may be methylated to form 5-methylcytosine"
gatctacaaaccagcccccaggagcagcaggccctggcaacctctgtgctatggagtccacgcagaacagggacttcaaagtgcttggggtgtgctggcttgggagtcatttcgctgagaac

SEQ ID NO: 20324 - DNA, 122 bp, Homo sapiens
  misc_feature (61)..(62): /note="This region represents a CpG dinucleotide"
  misc_feature (61)..(61): /note="Nucleotide may be methylated to form 5-methylcytosine"
gcctgactcctgccatttaatggtaattaaaataaaatgatgggccggcaccgtggctcacgcctattaatcttggcactatgtgaggcctgaggcaggcttaagcctaggagtttgagacc

SEQ ID NO: 20325 - DNA, 122 bp, Homo sapiens
  misc_feature (61)..(62): /note="This region represents a CpG dinucleotide"
  misc_feature (61)..(61): /note="Nucleotide may be methylated to form 5-methylcytosine"
ccacgccaagccccagccggcgtggggttccagccctttccggggaaggattggccgaggcgctcacctgtttgccctggtgaccaatgggctcgagctgcccgggctaggtcccgggctcg

SEQ ID NO: 20326 - DNA, 122 bp, Homo sapiens
  misc_feature (61)..(62): /note="This region represents a CpG dinucleotide"
  misc_feature (61)..(61): /note="Nucleotide may be methylated to form 5-methylcytosine"
tcaccaagacttccttccccaaagcccttctatctctcaccactgttactttcccaccctcggctggcctcatcgccatacacccagactgtgtcaggggctctcactaagtggattcgaga

SEQ ID NO: 20327 - DNA, 122 bp, Homo sapiens
  misc_feature (61)..(62): /note="This region represents a CpG dinucleotide"
  misc_feature (61)..(61): /note="Nucleotide may be methylated to form 5-methylcytosine"
ggaaccacttgatttgggtcagtgaaaaactacattcctaggctgttctcaaggctgacacgtgagcccagatgatcaggctccaaaaggcaaaacagcagcaacccacagacacatatgtg

SEQ ID NO: 20328 - DNA, 122 bp, Homo sapiens
  misc_feature (61)..(62): /note="This region represents a CpG dinucleotide"
  misc_feature (61)..(61): /note="Nucleotide may be methylated to form 5-methylcytosine"
acatgattctcaaataaattctcatctgaaaagaaggctaccaagcatgttgtgaggtatcgctttagcttagtctttgtgctctgcctggctcagttgtcctgcagaacaacgacagtcca

SEQ ID NO: 20329 - DNA, 122 bp, Homo sapiens
  misc_feature (61)..(62): /note="This region represents a CpG dinucleotide"
  misc_feature (61)..(61): /note="Nucleotide may be methylated to form 5-methylcytosine"
tagagatcaagcaacgatggctaatgaattttacacaaagcatgctaataatggggcctgcggaacagaaggataatcacagcaggaattagttttctacttaaacatccttcctttgcacc

SEQ ID NO: 20330 - DNA, 122 bp, Homo sapiens
  misc_feature (61)..(62): /note="This region represents a CpG dinucleotide"
  misc_feature (61)..(61): /note="Nucleotide may be methylated to form 5-methylcytosine"
ctgctgtgttgtaaatgcataaacatggaactcagttaatcatcattcactcaacagcatcggtctatcttcctgcccacagggttctgcatccaacctcaggcaaaggtgcaagtcatggg

SEQ ID NO: 20331 - DNA, 122 bp, Homo sapiens
  misc_feature (61)..(62): /note="This region represents a CpG dinucleotide"
  misc_feature (61)..(61): /note="Nucleotide may be methylated to form 5-methylcytosine"
tggtggcaaggaataaggagagtgaggaatatgactttgtggcaaatgctttaacttggacgtaagagctaagtctggcattgctgcaattgaatggatactattgtcccaactttgcagaa

SEQ ID NO: 20332 - DNA, 122 bp, Homo sapiens
  misc_feature (61)..(62): /note="This region represents a CpG dinucleotide"
  misc_feature (61)..(61): /note="Nucleotide may be methylated to form 5-methylcytosine"
gtaacatgcaatttccctgatatattgaactgatgcttttatttgatcacaggactcagccgttacaaaaataacaagtcattttctttaataaaaaataaaaggaagtatatggttgggtc

SEQ ID NO: 20333 - DNA, 122 bp, Homo sapiens
  misc_feature (61)..(62): /note="This region represents a CpG dinucleotide"
  misc_feature (61)..(61): /note="Nucleotide may be methylated to form 5-methylcytosine"
cgtaatcaaattgtttcttagcttctgaaagtcttgttaaatcatttaaggtctatgtgacgatagatggtcgttagagaaaagtcaaaaccagattcttggctgtgtccccactcgtgcca

SEQ ID NO: 20334 - DNA, 122 bp, Homo sapiens
  misc_feature (61)..(62): /note="This region represents a CpG dinucleotide"
  misc_feature (61)..(61): /note="Nucleotide may be methylated to form 5-methylcytosine"
acaaacaaaaggtgtccactccttttctccaggctcttaacatgcttgtaagattctttacgtcttagctttccctgaactgccttctacatgtttttgaaagtgaaaaaaaaactgaaagg

SEQ ID NO: 20335 - DNA, 122 bp, Homo sapiens
  misc_feature (61)..(62): /note="This region represents a CpG dinucleotide"
  misc_feature (61)..(61): /note="Nucleotide may be methylated to form 5-methylcytosine"
taaaaaggacagttcacttgaccaaacttgaccacacataccacagcaagctgatgacagcgccatacatgatttttcatgagcaaagagaaatgtactgcatacatcttaacctccagttg

SEQ ID NO: 20336 - DNA, 122 bp, Homo sapiens
  misc_feature (61)..(62): /note="This region represents a CpG dinucleotide"
  misc_feature (61)..(61): /note="Nucleotide may be methylated to form 5-methylcytosine"
agcaagtgcaagtgtgagatttagagattctaagaggggaagggccagaggtcttgaaaacgaccttcattcgttcattcattcgagaagtttgcgagggcctccgtgtcctgcgtttagtg

SEQ ID NO: 20337 - DNA, 122 bp, Homo sapiens
  misc_feature (61)..(62): /note="This region represents a CpG dinucleotide"
  misc_feature (61)..(61): /note="Nucleotide may be methylated to form 5-methylcytosine"
cagattgacatcacagcgggaggccttcagtgtccctccactctcagccctgtgctgcaacgaatcagagggatcccagcctgatgcctccagtgtaaagtccaccatcagcctttcttcct

SEQ ID NO: 20338 - DNA, 122 bp, Homo sapiens
  misc_feature (61)..(62): /note="This region represents a CpG dinucleotide"
  misc_feature (61)..(61): /note="Nucleotide may be methylated to form 5-methylcytosine"
tttccactgttctagattatccccatgttttttcacttgacagagattatgatgaggaaccggttacacccacgctacctcccagtgagccttccccaccacacaaagctgcctccaggatt

SEQ ID NO: 20339 - DNA, 122 bp, Homo sapiens
  misc_feature (61)..(62): /note="This region represents a CpG dinucleotide"
  misc_feature (61)..(61): /note="Nucleotide may be methylated to form 5-methylcytosine"
cttgagaagacctgggccacatggaaaaactgttgcaactgataccaaagtttgtgtcatcgaatttcaaaacaattctctgcagtgtacaaagccagaaagagaaaccagcctcattcatg

SEQ ID NO: 20340 - DNA, 122 bp, Homo sapiens
  misc_feature (61)..(62): /note="This region represents a CpG dinucleotide"
  misc_feature (61)..(61): /note="Nucleotide may be methylated to form 5-methylcytosine"
ggggaaacaagatcagaagcttcacatataaatcagagtgatggacagagccctaattcccggggaggtcaggtcaaatatacttggctgaaagccaaagtatgtacaacctccatgagtcc

SEQ ID NO: 20341 - DNA, 122 bp, Homo sapiens
  misc_feature (61)..(62): /note="This region represents a CpG dinucleotide"
  misc_feature (61)..(61): /note="Nucleotide may be methylated to form 5-methylcytosine"
tcacagggcagccatcttcaagtcccattcactttggcagctagtggttctttctcactccgctagtaaaggccctatggaaggagtaaggaagctctgttttttgcttactcctttgagta

SEQ ID NO: 20342 - DNA, 122 bp, Homo sapiens
  misc_feature (61)..(62): /note="This region represents a CpG dinucleotide"
  misc_feature (61)..(61): /note="Nucleotide may be methylated to form 5-methylcytosine"
actcactcagagtcctggcttttccagtgtcagcagcatatgactccactccattcttttcgctaatcaagattatcaggaagcaattaagagtgaaatctgcataaggttaaccttgaatt

SEQ ID NO: 20343 - DNA, 122 bp, Homo sapiens
  misc_feature (61)..(62): /note="This region represents a CpG dinucleotide"
  misc_feature (61)..(61): /note="Nucleotide may be methylated to form 5-methylcytosine"
gaaactctgccactatctccttaccttcccattactggcctttcccaattgtgtgacacacgccattgctggttcctggaatcattttagatggtgcaagatactggattaagcaaggcatg

SEQ ID NO: 20344 - DNA, 122 bp, Homo sapiens
  misc_feature (61)..(62): /note="This region represents a CpG dinucleotide"
  misc_feature (61)..(61): /note="Nucleotide may be methylated to form 5-methylcytosine"
tgatgtaggggcctaatatttcctttcaaggatctgggtaatcacagaggccccctcctccggcccccaaatttctctgctgttggtgctatgcaaacaagtttcttttgaattatgaatga

SEQ ID NO: 20345 - DNA, 122 bp, Homo sapiens
  misc_feature (61)..(62): /note="This region represents a CpG dinucleotide"
  misc_feature (61)..(61): /note="Nucleotide may be methylated to form 5-methylcytosine"
acagtgtaagcattccaaagttcatgctttggcctggaggacctgagtcacaatgactgacgcaagacagtattgcccagaagttatgggctggtgggctgattaatggtctcagcatgaag

SEQ ID NO: 20346 - DNA, 122 bp, Homo sapiens
  misc_feature (61)..(62): /note="This region represents a CpG dinucleotide"
  misc_feature (61)..(61): /note="Nucleotide may be methylated to form 5-methylcytosine"
atccatagttatggaaggaagcccagtgaagttctggggcacagcctggctgtttgaagacggttgtaagccaagctgctgtggccatgagaaaggcacccagtggttcctgtgataaagac

SEQ ID NO: 20347 - DNA, 122 bp, Homo sapiens
  misc_feature (61)..(62): /note="This region represents a CpG dinucleotide"
  misc_feature (61)..(61): /note="Nucleotide may be methylated to form 5-methylcytosine"
ctctctctctagctgttttccttcactaatatttccaaaacacacaacaacagttggcatcgctcgcatataaacagctcttccatgtcactgagaaaacgagcaagatccagggaggaaaa

SEQ ID NO: 20348 - DNA, 122 bp, Homo sapiens
  misc_feature (61)..(62): /note="This region represents a CpG dinucleotide"
  misc_feature (61)..(61): /note="Nucleotide may be methylated to form 5-methylcytosine"
cactcaatatgttggctttgtttagtgactaagccaaagaaaaaatttaatcagtgagaacgtgtctgtaattatgttctaatccaaaataagagggtgagaaatttttcacctcaccgaga

SEQ ID NO: 20349 - DNA, 122 bp, Homo sapiens
  misc_feature (61)..(62): /note="This region represents a CpG dinucleotide"
  misc_feature (61)..(61): /note="Nucleotide may be methylated to form 5-methylcytosine"
ttgcactcagttactctgaagtcaaatgagtagtttatgttataaattatttctgcacaacgttcttgtatcatatgaggataagtgctctgtgttatgacacaatcacaccttcttgtgct

SEQ ID NO: 20350 - DNA, 122 bp, Homo sapiens
  misc_feature (61)..(62): /note="This region represents a CpG dinucleotide"
  misc_feature (61)..(61): /note="Nucleotide may be methylated to form 5-methylcytosine"
gtgcttctcaaatctcctctaccaggtcacagttctctttagcctagattacctcaatagcgtcaaaaccggtatccctgcctcctgtctctcctgcttcaatccattctcacagcacccca

SEQ ID NO: 20351 - DNA, 122 bp, Homo sapiens
  misc_feature (61)..(62): /note="This region represents a CpG dinucleotide"
  misc_feature (61)..(61): /note="Nucleotide may be methylated to form 5-methylcytosine"
ctgtcctctgaagaacagtatctttaatttttagtaatagatcattagaaacctggagaacgtgcagaaacagttaaatgtaacaggtaacttaaaaagtctaagtagtattacatgggaca

SEQ ID NO: 20352 - DNA, 122 bp, Homo sapiens
  misc_feature (61)..(62): /note="This region represents a CpG dinucleotide"
  misc_feature (61)..(61): /note="Nucleotide may be methylated to form 5-methylcytosine"
cttgagagccctccctgaccacagactcagtgctcgcttctacagagaaaattacaattacgccagagtgtgttgaaactaacttgtcactgggctcaggaaagaccatgttattcatggga

SEQ ID NO: 20353 - DNA, 122 bp, Homo sapiens
  misc_feature (61)..(62): /note="This region represents a CpG dinucleotide"
  misc_feature (61)..(61): /note="Nucleotide may be methylated to form 5-methylcytosine"
tgaggacagagagcctgagagcaatgaaaaggaaatcaggaacagaggctgagccagccacgggtggccccaggggacatcatcatgaacatgaagctttctggaaggctagaagtcgcact

SEQ ID NO: 20354 - DNA, 122 bp, Homo sapiens
  misc_feature (61)..(62): /note="This region represents a CpG dinucleotide"
  misc_feature (61)..(61): /note="Nucleotide may be methylated to form 5-methylcytosine"
gtaggttagaaaacaggaggaacagaggattgggtggggcctaaaggaattctacagttccgagtgtaggagggaaaagagcaactaacttcttatcagcaagccacaggaagtgtttttaa

SEQ ID NO: 20355 - DNA, 122 bp, Homo sapiens
  misc_feature (61)..(62): /note="This region represents a CpG dinucleotide"
  misc_feature (61)..(61): /note="Nucleotide may be methylated to form 5-methylcytosine"
ctagtttctaatgagactctctacagccttcgtttcttgcagcatgtctgagtgtccattcgctctgctgaagaaatagtgatgggtgtgatcaaggaatactgcctgagatgagtggtatt

SEQ ID NO: 20356 - DNA, 122 bp, Homo sapiens
  misc_feature (61)..(62): /note="This region represents a CpG dinucleotide"
  misc_feature (61)..(61): /note="Nucleotide may be methylated to form 5-methylcytosine"
tctctgtcttgttccagttcacatttcctactcattcgctgtggtcgccccgcctactcccgcctttccagcctgtggccagcccctgcaggggctcctagcccactgccttagtgttcatg

SEQ ID NO: 20357 - DNA, 122 bp, Homo sapiens
  misc_feature (61)..(62): /note="This region represents a CpG dinucleotide"
  misc_feature (61)..(61): /note="Nucleotide may be methylated to form 5-methylcytosine"
tgtctgatgactcctgtacaatgagatgtgtattctttcactgtgccctgtatgttcaggcgcagtcttactgcctcttttaaacttcctgatgggagctgtcctccaccagcaggacttcc

SEQ ID NO: 20358 - DNA, 122 bp, Homo sapiens
  misc_feature (61)..(62): /note="This region represents a CpG dinucleotide"
  misc_feature (61)..(61): /note="Nucleotide may be methylated to form 5-methylcytosine"
cagaccccctctaggagatgttactgtcgctcattcgtatttccggttctactcctcttccgggcacactggagaattacacttccttgctgacttgagataagtcacagctttggccaatg

SEQ ID NO: 20359 - DNA, 122 bp, Homo sapiens
  misc_feature (61)..(62): /note="This region represents a CpG dinucleotide"
  misc_feature (61)..(61): /note="Nucleotide may be methylated to form 5-methylcytosine"
agaggcccacgtgtgggcattggcccgcgatctgaaaggggctgtcctgttcctcatgggcgctgccagcgccacgcactcctctttctgcctggccggccactcccgtctgctgtgacgcg

SEQ ID NO: 20360 - DNA, 122 bp, Homo sapiens
  misc_feature (61)..(62): /note="This region represents a CpG dinucleotide"
  misc_feature (61)..(61): /note="Nucleotide may be methylated to form 5-methylcytosine"
ctcagccaccctgaatgtatagttgcctccagtgccccagggccagaagagatttctttacgggagatgcaatcagctctaaccaatcagtaagaagggttaatcagctgatcgattggtcc

SEQ ID NO: 20361 - DNA, 122 bp, Homo sapiens
  misc_feature (61)..(62): /note="This region represents a CpG dinucleotide"
  misc_feature (61)..(61): /note="Nucleotide may be methylated to form 5-methylcytosine"
ttgataaatttttcacagcagaacaccccaactgggatttccaaatccttccatcacacacggaggagctaggatttgcaaacccacttgtctgtataccaatcctgtggggaaagacctta

SEQ ID NO: 20362 - DNA, 122 bp, Homo sapiens
  misc_feature (61)..(62): /note="This region represents a CpG dinucleotide"
  misc_feature (61)..(61): /note="Nucleotide may be methylated to form 5-methylcytosine"
aatgaaccaagacttcctcaagcttagctaagcctcaaatgagaaaggcaacactttctgcgaacatgtcacagtgctggatagcacaaaggctgacctcaagaaaaggctgattcagtaag

SEQ ID NO: 20363 - DNA, 122 bp, Homo sapiens
  misc_feature (61)..(62): /note="This region represents a CpG dinucleotide"
  misc_feature (61)..(61): /note="Nucleotide may be methylated to form 5-methylcytosine"
ggtttcccactgtgcctgcagcgccacggagtgcagtttcgtggaggctactgcagatggcggagagggaggggtcattgattattcattcatgtattcaacaagcacacactgagccctat

SEQ ID NO: 20364 - DNA, 122 bp, Homo sapiens
  misc_feature (61)..(62): /note="This region represents a CpG dinucleotide"
  misc_feature (61)..(61): /note="Nucleotide may be methylated to form 5-methylcytosine"
tcctaatcactctcagaacaacagcagcatacctgattgaggagcagctggcattcactgcgcaaagagcaccatcaaaaattgagcatgtggctccaagagccaccactgtttccttctgt

SEQ ID NO: 20365 - DNA, 122 bp, Homo sapiens
  misc_feature (61)..(62): /note="This region represents a CpG dinucleotide"
  misc_feature (61)..(61): /note="Nucleotide may be methylated to form 5-methylcytosine"
tctctaggggcatgtgtgtgtgtttcccaatgagagactgggtttggcatgggaagagggcggaaggtaaagctaggtataaaggagcagatataatgtaaggcttattttcatcctgtttt

SEQ ID NO: 20366 - DNA, 122 bp, Homo sapiens
  misc_feature (61)..(62): /note="This region represents a CpG dinucleotide"
  misc_feature (61)..(61): /note="Nucleotide may be methylated to form 5-methylcytosine"
gttcccatcgcctggaaccttctctccctgcttttctggtttaactcttggtcactctctcgccaggccttgccccatgggccacagaggaaggcccctgcaactccaggggcagctgaagg

SEQ ID NO: 20367 - DNA, 122 bp, Homo sapiens
  misc_feature (61)..(62): /note="This region represents a CpG dinucleotide"
  misc_feature (61)..(61): /note="Nucleotide may be methylated to form 5-methylcytosine"
gtctctcttcccctgctgtggccacctagaggtccatgtgttccaggtggtgcaatcaaacgatggtgaagacaccatcaacctgggccacagatgactgtctaggcactatcattcacccg

SEQ ID NO: 20368 - DNA, 122 bp, Homo sapiens
  misc_feature (61)..(62): /note="This region represents a CpG dinucleotide"
  misc_feature (61)..(61): /note="Nucleotide may be methylated to form 5-methylcytosine"
gggaagcaggccagggcagaggcccagggaagatctcagcaggggcagtgtgagcatgagcgagtgtgtgcacctgtgacagtgcagacagcccaagatcagagatacaatgtgcagggggg

SEQ ID NO: 20369 - DNA, 122 bp, Homo sapiens
  misc_feature (61)..(62): /note="This region represents a CpG dinucleotide"
  misc_feature (61)..(61): /note="Nucleotide may be methylated to form 5-methylcytosine"
tcttggtgctccctcagcagccgctgagccgaggccacatccactgacacctccttgctgcgcagctgagcctggacactctctgcccacagtagcagttgctggctctcttgcaggaagct

SEQ ID NO: 20370 - DNA, 122 bp, Homo sapiens
  misc_feature (61)..(62): /note="This region represents a CpG dinucleotide"
  misc_feature (61)..(61): /note="Nucleotide may be methylated to form 5-methylcytosine"
cagtcttgtctttgcctgagggtgagctaggaccctgggagcataagggaggggacttgccggagatcctagaagggaaaggaggcagcactgaaagaagaaacatttccttgattgatcat

SEQ ID NO: 20371 - DNA, 122 bp, Homo sapiens
  misc_feature (61)..(62): /note="This region represents a CpG dinucleotide"
  misc_feature (61)..(61): /note="Nucleotide may be methylated to form 5-methylcytosine"
gattctcaaagggcttcacatatatgcttgtttttatcttgccttttcatgagcaggacgcgcatcattagtctcattgtacagaagaggaatccaagacccagaaatgctaaggcaggaat

SEQ ID NO: 20372 - DNA, 122 bp, Homo sapiens
  misc_feature (61)..(62): /note="This region represents a CpG dinucleotide"
  misc_feature (61)..(61): /note="Nucleotide may be methylated to form 5-methylcytosine"
tggcagtggaaaacatctgggtgatctccacccaacccccacgcctgctcagccttcctccgggtcaggccaggtcagctgttctgcccaagctacaggcacagctgctagcccactgctgt

SEQ ID NO: 20373 - DNA, 122 bp, Homo sapiens
  misc_feature (61)..(62): /note="This region represents a CpG dinucleotide"
  misc_feature (61)..(61): /note="Nucleotide may be methylated to form 5-methylcytosine"
tggtgccactacctcctccttgacaggtagatcattgccctgggctgtgtcccactgggtcgctttccaaagtaagtcatagtaacacctgcatgctatctttctcccctaccagggagctc

SEQ ID NO: 20374 - DNA, 122 bp, Homo sapiens
  misc_feature (61)..(62): /note="This region represents a CpG dinucleotide"
  misc_feature (61)..(61): /note="Nucleotide may be methylated to form 5-methylcytosine"
acctcaagtgatccacctgcctcggcctcccaaagtgctaagattacaggtgtgagccaccgtgcccagccaagatatctgataatctttttgaagatcccttgtatgtgatgagtcacttc

SEQ ID NO: 20375 - DNA, 122 bp, Homo sapiens
  misc_feature (61)..(62): /note="This region represents a CpG dinucleotide"
  misc_feature (61)..(61): /note="Nucleotide may be methylated to form 5-methylcytosine"
agcaggcataaactaggaaggtctgaggcaaaccagataacatggtcactctagtcttaacgaagttacctaatcttggtgtcttggtttcttcacattgtggaagggacatgactcacttc

SEQ ID NO: 20376 - DNA, 122 bp, Homo sapiens
  misc_feature (61)..(62): /note="This region represents a CpG dinucleotide"
  misc_feature (61)..(61): /note="Nucleotide may be methylated to form 5-methylcytosine"
atctatatttagggtatgccgtctgccaacccctttggaattcaagacataaggattatacgtttcaggaagtagagacatcattaattataaagtgttcctttatgtgatcgtaattgcac

SEQ ID NO: 20377 - DNA, 122 bp, Homo sapiens
  misc_feature (61)..(62): /note="This region represents a CpG dinucleotide"
  misc_feature (61)..(61): /note="Nucleotide may be methylated to form 5-methylcytosine"
ttgaattttatgaataataacactgatttatgtatggtttattatacaaaatacaatagacgggaaaactagttgggcagaagttggcaaacaatgtagcacattgctaaaacagatgtaca

SEQ ID NO: 20378 - DNA, 122 bp, Homo sapiens
  misc_feature (61)..(62): /note="This region represents a CpG dinucleotide"
  misc_feature (61)..(61): /note="Nucleotide may be methylated to form 5-methylcytosine"
tttagaaaaatgggggtactcggaaacaaagccagttatcccaatctgtggtcagcctatcgcccgtggagtcgtatcccttggtgggctgtgttttcatagcctctaggtaacacaggcac

SEQ ID NO: 20379 - DNA, 122 bp, Homo sapiens
  misc_feature (61)..(62): /note="This region represents a CpG dinucleotide"
  misc_feature (61)..(61): /note="Nucleotide may be methylated to form 5-methylcytosine"
taaatccaacgtgacgcctaccgagctgggtacaacattggtttgtttcataaaacagcccggggtgtttgggactcttactcctttacaactctcatttgactgtccaaagatgcttgcac

SEQ ID NO: 20380 - DNA, 122 bp, Homo sapiens
  misc_feature (61)..(62): /note="This region represents a CpG dinucleotide"
  misc_feature (61)..(61): /note="Nucleotide may be methylated to form 5-methylcytosine"
aaacccagaagtgcttggagcttgggtgcctgccttccaagctgcaaagaccaaaagtgccgccttcccccaactcctaaattacacctccacacctccacaaagtcagctcctagattgac

SEQ ID NO: 20381 - DNA, 122 bp, Homo sapiens
  misc_feature (61)..(62): /note="This region represents a CpG dinucleotide"
  misc_feature (61)..(61): /note="Nucleotide may be methylated to form 5-methylcytosine"
aaattcaggagcttttacttttcagccaaatgagttggaaattatcacactacccaaaggcgtctgtagtcaattaattattcaaagtctaactcacttgacatgcaaagatgaagtttaaa

SEQ ID NO: 20382 - DNA, 122 bp, Homo sapiens
  misc_feature (61)..(62): /note="This region represents a CpG dinucleotide"
  misc_feature (61)..(61): /note="Nucleotide may be methylated to form 5-methylcytosine"
tccctgtttcagaaccgagttaagatgttcacccttctcccctgtttgggtcccccctgccgtttagctactcgtaggcccggttgtccgccagggacgggcctagttccttcctcagctcc

SEQ ID NO: 20383 - DNA, 122 bp, Homo sapiens
  misc_feature (61)..(62): /note="This region represents a CpG dinucleotide"
  misc_feature (61)..(61): /note="Nucleotide may be methylated to form 5-methylcytosine"
catttgctgaattaaacaaaaatacaaggctttgggatattctttacaggatctaatgctcgaggcggttttcttcctattatcatgcaaacaaaccatttaaataccccaagccacaaaat

SEQ ID NO: 20384 - DNA, 122 bp, Homo sapiens
  misc_feature (61)..(62): /note="This region represents a CpG dinucleotide"
  misc_feature (61)..(61): /note="Nucleotide may be methylated to form 5-methylcytosine"
gctataacagcacctgttggcttctaagtgcacagagttctcacaacaatgtgccaaaaccgccacccttcccatcctggcacccacctccccccaccccaggagacctgcatatcagatat

SEQ ID NO: 20385 - DNA, 122 bp, Homo sapiens
  misc_feature (61)..(62): /note="This region represents a CpG dinucleotide"
  misc_feature (61)..(61): /note="Nucleotide may be methylated to form 5-methylcytosine"
gtcactgcccgataattcaaaggaggaactccagtatgacggccatctccggtcaggacacgcccgagctttgcagatgccattcagagaacctaggggacagatctatttagatgcacaaa

SEQ ID NO: 20386 - DNA, 122 bp, Homo sapiens
  misc_feature (61)..(62): /note="This region represents a CpG dinucleotide"
  misc_feature (61)..(61): /note="Nucleotide may be methylated to form 5-methylcytosine"
taaacagcacatcgttgcttttgcatcagccagaaaaaaaaaatactttttagaagaaaacgtacattatcatgagtcatagtatttgaggagtacagctctgaagcggcctgaggtgaggg

SEQ ID NO: 20387 - DNA, 122 bp, Homo sapiens
  misc_feature (61)..(62): /note="This region represents a CpG dinucleotide"
  misc_feature (61)..(61): /note="Nucleotide may be methylated to form 5-methylcytosine"
agggaaccctgggcctgctcacccagccgcaggtcaagcagcacaaagaaagggccagggcgggtcttgttttcagcttctgtggctcagtaaccccacccactggtaaactggccaactga

SEQ ID NO: 20388 - DNA, 122 bp, Homo sapiens
  misc_feature (61)..(62): /note="This region represents a CpG dinucleotide"
  misc_feature (61)..(61): /note="Nucleotide may be methylated to form 5-methylcytosine"
tgacaaaggcctcaatgtggcatatccaagctcaaggtgactgcctttctccccaaatgccgtgcttctcctggctccccagcctcgtaaaagggactaaaaactgcagttctcaggttaga

SEQ ID NO: 20389 - DNA, 122 bp, Homo sapiens
  misc_feature (61)..(62): /note="This region represents a CpG dinucleotide"
  misc_feature (61)..(61): /note="Nucleotide may be methylated to form 5-methylcytosine"
ctgagttagggactgtggcctctctgtgattatccttccttgatctataattacagtttacgtgaggacaatgtggtacattataactaaggtaacaagctttaatagggataattagtact

SEQ ID NO: 20390 - DNA, 122 bp, Homo sapiens
  misc_feature (61)..(62): /note="This region represents a CpG dinucleotide"
  misc_feature (61)..(61): /note="Nucleotide may be methylated to form 5-methylcytosine"
tctgttttcaaatacgtctgctagatacgaagtttctaccgactcagcacaatataattacgtaatgcatccattcacccatttcatactgagaaatatgcaatagttttctccagtgataa

SEQ ID NO: 20391 - DNA, 122 bp, Homo sapiens
  misc_feature (61)..(62): /note="This region represents a CpG dinucleotide"
  misc_feature (61)..(61): /note="Nucleotide may be methylated to form 5-methylcytosine"
cttgtctgtttagatttgctcagcaaaacttttactttgacactgtaatcccagatataccggagatgactaagctttcagtactcacaggcttaccatcttgaccaggttgtccagggtag

SEQ ID NO: 20392 - DNA, 122 bp, Homo sapiens
  misc_feature (61)..(62): /note="This region represents a CpG dinucleotide"
  misc_feature (61)..(61): /note="Nucleotide may be methylated to form 5-methylcytosine"
taaaaaataaaggcatgggtttggtttcgaataaagaccttgaagtgcttggcaggtgtccgctcccggagcgccgcgggtcccctgctcctgtcggcgcccgtgcctcaggcggtcccgat

SEQ ID NO: 20393 - DNA, 122 bp, Homo sapiens
  misc_feature (61)..(62): /note="This region represents a CpG dinucleotide"
  misc_feature (61)..(61): /note="Nucleotide may be methylated to form 5-methylcytosine"
actgctagacctggaaactgaaggagagtaataaggatttacaacaatagtcatggggaacggaaaaaggaatcatcaaatgagggattaattgccgagcagcattgaaagtctaactttca

SEQ ID NO: 20394 - DNA, 122 bp, Homo sapiens
  misc_feature (61)..(62): /note="This region represents a CpG dinucleotide"
  misc_feature (61)..(61): /note="Nucleotide may be methylated to form 5-methylcytosine"
gatttcttgtcaatacaaacaagtcaatttatggcccagtacatgaacagacatttaaggcgcaaattgtttgcttcttttttttccctataattaaagctcattctcttcttaaagggaaa

SEQ ID NO: 20395 - DNA, 122 bp, Homo sapiens
  misc_feature (61)..(62): /note="This region represents a CpG dinucleotide"
  misc_feature (61)..(61): /note="Nucleotide may be methylated to form 5-methylcytosine"
aaatctagtccattctgaggctccgccgcaccccgccccctcaggctctcccattagcaccgccccttaggtacagttacactggctccgcccactaattggcctcgccccccaagggccca

SEQ ID NO: 20396 - DNA, 122 bp, Homo sapiens
  misc_feature (61)..(62): /note="This region represents a CpG dinucleotide"
  misc_feature (61)..(61): /note="Nucleotide may be methylated to form 5-methylcytosine"
tttcagctaagacaccacactggaagggacattacataacaaaggtctttaatactatcacggagcttacaataagtataatctgacagaaggcagggagtcaccgttatgagatcagaaaa

SEQ ID NO: 20397 - DNA, 122 bp, Homo sapiens
  misc_feature (61)..(62): /note="This region represents a CpG dinucleotide"
  misc_feature (61)..(61): /note="Nucleotide may be methylated to form 5-methylcytosine"
ggccttcataagtataaaaagtttcactgttatattattttgatcacggctgataacagacggccatcacaaacaccctctgacagaagtggaggaggaagtgtgaaactaaggttcaggag

SEQ ID NO: 20398 - DNA, 122 bp, Homo sapiens
  misc_feature (61)..(62): /note="This region represents a CpG dinucleotide"
  misc_feature (61)..(61): /note="Nucleotide may be methylated to form 5-methylcytosine"
tacatctataaactggtatccgttttcatacattggtcttataagtttggattctatgagcgcacccacagagatgaatgtgctatttgctgatgaaatcagtttctaagcctgcaatgctg

SEQ ID NO: 20399 - DNA, 122 bp, Homo sapiens
  misc_feature (61)..(62): /note="This region represents a CpG dinucleotide"
  misc_feature (61)..(61): /note="Nucleotide may be methylated to form 5-methylcytosine"
attatttctccatttacatattaggaccttgtatttcagaagagataagagactttcccacggttacgtacgtagtaattggtagaactggctgttaaaagatatgtctattcaaatcaaaa

SEQ ID NO: 20400 - DNA, 122 bp, Homo sapiens
  misc_feature (61)..(62): /note="This region represents a CpG dinucleotide"
  misc_feature (61)..(61): /note="Nucleotide may be methylated to form 5-methylcytosine"
gtgtcctttctgtggaaacttgagaactgagtagatggcagcatgtgtcactctcataggcgcaagaagctgtggaaactgctgcttgctgacttcagctcccccacaccctccaccctcca

SEQ ID NO: 20401 - DNA, 122 bp, Homo sapiens
  misc_feature (61)..(62): /note="This region represents a CpG dinucleotide"
  misc_feature (61)..(61): /note="Nucleotide may be methylated to form 5-methylcytosine"
tactgcatcagcacatcaacctattgattaattgttgagtctttttttaagtttaaacttcggccaggcagtgattgaaatggatttatttttgcaagtaagcagattacagaggcaagcaa

SEQ ID NO: 20402 - DNA, 122 bp, Homo sapiens
  misc_feature (61)..(62): /note="This region represents a CpG dinucleotide"
  misc_feature (61)..(61): /note="Nucleotide may be methylated to form 5-methylcytosine"
tacagcaggtgttgtcgtcacaatcctgggaaggaaataaggtacacaaaggttaagtaacgtctgatgtctcttgtctagtaagtagcagggatggacttaaacacagaccaatctcactc

SEQ ID NO: 20403 - DNA, 122 bp, Homo sapiens
  misc_feature (61)..(62): /note="This region represents a CpG dinucleotide"
  misc_feature (61)..(61): /note="Nucleotide may be methylated to form 5-methylcytosine"
tatcctgcatgtggcaggcagctcagtgatccaggcagtagaatgtcatggcccttctaccgcagtggtcagggtggggtggggaggaaggcgtggctcttaatgctcctccctgaaagtga

SEQ ID NO: 20404 - DNA, 122 bp, Homo sapiens
  misc_feature (61)..(62): /note="This region represents a CpG dinucleotide"
  misc_feature (61)..(61): /note="Nucleotide may be methylated to form 5-methylcytosine"
aggatacagagagatctggaaaccttgccttgagagacgtaatcgaaagaacctaggacacgtgccctgaaaatgagacaaggaagacatgtgagaaccatctgcatgtttgcaaagtctgt

SEQ ID NO: 20405 - DNA, 122 bp, Homo sapiens
  misc_feature (61)..(62): /note="This region represents a CpG dinucleotide"
  misc_feature (61)..(61): /note="Nucleotide may be methylated to form 5-methylcytosine"
ctaccttatgatgaccagttctttattgcccagtggccattcatgtttcatgtgtgccaacgtgtggcagtaacgccggctgaaatttacttagtaccctatctcagaagagatcaaagtac

SEQ ID NO: 20406 - DNA, 122 bp, Homo sapiens
  misc_feature (61)..(62): /note="This region represents a CpG dinucleotide"
  misc_feature (61)..(61): /note="Nucleotide may be methylated to form 5-methylcytosine"
acaggtatgcactggtaacatgcagatgatttcatccagctaagctggttggagtaggagcgataccaaagggtacacccatctgtgagtcacatcttgaaaaacactgagaggaaccttct

SEQ ID NO: 20407 - DNA, 122 bp, Homo sapiens
  misc_feature (61)..(62): /note="This region represents a CpG dinucleotide"
  misc_feature (61)..(61): /note="Nucleotide may be methylated to form 5-methylcytosine"
taccttgtaatgcctgcctggggaatgagtacatactcttctgtacctattaactgcaggcgtggctacatgacttgctctagccaacagactgtgaggaggaatgacatgaccctcaactg

SEQ ID NO: 20408 - DNA, 122 bp, Homo sapiens
  misc_feature (61)..(62): /note="This region represents a CpG dinucleotide"
  misc_feature (61)..(61): /note="Nucleotide may be methylated to form 5-methylcytosine"
gggctaccctataagggcagggctcagatacaatccgagagcaggactaaagcatgagggcggccaaggcggaagggagtagggaaggaagcgccgcgcgtttccaagatacgcaggcgggc

SEQ ID NO: 20409 - DNA, 122 bp, Homo sapiens
  misc_feature (61)..(62): /note="This region represents a CpG dinucleotide"
  misc_feature (61)..(61): /note="Nucleotide may be methylated to form 5-methylcytosine"
gtctctatagagccgctgatttatgactgcaacctgaagttggtgtggcagtcctccaggcgcgcctccctgcctgctcccagcctcctctttgcccacctgattggcagggggcagtggct

SEQ ID NO: 20410 - DNA, 122 bp, Homo sapiens
  misc_feature (61)..(62): /note="This region represents a CpG dinucleotide"
  misc_feature (61)..(61): /note="Nucleotide may be methylated to form 5-methylcytosine"
cagaggaagtggtctgtgggccagctgaattgcccaaggagctgagtcactggctgatttcggcctgccctgcagtccctggggtgactatggtgataggggagagaaatctgcttatctag

SEQ ID NO: 20411 - DNA, 122 bp, Homo sapiens
  misc_feature (61)..(62): /note="This region represents a CpG dinucleotide"
  misc_feature (61)..(61): /note="Nucleotide may be methylated to form 5-methylcytosine"
tcttaattcagtttgactgagattaaaactattattaatctccatttcccaacacacacgcgcaggtaagaagggaaatgtagctaaacaatttaaagtaaccagattatctgccctctgat

SEQ ID NO: 20412 - DNA, 122 bp, Homo sapiens
  misc_feature (61)..(62): /note="This region represents a CpG dinucleotide"
  misc_feature (61)..(61): /note="Nucleotide may be methylated to form 5-methylcytosine"
acaagtcaaacagagtcacccaaacaagcgtggcacgcaaacctttagagttcagcaaaccgagggctgagttaccaaaccgtgtcctttcagggcatgcaaaaggcttttcctgctctgct

SEQ ID NO: 20413 - DNA, 122 bp, Homo sapiens
  misc_feature (61)..(62): /note="This region represents a CpG dinucleotide"
  misc_feature (61)..(61): /note="Nucleotide may be methylated to form 5-methylcytosine"
tcaaagacacactggggccgtgtgcagtatgtgggagctgtgggaacctgctctgtcttccgttttctctccacactgtctggaagaagtgatttcatctcacagtcatttggtgactaagg

SEQ ID NO: 20414 - DNA, 122 bp, Homo sapiens
  misc_feature (61)..(62): /note="This region represents a CpG dinucleotide"
  misc_feature (61)..(61): /note="Nucleotide may be methylated to form 5-methylcytosine"
gcaggcagaggtgccttcctgcaggtgtgccagagtctttggtaatgagccattatgctccgtcagtcattctgctgtaaccatgcatagtcatcctgtttccttcctcacagtatatggag

SEQ ID NO: 20415 - DNA, 122 bp, Homo sapiens
  misc_feature (61)..(62): /note="This region represents a CpG dinucleotide"
  misc_feature (61)..(61): /note="Nucleotide may be methylated to form 5-methylcytosine"
ttgaagtaaacctggctatagagagggtgcaatttatgttgcctgccacgttccctggttcggtaagattttcagttaaagtcatcctccttcacttccgttttgccccagggaagggagac

SEQ ID NO: 20416 - DNA, 122 bp, Homo sapiens
  misc_feature (61)..(62): /note="This region represents a CpG dinucleotide"
  misc_feature (61)..(61): /note="Nucleotide may be methylated to form 5-methylcytosine"
ttcatgctggggtgccacatcccccccagggggagaacttggcagcagacctggggctcacggcactcatcctggaccaagatcagcagggaatcccatcctgcccaggggaaggctggata

SEQ ID NO: 20417 - DNA, 122 bp, Homo sapiens
  misc_feature (61)..(62): /note="This region represents a CpG dinucleotide"
  misc_feature (61)..(61): /note="Nucleotide may be methylated to form 5-methylcytosine"
caatgaccccgtattctggattgcagtcattcccaaagtccacaggataagggtgatatgcgtcacgtaaggatcccagactcatcagactctagggagtaccaggtgccaacaaagaaagc

SEQ ID NO: 20418 - DNA, 122 bp, Homo sapiens
  misc_feature (61)..(62): /note="This region represents a CpG dinucleotide"
  misc_feature (61)..(61): /note="Nucleotide may be methylated to form 5-methylcytosine"
ctgtgataccatgacagtgaatctacacccaagatggctactaagtgactaatggcaatccgtgcaggacagaccagggtggagcaagatttcatcattggtactcagaatggtgtgcaatt

SEQ ID NO: 20419 - DNA, 122 bp, Homo sapiens
  misc_feature (61)..(62): /note="This region represents a CpG dinucleotide"
  misc_feature (61)..(61): /note="Nucleotide may be methylated to form 5-methylcytosine"
agcatggtggtacagggtagggagtcctacactggttctgattctgccactcacaagctacgttttcattctttctctgagccttgattttcccttctataaagtgaagggttagatcaaat

SEQ ID NO: 20420 - DNA, 122 bp, Homo sapiens
  misc_feature (61)..(62): /note="This region represents a CpG dinucleotide"
  misc_feature (61)..(61): /note="Nucleotide may be methylated to form 5-methylcytosine"
ggtggggaagtttgttattacagccggcaagaacgaggacacttcacagggctgggctgccgaggaaagatgagagactaaactgatgagaatcaccaaccagtttgatgacttggagaaca

SEQ ID NO: 20421 - DNA, 122 bp, Homo sapiens
  misc_feature (61)..(62): /note="This region represents a CpG dinucleotide"
  misc_feature (61)..(61): /note="Nucleotide may be methylated to form 5-methylcytosine"
ccaaagcagtacataatttttgttaattgtgtttacaagtgtgacttcaggattacccagcggtttggaagctgattattcttagtctggagattgagtcatttattcatgaaatatttact

SEQ ID NO: 20422 - DNA, 122 bp, Homo sapiens
  misc_feature (61)..(62): /note="This region represents a CpG dinucleotide"
  misc_feature (61)..(61): /note="Nucleotide may be methylated to form 5-methylcytosine"
cagttgcatacaaggaagattactgcactagcctgaagacaaatgtctacaaatattatacgctcaagtgcagggaggagttttgttcaaggcagcacagaaaacaaattactctggtctta

SEQ ID NO: 20423 - DNA, 122 bp, Homo sapiens
  misc_feature (61)..(62): /note="This region represents a CpG dinucleotide"
  misc_feature (61)..(61): /note="Nucleotide may be methylated to form 5-methylcytosine"
aaaaagaattcagtactaagaaaaaaaagctgctattgttttcttcactggcagaagcagcgagtaagtggcaactcatgactctaatgatgcatcatccctaggcagattatttataatgc

SEQ ID NO: 20424 - DNA, 122 bp, Homo sapiens
  misc_feature (61)..(62): /note="This region represents a CpG dinucleotide"
  misc_feature (61)..(61): /note="Nucleotide may be methylated to form 5-methylcytosine"
agggatttgccatgatgattgaacgaccgtaatgggattgagcggcagggttctagtggacgcaatgaagcggattgcaaagaggaagctggcagccacactgcttctccaaaattagtttt

SEQ ID NO: 20425 - DNA, 122 bp, Homo sapiens
  misc_feature (61)..(62): /note="This region represents a CpG dinucleotide"
  misc_feature (61)..(61): /note="Nucleotide may be methylated to form 5-methylcytosine"
gctactctctgccctgggccggtgctagatgttttacatgcactgttaatcactgttactcgtggagggagattttattattaactttcttttccagatgaggtaactgaggctcagagagg

SEQ ID NO: 20426 - DNA, 122 bp, Homo sapiens
  misc_feature (61)..(62): /note="This region represents a CpG dinucleotide"
  misc_feature (61)..(61): /note="Nucleotide may be methylated to form 5-methylcytosine"
tccatttttgtaaacgtgcctacttgctaaaatttatttgtaaccccaaaatcaaacacacgtagcaccttcgtggtcattcacagacacaggcagagcagcgaaggctttttgtagtattt

SEQ ID NO: 20427 - DNA, 122 bp, Homo sapiens
  misc_feature (61)..(62): /note="This region represents a CpG dinucleotide"
  misc_feature (61)..(61): /note="Nucleotide may be methylated to form 5-methylcytosine"
tggttgatgtgaatggtgacagctcctgtgaggggcttgtttcttctgaacgtgtgcccacgtgtgtatgcacgtgtgtgagtgtgcatgtgcccacgtgtgtatgcacgtgtgtgagtgtg

SEQ ID NO: 20428 - DNA, 122 bp, Homo sapiens
  misc_feature (61)..(62): /note="This region represents a CpG dinucleotide"
  misc_feature (61)..(61): /note="Nucleotide may be methylated to form 5-methylcytosine"
gctggaattggtttggatttagcctctgccgacttcagagtgtgcaacagccaaatagaacgcacgtcaagttttgcaaactgtccagcacagcccgcgctgtttctgtggttaagcgccat

SEQ ID NO: 20429 - DNA, 122 bp, Homo sapiens
  misc_feature (61)..(62): /note="This region represents a CpG dinucleotide"
  misc_feature (61)..(61): /note="Nucleotide may be methylated to form 5-methylcytosine"
cccagagctaagtcagctctgagcaggactctacaaggccacatcaaaaatgacaacaggcgggccagtgtgatgaggcatcggtgggaggttcaccccgggtgaggattctgtcatggcac

SEQ ID NO: 20430 - DNA, 122 bp, Homo sapiens
  misc_feature (61)..(62): /note="This region represents a CpG dinucleotide"
  misc_feature (61)..(61): /note="Nucleotide may be methylated to form 5-methylcytosine"
ctgtttgacaaatgtcacgtaagaagaagcccatgatactgaggatggtataggaggggccgtatccaggttgaaggagtcaaatatgacagctgccgtgagaattacaatcagaaaaccat

SEQ ID NO: 20431 - DNA, 122 bp, Homo sapiens
  misc_feature (61)..(62): /note="This region represents a CpG dinucleotide"
  misc_feature (61)..(61): /note="Nucleotide may be methylated to form 5-methylcytosine"
gaagtgaatttatgagattaccttttaatcttaacatcgggattggcacatgtttaaaatcgtgatattattattttttctcattcattcgacaacaacaaaaatagagacctactctaggt

SEQ ID NO: 20432 - DNA, 122 bp, Homo sapiens
  misc_feature (61)..(62): /note="This region represents a CpG dinucleotide"
  misc_feature (61)..(61): /note="Nucleotide may be methylated to form 5-methylcytosine"
gccaaagtgggcagatcacctgaggtcaggagtttgagaccaggaaactgaccaacatgacgaaacccagtctctactaacaatacaataattagtcagctgtggcagcacgcacctgtaat

SEQ ID NO: 20433 - DNA, 122 bp, Homo sapiens
  misc_feature (61)..(62): /note="This region represents a CpG dinucleotide"
  misc_feature (61)..(61): /note="Nucleotide may be methylated to form 5-methylcytosine"
ttgcactgggtcttgaagaacacaggcatgttagagacacatggagaaaagggacagcagcgagtagagagagaggaaaagaagtcacggaactgagacatgccacacatcagtggaagaca

SEQ ID NO: 20434 - DNA, 122 bp, Homo sapiens
  misc_feature (61)..(62): /note="This region represents a CpG dinucleotide"
  misc_feature (61)..(61): /note="Nucleotide may be methylated to form 5-methylcytosine"
catatgttaaaattgacaccataaaataaataacagagagactgactctccaaaataaagcgtttattccagaattgcaaggaattgcaatttgagatatgcatgctatagtggactatagg

SEQ ID NO: 20435 - DNA, 122 bp, Homo sapiens
  misc_feature (61)..(62): /note="This region represents a CpG dinucleotide"
  misc_feature (61)..(61): /note="Nucleotide may be methylated to form 5-methylcytosine"
taaatgtttggattaatggattgatgtcaaaaataggttccttttagtgtttgctccttccgactccactcagattctttttttaaaatttctttctaaaaaagcataactcagattcttaa

SEQ ID NO: 20436 - DNA, 122 bp, Homo sapiens
  misc_feature (61)..(62): /note="This region represents a CpG dinucleotide"
  misc_feature (61)..(61): /note="Nucleotide may be methylated to form 5-methylcytosine"
tggggtatcaggtggctctgccagaaactcccttggcacacagagcactgggtcggccctcgggtgtggctgtttgggcaggacagccctctgtatgtagccttgagcaggtaggggggcca

SEQ ID NO: 20437 - DNA, 122 bp, Homo sapiens
  misc_feature (61)..(62): /note="This region represents a CpG dinucleotide"
  misc_feature (61)..(61): /note="Nucleotide may be methylated to form 5-methylcytosine"
tttatagtctgtcaaatagcaacttggatttgtatagctcaggaacttcaatgcataaaacgtgtcagggcatgcaaagaaacaactttaggagaaacaacactgttgtttctttgaagatg

SEQ ID NO: 20438 - DNA, 122 bp, Homo sapiens
  misc_feature (61)..(62): /note="This region represents a CpG dinucleotide"
  misc_feature (61)..(61): /note="Nucleotide may be methylated to form 5-methylcytosine"
aaactttcccctccactcttcgcccgtgcctctccaatctgggtgccctggaggacggaacgggaactgcagatccaggcactccattatggcaacccagcaagcagttcagcacggactta

SEQ ID NO: 20439 - DNA, 122 bp, Homo sapiens
  misc_feature (61)..(62): /note="This region represents a CpG dinucleotide"
  misc_feature (61)..(61): /note="Nucleotide may be methylated to form 5-methylcytosine"
tctccaagatgcagagcctgatccacagcatttagtaggctgctctccaaatcctggggacgctcaaatctggagccaacccaggatttcatctgtccctccagcctgggaggatcccactg

SEQ ID NO: 20440 - DNA, 122 bp, Homo sapiens
  misc_feature (61)..(62): /note="This region represents a CpG dinucleotide"
  misc_feature (61)..(61): /note="Nucleotide may be methylated to form 5-methylcytosine"
tcaaggcatgttccctaaaactagagcacatatctttccagttagcgagtggctgtttaacgcaaggaacatcctgcaatcctatgaaagaggatgcaaaagatatgcaggataccctttat

SEQ ID NO: 20441 - DNA, 122 bp, Homo sapiens
  misc_feature (61)..(62): /note="This region represents a CpG dinucleotide"
  misc_feature (61)..(61): /note="Nucleotide may be methylated to form 5-methylcytosine"
aaacatgtgcataactacacaatcaagaaaatcttaccacttctgtcaatacactctatgcgaagcggcaataagatcacacttaacaatctccagaagaaaatgagagagaatgaaacacc

SEQ ID NO: 20442 - DNA, 122 bp, Homo sapiens
  misc_feature (61)..(62): /note="This region represents a CpG dinucleotide"
  misc_feature (61)..(61): /note="Nucleotide may be methylated to form 5-methylcytosine"
tgggcttgatcttagagaaacatgcaagctgctacaacttagcggagaatttccatgccacgtcaatttacagccagccccctaccagagttctgtcgctcagggcaccagcggtgctttgt

SEQ ID NO: 20443 - DNA, 122 bp, Homo sapiens
  misc_feature (61)..(62): /note="This region represents a CpG dinucleotide"
  misc_feature (61)..(61): /note="Nucleotide may be methylated to form 5-methylcytosine"
agtccaaaggcaacttacgccagcttgcagccagatggccgggggagccactgtgccttacgccctaactactgtaaaggctgcatgtggattcaggaagagtcttgacatgaaagggaagt

SEQ ID NO: 20444 - DNA, 122 bp, Homo sapiens
  misc_feature (61)..(62): /note="This region represents a CpG dinucleotide"
  misc_feature (61)..(61): /note="Nucleotide may be methylated to form 5-methylcytosine"
gacccactgaaccagaattactcagggtggtgtctgggaacccgcattgcatcagattcccgctgtgattcttacatacactgaacattgagaaatgctgtcaggtgaaaggcaaagcaaca

SEQ ID NO: 20445 - DNA, 122 bp, Homo sapiens
  misc_feature (61)..(62): /note="This region represents a CpG dinucleotide"
  misc_feature (61)..(61): /note="Nucleotide may be methylated to form 5-methylcytosine"
tctctcctgctgttttttctatagaaagagaaatatgaaatactttcccagccaccattgcgctaggtgtgaccttatgacacagttctgactaataagacataagaggcctgggcacggtg

SEQ ID NO: 20446 - DNA, 122 bp, Homo sapiens
  misc_feature (61)..(62): /note="This region represents a CpG dinucleotide"
  misc_feature (61)..(61): /note="Nucleotide may be methylated to form 5-methylcytosine"
ccgttctctctacctagataagtgggcacctctacctctatgatttctctttcaggactccgtgtagttatcatttcctctaaaaagcctttcctaaaaccaagttggatgtctgttttgtg

SEQ ID NO: 20447 - DNA, 122 bp, Homo sapiens
  misc_feature (61)..(62): /note="This region represents a CpG dinucleotide"
  misc_feature (61)..(61): /note="Nucleotide may be methylated to form 5-methylcytosine"
gagccccacctccacgtgtgcccggggcgggtctcccagcagcaccacctcctccacccccgaagctgcttcttagaccaaaggcttgctccttgcaaaagactgaacagctgcatcgtttc

SEQ ID NO: 20448 - DNA, 122 bp, Homo sapiens
  misc_feature (61)..(62): /note="This region represents a CpG dinucleotide"
  misc_feature (61)..(61): /note="Nucleotide may be methylated to form 5-methylcytosine"
gtggcaagttcacggtcaagctaagcttaaacaaggcttgattcaggctcatgattcagccgctagactctactgcctcttgcacaagtagcaactcactgctctccctgccctcttgatgt

SEQ ID NO: 20449 - DNA, 122 bp, Homo sapiens
  misc_feature (61)..(62): /note="This region represents a CpG dinucleotide"
  misc_feature (61)..(61): /note="Nucleotide may be methylated to form 5-methylcytosine"
tcttggccttcacccatggcacgcaccgataaatgattaaaccaccttcctcaaggaggacgaaaaaggcaggaacatacgtctgagcagctgagggtaatacagacgactgatggtttcct

SEQ ID NO: 20450 - DNA, 122 bp, Homo sapiens
  misc_feature (61)..(62): /note="This region represents a CpG dinucleotide"
  misc_feature (61)..(61): /note="Nucleotide may be methylated to form 5-methylcytosine"
gcttctgtacgtaggaacccagtcacttcgtagcagagaggcagactgcgcacagatctgcgtggggaagggagtgcgccaagccacagcctgatgggccggcgtgcctggcaggaggctca

SEQ ID NO: 20451 - DNA, 122 bp, Homo sapiens
  misc_feature (61)..(62): /note="This region represents a CpG dinucleotide"
  misc_feature (61)..(61): /note="Nucleotide may be methylated to form 5-methylcytosine"
cactcatcctgcaaagctttcagaatggccgggatgctggtggctgagggaggcttgggccggattgggtgagcaactgccgaaagggaaagcaggtatgaagaacataacccaggggcctc

SEQ ID NO: 20452 - DNA, 122 bp, Homo sapiens
  misc_feature (61)..(62): /note="This region represents a CpG dinucleotide"
  misc_feature (61)..(61): /note="Nucleotide may be methylated to form 5-methylcytosine"
cgcgagcgctgcccccctactcagatggcactctagaactggaatgtcccacagagcagccgcaaaccacagatggctgttaagcacttaatatgtggctgctgtgaattgagccttgccac

SEQ ID NO: 20453 - DNA, 122 bp, Homo sapiens
  misc_feature (61)..(62): /note="This region represents a CpG dinucleotide"
  misc_feature (61)..(61): /note="Nucleotide may be methylated to form 5-methylcytosine"
agagtttagtcatgtgtattcacaccccacatttgtttcttctaagaaatgaagtctatccgttaaggaaatgtcagttaatcctcattgctgctgttatcatggttggatttgctccaaaa

SEQ ID NO: 20454 - DNA, 122 bp, Homo sapiens
  misc_feature (61)..(62): /note="This region represents a CpG dinucleotide"
  misc_feature (61)..(61): /note="Nucleotide may be methylated to form 5-methylcytosine"
aaaaaaaattcttttttgttttggccctgagttgcactgtaaatacaggactgaagatgacgtgacaaacccagacatcgccatgcctaaggcgtagagctgaagactttttatgtgtcata

SEQ ID NO: 20455 - DNA, 122 bp, Homo sapiens
  misc_feature (61)..(62): /note="This region represents a CpG dinucleotide"
  misc_feature (61)..(61): /note="Nucleotide may be methylated to form 5-methylcytosine"
cctcaaagagttactcgcatttctacctacaagtaattttttgtttgtggttttacagcacgtaaagggtttggaagtcctctggaaaggtaaacttcgtgtacagttaatcatttcctgga

SEQ ID NO: 20456 - DNA, 122 bp, Homo sapiens
  misc_feature (61)..(62): /note="This region represents a CpG dinucleotide"
  misc_feature (61)..(61): /note="Nucleotide may be methylated to form 5-methylcytosine"
tctttaattctttcctgatctagactagacctgtggtacattattcaatgactctatccccgttatacttccattccactttccagaaaaactctaaccctgggtcaattcgattgcacctg

SEQ ID NO: 20457 - DNA, 122 bp, Homo sapiens
  misc_feature (61)..(62): /note="This region represents a CpG dinucleotide"
  misc_feature (61)..(61): /note="Nucleotide may be methylated to form 5-methylcytosine"
tagtagactattagtagttaagtttttggaaactcaaaagtttacatggaattttgactgcgcagggtgtagacattcttaactcctcacattgttcaagggtcaactgtataaattctgag

SEQ ID NO: 20458 - DNA, 122 bp, Homo sapiens
  misc_feature (61)..(62): /note="This region represents a CpG dinucleotide"
  misc_feature (61)..(61): /note="Nucleotide may be methylated to form 5-methylcytosine"
gctgtttgagggcaggaaagcccagttcctttaacccttgtgtcggtgcctgcacagagccgggcaccccagcacatctgtgtttgtggctctgaattcatttatctgtgccagtctcctgc

SEQ ID NO: 20459 - DNA, 122 bp, Homo sapiens
  misc_feature (61)..(62): /note="This region represents a CpG dinucleotide"
  misc_feature (61)..(61): /note="Nucleotide may be methylated to form 5-methylcytosine"
tcactgcagcctctacctcccgggctcaagccatcctcctacctcagtcattcaaaatgccgacattacaggcctcagccatcacgccccgccaagatcgtgtattcctgagtgctccgtgt

SEQ ID NO: 20460 - DNA, 122 bp, Homo sapiens
  misc_feature (61)..(62): /note="This region represents a CpG dinucleotide"
  misc_feature (61)..(61): /note="Nucleotide may be methylated to form 5-methylcytosine"
aacagttcatgactcaacagctacgtagtctatccacccattcatgtgacattgtgaaggcgacactgccacaagccacaaccaagccttctacagggatgaaggccaaggggactctatgc

SEQ ID NO: 20461 - DNA, 122 bp, Homo sapiens
  misc_feature (61)..(62): /note="This region represents a CpG dinucleotide"
  misc_feature (61)..(61): /note="Nucleotide may be methylated to form 5-methylcytosine"
tttttctgtgccagggcccagttttaacagggatgaatgaacagggccagcctagggccgcgaaggagctgaatgcaacctgcaatcctgaaatatggaggctaacatagaccaagggccct

SEQ ID NO: 20462 - DNA, 122 bp, Homo sapiens
  misc_feature (61)..(62): /note="This region represents a CpG dinucleotide"
  misc_feature (61)..(61): /note="Nucleotide may be methylated to form 5-methylcytosine"
gttttaatgtgtgcctgggtgcagacgggctgaggcttaaaagggcatcagcaccaaatgcggacagggtagcagttttatagtctcctgtaaacaggaagtatctcagtctgatgtaactg

SEQ ID NO: 20463 - DNA, 122 bp, Homo sapiens
  misc_feature (61)..(62): /note="This region represents a CpG dinucleotide"
  misc_feature (61)..(61): /note="Nucleotide may be methylated to form 5-methylcytosine"
cctaacagaagtggccatgatgtgctagcaattatgcctgtcctcacaattctctgtgagcgtgctgctctattccttcctcttcacaatatgaagaaagtaaggctcagagaactgcccca

SEQ ID NO: 20464 - DNA, 122 bp, Homo sapiens
  misc_feature (61)..(62): /note="This region represents a CpG dinucleotide"
  misc_feature (61)..(61): /note="Nucleotide may be methylated to form 5-methylcytosine"
ctgctgtgggctcctggcacgaaagggtgaagtccgtctgagtccaccgaccaatggtgacgcgcagcgccttcgcggcgcttcctgattggcgggcatgcagggtgggcgggagggaggag

SEQ ID NO: 20465 - DNA, 122 bp, Homo sapiens
  misc_feature (61)..(62): /note="This region represents a CpG dinucleotide"
  misc_feature (61)..(61): /note="Nucleotide may be methylated to form 5-methylcytosine"
ctggaggacttgagtcccagtctttggtttgtccctgactagcagtgtgacctccaataacgctcttgacctgtctgggcctttgctgcttcatctgtggcatgaacacgttggactagaaa

SEQ ID NO: 20466 - DNA, 122 bp, Homo sapiens
  misc_feature (61)..(62): /note="This region represents a CpG dinucleotide"
  misc_feature (61)..(61): /note="Nucleotide may be methylated to form 5-methylcytosine"
gagctgggttaccccagctgttaaaatggccttacacagctgctcaccaagaatttagttcgtgattattatagttacacctttaagtcaactatgacaaaaatgacacagtaattacaggt

SEQ ID NO: 20467 - DNA, 122 bp, Homo sapiens
  misc_feature (61)..(62): /note="This region represents a CpG dinucleotide"
  misc_feature (61)..(61): /note="Nucleotide may be methylated to form 5-methylcytosine"
ggctgcttttaagccaaggggccttctggctttttggctgctggcatgcaagctcagaggcgctccttgagttcattcttttcccatcttttcccttgtttccgtgacagaatacagtcgct

SEQ ID NO: 20468 - DNA, 122 bp, Homo sapiens
  misc_feature (61)..(62): /note="This region represents a CpG dinucleotide"
  misc_feature (61)..(61): /note="Nucleotide may be methylated to form 5-methylcytosine"
caattagtattagattcagctacgagtaatagaaactctaaaacccctagtgacttaaaacgttaaagaggataaaaataatctggatgcaaggggttccggactagtatggggactgaaca

SEQ ID NO: 20469 - DNA, 122 bp, Homo sapiens
  misc_feature (61)..(62): /note="This region represents a CpG dinucleotide"
  misc_feature (61)..(61): /note="Nucleotide may be methylated to form 5-methylcytosine"
cctgggcgacagagcaagactctgtctcaaaacaaaaccaaacaaaacaaaaaactcacccgaaagtaacctttattggccttattaaattgacagtggttgctttttgttctgcttttggt

SEQ ID NO: 20470 - DNA, 122 bp, Homo sapiens
  misc_feature (61)..(62): /note="This region represents a CpG dinucleotide"
  misc_feature (61)..(61): /note="Nucleotide may be methylated to form 5-methylcytosine"
acactttatttgggcttcgcctgcttttgtggaagggtagtttactagaggatataatctcgtgttttaatttgctctctctcctaaaggaaatgtggagaaaaaaaaaaagcagaaattgg

SEQ ID NO: 20471 - DNA, 122 bp, Homo sapiens
  misc_feature (61)..(62): /note="This region represents a CpG dinucleotide"
  misc_feature (61)..(61): /note="Nucleotide may be methylated to form 5-methylcytosine"
tcatggcatttcctttttccataattgttttaccttaagttgccacccagagataagcttcgcccacagtatatttctctaatgccaccagactggcatttttgtaattcaaatattctctt

SEQ ID NO: 20472 - DNA, 122 bp, Homo sapiens
  misc_feature (61)..(62): /note="This region represents a CpG dinucleotide"
  misc_feature (61)..(61): /note="Nucleotide may be methylated to form 5-methylcytosine"
gagcgaggggcctccgacttggccccggcctggcacaccgtcccggaggcccatcccggccgctcctccaggtggggcttcaccgccccccgccccgcccccgagaccagcttctagaggcg

SEQ ID NO: 20473 - DNA, 122 bp, Homo sapiens
  misc_feature (61)..(62): /note="This region represents a CpG dinucleotide"
  misc_feature (61)..(61): /note="Nucleotide may be methylated to form 5-methylcytosine"
acagcgggggctcccgggaggtaggggaggtggccagaccggtggggggctccgccatgccgtgcaagtgctcagggccgcctcaccctccatctggccccagcccatgccggccttccctc

SEQ ID NO: 20474 - DNA, 122 bp, Homo sapiens
  misc_feature (61)..(62): /note="This region represents a CpG dinucleotide"
  misc_feature (61)..(61): /note="Nucleotide may be methylated to form 5-methylcytosine"
ttcaagcatattcttaattatttaaaaaagaactgaaagtctacttcaggcaacacatcacgggaagtagctgtgactcagttcctgtctttatgagctaagtcacatggggacaagcaggg

SEQ ID NO: 20475 - DNA, 122 bp, Homo sapiens
  misc_feature (61)..(62): /note="This region represents a CpG dinucleotide"
  misc_feature (61)..(61): /note="Nucleotide may be methylated to form 5-methylcytosine"
gagggttcctgtatgtccacacccctgccaattcttgacatcatgctgattcacaactttcggcagtgtaatgagtgtgaaatgttatcttttttaaaaaaattatatttctgattactaat

SEQ ID NO: 20476 - DNA, 122 bp, Homo sapiens
  misc_feature (61)..(62): /note="This region represents a CpG dinucleotide"
  misc_feature (61)..(61): /note="Nucleotide may be methylated to form 5-methylcytosine"
tccacagctttccctcctgcctttcctctggttctttatttcagtcttttttgcatacatcggtagagatgcagaaatagaacaaagaaacgggcaaatgggctaaattatagtgaaccaaa

SEQ ID NO: 20477 - DNA, 122 bp, Homo sapiens
  misc_feature (61)..(62): /note="This region represents a CpG dinucleotide"
  misc_feature (61)..(61): /note="Nucleotide may be methylated to form 5-methylcytosine"
taattctacctgtggctaggaggattcttctgagtattaggcaagggaacatatgtcaaacgcttagcacattgcccagcacgtaaagcgcttagccagtgtttgcagctgtatgataatcc

SEQ ID NO: 20478 - DNA, 122 bp, Homo sapiens
  misc_feature (61)..(62): /note="This region represents a CpG dinucleotide"
  misc_feature (61)..(61): /note="Nucleotide may be methylated to form 5-methylcytosine"
gtctgtcttttcacatgacagtctcttttttgtgtgtctgtctttgtgtctctgtgtctccgtgtctccttgtaactgcccaatgggctcaccttgcccgctgcctagacagaagcgatttc

SEQ ID NO: 20479 - DNA, 122 bp, Homo sapiens
  misc_feature (61)..(62): /note="This region represents a CpG dinucleotide"
  misc_feature (61)..(61): /note="Nucleotide may be methylated to form 5-methylcytosine"
aacagaaggggagggcctcagtagctcccacttcttttccagcccacatttggaagcaaccggcacccacgcaggttctggaacttgccaaggtcagtgtcttttccacctccagaattatc

SEQ ID NO: 20480 - DNA, 122 bp, Homo sapiens
  misc_feature (61)..(62): /note="This region represents a CpG dinucleotide"
  misc_feature (61)..(61): /note="Nucleotide may be methylated to form 5-methylcytosine"
cttttgggtacctgaatacaatttcatggatggctagacctgggcactctaaaagatttacgactcattttgttaactataggtgccccggaaatgaattaaagcctcagtaaaataattaa

SEQ ID NO: 20481 - DNA, 122 bp, Homo sapiens
  misc_feature (61)..(62): /note="This region represents a CpG dinucleotide"
  misc_feature (61)..(61): /note="Nucleotide may be methylated to form 5-methylcytosine"
ttacgttaagtgaaataagtcaggcacagaaagacaaatactacatgttctcaccatatgcggaagcttaagaagttgacttcacagaagtagagtataaatagtggttattagaggctggg

SEQ ID NO: 20482 - DNA, 122 bp, Homo sapiens
  misc_feature (61)..(62): /note="This region represents a CpG dinucleotide"
  misc_feature (61)..(61): /note="Nucleotide may be methylated to form 5-methylcytosine"
gttcaggactgagggccagggacgggccacaggctccctgcctggggtccaagcctagatcgctcgctccccacccgcaccaaagcccaggcaaagggtgcttcagccacttcctgttgcag

SEQ ID NO: 20483 - DNA, 122 bp, Homo sapiens
  misc_feature (61)..(62): /note="This region represents a CpG dinucleotide"
  misc_feature (61)..(61): /note="Nucleotide may be methylated to form 5-methylcytosine"
agagcaggaatcaattcttggtggagaaaataatctatgactagatgacgcttaaaggcacgacaagagattttatgaagttcccctaacggagggaataatgaagtgcctggcagagaagg

SEQ ID NO: 20484 - DNA, 122 bp, Homo sapiens
  misc_feature (61)..(62): /note="This region represents a CpG dinucleotide"
  misc_feature (61)..(61): /note="Nucleotide may be methylated to form 5-methylcytosine"
cagtcattgttacagtcacacatacctggaagaagcaatggtccctgcatttctgtggtacgggtatcccacgccagccagccctggaagctctctactgtgccgtaagccaaccacctttc

SEQ ID NO: 20485 - DNA, 122 bp, Homo sapiens
  misc_feature (61)..(62): /note="This region represents a CpG dinucleotide"
  misc_feature (61)..(61): /note="Nucleotide may be methylated to form 5-methylcytosine"
ggggctgggtgagctggttccacaagatggtttctgcttgacctgggcagctgagccggacgtgggctgtgggtacccaaccgtttggattctcagcagagccctggggaagggaggcactg

SEQ ID NO: 20486 - DNA, 122 bp, Homo sapiens
  misc_feature (61)..(62): /note="This region represents a CpG dinucleotide"
  misc_feature (61)..(61): /note="Nucleotide may be methylated to form 5-methylcytosine"
gaagcatttgtggttagtgagtcaaaaagcaccaccgtttagctgcacttggtgtagttgcgattagtgcctttctgttctgagagacatgtatggcactctttcataagatcttgttacat

SEQ ID NO: 20487 - DNA, 122 bp, Homo sapiens
  misc_feature (61)..(62): /note="This region represents a CpG dinucleotide"
  misc_feature (61)..(61): /note="Nucleotide may be methylated to form 5-methylcytosine"
ctcataatttacctcactaacctgtgtggttctggatggcacagagccaactgggactctcgtttttctcattctggtccctactcccttcttcgtgtgacctaagaccttaacagctgtgt

SEQ ID NO: 20488 - DNA, 122 bp, Homo sapiens
  misc_feature (61)..(62): /note="This region represents a CpG dinucleotide"
  misc_feature (61)..(61): /note="Nucleotide may be methylated to form 5-methylcytosine"
agactccgtctcaaagaaaaaaaaaaaaaagagaactacagaccaacacccctacaaccacggatgcaaagatctttggtaagacacaagcaaagtgattccagcaatgccaggagcaaggt

SEQ ID NO: 20489 - DNA, 122 bp, Homo sapiens
  misc_feature (61)..(62): /note="This region represents a CpG dinucleotide"
  misc_feature (61)..(61): /note="Nucleotide may be methylated to form 5-methylcytosine"
aacttgcttaagcttctatggccaataatagtgagcagactccagtctgactccaaagcccgtgctattcccctcacacctctctcccttccccagctcaaaaaggcctatttttctaactg

SEQ ID NO: 20490 - DNA, 122 bp, Homo sapiens
  misc_feature (61)..(62): /note="This region represents a CpG dinucleotide"
  misc_feature (61)..(61): /note="Nucleotide may be methylated to form 5-methylcytosine"
cttcttcaatcctaacattcacagttccttctaccacatggcttctaacgtctctcatcacgcaagtctcactccttttgagccaatctagcctactaatccattctgttaatgttcctctg

SEQ ID NO: 20491 - DNA, 122 bp, Homo sapiens
  misc_feature (61)..(62): /note="This region represents a CpG dinucleotide"
  misc_feature (61)..(61): /note="Nucleotide may be methylated to form 5-methylcytosine"
ggaaactggtgtggccactttacaggtcatgagcaggactcaggtgtcctccaggtcacacggatggtaagaaagaagcagggctggatttcatctcagatgatctggtttccagtcatgct

SEQ ID NO: 20492 - DNA, 122 bp, Homo sapiens
  misc_feature (61)..(62): /note="This region represents a CpG dinucleotide"
  misc_feature (61)..(61): /note="Nucleotide may be methylated to form 5-methylcytosine"
tttggaaccacttatataatgtataccacctgttatttgtgtatttttagaagtgggagtcgggtaatcctagtcctgtcagtaaaagagcaaactgtttaccagaagcagagcttttttct

SEQ ID NO: 20493 - DNA, 122 bp, Homo sapiens
  misc_feature (61)..(62): /note="This region represents a CpG dinucleotide"
  misc_feature (61)..(61): /note="Nucleotide may be methylated to form 5-methylcytosine"
tgcaaagccccccaggctttatttagcttagaagcagcaaagccatcaagttccctcaggcgtttattatttcgcaggcattttcaaacacatgatttttttctggccttttacgtccttga

SEQ ID NO: 20494 - DNA, 122 bp, Homo sapiens
  misc_feature (61)..(62): /note="This region represents a CpG dinucleotide"
  misc_feature (61)..(61): /note="Nucleotide may be methylated to form 5-methylcytosine"
cacaggcacctcttcccaagccccagagggatactgtgaaacttaatgaggaaatgagaacggagtgcacagcagagtgcactcatgtagtgagtgcttgtgaatgtcagctttaaacgtaa

SEQ ID NO: 20495 - DNA, 122 bp, Homo sapiens
  misc_feature (61)..(62): /note="This region represents a CpG dinucleotide"
  misc_feature (61)..(61): /note="Nucleotide may be methylated to form 5-methylcytosine"
tttcctctctctctggggctcgattgcctaatatggtaaggtatttcccagacaagattgcgctgtggagttagaacaacagtttgtctaagtttaaagacatggtaggtgagctatctaat

SEQ ID NO: 20496 - DNA, 122 bp, Homo sapiens
  misc_feature (61)..(62): /note="This region represents a CpG dinucleotide"
  misc_feature (61)..(61): /note="Nucleotide may be methylated to form 5-methylcytosine"
tgtgctcttggcctcataatccttggccatgttgtccagttgaaagtatttatggctgggcgctgtggctcacacctgtaatcctggcactttgggagactgaggcgggtggatcatgaggt

SEQ ID NO: 20497 - DNA, 122 bp, Homo sapiens
  misc_feature (61)..(62): /note="This region represents a CpG dinucleotide"
  misc_feature (61)..(61): /note="Nucleotide may be methylated to form 5-methylcytosine"
tggcctggcttgactagctgaatgcttgaagcactctttgcttatccttcctgttcattacgttaaccaggaaacttcccatggccgtggttctgtattaacattttctgaacagcgtgctc

SEQ ID NO: 20498 - DNA, 122 bp, Homo sapiens
  misc_feature (61)..(62): /note="This region represents a CpG dinucleotide"
  misc_feature (61)..(61): /note="Nucleotide may be methylated to form 5-methylcytosine"
cagggaagcagggactcctggggtacagcaaaaggtacttgtgctacattcatcctcgggcgtccatgaaggctttagcgcctcactgaggaaagcagaggaagcatgaaagcaaactatga

SEQ ID NO: 20499 - DNA, 122 bp, Homo sapiens
  misc_feature (61)..(62): /note="This region represents a CpG dinucleotide"
  misc_feature (61)..(61): /note="Nucleotide may be methylated to form 5-methylcytosine"
acagagtggtgtctccctagggttacagattggagcaggtggtgggcactccaggacccccgctgcagggcccgcacctctctgctcacctctctagggaggggtgagctggaggcagcagg

SEQ ID NO: 20500 - DNA, 122 bp, Homo sapiens
  misc_feature (61)..(62): /note="This region represents a CpG dinucleotide"
  misc_feature (61)..(61): /note="Nucleotide may be methylated to form 5-methylcytosine"
tctgtgagtgtgtgtgaatgtatgtgtgtgtgtgtgtgtgtgtctctgtgtgtgagagagcgagcgagcgtgtatgttctcattaggggacgatctatgatttgacagcctcactgctgctg

SEQ ID NO: 20501 - DNA, 122 bp, Homo sapiens
  misc_feature (61)..(62): /note="This region represents a CpG dinucleotide"
  misc_feature (61)..(61): /note="Nucleotide may be methylated to form 5-methylcytosine"
ttccttctgccctgtaataataggctgcctggggctcactgggctatggtttaaaaagtccgcaggtggcttctcctctctccagctaggctggctggaaagggagggcaggattgtgtgtc

SEQ ID NO: 20502 - DNA, 122 bp, Homo sapiens
  misc_feature (61)..(62): /note="This region represents a CpG dinucleotide"
  misc_feature (61)..(61): /note="Nucleotide may be methylated to form 5-methylcytosine"
tgctcacttaacctctgctctccagttacactcaggatagaatacatggaaagcacctggcgtattcagcagctcaacttatgttagtatttttcctccttcctcctccccggccacctaca

SEQ ID NO: 20503 - DNA, 122 bp, Homo sapiens
  misc_feature (61)..(62): /note="This region represents a CpG dinucleotide"
  misc_feature (61)..(61): /note="Nucleotide may be methylated to form 5-methylcytosine"
taacttctatttcagttactttctctttccataatgatagtcattcatgtcttaaatcaccgttagtaacagataatattaattgattttctatggatttttatttagcagatgtacaaggg

SEQ ID NO: 20504 - DNA, 122 bp, Homo sapiens
  misc_feature (61)..(62): /note="This region represents a CpG dinucleotide"
  misc_feature (61)..(61): /note="Nucleotide may be methylated to form 5-methylcytosine"
aagagcccacacatgttagaaacagtcagtcctgtgttcagattccccttcccctgacaccgccgtggtggggagtccctgtgggggcagtcacttctttcttctaacctgagtctgactca

SEQ ID NO: 20505 - DNA, 122 bp, Homo sapiens
  misc_feature (61)..(62): /note="This region represents a CpG dinucleotide"
  misc_feature (61)..(61): /note="Nucleotide may be methylated to form 5-methylcytosine"
ttgaattaaaaagtacatccggcttgaaggctgactcatactaaattatagtgccctatgcgtaagtacagattaaaaggcatatttaattagttcttttaagaatttctccccacaaacct

SEQ ID NO: 20506 - DNA, 122 bp, Homo sapiens
  misc_feature (61)..(62): /note="This region represents a CpG dinucleotide"
  misc_feature (61)..(61): /note="Nucleotide may be methylated to form 5-methylcytosine"
acattttctcatgtacttattctccgtccctcaagccttccagcaccctgtgaaatagggcgggcattattactaagcccattttcacagaggatgaggatgacagggcagggagttgccca

SEQ ID NO: 20507 - DNA, 122 bp, Homo sapiens
  misc_feature (61)..(62): /note="This region represents a CpG dinucleotide"
  misc_feature (61)..(61): /note="Nucleotide may be methylated to form 5-methylcytosine"
ccacaggcaaccattccttactcatacaagagcggatacattatcataggtatcttacaccgtgtcagcagttattcaaaagccaatctttaaattatgcagcttttctgcctcaactggtc

SEQ ID NO: 20508 - DNA, 122 bp, Homo sapiens
  misc_feature (61)..(62): /note="This region represents a CpG dinucleotide"
  misc_feature (61)..(61): /note="Nucleotide may be methylated to form 5-methylcytosine"
actgtcatttaggtggggacaaactaaggtccagtaacttccctgtgtctgttcttcctccgtccccctcccccgtgactctgagtcctgcagaccagcccttgggcatgttttgggtcacc

SEQ ID NO: 20509 - DNA, 122 bp, Homo sapiens
  misc_feature (61)..(62): /note="This region represents a CpG dinucleotide"
  misc_feature (61)..(61): /note="Nucleotide may be methylated to form 5-methylcytosine"
tagttatagcaatggatttatgcagagtcacctacctggtggtatcaaattgccatataccgggtacatagtttatttttaagcttaatctctctttgaatcagtttcctcatgtgtaaggt

SEQ ID NO: 20510 - DNA, 122 bp, Homo sapiens
  misc_feature (61)..(62): /note="This region represents a CpG dinucleotide"
  misc_feature (61)..(61): /note="Nucleotide may be methylated to form 5-methylcytosine"
ttggcattttgtacatatgaatcagaagattatttttctcattcctgaagggtgactccacgtaagcataagatattcctttgttgtggctctgttctaggtgtgacacttatccttgcagt

SEQ ID NO: 20511 - DNA, 122 bp, Homo sapiens
  misc_feature (61)..(62): /note="This region represents a CpG dinucleotide"
  misc_feature (61)..(61): /note="Nucleotide may be methylated to form 5-methylcytosine"
gaagcattagcctgcctctttgagagggatgaggagttctcggcttctatatttgaaaatcgaaaaataaatattttccttggtacagctgtgaagatagaaataaatgagattgtgtatgt

SEQ ID NO: 20512 - DNA, 122 bp, Homo sapiens
  misc_feature (61)..(62): /note="This region represents a CpG dinucleotide"
  misc_feature (61)..(61): /note="Nucleotide may be methylated to form 5-methylcytosine"
tcatgtgtaaaattggtgagtaatgcatgtctgttgtcattagacaactgaggtcatctacggaaactccttgttcaggccatggctcttggcagtgctcactatgagtgcgatttgggtag

SEQ ID NO: 20513 - DNA, 122 bp, Homo sapiens
  misc_feature (61)..(62): /note="This region represents a CpG dinucleotide"
  misc_feature (61)..(61): /note="Nucleotide may be methylated to form 5-methylcytosine"
caatacaaatacagcaggtcctcagacaacctcatttcattcaatgccatttccttataacgttgatgagaaaaaacattcccagcctaggccactgtctgtgtggagtttgcacattctcc

SEQ ID NO: 20514 - DNA, 122 bp, Homo sapiens
  misc_feature (61)..(62): /note="This region represents a CpG dinucleotide"
  misc_feature (61)..(61): /note="Nucleotide may be methylated to form 5-methylcytosine"
agatcactcagagtcattctgtattctgcccatatcctcctcttctggtttgattggaatcgtatgtgctttgggaggaatgagataagatatggcaaaggctgagaaattgaggaatctga

SEQ ID NO: 20515 - DNA, 122 bp, Homo sapiens
  misc_feature (61)..(62): /note="This region represents a CpG dinucleotide"
  misc_feature (61)..(61): /note="Nucleotide may be methylated to form 5-methylcytosine"
aggagaggtttggattgactgcccaggccagctcagaagaggaaattctgaaaggggatccgtctttgtcatattccctgaatcaagtgtttctggctgcagctgcctagccaggtgttttg

SEQ ID NO: 20516 - DNA, 122 bp, Homo sapiens
  misc_feature (61)..(62): /note="This region represents a CpG dinucleotide"
  misc_feature (61)..(61): /note="Nucleotide may be methylated to form 5-methylcytosine"
aatttttgccctttaaacatgtaaagctttatttactgtgggcctgtactgtgttggtggcgatttaaagatggaagggtggtgttcctgcccttagggattctcagcccatatagaagctg

SEQ ID NO: 20517 - DNA, 122 bp, Homo sapiens
  misc_feature (61)..(62): /note="This region represents a CpG dinucleotide"
  misc_feature (61)..(61): /note="Nucleotide may be methylated to form 5-methylcytosine"
agtcaggtggcctgggctcctccaccctcgctaacagctaactccatggccatggacacacgcttgtgccacaggtgcagactttctaaagacttaggttttggagatctctctggtctccg

SEQ ID NO: 20518 - DNA, 122 bp, Homo sapiens
  misc_feature (61)..(62): /note="This region represents a CpG dinucleotide"
  misc_feature (61)..(61): /note="Nucleotide may be methylated to form 5-methylcytosine"
actgtagcctgggtgatttatacagaacagaaatgtatttctcaaggtgtcagtgggttgcgtggtgagggctgctgtctgcttcccatgtggcatcctatggctttatcctccagaaggaa

SEQ ID NO: 20519 - DNA, 122 bp, Homo sapiens
  misc_feature (61)..(62): /note="This region represents a CpG dinucleotide"
  misc_feature (61)..(61): /note="Nucleotide may be methylated to form 5-methylcytosine"
gtttttcccagtgttaaggtgctcccaccctcatcccacacccagcatcacccagggcaccgccactttgagatcctgagggcacatctgacaatggagcattcaggaaggccttctcagat

SEQ ID NO: 20520 - DNA, 122 bp, Homo sapiens
  misc_feature (61)..(62): /note="This region represents a CpG dinucleotide"
  misc_feature (61)..(61): /note="Nucleotide may be methylated to form 5-methylcytosine"
aaccatatcccctccctgatctcactctgatgattacatctgtctcatatttcagtctctcgctcttgccttactcctttcttgcatccattaatatttcaggtttcattagaaaaatacct

SEQ ID NO: 20521 - DNA, 122 bp, Homo sapiens
  misc_feature (61)..(62): /note="This region represents a CpG dinucleotide"
  misc_feature (61)..(61): /note="Nucleotide may be methylated to form 5-methylcytosine"
atcaggtctcggtctctgtagaggaaatgtccttggtctagaaggctctgaaggcctttgcggtgagatgctgggtgatgcctgtgttaccttcataaatgcacattagtccctccagggca

SEQ ID NO: 20522 - DNA, 122 bp, Homo sapiens
  misc_feature (61)..(62): /note="This region represents a CpG dinucleotide"
  misc_feature (61)..(61): /note="Nucleotide may be methylated to form 5-methylcytosine"
agggtggctatagctcaggagagtgctcgaaaaaccccatgcatagctcaaaaaaccccacgcgtagctcagatgctctcaggctcaggtgcctaccgaggatgtcacgcattcccagtgct

SEQ ID NO: 20523 - DNA, 122 bp, Homo sapiens
  misc_feature (61)..(62): /note="This region represents a CpG dinucleotide"
  misc_feature (61)..(61): /note="Nucleotide may be methylated to form 5-methylcytosine"
gcacgctgagcattttgccatcacagatgcctctctaaacgtctctagctcaagtaataacggagctgcctaattgcagtcattaaggagcctgtgactttaaatgacaaaggtagagatgc

SEQ ID NO: 20524 - DNA, 122 bp, Homo sapiens
  misc_feature (61)..(62): /note="This region represents a CpG dinucleotide"
  misc_feature (61)..(61): /note="Nucleotide may be methylated to form 5-methylcytosine"
atgagccgtgtacaagttacattgatggttggtctgggtttctgattcttgaaaaacactcgagcagaacatttccccaaacgtccctcaccttcctgaagtaaagactgtggagttaaaca

SEQ ID NO: 20525 - DNA, 122 bp, Homo sapiens
  misc_feature (61)..(62): /note="This region represents a CpG dinucleotide"
  misc_feature (61)..(61): /note="Nucleotide may be methylated to form 5-methylcytosine"
gaagttgtggatgtgaggagctctgcaaactaggacacacacagtacctgcagaagacaccgtcacctgctgcacccacagccctgcacaactcagggctgctctcgagaggagagtgcagg

SEQ ID NO: 20526 - DNA, 122 bp, Homo sapiens
  misc_feature (61)..(62): /note="This region represents a CpG dinucleotide"
  misc_feature (61)..(61): /note="Nucleotide may be methylated to form 5-methylcytosine"
catttttcacctgctgactaaatatccctcgggccctgaataatcagcagcatggctgggcgcggtggctcatgcctgtaatcccagcactttgggaggccgaggtgggtggatcacttgag

SEQ ID NO: 20527 - DNA, 122 bp, Homo sapiens
  misc_feature (61)..(62): /note="This region represents a CpG dinucleotide"
  misc_feature (61)..(61): /note="Nucleotide may be methylated to form 5-methylcytosine"
gggagcctgttcagaaatttctcagcagtcatcctggagcctacaggcagagttgggaaccggggcccaggaaggactatgagtggtggtggagcccccctggagtttgttctgcagtcccc

SEQ ID NO: 20528 - DNA, 122 bp, Homo sapiens
  misc_feature (61)..(62): /note="This region represents a CpG dinucleotide"
  misc_feature (61)..(61): /note="Nucleotide may be methylated to form 5-methylcytosine"
tttcctacttagcaaaattcagccagagtactaatagcctgggaatacacccagaatcggcgtgggagggagaaggggtgtcagagaccagaagaaaaagtgaaagctgtctgctgaaatca

SEQ ID NO: 20529 - DNA, 122 bp, Homo sapiens
  misc_feature (61)..(62): /note="This region represents a CpG dinucleotide"
  misc_feature (61)..(61): /note="Nucleotide may be methylated to form 5-methylcytosine"
aaacttagatggtatagcctactacacatctaggctttattatatagcttattgctcttacgctacaaacctgtatagcatgttactatatttagtactatagacaattgtaacagaatggt

SEQ ID NO: 20530 - DNA, 122 bp, Homo sapiens
  misc_feature (61)..(62): /note="This region represents a CpG dinucleotide"
  misc_feature (61)..(61): /note="Nucleotide may be methylated to form 5-methylcytosine"
aaggtgaatctcctgcctgacaccttgtagagattagtgtatccagctattctattgccacgatgcctctaaaaaccagactgactgggaacagcagtagggggttggccagtgagggcagg

SEQ ID NO: 20531 - DNA, 122 bp, Homo sapiens
  misc_feature (61)..(62): /note="This region represents a CpG dinucleotide"
  misc_feature (61)..(61): /note="Nucleotide may be methylated to form 5-methylcytosine"
tacaatactttgcatacttcagtcaagtagacagtcaatattaatcaccacattctccaacgctttctcatacaggttctatttctccactatgaacagtgagattttttttctggtatact

SEQ ID NO: 20532 - DNA, 122 bp, Homo sapiens
  misc_feature (61)..(62): /note="This region represents a CpG dinucleotide"
  misc_feature (61)..(61): /note="Nucleotide may be methylated to form 5-methylcytosine"
ctataaaacaagataaaaataagtgggcaaactagtatgacgttaaagagaaggaaaatacgaaaccagaacagtgtgacaaatcggccaaccagaggattttatagtgtttttgagatcaa

SEQ ID NO: 20533 - DNA, 122 bp, Homo sapiens
  misc_feature (61)..(62): /note="This region represents a CpG dinucleotide"
  misc_feature (61)..(61): /note="Nucleotide may be methylated to form 5-methylcytosine"
ctaatacaaagacttggttctgttcctcctcagtgaagatccccttttccttctcctcctcgtctttacagtatccagtgcagtggtttcaggacaataaatgctacttactgaagaggaag

SEQ ID NO: 20534 - DNA, 122 bp, Homo sapiens
  misc_feature (61)..(62): /note="This region represents a CpG dinucleotide"
  misc_feature (61)..(61): /note="Nucleotide may be methylated to form 5-methylcytosine"
catgataaaccagatgctgccagtgatatcttggctgggtccacaagaactatcaagtgccgtgaaaggaacatgggttttagagtccaagactctgggcttgcatgctggctctgccccca

SEQ ID NO: 20535 - DNA, 122 bp, Homo sapiens
  misc_feature (61)..(62): /note="This region represents a CpG dinucleotide"
  misc_feature (61)..(61): /note="Nucleotide may be methylated to form 5-methylcytosine"
ttatagcagataccagtaggatcccagattcttcctggcctttatctgttccttcaaaaacgctgtgcaagtctgggcatcttcccaccctgcctctcccttcttctttctctctccacccc

SEQ ID NO: 20536 - DNA, 122 bp, Homo sapiens
  misc_feature (61)..(62): /note="This region represents a CpG dinucleotide"
  misc_feature (61)..(61): /note="Nucleotide may be methylated to form 5-methylcytosine"
tctgcaccctcccttctctgtggtaatagtgagcactctgcttcactggattcatctgaacgccagcaccagcagcctcctgaggaatgcttgtttaagatagtggtaagagaaaaaagcag

SEQ ID NO: 20537 - DNA, 122 bp, Homo sapiens
  misc_feature (61)..(62): /note="This region represents a CpG dinucleotide"
  misc_feature (61)..(61): /note="Nucleotide may be methylated to form 5-methylcytosine"
ttattatactctgatacagctttttaatcaaaacatccccaaattgttgatatttgaactcgtttctctgagaactgtcatgtcttttcagaagatgcaatcagtcttctgaaggatataag

SEQ ID NO: 20538 - DNA, 122 bp, Homo sapiens
  misc_feature (61)..(62): /note="This region represents a CpG dinucleotide"
  misc_feature (61)..(61): /note="Nucleotide may be methylated to form 5-methylcytosine"
tcacacccacttctgactcaggccccaacaagcccttgctagcccagcttccccctcccccgcccaggcaatacaggcttctgcaacccctgactctgggatgtgaggcagaatccagagac

SEQ ID NO: 20539 - DNA, 122 bp, Homo sapiens
  misc_feature (61)..(62): /note="This region represents a CpG dinucleotide"
  misc_feature (61)..(61): /note="Nucleotide may be methylated to form 5-methylcytosine"
agcagagaattcatcagtagggcaatttctgccggctgttggagaatcagcacatgccagcgtgagacactataatgaatcattatcgttagtaattcataacggattcattccaagaaaat

SEQ ID NO: 20540 - DNA, 122 bp, Homo sapiens
  misc_feature (61)..(62): /note="This region represents a CpG dinucleotide"
  misc_feature (61)..(61): /note="Nucleotide may be methylated to form 5-methylcytosine"
cctaagaacagaggtcaatagaaggaaaaacaaaaccacaagcagttctccaaagaccaacgagactgataaattctagacagactgatccagagagagaggacagatcaccaatacccaga

SEQ ID NO: 20541 - DNA, 122 bp, Homo sapiens
  misc_feature (61)..(62): /note="This region represents a CpG dinucleotide"
  misc_feature (61)..(61): /note="Nucleotide may be methylated to form 5-methylcytosine"
tccagcccatgggctgcaccgtttcatcctgctttgcggctgtttctcaaacttcaacgccgggactcagggcttgggaacaagctgggaggatttgctgaaagctgcacagtatgaatcac

SEQ ID NO: 20542 - DNA, 122 bp, Homo sapiens
  misc_feature (61)..(62): /note="This region represents a CpG dinucleotide"
  misc_feature (61)..(61): /note="Nucleotide may be methylated to form 5-methylcytosine"
aagcagccttctgtgggttgtggtttcagtgtcagctcccagttcccctttcaaagccttcgctgtgctgtttgaacctgccccacgtgtgtgccccgcaccccaccccggtctcccctgag

SEQ ID NO: 20543 - DNA, 122 bp, Homo sapiens
  misc_feature (61)..(62): /note="This region represents a CpG dinucleotide"
  misc_feature (61)..(61): /note="Nucleotide may be methylated to form 5-methylcytosine"
tcaacaattgtaaaggtcacatgctgacgcgacagttgctgaggctgtgatgcaaacgcacgcaggaagcgttgtgcaagcaggctctggagacccgcaggctcctgggcagagggctgcct

SEQ ID NO: 20544 - DNA, 122 bp, Homo sapiens
  misc_feature (61)..(62): /note="This region represents a CpG dinucleotide"
  misc_feature (61)..(61): /note="Nucleotide may be methylated to form 5-methylcytosine"
cttttatttaaatgattggaatataaatcctgtttttcagatctgatttcttgacatttgcggggaacactagcatatctgttgcttttgttttaggaacaaaagtaaactctgtagggagt

SEQ ID NO: 20545 - DNA, 122 bp, Homo sapiens
  misc_feature (61)..(62): /note="This region represents a CpG dinucleotide"
  misc_feature (61)..(61): /note="Nucleotide may be methylated to form 5-methylcytosine"
tcacgaaattgattttcaacatacaacgcaagattttcatctttttgagatccagcctcacgagggacatatgaattttcattcagcagcctggaggagaaaatgccttttaaatgaactta

SEQ ID NO: 20546 - DNA, 122 bp, Homo sapiens
  misc_feature (61)..(62): /note="This region represents a CpG dinucleotide"
  misc_feature (61)..(61): /note="Nucleotide may be methylated to form 5-methylcytosine"
atctcctgcagcagggacttcattgcatcttcacttggtcttcctgtgccctcctatggacgccccacccccaccagctctgtgtgtgtgtgtgtgtgtgtgtgtgtgtgtgtgtgtgtgtg

SEQ ID NO: 20547 - DNA, 122 bp, Homo sapiens
  misc_feature (61)..(62): /note="This region represents a CpG dinucleotide"
  misc_feature (61)..(61): /note="Nucleotide may be methylated to form 5-methylcytosine"
aaaatagttacaacactcttgatatgtctcagcatctatagacattaacatcaggaaaagcgggggtgtggggggaaggaatttgtcagggagggccctttggacaaatgtcacgtttctca

SEQ ID NO: 20548 - DNA, 122 bp, Homo sapiens
  misc_feature (61)..(62): /note="This region represents a CpG dinucleotide"
  misc_feature (61)..(61): /note="Nucleotide may be methylated to form 5-methylcytosine"
aagaagaagatggtggatccaggagtctcaaggccacggtgaaaggagcctgcggaaaggcggtgaggtggcttaaacagtggtggggagaggctagctggcagacttttaagaacaaggaa

SEQ ID NO: 20549 - DNA, 122 bp, Homo sapiens
  misc_feature (61)..(62): /note="This region represents a CpG dinucleotide"
  misc_feature (61)..(61): /note="Nucleotide may be methylated to form 5-methylcytosine"
ttttacagggctgttgtaaggcttacctgaatttcatatatgtaaagtgctggctcataccgtgggatatatgtttacaatagttatcaataagcaaataagtgaaaatatgccgcacaaag

SEQ ID NO: 20550 - DNA, 122 bp, Homo sapiens
  misc_feature (61)..(62): /note="This region represents a CpG dinucleotide"
  misc_feature (61)..(61): /note="Nucleotide may be methylated to form 5-methylcytosine"
caaaaatctagtcaagatagagacgcggttactaaattatagtaaaggtaaggagggagacgtagaaatagtcatgaagagtggcactcaaacgacttaagtttgggaaatcttagatggtt

SEQ ID NO: 20551 - DNA, 122 bp, Homo sapiens
  misc_feature (61)..(62): /note="This region represents a CpG dinucleotide"
  misc_feature (61)..(61): /note="Nucleotide may be methylated to form 5-methylcytosine"
ttgctttaccttttaaatggaaataatagtgacataatgtaatgtgatatttgcaaagcacgtggcttagtgcttagcaaagagtaaatgtttaatagtgttatctagttcttatttttggt

SEQ ID NO: 20552 - DNA, 122 bp, Homo sapiens
  misc_feature (61)..(62): /note="This region represents a CpG dinucleotide"
  misc_feature (61)..(61): /note="Nucleotide may be methylated to form 5-methylcytosine"
tccactcaaggactaggaactgaatctctgcacccttaaaaccactctcttagccgggcgcggtggctcatacctgtaatcccagcactttgggaggccaaggcaggtggatcacgaggtca

SEQ ID NO: 20553 - DNA, 122 bp, Homo sapiens
  misc_feature (61)..(62): /note="This region represents a CpG dinucleotide"
  misc_feature (61)..(61): /note="Nucleotide may be methylated to form 5-methylcytosine"
ccagcttggacaacatagggagactccatctcaaataatttactgatatttgtaaataaacgaacagggtggtttcagactgtgataaatactaagcaaatcagggtaatgtgactcagggt

SEQ ID NO: 20554 - DNA, 122 bp, Homo sapiens
  misc_feature (61)..(62): /note="This region represents a CpG dinucleotide"
  misc_feature (61)..(61): /note="Nucleotide may be methylated to form 5-methylcytosine"
ccctctgggttctctagagcaacagcaatacccgcccggcaggggtgtggcttagagccccgcacctcctcgccgcgcggcgggcctgacttctagccacgggtctccgcagttggcccagc

SEQ ID NO: 20555 - DNA, 122 bp, Homo sapiens
  misc_feature (61)..(62): /note="This region represents a CpG dinucleotide"
  misc_feature (61)..(61): /note="Nucleotide may be methylated to form 5-methylcytosine"
gaagatagggatggggaccccgaacttgaaccactctacgacatagggtgggggctgtcccgtcactgggtggatcacgtcgcatcgcaggaccacgctctccccagctcttgccgtcacaa

SEQ ID NO: 20556 - DNA, 122 bp, Homo sapiens
  misc_feature (61)..(62): /note="This region represents a CpG dinucleotide"
  misc_feature (61)..(61): /note="Nucleotide may be methylated to form 5-methylcytosine"
aggacattagtaaatgtccagaaacaacgggatgtccccagtgggtgggagcttccttcccgcttgatgcttgttcggcactgagtcctgtctactccacttcctggttcttgccactgtga

SEQ ID NO: 20557 - DNA, 122 bp, Homo sapiens
  misc_feature (61)..(62): /note="This region represents a CpG dinucleotide"
  misc_feature (61)..(61): /note="Nucleotide may be methylated to form 5-methylcytosine"
gtacagaactcttcctcagctcagattaaatgaagatttaagtgcagttaagtgtatacacgtgcactagagagtagacagaatcttcttgccaactgcttcatactaataaggacactgag

SEQ ID NO: 20558 - DNA, 122 bp, Homo sapiens
  misc_feature (61)..(62): /note="This region represents a CpG dinucleotide"
  misc_feature (61)..(61): /note="Nucleotide may be methylated to form 5-methylcytosine"
caacacaactggagcagtattactctaactcttccacagattcttttctatcacccaaatcgcatgttttcccacaaccgatgtcacaaaagaggcctttaacagaaaagcctctggctctt

SEQ ID NO: 20559 - DNA, 122 bp, Homo sapiens
  misc_feature (61)..(62): /note="This region represents a CpG dinucleotide"
  misc_feature (61)..(61): /note="Nucleotide may be methylated to form 5-methylcytosine"
gtgacttgttttctttctctctcagagccctagtgttgaagaacatgtcacaccagcacacgccgccgtcgccagcagcaggaagttgttgatttgcagcatattcacactttctgatgcag

SEQ ID NO: 20560 - DNA, 122 bp, Homo sapiens
  misc_feature (61)..(62): /note="This region represents a CpG dinucleotide"
  misc_feature (61)..(61): /note="Nucleotide may be methylated to form 5-methylcytosine"
attgcaagaaatatttgcttaagcaatacatttattattcataggtcagagcttggaaagcggcaggtgcacaggagcccttgacaatggcaaagcatgatcacatgtttaccgccaagaca

SEQ ID NO: 20561 - DNA, 122 bp, Homo sapiens
  misc_feature (61)..(62): /note="This region represents a CpG dinucleotide"
  misc_feature (61)..(61): /note="Nucleotide may be methylated to form 5-methylcytosine"
agtagaatttgctgcgggagagctcactctagaaggggttctcaacgtctggcttccagacgagcagcaacagcattcactgggaacttgcataagtggaaattaggtgttgctcagcctta

SEQ ID NO: 20562 - DNA, 122 bp, Homo sapiens
  misc_feature (61)..(62): /note="This region represents a CpG dinucleotide"
  misc_feature (61)..(61): /note="Nucleotide may be methylated to form 5-methylcytosine"
caacactgaggattacaattcaacatgagtcttgggcagggacacaaatccaaaccatatcgggcatccttgattcttaacaaagtcgtggttgagtaagctgctgtttcctagaacacaat

SEQ ID NO: 20563 - DNA, 122 bp, Homo sapiens
  misc_feature (61)..(62): /note="This region represents a CpG dinucleotide"
  misc_feature (61)..(61): /note="Nucleotide may be methylated to form 5-methylcytosine"
ctcctttttctagaaagccactagagcagagttgctagtgaacagtttaatttccacatacgtcacagaaagagagctaaagggctctggttatcatccacagactgaccagtcaaccccta

SEQ ID NO: 20564 - DNA, 122 bp, Homo sapiens
  misc_feature (61)..(62): /note="This region represents a CpG dinucleotide"
  misc_feature (61)..(61): /note="Nucleotide may be methylated to form 5-methylcytosine"
gttgggctggagcccaaaagtgctcatcgaagccctggcacccgcttgcctgcgtgctcccgctcccacagagagtttgagcatggtggtggccaagtaagtaggccacacccctgtcgcaa

SEQ ID NO: 20565 - DNA, 122 bp, Homo sapiens
  misc_feature (61)..(62): /note="This region represents a CpG dinucleotide"
  misc_feature (61)..(61): /note="Nucleotide may be methylated to form 5-methylcytosine"
atttatttctcacagttctgaaagttggaaatccaggatccaggtgctagccaatctggtcgctggtgaggacccagagattcacagatgactcacagaaggcacctactcacagtgccctc

SEQ ID NO: 20566 - DNA, 122 bp, Homo sapiens
  misc_feature (61)..(62): /note="This region represents a CpG dinucleotide"
  misc_feature (61)..(61): /note="Nucleotide may be methylated to form 5-methylcytosine"
attgattttatggctaatacattaaaggaaaaggaagagctttgtaaacagaaggacttacggcttggtaatgtgtgagtattaccttccaaatattgctaaagaatgtatgtgctttagca

SEQ ID NO: 20567 - DNA, 122 bp, Homo sapiens
  misc_feature (61)..(62): /note="This region represents a CpG dinucleotide"
  misc_feature (61)..(61): /note="Nucleotide may be methylated to form 5-methylcytosine"
caaaacaggaaggggatgattatgaagtcattcctaacagtaatttctatgtatccagaacggcctgcagagataatacttctgtctatcacataagtggaaagaaaaagacatttaaggat

SEQ ID NO: 20568 - DNA, 122 bp, Homo sapiens
  misc_feature (61)..(62): /note="This region represents a CpG dinucleotide"
  misc_feature (61)..(61): /note="Nucleotide may be methylated to form 5-methylcytosine"
cgcggcctcggcagcccccggggcagctgcgcgtgctgcagtcttcccctgagtagcctgcgtcacacacgcacacgccatcctcgcaaaggccgtgcccacggcagtccccgggacagcga

SEQ ID NO: 20569 - DNA, 122 bp, Homo sapiens
  misc_feature (61)..(62): /note="This region represents a CpG dinucleotide"
  misc_feature (61)..(61): /note="Nucleotide may be methylated to form 5-methylcytosine"
cactctaactcacccatgaccaaaccaaagaacagcaactaagagatcactctgaatgagcgcactctgttctgctgacatatcagctctaacacagaaagggagaaaagaagttctcctga

SEQ ID NO: 20570 - DNA, 122 bp, Homo sapiens
  misc_feature (61)..(62): /note="This region represents a CpG dinucleotide"
  misc_feature (61)..(61): /note="Nucleotide may be methylated to form 5-methylcytosine"
caggctgtggagacagcgttagtcagcagcctcttctctcatgcatgccctgatctttaacgctccaacgtgcatctgtgacaatgacagcggattcctgactgtggccatggctcaggata

SEQ ID NO: 20571 - DNA, 122 bp, Homo sapiens
  misc_feature (61)..(62): /note="This region represents a CpG dinucleotide"
  misc_feature (61)..(61): /note="Nucleotide may be methylated to form 5-methylcytosine"
ataagatctgtgtttctggcttgcagacaagagcactgccgcactgaagcgtgtgtgggtcgtatatgtgacagagcacaggaggcctgcagcgaggtcccgacagggaggactttcttggg

SEQ ID NO: 20572 - DNA, 122 bp, Homo sapiens
  misc_feature (61)..(62): /note="This region represents a CpG dinucleotide"
  misc_feature (61)..(61): /note="Nucleotide may be methylated to form 5-methylcytosine"
gatctttttgtgtttatgccttatttattgggccctctcatagttgtggttttcatctatcgttactcctttccctgtactgctagactttccaggagaccttcatcagaaagattaatact

SEQ ID NO: 20573 - DNA, 122 bp, Homo sapiens
  misc_feature (61)..(62): /note="This region represents a CpG dinucleotide"
  misc_feature (61)..(61): /note="Nucleotide may be methylated to form 5-methylcytosine"
ccagacggcacgggcacgccctcacacctgccagcctgtggggtgagggacgcggcaatgcggcggtctgtcggcactgctggttcccagtctctcgcccaggctgccagtgacactgcgac

SEQ ID NO: 20574 - DNA, 122 bp, Homo sapiens
  misc_feature (61)..(62): /note="This region represents a CpG dinucleotide"
  misc_feature (61)..(61): /note="Nucleotide may be methylated to form 5-methylcytosine"
caaggattcaggtttgtagctcaatggggaagttggggctgaagataacgaccttaagagcgatcagcacagaaatatgagctgagcctataggcatgggtgggatcattaaggaaacatct

SEQ ID NO: 20575 - DNA, 122 bp, Homo sapiens
  misc_feature (61)..(62): /note="This region represents a CpG dinucleotide"
  misc_feature (61)..(61): /note="Nucleotide may be methylated to form 5-methylcytosine"
tccttactgtagaactgtttccctacagcctagtaatagaggaggagacatttctaaaatcgcacccagaactgtctacaccaagagcaaagattcgactgtcaatcacactttgacttgca

SEQ ID NO: 20576 - DNA, 122 bp, Homo sapiens
  misc_feature (61)..(62): /note="This region represents a CpG dinucleotide"
  misc_feature (61)..(61): /note="Nucleotide may be methylated to form 5-methylcytosine"
tgatgaagaacaagtaaataaaaaaccattgtgctaagtgctctccttcatttattctcacgatcacattctgaggtaggtattactatgcacattttacaggtcaggaaagcaaagctcac

SEQ ID NO: 20577 - DNA, 122 bp, Homo sapiens
  misc_feature (61)..(62): /note="This region represents a CpG dinucleotide"
  misc_feature (61)..(61): /note="Nucleotide may be methylated to form 5-methylcytosine"
tactcactgaatgcgaaaactctctatttttcaaactgtgggttatgatccattagagaacgattagatcaacttagtgggagacaagaggtttttaaatgaaaaataatagactagaaaat

SEQ ID NO: 20578 - DNA, 122 bp, Homo sapiens
  misc_feature (61)..(62): /note="This region represents a CpG dinucleotide"
  misc_feature (61)..(61): /note="Nucleotide may be methylated to form 5-methylcytosine"
ttgcacatatagagacatcgtcttcttgtagacaagtcatgcttatcataattcattcaccgtcaccagctctggtattactgaaattgaaaacagtcttactggtgtatctgctgcagtat

SEQ ID NO: 20579 - DNA, 122 bp, Homo sapiens
  misc_feature (61)..(62): /note="This region represents a CpG dinucleotide"
  misc_feature (61)..(61): /note="Nucleotide may be methylated to form 5-methylcytosine"
attggaaaggagcaaaccagaaatggctttattttctcccttggactaatttttaagtctcgattggaattcagtgagtaggttcataatgtgcatgacagaaataagctttatagtggttt

SEQ ID NO: 20580 - DNA, 122 bp, Homo sapiens
  misc_feature (61)..(62): /note="This region represents a CpG dinucleotide"
  misc_feature (61)..(61): /note="Nucleotide may be methylated to form 5-methylcytosine"
aagacaacaattgagtattgggcttttaataccttgaagcagaagttaaaaagagaaaaacgagttttcctgtacttacttggctgactcactccaaggctagcagtaggcagggccctagt

SEQ ID NO: 20581 - DNA, 122 bp, Homo sapiens
  misc_feature (61)..(62): /note="This region represents a CpG dinucleotide"
  misc_feature (61)..(61): /note="Nucleotide may be methylated to form 5-methylcytosine"
aacatgggttccccaacctccaatttctttccatctatagggttgttctgtagagcagggcgcccacacccaggctgcacacttgagtcacctggggagccccacccaattaaatcccaatc

SEQ ID NO: 20582 - DNA, 122 bp, Homo sapiens
  misc_feature (61)..(62): /note="This region represents a CpG dinucleotide"
  misc_feature (61)..(61): /note="Nucleotide may be methylated to form 5-methylcytosine"
gtaataagtgtgtgagtgaatcaatgaaggtaaaaatgagtaagtgcctgagtaattgaacgaagagatgattgcataaagcagcaaatgaatttgtaaatcacaatgactaacacttttga

SEQ ID NO: 20583 - DNA, 122 bp, Homo sapiens
  misc_feature (61)..(62): /note="This region represents a CpG dinucleotide"
  misc_feature (61)..(61): /note="Nucleotide may be methylated to form 5-methylcytosine"
tgatatttttttcaaggttaaataaacaaaatgtaataaaattagattgtaagtagaatgcgtaagtgcatacctgcattggaaccaaaactcataaaacagatatatgtcaagcatgcctc

SEQ ID NO: 20584 - DNA, 122 bp, Homo sapiens
  misc_feature (61)..(62): /note="This region represents a CpG dinucleotide"
  misc_feature (61)..(61): /note="Nucleotide may be methylated to form 5-methylcytosine"
ttcaagggaaaaaaaaaaaacaactgcatggcctgggaaaagagaagaaatcactgaggtcgagtcacagaattgagaaaacctcatcttaaacactgaaaatggaagtggatatttcagat

SEQ ID NO: 20585 - DNA, 122 bp, Homo sapiens
  misc_feature (61)..(62): /note="This region represents a CpG dinucleotide"
  misc_feature (61)..(61): /note="Nucleotide may be methylated to form 5-methylcytosine"
gtttagacattgttgggtttccgtaatgctgagaaaatagcatgggagccctgcaggaaccgtgccatcactgtgtttctcttatctgagctcggttctcacactagctggagctcttgcat

SEQ ID NO: 20586 - DNA, 122 bp, Homo sapiens
  misc_feature (61)..(62): /note="This region represents a CpG dinucleotide"
  misc_feature (61)..(61): /note="Nucleotide may be methylated to form 5-methylcytosine"
gcgatctccgggatgttgctgaacaggcgctccgcctccacctgggcgcggcgggaggtgcggttggccacgcccctccgccaggttagccccgccccaggtccaggtcccgccctccttcc

SEQ ID NO: 20587 - DNA, 122 bp, Homo sapiens
  misc_feature (61)..(62): /note="This region represents a CpG dinucleotide"
  misc_feature (61)..(61): /note="Nucleotide may be methylated to form 5-methylcytosine"
ttaataaagcactgtcagtaggtcggcttgtcttctctgtcggccacatcaaaatcaatacgtcccctgtgtattctgccatgattgtctgggctggggaatctaataggattaagtgtttg

SEQ ID NO: 20588 - DNA, 122 bp, Homo sapiens
  misc_feature (61)..(62): /note="This region represents a CpG dinucleotide"
  misc_feature (61)..(61): /note="Nucleotide may be methylated to form 5-methylcytosine"
ggagtagttttgttcaaaagcaatatttatttttcatgaagataagaggcatattacattcgctatagaaaatgctatgagaggaaaaagctgcatgttaccgatatgacaaaaaacataaa

SEQ ID NO: 20589 - DNA, 122 bp, Homo sapiens
  misc_feature (61)..(62): /note="This region represents a CpG dinucleotide"
  misc_feature (61)..(61): /note="Nucleotide may be methylated to form 5-methylcytosine"
gtttgttttattgcttagctaaccaaggcttttattagtccaccaaactgtaaattcagtcgtcttgtgagcactcagaaggttgtgtccaaataagcaaagtacttttcaggtctaagtga

SEQ ID NO: 20590 - DNA, 122 bp, Homo sapiens
  misc_feature (61)..(62): /note="This region represents a CpG dinucleotide"
  misc_feature (61)..(61): /note="Nucleotide may be methylated to form 5-methylcytosine"
ttgctctgttgctctctgcttggccacagttttgcaatgattgttttcctcaggccacagcgccatcaagcactctcacttccatggctctggctctcagaggggctctggtaacaccagtt

SEQ ID NO: 20591 - DNA, 122 bp, Homo sapiens
  misc_feature (61)..(62): /note="This region represents a CpG dinucleotide"
  misc_feature (61)..(61): /note="Nucleotide may be methylated to form 5-methylcytosine"
cagtcttttgtgtgcctgtgaggtcctgggcaagctgtggagctgtaaatatttgcccttcgcccagagctggccagctgctgagactgcagctgacagacaggccaggggccaggaagggg

SEQ ID NO: 20592 - DNA, 122 bp, Homo sapiens
  misc_feature (61)..(62): /note="This region represents a CpG dinucleotide"
  misc_feature (61)..(61): /note="Nucleotide may be methylated to form 5-methylcytosine"
cccagctactcaggaggctgaggaaagaagatcaattgagcccaggaggctgcagtgaaccgtggtcataccctgtactccggcctgtgtgacagaaggagatcttatctccaaaaaaagtc

SEQ ID NO: 20593 - DNA, 122 bp, Homo sapiens
  misc_feature (61)..(62): /note="This region represents a CpG dinucleotide"
  misc_feature (61)..(61): /note="Nucleotide may be methylated to form 5-methylcytosine"
aagagagggatagggagagatttgttaaggatacaaaattacagctagataagggggatacgttttagtgttctctacctctgtaggatgaatatatgtaggtaacatattatgtagtttca

SEQ ID NO: 20594 - DNA, 122 bp, Homo sapiens
  misc_feature (61)..(62): /note="This region represents a CpG dinucleotide"
  misc_feature (61)..(61): /note="Nucleotide may be methylated to form 5-methylcytosine"
tccatgcgtcaccttgctggtgatgcttcactggatcacttggttccggggttgtccgcacgtctccctgtagtgcaggtgctccttcctgtttccaattagcctgtgggatgggacttgga

SEQ ID NO: 20595 - DNA, 122 bp, Homo sapiens
  misc_feature (61)..(62): /note="This region represents a CpG dinucleotide"
  misc_feature (61)..(61): /note="Nucleotide may be methylated to form 5-methylcytosine"
tgcctgccgctgcccgagttcgtggacaacacgcaggtgcccagctactgcctgaatgcacgcggcgagggggccgtgcgcaagatcctcctgtgcctggccaaccagttccccgacatctc

SEQ ID NO: 20596 - DNA, 122 bp, Homo sapiens
  misc_feature (61)..(62): /note="This region represents a CpG dinucleotide"
  misc_feature (61)..(61): /note="Nucleotide may be methylated to form 5-methylcytosine"
gtgccttgtggtgtatacacaggcaatgagctctaaaaagcactttaatcgaacgaacaacggctgctttcagcagtaggatgagtcacaaacttaatgttgaaatcaagcagccagacaca

SEQ ID NO: 20597 - DNA, 122 bp, Homo sapiens
  misc_feature (61)..(62): /note="This region represents a CpG dinucleotide"
  misc_feature (61)..(61): /note="Nucleotide may be methylated to form 5-methylcytosine"
cctgttagtcaacagccagatgccaacagataatcacattagactcatcagcaagcacaccgtgcacacaagttccactcccatgtacaggttcctgtcccatgtacacaagcctgcacaca

SEQ ID NO: 20598 - DNA, 122 bp, Homo sapiens
  misc_feature (61)..(62): /note="This region represents a CpG dinucleotide"
  misc_feature (61)..(61): /note="Nucleotide may be methylated to form 5-methylcytosine"
atttctaactggccagtcttctgctatgttcaccatgactaacacaggatatgatttgttcgacaccataaaagtatatcagtaagacatgttaatgagaaaggaaacagggatgaagagtc

SEQ ID NO: 20599 - DNA, 122 bp, Homo sapiens
  misc_feature (61)..(62): /note="This region represents a CpG dinucleotide"
  misc_feature (61)..(61): /note="Nucleotide may be methylated to form 5-methylcytosine"
aaataaataagaatcttatgggaccaccctggcatatgtggttcatctttgaccaaaacacgccattatgaagcatgtgattatattacatggtttagactctgggtgtggttagattccct

SEQ ID NO: 20600 - DNA, 122 bp, Homo sapiens
  misc_feature (61)..(62): /note="This region represents a CpG dinucleotide"
  misc_feature (61)..(61): /note="Nucleotide may be methylated to form 5-methylcytosine"
cgatttggcttgtctgttcacatttgcatgaggaactgaactgttgttttcatagggaaacgagagactgtgtttcctcagcttaaaaaagaaagggcattttgctcctcccagccaaaatg

SEQ ID NO: 20601 - DNA, 122 bp, Homo sapiens
  misc_feature (61)..(62): /note="This region represents a CpG dinucleotide"
  misc_feature (61)..(61): /note="Nucleotide may be methylated to form 5-methylcytosine"
aagacatgttgaagttctaactcccagtaccttagaatgcacccttttcggagatagggtcgttacagaggtgatcaaatgaagatgaggctatcagggtgtgtcctaatcttctatgatga

SEQ ID NO: 20602 - DNA, 122 bp, Homo sapiens
  misc_feature (61)..(62): /note="This region represents a CpG dinucleotide"
  misc_feature (61)..(61): /note="Nucleotide may be methylated to form 5-methylcytosine"
taccttattttgagagtttgctgtgtgccagtactatctgccatgaagtaggtggtgttacggtgtccatttcacagatgagaaaataaggcttatgagttgacactttggttgtgatcata

SEQ ID NO: 20603 - DNA, 122 bp, Homo sapiens
  misc_feature (61)..(62): /note="This region represents a CpG dinucleotide"
  misc_feature (61)..(61): /note="Nucleotide may be methylated to form 5-methylcytosine"
tgaatcacagatggactgagtctaattacaaatcagctttgactcagctcagtctctgaccggttgatatagtcagctcttcatgcattcttcctgacagaggaaacattgaattctgtctg

SEQ ID NO: 20604 - DNA, 122 bp, Homo sapiens
  misc_feature (61)..(62): /note="This region represents a CpG dinucleotide"
  misc_feature (61)..(61): /note="Nucleotide may be methylated to form 5-methylcytosine"
aaatatcctccctggtactgagatttgaagtttattgtgctgccctattcttgggcatttcgtaatattcaagatatctgaaccaccatctgttctgtggaagtgtgactaattagtggcta

SEQ ID NO: 20605 - DNA, 122 bp, Homo sapiens
  misc_feature (61)..(62): /note="This region represents a CpG dinucleotide"
  misc_feature (61)..(61): /note="Nucleotide may be methylated to form 5-methylcytosine"
gacctcaggcaatctgcccgccttggcctcccaaagtgctgggattacagacgtgagccacggcacctggccagagctgacaattattttaacaggatgccctaacttctgtgctgaaaaca

SEQ ID NO: 20606 - DNA, 122 bp, Homo sapiens
  misc_feature (61)..(62): /note="This region represents a CpG dinucleotide"
  misc_feature (61)..(61): /note="Nucleotide may be methylated to form 5-methylcytosine"
taccagtggctgaaacaatcagcacccatgcccatgagtagaggctgaccgtgagtcactcggagaatctctgtatcttcctatttccaagaaatcagtgaaaagttgtgcaacttttttag

SEQ ID NO: 20607 - DNA, 122 bp, Homo sapiens
  misc_feature (61)..(62): /note="This region represents a CpG dinucleotide"
  misc_feature (61)..(61): /note="Nucleotide may be methylated to form 5-methylcytosine"
ttctaggctgaggaaacagcatgtgctatggtacgaaggagtggctggctttgcgtcttccgttgagtttctgagagttgatatcagtggaatcaaggctaagaggtggtgagcctgtgcgt

SEQ ID NO: 20608 - DNA, 122 bp, Homo sapiens
  misc_feature (61)..(62): /note="This region represents a CpG dinucleotide"
  misc_feature (61)..(61): /note="Nucleotide may be methylated to form 5-methylcytosine"
tcaaccaccttctcctctaaatcattaccttctataatggaagttctgaacccccacccccgacatcaccgttctatgccatgcctcttccttgacttggtcacccttaaatctctgtcaaa

SEQ ID NO: 20609 - DNA, 122 bp, Homo sapiens
  misc_feature (61)..(62): /note="This region represents a CpG dinucleotide"
  misc_feature (61)..(61): /note="Nucleotide may be methylated to form 5-methylcytosine"
ggttttcatggagaaagaggcaacgttgactatacgtgtttactcaaagcttttttataccggactatatgccatccaggtttaagagaattccaggcaggctctagcattatgtttttcac

SEQ ID NO: 20610 - DNA, 122 bp, Homo sapiens
  misc_feature (61)..(62): /note="This region represents a CpG dinucleotide"
  misc_feature (61)..(61): /note="Nucleotide may be methylated to form 5-methylcytosine"
aaagaaagcctgggcagtggcctcagtgaaccctcgaggatgctgtgatcctcttggtgacgtccccagcctctgcttcaggatgacagcatggtctcctgcaccatagctcggtctgaaat

SEQ ID NO: 20611 - DNA, 122 bp, Homo sapiens
  misc_feature (61)..(62): /note="This region represents a CpG dinucleotide"
  misc_feature (61)..(61): /note="Nucleotide may be methylated to form 5-methylcytosine"
aaatatttattactctgccagccactgttcaaggtgctgaggataaaacaaggaaaggaacgaagtctctgtgttcgttagagcttttatattctaataggggaaacagcaaaaaataaaca

SEQ ID NO: 20612 - DNA, 122 bp, Homo sapiens
  misc_feature (61)..(62): /note="This region represents a CpG dinucleotide"
  misc_feature (61)..(61): /note="Nucleotide may be methylated to form 5-methylcytosine"
gtaattcctccctatgaataataaacggcttacttataaatactgtccagtggccatccccgtagttctgtgcaatttaatttttaattcaggtaggtttaccttgcctttgtttacccatt

SEQ ID NO: 20613 - DNA, 122 bp, Homo sapiens
  misc_feature (61)..(62): /note="This region represents a CpG dinucleotide"
  misc_feature (61)..(61): /note="Nucleotide may be methylated to form 5-methylcytosine"
acaacaggaccagtcccctatcagggccaccactctaccgggctggggaggaaagcccttcgcagtcctgcgggaacaggaggcactcccacattgctccacttctctgtattccagtttaa

SEQ ID NO: 20614 - DNA, 122 bp, Homo sapiens
  misc_feature (61)..(62): /note="This region represents a CpG dinucleotide"
  misc_feature (61)..(61): /note="Nucleotide may be methylated to form 5-methylcytosine"
agagtgggaggaggaggacaatttcgcacctgagtgatccttttcataaaaatgggatcacgttacttcctactaagagaagggaaatgttatccgagaatgtggggctctcattctcggat

SEQ ID NO: 20615 - DNA, 122 bp, Homo sapiens
  misc_feature (61)..(62): /note="This region represents a CpG dinucleotide"
  misc_feature (61)..(61): /note="Nucleotide may be methylated to form 5-methylcytosine"
ttaagttgaactcgtgcagtgcatgatcagaatcagcttctctggtaagccaaggagtgacgtgaccaggttgacgttatcagtgaaaaggacaatgaaggtaatgattcacataattatta

SEQ ID NO: 20616 - DNA, 122 bp, Homo sapiens
  misc_feature (61)..(62): /note="This region represents a CpG dinucleotide"
  misc_feature (61)..(61): /note="Nucleotide may be methylated to form 5-methylcytosine"
tgaagcccgcggatttgtgataagcagttgccacgactcagaaggtggtccgcgtctccacgctggagcaatggccatgctagaaagtgcagtttctgtcactagtgcttgctcggaccact

SEQ ID NO: 20617 - DNA, 122 bp, Homo sapiens
  misc_feature (61)..(62): /note="This region represents a CpG dinucleotide"
  misc_feature (61)..(61): /note="Nucleotide may be methylated to form 5-methylcytosine"
gatctgatttggttttccaatgaggcggggcgttgagcaaccctctttgcctccagttgtcgtggcttcgtggggccaaccattttcggccaggctgagaaatttcttattgatgggtctgc

SEQ ID NO: 20618 - DNA, 122 bp, Homo sapiens
  misc_feature (61)..(62): /note="This region represents a CpG dinucleotide"
  misc_feature (61)..(61): /note="Nucleotide may be methylated to form 5-methylcytosine"
atctgtcagttctgatggaatatactaacagtggctgggtttaaatcctggctccagggccgggcacagtggctcatgcctgtaatcccagcactggaaggctgagatgggcggatcatgaa

SEQ ID NO: 20619 - DNA, 122 bp, Homo sapiens
  misc_feature (61)..(62): /note="This region represents a CpG dinucleotide"
  misc_feature (61)..(61): /note="Nucleotide may be methylated to form 5-methylcytosine"
tttatttggttcaggaaggacaatgagagattgtcaagtcgaacagactcactttacagacgaggataccaggtcctagaaaagttaattgaccagtcactgagctaactgcattgaatcat

SEQ ID NO: 20620 - DNA, 122 bp, Homo sapiens
  misc_feature (61)..(62): /note="This region represents a CpG dinucleotide"
  misc_feature (61)..(61): /note="Nucleotide may be methylated to form 5-methylcytosine"
atcaacatcacacccagacatgaacaataattaaattcagccatctatgatattttgccacgtttcaatcatataaaaactgtaactttatacatattagtttgatttatgacctttacttt

SEQ ID NO: 20621 - DNA, 122 bp, Homo sapiens
  misc_feature (61)..(62): /note="This region represents a CpG dinucleotide"
  misc_feature (61)..(61): /note="Nucleotide may be methylated to form 5-methylcytosine"
cagagaacatttttgcttagtgtcttctctgaaggaagtatgccatttttccttaacctgcgcttgaatagttactatatgttgaccataaacaatagatggcactggcccaaaacatggtt

SEQ ID NO: 20622 - DNA, 122 bp, Homo sapiens
  misc_feature (61)..(62): /note="This region represents a CpG dinucleotide"
  misc_feature (61)..(61): /note="Nucleotide may be methylated to form 5-methylcytosine"
gcattggatttagtgccaggcgggttggtgagtagactcagcacccacattctcttcttgcgtctctctctggccacccagattatccaggggctgctgtttacttgagagctagaagtatc

SEQ ID NO: 20623 - DNA, 122 bp, Homo sapiens
  misc_feature (61)..(62): /note="This region represents a CpG dinucleotide"
  misc_feature (61)..(61): /note="Nucleotide may be methylated to form 5-methylcytosine"
gattggttaagagacgccgtcactcgcggcataccgaccaaccttgggacagacaggcgccgtggggacagtggttgtttgggaaacagacacgccttctctggcaccacagcactctcggc

SEQ ID NO: 20624 - DNA, 122 bp, Homo sapiens
  misc_feature (61)..(62): /note="This region represents a CpG dinucleotide"
  misc_feature (61)..(61): /note="Nucleotide may be methylated to form 5-methylcytosine"
gggcaacatagtgagagagtgtctctacaaaaaacttgcctgggcgtggtagctcacacccgtaatcccagcactttgggaggccgaggcaggcggatcacctgagaggtcaggagttcaag

SEQ ID NO: 20625 - DNA, 122 bp, Homo sapiens
  misc_feature (61)..(62): /note="This region represents a CpG dinucleotide"
  misc_feature (61)..(61): /note="Nucleotide may be methylated to form 5-methylcytosine"
tggctcgcgtggacaggtggacggacgctgtggccgcatggaaccttgagaacccagggacgagccagtgccgggaaggaactgccgggactcaccgagctgcacttaactgttctctttct

SEQ ID NO: 20626 - DNA, 122 bp, Homo sapiens
  misc_feature (61)..(62): /note="This region represents a CpG dinucleotide"
  misc_feature (61)..(61): /note="Nucleotide may be methylated to form 5-methylcytosine"
cgggaggtcgggagatcaggagtccacgcaccagcctcgggaggacttccaagcctgctgcgtgtctgagctgcagccacagtggatttccccagctggtcattgtttaaacgactaagacc

SEQ ID NO: 20627 - DNA, 122 bp, Homo sapiens
  misc_feature (61)..(62): /note="This region represents a CpG dinucleotide"
  misc_feature (61)..(61): /note="Nucleotide may be methylated to form 5-methylcytosine"
gggcagtggtgatgctgacgagctgtgccttcagctcactctgatgggcattgggagggtcggtcttagctgtcagcttggtcaggcgatgagcccaggtatccagtcgaacatgaatccag

SEQ ID NO: 20628 - DNA, 122 bp, Homo sapiens
  misc_feature (61)..(62): /note="This region represents a CpG dinucleotide"
  misc_feature (61)..(61): /note="Nucleotide may be methylated to form 5-methylcytosine"
gcagagctgcttctgatcctcatctgctcttcagtgtcttaaacactgatgggcaggaaacgcctgggtgtgcctagctcagaagctgagggcagggagcctctgccctcctgagcctgggg

SEQ ID NO: 20629 - DNA, 122 bp, Homo sapiens
  misc_feature (61)..(62): /note="This region represents a CpG dinucleotide"
  misc_feature (61)..(61): /note="Nucleotide may be methylated to form 5-methylcytosine"
gtggctgagttctccttgggcaccaagaaacacaggccagatggatgactgccaagatctcgtaatggcatgaactgaggggcaagtttgtttggatggcactgtgaaaatcaacttaccct

SEQ ID NO: 20630 - DNA, 122 bp, Homo sapiens
  misc_feature (61)..(62): /note="This region represents a CpG dinucleotide"
  misc_feature (61)..(61): /note="Nucleotide may be methylated to form 5-methylcytosine"
cctagcctcgccctttctctccctctggactgagacctctttatttcctctgtagtttctcggtgtctcttcttttctcttttgcttcctctcccatttcgtttactgaccattatcaaaat

SEQ ID NO: 20631 - DNA, 122 bp, Homo sapiens
  misc_feature (61)..(62): /note="This region represents a CpG dinucleotide"
  misc_feature (61)..(61): /note="Nucleotide may be methylated to form 5-methylcytosine"
gtattatctttcattgtaaatgagtaaaatgacatcagtctcctgtgaggatggggcatgcgagtcacccagagtctcttaaatcctggactcactggacctgcagtgctaaagagcagagc

SEQ ID NO: 20632 - DNA, 122 bp, Homo sapiens
  misc_feature (61)..(62): /note="This region represents a CpG dinucleotide"
  misc_feature (61)..(61): /note="Nucleotide may be methylated to form 5-methylcytosine"
tcttgctcacacggggcatgagaactctaggaaatgtctcattcccacatccttagtcttcggcaccatgagtgggtgggcacgttgtaatggcccaagtggctcaccttgcccattgccta

SEQ ID NO: 20633 - DNA, 122 bp, Homo sapiens
  misc_feature (61)..(62): /note="This region represents a CpG dinucleotide"
  misc_feature (61)..(61): /note="Nucleotide may be methylated to form 5-methylcytosine"
gctcaaagaggaaaggcagttcgtgaccgtctggggacagcccctcagggtgcagaggtccgtgaagacgcagacatagtctccacccggagtcgggcgagtcctccaacccagcttcctcc

SEQ ID NO: 20634 - DNA, 122 bp, Homo sapiens
  misc_feature (61)..(62): /note="This region represents a CpG dinucleotide"
  misc_feature (61)..(61): /note="Nucleotide may be methylated to form 5-methylcytosine"
agcaaagagctgcattttgttctttaaccttgagaatactgtctcaataacattccattacgtgcatataccacattttgtttgtccatttatccactgatggacatttgggttgtttccac

SEQ ID NO: 20635 - DNA, 122 bp, Homo sapiens
  misc_feature (61)..(62): /note="This region represents a CpG dinucleotide"
  misc_feature (61)..(61): /note="Nucleotide may be methylated to form 5-methylcytosine"
ctgagatttgtgagccaggtttaggccagaagcctggggctgaggacactcctgcgggagcgtgaggatagcctctcttcccgccctatttgcaagctcagatgtctgttcattcactagaa

SEQ ID NO: 20636 - DNA, 122 bp, Homo sapiens
  misc_feature (61)..(62): /note="This region represents a CpG dinucleotide"
  misc_feature (61)..(61): /note="Nucleotide may be methylated to form 5-methylcytosine"
cacagcgtcgttcccactggagtctgttgtgagctgagatgactctctgacttcggcctgcgtccctgcacacgtcagccctccgggctgccaaaacacaggccaggcagccctgggtgaac

SEQ ID NO: 20637 - DNA, 122 bp, Homo sapiens
  misc_feature (61)..(62): /note="This region represents a CpG dinucleotide"
  misc_feature (61)..(61): /note="Nucleotide may be methylated to form 5-methylcytosine"
attctggatcagctaaaggctttttccccttagttttctttatgtgtttttctgtaaagccgaaaatttagtcattactctcattattacattatcctcattattacaactttatttccaca

SEQ ID NO: 20638 - DNA, 122 bp, Homo sapiens
  misc_feature (61)..(62): /note="This region represents a CpG dinucleotide"
  misc_feature (61)..(61): /note="Nucleotide may be methylated to form 5-methylcytosine"
gatgaaaagatgacattttgtcagatactgaaagaacccagaggaacatatttgcatttacgttctacatgggtacctttggtgattcatggacctgccacagaaaaatgtgaggttttcaa

SEQ ID NO: 20639 - DNA, 122 bp, Homo sapiens
  misc_feature (61)..(62): /note="This region represents a CpG dinucleotide"
  misc_feature (61)..(61): /note="Nucleotide may be methylated to form 5-methylcytosine"
gtccaaaaagacaggtgttaaccggtggagctgggtctaaatccacaattttctcagtgccgctacaatggtagcagaattaagcaggattttctagtccttacaaataggttcaaggcagc

SEQ ID NO: 20640 - DNA, 122 bp, Homo sapiens
  misc_feature (61)..(62): /note="This region represents a CpG dinucleotide"
  misc_feature (61)..(61): /note="Nucleotide may be methylated to form 5-methylcytosine"
gtgctgactaacaaggcatttaggtgtgcagcatcctagagtgctccagggcagtgtcagcgttctcgggagtaaaaggtgccacttggtagcaatgatattccagaattaaatgggttttt

SEQ ID NO: 20641 - DNA, 122 bp, Homo sapiens
  misc_feature (61)..(62): /note="This region represents a CpG dinucleotide"
  misc_feature (61)..(61): /note="Nucleotide may be methylated to form 5-methylcytosine"
cttatgggctcaagagatcatcctgcctcagcctccccagtggctgagactacaggcacacgccaccacgctgggctaatttttgttgttgttagtagagataaggtctgcgtatgttgtcc

SEQ ID NO: 20642 - DNA, 122 bp, Homo sapiens
  misc_feature (61)..(62): /note="This region represents a CpG dinucleotide"
  misc_feature (61)..(61): /note="Nucleotide may be methylated to form 5-methylcytosine"
gcttgaatgctacaaatgagactgactcatgggtgcagtgttgagaattcaaataccaggcgtgttgacatcagtgactttgaaatgttgacagctcagggtaaacattttgaataaagcaa

SEQ ID NO: 20643 - DNA, 122 bp, Homo sapiens
  misc_feature (61)..(62): /note="This region represents a CpG dinucleotide"
  misc_feature (61)..(61): /note="Nucleotide may be methylated to form 5-methylcytosine"
aaaaacttttaaattaaccgtagttattaagtcatttcacacacaaacttttattacagacgcccagagctgagctgcaacccaacaagataggagagcagcagagtctcccgctaagtttg

SEQ ID NO: 20644 - DNA, 122 bp, Homo sapiens
  misc_feature (61)..(62): /note="This region represents a CpG dinucleotide"
  misc_feature (61)..(61): /note="Nucleotide may be methylated to form 5-methylcytosine"
gagatgatggcctggctttactaaaaaactgtgtgatcaaaatcccaactataggaaagacgtaactgagaacgactgggccccatgttctgggaggagccccgctaaccacaacctcctct

SEQ ID NO: 20645 - DNA, 122 bp, Homo sapiens
  misc_feature (61)..(62): /note="This region represents a CpG dinucleotide"
  misc_feature (61)..(61): /note="Nucleotide may be methylated to form 5-methylcytosine"
tttttagtgtgacaatttatctgcccaggaagagcaaatactgtgactgtctatgttgctcgtttttcttgttagcaacacctggttaatttgttattaagaaatacctttaagccatagaa

SEQ ID NO: 20646 - DNA, 122 bp, Homo sapiens
  misc_feature (61)..(62): /note="This region represents a CpG dinucleotide"
  misc_feature (61)..(61): /note="Nucleotide may be methylated to form 5-methylcytosine"
ggaggctgagatgggaggatcgcttaagcccaggagttccaggctgcggtgagctgatgacgccactgcatgatgaatctttagttgttcaaacaacaggaaggatggtgttgcagtcaaca

SEQ ID NO: 20647 - DNA, 122 bp, Homo sapiens
  misc_feature (61)..(62): /note="This region represents a CpG dinucleotide"
  misc_feature (61)..(61): /note="Nucleotide may be methylated to form 5-methylcytosine"
tgtcttggtctcacgccttccccagctcttcctgatgagctgccagtccacacctgcaagcgtccccaggccccacacagcaggtctgaccagcactggtccaggcccaggcccagggagtg

SEQ ID NO: 20648 - DNA, 122 bp, Homo sapiens
  misc_feature (61)..(62): /note="This region represents a CpG dinucleotide"
  misc_feature (61)..(61): /note="Nucleotide may be methylated to form 5-methylcytosine"
agtacaagtaaatagggctttgagttatgaactctgaaaagacaaacataaagttaatcccgttatctgagaaacatatttaccttgcaggaacatagtactttctatatcataatcttgat

SEQ ID NO: 20649 - DNA, 122 bp, Homo sapiens
  misc_feature (61)..(62): /note="This region represents a CpG dinucleotide"
  misc_feature (61)..(61): /note="Nucleotide may be methylated to form 5-methylcytosine"
ctccccctccacagcccctgaggtggagcttccctcacagaccccatctggtcgagcctacggctgcccagtgtacactcagtgatgcttataccaaatagggcatgtgcgctggtgtctgt

SEQ ID NO: 20650 - DNA, 122 bp, Homo sapiens
  misc_feature (61)..(62): /note="This region represents a CpG dinucleotide"
  misc_feature (61)..(61): /note="Nucleotide may be methylated to form 5-methylcytosine"
ctcagtgattgcaagttagtttatcttgctctccttcctgctccacaaaaaaacagtgcacggcctgacctcgcaacactaagagctctgctttaacaggaaacagacacagtcatgggccc

SEQ ID NO: 20651 - DNA, 122 bp, Homo sapiens
  misc_feature (61)..(62): /note="This region represents a CpG dinucleotide"
  misc_feature (61)..(61): /note="Nucleotide may be methylated to form 5-methylcytosine"
ctgggttgaaggcagcagagctagagttagaagccctgtttaccctggtgaatcctaatccgtgtcccaagcatcatgtcttctgtgactcacatccatcactcacccaactgtgtggactt

SEQ ID NO: 20652 - DNA, 122 bp, Homo sapiens
  misc_feature (61)..(62): /note="This region represents a CpG dinucleotide"
  misc_feature (61)..(61): /note="Nucleotide may be methylated to form 5-methylcytosine"
gttggcaaacgtgaactggaagtcactaagctactagtaaaacagccagacgtcaggatccgtataatcagaaagcctgaggctctgtaggtttaacctaaaatggcgagaaaaccttcttc

SEQ ID NO: 20653 - DNA, 122 bp, Homo sapiens
  misc_feature (61)..(62): /note="This region represents a CpG dinucleotide"
  misc_feature (61)..(61): /note="Nucleotide may be methylated to form 5-methylcytosine"
agcattgggctgagagtcacccagtctgggctccaaggaatgctgagctcagtagcggagcgtaacaacttagcattgttagaaatgtcctgtttcttactgtcatctctcagaggactctg

SEQ ID NO: 20654 - DNA, 122 bp, Homo sapiens
  misc_feature (61)..(62): /note="This region represents a CpG dinucleotide"
  misc_feature (61)..(61): /note="Nucleotide may be methylated to form 5-methylcytosine"
catgggatctggaaacagagcggaggaaggagctcgggaatggtcttgctcaatccttcccggcctctgctcatcggaatcacccagagggcttttaagcttagacaaaacactctgatgtt

SEQ ID NO: 20655 - DNA, 122 bp, Homo sapiens
  misc_feature (61)..(62): /note="This region represents a CpG dinucleotide"
  misc_feature (61)..(61): /note="Nucleotide may be methylated to form 5-methylcytosine"
aaatgttatgattagttagccagctagaggtacaaactcacacgaggccatctgagaattcgataatttttagtgttatcataaatttattacctataaaagtatctataaaatcctggatc

SEQ ID NO: 20656 - DNA, 122 bp, Homo sapiens
  misc_feature (61)..(62): /note="This region represents a CpG dinucleotide"
  misc_feature (61)..(61): /note="Nucleotide may be methylated to form 5-methylcytosine"
gaggccctagacagggagcacctggcaagtcacactcccttgaccacaggactcccactccgctgcttgagtaaacataattatcaagacaatagcagctgtgacttgtcttctggtgccaa

SEQ ID NO: 20657 - DNA, 122 bp, Homo sapiens
  misc_feature (61)..(62): /note="This region represents a CpG dinucleotide"
  misc_feature (61)..(61): /note="Nucleotide may be methylated to form 5-methylcytosine"
cccacccaaatcttattatgaattgtagttcccataatccccatgtgttatggccaggatcgggggagatagctgaatcatgagggtggtttccccatcctgttctggtgatagtaagttag

SEQ ID NO: 20658 - DNA, 122 bp, Homo sapiens
  misc_feature (61)..(62): /note="This region represents a CpG dinucleotide"
  misc_feature (61)..(61): /note="Nucleotide may be methylated to form 5-methylcytosine"
acgtagcagaggaatggacctgctggctgccacacgggaagttctcagaggcgtccgtggcgaagcctctgtgtcctggagctatcatggttacttccttgctgcttacttcttaaagctgt

SEQ ID NO: 20659 - DNA, 122 bp, Homo sapiens
  misc_feature (61)..(62): /note="This region represents a CpG dinucleotide"
  misc_feature (61)..(61): /note="Nucleotide may be methylated to form 5-methylcytosine"
cagaacctgtgccatccagatgggagcagtaagggtgtagggcaaagttagtgagctgcccggtgcacgaggacttccatgataatcagggctgaaccaggaaggcaggtcaaggccagggt

SEQ ID NO: 20660 - DNA, 122 bp, Homo sapiens
  misc_feature (61)..(62): /note="This region represents a CpG dinucleotide"
  misc_feature (61)..(61): /note="Nucleotide may be methylated to form 5-methylcytosine"
caagataatatccaccccacaaagttatcatagaacttaaaagagaaaataaatataaaacgaaacatgagcactgtgactgatgcagagtaataaatgattctggccactactccacctgc

SEQ ID NO: 20661 - DNA, 122 bp, Homo sapiens
  misc_feature (61)..(62): /note="This region represents a CpG dinucleotide"
  misc_feature (61)..(61): /note="Nucleotide may be methylated to form 5-methylcytosine"
tagcagaagtctgttttctagttccttaattcttcctgtaagtcttgcctgccaggctttcggctgtgtgactgttctctcgcagtctgaatgagatagtgattcgtcccagggcactgttg

SEQ ID NO: 20662 - DNA, 122 bp, Homo sapiens
  misc_feature (61)..(62): /note="This region represents a CpG dinucleotide"
  misc_feature (61)..(61): /note="Nucleotide may be methylated to form 5-methylcytosine"
tgacctcatgatccgcccgcgtcagcctcctaaagtgctgggattacaggcgtgagccaccgtgcccagcccaggccttgtaattgtagcagaggatttggcttccctcagcctatggatct

SEQ ID NO: 20663 - DNA, 122 bp, Homo sapiens
  misc_feature (61)..(62): /note="This region represents a CpG dinucleotide"
  misc_feature (61)..(61): /note="Nucleotide may be methylated to form 5-methylcytosine"
gcaataagtcaactgatacccccttgtaatatcatgatttatgcctctgctttgaatacacgagaatctaatatgatgttctgctagtctaccaagattcgcttggggcttaaacatctatg

SEQ ID NO: 20664 - DNA, 122 bp, Homo sapiens
  misc_feature (61)..(62): /note="This region represents a CpG dinucleotide"
  misc_feature (61)..(61): /note="Nucleotide may be methylated to form 5-methylcytosine"
acttttatgacagctggagaccttgaacacacttggccatggcttatcagcctccaatgacgtagtcgtgaagcaaagaacctcttggacccttaactttatcactaatagcaacatcccca

SEQ ID NO: 20665 - DNA, 122 bp, Homo sapiens
  misc_feature (61)..(62): /note="This region represents a CpG dinucleotide"
  misc_feature (61)..(61): /note="Nucleotide may be methylated to form 5-methylcytosine"
gcttatgccgcaggctgacagcgaaaactctcagcacaacaggggtatctgggcagacagcgaacagggctgagaacctactatgtgcagacatgacagtctgattgaatcccaataacaat

SEQ ID NO: 20666 - DNA, 122 bp, Homo sapiens
  misc_feature (61)..(62): /note="This region represents a CpG dinucleotide"
  misc_feature (61)..(61): /note="Nucleotide may be methylated to form 5-methylcytosine"
aagattatgccaaggaaggcttaattctccaccccaaggtaaacagtcatatgttacttccgtgtttgttcaatatacatgcatcaggaccattttcataaatattcgtagcttccctgttc

SEQ ID NO: 20667 - DNA, 122 bp, Homo sapiens
  misc_feature (61)..(62): /note="This region represents a CpG dinucleotide"
  misc_feature (61)..(61): /note="Nucleotide may be methylated to form 5-methylcytosine"
tgaaaacacgaagtttggagtgggcagttccagcagcagccggtcttggctcagctgctccgtgatgtctgcagagacctaggccctccttctttctgccttccctcctctgcctgctggct

SEQ ID NO: 20668 - DNA, 122 bp, Homo sapiens
  misc_feature (61)..(62): /note="This region represents a CpG dinucleotide"
  misc_feature (61)..(61): /note="Nucleotide may be methylated to form 5-methylcytosine"
gtaatcctagcactactttgggaggctgaggtgggtggattagttgaggtcaggtgttcacgtaatgaggtcggattacttgaggccagattacttgattacttgaggccaggtcaacctgg

SEQ ID NO: 20669 - DNA, 122 bp, Homo sapiens
  misc_feature (61)..(62): /note="This region represents a CpG dinucleotide"
  misc_feature (61)..(61): /note="Nucleotide may be methylated to form 5-methylcytosine"
agaataaagcctacatttgtgggtggccacaaatcttagctaaaaattggctgaactatacggacgtgacttagagaggttggatttattgaaatgttcacaggctgaggtgtcagaagagt

SEQ ID NO: 20670 - DNA, 122 bp, Homo sapiens
  misc_feature (61)..(62): /note="This region represents a CpG dinucleotide"
  misc_feature (61)..(61): /note="Nucleotide may be methylated to form 5-methylcytosine"
tgcagtgagatttagacctgtggctgttcctcttatggcctgagattgaatttaaatcatcgctgtgggactgcttgatgtatgcaatggtttagagcaagagaaagtttacaaagaaagca

SEQ ID NO: 20671 - DNA, 122 bp, Homo sapiens
  misc_feature (61)..(62): /note="This region represents a CpG dinucleotide"
  misc_feature (61)..(61): /note="Nucleotide may be methylated to form 5-methylcytosine"
gacagctataatcatttgtttgttctaacctgaactttcactagctgcttgctgtccatgcggcctaggcaatcagatgaagcttgaatttcacagttatgtgaattgttctttgtactgca

SEQ ID NO: 20672 - DNA, 122 bp, Homo sapiens
  misc_feature (61)..(62): /note="This region represents a CpG dinucleotide"
  misc_feature (61)..(61): /note="Nucleotide may be methylated to form 5-methylcytosine"
gaagatgagagaagaggagtgggatatggagaaaacaatttcctagtcatctgtatgccccgtgacagtacacagcaatagcccagcaggagtgcacaggcaatatgtgattatgtcaacaa

SEQ ID NO: 20673 - DNA, 122 bp, Homo sapiens
  misc_feature (61)..(62): /note="This region represents a CpG dinucleotide"
  misc_feature (61)..(61): /note="Nucleotide may be methylated to form 5-methylcytosine"
ctatttgcttaaggaacaaatattgctgtgggaagtgactaaatagcttcccagaagcagcggtcatggggcctttggaccagctgggcatcttctaatcaaggcaggagggggaatgatgc

SEQ ID NO: 20674 - DNA, 122 bp, Homo sapiens
  misc_feature (61)..(62): /note="This region represents a CpG dinucleotide"
  misc_feature (61)..(61): /note="Nucleotide may be methylated to form 5-methylcytosine"
gccattgactttgtgtgtccttaaggaagtaactgtgtctctctgaatcttgaatgaccacgggcacactggaaatgaaagtatttgccagtttccacatgaaaagtgagtaaagcaggatt

SEQ ID NO: 20675 - DNA, 122 bp, Homo sapiens
  misc_feature (61)..(62): /note="This region represents a CpG dinucleotide"
  misc_feature (61)..(61): /note="Nucleotide may be methylated to form 5-methylcytosine"
tcatttgttgacacaagtcagtaaatggatcatttgaagcctaatgccagttggacaactcgaattcaatagttgtatctccaaaacagggcaaataacataaccaataaaaactgttttct

SEQ ID NO: 20676 - DNA, 122 bp, Homo sapiens
  misc_feature (61)..(62): /note="This region represents a CpG dinucleotide"
  misc_feature (61)..(61): /note="Nucleotide may be methylated to form 5-methylcytosine"
atgactacaaatgtaatcagtgctgaatttgtggggatctcaaaggaaacagaattttatcgtaatcctggttaatacaggaattggtgagtcaggccttgggtttaatttcttctgccaaa

SEQ ID NO: 20677 - DNA, 122 bp, Homo sapiens
  misc_feature (61)..(62): /note="This region represents a CpG dinucleotide"
  misc_feature (61)..(61): /note="Nucleotide may be methylated to form 5-methylcytosine"
gtagtgaggaaaggggttctggggccagaatgtcagggctctgaccctgctctgccacatcgtggcagctacagcttgggcctcagttttgtcatccacaaaatgaggatgataatatgcat

SEQ ID NO: 20678 - DNA, 122 bp, Homo sapiens
  misc_feature (61)..(62): /note="This region represents a CpG dinucleotide"
  misc_feature (61)..(61): /note="Nucleotide may be methylated to form 5-methylcytosine"
gcattcacaatatggctaactggcacaagaggcctagcttttggcctatctttgtttacacgccttcctcacaaagcttaatcatttctactttttttaaagcaagagatgtgcaactcttc

SEQ ID NO: 20679 - DNA, 122 bp, Homo sapiens
  misc_feature (61)..(62): /note="This region represents a CpG dinucleotide"
  misc_feature (61)..(61): /note="Nucleotide may be methylated to form 5-methylcytosine"
taatccaggaaaatctccccatctcaaaatccttaacttaatctgtcaaatcctttttgccgcataaggtaacattcacaggttccagggattagggcatggacggctttgggaccattatt

SEQ ID NO: 20680 - DNA, 122 bp, Homo sapiens
  misc_feature (61)..(62): /note="This region represents a CpG dinucleotide"
  misc_feature (61)..(61): /note="Nucleotide may be methylated to form 5-methylcytosine"
ctatgatttttgattatcagctccagcatttatggatcccttctcctattatctaatctacgggctctaaagattaaactgtgcactttggactatttaaatagttcttaaccactgatctc

SEQ ID NO: 20681 - DNA, 122 bp, Homo sapiens
  misc_feature (61)..(62): /note="This region represents a CpG dinucleotide"
  misc_feature (61)..(61): /note="Nucleotide may be methylated to form 5-methylcytosine"
ttactaaagctgcataaaaaactactccaaaacttagtcctgtgaaataccatcttgttgcgctcactctgtaggttaggaatttggtcagggcataatggggatgacttgtctctgattca

SEQ ID NO: 20682 - DNA, 122 bp, Homo sapiens
  misc_feature (61)..(62): /note="This region represents a CpG dinucleotide"
  misc_feature (61)..(61): /note="Nucleotide may be methylated to form 5-methylcytosine"
tccggggaagcactggaaacagcaggaccatcccgaaactgcttctgcagtgggaggcgccgggcgcccggctggccgggtggaaaccacgctgcagccgccgggccaagggcaccgcggtg

SEQ ID NO: 20683 - DNA, 122 bp, Homo sapiens
  misc_feature (61)..(62): /note="This region represents a CpG dinucleotide"
  misc_feature (61)..(61): /note="Nucleotide may be methylated to form 5-methylcytosine"
atgagagtcgggcaactgacttgggttccagttccagttttgcatttactccttactccccgtgtaatcctggtgggggcagtcaattcctcagagttgcagttttctcctagggctaaagg

SEQ ID NO: 20684 - DNA, 122 bp, Homo sapiens
  misc_feature (61)..(62): /note="This region represents a CpG dinucleotide"
  misc_feature (61)..(61): /note="Nucleotide may be methylated to form 5-methylcytosine"
gtggaagggaggagggctggcttttctcgtggccttggcgagcagggcgtggtgcagtgtcgtgagaacactttcaggacctgccgcccagcttgggtctctccagctgtgatgcaaggacc

SEQ ID NO: 20685 - DNA, 122 bp, Homo sapiens
  misc_feature (61)..(62): /note="This region represents a CpG dinucleotide"
  misc_feature (61)..(61): /note="Nucleotide may be methylated to form 5-methylcytosine"
cataaatcatgtgggaaaataatccatcatgagagaaagagagagcacatgtagggaggtcggagaccttgaactcagtgaaatcatctgaatgagaatacaaagaaaaggtttgtaaggat

SEQ ID NO: 20686 - DNA, 122 bp, Homo sapiens
  misc_feature (61)..(62): /note="This region represents a CpG dinucleotide"
  misc_feature (61)..(61): /note="Nucleotide may be methylated to form 5-methylcytosine"
gacatgcacagacacagacacataaggagatgatatatcaatgactcttacacacacccacgagtcacagcccctgaagtgatatggtgaactagaagtgtcagcccccattcctgtggact

SEQ ID NO: 20687 - DNA, 122 bp, Homo sapiens
  misc_feature (61)..(62): /note="This region represents a CpG dinucleotide"
  misc_feature (61)..(61): /note="Nucleotide may be methylated to form 5-methylcytosine"
caaaagaggttttcaacagtgtcagcagaggctatagtgatgagtaaggaagttgataaacggcaacatctgaaatagctactcgccctgaataggcaggtggagaatattagttacacgtg

SEQ ID NO: 20688 - DNA, 122 bp, Homo sapiens
  misc_feature (61)..(62): /note="This region represents a CpG dinucleotide"
  misc_feature (61)..(61): /note="Nucleotide may be methylated to form 5-methylcytosine"
tgtaaaaatggatgactactttttagattctgaactcatttctgttctcttacttagtcccgacatgctgacactggatgagcaagagcttatgtgcttttactaataacttctcaatgttt

SEQ ID NO: 20689 - DNA, 122 bp, Homo sapiens
  misc_feature (61)..(62): /note="This region represents a CpG dinucleotide"
  misc_feature (61)..(61): /note="Nucleotide may be methylated to form 5-methylcytosine"
agtcttctttccaaataaggaaaggaatgtgagctggtactgataagcctggtactgtggcgtgtccaggcatgtaacaaaggcagaaacgaaaaaaagagaaaaaggaaaaaaggttgtgg

SEQ ID NO: 20690 - DNA, 122 bp, Homo sapiens
  misc_feature (61)..(62): /note="This region represents a CpG dinucleotide"
  misc_feature (61)..(61): /note="Nucleotide may be methylated to form 5-methylcytosine"
taaccatatgtaaatattctctttaagtatttaccaccgtaaatgaaggaaagccatccacggcttgggctgatgtaaccaggaagtattccaatgatgtgaattattaatgtagaataaag

SEQ ID NO: 20691 - DNA, 122 bp, Homo sapiens
  misc_feature (61)..(62): /note="This region represents a CpG dinucleotide"
  misc_feature (61)..(61): /note="Nucleotide may be methylated to form 5-methylcytosine"
cagaagtggccccagagggtgttttgctcttctttttcttttttaattaagtctgtgacgcgctagaaatgctgatgtctcatgttactgttttttcccccagtgctgccaggttgccagat

SEQ ID NO: 20692 - DNA, 122 bp, Homo sapiens
  misc_feature (61)..(62): /note="This region represents a CpG dinucleotide"
  misc_feature (61)..(61): /note="Nucleotide may be methylated to form 5-methylcytosine"
cccacccggcggtcacaccgccttgcgcgctcggcatgacgtcactcccaccaggcacctcgccttgtcaggagctgccaggcgccaaccgccgacctctgaccgctacgggtcccggctcg

SEQ ID NO: 20693 - DNA, 122 bp, Homo sapiens
  misc_feature (61)..(62): /note="This region represents a CpG dinucleotide"
  misc_feature (61)..(61): /note="Nucleotide may be methylated to form 5-methylcytosine"
aaatccctcagcagatgtgtcttcatgaatcattggtcacactgagtcacatgcctcttccgtgaggtaacatcaaggaaatggaatgtccacaactggcttaatcagagtagctgggaagg

SEQ ID NO: 20694 - DNA, 122 bp, Homo sapiens
  misc_feature (61)..(62): /note="This region represents a CpG dinucleotide"
  misc_feature (61)..(61): /note="Nucleotide may be methylated to form 5-methylcytosine"
atttatccaaccaaatcacactttacaatgcaaatctgccaatcagaccttggatattaacgaggaactgctttaaggggattttggtgtttgtgctgtgaagagcctgcttacctccaacg

SEQ ID NO: 20695 - DNA, 122 bp, Homo sapiens
  misc_feature (61)..(62): /note="This region represents a CpG dinucleotide"
  misc_feature (61)..(61): /note="Nucleotide may be methylated to form 5-methylcytosine"
ccatacggctgcctttctggttgccaggccagcaggtacaaggggtatgtcctctgtgaccgtgagcccaggccagcctctcactctcacttcagggcaggcagacaactccaagcaagcca

SEQ ID NO: 20696 - DNA, 122 bp, Homo sapiens
  misc_feature (61)..(62): /note="This region represents a CpG dinucleotide"
  misc_feature (61)..(61): /note="Nucleotide may be methylated to form 5-methylcytosine"
cttcacaactttgccagatagatgttttcattatcatttaataaaatttaagctgaataacgttccacaatttgatgcctaagtcaaaaagataggaaagagtagaaatgggatttgtaccc

SEQ ID NO: 20697 - DNA, 122 bp, Homo sapiens
  misc_feature (61)..(62): /note="This region represents a CpG dinucleotide"
  misc_feature (61)..(61): /note="Nucleotide may be methylated to form 5-methylcytosine"
ctaagcctcctgagcacaggaatagggtgttcctcggtcactgctaaagctccattgtctcgcttggaaagcacttagtccacagtttctaatgaatgaatgagtgagtgagggaataatct

SEQ ID NO: 20698 - DNA, 122 bp, Homo sapiens
  misc_feature (61)..(62): /note="This region represents a CpG dinucleotide"
  misc_feature (61)..(61): /note="Nucleotide may be methylated to form 5-methylcytosine"
ctaaatctactctgcctgtgctttatgaatggaacaacaaagtctggattacagcacctacgtttatagcgtgatttactgagtatttgaagccctgtttgagaactactgctcagaaaaaa

SEQ ID NO: 20699 - DNA, 122 bp, Homo sapiens
  misc_feature (61)..(62): /note="This region represents a CpG dinucleotide"
  misc_feature (61)..(61): /note="Nucleotide may be methylated to form 5-methylcytosine"
ctttgttctctactgattctgtcagtttttagagcccataaaatagcttcatttctataccgtcttattcacattcagatttttcatatagcatgtcacacacagtataagacattttccat

SEQ ID NO: 20700 - DNA, 122 bp, Homo sapiens
  misc_feature (61)..(62): /note="This region represents a CpG dinucleotide"
  misc_feature (61)..(61): /note="Nucleotide may be methylated to form 5-methylcytosine"
ggttagagagcaaggctggtactccaggctaaacagggcctgtctcagcctcagtcctagcgtgcttccagcgggtgttgtcaggatagcaacctagctggagagacagccctcccctctag

SEQ ID NO: 20701 - DNA, 122 bp, Homo sapiens
  misc_feature (61)..(62): /note="This region represents a CpG dinucleotide"
  misc_feature (61)..(61): /note="Nucleotide may be methylated to form 5-methylcytosine"
gtcaagcaaaagaggacatcctgtataattctgtttatataaactttgaaaaaggcaaaacgaatctgagctgtcagcattcaggatggtggttatccttgaggaggccagaaggaagcatg

SEQ ID NO: 20702 - DNA, 122 bp, Homo sapiens
  misc_feature (61)..(62): /note="This region represents a CpG dinucleotide"
  misc_feature (61)..(61): /note="Nucleotide may be methylated to form 5-methylcytosine"
tgaagcactttctccataatgttcacttctttaatgacaggatagatgttgctgttctgacgactggagtattcagactgatgagaaccactggtgattctcagcagtcccaacatcacatg

SEQ ID NO: 20703 - DNA, 122 bp, Homo sapiens
  misc_feature (61)..(62): /note="This region represents a CpG dinucleotide"
  misc_feature (61)..(61): /note="Nucleotide may be methylated to form 5-methylcytosine"
aagaaacgtgaagtctatacattatctttgtaagcctgtgaatacgtctttatctataaacgcctcatcttgaaagaagctctcctccagggcagtgttttatctcacccaatgtcagagct

SEQ ID NO: 20704 - DNA, 122 bp, Homo sapiens
  misc_feature (61)..(62): /note="This region represents a CpG dinucleotide"
  misc_feature (61)..(61): /note="Nucleotide may be methylated to form 5-methylcytosine"
actaatagaaatccttgagtttgcaggatagtagatcagaaagcaaacaacttgttgaaacgttgagacactatctgcttgtaagataacaaaactggctacactcagttagaaccaatatg

SEQ ID NO: 20705 - DNA, 122 bp, Homo sapiens
  misc_feature (61)..(62): /note="This region represents a CpG dinucleotide"
  misc_feature (61)..(61): /note="Nucleotide may be methylated to form 5-methylcytosine"
tccccatccttcttaggatccaaactttgtctcctatccattacaggctatcaaaactcacgttccaggctttccaatttcgaatcacaagagactgttgctgctaccctgtcaacaacgat

SEQ ID NO: 20706 - DNA, 122 bp, Homo sapiens
  misc_feature (61)..(62): /note="This region represents a CpG dinucleotide"
  misc_feature (61)..(61): /note="Nucleotide may be methylated to form 5-methylcytosine"
tgtcagtggtagtttttcctcttccatgtataaatacttccatttctttggaatgcaattcgtttgggccgtgctcctaaattgatttaagaagatttaaatgatctgtttaaatacttcat

SEQ ID NO: 20707 - DNA, 122 bp, Homo sapiens
  misc_feature (61)..(62): /note="This region represents a CpG dinucleotide"
  misc_feature (61)..(61): /note="Nucleotide may be methylated to form 5-methylcytosine"
cctctctgaaaccacaccctaacccagcctgctggttggtcatctattttccaggctcttcgtaaccctgggcatatctccatatacacccatcacacctgctattactattggttgatgtg

SEQ ID NO: 20708 - DNA, 122 bp, Homo sapiens
  misc_feature (61)..(62): /note="This region represents a CpG dinucleotide"
  misc_feature (61)..(61): /note="Nucleotide may be methylated to form 5-methylcytosine"
attagagggttgcttcaaaggtgaaaaatgaaactttgaaaaattacatgtttgtagatgcgtagaactaaacgggcaagccacactaggttttgtcaaacaatagttttatttgtgtcctg

SEQ ID NO: 20709 - DNA, 122 bp, Homo sapiens
  misc_feature (61)..(62): /note="This region represents a CpG dinucleotide"
  misc_feature (61)..(61): /note="Nucleotide may be methylated to form 5-methylcytosine"
ggataatccacttgtggctcccatttcaagatctttaaagtagtcatgtctcttaagtcccgtttgctgtagaaggaaacacttaacaaatgccagggattagggtgtggatgttcttgggg

SEQ ID NO: 20710 - DNA, 122 bp, Homo sapiens
  misc_feature (61)..(62): /note="This region represents a CpG dinucleotide"
  misc_feature (61)..(61): /note="Nucleotide may be methylated to form 5-methylcytosine"
agtgttattctgctttgtaggcttctggcttttcttcttcaaggcacacttctggctaaacgttttctgaacatggccttctcttagtaatctgtttgaaaagtctgtgatttcccaccctc

SEQ ID NO: 20711 - DNA, 122 bp, Homo sapiens
  misc_feature (61)..(62): /note="This region represents a CpG dinucleotide"
  misc_feature (61)..(61): /note="Nucleotide may be methylated to form 5-methylcytosine"
acctcctaggctcaagcaatcctcccgcgttagtctcctaagtagctgggattataggcacgtgtcatcatgactggttaatttgtgtgtatgtgtttgtgtttgtagagacaggattttac

SEQ ID NO: 20712 - DNA, 122 bp, Homo sapiens
  misc_feature (61)..(62): /note="This region represents a CpG dinucleotide"
  misc_feature (61)..(61): /note="Nucleotide may be methylated to form 5-methylcytosine"
tagtcatggcatgagtcagctgtgagggctgatggcacaccaccgaatactctgctgtggcgccactagcctccatttaccttcttctccaacgttttccagcctccctcataccttgcccc

SEQ ID NO: 20713 - DNA, 122 bp, Homo sapiens
  misc_feature (61)..(62): /note="This region represents a CpG dinucleotide"
  misc_feature (61)..(61): /note="Nucleotide may be methylated to form 5-methylcytosine"
aggacctcctttctgtggactgggtttttgcctcctcaccaagagactgggctccctgggcgagcagaggctgctgggtaagagagatttagttctgtttcaacaagctgtggggccttcga

SEQ ID NO: 20714 - DNA, 122 bp, Homo sapiens
  misc_feature (61)..(62): /note="This region represents a CpG dinucleotide"
  misc_feature (61)..(61): /note="Nucleotide may be methylated to form 5-methylcytosine"
tgcacttcgaagctgaggcctgaacagatcccaaccttttttggaagctgctttctcttacgtaaaacatagacactggtaatcctactaccaacacttgtgataagaacagcatatatttg

SEQ ID NO: 20715 - DNA, 122 bp, Homo sapiens
  misc_feature (61)..(62): /note="This region represents a CpG dinucleotide"
  misc_feature (61)..(61): /note="Nucleotide may be methylated to form 5-methylcytosine"
tcccgccctgcctggccacatctgtgtacatttacttattcctcacatccgtattgtgggcgtgggtatcttttcccccgactgcttctttcaaaaccttgccctaagcaggaggtttttaa

SEQ ID NO: 20716 - DNA, 122 bp, Homo sapiens
  misc_feature (61)..(62): /note="This region represents a CpG dinucleotide"
  misc_feature (61)..(61): /note="Nucleotide may be methylated to form 5-methylcytosine"
acagctgggggccatcctccagcagctctcgcagcagctgggggactaagtccttcgttccggaagaggaagctgtgctgtagtcatagcttccaccacaatgtgtacacagactatattct

SEQ ID NO: 20717 - DNA, 122 bp, Homo sapiens
  misc_feature (61)..(62): /note="This region represents a CpG dinucleotide"
  misc_feature (61)..(61): /note="Nucleotide may be methylated to form 5-methylcytosine"
acagctgatacatttcagggctgggattcaaattcaagacttctgactccagagccctaccgttcaaccaggaagtaccttatacagtcttttccacagatggtttcttcctcagtggggga

SEQ ID NO: 20718 - DNA, 122 bp, Homo sapiens
  misc_feature (61)..(62): /note="This region represents a CpG dinucleotide"
  misc_feature (61)..(61): /note="Nucleotide may be methylated to form 5-methylcytosine"
acccccatttctgtccccattgtgccccgatgttacatcacacactatgattaaattggacgtcagtgcttaaattgttatgaccacgcacacattctctgctgaaccagtagtgctctgca

SEQ ID NO: 20719 - DNA, 122 bp, Homo sapiens
  misc_feature (61)..(62): /note="This region represents a CpG dinucleotide"
  misc_feature (61)..(61): /note="Nucleotide may be methylated to form 5-methylcytosine"
ccgccctcgtgcgcattctggttctagacgtaaatgacaacgcccctgattttgtgcggtcgctctacaaggtgcaggtgcccgaaaatagccccgttggttccatggttgtctccgtgtca

SEQ ID NO: 20720 - DNA, 122 bp, Homo sapiens
  misc_feature (61)..(62): /note="This region represents a CpG dinucleotide"
  misc_feature (61)..(61): /note="Nucleotide may be methylated to form 5-methylcytosine"
tttcgcaccacccccattccggcctctccattgattcctcgatcatcccgccccctacaccgcccactcccgggcatccccattggctgcgtgcttctccggctctcaattcgctgtacgtc

SEQ ID NO: 20721 - DNA, 122 bp, Homo sapiens
  misc_feature (61)..(62): /note="This region represents a CpG dinucleotide"
  misc_feature (61)..(61): /note="Nucleotide may be methylated to form 5-methylcytosine"
tggactctaagaggctatgaattgaattggcctcatcattttggctgctgagatgggagccgtgtgccctgatcctcacaccatttcccatcaccctgccttgctctgccccaccgacaccc

SEQ ID NO: 20722 - DNA, 122 bp, Homo sapiens
  misc_feature (61)..(62): /note="This region represents a CpG dinucleotide"
  misc_feature (61)..(61): /note="Nucleotide may be methylated to form 5-methylcytosine"
aggtgactgcccaggaattctgaccaagtcttgctcatcttcatcggagtctctgagcatcgcagctgccaggcagccaagcattgtgtcgcaactctgcagaagtgccacacacacagtga

SEQ ID NO: 20723 - DNA, 122 bp, Homo sapiens
  misc_feature (61)..(62): /note="This region represents a CpG dinucleotide"
  misc_feature (61)..(61): /note="Nucleotide may be methylated to form 5-methylcytosine"
ccggtaagtcctgagataaagcgtccagtgggggttgacaggatgccactctggaagccccgtctggcacgtttatttctgggctccctccatgacccccttccttgcttttttctatcaca

SEQ ID NO: 20724 - DNA, 122 bp, Homo sapiens
  misc_feature (61)..(62): /note="This region represents a CpG dinucleotide"
  misc_feature (61)..(61): /note="Nucleotide may be methylated to form 5-methylcytosine"
attcttcacctactaggttgtcaaccctctgaaaagccttccagggccacgtgggagcctcgtctgggtgcatatagctcctcggccgcctcctgctgtggatctgatgtggtgttgaagta

SEQ ID NO: 20725 - DNA, 122 bp, Homo sapiens
  misc_feature (61)..(62): /note="This region represents a CpG dinucleotide"
  misc_feature (61)..(61): /note="Nucleotide may be methylated to form 5-methylcytosine"
ttggaactcatctaagtcaaagacaacaacaccctctgagatgctactgacctcatgccacgtaactattctgtggctgccaggaggaaccgcccactcgctcttcttgggtttactcctaa

SEQ ID NO: 20726 - DNA, 122 bp, Homo sapiens
  misc_feature (61)..(62): /note="This region represents a CpG dinucleotide"
  misc_feature (61)..(61): /note="Nucleotide may be methylated to form 5-methylcytosine"
gtgtgtcatgcaatcaatgaccaatgacagtgattgctactattgtactgtatgcctacacgtggtcatttaatgcttgaaccatccctacaaagaaggtatcaacccaatttttctgatgc

SEQ ID NO: 20727 - DNA, 122 bp, Homo sapiens
  misc_feature (61)..(62): /note="This region represents a CpG dinucleotide"
  misc_feature (61)..(61): /note="Nucleotide may be methylated to form 5-methylcytosine"
agaagtattgctgtgaactctacacatagtttatttttaatatgtatactttcctagtgccgtccactgcaaaaaccaagaaacaatggtgagccccataacagtgagcacctctagcacct

SEQ ID NO: 20728 - DNA, 122 bp, Homo sapiens
  misc_feature (61)..(62): /note="This region represents a CpG dinucleotide"
  misc_feature (61)..(61): /note="Nucleotide may be methylated to form 5-methylcytosine"
ttccacatggtcctccccaattaaaatcttggcagcaacttctaggcttactatctgaggcgttgacaccaaaaacagcatcacaaatttctggctcattacccttaaagacttgtctttgc

SEQ ID NO: 20729 - DNA, 122 bp, Homo sapiens
  misc_feature (61)..(62): /note="This region represents a CpG dinucleotide"
  misc_feature (61)..(61): /note="Nucleotide may be methylated to form 5-methylcytosine"
agaggctaaatgatgtggctatgatgtcacagctaggaactggccgagccaagataagaacgtaggcagcatgactctgaagcctatggtcttaacttgtatgctatatttcctcttgtgta

SEQ ID NO: 20730 - DNA, 122 bp, Homo sapiens
  misc_feature (61)..(62): /note="This region represents a CpG dinucleotide"
  misc_feature (61)..(61): /note="Nucleotide may be methylated to form 5-methylcytosine"
tgtctcagttttctaaactaaccacactccaggctttgggtgacttagcaaatgtgttggcgtgggaccagcagaaaggcagattctggtcccagcctgtcgctaactagctgggcgacctt

SEQ ID NO: 20731 - DNA, 122 bp, Homo sapiens
  misc_feature (61)..(62): /note="This region represents a CpG dinucleotide"
  misc_feature (61)..(61): /note="Nucleotide may be methylated to form 5-methylcytosine"
caggtggagagtgggtgggagctgaaatcatcttggtctcttcctgttctggaagtgatgcgcagtgaattagggaaaatgaggaagtgagatggagaggtaaaacacagaagggcagagtg

SEQ ID NO: 20732 - DNA, 122 bp, Homo sapiens
  misc_feature (61)..(62): /note="This region represents a CpG dinucleotide"
  misc_feature (61)..(61): /note="Nucleotide may be methylated to form 5-methylcytosine"
gtatcccataacatatgaatggtaatatttgtggcttattcaaggtactgtatttccttccgctcatgggcaagagcttattttttggctgatctccttttgcagaagaggccaagttcctg

SEQ ID NO: 20733 - DNA, 122 bp, Homo sapiens
  misc_feature (61)..(62): /note="This region represents a CpG dinucleotide"
  misc_feature (61)..(61): /note="Nucleotide may be methylated to form 5-methylcytosine"
atgctgcccccgcgggcgcgctccctgaagtcctttgtggtcacctcagtggtggctttccgtgagtccgagggccaggggtgggcgtgggactggccagccttccatggagtggggctggg

SEQ ID NO: 20734 - DNA, 122 bp, Homo sapiens
  misc_feature (61)..(62): /note="This region represents a CpG dinucleotide"
  misc_feature (61)..(61): /note="Nucleotide may be methylated to form 5-methylcytosine"
actcttgtccactcgcaacagagtgagactccaccttaaaaaaaaataaaaacaacaacacgactcctggcctaatggactgataaggtaaacaagaagaaagacacaggcctgtacacata

SEQ ID NO: 20735 - DNA, 122 bp, Homo sapiens
  misc_feature (61)..(62): /note="This region represents a CpG dinucleotide"
  misc_feature (61)..(61): /note="Nucleotide may be methylated to form 5-methylcytosine"
acctacttatgggacattttcaagttctacttatagatcttgtagttcagggagcagtggcgtctcatgtattcagcacaatgtggagttatgctgttgtttaatgtggcttaggccttctg

SEQ ID NO: 20736 - DNA, 122 bp, Homo sapiens
  misc_feature (61)..(62): /note="This region represents a CpG dinucleotide"
  misc_feature (61)..(61): /note="Nucleotide may be methylated to form 5-methylcytosine"
ctgctgcttgctggctgcatttattcccctctctgagccttggtctcctcatctggaaaacggagattcttatctgtacccagatgaggcacagcatggaaaagactcagcacatagaagac

SEQ ID NO: 20737 - DNA, 122 bp, Homo sapiens
  misc_feature (61)..(62): /note="This region represents a CpG dinucleotide"
  misc_feature (61)..(61): /note="Nucleotide may be methylated to form 5-methylcytosine"
gggttcaccaatatgctaaaatcaatcaatctttccttcagaccgaacctaaatcctaatcgttaaatctttaaaagtgccatatgcagagcaccctgctgcttgcactcagagtacaaaat

SEQ ID NO: 20738 - DNA, 122 bp, Homo sapiens
  misc_feature (61)..(62): /note="This region represents a CpG dinucleotide"
  misc_feature (61)..(61): /note="Nucleotide may be methylated to form 5-methylcytosine"
tagggcccgcccaggccccaaccaccaccctggaaacagctgtgatggctctgcccagggcgccgaggccgggggaagggatctccagggagaggccctggatggggagaggaggtgatgag

SEQ ID NO: 20739 - DNA, 122 bp, Homo sapiens
  misc_feature (61)..(62): /note="This region represents a CpG dinucleotide"
  misc_feature (61)..(61): /note="Nucleotide may be methylated to form 5-methylcytosine"
ccgcaccaggactgcccttcaacttgctgccacacacccgtcgagggcgcactggcctaacgtagtttagaacaaaggcattgcctactgcaggcatggttataccagggaatgacaataaa

SEQ ID NO: 20740 - DNA, 122 bp, Homo sapiens
  misc_feature (61)..(62): /note="This region represents a CpG dinucleotide"
  misc_feature (61)..(61): /note="Nucleotide may be methylated to form 5-methylcytosine"
acacccacagccccgtccactgacaccttcagactcaagagcgagtgccaccgccctaaacggaaagacactcatcacggcagcatctttcaagtgaacagaaagtgtagtttctgaccttg

SEQ ID NO: 20741 - DNA, 122 bp, Homo sapiens
  misc_feature (61)..(62): /note="This region represents a CpG dinucleotide"
  misc_feature (61)..(61): /note="Nucleotide may be methylated to form 5-methylcytosine"
ttcaaactctaaatgacctaaccttgacaggagccatgacagtaaaaaaaaggcaaggtacgaaagtgttgagcttgcccaggtttggaggtttgccccatcatttaagccaaataaatcaa

SEQ ID NO: 20742 - DNA, 122 bp, Homo sapiens
  misc_feature (61)..(62): /note="This region represents a CpG dinucleotide"
  misc_feature (61)..(61): /note="Nucleotide may be methylated to form 5-methylcytosine"
cagcttgaacacatacatgtattagctctgtgcacaggtttaaaataccattgggcggggcgcgatggctcacgcctataatcccagcgctttgggaggctgaggtgggtggatcacgaggt

SEQ ID NO: 20743 - DNA, 122 bp, Homo sapiens
  misc_feature (61)..(62): /note="This region represents a CpG dinucleotide"
  misc_feature (61)..(61): /note="Nucleotide may be methylated to form 5-methylcytosine"
ctgtatccccacggaagttgcaaactgaagcttctttgttcctgccaaatgactcatggacgccctttaaaagagaacgaaacagacgtgttttgatggggaaaatacataaaaaatgcagt

SEQ ID NO: 20744 - DNA, 122 bp, Homo sapiens
  misc_feature (61)..(62): /note="This region represents a CpG dinucleotide"
  misc_feature (61)..(61): /note="Nucleotide may be methylated to form 5-methylcytosine"
tctcacagaagcaactcacatttcacaataagatatgactcaatagtctctctgcgcatgcgtgtcagccaataatgcttagtcagaagaactcaagacagtctatgaagcagtagggaata

SEQ ID NO: 20745 - DNA, 122 bp, Homo sapiens
  misc_feature (61)..(62): /note="This region represents a CpG dinucleotide"
  misc_feature (61)..(61): /note="Nucleotide may be methylated to form 5-methylcytosine"
gtcttcttctgcactttctttctagtgtctagaattgcctgtaggtttacccctggatcccgtcaggatggggctaaatttagaatttttggaaagatgtgagctagcccgtctacagtgac

SEQ ID NO: 20746 - DNA, 122 bp, Homo sapiens
  misc_feature (61)..(62): /note="This region represents a CpG dinucleotide"
  misc_feature (61)..(61): /note="Nucleotide may be methylated to form 5-methylcytosine"
acagtaatgtaattccattgccttttaccatatggctattgtatgacatgtgcgtgtctgcgcattttcacgtgcatatgagcttagtacaatggaatgaggagaccggggtcagataaatc

SEQ ID NO: 20747 - DNA, 122 bp, Homo sapiens
  misc_feature (61)..(62): /note="This region represents a CpG dinucleotide"
  misc_feature (61)..(61): /note="Nucleotide may be methylated to form 5-methylcytosine"
gctgatcactgctgcatgaggcagtgtcataaacccctccttgatgctctctggctggagcggccagttgagtgactcatggagcttgtcatctcagggcctccttccctgatgcacacggc

SEQ ID NO: 20748 - DNA, 122 bp, Homo sapiens
  misc_feature (61)..(62): /note="This region represents a CpG dinucleotide"
  misc_feature (61)..(61): /note="Nucleotide may be methylated to form 5-methylcytosine"
cgagtttatattatgaataaaaggacctaagttgctttttctaaaactgctaatagcgtgcgtttaaaacattccctttttcagcagttatatttactatttttatactacacaatagtcta

SEQ ID NO: 20749 - DNA, 122 bp, Homo sapiens
  misc_feature (61)..(62): /note="This region represents a CpG dinucleotide"
  misc_feature (61)..(61): /note="Nucleotide may be methylated to form 5-methylcytosine"
tcatgaattttggtagtttctcctatagaacttggccaatgctggtgactagacacatggcgggttgacgtgaggtgctgtggttattccaagaatgataattaatacgatacgtctccccc

SEQ ID NO: 20750 - DNA, 122 bp, Homo sapiens
  misc_feature (61)..(62): /note="This region represents a CpG dinucleotide"
  misc_feature (61)..(61): /note="Nucleotide may be methylated to form 5-methylcytosine"
cagcacattcccaattatacttccaattccagacacagataactacattcctctactcaacggcttttagttgaatgtaactttggaatgtgaaatgactcaaggatcatgtaaagctaatt

SEQ ID NO: 20751 - DNA, 122 bp, Homo sapiens
  misc_feature (61)..(62): /note="This region represents a CpG dinucleotide"
  misc_feature (61)..(61): /note="Nucleotide may be methylated to form 5-methylcytosine"
tcaactgatgttttgtctgagcctgaagtaccaccataggcacagttgggaggggaaggccgagtcctggcaatacttctcactggtttgaaactctgagctctggccacagaagcaccatg

SEQ ID NO: 20752 - DNA, 122 bp, Homo sapiens
  misc_feature (61)..(62): /note="This region represents a CpG dinucleotide"
  misc_feature (61)..(61): /note="Nucleotide may be methylated to form 5-methylcytosine"
ttctgtaaaatgactagactcagctagaaagttctgctccatgtgatgctagctggctgccgtcacgtggaaggttgactaggctggaacatccaagatggcttagtcacatggccagcagt

SEQ ID NO: 20753 - DNA, 122 bp, Homo sapiens
  misc_feature (61)..(62): /note="This region represents a CpG dinucleotide"
  misc_feature (61)..(61): /note="Nucleotide may be methylated to form 5-methylcytosine"
ccgggtcagagccgcttgaggactatgctgggcagacagggtcgagacaggtgatctcaccgctcctgccacatgcttccctacaggcctcagcctccttttgcaataaaatgacccagatg

SEQ ID NO: 20754 - DNA, 122 bp, Homo sapiens
  misc_feature (61)..(62): /note="This region represents a CpG dinucleotide"
  misc_feature (61)..(61): /note="Nucleotide may be methylated to form 5-methylcytosine"
gagccaatctatctccagaaacatttaacaaaattgtatgcatatgattgtgtttatttacgcaggaacatatatggaaaggagactcatgtcttttatcagaatttccaaggcatctgtaa

SEQ ID NO: 20755 - DNA, 122 bp, Homo sapiens
  misc_feature (61)..(62): /note="This region represents a CpG dinucleotide"
  misc_feature (61)..(61): /note="Nucleotide may be methylated to form 5-methylcytosine"
tgctgagtccttttgtaaagtgaagacatcctttagaatgcagtggactgtgtagcatagcggttaagagctctgacttgaggcttaagtgctacttactggctgtctgaacttgggccatt

SEQ ID NO: 20756 - DNA, 122 bp, Homo sapiens
  misc_feature (61)..(62): /note="This region represents a CpG dinucleotide"
  misc_feature (61)..(61): /note="Nucleotide may be methylated to form 5-methylcytosine"
taaagtagaagtcaggagtcttagattctagacctgtttttgctgttctgaaaggcttcacgttctgcatcagataaaattttaaggttattgaggtagaatagtgtctaaggtgctgttta

SEQ ID NO: 20757 - DNA, 122 bp, Homo sapiens
  misc_feature (61)..(62): /note="This region represents a CpG dinucleotide"
  misc_feature (61)..(61): /note="Nucleotide may be methylated to form 5-methylcytosine"
tcggctgtgcacaagacatggttgcttctccccaggccagggagtgtcaccaaacacacacgttctttctaaaagactatgcatgcagtgtggtcacagtgtatttatcattgtagctagtc

SEQ ID NO: 20758 - DNA, 122 bp, Homo sapiens
  misc_feature (61)..(62): /note="This region represents a CpG dinucleotide"
  misc_feature (61)..(61): /note="Nucleotide may be methylated to form 5-methylcytosine"
ggtatgtttccctggtcttgctctggtttgtttgattactagtggtttgtgcacagaaagcgtgtgtatgtatttcctgatgttgtggttagtattatcctagtgcccaccccttttataga

SEQ ID NO: 20759 - DNA, 122 bp, Homo sapiens
  misc_feature (61)..(62): /note="This region represents a CpG dinucleotide"
  misc_feature (61)..(61): /note="Nucleotide may be methylated to form 5-methylcytosine"
tgtctgttgatgattcattttttcattcaacaaacatttaatgaggcctacaatgtgcaccggattaggcactgtgaatacaaagatgagtaaggcactgtccttgcccttaaggaatttaa

SEQ ID NO: 20760 - DNA, 122 bp, Homo sapiens
  misc_feature (61)..(62): /note="This region represents a CpG dinucleotide"
  misc_feature (61)..(61): /note="Nucleotide may be methylated to form 5-methylcytosine"
tctccatatgactctcatatatacttctcccagcctctaatcctcaggggataagagtagcgccgacctcatagggcttctgtgagaactattttgagtgaatgcaagtaaaacacacagta

SEQ ID NO: 20761 - DNA, 122 bp, Homo sapiens
  misc_feature (61)..(62): /note="This region represents a CpG dinucleotide"
  misc_feature (61)..(61): /note="Nucleotide may be methylated to form 5-methylcytosine"
tgcacgtgtggcggtgaccatcaaggtttctgacggatcttgtcaagagacttaagtcatcgtcacagtatttcagacgaacgcagtgatgtggccaggtgcacatgctcacccaccatagt

SEQ ID NO: 20762 - DNA, 122 bp, Homo sapiens
  misc_feature (61)..(62): /note="This region represents a CpG dinucleotide"
  misc_feature (61)..(61): /note="Nucleotide may be methylated to form 5-methylcytosine"
tgaggcaccctacaggcaatcaaccaagtaacatcgacagtcattggtattgaggaaacccgccaaggctgctctagacttgggtcggcaaaccacagcctgcgggtaagtccagcctgtgg

SEQ ID NO: 20763 - DNA, 122 bp, Homo sapiens
  misc_feature (61)..(62): /note="This region represents a CpG dinucleotide"
  misc_feature (61)..(61): /note="Nucleotide may be methylated to form 5-methylcytosine"
ttatctttttgccttgcctgtttcctcatctctaagaatcttcgcctcctccctgccccacgaggagggtgagagaattcactgagtaatgtccacttagcacttagcttgcaaggggggaa

SEQ ID NO: 20764 - DNA, 122 bp, Homo sapiens
  misc_feature (61)..(62): /note="This region represents a CpG dinucleotide"
  misc_feature (61)..(61): /note="Nucleotide may be methylated to form 5-methylcytosine"
cccaagttccctctgtagaatctgacaaagaccagggacaccctctgctctgcccttgagcgatgatcccttctcctccactgtgatgtaaaccaggcagcagccatggtacatgagatact

SEQ ID NO: 20765 - DNA, 122 bp, Homo sapiens
  misc_feature (61)..(62): /note="This region represents a CpG dinucleotide"
  misc_feature (61)..(61): /note="Nucleotide may be methylated to form 5-methylcytosine"
gaggcagagagggaaaagttccatgttgatcccaggggacaattccttaccttccttgttcgcctgatagtcaagtgagaaatggcttgcatgacaagatactgcatggaaaaagcctgggc

SEQ ID NO: 20766 - DNA, 122 bp, Homo sapiens
  misc_feature (61)..(62): /note="This region represents a CpG dinucleotide"
  misc_feature (61)..(61): /note="Nucleotide may be methylated to form 5-methylcytosine"
acaccctcctccgcaaagcctcttgtgatctccagtctgactggacacggcttcttgctgcgcccgtgatcctaagcatggggtgtgggtggtagggaaaagcctggagcagggctgcttgg

SEQ ID NO: 20767 - DNA, 122 bp, Homo sapiens
  misc_feature (61)..(62): /note="This region represents a CpG dinucleotide"
  misc_feature (61)..(61): /note="Nucleotide may be methylated to form 5-methylcytosine"
tagcactggtgtctacaggctcgattcccagctctcccacaaggacgtggctcagacgcacgtcaccatctcaacccaatgtaggccacccgctgcaggcgagcttccctacccaatccgac

SEQ ID NO: 20768 - DNA, 122 bp, Homo sapiens
  misc_feature (61)..(62): /note="This region represents a CpG dinucleotide"
  misc_feature (61)..(61): /note="Nucleotide may be methylated to form 5-methylcytosine"
aaattaaaaatgtctggtttttaatccaataatattttcctgaacacattaaggctattacgtacacatggcatgccatctctgcagtttggagaattagtaagagagtcctactcttgcaa

SEQ ID NO: 20769 - DNA, 122 bp, Homo sapiens
  misc_feature (61)..(62): /note="This region represents a CpG dinucleotide"
  misc_feature (61)..(61): /note="Nucleotide may be methylated to form 5-methylcytosine"
attatcttcctgatccgattagtaagaggcagcttgttaaatgaaccttttagttaactccgaatcaaattctttgttaccagaagagtagtttctatcttccagaataaaaagccatgtcc

SEQ ID NO: 20770 - DNA, 122 bp, Homo sapiens
  misc_feature (61)..(62): /note="This region represents a CpG dinucleotide"
  misc_feature (61)..(61): /note="Nucleotide may be methylated to form 5-methylcytosine"
gggaattcttagaaatgataaattgcaggggtcctctgcttcaccccggagagtttcccccgactggcctatgtgtgagtgttttcctcctgcgcgggtctggccttgtgcaagaggcaaca

SEQ ID NO: 20771 - DNA, 122 bp, Homo sapiens
  misc_feature (61)..(62): /note="This region represents a CpG dinucleotide"
  misc_feature (61)..(61): /note="Nucleotide may be methylated to form 5-methylcytosine"
catcttcacaaagaatagaattcaacgcaaacattttcacagtaagtcaataaagtggtacgtcaggatttgggaaatgccactgtttgcaagcacaaatctaaagtctgttttatgacaga

SEQ ID NO: 20772 - DNA, 122 bp, Homo sapiens
  misc_feature (61)..(62): /note="This region represents a CpG dinucleotide"
  misc_feature (61)..(61): /note="Nucleotide may be methylated to form 5-methylcytosine"
accactgactgcaaaattaaccaccatgatagctaataacagctatgccaagtgtgctgccgcgtgcttcacagttagaactcatttccttctcccagctacatgagggaggaactcttgtt

SEQ ID NO: 20773 - DNA, 122 bp, Homo sapiens
  misc_feature (61)..(62): /note="This region represents a CpG dinucleotide"
  misc_feature (61)..(61): /note="Nucleotide may be methylated to form 5-methylcytosine"
ttggaagaggagagaaaagctaagattcttcacagattaagaagctctctgaataacagacgaagaaacttagatgatgatctacaggcaacagagagtcactggaggttttctaaaaggag

SEQ ID NO: 20774 - DNA, 122 bp, Homo sapiens
  misc_feature (61)..(62): /note="This region represents a CpG dinucleotide"
  misc_feature (61)..(61): /note="Nucleotide may be methylated to form 5-methylcytosine"
tgttagtcactgagtctctgttgatctaaattcagctgtttctttaagcattctgtagtccggccctactcccacgtatccaacctagtctaccctagaatccactaacgctttattatgtt

SEQ ID NO: 20775 - DNA, 122 bp, Homo sapiens
  misc_feature (61)..(62): /note="This region represents a CpG dinucleotide"
  misc_feature (61)..(61): /note="Nucleotide may be methylated to form 5-methylcytosine"
tcagagagcatgaaaaggtgagactaaggaggaaattcttttcacagagaagctcagagccgaaccaatccttggctgtagagaaggaggagctttcagagtttgctggttccaagcttttt

SEQ ID NO: 20776 - DNA, 122 bp, Homo sapiens
  misc_feature (61)..(62): /note="This region represents a CpG dinucleotide"
  misc_feature (61)..(61): /note="Nucleotide may be methylated to form 5-methylcytosine"
ttgttctggccaggacatcgggatggatggggaggtggggagagctggagctggagatgacggctggggatttgtcacagagcttcctgatatgcctgaggtggtgggaatggagagtgggg

SEQ ID NO: 20777 - DNA, 122 bp, Homo sapiens
  misc_feature (61)..(62): /note="This region represents a CpG dinucleotide"
  misc_feature (61)..(61): /note="Nucleotide may be methylated to form 5-methylcytosine"
gagcctctgggatctggtttaaaacaaaaccaaaaaaggttttacatacacacatgcacacgcacacacacacacacacacacacgcgcgaaagaagccatcttttcaatgtctgcttctct

SEQ ID NO: 20778 - DNA, 122 bp, Homo sapiens
  misc_feature (61)..(62): /note="This region represents a CpG dinucleotide"
  misc_feature (61)..(61): /note="Nucleotide may be methylated to form 5-methylcytosine"
atttgccattcatacatcttttttggtagtgtctgttcaaatctttgcccatttaaaaaccgggttgttttcttattattgaattttgatagttctttatatattctggatacaagtccttt

SEQ ID NO: 20779 - DNA, 122 bp, Homo sapiens
  misc_feature (61)..(62): /note="This region represents a CpG dinucleotide"
  misc_feature (61)..(61): /note="Nucleotide may be methylated to form 5-methylcytosine"
ggcgtgagggccatactcgggtggtgggggagggggtggggggtgcccatactggggggccgtagcgacttgggccccgacagtgacccccgactggtggacccatccttctcccttcgtag

SEQ ID NO: 20780 - DNA, 122 bp, Homo sapiens
  misc_feature (61)..(62): /note="This region represents a CpG dinucleotide"
  misc_feature (61)..(61): /note="Nucleotide may be methylated to form 5-methylcytosine"
aaatgtgaagtattcacttctctattagtcacaccttttacaccatagactccaaagaggcgttaagcacctggttttcctttggctcagaaaaaccaaccaccaaaaaccgccgtttttta

SEQ ID NO: 20781 - DNA, 122 bp, Homo sapiens
  misc_feature (61)..(62): /note="This region represents a CpG dinucleotide"
  misc_feature (61)..(61): /note="Nucleotide may be methylated to form 5-methylcytosine"
aaactgaaggaaaatccacagggaccgggattgatggagacgcaaaatgggacagaaaggcgggctgaggaaaccaactttcagggaagtggttattacctggatggaatctggaaacacca

SEQ ID NO: 20782 - DNA, 122 bp, Homo sapiens
  misc_feature (61)..(62): /note="This region represents a CpG dinucleotide"
  misc_feature (61)..(61): /note="Nucleotide may be methylated to form 5-methylcytosine"
atgatcctccacgcctgaccaggattacaacttcattcttccagctgctcagatctaaaccgccagagtcatccccgagtcctctcttaaactccacatccgccctgtgggtatccgcctgt

SEQ ID NO: 20783 - DNA, 122 bp, Homo sapiens
  misc_feature (61)..(62): /note="This region represents a CpG dinucleotide"
  misc_feature (61)..(61): /note="Nucleotide may be methylated to form 5-methylcytosine"
cttgaaagacagcagtaaatagaaatcctcccaacaggcagagcctcaggtggtatacctcgccagctacttcatgtggaaaaggaagtggcctgcagtaagaatacaagtgggtttataga

SEQ ID NO: 20784 - DNA, 122 bp, Homo sapiens
  misc_feature (61)..(62): /note="This region represents a CpG dinucleotide"
  misc_feature (61)..(61): /note="Nucleotide may be methylated to form 5-methylcytosine"
cttgttagaaatgcaaattcttgcgccctatcccagacctactatatcagcaactcttagcgggtggggagggtagggctgagctctgtaagtcatactgaagttgagacccactggtctat

SEQ ID NO: 20785 - DNA, 122 bp, Homo sapiens
  misc_feature (61)..(62): /note="This region represents a CpG dinucleotide"
  misc_feature (61)..(61): /note="Nucleotide may be methylated to form 5-methylcytosine"
tgttgtatccatgtaggtataacactgactgtagccaagggcacaaggaccgctaaggaccgttgagcatgctgtgcactgcccaactccagggggcacacgaagcctgaactggctcaggc

SEQ ID NO: 20786 - DNA, 122 bp, Homo sapiens
  misc_feature (61)..(62): /note="This region represents a CpG dinucleotide"
  misc_feature (61)..(61): /note="Nucleotide may be methylated to form 5-methylcytosine"
aatacagcttcaagttactgtctagtctccttttatttcagcctgaaagactcacttcagcgtttcttgcaggacaggtctggtgataatgaactctctcagattttgttaatctggaaatg

SEQ ID NO: 20787 - DNA, 122 bp, Homo sapiens
  misc_feature (61)..(62): /note="This region represents a CpG dinucleotide"
  misc_feature (61)..(61): /note="Nucleotide may be methylated to form 5-methylcytosine"
tggtatgtttcacttgctttttttttttttttctttttctccagcaaattgctcaaatgtcggtgtgctctcatgaacagaaacgatggcacggtgggtcctggtctcaagacttcctctca

SEQ ID NO: 20788 - DNA, 122 bp, Homo sapiens
  misc_feature (61)..(62): /note="This region represents a CpG dinucleotide"
  misc_feature (61)..(61): /note="Nucleotide may be methylated to form 5-methylcytosine"
accttctgtccagaaggaacttgggactgacctggagccccaggaggcctcagtccttgacgcttaagcaacaagtctggattgggtgaaggcaaagctggtgaacatttaccacccacacc

SEQ ID NO: 20789 - DNA, 122 bp, Homo sapiens
  misc_feature (61)..(62): /note="This region represents a CpG dinucleotide"
  misc_feature (61)..(61): /note="Nucleotide may be methylated to form 5-methylcytosine"
gagccccaccagagcagatgagctggaagtgcagcagagttagagcctgggctggactgtcggtggggtagagtctaagttgtttccggtctgagccttcaagttgctgggctgtccttggc

SEQ ID NO: 20790 - DNA, 122 bp, Homo sapiens
  misc_feature (61)..(62): /note="This region represents a CpG dinucleotide"
  misc_feature (61)..(61): /note="Nucleotide may be methylated to form 5-methylcytosine"
gataccagcaggggtgatacatgaagaaaacccattataaatcttccgtgcatgccgttgcggggtggtgcgttgtcagacatagagattgaaatcactcagccttgtggtcatgaggcgtg

SEQ ID NO: 20791 - DNA, 122 bp, Homo sapiens
  misc_feature (61)..(62): /note="This region represents a CpG dinucleotide"
  misc_feature (61)..(61): /note="Nucleotide may be methylated to form 5-methylcytosine"
ccagtgccgtcctaaatcagttccagctagtgaccatttgtgccagtggtgccacaggcacggggaagacctctgtaatcttcacctaatcagatgatacctaaaccagtctggcaacaagg

SEQ ID NO: 20792 - DNA, 122 bp, Homo sapiens
  misc_feature (61)..(62): /note="This region represents a CpG dinucleotide"
  misc_feature (61)..(61): /note="Nucleotide may be methylated to form 5-methylcytosine"
tatatacaggagtatgaaaggcagaagataggtcagagagattttggagatgtcagaacacgggggtggatagtcaaaataatcagagtggatgaaatctcctgaagataatgtatgggtgg

SEQ ID NO: 20793 - DNA, 122 bp, Homo sapiens
  misc_feature (61)..(62): /note="This region represents a CpG dinucleotide"
  misc_feature (61)..(61): /note="Nucleotide may be methylated to form 5-methylcytosine"
ggactctcctttctgtgcatctcagtgtccttgtgtttgcagctgggaggtcggccctgtcgttctcaccccacctgtggcacagcagagagaagggtgcacaggtctttgcagcgtgcctg

SEQ ID NO: 20794 - DNA, 122 bp, Homo sapiens
  misc_feature (61)..(62): /note="This region represents a CpG dinucleotide"
  misc_feature (61)..(61): /note="Nucleotide may be methylated to form 5-methylcytosine"
ggagtggacagctctgtagcttggggccctgcctcttcttctgaggcagtactgcctctgcgcccttggcctggggctcctggctctcaggggtggcaacagccttcccttcctgggcagcg

SEQ ID NO: 20795 - DNA, 122 bp, Homo sapiens
  misc_feature (61)..(62): /note="This region represents a CpG dinucleotide"
  misc_feature (61)..(61): /note="Nucleotide may be methylated to form 5-methylcytosine"
ttttctttgttcatcctatctctagatatctgtttctgctagttctgaaagcattgagaacgtatcctacctgcctttggagaaaagtaaacaaagagatttataacctctctctttttttt

SEQ ID NO: 20796 - DNA, 122 bp, Homo sapiens
  misc_feature (61)..(62): /note="This region represents a CpG dinucleotide"
  misc_feature (61)..(61): /note="Nucleotide may be methylated to form 5-methylcytosine"
gacggacctcatggccttcagcccctgccttcctcctgatctgggatcagttgatgtaggcgaagagcaagatttaaatgttgatcatggcctcaaagtaagtccatttaaatttagaactc

SEQ ID NO: 20797 - DNA, 122 bp, Homo sapiens
  misc_feature (61)..(62): /note="This region represents a CpG dinucleotide"
  misc_feature (61)..(61): /note="Nucleotide may be methylated to form 5-methylcytosine"
aagggttgaagggtgttttattataaagttaagctgcagttgggcaggaaaccacaatgtcgaagacattctcttgaaggaactgttaaggtaacaccaagagcaagtgataatactgaagt

SEQ ID NO: 20798 - DNA, 122 bp, Homo sapiens
  misc_feature (61)..(62): /note="This region represents a CpG dinucleotide"
  misc_feature (61)..(61): /note="Nucleotide may be methylated to form 5-methylcytosine"
caattaactgcctaggctgggtgaaccaaagtaactcagtaaaaaaactttaccagttcccgtcctccctgtagttgctaaataaatattgaaaggactaagataattctctaaagatccct

SEQ ID NO: 20799 - DNA, 122 bp, Homo sapiens
  misc_feature (61)..(62): /note="This region represents a CpG dinucleotide"
  misc_feature (61)..(61): /note="Nucleotide may be methylated to form 5-methylcytosine"
ttaaatattttgaaaatcacttccctggtttcctgtgtcttcagtgaaatggaacacactcgtgtgttagtgctcaaacacagagcctggctctctgcaggcacaacacaaatggtagcagt

SEQ ID NO: 20800 - DNA, 122 bp, Homo sapiens
  misc_feature (61)..(62): /note="This region represents a CpG dinucleotide"
  misc_feature (61)..(61): /note="Nucleotide may be methylated to form 5-methylcytosine"
aagtgctaacagagcaaatctgaaacaagttcatggggattgggtaatgagtcatcgaaacgaaatcttttggaaaccatgctgctatcctctgggatattctctttgtcttctctatcacc

SEQ ID NO: 20801 - DNA, 122 bp, Homo sapiens
  misc_feature (61)..(62): /note="This region represents a CpG dinucleotide"
  misc_feature (61)..(61): /note="Nucleotide may be methylated to form 5-methylcytosine"
tttgttggagaaactgggtagtctgtccagtagaggtatttgtttacttttgacagataacgcattcatgtgttataacattcaaaaggtacaacatagtaaagagtggaaaacttcctccc

SEQ ID NO: 20802 - DNA, 122 bp, Homo sapiens
  misc_feature (61)..(62): /note="This region represents a CpG dinucleotide"
  misc_feature (61)..(61): /note="Nucleotide may be methylated to form 5-methylcytosine"
tttctgaagaaggttacagaatcttcttcagagatcttagggaaaaaaaaaaaagattgtcgtgagagttgaaaatcctgccattgtaaccagttgatctacggtttctgattctgtcatgc

SEQ ID NO: 20803 - DNA, 122 bp, Homo sapiens
  misc_feature (61)..(62): /note="This region represents a CpG dinucleotide"
  misc_feature (61)..(61): /note="Nucleotide may be methylated to form 5-methylcytosine"
agacagcagtgtaaacactcagacaaaaacagagagcccggggaaaggccactgaattaacgtgtgtgttacctagacaggggtgaaagtagtttaaataaaattaaaagtatatggccaaa

SEQ ID NO: 20804 - DNA, 122 bp, Homo sapiens
  misc_feature (61)..(62): /note="This region represents a CpG dinucleotide"
  misc_feature (61)..(61): /note="Nucleotide may be methylated to form 5-methylcytosine"
cagaatctctacctgcaggccacacccagctccacctcagatatgtagtgagtgaccacacgtgtgggttggagtcccacccaaagctccctggaccctagaaggcatagggtgggggcagt

SEQ ID NO: 20805 - DNA, 122 bp, Homo sapiens
  misc_feature (61)..(62): /note="This region represents a CpG dinucleotide"
  misc_feature (61)..(61): /note="Nucleotide may be methylated to form 5-methylcytosine"
ctattgttcctgaaaaaccagatactccaggaggcggatagatgactagggaatggacagcgcaatgaatgttgattgggcatgcacagtacacaggcactgcactgatttctttccatgag

SEQ ID NO: 20806 - DNA, 122 bp, Homo sapiens
  misc_feature (61)..(62): /note="This region represents a CpG dinucleotide"
  misc_feature (61)..(61): /note="Nucleotide may be methylated to form 5-methylcytosine"
cccattccccttgtagagttcatgtctccacaaaaaccaccatttacccagttgcccaagcgagctgcttgagtatcattaacttctacacccctaaatctctgacttctaagctaataaca

SEQ ID NO: 20807 - DNA, 122 bp, Homo sapiens
  misc_feature (61)..(62): /note="This region represents a CpG dinucleotide"
  misc_feature (61)..(61): /note="Nucleotide may be methylated to form 5-methylcytosine"
ttcttgttagctccaccccattcctctagtgcatatgtgggtccttagcctgagttactacgtattgttttattttccttactgcacatggatcaggagatggaattttccactgtggacat

SEQ ID NO: 20808 - DNA, 122 bp, Homo sapiens
  misc_feature (61)..(62): /note="This region represents a CpG dinucleotide"
  misc_feature (61)..(61): /note="Nucleotide may be methylated to form 5-methylcytosine"
aagcggccctgtcagttcaggggccctgacactcagcctttcctggaggggccccagttccgtgagtagcacagtgccaaccccatcagaatattaccacatgtgtcaatcacacaccttgt

SEQ ID NO: 20809 - DNA, 122 bp, Homo sapiens
  misc_feature (61)..(62): /note="This region represents a CpG dinucleotide"
  misc_feature (61)..(61): /note="Nucleotide may be methylated to form 5-methylcytosine"
accccaggggtgtagtgatacctcatggcccagggcttcagccattcaaaaacagacattcgccatgattcatactgttagcataaactatctcgtcaaactaacaaaatgcagcccaaggc

SEQ ID NO: 20810 - DNA, 122 bp, Homo sapiens
  misc_feature (61)..(62): /note="This region represents a CpG dinucleotide"
  misc_feature (61)..(61): /note="Nucleotide may be methylated to form 5-methylcytosine"
ccaccctaatccaggatgatcgtatctcagtactgtcaacttaattacatctgcaaagaccgtttatccgttttttttttttttggagatgaagtctcactctttttgcccaggctggagtg

SEQ ID NO: 20811 - DNA, 122 bp, Homo sapiens
  misc_feature (61)..(62): /note="This region represents a CpG dinucleotide"
  misc_feature (61)..(61): /note="Nucleotide may be methylated to form 5-methylcytosine"
catctcctactgccctccctctccctctctgctcttgcaatagctggaataggccaggcgcgcttcatgctcaggaccttgaatgctttgtgccttgatattgccttgccacacttcccagc

SEQ ID NO: 20812 - DNA, 122 bp, Homo sapiens
  misc_feature (61)..(62): /note="This region represents a CpG dinucleotide"
  misc_feature (61)..(61): /note="Nucleotide may be methylated to form 5-methylcytosine"
gtcatcgggccatggtgttgatacctgcctgcacgtggtgctcagcagcaaggtacaaggcgtgtgtggccctggggtgctggggagagggagaatcccgtggtgagaggcacctcctgggt

SEQ ID NO: 20813 - DNA, 122 bp, Homo sapiens
  misc_feature (61)..(62): /note="This region represents a CpG dinucleotide"
  misc_feature (61)..(61): /note="Nucleotide may be methylated to form 5-methylcytosine"
ggactttctctgtcagagtttggagaaaacactcatgcatttgattcacagccaggagtccgcttgccttttactgatcttctgtttgtcagcagtttccacattaagacagttgagtgagt

SEQ ID NO: 20814 - DNA, 122 bp, Homo sapiens
  misc_feature (61)..(62): /note="This region represents a CpG dinucleotide"
  misc_feature (61)..(61): /note="Nucleotide may be methylated to form 5-methylcytosine"
gttggaagttgtttgatgttttgctttttttaacctcctggtgtccatctgggcagaagccgagtgactgcccacaggagggccctgtttggctctgatgacctcctagagggacttttggg

SEQ ID NO: 20815 - DNA, 122 bp, Homo sapiens
  misc_feature (61)..(62): /note="This region represents a CpG dinucleotide"
  misc_feature (61)..(61): /note="Nucleotide may be methylated to form 5-methylcytosine"
gggtttttgagggatgtacaggagctcccgcaggcccatttcacaacaatgctcagggtacgtgcaaaggcctagcttcactggtagttgtctctgcccaggaacacatggtcagagtccct

SEQ ID NO: 20816 - DNA, 122 bp, Homo sapiens
  misc_feature (61)..(62): /note="This region represents a CpG dinucleotide"
  misc_feature (61)..(61): /note="Nucleotide may be methylated to form 5-methylcytosine"
gtgcagagtcagcaagtttcaaagttttgaagtaataaaagtatcattaggataggagcacgtatggagcagaaggaatggatactagaaatgttcctaggtggaattattaggattgggat

SEQ ID NO: 20817 - DNA, 122 bp, Homo sapiens
  misc_feature (61)..(62): /note="This region represents a CpG dinucleotide"
  misc_feature (61)..(61): /note="Nucleotide may be methylated to form 5-methylcytosine"
ccacacatgcagagtcacatgatataaaccattcattcatctgacaaatagggcacctcacgtatgtcacactctgtcctggcgtggagaatacaatggtgaaatagaaacaacacaagtct

SEQ ID NO: 20818 - DNA, 122 bp, Homo sapiens
  misc_feature (61)..(62): /note="This region represents a CpG dinucleotide"
  misc_feature (61)..(61): /note="Nucleotide may be methylated to form 5-methylcytosine"
tccagccctccccaccgcctggccaccgaagacagaggacagaggcgtggttggcagccacgcgcccttgaggagaccacacacctaggtaaacactggctggaaagacccaaggttgtcaa

SEQ ID NO: 20819 - DNA, 122 bp, Homo sapiens
  misc_feature (61)..(62): /note="This region represents a CpG dinucleotide"
  misc_feature (61)..(61): /note="Nucleotide may be methylated to form 5-methylcytosine"
agagattagcacgttggaaccaccaacatgtcaccttgtggtgtgaggtcatctcgacttcgtaagccctcagcatacccaggcttctcccaaaatctgtgagttgcagcagccacagagag

SEQ ID NO: 20820 - DNA, 122 bp, Homo sapiens
  misc_feature (61)..(62): /note="This region represents a CpG dinucleotide"
  misc_feature (61)..(61): /note="Nucleotide may be methylated to form 5-methylcytosine"
atatgatgaccacccacacgagtgacgtgcccaccacacagcaaaccacggctatgatcacgacacccacagtggcccatccgtcatcgtctaacgatggggctgtcatctgaggggagtcg

SEQ ID NO: 20821 - DNA, 122 bp, Homo sapiens
  misc_feature (61)..(62): /note="This region represents a CpG dinucleotide"
  misc_feature (61)..(61): /note="Nucleotide may be methylated to form 5-methylcytosine"
ctggacaagggataggtgtcccgtggccccagcccacactacctgtggtggtgatgaaggcgtaggacttggaggtctgccccgcccgcaccccgtggacctccacgtggtaggtggtgccg

SEQ ID NO: 20822 - DNA, 122 bp, Homo sapiens
  misc_feature (61)..(62): /note="This region represents a CpG dinucleotide"
  misc_feature (61)..(61): /note="Nucleotide may be methylated to form 5-methylcytosine"
tactcactaggaagtcagatacaatagaaacaagaacttgtcaaggtgactaagaagactcgattcaattcagaagtatctactagacatttcctggtcacctgacaaggtaggaaaacaga

SEQ ID NO: 20823 - DNA, 122 bp, Homo sapiens
  misc_feature (61)..(62): /note="This region represents a CpG dinucleotide"
  misc_feature (61)..(61): /note="Nucleotide may be methylated to form 5-methylcytosine"
gtcgggggcctgtttcattctacttaagattccacaaggcacagacagcagcaactcgtgcgttatttttccctctagaatttccaggacgtcgaggagacgctgtgcagcaagttctgtca

SEQ ID NO: 20824 - DNA, 122 bp, Homo sapiens
  misc_feature (61)..(62): /note="This region represents a CpG dinucleotide"
  misc_feature (61)..(61): /note="Nucleotide may be methylated to form 5-methylcytosine"
acacccaccagatttcctcctacctctcaggctgatcctcctctctcttttttgcaggtccgccttcctgactcaaccaatggtgttggtgttccctgggccaattccagcccatttccttc

SEQ ID NO: 20825 - DNA, 122 bp, Homo sapiens
  misc_feature (61)..(62): /note="This region represents a CpG dinucleotide"
  misc_feature (61)..(61): /note="Nucleotide may be methylated to form 5-methylcytosine"
gcactcacttttttttcaacattgctggctaacaagtactcagttgttgcaacaactacccgtaaataaatagcgagcaggtgaatatctgtttctatggtttctatttacagtagagagag

SEQ ID NO: 20826 - DNA, 122 bp, Homo sapiens
  misc_feature (61)..(62): /note="This region represents a CpG dinucleotide"
  misc_feature (61)..(61): /note="Nucleotide may be methylated to form 5-methylcytosine"
tcttgcaactgctgccagtcttcagaaagattacatcagactggaaaaacctaggagagacgctgtaatgtcttagccgtggtgacctactggggcatcttataacccacttcaacgaggca

SEQ ID NO: 20827 - DNA, 122 bp, Homo sapiens
  misc_feature (61)..(62): /note="This region represents a CpG dinucleotide"
  misc_feature (61)..(61): /note="Nucleotide may be methylated to form 5-methylcytosine"
ctcccccaggtgagggagacctttgctttgttcaccgacatatcccaagcattagaactgcgcctggcaccagcaggtgttcaattatttatttaatgggtgacttggagcagaaaccgaag

SEQ ID NO: 20828 - DNA, 122 bp, Homo sapiens
  misc_feature (61)..(62): /note="This region represents a CpG dinucleotide"
  misc_feature (61)..(61): /note="Nucleotide may be methylated to form 5-methylcytosine"
cttcttaagtggtattagacaacaaacatacatgcttccttacacccatccaaccaacagcgatgttcaagtgttcagttttcattgtgatttattgagaaagggcagcaatataactgact

SEQ ID NO: 20829 - DNA, 122 bp, Homo sapiens
  misc_feature (61)..(62): /note="This region represents a CpG dinucleotide"
  misc_feature (61)..(61): /note="Nucleotide may be methylated to form 5-methylcytosine"
atatgtttgcaggctgtctggattacagattcacaagcttcattcaaagctcgatcaatgcggtaatctgcaccagggtcagtctcctgaatcagtgtttgaagctgaattaaaataaatta

SEQ ID NO: 20830 - DNA, 122 bp, Homo sapiens
  misc_feature (61)..(62): /note="This region represents a CpG dinucleotide"
  misc_feature (61)..(61): /note="Nucleotide may be methylated to form 5-methylcytosine"
acgcaggagcaaacgggtgggtgtgctggtggcgaggtgggtaggggttggtacagggtccgggacaataaattaagcatttgggccacaatgggccaaggtgaggcaccacaggtgggagg

SEQ ID NO: 20831 - DNA, 122 bp, Homo sapiens
  misc_feature (61)..(62): /note="This region represents a CpG dinucleotide"
  misc_feature (61)..(61): /note="Nucleotide may be methylated to form 5-methylcytosine"
gtctcactgtgttgcccaggctcgtctcaaaactcctgaactcaagcaattctcccacctcgacctcctaataagcaaacgcttgttattctgaccactagtttgtagaatagagccatgtg

SEQ ID NO: 20832 - DNA, 122 bp, Homo sapiens
  misc_feature (61)..(62): /note="This region represents a CpG dinucleotide"
  misc_feature (61)..(61): /note="Nucleotide may be methylated to form 5-methylcytosine"
gaaatacaaattaaaaccactatgaagtatcattacacaccaactaaaatggctaaaatacgaacaataggaaatttaataaggatggagaagtgagtcctcatacaatgctggtgcaaatg

SEQ ID NO: 20833 - DNA, 122 bp, Homo sapiens
  misc_feature (61)..(62): /note="This region represents a CpG dinucleotide"
  misc_feature (61)..(61): /note="Nucleotide may be methylated to form 5-methylcytosine"
aggagagcaagaatttctcctgacttcctgccaagctttcagggaccttggagtggtcagcgctatctgccccaacacgaactggagccagattgtgcattctcgactgctcatctgctttc

SEQ ID NO: 20834 - DNA, 122 bp, Homo sapiens
  misc_feature (61)..(62): /note="This region represents a CpG dinucleotide"
  misc_feature (61)..(61): /note="Nucleotide may be methylated to form 5-methylcytosine"
ggcctgaggctgggagtgcaggcatgaatttgagtgcaggctcaggaacatccccagggccgccaggcagggagacacctcttcaactcctggctcctcgactctagctggtgacctaggca

SEQ ID NO: 20835 - DNA, 122 bp, Homo sapiens
  misc_feature (61)..(62): /note="This region represents a CpG dinucleotide"
  misc_feature (61)..(61): /note="Nucleotide may be methylated to form 5-methylcytosine"
tttgtctctttattacacccaaacaccataaacagagccaatgaagagattgctcaggttcgaacaaaagcaaaggctgagagtgcagctctccatgctggactccgcaaagagcagatgaa

SEQ ID NO: 20836 - DNA, 122 bp, Homo sapiens
  misc_feature (61)..(62): /note="This region represents a CpG dinucleotide"
  misc_feature (61)..(61): /note="Nucleotide may be methylated to form 5-methylcytosine"
acattttactccaaactgttgaagacagtgctttctcgttcacagaagaggcttttctagcggcacgaaagaatttggaagcggcagtgttacggtaaaaaaccgacaaggtgcctgatgaa

SEQ ID NO: 20837 - DNA, 122 bp, Homo sapiens
  misc_feature (61)..(62): /note="This region represents a CpG dinucleotide"
  misc_feature (61)..(61): /note="Nucleotide may be methylated to form 5-methylcytosine"
gttcccagaatccccattaaaacaaacaaacaaacaaacaaaacacctatccaagtgatacggttgaactttaaagtaaagagaatcacaaactggcagatctctttaatttatacttaggg

SEQ ID NO: 20838 - DNA, 122 bp, Homo sapiens
  misc_feature (61)..(62): /note="This region represents a CpG dinucleotide"
  misc_feature (61)..(61): /note="Nucleotide may be methylated to form 5-methylcytosine"
gggagggtgacacccgcagccccagcctcctggggtgtgggtatggatcaccttgtgtagcgcctacttagggacaaggtttcatacccaccatcgcatttccagggagatgagagtggaaa

SEQ ID NO: 20839 - DNA, 122 bp, Homo sapiens
  misc_feature (61)..(62): /note="This region represents a CpG dinucleotide"
  misc_feature (61)..(61): /note="Nucleotide may be methylated to form 5-methylcytosine"
agtgtgggtggataggtcttgcatgacaaatccactctaacatttcacaatctccctaagcgtttgaatttcttcctctgcattataccaaggcaagtctgacattttcagttcacttactg

SEQ ID NO: 20840 - DNA, 122 bp, Homo sapiens
  misc_feature (61)..(62): /note="This region represents a CpG dinucleotide"
  misc_feature (61)..(61): /note="Nucleotide may be methylated to form 5-methylcytosine"
ctgaagcagaaatacaaaaactaagaacagaaatgagcaaacaaacaaaaaagaaagaaacgaaatgagttgacaggactcaaaaaagaaacagaaaagagtacacagacattttcaaaata

SEQ ID NO: 20841 - DNA, 122 bp, Homo sapiens
  misc_feature (61)..(62): /note="This region represents a CpG dinucleotide"
  misc_feature (61)..(61): /note="Nucleotide may be methylated to form 5-methylcytosine"
cactcatcttttcatgttgctggaagtcagctcctcttagcggtgtgcagcttgggcttccggagttggctgggtctttgtgcttatcagcgataccctcctgtctcccatccctccctctc

SEQ ID NO: 20842 - DNA, 122 bp, Homo sapiens
  misc_feature (61)..(62): /note="This region represents a CpG dinucleotide"
  misc_feature (61)..(61): /note="Nucleotide may be methylated to form 5-methylcytosine"
agaatgaccactgcactctagcctgagtgacagggtaagactttgaaaaaaaaaaagttgcgagtgatcatccacaccaaatgctggtggttttgcattttgactctggacagagttaggcc

SEQ ID NO: 20843 - DNA, 122 bp, Homo sapiens
  misc_feature (61)..(62): /note="This region represents a CpG dinucleotide"
  misc_feature (61)..(61): /note="Nucleotide may be methylated to form 5-methylcytosine"
acataaattatttacatggatctttatgtataattcatccttatatataccccttaatcacgtagtcatgagaagataactttgctttctttacagaaagggcagagaggaataagataaga

SEQ ID NO: 20844 - DNA, 122 bp, Homo sapiens
  misc_feature (61)..(62): /note="This region represents a CpG dinucleotide"
  misc_feature (61)..(61): /note="Nucleotide may be methylated to form 5-methylcytosine"
tcatctctgctgcttattgattttgtgctgtggacaaatgacttggcttccctgtgcctccgtttctatattttttaagtggggataatgatacaaactagttcatggggctgttgtgagga

SEQ ID NO: 20845 - DNA, 122 bp, Homo sapiens
  misc_feature (61)..(62): /note="This region represents a CpG dinucleotide"
  misc_feature (61)..(61): /note="Nucleotide may be methylated to form 5-methylcytosine"
tggctaacttaaaatcgttgaattcactagtttgcataaacatttaagaatttgaaaacacggttgaaaaacagtgttaccaagaaattttgtaataacatgttcaaatgaagacaaaaatt

SEQ ID NO: 20846 - DNA, 122 bp, Homo sapiens
  misc_feature (61)..(62): /note="This region represents a CpG dinucleotide"
  misc_feature (61)..(61): /note="Nucleotide may be methylated to form 5-methylcytosine"
aactgtttacatggaagccaaaagcttcaagagctagagctggtgacccatgagcaaggtcgaagccaaatcttttatgacccagcttccagtgtcacatagagtcacttctgctgcattcc

SEQ ID NO: 20847 - DNA, 122 bp, Homo sapiens
  misc_feature (61)..(62): /note="This region represents a CpG dinucleotide"
  misc_feature (61)..(61): /note="Nucleotide may be methylated to form 5-methylcytosine"
gactgagtccaaagggcagttatatgctcactactgtgagcaattacctctgaagccagacgtttgacaacagttgatcacaggtcactggccagaagttacatgtactgcagcaaaggttt

SEQ ID NO: 20848 - DNA, 122 bp, Homo sapiens
  misc_feature (61)..(62): /note="This region represents a CpG dinucleotide"
  misc_feature (61)..(61): /note="Nucleotide may be methylated to form 5-methylcytosine"
agcctgtgacttgtttgaattaaactgtactttcttttcaggttgccacaatccattgtgcgtagtggttccatttcaaaagaatgttacaggatagcctcattttatgataactggaataa

SEQ ID NO: 20849 - DNA, 122 bp, Homo sapiens
  misc_feature (61)..(62): /note="This region represents a CpG dinucleotide"
  misc_feature (61)..(61): /note="Nucleotide may be methylated to form 5-methylcytosine"
gcaaacacagccaggctgtcacacatttgcatgccttgatacacagtagtgccacatgcccgtcctcctccagtctgcctgatgaactcctcttcatccctcatagtccaactgggctggcc

SEQ ID NO: 20850 - DNA, 122 bp, Homo sapiens
  misc_feature (61)..(62): /note="This region represents a CpG dinucleotide"
  misc_feature (61)..(61): /note="Nucleotide may be methylated to form 5-methylcytosine"
tcaacaagccaaaccccaacttcaaaagctcctgccgaggagaggaaatactgatcagcacgtccctgctctgacgctgctcaccatggccttggcgctcactgctgccctgccccagaatc

SEQ ID NO: 20851 - DNA, 122 bp, Homo sapiens
  misc_feature (61)..(62): /note="This region represents a CpG dinucleotide"
  misc_feature (61)..(61): /note="Nucleotide may be methylated to form 5-methylcytosine"
ttcctggtcagaaagttcttcctcatgtcaaatctaaatccttcttgctctaaaatcttgcgtaacattaagccggtgtttctcttttgccttaaaaagcatttgagtttttacgctggatg

SEQ ID NO: 20852 - DNA, 122 bp, Homo sapiens
  misc_feature (61)..(62): /note="This region represents a CpG dinucleotide"
  misc_feature (61)..(61): /note="Nucleotide may be methylated to form 5-methylcytosine"
gattcttttttttttttttcacgtggctaacttcttgatgtagctttgctagattcattccgcatctaaactgcttacctctcattcctccgtgcccccgtattgaggcctttcttctaaca

SEQ ID NO: 20853 - DNA, 122 bp, Homo sapiens
  misc_feature (61)..(62): /note="This region represents a CpG dinucleotide"
  misc_feature (61)..(61): /note="Nucleotide may be methylated to form 5-methylcytosine"
tatacagatttatctttctatcatgactgaggtatgcacagagttgactttatgagtgtacgatctgtgttgctgcacagagtcctgcacttaaaagcaccccatactcagtttaatgtctc

SEQ ID NO: 20854 - DNA, 122 bp, Homo sapiens
  misc_feature (61)..(62): /note="This region represents a CpG dinucleotide"
  misc_feature (61)..(61): /note="Nucleotide may be methylated to form 5-methylcytosine"
acctttggacagtgccaacatgtttttcttttgtttgtttgagacggagcgttcctctgtcgccagttagtgtttacagctcctagccccagtgggcgtgtgctaccgtgtgctcttttaat

SEQ ID NO: 20855 - DNA, 122 bp, Homo sapiens
  misc_feature (61)..(62): /note="This region represents a CpG dinucleotide"
  misc_feature (61)..(61): /note="Nucleotide may be methylated to form 5-methylcytosine"
tattgaaaaacgcctctggagattcttcaggcactccttccattatttaataatctttgccgcaaataagctctgccttatagctgacctaaatccctcgggttatctcctgtagataaggg

SEQ ID NO: 20856 - DNA, 122 bp, Homo sapiens
  misc_feature (61)..(62): /note="This region represents a CpG dinucleotide"
  misc_feature (61)..(61): /note="Nucleotide may be methylated to form 5-methylcytosine"
atgtagccaggcagtggtttcagatgtgctatgagtggatgaatcggggcttcaggagcacggagaggaactcccaactcaggcctgagaatcagggaagacttcagaaggaagataagctt

SEQ ID NO: 20857 - DNA, 122 bp, Homo sapiens
  misc_feature (61)..(62): /note="This region represents a CpG dinucleotide"
  misc_feature (61)..(61): /note="Nucleotide may be methylated to form 5-methylcytosine"
ataggacttagtgtgctcaggatgactgcactggacaattgccaccaagactactcaggacgcccccacacattctccaggagagcaaggaaagtggaaatcttacaaagtttcctcacctc

SEQ ID NO: 20858 - DNA, 122 bp, Homo sapiens
  misc_feature (61)..(62): /note="This region represents a CpG dinucleotide"
  misc_feature (61)..(61): /note="Nucleotide may be methylated to form 5-methylcytosine"
gatagggcctctggcctcaaaaatctaacatcccaggaggagataggagggccagccatgcgtggtttgaggttggtattaatgtcatgctgtggatctaatccagcttaaattctgcccag

SEQ ID NO: 20859 - DNA, 122 bp, Homo sapiens
  misc_feature (61)..(62): /note="This region represents a CpG dinucleotide"
  misc_feature (61)..(61): /note="Nucleotide may be methylated to form 5-methylcytosine"
ttaagcttaatgtctctgtttctgtaactttctccataatctggcagtatctcatttcttcgtggccagtgtttgggcactgaaaaggtcaatcaatacatagaattgtgactcaactcacg

SEQ ID NO: 20860 - DNA, 122 bp, Homo sapiens
  misc_feature (61)..(62): /note="This region represents a CpG dinucleotide"
  misc_feature (61)..(61): /note="Nucleotide may be methylated to form 5-methylcytosine"
aaaaacaccaggcctaaaatagtatctaggacaacactggcagaactaaaagaaacagaacgaggaagaaatttgggtggggcatagagcaaatgagttcaatttcacacagaatgattttg

SEQ ID NO: 20861 - DNA, 122 bp, Homo sapiens
  misc_feature (61)..(62): /note="This region represents a CpG dinucleotide"
  misc_feature (61)..(61): /note="Nucleotide may be methylated to form 5-methylcytosine"
cagccactccctacttaggaatcccatgcattcccctcttcttccatctggactgtgccacgccagggaattcatttggtccaggctagaattcactgggaacaattagcaacaggcccaaa

SEQ ID NO: 20862 - DNA, 122 bp, Homo sapiens
  misc_feature (61)..(62): /note="This region represents a CpG dinucleotide"
  misc_feature (61)..(61): /note="Nucleotide may be methylated to form 5-methylcytosine"
gatataaggtctcactctatgagtcagacaaggggaggctcccactcataaccacatggtcgtccccaggctgaccaaccagggaacttcagcagcccaagcactgggaagcccactgggaa

SEQ ID NO: 20863 - DNA, 122 bp, Homo sapiens
  misc_feature (61)..(62): /note="This region represents a CpG dinucleotide"
  misc_feature (61)..(61): /note="Nucleotide may be methylated to form 5-methylcytosine"
atccgcctcagcctcccaaagtgctgggattacaggtgtacaccctgcccagccacaagccgatttttaaaaggtcaaatgctatgacagccattttacaggaaaaaaaaaaattgtatagt

SEQ ID NO: 20864 - DNA, 122 bp, Homo sapiens
  misc_feature (61)..(62): /note="This region represents a CpG dinucleotide"
  misc_feature (61)..(61): /note="Nucleotide may be methylated to form 5-methylcytosine"
tgggagcacaagcctgggtgaccagtggccggaggggaaggaaatggactgaggtggtgacgaagggggacactcctgacacatgtcattccatggctgaatgactaaggagaaatacacag

SEQ ID NO: 20865 - DNA, 122 bp, Homo sapiens
  misc_feature (61)..(62): /note="This region represents a CpG dinucleotide"
  misc_feature (61)..(61): /note="Nucleotide may be methylated to form 5-methylcytosine"
gtagccagaaaacctttccgaaagtaattacgagagcacagcaggcaagagcacagcaggcgagtcagacttctggtgacatgaacactcagcctgctgatatgaatttcagttgtcttcat

SEQ ID NO: 20866 - DNA, 122 bp, Homo sapiens
  misc_feature (61)..(62): /note="This region represents a CpG dinucleotide"
  misc_feature (61)..(61): /note="Nucleotide may be methylated to form 5-methylcytosine"
tgacctgagggcgtcccttaggggctgcagtctcctcttggccatctggaagggtgtgctcggggttctagggggcagatggggcagggtccctgcagccctgtctctgagatgatggactg

SEQ ID NO: 20867 - DNA, 122 bp, Homo sapiens
  misc_feature (61)..(62): /note="This region represents a CpG dinucleotide"
  misc_feature (61)..(61): /note="Nucleotide may be methylated to form 5-methylcytosine"
ggtcgaagtgttacctactgatagctagcacagagtaggtgctgaggtcacagaatgtgacgagaatttcaagaaggagcggtgctcagtgttgcagagattaaggagtatgagattgaaaa

SEQ ID NO: 20868 - DNA, 122 bp, Homo sapiens
  misc_feature (61)..(62): /note="This region represents a CpG dinucleotide"
  misc_feature (61)..(61): /note="Nucleotide may be methylated to form 5-methylcytosine"
ctgtctgggaagtagcaacttcaaatgagagggggataagaaggagttaacctcaggctacggaatggagtacagacagtacaagactcaaaaatgagatgacaaatttcatctactggcaa

SEQ ID NO: 20869 - DNA, 122 bp, Homo sapiens
  misc_feature (61)..(62): /note="This region represents a CpG dinucleotide"
  misc_feature (61)..(61): /note="Nucleotide may be methylated to form 5-methylcytosine"
aatgccaaagttacctattgttaaatattttcaaagcagtgtaggcagtcctgccaaccccgtcctggctgtctccaagagcgctggccaacagtgccaagggtccttgccagtttcctgga

SEQ ID NO: 20870 - DNA, 122 bp, Homo sapiens
  misc_feature (61)..(62): /note="This region represents a CpG dinucleotide"
  misc_feature (61)..(61): /note="Nucleotide may be methylated to form 5-methylcytosine"
atgtattgagacgtgattaaaatatccccaaatgaagggactgaaatgaaaataaccaaacgagataaatgtgtgtggaactgccttgttaacaataaggattatatctgtatatgtcatat

SEQ ID NO: 20871 - DNA, 122 bp, Homo sapiens
  misc_feature (61)..(62): /note="This region represents a CpG dinucleotide"
  misc_feature (61)..(61): /note="Nucleotide may be methylated to form 5-methylcytosine"
gaaataggtcacaaagtgaaatgtgtaaatacatatcactatggttggtaattgtatacacgcagtattataactgtagtcatctcaaataccatgatggacaactgagtcttttgatgagg

SEQ ID NO: 20872 - DNA, 122 bp, Homo sapiens
  misc_feature (61)..(62): /note="This region represents a CpG dinucleotide"
  misc_feature (61)..(61): /note="Nucleotide may be methylated to form 5-methylcytosine"
tcccttcagcccgttgctatagtaatcttccagagctccaaagccatgtctgtctgtgtgcgtatacccaactcacattatctctctctctttctttctctctctctctttctctctgacac

SEQ ID NO: 20873 - DNA, 122 bp, Homo sapiens
  misc_feature (61)..(62): /note="This region represents a CpG dinucleotide"
  misc_feature (61)..(61): /note="Nucleotide may be methylated to form 5-methylcytosine"
tgctgtgagagctgtggcagagcacgtggcattctggaatctctgaacttctcacagtaacgtttttcaatgcttgaaataaaatacccaggattataaaggaaaccaacaacactgaaaga

SEQ ID NO: 20874 - DNA, 122 bp, Homo sapiens
  misc_feature (61)..(62): /note="This region represents a CpG dinucleotide"
  misc_feature (61)..(61): /note="Nucleotide may be methylated to form 5-methylcytosine"
ttgaatcccaaatgttccttataaatggctcttccatttctcaagcagattaagtacatgcgctgcagtaattcaagtcttagaacttattaaagtgagataatatgaagctcctttgtcat

SEQ ID NO: 20875 - DNA, 122 bp, Homo sapiens
  misc_feature (61)..(62): /note="This region represents a CpG dinucleotide"
  misc_feature (61)..(61): /note="Nucleotide may be methylated to form 5-methylcytosine"
ggcgcccgagacacagccagcgggtgttcagaaaggaaaacgctcgctcaacagccttttcggttgattcttacattcaaggtgtgttactatttgtggcaagcatcttttcatttaaatct

SEQ ID NO: 20876 - DNA, 122 bp, Homo sapiens
  misc_feature (61)..(62): /note="This region represents a CpG dinucleotide"
  misc_feature (61)..(61): /note="Nucleotide may be methylated to form 5-methylcytosine"
atttattgtagaaaataacttcacattgctctgcactgtaaaaaacctttgacatacattcgcattttatttaacatttcataacatcactttgaagtttgcagacctgatgtttgtttttg

SEQ ID NO: 20877 - DNA, 122 bp, Homo sapiens
  misc_feature (61)..(62): /note="This region represents a CpG dinucleotide"
  misc_feature (61)..(61): /note="Nucleotide may be methylated to form 5-methylcytosine"
gcaatgtctactgaactaaaattaagtttgttctcactaaaaataatgttgttggccaggcgtggtggctcacgcctgtaatcccagcactttgggaggctgaggtgggtggatcacgaggt

SEQ ID NO: 20878 - DNA, 122 bp, Homo sapiens
  misc_feature (61)..(62): /note="This region represents a CpG dinucleotide"
  misc_feature (61)..(61): /note="Nucleotide may be methylated to form 5-methylcytosine"
aatctgacatgttgtaatacactgttagagacatattgtggctataagattaatgatagccgtaaggcccatgcaaacatcttgcagggctgacactatgtgtcaattagcagtatgatgca

SEQ ID NO: 20879 - DNA, 122 bp, Homo sapiens
  misc_feature (61)..(62): /note="This region represents a CpG dinucleotide"
  misc_feature (61)..(61): /note="Nucleotide may be methylated to form 5-methylcytosine"
tcctacgtgtcatccctgcctcagctcctcctctacaagctcctggcctttgctggatcacgttggcctaaaccaggaagaatacctggcagggctccacatccgggcaactatcgttccct

SEQ ID NO: 20880 - DNA, 122 bp, Homo sapiens
  misc_feature (61)..(62): /note="This region represents a CpG dinucleotide"
  misc_feature (61)..(61): /note="Nucleotide may be methylated to form 5-methylcytosine"
cacttactagcagtgccatttagcttctcactgccttaactttactgattaagtttattgcggtagtagtaacagctccagcctcagagggctctcacttaagagttaatttatctaaaatt

SEQ ID NO: 20881 - DNA, 122 bp, Homo sapiens
  misc_feature (61)..(62): /note="This region represents a CpG dinucleotide"
  misc_feature (61)..(61): /note="Nucleotide may be methylated to form 5-methylcytosine"
agatgaggaaatggaggaacaggggttaagcagtttgcctgaggttgcacagctggtgagcggcaggccacagcaggctccagagtccacccacttaaccaactaggccacactatctgctc

SEQ ID NO: 20882 - DNA, 122 bp, Homo sapiens
  misc_feature (61)..(62): /note="This region represents a CpG dinucleotide"
  misc_feature (61)..(61): /note="Nucleotide may be methylated to form 5-methylcytosine"
aagccctcctcctgcgcaccacatctggggcctccgaggagggacaaagcattcaactcccgggacctgtgggtgggaatgtccccaggcccagccctttagtgcctgctgatggctgtcac

SEQ ID NO: 20883 - DNA, 122 bp, Homo sapiens
  misc_feature (61)..(62): /note="This region represents a CpG dinucleotide"
  misc_feature (61)..(61): /note="Nucleotide may be methylated to form 5-methylcytosine"
ctgggttaagtgctcatgagtcacagagaacctgccttagatctcagtttcagtgactttcgtcagagagataattggagggattctctaaccggttgtcaagggctctctttcttgattgg

SEQ ID NO: 20884 - DNA, 122 bp, Homo sapiens
  misc_feature (61)..(62): /note="This region represents a CpG dinucleotide"
  misc_feature (61)..(61): /note="Nucleotide may be methylated to form 5-methylcytosine"
agttttttatttgaagacactctgaccccacagtgccactgcaggagccagcctggtggacgcagagccctgaggtcacggtagacaagaaaacaggcaccagttattgtccaagaacacag

SEQ ID NO: 20885 - DNA, 122 bp, Homo sapiens
  misc_feature (61)..(62): /note="This region represents a CpG dinucleotide"
  misc_feature (61)..(61): /note="Nucleotide may be methylated to form 5-methylcytosine"
tagtggggaggagtttcttggttaagaagcagaaccttggagctgtgttgtaactacatgcgtaaaggcaggcttaggacatgtcagacgtctgaagcaggaagcaggcaaaggaagcaccg

SEQ ID NO: 20886 - DNA, 122 bp, Homo sapiens
  misc_feature (61)..(62): /note="This region represents a CpG dinucleotide"
  misc_feature (61)..(61): /note="Nucleotide may be methylated to form 5-methylcytosine"
cattaccttattcatgttgtgtcctccccacaacctccacaaaacccaagtgagcctttgcgccatgttggactgcatgactgatgacatgacagctgtgatcaatcaagattccgcaatca

SEQ ID NO: 20887 - DNA, 122 bp, Homo sapiens
  misc_feature (61)..(62): /note="This region represents a CpG dinucleotide"
  misc_feature (61)..(61): /note="Nucleotide may be methylated to form 5-methylcytosine"
ttccagtcagtcccacaagactgccccccattgcagatgccaacaggaagtagtaagtcccgaagttactcacagcttctgcctgacttggctacaaattgaaagttcccatgactgccttc

SEQ ID NO: 20888 - DNA, 122 bp, Homo sapiens
  misc_feature (61)..(62): /note="This region represents a CpG dinucleotide"
  misc_feature (61)..(61): /note="Nucleotide may be methylated to form 5-methylcytosine"
tgctaactgaagcatgccagtcacacacaaagaagtactgtgtgctacagataacaacaacgtgaatgtatttaatactactggctgtacacttggaaatggttaagacagtaaattttatg

SEQ ID NO: 20889 - DNA, 122 bp, Homo sapiens
  misc_feature (61)..(62): /note="This region represents a CpG dinucleotide"
  misc_feature (61)..(61): /note="Nucleotide may be methylated to form 5-methylcytosine"
ggcgaatggcagcacctggctggaaaaggagtgaggggaagtatgggtggctgattgtgacggaaacacaaggctgtacagcactggccatgttccttgagtcaaaatgatccaggtggctt

SEQ ID NO: 20890 - DNA, 122 bp, Homo sapiens
  misc_feature (61)..(62): /note="This region represents a CpG dinucleotide"
  misc_feature (61)..(61): /note="Nucleotide may be methylated to form 5-methylcytosine"
gtataaggagtagttttgcaagagcaaacagcatagcctatacaccgtaggagaaggtcacgaaggaaagaaatgaaaacagaggatgacagacttctaattgatataacctgacttaagaa

SEQ ID NO: 20891 - DNA, 122 bp, Homo sapiens
  misc_feature (61)..(62): /note="This region represents a CpG dinucleotide"
  misc_feature (61)..(61): /note="Nucleotide may be methylated to form 5-methylcytosine"
aagtcaagatgaattaaagatttaaatataagacatcaaactataagaatcctagaagaacgcccaataaacaccattctggaaacttgccctggaatagaatttatggctaagtctggaaa

SEQ ID NO: 20892 - DNA, 122 bp, Homo sapiens
  misc_feature (61)..(62): /note="This region represents a CpG dinucleotide"
  misc_feature (61)..(61): /note="Nucleotide may be methylated to form 5-methylcytosine"
ttcttttttaggagctggtaggatttaacagaatattatcacttctctaaatgcatggaacggggagacttatctgagagtcaggttaatgagaactgattccatctatgaaacccctgcca

SEQ ID NO: 20893 - DNA, 122 bp, Homo sapiens
  misc_feature (61)..(62): /note="This region represents a CpG dinucleotide"
  misc_feature (61)..(61): /note="Nucleotide may be methylated to form 5-methylcytosine"
gtgtatgtgattattgctttacaatccttgaatttgagtcttatgaggcattaccaccttcgtatttgtaataaaactccagctttacagacatcacctaggggaagggaagggaattgggg

SEQ ID NO: 20894 - DNA, 122 bp, Homo sapiens
  misc_feature (61)..(62): /note="This region represents a CpG dinucleotide"
  misc_feature (61)..(61): /note="Nucleotide may be methylated to form 5-methylcytosine"
gagctgtggtttcacacagctaagaagtggccagaggcagcttttgaatccctggtcaggcgtctgtgttgagataacctgaaattcctgttgccaagcatgactttctcatcagaccttac

SEQ ID NO: 20895 - DNA, 122 bp, Homo sapiens
  misc_feature (61)..(62): /note="This region represents a CpG dinucleotide"
  misc_feature (61)..(61): /note="Nucleotide may be methylated to form 5-methylcytosine"
ggcaccagcggtgctttgtctattccagttggctggatgataaaaagaggtgtccaaaaacggaaataaaaaggcaaaagggcaacttggatgtaattatctacaagtagaagatatattca

SEQ ID NO: 20896 - DNA, 122 bp, Homo sapiens
  misc_feature (61)..(62): /note="This region represents a CpG dinucleotide"
  misc_feature (61)..(61): /note="Nucleotide may be methylated to form 5-methylcytosine"
cattttgacctaatgagacgctcagccctgtgttctgtaacttaagacatatcaatagcacgcccatgattgtagcagaggttagcatgcctgcattgcagttgtactcagtctatatgagt

SEQ ID NO: 20897 - DNA, 122 bp, Homo sapiens
  misc_feature (61)..(62): /note="This region represents a CpG dinucleotide"
  misc_feature (61)..(61): /note="Nucleotide may be methylated to form 5-methylcytosine"
ccggccaagattattttaaaaggcatgacacactgtctctcgtgctccaccatggtaagacgtgcttgcttccccttcaccttccgctatgattgtaagtttcctgaggcctcctagtcatg

SEQ ID NO: 20898 - DNA, 122 bp, Homo sapiens
  misc_feature (61)..(62): /note="This region represents a CpG dinucleotide"
  misc_feature (61)..(61): /note="Nucleotide may be methylated to form 5-methylcytosine"
cccactccaagagtgtaatatttcacttaatacacttctgctgctttgcttcgctatctgcgtgtgtctcgtccagttctttgttcaggacaccaagaacctggaactacacggcaccatcc

SEQ ID NO: 20899 - DNA, 122 bp, Homo sapiens
  misc_feature (61)..(62): /note="This region represents a CpG dinucleotide"
  misc_feature (61)..(61): /note="Nucleotide may be methylated to form 5-methylcytosine"
gggaaaccgtggggccagagccctaatccaccatccccaggatttactccgggacagctgcgtggatgggctgtgtcctccctccctcctgcccggcttcccctccttcgctctcttccttc

SEQ ID NO: 20900 - DNA, 122 bp, Homo sapiens
  misc_feature (61)..(62): /note="This region represents a CpG dinucleotide"
  misc_feature (61)..(61): /note="Nucleotide may be methylated to form 5-methylcytosine"
cactgtttggaaaaacagaaagcaagaaaactatcatctgtaatttcacagtataatagacgacacatggagtgaataatgaattgtttctgctatactaagacacatagccagcctacttg

SEQ ID NO: 20901 - DNA, 122 bp, Homo sapiens
  misc_feature (61)..(62): /note="This region represents a CpG dinucleotide"
  misc_feature (61)..(61): /note="Nucleotide may be methylated to form 5-methylcytosine"
cacacaatggctatgaaaatgcaagtagtttcctcgcgtgacctcaccatgattcacatacgtgccactgtttgaaatctggtctgtttgcatttctgttatgacagagagatgatgtttgc

SEQ ID NO: 20902 - DNA, 122 bp, Homo sapiens
  misc_feature (61)..(62): /note="This region represents a CpG dinucleotide"
  misc_feature (61)..(61): /note="Nucleotide may be methylated to form 5-methylcytosine"
aaggtcgcacagcccagaaatggccaagctgggatctgaacccgggcccaggagtccagacgctgcgctgttaaccacagcactgccctgcccccagagaaaggggctttcagcctcttcac

SEQ ID NO: 20903 - DNA, 122 bp, Homo sapiens
  misc_feature (61)..(62): /note="This region represents a CpG dinucleotide"
  misc_feature (61)..(61): /note="Nucleotide may be methylated to form 5-methylcytosine"
cagtgtaacccagagcaattaaatactagaaactgccaatccatggaacacttgcctttccgtgaagcagggtgcatgccccgggcttgaagggcatcgggaccaagactggagcccgcctg

SEQ ID NO: 20904 - DNA, 122 bp, Homo sapiens
  misc_feature (61)..(62): /note="This region represents a CpG dinucleotide"
  misc_feature (61)..(61): /note="Nucleotide may be methylated to form 5-methylcytosine"
agagatgactcacctgcatgtcatactctatttcatcctcagagcaaccctatgaggtcacgccattcacaggtgaggagcccagctcagagaggctaagtcatttgtctgtgggtacatag

SEQ ID NO: 20905 - DNA, 122 bp, Homo sapiens
  misc_feature (61)..(62): /note="This region represents a CpG dinucleotide"
  misc_feature (61)..(61): /note="Nucleotide may be methylated to form 5-methylcytosine"
gtctctaactcttgacctcaatcttccctcggcctcccactcggttcccaggtgagccaccgcacccggcctgatttgcatttttaacaagtttccaggtgatggaaatgtcagtgacatca

SEQ ID NO: 20906 - DNA, 122 bp, Homo sapiens
  misc_feature (61)..(62): /note="This region represents a CpG dinucleotide"
  misc_feature (61)..(61): /note="Nucleotide may be methylated to form 5-methylcytosine"
acatttgtctctcccacgatgacgtcaacgtgtaccagcccttctcttccacatgggaaacgtgttatgttgttccaattgtacattcacttggtgaagggttgtgttaagtgattccaaaa

SEQ ID NO: 20907 - DNA, 122 bp, Homo sapiens
  misc_feature (61)..(62): /note="This region represents a CpG dinucleotide"
  misc_feature (61)..(61): /note="Nucleotide may be methylated to form 5-methylcytosine"
cttgacttataagccaccacagcatgggcagaattcgccataatcacagtgtgtgaagagcgctataggattttagagagattcagcccggacaatcagggttggcttcacggaggaggggg

SEQ ID NO: 20908 - DNA, 122 bp, Homo sapiens
  misc_feature (61)..(62): /note="This region represents a CpG dinucleotide"
  misc_feature (61)..(61): /note="Nucleotide may be methylated to form 5-methylcytosine"
ttgtaggcaaatatcactcattaacataaatgcaaaaacctgaaacaaaagatcagcatacggaatctggtgatacataaacaggataaaacattatcaccaagttgggtttatgccaaaca

SEQ ID NO: 20909 - DNA, 122 bp, Homo sapiens
  misc_feature (61)..(62): /note="This region represents a CpG dinucleotide"
  misc_feature (61)..(61): /note="Nucleotide may be methylated to form 5-methylcytosine"
gactctacaaattttgaggctaagacttaagaggcttagtttccactctgaccctcctggcgtgctgcctgagactgcccgataagactaccccataagaaggcaaacagcccccaggaggg

SEQ ID NO: 20910 - DNA, 122 bp, Homo sapiens
  misc_feature (61)..(62): /note="This region represents a CpG dinucleotide"
  misc_feature (61)..(61): /note="Nucleotide may be methylated to form 5-methylcytosine"
ctggggtcccccctcgatggtgctggtgcctgagttttaatgtgctcccgggcaggcgggcggggctgactcaggcagtccccatactactgaaaataatactgaggatgtgtgccaactcc

SEQ ID NO: 20911 - DNA, 122 bp, Homo sapiens
  misc_feature (61)..(62): /note="This region represents a CpG dinucleotide"
  misc_feature (61)..(61): /note="Nucleotide may be methylated to form 5-methylcytosine"
agagaatttaaaagcagatttgaatatacaattctcaaagcagaaaaccaaacagcaggccgagtgccatggctcacacctgtaatcccagcccttcaggaggctgaggcaagcagattgct

SEQ ID NO: 20912 - DNA, 122 bp, Homo sapiens
  misc_feature (61)..(62): /note="This region represents a CpG dinucleotide"
  misc_feature (61)..(61): /note="Nucleotide may be methylated to form 5-methylcytosine"
cttgggagaagcttggcggtcataagcttgagctcacctatcaggtagagagcttccacacgctcctgggaatttccttgacctagcttgaccctgtaaggcacaagttgctttcctttcac

SEQ ID NO: 20913 - DNA, 122 bp, Homo sapiens
  misc_feature (61)..(62): /note="This region represents a CpG dinucleotide"
  misc_feature (61)..(61): /note="Nucleotide may be methylated to form 5-methylcytosine"
atagcacagatcagtcagtgtaaatccttcagtggcacagccaggatagcagcaccccaacgatactttgccaaagcctccatttttacttcaactgccacagtaacagactggtgtcaccc

SEQ ID NO: 20914 - DNA, 122 bp, Homo sapiens
  misc_feature (61)..(62): /note="This region represents a CpG dinucleotide"
  misc_feature (61)..(61): /note="Nucleotide may be methylated to form 5-methylcytosine"
ctaaaatgggggctgttacatttctgccatgacagagaagtttttggggggaaatcccaacgatgaccacagcctaaaaatgcacagcttagaggggagtttccaatggacttggtcttcag

SEQ ID NO: 20915 - DNA, 122 bp, Homo sapiens
  misc_feature (61)..(62): /note="This region represents a CpG dinucleotide"
  misc_feature (61)..(61): /note="Nucleotide may be methylated to form 5-methylcytosine"
ctttagaggctgctgcccctggattcaatgattatcattttcatcacagcatttactgagcgtttatgacatacctggaaatatctcaagacccagcctcttcacttactagctatgtaacc

SEQ ID NO: 20916 - DNA, 122 bp, Homo sapiens
  misc_feature (61)..(62): /note="This region represents a CpG dinucleotide"
  misc_feature (61)..(61): /note="Nucleotide may be methylated to form 5-methylcytosine"
tatacattatttcacagtggcatcactcatgcctgtggtttcaatgacaatgatccagtccgtgtcccctctcttagcatgaggtccatgcatgtcttttcagccacttcctagacaaatcc

SEQ ID NO: 20917 - DNA, 122 bp, Homo sapiens
  misc_feature (61)..(62): /note="This region represents a CpG dinucleotide"
  misc_feature (61)..(61): /note="Nucleotide may be methylated to form 5-methylcytosine"
taatattcagggtgttaaattcattcacgttctataccttgattgtcttctacaaactggcgttttttagttttttatgttggagagctttaacttttcaacatagcccactgaaataggag

SEQ ID NO: 20918 - DNA, 122 bp, Homo sapiens
  misc_feature (61)..(62): /note="This region represents a CpG dinucleotide"
  misc_feature (61)..(61): /note="Nucleotide may be methylated to form 5-methylcytosine"
ggcaagaaggaaggagggaacagcatgtacaaggactggaaacaagagaggctggccaagcgtgggacagtcaatagctcagtatggtaaggagttagaatttaagacatgcaaattgtgga

SEQ ID NO: 20919 - DNA, 122 bp, Homo sapiens
  misc_feature (61)..(62): /note="This region represents a CpG dinucleotide"
  misc_feature (61)..(61): /note="Nucleotide may be methylated to form 5-methylcytosine"
gagctgccatgcctggccttatttcccttacatttaagtggacagtcgctgcctagggttcgtgtgtgcagtttccctcagtaaatgtgcaatgagcgcctactattctctaagcactcagc

SEQ ID NO: 20920 - DNA, 122 bp, Homo sapiens
  misc_feature (61)..(62): /note="This region represents a CpG dinucleotide"
  misc_feature (61)..(61): /note="Nucleotide may be methylated to form 5-methylcytosine"
cctccgtccgcgtccctcctccctcctccctcctccgcatccctccttccccgccctccgcgaggctgcagcccaggctgagcgccgcctcccaggcccagggccgcccctccaagccccaa

SEQ ID NO: 20921 - DNA, 122 bp, Homo sapiens
  misc_feature (61)..(62): /note="This region represents a CpG dinucleotide"
  misc_feature (61)..(61): /note="Nucleotide may be methylated to form 5-methylcytosine"
aagtttttttttttttttttgtagtcaccagaggatatctctttatttcctttccaggtacgtattaattgacatgttacccatcatctcttgtttgtgcaggagagatgtggtcccggctt

SEQ ID NO: 20922 - DNA, 122 bp, Homo sapiens
  misc_feature (61)..(62): /note="This region represents a CpG dinucleotide"
  misc_feature (61)..(61): /note="Nucleotide may be methylated to form 5-methylcytosine"
tattgtgcttctgacaatataactttggtcagttcattaaatccacacctaagagaaatacgtagtattcagggattaacatttgttggaaattttggttccctggagggagaaggaatatt

SEQ ID NO: 20923 - DNA, 122 bp, Homo sapiens
  misc_feature (61)..(62): /note="This region represents a CpG dinucleotide"
  misc_feature (61)..(61): /note="Nucleotide may be methylated to form 5-methylcytosine"
cctttggaaaaaccaagccccaggtgcagtttcctctgggtcatgagtaagcctttgccacgcttggagtagattccattctgaccttctttcagacaggcctgcccacggcctgttgcgtc

SEQ ID NO: 20924 - DNA, 122 bp, Homo sapiens
  misc_feature (61)..(62): /note="This region represents a CpG dinucleotide"
  misc_feature (61)..(61): /note="Nucleotide may be methylated to form 5-methylcytosine"
tggtgaaatgggtcaacgctgtttgccaggcagcctatgaaactgcaagcaggctactggcgtagtgatagcagcacaggccaaagcagtccacaatctatagctgaatctaggtcaccagg

SEQ ID NO: 20925 - DNA, 122 bp, Homo sapiens
  misc_feature (61)..(62): /note="This region represents a CpG dinucleotide"
  misc_feature (61)..(61): /note="Nucleotide may be methylated to form 5-methylcytosine"
ggaaggaaaatggttcctgatggaaacaccgaaatccagagctcagagaacacggactggcggggcaggcggcagagccttgcggcgctggacacattgaacactcagcgcccagcacaggg

SEQ ID NO: 20926 - DNA, 122 bp, Homo sapiens
  misc_feature (61)..(62): /note="This region represents a CpG dinucleotide"
  misc_feature (61)..(61): /note="Nucleotide may be methylated to form 5-methylcytosine"
tcggagcatataattttggggagccattttcttctagggagttcactttcctgtgcggggcggcggaggaagacaacacataactgaacgacagatgaagataaattataaaagaacattgt

SEQ ID NO: 20927 - DNA, 122 bp, Homo sapiens
  misc_feature (61)..(62): /note="This region represents a CpG dinucleotide"
  misc_feature (61)..(61): /note="Nucleotide may be methylated to form 5-methylcytosine"
aaatctgataagaagcatttacaagctattctcgctgaagcctgctacaggcttcatctgcgtaataagaaatttgctttccataattgcttatcttaatccagacagttcttttccattga

SEQ ID NO: 20928 - DNA, 122 bp, Homo sapiens
  misc_feature (61)..(62): /note="This region represents a CpG dinucleotide"
  misc_feature (61)..(61): /note="Nucleotide may be methylated to form 5-methylcytosine"
atcacccaagacggagctcccaccacatcctgatcacagcgttgcagagatcatgagacccggcctttgcaggcaagagttgcttgtcattcaaagcattttccctgaattccagacagcct

SEQ ID NO: 20929 - DNA, 122 bp, Homo sapiens
  misc_feature (61)..(62): /note="This region represents a CpG dinucleotide"
  misc_feature (61)..(61): /note="Nucleotide may be methylated to form 5-methylcytosine"
catatggggacatggcacagggaggactctgtccctgccttcacgaaggggaattccaaacgagtcacgaagtccttctgactagggaccaaggcactagcctgtgtcagagataacatggc

SEQ ID NO: 20930 - DNA, 122 bp, Homo sapiens
  misc_feature (61)..(62): /note="This region represents a CpG dinucleotide"
  misc_feature (61)..(61): /note="Nucleotide may be methylated to form 5-methylcytosine"
tcagcttttcttacactgtagagtcactctgtacagaggacatctgtggttttcccttgccgagcatccactctgctccttctgttagcagcaccctagttatcctccgggaaaccaccccg

SEQ ID NO: 20931 - DNA, 122 bp, Homo sapiens
  misc_feature (61)..(62): /note="This region represents a CpG dinucleotide"
  misc_feature (61)..(61): /note="Nucleotide may be methylated to form 5-methylcytosine"
ctcttttaggtctctttcagttcataaatctttttttctttcagtttctttttgaaggaacgggattgattgtgcatcctacagagtgacccacagttcagattctgttggttccttcccca

SEQ ID NO: 20932 - DNA, 122 bp, Homo sapiens
  misc_feature (61)..(62): /note="This region represents a CpG dinucleotide"
  misc_feature (61)..(61): /note="Nucleotide may be methylated to form 5-methylcytosine"
ctccgtagagggtgggagtttagacatctggctccaagttgtaaacctacctacttgtcacggaaatatgagaagttttaattttcctttggataaaggcaatcagctcccacagatggcca

SEQ ID NO: 20933 - DNA, 122 bp, Homo sapiens
  misc_feature (61)..(62): /note="This region represents a CpG dinucleotide"
  misc_feature (61)..(61): /note="Nucleotide may be methylated to form 5-methylcytosine"
tcactcccaccttccttgtaagctctcctgagtgctctgagatgcttgtcctgctctccacgcaggaactcaaatccatgcagggaaggttaataaaaaccactggtcaggtgctattgact

SEQ ID NO: 20934 - DNA, 122 bp, Homo sapiens
  misc_feature (61)..(62): /note="This region represents a CpG dinucleotide"
  misc_feature (61)..(61): /note="Nucleotide may be methylated to form 5-methylcytosine"
tcagaggcattcagactgcaaaactgctgacttcacactgtggacagtgtttcccaaggccgttggaacaagacatcataatgagattcttaccccttgtaatgcctcccttcttcacttga

SEQ ID NO: 20935 - DNA, 122 bp, Homo sapiens
  misc_feature (61)..(62): /note="This region represents a CpG dinucleotide"
  misc_feature (61)..(61): /note="Nucleotide may be methylated to form 5-methylcytosine"
atcaacttgtcatttccttcattaggccaggagctcggagggacactgcattgattagggcgcaaaccagctttagctcgtcatcgttgtgtgcttagaggaagttcacctgctttggcctc

SEQ ID NO: 20936 - DNA, 122 bp, Homo sapiens
  misc_feature (61)..(62): /note="This region represents a CpG dinucleotide"
  misc_feature (61)..(61): /note="Nucleotide may be methylated to form 5-methylcytosine"
gtgtttacaaatcttaaattacatgatcaagaaccagggaccagacaaccagaacctagccgtcaccaattaagaagtcaggattaaggactcgtggactgacggtagatgccagtggaaac

SEQ ID NO: 20937 - DNA, 122 bp, Homo sapiens
  misc_feature (61)..(62): /note="This region represents a CpG dinucleotide"
  misc_feature (61)..(61): /note="Nucleotide may be methylated to form 5-methylcytosine"
atgaaccaaagaaaagttaacaaaatattaacttctgagaaggtttgggcacagggtactcgtaagatatctaggaggtgacagaggaagtctgcaacatatttaaagccgggaagcttgag

SEQ ID NO: 20938 - DNA, 122 bp, Homo sapiens
  misc_feature (61)..(62): /note="This region represents a CpG dinucleotide"
  misc_feature (61)..(61): /note="Nucleotide may be methylated to form 5-methylcytosine"
gggcagttggtgctgcttgtgtgtgggaggcatgcagacctctctgccgggctgcttgagcgtccttatggcatggcaactggcttcctccagagtgaggaatcccagagagagcaaggcag

SEQ ID NO: 20939 - DNA, 122 bp, Homo sapiens
  misc_feature (61)..(62): /note="This region represents a CpG dinucleotide"
  misc_feature (61)..(61): /note="Nucleotide may be methylated to form 5-methylcytosine"
gactatgctctcagaatatgttctagaacacctaagttgcaattcttaaaatcaacacagcgtaagactgctttaggaggaagtgatcaagctcaaagcaacctaggcatgatgtgccttgt

SEQ ID NO: 20940 - DNA, 122 bp, Homo sapiens
  misc_feature (61)..(62): /note="This region represents a CpG dinucleotide"
  misc_feature (61)..(61): /note="Nucleotide may be methylated to form 5-methylcytosine"
gggctcccgtggatgctggtaccactcttccttaatctgggtgctggttactcaacgtttcgtgaaaattcacgtatctgtacactaatgagttatacatttttccgtatatatgtcatact

SEQ ID NO: 20941 - DNA, 122 bp, Homo sapiens
  misc_feature (61)..(62): /note="This region represents a CpG dinucleotide"
  misc_feature (61)..(61): /note="Nucleotide may be methylated to form 5-methylcytosine"
ataccttcctcttaagcttacagtctaaaggggaaatagtcatgcaatcacagtacaatacgtgaattgctactgtcaagctttagattctagatatagtaactggagcacaagaaaagaca

SEQ ID NO: 20942 - DNA, 122 bp, Homo sapiens
  misc_feature (61)..(62): /note="This region represents a CpG dinucleotide"
  misc_feature (61)..(61): /note="Nucleotide may be methylated to form 5-methylcytosine"
tactgagtgtgaggaatcttgtgtggctgctgaggaatttagctgccactttccaggcaccggaacaatgtgcccattcgtggattaaggaaaccatgacctcaagcctcctaatcctcctc

SEQ ID NO: 20943 - DNA, 122 bp, Homo sapiens
  misc_feature (61)..(62): /note="This region represents a CpG dinucleotide"
  misc_feature (61)..(61): /note="Nucleotide may be methylated to form 5-methylcytosine"
ctaatgtcaagggcagtgttttgctttctcattgtaacccccaggagtgattaagatcttcgtttagaatctgcaggattggccgggcgtggtggctcatgcctgtaattccagtactttgg

SEQ ID NO: 20944 - DNA, 122 bp, Homo sapiens
  misc_feature (61)..(62): /note="This region represents a CpG dinucleotide"
  misc_feature (61)..(61): /note="Nucleotide may be methylated to form 5-methylcytosine"
agttaaatataatcaaggaatttccctgtctttgctatttgagattgtgaccacaacaggcggttggctgaaagggaaactgaagggcggggagggagggaaatagatgaaaaaacaaaaca

SEQ ID NO: 20945 - DNA, 122 bp, Homo sapiens
  misc_feature (61)..(62): /note="This region represents a CpG dinucleotide"
  misc_feature (61)..(61): /note="Nucleotide may be methylated to form 5-methylcytosine"
tatgaaaccacctctgttacaatgatgtccgtgcctctgaaatgcgtccacgcagaggatcgcgcagaggcagaaggaggcttggggggtgtgaaggaagaatgcaggatgaggacactaca

SEQ ID NO: 20946 - DNA, 122 bp, Homo sapiens
  misc_feature (61)..(62): /note="This region represents a CpG dinucleotide"
  misc_feature (61)..(61): /note="Nucleotide may be methylated to form 5-methylcytosine"
cttttgggtccccgcctgacagctcttgccgtctgtgcctcacgtccacacggatgataacgaacccctcatggggctgttgggatgacgaggtgagacggcatctgtcagctcttacagag

SEQ ID NO: 20947 - DNA, 122 bp, Homo sapiens
  misc_feature (61)..(62): /note="This region represents a CpG dinucleotide"
  misc_feature (61)..(61): /note="Nucleotide may be methylated to form 5-methylcytosine"
cacattccaaagaagttactgtcagtgtttcttcatatataaaattcaagtgagttcttacgtgtgtaattcacatcatttttctcctcatctcatgcataatttattgcaagtttattttt

SEQ ID NO: 20948 - DNA, 122 bp, Homo sapiens
  misc_feature (61)..(62): /note="This region represents a CpG dinucleotide"
  misc_feature (61)..(61): /note="Nucleotide may be methylated to form 5-methylcytosine"
tacagccatcactggaacaaattgaaacctccccgccccgttttctgcctttggtgcaggcggggccgcgttcccagataccgtgagaggccttggggcgcggaggttgggggcagcctcgg

SEQ ID NO: 20949 - DNA, 122 bp, Homo sapiens
  misc_feature (61)..(62): /note="This region represents a CpG dinucleotide"
  misc_feature (61)..(61): /note="Nucleotide may be methylated to form 5-methylcytosine"
atgtcatatcctttctatagcagagcagtaaaaatacacacaagataaaatgctacataacggtaagagtttaaagtctattggagtcattaaaataagaacaagttttcatatatatacac

SEQ ID NO: 20950 - DNA, 122 bp, Homo sapiens
  misc_feature (61)..(62): /note="This region represents a CpG dinucleotide"
  misc_feature (61)..(61): /note="Nucleotide may be methylated to form 5-methylcytosine"
ttattttatttcttttttagtatactgacaatttaaggcagattctagattgactcaatgcgtgtgatccagttaactgaatgcaattttggtatcaattctccaagcaaaaatttcttgat

SEQ ID NO: 20951 - DNA, 122 bp, Homo sapiens
  misc_feature (61)..(62): /note="This region represents a CpG dinucleotide"
  misc_feature (61)..(61): /note="Nucleotide may be methylated to form 5-methylcytosine"
aagttgctacttgctcggtcccctgaacttgggttatttctgtggtcagggcaatggcagcgttttcaggtaccagcttcaccacagtcagcactttccagaagagttcctgggctggctgg

SEQ ID NO: 20952 - DNA, 122 bp, Homo sapiens
  misc_feature (61)..(62): /note="This region represents a CpG dinucleotide"
  misc_feature (61)..(61): /note="Nucleotide may be methylated to form 5-methylcytosine"
catgcctgccctggtacagcgccgcatcgcagactacgaggctgcctcggctgtgccaggcgttgctgctgaacagcctggggtctctccatcaggcagctagccatacccaaccccaggaa

SEQ ID NO: 20953 - DNA, 122 bp, Homo sapiens
  misc_feature (61)..(62): /note="This region represents a CpG dinucleotide"
  misc_feature (61)..(61): /note="Nucleotide may be methylated to form 5-methylcytosine"
ttccttttctgagacttctggtttcttcctcatggctcatattatgactaatttcagacgcgttaaatccctctatcttgagacttgtgtacttgcgtgtacaagacaggtaacagtcttat

SEQ ID NO: 20954 - DNA, 122 bp, Homo sapiens
  misc_feature (61)..(62): /note="This region represents a CpG dinucleotide"
  misc_feature (61)..(61): /note="Nucleotide may be methylated to form 5-methylcytosine"
ttcccttatttaaccacatgttccatgcacagatggtatttatcttcaggagatgactcacgcccttgtcaacatacctttctatattaaatatccctatcacatacaaactggacctcaga

SEQ ID NO: 20955 - DNA, 122 bp, Homo sapiens
  misc_feature (61)..(62): /note="This region represents a CpG dinucleotide"
  misc_feature (61)..(61): /note="Nucleotide may be methylated to form 5-methylcytosine"
tgggcatgtgcaggcagacagcagaagtcacatcctataggttctatttagcattcacctcgtgactcagtccagatactcacttaataaccaagttcaggttcaggaaacagccaaatttc

SEQ ID NO: 20956 - DNA, 122 bp, Homo sapiens
  misc_feature (61)..(62): /note="This region represents a CpG dinucleotide"
  misc_feature (61)..(61): /note="Nucleotide may be methylated to form 5-methylcytosine"
tatagatgagaactttgatgcttagagcagatgtgttgctggctcatagcggcatttgaacgcggggctgctgatttctgggcctgtattatttctaagacacctcactgccttctgcacta

SEQ ID NO: 20957 - DNA, 122 bp, Homo sapiens
  misc_feature (61)..(62): /note="This region represents a CpG dinucleotide"
  misc_feature (61)..(61): /note="Nucleotide may be methylated to form 5-methylcytosine"
ttcagggacagctcaagtatggggcaataactgaacccatcaccaggagcaacttgctgccgtgtggtcttgcgggggcaccacagtgagccccacctcggggtggctcatcacacacagtc

SEQ ID NO: 20958 - DNA, 122 bp, Homo sapiens
  misc_feature (61)..(62): /note="This region represents a CpG dinucleotide"
  misc_feature (61)..(61): /note="Nucleotide may be methylated to form 5-methylcytosine"
gtatataactctcatcagtcaagtgagtacaaatgtgtagatagtatgtatctaagtccacggaggggtgctacccaacgattatactacactggcccctcctctgtggttttgctttccaa

SEQ ID NO: 20959 - DNA, 122 bp, Homo sapiens
  misc_feature (61)..(62): /note="This region represents a CpG dinucleotide"
  misc_feature (61)..(61): /note="Nucleotide may be methylated to form 5-methylcytosine"
agaacacagagggcaggaacagctgtggcctcgggccagatacctgcattctgtgtgaggcggttaaatgctgacaaggtgtggattgactgtgacaagttagagttgcccgtggtgaaacc

SEQ ID NO: 20960 - DNA, 122 bp, Homo sapiens
  misc_feature (61)..(62): /note="This region represents a CpG dinucleotide"
  misc_feature (61)..(61): /note="Nucleotide may be methylated to form 5-methylcytosine"
gtccaactttatgatgtgcccaaaagaggagcatcaaaatattttaaacagcactaatgacgcagattagccccaaaattgttcttgtcactgtggtcgttaaatgtgactatttgtatctt

SEQ ID NO: 20961 - DNA, 122 bp, Homo sapiens
  misc_feature (61)..(62): /note="This region represents a CpG dinucleotide"
  misc_feature (61)..(61): /note="Nucleotide may be methylated to form 5-methylcytosine"
ggggcagctgcccccgtcggcccctaaatggtgcttggcagcttggcggagtgcacctgacgcagcagcaggacaagcgcagccaggagcgcggaggcgaagagcagcaggaggacgaccca

SEQ ID NO: 20962 - DNA, 122 bp, Homo sapiens
  misc_feature (61)..(62): /note="This region represents a CpG dinucleotide"
  misc_feature (61)..(61): /note="Nucleotide may be methylated to form 5-methylcytosine"
gggcagagcccaccaaccttgggggcacaccaggtatggcaggagaatggaacatggtcccggattttgtacttggtgtggacagcaggtgcctctgtccatttcccgttgctgtgatgaca

SEQ ID NO: 20963 - DNA, 122 bp, Homo sapiens
  misc_feature (61)..(62): /note="This region represents a CpG dinucleotide"
  misc_feature (61)..(61): /note="Nucleotide may be methylated to form 5-methylcytosine"
taacagagttcctcaaaaacaggcaggtacaggcatgttcccaaaagcagtggcggagcacgccatgagaccacacaggcccttactcgtcaggaggaggactctgatttttactgtaacct

SEQ ID NO: 20964 - DNA, 122 bp, Homo sapiens
  misc_feature (61)..(62): /note="This region represents a CpG dinucleotide"
  misc_feature (61)..(61): /note="Nucleotide may be methylated to form 5-methylcytosine"
ctcagggtaaaagagcttatggtattcggcagtgacaacccccagtcctcaatggcttaacgcaagtccactgggagtccaggtgcatctccaggacagtggccctttacataatgactgca

SEQ ID NO: 20965 - DNA, 122 bp, Homo sapiens
  misc_feature (61)..(62): /note="This region represents a CpG dinucleotide"
  misc_feature (61)..(61): /note="Nucleotide may be methylated to form 5-methylcytosine"
aaaaaaatcaaggcgctactttgcatttaaaattcatttttgaaacatactggcagcaaacgccacactattgcagttagggaagacaggagagcaaatgtcaggtcttggcaaagtggggt

SEQ ID NO: 20966 - DNA, 122 bp, Homo sapiens
  misc_feature (61)..(62): /note="This region represents a CpG dinucleotide"
  misc_feature (61)..(61): /note="Nucleotide may be methylated to form 5-methylcytosine"
aaaagggtcctggtttccctgtttctgtaagtgacacagccaggaaggacgtccaggactcgcctgagcattgtggctggctgacgcctcaggtccgctaagcatttcctgaattcacccca

SEQ ID NO: 20967 - DNA, 122 bp, Homo sapiens
  misc_feature (61)..(62): /note="This region represents a CpG dinucleotide"
  misc_feature (61)..(61): /note="Nucleotide may be methylated to form 5-methylcytosine"
agaaacacagcacatgctgagcagcccacaaagcccccattattgctgtgtgggcaactccgtttgcatctcattgaaaatgttgtcttgcacatcaacatacgcaattaaaaaataaaaga

SEQ ID NO: 20968 - DNA, 122 bp, Homo sapiens
  misc_feature (61)..(62): /note="This region represents a CpG dinucleotide"
  misc_feature (61)..(61): /note="Nucleotide may be methylated to form 5-methylcytosine"
tattaagtatatttaatttacttttaattgacaaatagttcttatgcatactcacgggtccgtggcgtccttaggataggtttaatgcgtggtgattaggttagggtgattaacatgtccat

SEQ ID NO: 20969 - DNA, 122 bp, Homo sapiens
  misc_feature (61)..(62): /note="This region represents a CpG dinucleotide"
  misc_feature (61)..(61): /note="Nucleotide may be methylated to form 5-methylcytosine"
tgtgctccttcctatcaaatctccttagtataattaaacacaaacaacccagaacactttcgctttattttatttatttattcagttggggtctagttctatcgcccaggctggagtgcagt

SEQ ID NO: 20970 - DNA, 122 bp, Homo sapiens
  misc_feature (61)..(62): /note="This region represents a CpG dinucleotide"
  misc_feature (61)..(61): /note="Nucleotide may be methylated to form 5-methylcytosine"
tttgttcattcattcattctgtcaacacacttacggtaaactcctgtgtgtaacatgttacgcttgtgtctaggtctgcaaataaccccatgtttagaagttcatggtcagcaggttcctca

SEQ ID NO: 20971 - DNA, 122 bp, Homo sapiens
  misc_feature (61)..(62): /note="This region represents a CpG dinucleotide"
  misc_feature (61)..(61): /note="Nucleotide may be methylated to form 5-methylcytosine"
ggttctaaaaagcctattcctgaaggcctgaagaactgattttaataacccataataatacgggagggagatagagttgactaattttcagtttcacagtttggctaatgcctacagtaaga

SEQ ID NO: 20972 - DNA, 122 bp, Homo sapiens
  misc_feature (61)..(62): /note="This region represents a CpG dinucleotide"
  misc_feature (61)..(61): /note="Nucleotide may be methylated to form 5-methylcytosine"
accaatttaaaccttttactgttgtttgaaagtgaaatggaaacccaagctcttctggcacgaagattggcatccagtgtgactgtcctctgggcaatgcaaaacatttgctccctgcatca

SEQ ID NO: 20973 - DNA, 122 bp, Homo sapiens
  misc_feature (61)..(62): /note="This region represents a CpG dinucleotide"
  misc_feature (61)..(61): /note="Nucleotide may be methylated to form 5-methylcytosine"
tggcaaacagatgtgacttggcaaaaaagaaagcagaaatcaccaggaagtggaggctgccgccagcagggcatttgaatgcacagccaaatgggcgtgatctctggtccacccaagacaga

SEQ ID NO: 20974 - DNA, 122 bp, Homo sapiens
  misc_feature (61)..(62): /note="This region represents a CpG dinucleotide"
  misc_feature (61)..(61): /note="Nucleotide may be methylated to form 5-methylcytosine"
ctctaaagattctggtatatccagcccaaccagcccattttaattgaaaatttactgctacgtaataaaagacgttaataacatgtacaatatagatacaggaaaaaaaagtttgagtttaa

SEQ ID NO: 20975 - DNA, 122 bp, Homo sapiens
  misc_feature (61)..(62): /note="This region represents a CpG dinucleotide"
  misc_feature (61)..(61): /note="Nucleotide may be methylated to form 5-methylcytosine"
tttctccacatagtaaatcagccctaagacacagaagaaacccagaagatttggcagtgccgacaggcatagtgtggcagttctgctctgctggtctctgagtggccatactaagtctgaag

SEQ ID NO: 20976 - DNA, 122 bp, Homo sapiens
  misc_feature (61)..(62): /note="This region represents a CpG dinucleotide"
  misc_feature (61)..(61): /note="Nucleotide may be methylated to form 5-methylcytosine"
gtttgcttttacttcttatagcatggtcttactagctgctttaaaatctttgtctgataacgccaacatttgtgtcatcttggggttggcatctgttggctgccttccctggcaagtacatg

SEQ ID NO: 20977 - DNA, 122 bp, Homo sapiens
  misc_feature (61)..(62): /note="This region represents a CpG dinucleotide"
  misc_feature (61)..(61): /note="Nucleotide may be methylated to form 5-methylcytosine"
attgccactttggttttggtgggttttggctgacttctttaccacatctcattttatcaacggggattttgtgacctgcatcttgtgaaaccagtaatgctgacttcctgtctcatcctgtg

SEQ ID NO: 20978 - DNA, 122 bp, Homo sapiens
  misc_feature (61)..(62): /note="This region represents a CpG dinucleotide"
  misc_feature (61)..(61): /note="Nucleotide may be methylated to form 5-methylcytosine"
tcttctagtgttactataaacctgaaaactgagaggaggagatcaagagttagagaattccgactgccttgcctgtgttaatatagcctgccctggagttcacctctgctggaaatatttct

SEQ ID NO: 20979 - DNA, 122 bp, Homo sapiens
  misc_feature (61)..(62): /note="This region represents a CpG dinucleotide"
  misc_feature (61)..(61): /note="Nucleotide may be methylated to form 5-methylcytosine"
aaaacaaaaacaaaaacacaaaaagctgaacttctgcttgtgtttctcccttgcctgagccggaattgaatttagcctttgttttcccagatttggatgatgtatgagttccttaacaccca

SEQ ID NO: 20980 - DNA, 122 bp, Homo sapiens
  misc_feature (61)..(62): /note="This region represents a CpG dinucleotide"
  misc_feature (61)..(61): /note="Nucleotide may be methylated to form 5-methylcytosine"
tgcccagcctgactgctggcagccctaagcagatacactccagatgcagtgtgacctcctcgttgccacctcttggggaaggaaactgtgatgggctccctgccatcctacaaccatggcac

SEQ ID NO: 20981 - DNA, 122 bp, Homo sapiens
  misc_feature (61)..(62): /note="This region represents a CpG dinucleotide"
  misc_feature (61)..(61): /note="Nucleotide may be methylated to form 5-methylcytosine"
tccctcccagcccctgagtcatgaacagcaaggagtgtttgaagtttctgctttgaactccgtccagcctgatccctggcctgagcaacttcacaacagtaattgcactttaagacagccta

SEQ ID NO: 20982 - DNA, 122 bp, Homo sapiens
  misc_feature (61)..(62): /note="This region represents a CpG dinucleotide"
  misc_feature (61)..(61): /note="Nucleotide may be methylated to form 5-methylcytosine"
tgaaacatcacctcttcctgggcctcaagtacacttcaggccttcagactggaactgcatcgttggctctcctgatctttgggcccttggacttggactggttccacaccattggctctcct

SEQ ID NO: 20983 - DNA, 122 bp, Homo sapiens
  misc_feature (61)..(62): /note="This region represents a CpG dinucleotide"
  misc_feature (61)..(61): /note="Nucleotide may be methylated to form 5-methylcytosine"
tggaactaccttcctcttgtctatcctggggtttagctactgatgatacaagcctcattgcgcctctccccaatatgtgggttatgacaagcaatggtggcttgctttaccaggagcatttg

SEQ ID NO: 20984 - DNA, 122 bp, Homo sapiens
  misc_feature (61)..(62): /note="This region represents a CpG dinucleotide"
  misc_feature (61)..(61): /note="Nucleotide may be methylated to form 5-methylcytosine"
ctcatgcgtttgtcctcattttcctgcaaagataattgcgtgtgatgttctctggcatgccgtgtttccctttctgtgttccttgactttgaaaatgcgaaggttttataaataagtacaat

SEQ ID NO: 20985 - DNA, 122 bp, Homo sapiens
  misc_feature (61)..(62): /note="This region represents a CpG dinucleotide"
  misc_feature (61)..(61): /note="Nucleotide may be methylated to form 5-methylcytosine"
tgagacctttacccgggacgcctgttccctgctggggctttctgtggagtccccccttagcgtcaggtacaacccagccctgtgagggcagcacaggtgggagggtagagaggtaatcatca

SEQ ID NO: 20986 - DNA, 122 bp, Homo sapiens
  misc_feature (61)..(62): /note="This region represents a CpG dinucleotide"
  misc_feature (61)..(61): /note="Nucleotide may be methylated to form 5-methylcytosine"
cccacccagtactcattgagctgccgctgtgaaccctgcctgagctccccagtatgaacacgccttgctgacctggggctcctggccacaccctgagcaagtccaaatgcgcctgtgtacca

SEQ ID NO: 20987 - DNA, 122 bp, Homo sapiens
  misc_feature (61)..(62): /note="This region represents a CpG dinucleotide"
  misc_feature (61)..(61): /note="Nucleotide may be methylated to form 5-methylcytosine"
agtgccatcagggcgctccggcaccttcaggagggaggtgactgcagggcgcacagacagcgcccccgctacatggtttatggctttgctctgcgcgtgaagcattaattaaagggggacca

SEQ ID NO: 20988 - DNA, 122 bp, Homo sapiens
  misc_feature (61)..(62): /note="This region represents a CpG dinucleotide"
  misc_feature (61)..(61): /note="Nucleotide may be methylated to form 5-methylcytosine"
gccaagagtggaccttagtgcaagccagggacattagtcagtaataatgttccacgctgacgcacaaatgaaagttattttatttgtgtgaacaggagagctgacatggtctgtattgatat

SEQ ID NO: 20989 - DNA, 122 bp, Homo sapiens
  misc_feature (61)..(62): /note="This region represents a CpG dinucleotide"
  misc_feature (61)..(61): /note="Nucleotide may be methylated to form 5-methylcytosine"
aacatggctattatgctgtggagtggttaatgtccagatcagttccacataatgtaaagccgacctcaagtaggaggaggataaatgggttaaaggaaaaaagactagcagaggttcctgtg

SEQ ID NO: 20990 - DNA, 122 bp, Homo sapiens
  misc_feature (61)..(62): /note="This region represents a CpG dinucleotide"
  misc_feature (61)..(61): /note="Nucleotide may be methylated to form 5-methylcytosine"
acacttttgaattgtacagcctcttggttgaagatctacgtcctcaaagtgcgggcttgccgtggagtaacacagatcccctctggcaactcgtctgggacgaagggcgtttttgcttagtg

SEQ ID NO: 20991 - DNA, 122 bp, Homo sapiens
  misc_feature (61)..(62): /note="This region represents a CpG dinucleotide"
  misc_feature (61)..(61): /note="Nucleotide may be methylated to form 5-methylcytosine"
ccagctgcttgggatggttctaaattccactcagagccctggaatgtgatgcctccaaggcgccagtcctgtgaatcccttcctggtgctcacagagggacagcggcaggtgtgcagaggcc

SEQ ID NO: 20992 - DNA, 122 bp, Homo sapiens
  misc_feature (61)..(62): /note="This region represents a CpG dinucleotide"
  misc_feature (61)..(61): /note="Nucleotide may be methylated to form 5-methylcytosine"
aataagggatttgggtaagatcagtggttcttagctgggagtgcactgtcctcctcaaggcgtgttaggaactttggctgtttttttctgtgaagacgctcaagaagtttgtctgtggcttg

SEQ ID NO: 20993 - DNA, 122 bp, Homo sapiens
  misc_feature (61)..(62): /note="This region represents a CpG dinucleotide"
  misc_feature (61)..(61): /note="Nucleotide may be methylated to form 5-methylcytosine"
aaaagcctgacccatagcaaacatcaataatacttcttccttttgctttgagcgggcaaacggaataggaaagaactgaccactgcagtggcagataagaaggcatcaaagagatagtaagg

SEQ ID NO: 20994 - DNA, 122 bp, Homo sapiens
  misc_feature (61)..(62): /note="This region represents a CpG dinucleotide"
  misc_feature (61)..(61): /note="Nucleotide may be methylated to form 5-methylcytosine"
aatgctgggattaacaggtgtgagccatcataccaggccttgctgacacctcttgttgcacgtggatgaatatactggatattacagagattcagttgtaggggattaatgaactggctgct

SEQ ID NO: 20995 - DNA, 122 bp, Homo sapiens
  misc_feature (61)..(62): /note="This region represents a CpG dinucleotide"
  misc_feature (61)..(61): /note="Nucleotide may be methylated to form 5-methylcytosine"
gaagtcctgggagaggagtacacaccaaagccatcagggcaaggaatctctccagagagccgcgaaagcaccaggcactcagaagccactcaagaaatattagtttcctccctattttacaa

SEQ ID NO: 20996 - DNA, 122 bp, Homo sapiens
  misc_feature (61)..(62): /note="This region represents a CpG dinucleotide"
  misc_feature (61)..(61): /note="Nucleotide may be methylated to form 5-methylcytosine"
cgagtgtttctctccatcatcttggctgtgtcctcggaacctagacccagatgtggcatacgctaggtgctcagcacttgctcagagcagtcacaactctgcaggtgataagggtggtggca

SEQ ID NO: 20997 - DNA, 122 bp, Homo sapiens
  misc_feature (61)..(62): /note="This region represents a CpG dinucleotide"
  misc_feature (61)..(61): /note="Nucleotide may be methylated to form 5-methylcytosine"
taagtgttgtttatcaagagaaactatttcttagcccacatattcccatttcttagttcacgaacacaggtcagtgacaagcacctgaggtttcttcaaagcactggaagccattgtttatg

SEQ ID NO: 20998 - DNA, 122 bp, Homo sapiens
  misc_feature (61)..(62): /note="This region represents a CpG dinucleotide"
  misc_feature (61)..(61): /note="Nucleotide may be methylated to form 5-methylcytosine"
ctgcatgctgggcactgtcccgagtacatgaccaccctcacaatactcctgcagagcgcacgcgtttatttccccacgccaaaggtgaggcctcagaggctgaggaatcggcccagcgcccc

SEQ ID NO: 20999 - DNA, 122 bp, Homo sapiens
  misc_feature (61)..(62): /note="This region represents a CpG dinucleotide"
  misc_feature (61)..(61): /note="Nucleotide may be methylated to form 5-methylcytosine"
ggcagacaaagcgcctccatcccgtgagagcctctgtgcgggcggccccgagaccacagccgtggctgtgcatgctgtcgtggaacctgacagcattgctgagcccaggacactcacctcga

SEQ ID NO: 21000 - DNA, 122 bp, Homo sapiens
  misc_feature (61)..(62): /note="This region represents a CpG dinucleotide"
  misc_feature (61)..(61): /note="Nucleotide may be methylated to form 5-methylcytosine"
atatgggccaagacggttttgttcaccgctgaatcctgagacacaccatgcattacccaacgatggcctgagatttactcaataaatgaatgactgaaagaaaaacagaaacaccttacaaa

SEQ ID NO: 21001 - DNA, 122 bp, Homo sapiens
  misc_feature (61)..(62): /note="This region represents a CpG dinucleotide"
  misc_feature (61)..(61): /note="Nucleotide may be methylated to form 5-methylcytosine"
ctagggcttctcaagttggatgagcatcaggatcacctgcagaagtctgttaaaatttgacggtctttgcacagccctagatctgctaaatcaattccagtatctccatgaaacccagcatc

SEQ ID NO: 21002 - DNA, 122 bp, Homo sapiens
  misc_feature (61)..(62): /note="This region represents a CpG dinucleotide"
  misc_feature (61)..(61): /note="Nucleotide may be methylated to form 5-methylcytosine"
gttacaaccgtggtgttcacatgccaccctactgtgggtcactctgttccactcacattacgggaacaacctaaaacaaaatgtctgagtgacaggatgagtgggccacaccacagacagga

SEQ ID NO: 21003 - DNA, 122 bp, Homo sapiens
  misc_feature (61)..(62): /note="This region represents a CpG dinucleotide"
  misc_feature (61)..(61): /note="Nucleotide may be methylated to form 5-methylcytosine"
ccaggtaaggcagtggttagaaacccagacattggcaggcacacgagtgccagctggaaccgggcagtgtcctgggcctcctcccagtccccagtggccactgactcactcagcctccaatc

SEQ ID NO: 21004 - DNA, 122 bp, Homo sapiens
  misc_feature (61)..(62): /note="This region represents a CpG dinucleotide"
  misc_feature (61)..(61): /note="Nucleotide may be methylated to form 5-methylcytosine"
tttaggccaaaagccctagatggtgaaggcctgtcaaagatgacatttgtcttcctcccacgccccatatccaatctatctgcagatcatgttgactgtgctgtaaaatatatcctgagtct

SEQ ID NO: 21005 - DNA, 122 bp, Homo sapiens
  misc_feature (61)..(62): /note="This region represents a CpG dinucleotide"
  misc_feature (61)..(61): /note="Nucleotide may be methylated to form 5-methylcytosine"
attcaatcagtaaatgacagttacgggagttgaactcaggcctgccttaatgccaaagcccgtattttcccaccatactattcagctgctgagaccttagggtccaacacatccaggttttg

SEQ ID NO: 21006 - DNA, 122 bp, Homo sapiens
  misc_feature (61)..(62): /note="This region represents a CpG dinucleotide"
  misc_feature (61)..(61): /note="Nucleotide may be methylated to form 5-methylcytosine"
tagaggtgacatcattattttgtaactttagtactaggctttccatttgtggtatggacacgtatgatatggagcaatttttgaattgtctttcacataggggaaattgcatcttatatacc

SEQ ID NO: 21007 - DNA, 122 bp, Homo sapiens
  misc_feature (61)..(62): /note="This region represents a CpG dinucleotide"
  misc_feature (61)..(61): /note="Nucleotide may be methylated to form 5-methylcytosine"
gggacatcaaagaaatgcatcgttaaatcaatagcagtttgtgcatatacttgtaaattgcggttacaagttttgtgacatgggagaaaaaatactgtgtatctgatggaggaagacacata

SEQ ID NO: 21008 - DNA, 122 bp, Homo sapiens
  misc_feature (61)..(62): /note="This region represents a CpG dinucleotide"
  misc_feature (61)..(61): /note="Nucleotide may be methylated to form 5-methylcytosine"
tttcaaatcaatgctggtctggctggcttaatggtacctaatcttaccttttgaagctcacgcatttgggagttgagatcaattgagataaaataaagtaaaatgtgttgactttgggattt

SEQ ID NO: 21009 - DNA, 122 bp, Homo sapiens
  misc_feature (61)..(62): /note="This region represents a CpG dinucleotide"
  misc_feature (61)..(61): /note="Nucleotide may be methylated to form 5-methylcytosine"
ccacactatgctgagcactgtgctaagccctgaagatgcagcagtgcataatgatcccttcgttcttggaacttatgtgctcatcagaagagtgtgccaacttgcttagaaataaatcaccc

SEQ ID NO: 21010 - DNA, 122 bp, Homo sapiens
  misc_feature (61)..(62): /note="This region represents a CpG dinucleotide"
  misc_feature (61)..(61): /note="Nucleotide may be methylated to form 5-methylcytosine"
acagtggggattgttgcagcatcagcacttcagccagctctgcaggtttccttggagacacgtggatttctctttctagaccttcagctattttcttttttttcttgttttcttgagatgga

SEQ ID NO: 21011 - DNA, 122 bp, Homo sapiens
  misc_feature (61)..(62): /note="This region represents a CpG dinucleotide"
  misc_feature (61)..(61): /note="Nucleotide may be methylated to form 5-methylcytosine"
cagggacctgactcacggcagacaccgacccccacgccagcaagttcactctggtggcaacgcagagaacctgaagatggcagacaagttagagcagctgcaccagtcttacagaggcaggg

SEQ ID NO: 21012 - DNA, 122 bp, Homo sapiens
  misc_feature (61)..(62): /note="This region represents a CpG dinucleotide"
  misc_feature (61)..(61): /note="Nucleotide may be methylated to form 5-methylcytosine"
ggaagaggtgtggggactctgagctgttctctctcctcctaaggggctggtctcaccctccgccagccacgggcccgggcggtgccagggtacctgcgccatgacgtcatgggaccgtcacc

SEQ ID NO: 21013 - DNA, 122 bp, Homo sapiens
  misc_feature (61)..(62): /note="This region represents a CpG dinucleotide"
  misc_feature (61)..(61): /note="Nucleotide may be methylated to form 5-methylcytosine"
catcactttctataaaaagtgagtggaagaatctaatattgtaaaactgcacgtgcctcgcgtgacctgagcagaaaattcctagtttgggattttctcacaggcatacctaaactgacctc

SEQ ID NO: 21014 - DNA, 122 bp, Homo sapiens
  misc_feature (61)..(62): /note="This region represents a CpG dinucleotide"
  misc_feature (61)..(61): /note="Nucleotide may be methylated to form 5-methylcytosine"
ttctagttctttatgcatatgcaaagtaagaatgtagtcatgtttttcttacactcgcctcgtttttatgtaaaagatagcataccatgtacactgttctgcatctttttttttcacttcaa

SEQ ID NO: 21015 - DNA, 122 bp, Homo sapiens
  misc_feature (61)..(62): /note="This region represents a CpG dinucleotide"
  misc_feature (61)..(61): /note="Nucleotide may be methylated to form 5-methylcytosine"
gtgaaacatgccaggaagggtggggacaggaaggtgacactagggcctctgtgtctgccccggggcactgtcagctgggtcaggatttatgccctgatgttcccacccccagacctggtcac

SEQ ID NO: 21016 - DNA, 122 bp, Homo sapiens
  misc_feature (61)..(62): /note="This region represents a CpG dinucleotide"
  misc_feature (61)..(61): /note="Nucleotide may be methylated to form 5-methylcytosine"
gtggtcacaagtgcagccaagaatgaggggctatttgggtcaggcaagcctgccatgtttcgggaaagttgccccggggttaggaaacgctccatctgagggaaatggagctccccaccggt

SEQ ID NO: 21017 - DNA, 122 bp, Homo sapiens
  misc_feature (61)..(62): /note="This region represents a CpG dinucleotide"
  misc_feature (61)..(61): /note="Nucleotide may be methylated to form 5-methylcytosine"
cccagcggcacaggaggcttccccttggcagtgctgtgtttgctgcctggcttaatgtgccgccgcctgttaaacaaatattgtgacaggcccactccatacactcagggacggcggcggca

SEQ ID NO: 21018 - DNA, 122 bp, Homo sapiens
  misc_feature (61)..(62): /note="This region represents a CpG dinucleotide"
  misc_feature (61)..(61): /note="Nucleotide may be methylated to form 5-methylcytosine"
actacccttctgggtgtggctgtaggggggtttgtcctctggaaaggcatccagcgccgccgaaggagtaaaacgagtcctgtgacccaacagccacagcagaaagtgctgggcagtagaga

SEQ ID NO: 21019 - DNA, 122 bp, Homo sapiens
  misc_feature (61)..(62): /note="This region represents a CpG dinucleotide"
  misc_feature (61)..(61): /note="Nucleotide may be methylated to form 5-methylcytosine"
cttaatggttccaccattgtgcaaagaggatgaccactcccagtgcgtgcacgttctctccgctaatgtcactgctcaaaacgttcagaaaattaacacttacgccagggtcggaggcctca

SEQ ID NO: 21020 - DNA, 122 bp, Homo sapiens
  misc_feature (61)..(62): /note="This region represents a CpG dinucleotide"
  misc_feature (61)..(61): /note="Nucleotide may be methylated to form 5-methylcytosine"
ccacactttacagataatgaatctgaagtttccatccacccatcccctcctccgctcaggcgctcaccaaatcttacactcatgaggtgctcagtagcctgtgctttggggcagcccacact

SEQ ID NO: 21021 - DNA, 122 bp, Homo sapiens
  misc_feature (61)..(62): /note="This region represents a CpG dinucleotide"
  misc_feature (61)..(61): /note="Nucleotide may be methylated to form 5-methylcytosine"
agaagaggcttttctagcggcacgaaagaatttggaagcggcagtgttacggtaaaaaaccgacaaggtgcctgatgaagaggatttttatttccactaggtggtgctgttggcttagcact

SEQ ID NO: 21022 - DNA, 122 bp, Homo sapiens
  misc_feature (61)..(62): /note="This region represents a CpG dinucleotide"
  misc_feature (61)..(61): /note="Nucleotide may be methylated to form 5-methylcytosine"
catgacatgtcttttctatcctttccctttcaacttatttgtgtctttgaatataaagtgcgttgtagacataatagtgttggatattttttatatccacatttctactctttgccatatga

SEQ ID NO: 21023 - DNA, 122 bp, Homo sapiens
  misc_feature (61)..(62): /note="This region represents a CpG dinucleotide"
  misc_feature (61)..(61): /note="Nucleotide may be methylated to form 5-methylcytosine"
tactggcaaggtctattaccaccagaatttaagatgactcacttcatctgttgaatcagccgtctctcttcctaccattacgaaaaaaatgtgtctttctaatgaaattaagacacaatact

SEQ ID NO: 21024 - DNA, 122 bp, Homo sapiens
  misc_feature (61)..(62): /note="This region represents a CpG dinucleotide"
  misc_feature (61)..(61): /note="Nucleotide may be methylated to form 5-methylcytosine"
gtggacacaacaacactgttaatcaacaggaactaatcagcatttatgtaacaccgcaaacgcagccgaatacacattttattcgtgtcgatgggacatttagcaagatatgaagtaacctg

SEQ ID NO: 21025 - DNA, 122 bp, Homo sapiens
  misc_feature (61)..(62): /note="This region represents a CpG dinucleotide"
  misc_feature (61)..(61): /note="Nucleotide may be methylated to form 5-methylcytosine"
gtccgcctgagccaggggaggccaggcggcccgggtgtctggagccgggggtctgctgtccgagaatgagaattttcttcccccagaacgtggagactgttcgatcaccaggagcacaaagt

SEQ ID NO: 21026 - DNA, 122 bp, Homo sapiens
  misc_feature (61)..(62): /note="This region represents a CpG dinucleotide"
  misc_feature (61)..(61): /note="Nucleotide may be methylated to form 5-methylcytosine"
tttaaaaaaggaattttaaaaattaatttctaggttttctaggattaagaagttgtaggacgggctaaagaaaacattgtgtcagataagtgttagccatcagactgcacttcaaagagttc

SEQ ID NO: 21027 - DNA, 122 bp, Homo sapiens
  misc_feature (61)..(62): /note="This region represents a CpG dinucleotide"
  misc_feature (61)..(61): /note="Nucleotide may be methylated to form 5-methylcytosine"
ggtagaaactacggcaaactggacagtgcatgcccatcatgggaagcagcttctattccacgccaggtaacttcagccatgtgagaatgcgggcccaagttgttatcggatttcccgattgt

SEQ ID NO: 21028 - DNA, 122 bp, Homo sapiens
  misc_feature (61)..(62): /note="This region represents a CpG dinucleotide"
  misc_feature (61)..(61): /note="Nucleotide may be methylated to form 5-methylcytosine"
cagccccctccccgatgaagggttcatccaaagttcgaatccagactctgaacaaagtggcgcagaccttttcctgactcctcaccctttgtcctcatcactcagtgacagacaggaatcaa

SEQ ID NO: 21029 - DNA, 122 bp, Homo sapiens
  misc_feature (61)..(62): /note="This region represents a CpG dinucleotide"
  misc_feature (61)..(61): /note="Nucleotide may be methylated to form 5-methylcytosine"
cccggggcagaatgtggtctagttctcccctttactgtggaaaacaccctgttgctgatccgtgcaacagctctcaaagatactttaatcatttccatcaagggccaatggtccagttaaaa

SEQ ID NO: 21030 - DNA, 122 bp, Homo sapiens
  misc_feature (61)..(62): /note="This region represents a CpG dinucleotide"
  misc_feature (61)..(61): /note="Nucleotide may be methylated to form 5-methylcytosine"
ggcccccttcatagtgttgtttaggaagattgagtgaaatgagcaaaatcctcaggcaagcgagaggcacatggtatgtgcttattaagcattagctgtagtattgtcacgtctttgctcta

SEQ ID NO: 21031 - DNA, 122 bp, Homo sapiens
  misc_feature (61)..(62): /note="This region represents a CpG dinucleotide"
  misc_feature (61)..(61): /note="Nucleotide may be methylated to form 5-methylcytosine"
agagagtgctaatgcattgagataatcccctgggggctcttccaggaaaacaactgacatcgtgctgttttgtcattgtagttggctgatatttttaatatgaaatcagattgtaagacttt

SEQ ID NO: 21032 - DNA, 122 bp, Homo sapiens
  misc_feature (61)..(62): /note="This region represents a CpG dinucleotide"
  misc_feature (61)..(61): /note="Nucleotide may be methylated to form 5-methylcytosine"
acaacaacactgttaatcaacaggaactaatcagcatttatgtaacaccgcaaacgcagccgaatacacattttattcgtgtcgatgggacatttagcaagatatgaagtaacctgggtcat

SEQ ID NO: 21033 - DNA, 122 bp, Homo sapiens
  misc_feature (61)..(62): /note="This region represents a CpG dinucleotide"
  misc_feature (61)..(61): /note="Nucleotide may be methylated to form 5-methylcytosine"
ccctggaatttgtcatgacctgaatttgacacacttaagaaatcaccctggaatctgtcacgacctgaatttgacacacttaagaaatctgaaattccaatattccaccttctgaccacaac

SEQ ID NO: 21034 - DNA, 122 bp, Homo sapiens
  misc_feature (61)..(62): /note="This region represents a CpG dinucleotide"
  misc_feature (61)..(61): /note="Nucleotide may be methylated to form 5-methylcytosine"
aggagtctgcaagactctgggaagtgacattaggccagagcctgcggaatggggaagaatcgagtgttgcaagcctaaggaatggcatgcgtctaggccctgggctggaaaagccctgcaga

SEQ ID NO: 21035 - DNA, 122 bp, Homo sapiens
  misc_feature (61)..(62): /note="This region represents a CpG dinucleotide"
  misc_feature (61)..(61): /note="Nucleotide may be methylated to form 5-methylcytosine"
gccttctcagaccggccaggtacttgctttccacctggcagtttctggcttggaggtaggcgcactgcaaacagggaaaggctggtcaggctaccgggtgggagctgggccgccccagaggc

SEQ ID NO: 21036 - DNA, 122 bp, Homo sapiens
  misc_feature (61)..(62): /note="This region represents a CpG dinucleotide"
  misc_feature (61)..(61): /note="Nucleotide may be methylated to form 5-methylcytosine"
cttggttctttccacaggtccctgagaacaatggaaataactcgtggccccacaatgacacggagattgccaacagcacacccaacccgaagcctgcagccagcagcccggaaacaccctct

SEQ ID NO: 21037 - DNA, 122 bp, Homo sapiens
  misc_feature (61)..(62): /note="This region represents a CpG dinucleotide"
  misc_feature (61)..(61): /note="Nucleotide may be methylated to form 5-methylcytosine"
agtcattacagttcctcctcctcccattaaaatgggagcatacagaggttagaaagtaaacgtagttctaatcaaagtttggcttacagcagatctcctgggcctgcaggttatctgcctaa

SEQ ID NO: 21038 - DNA, 122 bp, Homo sapiens
  misc_feature (61)..(62): /note="This region represents a CpG dinucleotide"
  misc_feature (61)..(61): /note="Nucleotide may be methylated to form 5-methylcytosine"
ctgcactgctgcaggctgtcctggcacactgcaggccgggcatcatttcatggtggaggacgtcactcagttttgcatgaggctcttgcatcacatttgtatttaaggaattcacaccttat

SEQ ID NO: 21039 - DNA, 122 bp, Homo sapiens
  misc_feature (61)..(62): /note="This region represents a CpG dinucleotide"
  misc_feature (61)..(61): /note="Nucleotide may be methylated to form 5-methylcytosine"
ttaactagtctcagtgatctcacccacaaagtgtgcataataacatctgcctcactgggccgtcatagagaccagcgagctaatcaggtaaagaagtcagcaggggctagaacagaatgggt

SEQ ID NO: 21040 - DNA, 122 bp, Homo sapiens
  misc_feature (61)..(62): /note="This region represents a CpG dinucleotide"
  misc_feature (61)..(61): /note="Nucleotide may be methylated to form 5-methylcytosine"
ttttgtgtgtgtataatgccattctcttcctctgtgaagtgcctgttcggggtgttgctacgtttttgttttgttgtgttttctgttgtagtgtttacatttttcttgtcgattcctaagag

SEQ ID NO: 21041 - DNA, 122 bp, Homo sapiens
  misc_feature (61)..(62): /note="This region represents a CpG dinucleotide"
  misc_feature (61)..(61): /note="Nucleotide may be methylated to form 5-methylcytosine"
tcaaaaaacaaacaaaaaataggttgttacttaactatggatcccagagaactattagaccgttcctgatgcaaatccacctcatccaacagctttttcttgacttttcttccagcagcttg

SEQ ID NO: 21042 - DNA, 122 bp, Homo sapiens
  misc_feature (61)..(62): /note="This region represents a CpG dinucleotide"
  misc_feature (61)..(61): /note="Nucleotide may be methylated to form 5-methylcytosine"
ggcctgggatcatttccagaggcatatttctccctgcactccaatggcaacactgggtggcgtgctaaagggcctgttgaactatattaaacgcctcaagacttgaggtggagtatgttgga

SEQ ID NO: 21043 - DNA, 122 bp, Homo sapiens
  misc_feature (61)..(62): /note="This region represents a CpG dinucleotide"
  misc_feature (61)..(61): /note="Nucleotide may be methylated to form 5-methylcytosine"
gccctcccagagtgagcccactgagtctccatggtgggagggttctggaatcatcagccccgttacctgcagagggagtgggcagggaagggggctgggggcagccgcagcctcccctccgt

SEQ ID NO: 21044 - DNA, 122 bp, Homo sapiens
  misc_feature (61)..(62): /note="This region represents a CpG dinucleotide"
  misc_feature (61)..(61): /note="Nucleotide may be methylated to form 5-methylcytosine"
ttcccctccaagtgttggagtcaaacagttgaaatatcaatttctcatctataaagtgaacgtgagtttagaggtttgcttaggattacaaagtcttaattctggggatagaatacccaggg

SEQ ID NO: 21045 - DNA, 122 bp, Homo sapiens
  misc_feature (61)..(62): /note="This region represents a CpG dinucleotide"
  misc_feature (61)..(61): /note="Nucleotide may be methylated to form 5-methylcytosine"
agggtgaggatgagctgaggaagccaggtacaggcaggagtgaaatggagagattaagaacgagacaggttcatgtctcacctggagctgagttctgcagaaatggccttggaggaggagac

SEQ ID NO: 21046 - DNA, 122 bp, Homo sapiens
  misc_feature (61)..(62): /note="This region represents a CpG dinucleotide"
  misc_feature (61)..(61): /note="Nucleotide may be methylated to form 5-methylcytosine"
aaaacatgattaataaacaaaatgaaactgaggttgtgacataaggaagttcacgtgacacgagagggcatgaaggaggaaattcactactagaatacactatgataggatatgatgatcct

SEQ ID NO: 21047 - DNA, 122 bp, Homo sapiens
  misc_feature (61)..(62): /note="This region represents a CpG dinucleotide"
  misc_feature (61)..(61): /note="Nucleotide may be methylated to form 5-methylcytosine"
aaatatctgtgtaggagcttaatcctcataggattctttagtgctgtcccttctctggagcgaataattctgggattaagagggtttgttgtgggacaatatcttacgttgtaactattttt

SEQ ID NO: 21048 - DNA, 122 bp, Homo sapiens
  misc_feature (61)..(62): /note="This region represents a CpG dinucleotide"
  misc_feature (61)..(61): /note="Nucleotide may be methylated to form 5-methylcytosine"
ggagtgccagctaggcgcgaggcagacagtagtaacagcgggggcgtgtgtgtacacacacgcacaggcacgcacagggaccgacgcatgcatacacagacacacaagcagagaggcaggcc

SEQ ID NO: 21049 - DNA, 122 bp, Homo sapiens
  misc_feature (61)..(62): /note="This region represents a CpG dinucleotide"
  misc_feature (61)..(61): /note="Nucleotide may be methylated to form 5-methylcytosine"
ccatacttcttcccctggcattagtgccccagggcattgatgttcctttcctttagaaagcggcccaggccatgcttaagactagatgggcactggaaagaccttgtccctctttctccact

SEQ ID NO: 21050 - DNA, 122 bp, Homo sapiens
  misc_feature (61)..(62): /note="This region represents a CpG dinucleotide"
  misc_feature (61)..(61): /note="Nucleotide may be methylated to form 5-methylcytosine"
atgggcaggcaggaaggcagactggtgagccccagcttacagctgcactgctgcccacagcgtgccaagttggaggccgccattgccgaggctgaggagcgtggggagctggcgctcaagga

SEQ ID NO: 21051 - DNA, 122 bp, Homo sapiens
  misc_feature (61)..(62): /note="This region represents a CpG dinucleotide"
  misc_feature (61)..(61): /note="Nucleotide may be methylated to form 5-methylcytosine"
agcaggtccccagttggagtcaggaaaccctagctcaggcctggctcagccacaatatgccgcgtgatgctggacctctgatgccgggactcatggtgacttcacccctctgagcctgtgcc

SEQ ID NO: 21052 - DNA, 122 bp, Homo sapiens
  misc_feature (61)..(62): /note="This region represents a CpG dinucleotide"
  misc_feature (61)..(61): /note="Nucleotide may be methylated to form 5-methylcytosine"
accactaaaactgctctcaccaacattaaaaaacaacctcctaaacaccagatctaatcacgcccatttaaaaaagacttggttcaagtgttgccatgtaggtgatgttttctttaataccc

SEQ ID NO: 21053 - DNA, 122 bp, Homo sapiens
  misc_feature (61)..(62): /note="This region represents a CpG dinucleotide"
  misc_feature (61)..(61): /note="Nucleotide may be methylated to form 5-methylcytosine"
ctttctgagctgacttgggactcgctcaacctgccgggaatccctgtgtgtgcaagtgaccgggtgggcggccccagccctgcttgcctccccgctctgggactggccgggaaagctcctca

SEQ ID NO: 21054 - DNA, 122 bp, Homo sapiens
  misc_feature (61)..(62): /note="This region represents a CpG dinucleotide"
  misc_feature (61)..(61): /note="Nucleotide may be methylated to form 5-methylcytosine"
aattgagcaaggacaggttgaatgccatgtaatttaaaccaaagccggcaactcctcacacggtcattgttgaaggtttgtgtgacgtaagtactgatgcctgaatcccaacacaaagattc

SEQ ID NO: 21055 - DNA, 122 bp, Homo sapiens
  misc_feature (61)..(62): /note="This region represents a CpG dinucleotide"
  misc_feature (61)..(61): /note="Nucleotide may be methylated to form 5-methylcytosine"
cagcccttccctgggagaagcctggcccagcccgggttttggcctgcaactaacacattgcgtacaccaccgttatctcttcacttaagtcctgaaaggggtcaataaagttactcaagaag

SEQ ID NO: 21056 - DNA, 122 bp, Homo sapiens
  misc_feature (61)..(62): /note="This region represents a CpG dinucleotide"
  misc_feature (61)..(61): /note="Nucleotide may be methylated to form 5-methylcytosine"
tggagaaggatggcatggccttccaggaggccctagacccagggccctttggtgagaacccgttttctccttccttccccagcctgtcttgtcccatccctgcccctccacagagtgctaga

SEQ ID NO: 21057 - DNA, 122 bp, Homo sapiens
  misc_feature (61)..(62): /note="This region represents a CpG dinucleotide"
  misc_feature (61)..(61): /note="Nucleotide may be methylated to form 5-methylcytosine"
atcccgtgtcccttttcttccctttcaagagaaatgggcaaaaggaaatacttattttttcgcatagatcaattatgttttttaaattttgtactgttaagtatgatagtactactcaatgt

SEQ ID NO: 21058 - DNA, 122 bp, Homo sapiens
  misc_feature (61)..(62): /note="This region represents a CpG dinucleotide"
  misc_feature (61)..(61): /note="Nucleotide may be methylated to form 5-methylcytosine"
gcagacgccacctccgatgtccttataaaacgtgtgcgcgggtgctgcgcatgcgtgtgtcgctgggggctgtaggctgggagcctccgggaactcccctcgccaggccaccagccttccta

SEQ ID NO: 21059 - DNA, 122 bp, Homo sapiens
  misc_feature (61)..(62): /note="This region represents a CpG dinucleotide"
  misc_feature (61)..(61): /note="Nucleotide may be methylated to form 5-methylcytosine"
cttgaagagcgacattaactgaaatggctcatggctcatcctttgattcaggcctgcctgcgtggagagctggacagacttcctcctgactaatgagccctcgcatcctaattgggccaggg

SEQ ID NO: 21060 - DNA, 122 bp, Homo sapiens
  misc_feature (61)..(62): /note="This region represents a CpG dinucleotide"
  misc_feature (61)..(61): /note="Nucleotide may be methylated to form 5-methylcytosine"
acctcaggtgatccgcccacctcggcctcccaaagtgctgggattacaggcgtgagccaccgtgcctggcctaaaaatgcctggctaaatttgttaggggccacaaccccagatttacctgc

SEQ ID NO: 21061 - DNA, 122 bp, Homo sapiens
  misc_feature (61)..(62): /note="This region represents a CpG dinucleotide"
  misc_feature (61)..(61): /note="Nucleotide may be methylated to form 5-methylcytosine"
gtctggctttttttttttttttttcaaaaaaatgttggttgcaacctattaaattgatttcgtgacacactagttcataaccctcagtttgaacaactctgacctagacgcctgccaagtct

SEQ ID NO: 21062 - DNA, 122 bp, Homo sapiens
  misc_feature (61)..(62): /note="This region represents a CpG dinucleotide"
  misc_feature (61)..(61): /note="Nucleotide may be methylated to form 5-methylcytosine"
tgaagactcgaactctagaaggcaacagtctgaaaacaataggtttcctccagaaagttccgctgaggtaaagctcattctagtctgagagcagatgaccttctcttgtcttttcaaacctt

SEQ ID NO: 21063 - DNA, 122 bp, Homo sapiens
  misc_feature (61)..(62): /note="This region represents a CpG dinucleotide"
  misc_feature (61)..(61): /note="Nucleotide may be methylated to form 5-methylcytosine"
cacagcaataatgtgggtggcagtaataacagcagctgaaccacctgagcaccatcctgacgaggcatagcctgagctctgtgaacagtgaagtccatctggtctctcagtggcctgagagt

SEQ ID NO: 21064 - DNA, 122 bp, Homo sapiens
  misc_feature (61)..(62): /note="This region represents a CpG dinucleotide"
  misc_feature (61)..(61): /note="Nucleotide may be methylated to form 5-methylcytosine"
gagtgatgaatggcaacaatgatgactgactgacagctgtgatgactgacagtaatgacacgtcatgccacactgcactggggtcacacctctggaaggccactttgttgattcaacttgag

SEQ ID NO: 21065 - DNA, 122 bp, Homo sapiens
  misc_feature (61)..(62): /note="This region represents a CpG dinucleotide"
  misc_feature (61)..(61): /note="Nucleotide may be methylated to form 5-methylcytosine"
attttggaataatactgtttatgaacatgggtgtgcaaatgtcatttccagttcctgctacgcatacataaatagataagtaatgttttgtacattgtgcaaaggaaaggtctgattttttt

SEQ ID NO: 21066 - DNA, 122 bp, Homo sapiens
  misc_feature (61)..(62): /note="This region represents a CpG dinucleotide"
  misc_feature (61)..(61): /note="Nucleotide may be methylated to form 5-methylcytosine"
tgtcaaattgcccaatttacactcctgccactccaaatgggggcatgcctcacacccctgcgtggtccagtacacaatgaatgctcattttgtgaagtcacagggtcaaatctttctccgtg

SEQ ID NO: 21067 - DNA, 122 bp, Homo sapiens
  misc_feature (61)..(62): /note="This region represents a CpG dinucleotide"
  misc_feature (61)..(61): /note="Nucleotide may be methylated to form 5-methylcytosine"
gagtcagaacctgggtggaatcttggctctgccactcattaagcgccatgaccttaagcacgttgcctaaaactctctagcctgcttcctcttctacaaactgcacacacctaccccacagg

SEQ ID NO: 21068 - DNA, 122 bp, Homo sapiens
  misc_feature (61)..(62): /note="This region represents a CpG dinucleotide"
  misc_feature (61)..(61): /note="Nucleotide may be methylated to form 5-methylcytosine"
cttgttcctgactttctagtaccaaccgcaatgtaaaactatttgtgctccactgcaagccgagcaccatagattttatgggactgacatactttttttttatttaaaattcttgctttgtg

SEQ ID NO: 21069 - DNA, 122 bp, Homo sapiens
  misc_feature (61)..(62): /note="This region represents a CpG dinucleotide"
  misc_feature (61)..(61): /note="Nucleotide may be methylated to form 5-methylcytosine"
agccagagcgtcttggcagttctcagcaccttgacatcacttccttgctaccactcagagcggcagtgacacagttcccttatctcagaaggccagaagacggctgtcaaaggtcacaggga

SEQ ID NO: 21070 - DNA, 122 bp, Homo sapiens
  misc_feature (61)..(62): /note="This region represents a CpG dinucleotide"
  misc_feature (61)..(61): /note="Nucleotide may be methylated to form 5-methylcytosine"
ttactcaaacaaacctggtatgtagagcaggcactgccagagcctcatggcctttttgtacgggagtggtgtacagttcagcagataggcacagcaaactcctcttctgccattcagatcag

SEQ ID NO: 21071 - DNA, 122 bp, Homo sapiens
  misc_feature (61)..(62): /note="This region represents a CpG dinucleotide"
  misc_feature (61)..(61): /note="Nucleotide may be methylated to form 5-methylcytosine"
tcttgctgtgttccctaggctggttttgaactgctgaagaccagccttaagtgattcttccgccttaacctcccaaagtgctgggattacaggtgtgagtcaccgtcttggcctttagtcac

SEQ ID NO: 21072 - DNA, 122 bp, Homo sapiens
  misc_feature (61)..(62): /note="This region represents a CpG dinucleotide"
  misc_feature (61)..(61): /note="Nucleotide may be methylated to form 5-methylcytosine"
gtattggacatctatttttaacaagcacgccaccagaagtattaaagtaaagatgttatacgtggccctggcactcacagagcagtcaaaagcatgacatagactaatgagtaaaaaggtaa

SEQ ID NO: 21073 - DNA, 122 bp, Homo sapiens
  misc_feature (61)..(62): /note="This region represents a CpG dinucleotide"
  misc_feature (61)..(61): /note="Nucleotide may be methylated to form 5-methylcytosine"
tgactgttatgcagcaggccggcaggtcaataaacttgcttgcctgactttgagtatactcgtcttttctcttggccaaccttacggtagctgtaccagtttgcatttccaccagcaatgaa

SEQ ID NO: 21074 - DNA, 122 bp, Homo sapiens
  misc_feature (61)..(62): /note="This region represents a CpG dinucleotide"
  misc_feature (61)..(61): /note="Nucleotide may be methylated to form 5-methylcytosine"
ttatacacacgtgaattaaaatcaaccaacatttgtgagattgggtttggtatctttgaccgtttttctcccctgcaagacgtagataatagcaccaaccccaaggagtttggggatgatta

SEQ ID NO: 21075 - DNA, 122 bp, Homo sapiens
  misc_feature (61)..(62): /note="This region represents a CpG dinucleotide"
  misc_feature (61)..(61): /note="Nucleotide may be methylated to form 5-methylcytosine"
ataatcaactatgctaagttctagaagcagttataaaattttagatgaatgaaatagttgcgtcacacacagattcttggaagtgtttgaatcgcatgagtattgtttgaactgcataatag

SEQ ID NO: 21076 - DNA, 122 bp, Homo sapiens
  misc_feature (61)..(62): /note="This region represents a CpG dinucleotide"
  misc_feature (61)..(61): /note="Nucleotide may be methylated to form 5-methylcytosine"
atcccaatgagtcaggagttattcatttattttctgctttgatgacaatatccattgatacggttataatccaagttggtgttttaaggcgcaatttttactcagctgtactccgtttcctt

SEQ ID NO: 21077 - DNA, 122 bp, Homo sapiens
  misc_feature (61)..(62): /note="This region represents a CpG dinucleotide"
  misc_feature (61)..(61): /note="Nucleotide may be methylated to form 5-methylcytosine"
ctgcccaaacttacatttttaaagataattcttgaatgcgatctgaaacaataattgtgacggagactgtatagcgtctgaaaatgtcagatccatcacatatcttgttgttgtctataaaa

SEQ ID NO: 21078 - DNA, 122 bp, Homo sapiens
  misc_feature (61)..(62): /note="This region represents a CpG dinucleotide"
  misc_feature (61)..(61): /note="Nucleotide may be methylated to form 5-methylcytosine"
accatgaccatgaccacgatcattggcatgaccatttgtttggacaaataccagtctagacgttgatgtgaagtattttgtagatgcagttaagatataccaccagttgactttaagtaaag

SEQ ID NO: 21079 - DNA, 122 bp, Homo sapiens
  misc_feature (61)..(62): /note="This region represents a CpG dinucleotide"
  misc_feature (61)..(61): /note="Nucleotide may be methylated to form 5-methylcytosine"
ccagcagacccccccgccttgggtttccgccaggacctaaatgcagtgtctgagttgccgcgacagtgcccacagagccccagatgacacgcgttcattttacttcacatataaattagaga

SEQ ID NO: 21080 - DNA, 122 bp, Homo sapiens
  misc_feature (61)..(62): /note="This region represents a CpG dinucleotide"
  misc_feature (61)..(61): /note="Nucleotide may be methylated to form 5-methylcytosine"
caaagcctagagggggccagggtggcagggggctggcatgtcagcggcgccccaggcgcacgcacacccagctgggtctagacagcgcttggcctcagccacaactttgctccaccccagag

SEQ ID NO: 21081 - DNA, 122 bp, Homo sapiens
  misc_feature (61)..(62): /note="This region represents a CpG dinucleotide"
  misc_feature (61)..(61): /note="Nucleotide may be methylated to form 5-methylcytosine"
agaaactctctgttctgtgagcagctggaaggtaaagaagaccagcagcccagggagcaccgaccaaaatttgtttctaatgagtaacaataaaaagcacggcccctctgagatccatccgc

SEQ ID NO: 21082 - DNA, 122 bp, Homo sapiens
  misc_feature (61)..(62): /note="This region represents a CpG dinucleotide"
  misc_feature (61)..(61): /note="Nucleotide may be methylated to form 5-methylcytosine"
tgataagattataaaagatttctctcgaattctcaacttttggtgaggcctctactctctcgccaaacagctgagtttttaatggattgtgtctcaagacaatcaaattggcacctttgaca

SEQ ID NO: 21083 - DNA, 122 bp, Homo sapiens
  misc_feature (61)..(62): /note="This region represents a CpG dinucleotide"
  misc_feature (61)..(61): /note="Nucleotide may be methylated to form 5-methylcytosine"
gaccattaagagcctgccaccaccaatgacccagatgcggtaaagcttgcaaaaccttgacgccctttgatgctcacagcaactgaggtggcaggcagagccagtttcattatcctcattgt

SEQ ID NO: 21084 - DNA, 122 bp, Homo sapiens
  misc_feature (61)..(62): /note="This region represents a CpG dinucleotide"
  misc_feature (61)..(61): /note="Nucleotide may be methylated to form 5-methylcytosine"
tctggtgagcactggagcctgattacaggatggctggggaaagaggaagtgtttgcaaaccgcaaggaggaatgtcgccctttgaaggagtttggcatttattttttgcctcctccactgtc

SEQ ID NO: 21085 - DNA, 122 bp, Homo sapiens
  misc_feature (61)..(62): /note="This region represents a CpG dinucleotide"
  misc_feature (61)..(61): /note="Nucleotide may be methylated to form 5-methylcytosine"
aatcattaggtcaacagtggtagttttcagtatttctcaaacacaataacgccttgtcatcgattgagaatactgaattttaatgccattgttttgtcaataaaaagtgcttatgtacactt

SEQ ID NO: 21086 - DNA, 122 bp, Homo sapiens
  misc_feature (61)..(62): /note="This region represents a CpG dinucleotide"
  misc_feature (61)..(61): /note="Nucleotide may be methylated to form 5-methylcytosine"
ccagaacttgcaactgcaccaagcagataaatatttcccagtagaaaatacttagctcctcgctcagcttagtcagcaattgctttttcttctccacttcccaggaaaacagcctgaagcat

SEQ ID NO: 21087 - DNA, 122 bp, Homo sapiens
  misc_feature (61)..(62): /note="This region represents a CpG dinucleotide"
  misc_feature (61)..(61): /note="Nucleotide may be methylated to form 5-methylcytosine"
accttcgtggttagtattacagttcttaaaggcagtgcatctggagttgttcgttccctccggtgggttcgtggtcttcctggcttcaggagtgaagctgcagaccttcgcggtgagtgtta

SEQ ID NO: 21088 - DNA, 122 bp, Homo sapiens
  misc_feature (61)..(62): /note="This region represents a CpG dinucleotide"
  misc_feature (61)..(61): /note="Nucleotide may be methylated to form 5-methylcytosine"
ctgctgggtggacggcagcagatggtgctatggggccggccctgtctccatctggtttggcgttgggagggcagcagcgatgcagaccccttggagccagatctggatgacctgtagggtga

SEQ ID NO: 21089 - DNA, 122 bp, Homo sapiens
  misc_feature (61)..(62): /note="This region represents a CpG dinucleotide"
  misc_feature (61)..(61): /note="Nucleotide may be methylated to form 5-methylcytosine"
aagctgcagaaggaggaaaaatcagagattggtgactgaccaaaggaagcacctgctttccggaaattaaaatcatgtgttaggcagctctgacttaattgccaaatggggtgaagcccagc

SEQ ID NO: 21090 - DNA, 122 bp, Homo sapiens
  misc_feature (61)..(62): /note="This region represents a CpG dinucleotide"
  misc_feature (61)..(61): /note="Nucleotide may be methylated to form 5-methylcytosine"
aagagaacctgcagtcttacagagaaatgcacaagtctggctggattcaccacttgctgacggaagaacctttgggccttgaataaacatgagtgttggccaaacaatagtcaccacatacc

SEQ ID NO: 21091 - DNA, 122 bp, Homo sapiens
  misc_feature (61)..(62): /note="This region represents a CpG dinucleotide"
  misc_feature (61)..(61): /note="Nucleotide may be methylated to form 5-methylcytosine"
gggacctgcctgttagctaggcatgccacattaactgcagctcacatgtagtgccaggggcgaccaggctgttgcttaacaaggatgcataatagctaattgcattttaggccattggtttg

SEQ ID NO: 21092 - DNA, 122 bp, Homo sapiens
  misc_feature (61)..(62): /note="This region represents a CpG dinucleotide"
  misc_feature (61)..(61): /note="Nucleotide may be methylated to form 5-methylcytosine"
agtggagggagggcctgtcactctccagcacgcacaccgaggagtggagggagagcctgtcgctctccagcagaagcaccaaggattggagggagggcctgtcgctctccagcaggagcacg

SEQ ID NO: 21093 - DNA, 122 bp, Homo sapiens
  misc_feature (61)..(62): /note="This region represents a CpG dinucleotide"
  misc_feature (61)..(61): /note="Nucleotide may be methylated to form 5-methylcytosine"
actggggctgccattctaccattgctgtaaactctttaaattttttccatttagggaaagcgttaagtgcaaagggtataactttgctttcaaaaatgattcatgatgttagtgaactgttg

SEQ ID NO: 21094 - DNA, 122 bp, Homo sapiens
  misc_feature (61)..(62): /note="This region represents a CpG dinucleotide"
  misc_feature (61)..(61): /note="Nucleotide may be methylated to form 5-methylcytosine"
atggcctgatggtcttgaccatgtttaatttttccattggctctttccccaagtgtttctcgtttctcccggggagagtcaaagcccacctcctcagagagttcttatcagacccctaaagg

SEQ ID NO: 21095 - DNA, 122 bp, Homo sapiens
  misc_feature (61)..(62): /note="This region represents a CpG dinucleotide"
  misc_feature (61)..(61): /note="Nucleotide may be methylated to form 5-methylcytosine"
gatttcgtttttattaaggaaacctgattcctaatcataggcatcaaaacctttaagctccgttgagttataggctttatggtcaacaattaggattttgataattatcataaatatcaaac

SEQ ID NO: 21096 - DNA, 122 bp, Homo sapiens
  misc_feature (61)..(62): /note="This region represents a CpG dinucleotide"
  misc_feature (61)..(61): /note="Nucleotide may be methylated to form 5-methylcytosine"
attttattttaccctttaggggaagtcatgatcagtatttttatctggaaatggcttctgcgaaatatgccactaggattattatgaatgggtctgttataaatggagttcttgatcaacat

SEQ ID NO: 21097 - DNA, 122 bp, Homo sapiens
  misc_feature (61)..(62): /note="This region represents a CpG dinucleotide"
  misc_feature (61)..(61): /note="Nucleotide may be methylated to form 5-methylcytosine"
gttaaggcagaaaaacgcagataagaaaatcgaagttgagggcaaggagctcatctttcacggtcatagacctcagttgcaacatctggaaaaagagctggttgggcatgccgggcaggctt

SEQ ID NO: 21098 - DNA, 122 bp, Homo sapiens
  misc_feature (61)..(62): /note="This region represents a CpG dinucleotide"
  misc_feature (61)..(61): /note="Nucleotide may be methylated to form 5-methylcytosine"
gcagattttgttttatgtccatcagggagccagtgaggtgtataaagcagaagagtgacacggtctgattggcaattttaaaaggtcactattgctactgcatggagcctggactagaaaga

SEQ ID NO: 21099 - DNA, 122 bp, Homo sapiens
  misc_feature (61)..(62): /note="This region represents a CpG dinucleotide"
  misc_feature (61)..(61): /note="Nucleotide may be methylated to form 5-methylcytosine"
ctgaagtagttattggcacctctgctgtgttagtaaggaaacgaagttcagcagaagatacgattttactcaagatgacacagctggcaagtagtcaagtctgaatccttttctaatattaa

SEQ ID NO: 21100 - DNA, 122 bp, Homo sapiens
  misc_feature (61)..(62): /note="This region represents a CpG dinucleotide"
  misc_feature (61)..(61): /note="Nucleotide may be methylated to form 5-methylcytosine"
atcagggggctgatgcagtggcttcagtgtcagtgactaaccagtggccctggagtgactcgtaaggcaggtaccctgtggacagttatttgtctgggggaggttagtgccacccactccag

SEQ ID NO: 21101 - DNA, 122 bp, Homo sapiens
  misc_feature (61)..(62): /note="This region represents a CpG dinucleotide"
  misc_feature (61)..(61): /note="Nucleotide may be methylated to form 5-methylcytosine"
aatccaaaagacaatggaatgaccatggaatgaaaactgtcaacccacaagcctatacctcgtggaaatatcatcacccatagacatcacacagtgataaaggggccaattctccaaggaga

SEQ ID NO: 21102 - DNA, 122 bp, Homo sapiens
  misc_feature (61)..(62): /note="This region represents a CpG dinucleotide"
  misc_feature (61)..(61): /note="Nucleotide may be methylated to form 5-methylcytosine"
ccaggtttgcagcccaggagcaatactccgccatgtagcctgggtgtgtagcaggctccccggtctaagtgtgtaaatacattctatgatgtcctcacagcgagaagatcgcctggtgactc

SEQ ID NO: 21103 - DNA, 122 bp, Homo sapiens
  misc_feature (61)..(62): /note="This region represents a CpG dinucleotide"
  misc_feature (61)..(61): /note="Nucleotide may be methylated to form 5-methylcytosine"
acaaggacaaaaattagagatactgtcagttgttaatcaagcttggcaatttggggccaacggctacaggagttattgtttggcttcctggaccagtttctagaaacagcggtcagacttcc

SEQ ID NO: 21104 - DNA, 122 bp, Homo sapiens
  misc_feature (61)..(62): /note="This region represents a CpG dinucleotide"
  misc_feature (61)..(61): /note="Nucleotide may be methylated to form 5-methylcytosine"
gtataggtccctggcatcctggttcatatctgtgttgctgactacagtgtctgtgatgtccgcatgtccaggcctgtttggggttgcctagcgactcttctggcacagggtgtgtctgtggt

SEQ ID NO: 21105 - DNA, 122 bp, Homo sapiens
  misc_feature (61)..(62): /note="This region represents a CpG dinucleotide"
  misc_feature (61)..(61): /note="Nucleotide may be methylated to form 5-methylcytosine"
gcagcccaggtgtggttcgagatgtcactttggccccagtctttcctgctgcttcttgggcgccctgcccagccccagctagcccgacgcccctccagggcctcttgagtcatcactggtct

SEQ ID NO: 21106 - DNA, 122 bp, Homo sapiens
  misc_feature (61)..(62): /note="This region represents a CpG dinucleotide"
  misc_feature (61)..(61): /note="Nucleotide may be methylated to form 5-methylcytosine"
agcacaaactgagctttcatcaaacgtaacccttaccgaaacaattgttcagatgagcaacgccaagtttaaagaaaggaagtaaaccgtctcaagaactgtcaatctgtttgtgttcgata

SEQ ID NO: 21107 - DNA, 122 bp, Homo sapiens
  misc_feature (61)..(62): /note="This region represents a CpG dinucleotide"
  misc_feature (61)..(61): /note="Nucleotide may be methylated to form 5-methylcytosine"
ttaagtgcagactccaggtggctcagccggcacctgatggtcagcagcacacatcagacacgcagctcaaccgtccagttcctccggatcttactgctggcacccatattgaggtggaagga

SEQ ID NO: 21108 - DNA, 122 bp, Homo sapiens
  misc_feature (61)..(62): /note="This region represents a CpG dinucleotide"
  misc_feature (61)..(61): /note="Nucleotide may be methylated to form 5-methylcytosine"
caaagttacattttggatatgctgttagagatgcctgctaggcattcccctggagatgcacgtagaccgttggacatatgaatctgaatctggagtttaggggctggaagaaaacatttgag

SEQ ID NO: 21109 - DNA, 122 bp, Homo sapiens
  misc_feature (61)..(62): /note="This region represents a CpG dinucleotide"
  misc_feature (61)..(61): /note="Nucleotide may be methylated to form 5-methylcytosine"
cccaaattaaacttctagagatgaaaatcacaatatttaaaatgaaaatttcacttgatgcgattaatagcatattagacactgtagaaggaaatatctgaacttgaaaagacagcaacaga

SEQ ID NO: 21110 - DNA, 122 bp, Homo sapiens
  misc_feature (61)..(62): /note="This region represents a CpG dinucleotide"
  misc_feature (61)..(61): /note="Nucleotide may be methylated to form 5-methylcytosine"
ccgatctcctgtaatctacctggattggaacgcccagctttgtacagcctgagctctggccgactggaatttctgccaggtcctattcacacccttggccccagctggctgtgaggtttcct

SEQ ID NO: 21111 - DNA, 122 bp, Homo sapiens
  misc_feature (61)..(62): /note="This region represents a CpG dinucleotide"
  misc_feature (61)..(61): /note="Nucleotide may be methylated to form 5-methylcytosine"
taagaaatatattttatttcacatactagtgtgtgcatgtatgcacaccacacctggaaacgtatattatttgcacaactgtgctctgttctatcaattaagggggaaaggaggtaaaacag

SEQ ID NO: 21112 - DNA, 122 bp, Homo sapiens
  misc_feature (61)..(62): /note="This region represents a CpG dinucleotide"
  misc_feature (61)..(61): /note="Nucleotide may be methylated to form 5-methylcytosine"
agaaaagcatggggtgaacccaggtctgcttcctgtggccaccatctgtgctgatggaggcgaccacagggtgttgggggtgggggtagggagtgggggctggatgagtcatcagggagggg

SEQ ID NO: 21113 - DNA, 122 bp, Homo sapiens
  misc_feature (61)..(62): /note="This region represents a CpG dinucleotide"
  misc_feature (61)..(61): /note="Nucleotide may be methylated to form 5-methylcytosine"
attcagatgttctctggggcctcagctcatgattaattcatcaagtattggttgagctctcgtcacatgtcagggatcatgccttgtgttgaggcttacaatggaaagcaagaactacaaga

SEQ ID NO: 21114 - DNA, 122 bp, Homo sapiens
  misc_feature (61)..(62): /note="This region represents a CpG dinucleotide"
  misc_feature (61)..(61): /note="Nucleotide may be methylated to form 5-methylcytosine"
ttaacaacttccttatgccaggatgttgctcagaagggattttttcaacttaggtgcaggcgcaataaatcaacctaaatgtcctaaacttgacccagcttattagaatatcgtacacacga

SEQ ID NO: 21115 - DNA, 122 bp, Homo sapiens
  misc_feature (61)..(62): /note="This region represents a CpG dinucleotide"
  misc_feature (61)..(61): /note="Nucleotide may be methylated to form 5-methylcytosine"
tatagatagacattttggagaagagtctctctttgaagacttcctctcagagtacaagtccgtggttacaaccattttgtttctcagcaaacatggggaagtttgcttttcttctctgagga

SEQ ID NO: 21116 - DNA, 122 bp, Homo sapiens
  misc_feature (61)..(62): /note="This region represents a CpG dinucleotide"
  misc_feature (61)..(61): /note="Nucleotide may be methylated to form 5-methylcytosine"
ctttcctccttctccaaaaggtggcatcagaaaggagggagcaggaaggcacaggccaaacgctcatctcaatggctgcctcagccatgctctgacaagtgagctgatgggaaaattgctcc

SEQ ID NO: 21117 - DNA, 122 bp, Homo sapiens
  misc_feature (61)..(62): /note="This region represents a CpG dinucleotide"
  misc_feature (61)..(61): /note="Nucleotide may be methylated to form 5-methylcytosine"
ggttgtctagggttgaggctgggaacagggagaacttcaaatgggcacaagaactcgtttcggcatgatagaaatgttccaaaatgatactatggtaatggtttcacaattcaaatttgcta

SEQ ID NO: 21118 - DNA, 122 bp, Homo sapiens
  misc_feature (61)..(62): /note="This region represents a CpG dinucleotide"
  misc_feature (61)..(61): /note="Nucleotide may be methylated to form 5-methylcytosine"
tatttattgtatttgctgtcaccactcccagattatagcaacatgaaggcatgcacattacgtaatttttttttttttttttttttttttttttttttttgagacggagtctcgctctgtcg

SEQ ID NO: 21119 - DNA, 122 bp, Homo sapiens
  misc_feature (61)..(62): /note="This region represents a CpG dinucleotide"
  misc_feature (61)..(61): /note="Nucleotide may be methylated to form 5-methylcytosine"
gcacttacacagttcctggtacaatgaacataaaagctaaaatccgtagcctgggccgggcgcggtggagctcacgcctgtaatcccagcactttgggaagccaaggcgggcggattacctg

SEQ ID NO: 21120 - DNA, 122 bp, Homo sapiens
  misc_feature (61)..(62): /note="This region represents a CpG dinucleotide"
  misc_feature (61)..(61): /note="Nucleotide may be methylated to form 5-methylcytosine"
agtatttactaagtgtgtgtatgtgcctacccaatgcctcagcaattccactcataggcacgtgcccaaccagcatgtgagctcgtgctgcacatcaagacacatacgtaactattcacggc

SEQ ID NO: 21121 - DNA, 122 bp, Homo sapiens
  misc_feature (61)..(62): /note="This region represents a CpG dinucleotide"
  misc_feature (61)..(61): /note="Nucleotide may be methylated to form 5-methylcytosine"
cctgatggctggtgagcttcagcctgatcctggtttctgcacagagaacactcactcttacgtcaagattcagagaatcacttgtacaaacttttctcattctcttagttacatatgaactc

SEQ ID NO: 21122 - DNA, 122 bp, Homo sapiens
  misc_feature (61)..(62): /note="This region represents a CpG dinucleotide"
  misc_feature (61)..(61): /note="Nucleotide may be methylated to form 5-methylcytosine"
gctgtgtcataaggcatggagatttgacaagaaagggcaggtaggatgctcatgatattgcgtggcccaggtcaaagcttagtaatgttggcttttgtcatgtaggggaggaatatcttttc

SEQ ID NO: 21123 - DNA, 122 bp, Homo sapiens
  misc_feature (61)..(62): /note="This region represents a CpG dinucleotide"
  misc_feature (61)..(61): /note="Nucleotide may be methylated to form 5-methylcytosine"
tgacccccagtctatcagagagcagatgccataatcagaggaccacaattccatctccagcgagacagatgcgaggaagggaagagggatgccctgtgtgcatctgcccgcactgcgagtcc

SEQ ID NO: 21124 - DNA, 122 bp, Homo sapiens
  misc_feature (61)..(62): /note="This region represents a CpG dinucleotide"
  misc_feature (61)..(61): /note="Nucleotide may be methylated to form 5-methylcytosine"
tgtggccccctgaaatagggaactggtgacctcaggcctgcatggggccacggagtgacccgcctgataaacagttctgggcatgaacagctgctgttcttgtggccggaactggttccttc

SEQ ID NO: 21125 - DNA, 122 bp, Homo sapiens
  misc_feature (61)..(62): /note="This region represents a CpG dinucleotide"
  misc_feature (61)..(61): /note="Nucleotide may be methylated to form 5-methylcytosine"
tatgagttttcacttcccttttcttctaaggttttgcttggaatctgccatcagcaatgccgaggcctggccttggtggaaatggaggtgctgcttaacttttcttccaaaacatagtacaa

SEQ ID NO: 21126 - DNA, 122 bp, Homo sapiens
  misc_feature (61)..(62): /note="This region represents a CpG dinucleotide"
  misc_feature (61)..(61): /note="Nucleotide may be methylated to form 5-methylcytosine"
aggtctccccaaatgctgctgattcctagtcccagcagcagccaggctgccatacaggtgcgtgtgtgaaaaaggggatggagaagctaggggcaccccctctctcctacaaagctttagcc

SEQ ID NO: 21127 - DNA, 122 bp, Homo sapiens
  misc_feature (61)..(62): /note="This region represents a CpG dinucleotide"
  misc_feature (61)..(61): /note="Nucleotide may be methylated to form 5-methylcytosine"
ctgtgtgtttgtagaaggagtatgaatctgtatagagagtgcttactgaagctccaggctcgccaggctcaccagggggaccttggaagccttggggacccttgagaagaaggaaaaagatg

SEQ ID NO: 21128 - DNA, 122 bp, Homo sapiens
  misc_feature (61)..(62): /note="This region represents a CpG dinucleotide"
  misc_feature (61)..(61): /note="Nucleotide may be methylated to form 5-methylcytosine"
tcatttggccaaagcaacaccaaacaaagctcaagagtcagacccatttccttgaagactcgtctctctggtatgctaagaaaaattaaatttgcaattttcggatgtacatatgccagaat

SEQ ID NO: 21129 - DNA, 122 bp, Homo sapiens
  misc_feature (61)..(62): /note="This region represents a CpG dinucleotide"
  misc_feature (61)..(61): /note="Nucleotide may be methylated to form 5-methylcytosine"
agtccttcttggatgagaacaggttctgctgcctcttcaaaatcacaggatatcctttcccggcctacagtcagcctgacaatataagcaatgctataaatattatagcacatactgagaaa

SEQ ID NO: 21130 - DNA, 122 bp, Homo sapiens
  misc_feature (61)..(62): /note="This region represents a CpG dinucleotide"
  misc_feature (61)..(61): /note="Nucleotide may be methylated to form 5-methylcytosine"
catgtataaaatgggggaaatgtatgcatttcagccctcctgttaggattaaataacatacgtgaagccttagggcagcttattgatatacaataaatcctcaacaattgtcagttgccttc

SEQ ID NO: 21131 - DNA, 122 bp, Homo sapiens
  misc_feature (61)..(62): /note="This region represents a CpG dinucleotide"
  misc_feature (61)..(61): /note="Nucleotide may be methylated to form 5-methylcytosine"
tatggtccccagaagtcctgatgggtcagcaagagctgtattaagcagagcaggcaacagcggcaaaaactagcagaacatcctcaagccaggactgcatgtgaggaagacagcgccagcat

SEQ ID NO: 21132 - DNA, 122 bp, Homo sapiens
  misc_feature (61)..(62): /note="This region represents a CpG dinucleotide"
  misc_feature (61)..(61): /note="Nucleotide may be methylated to form 5-methylcytosine"
ggggggaaaggtgaagaattgaaatttaaccaatgagttacttatatttctggagagccccggtgttatcctattaaatactttacaatgggatcgcatcgcagactgtaaatgaagaggaa

SEQ ID NO: 21133 - DNA, 122 bp, Homo sapiens
  misc_feature (61)..(62): /note="This region represents a CpG dinucleotide"
  misc_feature (61)..(61): /note="Nucleotide may be methylated to form 5-methylcytosine"
atgacttctcaccttcactaacactctcccaacatcccatccttcagtctgtttcctactcgttcccaatcaacatttctaaagaagagtatacagcctgctgggaaagctctgctttttcc

SEQ ID NO: 21134 - DNA, 122 bp, Homo sapiens
  misc_feature (61)..(62): /note="This region represents a CpG dinucleotide"
  misc_feature (61)..(61): /note="Nucleotide may be methylated to form 5-methylcytosine"
gtgtttggatttaaaaaccagagatcccaggtaggttagttccagctccccagctaaagacgtattacgtgattagccagcctctttttccttctaaattaaaaggattaagtatattttag

SEQ ID NO: 21135 - DNA, 122 bp, Homo sapiens
  misc_feature (61)..(62): /note="This region represents a CpG dinucleotide"
  misc_feature (61)..(61): /note="Nucleotide may be methylated to form 5-methylcytosine"
ttatgtgtggctgacacttctgcctcacacgacacgctgttggagtttctccctaggtgtcgagcctgagagatgatcaaaatctgccaagaaacagtttatctatcctgcccagacagata

SEQ ID NO: 21136 - DNA, 122 bp, Homo sapiens
  misc_feature (61)..(62): /note="This region represents a CpG dinucleotide"
  misc_feature (61)..(61): /note="Nucleotide may be methylated to form 5-methylcytosine"
gctaccatcttgctgatgtcagtacaatcttcctgaaatcttaacaaaggttgttaaagccgcactttgattttatctttaccctcagggcattatttctttcctgaaaaccttttgcaaga

SEQ ID NO: 21137 - DNA, 122 bp, Homo sapiens
  misc_feature (61)..(62): /note="This region represents a CpG dinucleotide"
  misc_feature (61)..(61): /note="Nucleotide may be methylated to form 5-methylcytosine"
acccaggcctccgaggtgtccctagggtggctccggggcctggctctgaaaaggatggcccgcttctgcccagacgctgccctggtcacgctcacagcagcccgggtgactcagggtgacac

SEQ ID NO: 21138 - DNA, 122 bp, Homo sapiens
  misc_feature (61)..(62): /note="This region represents a CpG dinucleotide"
  misc_feature (61)..(61): /note="Nucleotide may be methylated to form 5-methylcytosine"
ttatgtgacagtgagacagacaaagttattttagttcttcaggatgatgtcaaaatgacacgctgcccttataatgagactcagtattttgtactgtcatggcaggtggcaggttcacttac

SEQ ID NO: 21139 - DNA, 122 bp, Homo sapiens
  misc_feature (61)..(62): /note="This region represents a CpG dinucleotide"
  misc_feature (61)..(61): /note="Nucleotide may be methylated to form 5-methylcytosine"
cagaacagttcacggcaaagacttggccctggggctcctaaatccaagctgcctccccggcgccccaagccccagcctcgctctgggagtcatgattcccgtggagactccttcaaccacat

SEQ ID NO: 21140 - DNA, 122 bp, Homo sapiens
  misc_feature (61)..(62): /note="This region represents a CpG dinucleotide"
  misc_feature (61)..(61): /note="Nucleotide may be methylated to form 5-methylcytosine"
tgaagccgcagaccttcacagtgagtcttatagctcttaaagccacagtgagtcttatggcggctccagagttgtttgtttctcatggtgggttcctggtctggctggcttcaggagtgaag

SEQ ID NO: 21141 - DNA, 122 bp, Homo sapiens
  misc_feature (61)..(62): /note="This region represents a CpG dinucleotide"
  misc_feature (61)..(61): /note="Nucleotide may be methylated to form 5-methylcytosine"
gaaacccaaggttatggatgggaacaatgaatcattggtgtgattacattatcctttaaccgtaatgggtttgccttgcattaagtaaccagagggaaagaaagcacctgttccttaactct

SEQ ID NO: 21142 - DNA, 122 bp, Homo sapiens
  misc_feature (61)..(62): /note="This region represents a CpG dinucleotide"
  misc_feature (61)..(61): /note="Nucleotide may be methylated to form 5-methylcytosine"
ccccatgtgtaaactttccttgtacttcttaatggagcaactgggaaatgaaagatggtgcgaaggaggctgaaggaacatccacagaccagtactgctggtgtcattcatctgagtcatct

SEQ ID NO: 21143 - DNA, 122 bp, Homo sapiens
  misc_feature (61)..(62): /note="This region represents a CpG dinucleotide"
  misc_feature (61)..(61): /note="Nucleotide may be methylated to form 5-methylcytosine"
tagttactagctgtttaataaatctcccgaattgtttggtactgtttggcaagcttactccgcatattaagttttgactttcctgtgttttattggaactctttgttcctgaagcactaaca

SEQ ID NO: 21144 - DNA, 122 bp, Homo sapiens
  misc_feature (61)..(62): /note="This region represents a CpG dinucleotide"
  misc_feature (61)..(61): /note="Nucleotide may be methylated to form 5-methylcytosine"
gtccgcgacccctcgcgccccccaccccgcgactagcggctgcccccggcccgcgccccccgccaggccaaccgccgccaaatcctcgcgccagccttccgggtgggcacagccactgtggt

SEQ ID NO: 21145 - DNA, 122 bp, Homo sapiens
  misc_feature (61)..(62): /note="This region represents a CpG dinucleotide"
  misc_feature (61)..(61): /note="Nucleotide may be methylated to form 5-methylcytosine"
agggtacagggacactcaaagagtgatttgcttctctcagctcttgcattggcaggagctcggaaggacaacctctgagttcctcctcccaaaactagagtccttgaatctgacaacttgac

SEQ ID NO: 21146 - DNA, 122 bp, Homo sapiens
  misc_feature (61)..(62): /note="This region represents a CpG dinucleotide"
  misc_feature (61)..(61): /note="Nucleotide may be methylated to form 5-methylcytosine"
gttttgggcaaacagggtgacttgacaggtgcagcatgtgctctgtacatacagtggtggcgagggttaagagtggcctccacacagcatcaggtttagtcatgtaagatgtgcttccagga

SEQ ID NO: 21147 - DNA, 122 bp, Homo sapiens
  misc_feature (61)..(62): /note="This region represents a CpG dinucleotide"
  misc_feature (61)..(61): /note="Nucleotide may be methylated to form 5-methylcytosine"
aagaatgtttttttttctgttcgtatactttccccaacttctgctggcctggaatcagtacgccctaaccagcccatagatatgtggtcaggtttctagataaggcataggaacacttaggg

SEQ ID NO: 21148 - DNA, 122 bp, Homo sapiens
  misc_feature (61)..(62): /note="This region represents a CpG dinucleotide"
  misc_feature (61)..(61): /note="Nucleotide may be methylated to form 5-methylcytosine"
tgcatggtgtgtttaacaggactggactctatctttacaattctacaaaatcaggccaggcgcagtggctcatgcctgtaaacacctaacactttgagaggccaagtcaggcggatcacctg

SEQ ID NO: 21149 - DNA, 122 bp, Homo sapiens
  misc_feature (61)..(62): /note="This region represents a CpG dinucleotide"
  misc_feature (61)..(61): /note="Nucleotide may be methylated to form 5-methylcytosine"
cagcttggatattatttttcaccaaggaaataaacacttctctttggactaactcccatgcggcagaaccagagcaaggcatttattgctattcggcagctctttgaaaaatcaatccaaaa

SEQ ID NO: 21150 - DNA, 122 bp, Homo sapiens
  misc_feature (61)..(62): /note="This region represents a CpG dinucleotide"
  misc_feature (61)..(61): /note="Nucleotide may be methylated to form 5-methylcytosine"
ctggtgtatttcgaagtgcaaatacaagctcatatgtccagatgaaaatacagcctaggccggccgtggtggctcacgcctgtaatcccagcattttgggaagccgaggcgggaagatcact

SEQ ID NO: 21151 - DNA, 122 bp, Homo sapiens
  misc_feature (61)..(62): /note="This region represents a CpG dinucleotide"
  misc_feature (61)..(61): /note="Nucleotide may be methylated to form 5-methylcytosine"
tgaggctacttgagagcagaggggcgtggagagtcccttcctgcttcctcttcctgttagcgccttgcttgtcatgtcacctggtcaccaagtcatccagggctacaggcaggaaatcaagc

SEQ ID NO: 21152 - DNA, 122 bp, Homo sapiens
  misc_feature (61)..(62): /note="This region represents a CpG dinucleotide"
  misc_feature (61)..(61): /note="Nucleotide may be methylated to form 5-methylcytosine"
ttctgcttttgctgactgctatcagggttacatcaaaaacagtattgctggccaccgcgccggcgagcgccgccagggaggcagcggctggaggagcggacgggccccgcagggcccgaggg

SEQ ID NO: 21153 - DNA, 122 bp, Homo sapiens
  misc_feature (61)..(62): /note="This region represents a CpG dinucleotide"
  misc_feature (61)..(61): /note="Nucleotide may be methylated to form 5-methylcytosine"
atcaaattggcaaaaatccaacaatgcaatgacattctgtgccagccaggctgtggggtgcgtccatggtgtagcactggtggagggcaccctggcacaggccaccggaatgataaactcat

SEQ ID NO: 21154 - DNA, 122 bp, Homo sapiens
  misc_feature (61)..(62): /note="This region represents a CpG dinucleotide"
  misc_feature (61)..(61): /note="Nucleotide may be methylated to form 5-methylcytosine"
aagtaagaaacatcaacagatatccttatgctgtgctgtatttcaaaaatcttccacaaacgaggttccagcaatctggaaacagatatgtaaaacagcatataagctgcatttacttgccc

SEQ ID NO: 21155 - DNA, 122 bp, Homo sapiens
  misc_feature (61)..(62): /note="This region represents a CpG dinucleotide"
  misc_feature (61)..(61): /note="Nucleotide may be methylated to form 5-methylcytosine"
aactgactgcagccacctttctgagaacacatgtggatgagcagcacagaaaatgttgcccgcaatctatggtaaaccatggctctgggtggcagcacgtgttggagtcagaaggagcaggg

SEQ ID NO: 21156 - DNA, 122 bp, Homo sapiens
  misc_feature (61)..(62): /note="This region represents a CpG dinucleotide"
  misc_feature (61)..(61): /note="Nucleotide may be methylated to form 5-methylcytosine"
ataccaatagcccaagagatgggcatgtccctgcatttcctggtcaaggtgacaacactgcgtcctcctggaagaggtctgccactcaccataccacaaaccaaatataataaaatcagaag

SEQ ID NO: 21157 - DNA, 122 bp, Homo sapiens
  misc_feature (61)..(62): /note="This region represents a CpG dinucleotide"
  misc_feature (61)..(61): /note="Nucleotide may be methylated to form 5-methylcytosine"
acagttctacatactcaactctgagttgtctggcaagcataatggagggaggataccagccgtgaataattacagaataacctgtatcgtgtgatatgtttgaactgtcatacgtatgagtc

SEQ ID NO: 21158 - DNA, 122 bp, Homo sapiens
  misc_feature (61)..(62): /note="This region represents a CpG dinucleotide"
  misc_feature (61)..(61): /note="Nucleotide may be methylated to form 5-methylcytosine"
ccacttccttgggtatcctggtagtctctagaaacacctgggtgagctcactgccagcagcggctaccttgttacacctgttctggcagaggctcaatcatgagcagcaagggccagaccca

SEQ ID NO: 21159 - DNA, 122 bp, Homo sapiens
  misc_feature (61)..(62): /note="This region represents a CpG dinucleotide"
  misc_feature (61)..(61): /note="Nucleotide may be methylated to form 5-methylcytosine"
aggcgggttccaagataacccttaaagaatggggtgggttgagggaagggcctctcaggccgagtgaacagcaaatgcagaggcctggcctgaggaacaacaggttcagcgcgccagcggtt

SEQ ID NO: 21160 - DNA, 122 bp, Homo sapiens
  misc_feature (61)..(62): /note="This region represents a CpG dinucleotide"
  misc_feature (61)..(61): /note="Nucleotide may be methylated to form 5-methylcytosine"
ctccaatttcagcccagccaaaatattttcttacattctgtaaagttatttgataaaagacgtcaagtatttgccatcttgacaggaatggcaagatgcagagaagtgccccactttaatat

SEQ ID NO: 21161 - DNA, 122 bp, Homo sapiens
  misc_feature (61)..(62): /note="This region represents a CpG dinucleotide"
  misc_feature (61)..(61): /note="Nucleotide may be methylated to form 5-methylcytosine"
aatctcacttctgctttcaacatttcttaccaaatccagtttctaggacacaaatcattccgcaacccctccttccaatttctaatcctattttaatcactgaaatgggcagagtcagattt

SEQ ID NO: 21162 - DNA, 122 bp, Homo sapiens
  misc_feature (61)..(62): /note="This region represents a CpG dinucleotide"
  misc_feature (61)..(61): /note="Nucleotide may be methylated to form 5-methylcytosine"
gtaataatacctacaactaatacctaagtcacgggattactataaggcttaaagaagtaacgtacagcacaggccatgttgcctgacacaaggaaaagtgtcgagttctgtcactttcaaga

SEQ ID NO: 21163 - DNA, 122 bp, Homo sapiens
  misc_feature (61)..(62): /note="This region represents a CpG dinucleotide"
  misc_feature (61)..(61): /note="Nucleotide may be methylated to form 5-methylcytosine"
gcatctaaacactgggtggttccactgaaaatccagacacagggaaggctcctgcctgcccgctacatccctgcccgctccagcactgtaaccccggcggctcctccagatcttgcaatgct

SEQ ID NO: 21164 - DNA, 122 bp, Homo sapiens
  misc_feature (61)..(62): /note="This region represents a CpG dinucleotide"
  misc_feature (61)..(61): /note="Nucleotide may be methylated to form 5-methylcytosine"
agagctcaagctctcccctactaagttatgaattgaattaataattatcatgagttactacggtggtatccagcttgtggagaaaaaagtttataaatgctgaaaacattgtaggtgcaaaa

SEQ ID NO: 21165 - DNA, 122 bp, Homo sapiens
  misc_feature (61)..(62): /note="This region represents a CpG dinucleotide"
  misc_feature (61)..(61): /note="Nucleotide may be methylated to form 5-methylcytosine"
atcagaatatactggaaaaaatttctcccccagatgttacaacattgccatttagtgcagcgctacttgagagcagatggcgatgagtcaggatttaacaaagaccttaatggctcttctgc

SEQ ID NO: 21166 - DNA, 122 bp, Homo sapiens
  misc_feature (61)..(62): /note="This region represents a CpG dinucleotide"
  misc_feature (61)..(61): /note="Nucleotide may be methylated to form 5-methylcytosine"
aaggaagccagctattttaaaatgtattcactactttgcttgaggggcagtggggcataacggttaagaccaccagctttattttaagtatactttggcagtatctaccaatattttaaaca

SEQ ID NO: 21167 - DNA, 122 bp, Homo sapiens
  misc_feature (61)..(62): /note="This region represents a CpG dinucleotide"
  misc_feature (61)..(61): /note="Nucleotide may be methylated to form 5-methylcytosine"
ctagatgagtagcatactatgtcatcttatagtttcctgagattttgtcataaagcagaacgaaatgagctcattatagtttctagttatttcaataaattagaaaatgtatatgatgtact

SEQ ID NO: 21168 - DNA, 122 bp, Homo sapiens
  misc_feature (61)..(62): /note="This region represents a CpG dinucleotide"
  misc_feature (61)..(61): /note="Nucleotide may be methylated to form 5-methylcytosine"
agagcttcattgagacaaccgtctccttttagaggaaatggagcttgggagtggttaatacgtcacacatttaggttaaagtaaagctgacactagccccacagaaactttaatttgtgtag

SEQ ID NO: 21169 - DNA, 122 bp, Homo sapiens
  misc_feature (61)..(62): /note="This region represents a CpG dinucleotide"
  misc_feature (61)..(61): /note="Nucleotide may be methylated to form 5-methylcytosine"
cctagaaagtaccaagtctgtagttgcaaggtgattacacagcatttgcatttgggcagccgggtggaaggatgattcagaatgagatacttgcttttgttcgcaaaacagatgcgatgtgc

SEQ ID NO: 21170 - DNA, 122 bp, Homo sapiens
  misc_feature (61)..(62): /note="This region represents a CpG dinucleotide"
  misc_feature (61)..(61): /note="Nucleotide may be methylated to form 5-methylcytosine"
ggggttgggttctgtgcaggtgtggaggcgtcaccagggctgaattcatgggcacctccccgcagacactgtaggcctattcaatagaacctgctctccagtcaaggctgccaactcagagg

SEQ ID NO: 21171 - DNA, 122 bp, Homo sapiens
  misc_feature (61)..(62): /note="This region represents a CpG dinucleotide"
  misc_feature (61)..(61): /note="Nucleotide may be methylated to form 5-methylcytosine"
aaaagaattcccaaactgccacagcatgaattgaaaacataccatctgcagctgcttagccgcagctactgcccccaaatcaaatgaaaggctcaagaaatgctcagctgtgttcttattgc

SEQ ID NO: 21172 - DNA, 122 bp, Homo sapiens
  misc_feature (61)..(62): /note="This region represents a CpG dinucleotide"
  misc_feature (61)..(61): /note="Nucleotide may be methylated to form 5-methylcytosine"
taaactccccccaaggagaccaggcagggcagagacaatggctgcaggaaatcattcaggcgggacatgctggcctgccctccacccagtccccctgtgggccccactcccttctgattcag

SEQ ID NO: 21173 - DNA, 122 bp, Homo sapiens
  misc_feature (61)..(62): /note="This region represents a CpG dinucleotide"
  misc_feature (61)..(61): /note="Nucleotide may be methylated to form 5-methylcytosine"
ggggccgcagaccggtcctttaaaggttggaagtggccccgaggcgccggcagccctgggcggtcccgggaatcgcacaggacccggctcccctcgcctaagctgctggggggcgccatggg

SEQ ID NO: 21174 - DNA, 122 bp, Homo sapiens
  misc_feature (61)..(62): /note="This region represents a CpG dinucleotide"
  misc_feature (61)..(61): /note="Nucleotide may be methylated to form 5-methylcytosine"
ccaggaaacaccctgctatcaggacagaaatctggccgggggacaggaagttgagtgtgacgcaccaggagactttgaagcctgtgataccaagaggaaatcctaggccatttagcaaagaa

SEQ ID NO: 21175 - DNA, 122 bp, Homo sapiens
  misc_feature (61)..(62): /note="This region represents a CpG dinucleotide"
  misc_feature (61)..(61): /note="Nucleotide may be methylated to form 5-methylcytosine"
cgttgaaggtttaaagccgaggagctacgtgatgagcgctgtgttttaggaagaggactccgtaatagagaggatgagccagtggatccatttctaaatgtgtttcttaggctataggagga

SEQ ID NO: 21176 - DNA, 122 bp, Homo sapiens
  misc_feature (61)..(62): /note="This region represents a CpG dinucleotide"
  misc_feature (61)..(61): /note="Nucleotide may be methylated to form 5-methylcytosine"
gagaaatacttggagatcttagcagcatgaaagcctctttgtatcactgggattgcagcacgcatgatcaaggcccaggggtgatcaccaggccacactgctcctaagacagaggtactcag

SEQ ID NO: 21177 - DNA, 122 bp, Homo sapiens
  misc_feature (61)..(62): /note="This region represents a CpG dinucleotide"
  misc_feature (61)..(61): /note="Nucleotide may be methylated to form 5-methylcytosine"
aatctattaggcaatttctgcagtgggaggagaacacaaatactgctattctagttcttccgcttcctggtggctggtgatcccaggctatgattccagaaggcccaagcttctgcacacct

SEQ ID NO: 21178 - DNA, 122 bp, Homo sapiens
  misc_feature (61)..(62): /note="This region represents a CpG dinucleotide"
  misc_feature (61)..(61): /note="Nucleotide may be methylated to form 5-methylcytosine"
tgaccttgtgatccgcccgcctcggcctcccaaagcgctgggattacaggcatgagccaccgcgccctgccggcagagcgtccagtttctaaaggatctgccctgtcctgcgttctgtttcc

SEQ ID NO: 21179 - DNA, 122 bp, Homo sapiens
  misc_feature (61)..(62): /note="This region represents a CpG dinucleotide"
  misc_feature (61)..(61): /note="Nucleotide may be methylated to form 5-methylcytosine"
tgaaagtactgtcatctaaaagcaattgtgattttattgtaattggttgtcactgttgtacggtgtctagaattaaagaatacatgtaaactttcatggtatttagcctttcttaaattttt

SEQ ID NO: 21180 - DNA, 122 bp, Homo sapiens
  misc_feature (61)..(62): /note="This region represents a CpG dinucleotide"
  misc_feature (61)..(61): /note="Nucleotide may be methylated to form 5-methylcytosine"
atgcctgtccacgcctccactcccgggccacttccccgtggggcgggcagtggggcagggcggggtgggaatctgctgcaaccagggaagggaattgccccccgggcacagagagtttggag

SEQ ID NO: 21181 - DNA, 122 bp, Homo sapiens
  misc_feature (61)..(62): /note="This region represents a CpG dinucleotide"
  misc_feature (61)..(61): /note="Nucleotide may be methylated to form 5-methylcytosine"
tgattttgctgaacaagaggtatatgtaggtgaggggagcagcgggtaggagtggacccacggaagtggtgggaaataagcctgaataatagacacaaatggcctattgtgcgagtgtggct

SEQ ID NO: 21182 - DNA, 122 bp, Homo sapiens
  misc_feature (61)..(62): /note="This region represents a CpG dinucleotide"
  misc_feature (61)..(61): /note="Nucleotide may be methylated to form 5-methylcytosine"
ttacatttcctgggtcactttgaccttctcaaaggccgcagccaccattgagctggtattcgctcatgctgacatcctactccaaccctctctgcctcatcaaatacagccttgattttggt

SEQ ID NO: 21183 - DNA, 122 bp, Homo sapiens
  misc_feature (61)..(62): /note="This region represents a CpG dinucleotide"
  misc_feature (61)..(61): /note="Nucleotide may be methylated to form 5-methylcytosine"
ggattccatctcggcccagggacacccccgggcctggaacagagctgctctgggaaaacacgggtggagggggatagggaagctgtgcattgcggcctctgcagactccactcctccctgag

SEQ ID NO: 21184 - DNA, 122 bp, Homo sapiens
  misc_feature (61)..(62): /note="This region represents a CpG dinucleotide"
  misc_feature (61)..(61): /note="Nucleotide may be methylated to form 5-methylcytosine"
tcaggccagcagcctcatttgagagcttcttcaaaagacatattagactctcaggcctgccgcagacctactgaatcagagcctgcattcaaacaagatcccaggggatttgtatgcaaatt

SEQ ID NO: 21185 - DNA, 122 bp, Homo sapiens
  misc_feature (61)..(62): /note="This region represents a CpG dinucleotide"
  misc_feature (61)..(61): /note="Nucleotide may be methylated to form 5-methylcytosine"
tctgcattggactagattgggaagtaggccctacattaggggacgaaactcatgagtgcccgggtattttcagctattattggggatagggactctgcgggtggctagaggtactgctaagc

SEQ ID NO: 21186 - DNA, 122 bp, Homo sapiens
  misc_feature (61)..(62): /note="This region represents a CpG dinucleotide"
  misc_feature (61)..(61): /note="Nucleotide may be methylated to form 5-methylcytosine"
tgtgatctcagacgatgttgtattctgttttctagaaacccaacagggcactgggaagtccgttagccatcatatgcttagggttttggtttcattcttctgtgtatctttcttcttctctc

SEQ ID NO: 21187 - DNA, 122 bp, Homo sapiens
  misc_feature (61)..(62): /note="This region represents a CpG dinucleotide"
  misc_feature (61)..(61): /note="Nucleotide may be methylated to form 5-methylcytosine"
tctctcactgactgaagttcataccacaggaagtcacctccccaacacttctaggctgtgcgcccagaccctttggccaccttcaaagaagttggttcccaagacactggtaacagcactcg

SEQ ID NO: 21188 - DNA, 122 bp, Homo sapiens
  misc_feature (61)..(62): /note="This region represents a CpG dinucleotide"
  misc_feature (61)..(61): /note="Nucleotide may be methylated to form 5-methylcytosine"
aggtggtgatttatgatgcctgtgtacttccctgtggtgcccaggcctgcagattacagacgctgtgtaattagagaatccctctccacatgtgttctctgaacagggagcccagggaggct

SEQ ID NO: 21189 - DNA, 122 bp, Homo sapiens
  misc_feature (61)..(62): /note="This region represents a CpG dinucleotide"
  misc_feature (61)..(61): /note="Nucleotide may be methylated to form 5-methylcytosine"
cagacagccgaggcccttttcggcaccaggtgagtcggggtgagtcaggctcctgcaagtcgtaggtgttgcttccgtgctgagatcacgttctttgttttgttttgtgcccgtggcttgtt

SEQ ID NO: 21190 - DNA, 122 bp, Homo sapiens
  misc_feature (61)..(62): /note="This region represents a CpG dinucleotide"
  misc_feature (61)..(61): /note="Nucleotide may be methylated to form 5-methylcytosine"
ggtgacatcctgctactgacagtcaaaagaagccttcccagatgaaattttagtcctctgcgcagccatgctcttcttccagcaaaagagccatgtgcagtcgggtctgctccccatggggg

SEQ ID NO: 21191 - DNA, 122 bp, Homo sapiens
  misc_feature (61)..(62): /note="This region represents a CpG dinucleotide"
  misc_feature (61)..(61): /note="Nucleotide may be methylated to form 5-methylcytosine"
gcaggaaggactcggcagaataatgagctgtcaaacagattctagccaggcatagggtgacgctccaggctgatgagctctgtgccagaaggctggtgacaccagctggccacaaaaggcca

SEQ ID NO: 21192 - DNA, 122 bp, Homo sapiens
  misc_feature (61)..(62): /note="This region represents a CpG dinucleotide"
  misc_feature (61)..(61): /note="Nucleotide may be methylated to form 5-methylcytosine"
taagtgttctccatgtaccattttgtttagtcctcaccataatcttattgctgtcatctccgttttgtaggtgagaaaacctaggcccagagggtttaagccacttgactgaggtcacacag

SEQ ID NO: 21193 - DNA, 122 bp, Homo sapiens
  misc_feature (61)..(62): /note="This region represents a CpG dinucleotide"
  misc_feature (61)..(61): /note="Nucleotide may be methylated to form 5-methylcytosine"
atatattttattgtctttagatatccagtactacaacataatgtcttccacaaagtgtttcgagtcctgctatagctgtggcttagctcttcttgtgggaacctgtgtgtcttatgttctct

SEQ ID NO: 21194 - DNA, 122 bp, Homo sapiens
  misc_feature (61)..(62): /note="This region represents a CpG dinucleotide"
  misc_feature (61)..(61): /note="Nucleotide may be methylated to form 5-methylcytosine"
caggttctgtttaccacattgccttgacttcatgagttggggcacattctatttgggttgcgcaagccaagatcatcattgcataaagcaggaacccacaaattgctatttcttaggtgacc

SEQ ID NO: 21195 - DNA, 122 bp, Homo sapiens
  misc_feature (61)..(62): /note="This region represents a CpG dinucleotide"
  misc_feature (61)..(61): /note="Nucleotide may be methylated to form 5-methylcytosine"
tgctggcttcgtgtgaggtcatctatgtgcatggaccggcccctagaatcctccccagcccggttcacagatgacaaacctgaggcaagaaggctcataggtcaatgcagccaggaggggtc

SEQ ID NO: 21196 - DNA, 122 bp, Homo sapiens
  misc_feature (61)..(62): /note="This region represents a CpG dinucleotide"
  misc_feature (61)..(61): /note="Nucleotide may be methylated to form 5-methylcytosine"
tggtgagaacatcagtgaccataatggcccttcctgtcagtgtttgctgcggattgttctcggaaccgcaggggacagacacaggcttatagcctgtagagatttacaaggggtgactgcaa

SEQ ID NO: 21197 - DNA, 122 bp, Homo sapiens
  misc_feature (61)..(62): /note="This region represents a CpG dinucleotide"
  misc_feature (61)..(61): /note="Nucleotide may be methylated to form 5-methylcytosine"
aaagagaagagttcctagagtacagggtatgagaggtatcatggaatggagggggaaacacgataaataagagaaggacacatgtccttagggaatagaagattcccctggtcctgaaggag

SEQ ID NO: 21198 - DNA, 122 bp, Homo sapiens
  misc_feature (61)..(62): /note="This region represents a CpG dinucleotide"
  misc_feature (61)..(61): /note="Nucleotide may be methylated to form 5-methylcytosine"
acattcactcatgctgctacactcagtaaacaaagtgagatcaaggctgaaatatctgaacgagctgtaagaaactatgcagattagagccaacaggttatttaagatcagagaggccacag

SEQ ID NO: 21199 - DNA, 122 bp, Homo sapiens
  misc_feature (61)..(62): /note="This region represents a CpG dinucleotide"
  misc_feature (61)..(61): /note="Nucleotide may be methylated to form 5-methylcytosine"
ttcttcatattgatggttaagcaatatcttttccagctgtcacataaactccctgactgccgtcagtacacgctaacccaggatttccctagcaaagctcccaccaaatcccattacatcaa

SEQ ID NO: 21200 - DNA, 122 bp, Homo sapiens
  misc_feature (61)..(62): /note="This region represents a CpG dinucleotide"
  misc_feature (61)..(61): /note="Nucleotide may be methylated to form 5-methylcytosine"
ctagctttttaaaaatagccatttctgtttcatcccaattaaacaagacccaaagcttcccggttaaaagggtaaaaggccaaaccagtctacgttttcagaagcaacgtgtccaagaatga

SEQ ID NO: 21201 - DNA, 122 bp, Homo sapiens
  misc_feature (61)..(62): /note="This region represents a CpG dinucleotide"
  misc_feature (61)..(61): /note="Nucleotide may be methylated to form 5-methylcytosine"
cacacactctttgtaatactaatgcctgggtaggcagccagctctactgctcgagtaagccgtctgatcttgggaatttacttgccctctgtgtgactcagttttctcatctggaaaaggga

SEQ ID NO: 21202 - DNA, 122 bp, Homo sapiens
  misc_feature (61)..(62): /note="This region represents a CpG dinucleotide"
  misc_feature (61)..(61): /note="Nucleotide may be methylated to form 5-methylcytosine"
caccaaatgcattttgtggtcttactgtttgcttttgctggaccgtatgtcttttcaccccgctctgttgtaccttatgatgaggggcaaataaccacaaagcaggaaaccttgtcaaggaa

SEQ ID NO: 21203 - DNA, 122 bp, Homo sapiens
  misc_feature (61)..(62): /note="This region represents a CpG dinucleotide"
  misc_feature (61)..(61): /note="Nucleotide may be methylated to form 5-methylcytosine"
acagcctgaatgactttggtctttgaaagtgtatttctcagagtttaatctccaaggattcggaacaaaatgaacacattattcatcctatcctgaaatgatacttgtgtgtgtgctgggtg

SEQ ID NO: 21204 - DNA, 122 bp, Homo sapiens
  misc_feature (61)..(62): /note="This region represents a CpG dinucleotide"
  misc_feature (61)..(61): /note="Nucleotide may be methylated to form 5-methylcytosine"
atctcatgatccgcccacctcggccttccagagtgctgggattacaggtgtgagccactgcgcccggtcaagacatgttttgttaagtctctgtcacctgaaaaatgtgcatgtccttctgg

SEQ ID NO: 21205 - DNA, 122 bp, Homo sapiens
  misc_feature (61)..(62): /note="This region represents a CpG dinucleotide"
  misc_feature (61)..(61): /note="Nucleotide may be methylated to form 5-methylcytosine"
caaaacttactcctaaagcttaacacaaagtattgatactatgagtttgattggcttcaacgtccattttctacaccttttccattgaaacaaagttatttttacaagtcaaggggagcaag

SEQ ID NO: 21206 - DNA, 122 bp, Homo sapiens
  misc_feature (61)..(62): /note="This region represents a CpG dinucleotide"
  misc_feature (61)..(61): /note="Nucleotide may be methylated to form 5-methylcytosine"
gcaccatcctctggtactcccagggtgcatgctgggacacagagagcctcttgctttccacgtagttggtcagctggccctgattctggataacatcacccctggctcagcaagcctggctg

SEQ ID NO: 21207 - DNA, 122 bp, Homo sapiens
  misc_feature (61)..(62): /note="This region represents a CpG dinucleotide"
  misc_feature (61)..(61): /note="Nucleotide may be methylated to form 5-methylcytosine"
gtgacagtttaatgctactaccaattctctttgataacttgagtgttttaaaggaatggccgaacaactaaccttaaaatattcaggttctatcttatataaatacagattgttttaaaaga

SEQ ID NO: 21208 - DNA, 122 bp, Homo sapiens
  misc_feature (61)..(62): /note="This region represents a CpG dinucleotide"
  misc_feature (61)..(61): /note="Nucleotide may be methylated to form 5-methylcytosine"
tgcacacctactcagagggtctgagacctctgagtcaggcgtgtcgagtgaggtcagcaccgtgcctttgtgctattccagaagatccctgtccctaccccagcacaagtctccctgacttc

SEQ ID NO: 21209 - DNA, 122 bp, Homo sapiens
  misc_feature (61)..(62): /note="This region represents a CpG dinucleotide"
  misc_feature (61)..(61): /note="Nucleotide may be methylated to form 5-methylcytosine"
gtcttcatttttatcctttgccaaagatttctctgtcattacttggcagaatggagcttccgctctagaagatttcaccataagcgtatgtgagtagaaagtattccctaagaacttgcagg

SEQ ID NO: 21210 - DNA, 122 bp, Homo sapiens
  misc_feature (61)..(62): /note="This region represents a CpG dinucleotide"
  misc_feature (61)..(61): /note="Nucleotide may be methylated to form 5-methylcytosine"
gctttctgggttccatcatgtgaccaccatactgcagagcagaccagaactgctgatcaccgtgagaagcaaacacaaaggtcaggggctgagtggtttggctatttttctactgtgagaca

SEQ ID NO: 21211 - DNA, 122 bp, Homo sapiens
  misc_feature (61)..(62): /note="This region represents a CpG dinucleotide"
  misc_feature (61)..(61): /note="Nucleotide may be methylated to form 5-methylcytosine"
ctccaagaagtgcatccaggttggcggggagttctacactcccagcaagttcgaagactccggcagtgggaagaacaaggcccgcagcagcagtggcccgaagcctctggttcgagccaagg

SEQ ID NO: 21212 - DNA, 122 bp, Homo sapiens
  misc_feature (61)..(62): /note="This region represents a CpG dinucleotide"
  misc_feature (61)..(61): /note="Nucleotide may be methylated to form 5-methylcytosine"
atggtggaaaagttggcaattaataacttctaagaaaactgaactaatgaaccaatcctgcgtgtgctatgtgtataacctccttctcactattaacagatttgttccaaacttatataaga

SEQ ID NO: 21213 - DNA, 122 bp, Homo sapiens
  misc_feature (61)..(62): /note="This region represents a CpG dinucleotide"
  misc_feature (61)..(61): /note="Nucleotide may be methylated to form 5-methylcytosine"
atgacatagctactgtgacatagtgttaagctatgtcagaaggagccatgacaatgtcaacggttgaaagtcaggagctgaggatgtcaatgaccaatgagaaggaagcatatacagtgtgg

SEQ ID NO: 21214 - DNA, 122 bp, Homo sapiens
  misc_feature (61)..(62): /note="This region represents a CpG dinucleotide"
  misc_feature (61)..(61): /note="Nucleotide may be methylated to form 5-methylcytosine"
gtggcctggaaatgtcctggaagtggtggctgcattccaaaggtgagtgttccaagaaagcgggcaagccaggtgaaagtgtatcctgttcctgattcagccttggatcaggtctgtcttac

SEQ ID NO: 21215 - DNA, 122 bp, Homo sapiens
  misc_feature (61)..(62): /note="This region represents a CpG dinucleotide"
  misc_feature (61)..(61): /note="Nucleotide may be methylated to form 5-methylcytosine"
tgtcattcattggcatgacaattcagccctctggggtcagactcaattgcacaatgtatacgcatatgacagtatgatctatggagtttctaaagaaatgtgcaggagaagcaggcaaatac

SEQ ID NO: 21216 - DNA, 122 bp, Homo sapiens
  misc_feature (61)..(62): /note="This region represents a CpG dinucleotide"
  misc_feature (61)..(61): /note="Nucleotide may be methylated to form 5-methylcytosine"
agtttcactttctgcttccttaaacgcagcctttgctttaggctatcataacagtattaacgctaacatacatgttttctgactacacacatgaaggtcctctcatctgaaatgtttccggg

SEQ ID NO: 21217 - DNA, 122 bp, Homo sapiens
  misc_feature (61)..(62): /note="This region represents a CpG dinucleotide"
  misc_feature (61)..(61): /note="Nucleotide may be methylated to form 5-methylcytosine"
acacctaatcttaccttcgtaacacagccgcttggtctctagatgtgtttctgtttaaatcgtcgtagccctctagagcgccggctttcgggtcaggccggggttcaagtcccagccttcgc

SEQ ID NO: 21218 - DNA, 122 bp, Homo sapiens
  misc_feature (61)..(62): /note="This region represents a CpG dinucleotide"
  misc_feature (61)..(61): /note="Nucleotide may be methylated to form 5-methylcytosine"
gtttcgctcacagatgtatctatccctggaatgtcctttgggatgtatctgtccctgaaacgtcatttggcaaatagttgacactcaagaaatgtttgttgccgaatggattacctgacctg

SEQ ID NO: 21219 - DNA, 122 bp, Homo sapiens
  misc_feature (61)..(62): /note="This region represents a CpG dinucleotide"
  misc_feature (61)..(61): /note="Nucleotide may be methylated to form 5-methylcytosine"
accacacccaaacccctccctctgccacgttagcctggaactgcagtgaaaatcatccatcggtagttaagacaggatctagttaactaaagtaaactttgatcgcggcagctttccgatgc

SEQ ID NO: 21220 - DNA, 122 bp, Homo sapiens
  misc_feature (61)..(62): /note="This region represents a CpG dinucleotide"
  misc_feature (61)..(61): /note="Nucleotide may be methylated to form 5-methylcytosine"
ctccagaagagagagtgaattcaccctcctcccacagttttattctctctaggccctcaacggcttgggtgatgcccacacaccttggtgagagcaaattcctctctactcagactactgat

SEQ ID NO: 21221 - DNA, 122 bp, Homo sapiens
  misc_feature (61)..(62): /note="This region represents a CpG dinucleotide"
  misc_feature (61)..(61): /note="Nucleotide may be methylated to form 5-methylcytosine"
tctcactggttactaagaacatttggaggcaagcatactgacagcaaaaacacccggggacgaggacctcacactcagcagacagaggaggcaggatcacagttcttccttctccagcctcc

SEQ ID NO: 21222 - DNA, 122 bp, Homo sapiens
  misc_feature (61)..(62): /note="This region represents a CpG dinucleotide"
  misc_feature (61)..(61): /note="Nucleotide may be methylated to form 5-methylcytosine"
tcaactttctcatattgcaacactctgatattattcttttctctctcctccatcttctggcgatccttgtgattacattgaaaccacccggatattctgtcagaatctccttgttctaagtg

SEQ ID NO: 21223 - DNA, 122 bp, Homo sapiens
  misc_feature (61)..(62): /note="This region represents a CpG dinucleotide"
  misc_feature (61)..(61): /note="Nucleotide may be methylated to form 5-methylcytosine"
ttcttttcttttttttgagatggagtctccctcttttgtccagcctggagtgcagtggtgcgatctcagctcactgaaacctctacctcccaggttcaagcaattctcttgcctcagcctct

SEQ ID NO: 21224 - DNA, 122 bp, Homo sapiens
  misc_feature (61)..(62): /note="This region represents a CpG dinucleotide"
  misc_feature (61)..(61): /note="Nucleotide may be methylated to form 5-methylcytosine"
accaagaagcttgtggtttcctaaatcctgttctccccttcttcctccttgcagccatttcgttgcttgcttgctgcagacagttcgttggctgcccaacaaccagccatcccacttcttcc

SEQ ID NO: 21225 - DNA, 122 bp, Homo sapiens
  misc_feature (61)..(62): /note="This region represents a CpG dinucleotide"
  misc_feature (61)..(61): /note="Nucleotide may be methylated to form 5-methylcytosine"
atctgtcatagacacacactctttctctctctctctctctctctctcacacacacacacacgttcagcatggctgctttgcagtggaaacctgtactgcacatccacaggtgtggcaggagt

SEQ ID NO: 21226 - DNA, 122 bp, Homo sapiens
  misc_feature (61)..(62): /note="This region represents a CpG dinucleotide"
  misc_feature (61)..(61): /note="Nucleotide may be methylated to form 5-methylcytosine"
ggaaaatgttaatttgtactagaaacctctcaaggcaggaaactgatgaaactctagcaacgctaggcagcacatgaagaggaaacaaaagcagaagaaatgaacagttgtaattaattaaa

SEQ ID NO: 21227 - DNA, 122 bp, Homo sapiens
  misc_feature (61)..(62): /note="This region represents a CpG dinucleotide"
  misc_feature (61)..(61): /note="Nucleotide may be methylated to form 5-methylcytosine"
aagaagtgctttatctttaattattccactttttgttaaatggttcatgcttttaaactgcgattgtctcaaacttgcttgctattgaattgtgtaacatcagataatggcaagttgtcaaa

SEQ ID NO: 21228 - DNA, 122 bp, Homo sapiens
  misc_feature (61)..(62): /note="This region represents a CpG dinucleotide"
  misc_feature (61)..(61): /note="Nucleotide may be methylated to form 5-methylcytosine"
caggccatggaattggtctcaatgccatttaggcatgaatccagggtcctgggtaccagacgcatggtctaggtagggggtgtcatgtactaggtgagcatggggttccgctgggcatgttc

SEQ ID NO: 21229 - DNA, 122 bp, Homo sapiens
  misc_feature (61)..(62): /note="This region represents a CpG dinucleotide"
  misc_feature (61)..(61): /note="Nucleotide may be methylated to form 5-methylcytosine"
cagcaatcttcagctctcaggctgggttatggctgcccggttccaagtgggacagcaggacgggaacaccattgaggaagaagttcacagcactggcagccccaagaccctggctgcgcagc

SEQ ID NO: 21230 - DNA, 122 bp, Homo sapiens
  misc_feature (61)..(62): /note="This region represents a CpG dinucleotide"
  misc_feature (61)..(61): /note="Nucleotide may be methylated to form 5-methylcytosine"
gtgcccaagacatttttaattcatatcctggtgacaagtgagcattgaaaacccaagactcgtagatgagaagaattgaagcacacagacacctgagcacagagattagagattgatggtct

SEQ ID NO: 21231 - DNA, 122 bp, Homo sapiens
  misc_feature (61)..(62): /note="This region represents a CpG dinucleotide"
  misc_feature (61)..(61): /note="Nucleotide may be methylated to form 5-methylcytosine"
gtctacagggccccacaccctgaggggccctatgtttcgtttgctctgatgtcactgtctcgaaattcttaataattttatctttgatcttgtgttttgtaagggaagtttaatgagaccgc

SEQ ID NO: 21232 - DNA, 122 bp, Homo sapiens
  misc_feature (61)..(62): /note="This region represents a CpG dinucleotide"
  misc_feature (61)..(61): /note="Nucleotide may be methylated to form 5-methylcytosine"
ctgatggctgggaccccatctctgatggagcaaggcttctgatacccaactgaggcttggcgccaaggactgacatcaaggaagtggattcctgcaaacctggcacccgagggtccacttcc

SEQ ID NO: 21233 - DNA, 122 bp, Homo sapiens
  misc_feature (61)..(62): /note="This region represents a CpG dinucleotide"
  misc_feature (61)..(61): /note="Nucleotide may be methylated to form 5-methylcytosine"
tttactgcaataccatggtctcagtgaattgttttgtctgtgccgcaagctggaagcacccgttgggtgattgtacaaggacagtttcagaagctctccacttcctttctcccgcagccttg

SEQ ID NO: 21234 - DNA, 122 bp, Homo sapiens
  misc_feature (61)..(62): /note="This region represents a CpG dinucleotide"
  misc_feature (61)..(61): /note="Nucleotide may be methylated to form 5-methylcytosine"
ctcacaataaaactcaaggaactaagagaacatgaagttcacgtccctcctattagaaagcgggtatacataaaatccatcagtgttgaggttggtaccacagagggctatacccaaagagt

SEQ ID NO: 21235 - DNA, 122 bp, Homo sapiens
  misc_feature (61)..(62): /note="This region represents a CpG dinucleotide"
  misc_feature (61)..(61): /note="Nucleotide may be methylated to form 5-methylcytosine"
cagattcagacctctttgggctgagccaccttgtgagtgcagttactgcctttgtgtggccgtgacctctatttgtttgcttttaatttgccaacctatcgctgctggcagcactttttgag

SEQ ID NO: 21236 - DNA, 122 bp, Homo sapiens
  misc_feature (61)..(62): /note="This region represents a CpG dinucleotide"
  misc_feature (61)..(61): /note="Nucleotide may be methylated to form 5-methylcytosine"
ccccaccccctgcagccctgtccctccaggatgcatggccttgtcctgtgtgggggtggccgagagcactgccccagccctgggtaccttgggcaggaagctggcagaggccagggctgcca

SEQ ID NO: 21237 - DNA, 122 bp, Homo sapiens
  misc_feature (61)..(62): /note="This region represents a CpG dinucleotide"
  misc_feature (61)..(61): /note="Nucleotide may be methylated to form 5-methylcytosine"
ggccagattcggcatcgggcatgctggtttgcatctctgccctgtcattgttcttgctttcggaaaggagtgtgctagttacaggcataagacagtgactctagttccccttcatgaaagca

SEQ ID NO: 21238 - DNA, 122 bp, Homo sapiens
  misc_feature (61)..(62): /note="This region represents a CpG dinucleotide"
  misc_feature (61)..(61): /note="Nucleotide may be methylated to form 5-methylcytosine"
gccccatgagtccagcatcagagcctggtctctccatctaagaaggctgccatgagatagcggtcaggacagcaatggcaggtagcccagcatcaaggacagatgagtcaaacctcttctgt

SEQ ID NO: 21239 - DNA, 122 bp, Homo sapiens
  misc_feature (61)..(62): /note="This region represents a CpG dinucleotide"
  misc_feature (61)..(61): /note="Nucleotide may be methylated to form 5-methylcytosine"
ttacatcccagtggtgttgacattcagctttgtcccacaagctgctgaagacaggcagggcgccatctgtcatgttagatggtcactagttaacgataagtggtggagattacttttctgac

SEQ ID NO: 21240 - DNA, 122 bp, Homo sapiens
  misc_feature (61)..(62): /note="This region represents a CpG dinucleotide"
  misc_feature (61)..(61): /note="Nucleotide may be methylated to form 5-methylcytosine"
cagctctgccccacccatgcaagggtggggagctctttggattacatgatctctaggattcgtgggtactttctccagaacaggggcagttctcaagaggcgtgtggccacttaggcaggta

SEQ ID NO: 21241 - DNA, 122 bp, Homo sapiens
  misc_feature (61)..(62): /note="This region represents a CpG dinucleotide"
  misc_feature (61)..(61): /note="Nucleotide may be methylated to form 5-methylcytosine"
acaatacagatgactcacatatggctcattcaaagccactggcttgtacatggcatttatcgttaatctagccgtgcccccagcatcataaaaagaccccatggaaactcatccatcagatc

SEQ ID NO: 21242 - DNA, 122 bp, Homo sapiens
  misc_feature (61)..(62): /note="This region represents a CpG dinucleotide"
  misc_feature (61)..(61): /note="Nucleotide may be methylated to form 5-methylcytosine"
tggtaaagggacttgctcaaggccacacatctcaaatcaagccatttgcagtggagccaacgcatagggtcaccatgccacacctaagtgccctgtgatgcactaagctgttcatgtaagtc

SEQ ID NO: 21243 - DNA, 122 bp, Homo sapiens
  misc_feature (61)..(62): /note="This region represents a CpG dinucleotide"
  misc_feature (61)..(61): /note="Nucleotide may be methylated to form 5-methylcytosine"
agtgatccgcctgcctcggcttcccaaagtgctgggattactggcatgagccactgcgcccgacctccattttttgattattatcattggggtcactgtggcaggtgtgaagcaataccaca

SEQ ID NO: 21244 - DNA, 122 bp, Homo sapiens
  misc_feature (61)..(62): /note="This region represents a CpG dinucleotide"
  misc_feature (61)..(61): /note="Nucleotide may be methylated to form 5-methylcytosine"
aaatttttctcactgcgacctacagaaacacactgtagaacacctcctagtacactcacacgtgtgtgtacacctgaagtgtcaagaaacaataccctaagtgcaacaccctctgatatttt

SEQ ID NO: 21245 - DNA, 122 bp, Homo sapiens
  misc_feature (61)..(62): /note="This region represents a CpG dinucleotide"
  misc_feature (61)..(61): /note="Nucleotide may be methylated to form 5-methylcytosine"
agcaaaatgtgtagggctactgctggctgcaggacagccctgtagagaggctgtggtccccgaccaagaggactaatgggtgtcactatgcaaatttgctgtcccacacatcaaaggtctga

SEQ ID NO: 21246 - DNA, 122 bp, Homo sapiens
  misc_feature (61)..(62): /note="This region represents a CpG dinucleotide"
  misc_feature (61)..(61): /note="Nucleotide may be methylated to form 5-methylcytosine"
gatgttagaggtccaaaaactccacccttggatcatgctaacactgccattttttgtacacgtgactgatgaagaagcatgaagctcaattgcacatgtgcacgcatctcctttcataatta

SEQ ID NO: 21247 - DNA, 122 bp, Homo sapiens
  misc_feature (61)..(62): /note="This region represents a CpG dinucleotide"
  misc_feature (61)..(61): /note="Nucleotide may be methylated to form 5-methylcytosine"
gaagtattgaggaggtggggatggcattagggaagggttgtgccctgagctgggtaggcccgttggttggtaaacctttgttgtctttgaggaggccaaagaagccttgcatggacgcctca

SEQ ID NO: 21248 - DNA, 122 bp, Homo sapiens
  misc_feature (61)..(62): /note="This region represents a CpG dinucleotide"
  misc_feature (61)..(61): /note="Nucleotide may be methylated to form 5-methylcytosine"
cggtgagggaatgatcccggcttgtccacctgttaattatggtagaggaatgctgcaagccggcccaaatacaaattatggcacagggaaaatccaggcagccattcaccaggcacgagaaa

SEQ ID NO: 21249 - DNA, 122 bp, Homo sapiens
  misc_feature (61)..(62): /note="This region represents a CpG dinucleotide"
  misc_feature (61)..(61): /note="Nucleotide may be methylated to form 5-methylcytosine"
atatttttctgtttctttgacatctgcaaaggttcttaggtctagtttagtgagacagaacgcaagaacagtaagtcaggcaaagcagatgtatgactcatagataggcagcaagaataaac

SEQ ID NO: 21250 - DNA, 122 bp, Homo sapiens
  misc_feature (61)..(62): /note="This region represents a CpG dinucleotide"
  misc_feature (61)..(61): /note="Nucleotide may be methylated to form 5-methylcytosine"
atatgggtcactgagcacagccttgtccctctcacttctctgcgtttggtcttcacatcacggcacattttcagttgatgcctacttgcagtatcaggatgtgtggcaatctgggaagcaac

SEQ ID NO: 21251 - DNA, 122 bp, Homo sapiens
  misc_feature (61)..(62): /note="This region represents a CpG dinucleotide"
  misc_feature (61)..(61): /note="Nucleotide may be methylated to form 5-methylcytosine"
tggatttcaatgagtacatctagtatttcaattgtaacaattaactacagtcatgtgttacgtaacaatgtggatacatttcgagacatgctttgttaggtgatttcatcattatgtgaaca

SEQ ID NO: 21252 - DNA, 122 bp, Homo sapiens
  misc_feature (61)..(62): /note="This region represents a CpG dinucleotide"
  misc_feature (61)..(61): /note="Nucleotide may be methylated to form 5-methylcytosine"
tcatctctgacgcttactggcttgagtcagccctttctgtcgcataccgtgcagcttgcccgaggctgcccaggtttctgcactgagagtcccaaacaaactgggcagttggtgaatgagct

SEQ ID NO: 21253 - DNA, 122 bp, Homo sapiens
  misc_feature (61)..(62): /note="This region represents a CpG dinucleotide"
  misc_feature (61)..(61): /note="Nucleotide may be methylated to form 5-methylcytosine"
ggacacggtgatggcaggagagcaaaggaagtgggcagattctggctatacttttgcacgcgagacagtgggacttgccagcttgagcaaacagatgaacagaaatatttccaagatgcaga

SEQ ID NO: 21254 - DNA, 122 bp, Homo sapiens
  misc_feature (61)..(62): /note="This region represents a CpG dinucleotide"
  misc_feature (61)..(61): /note="Nucleotide may be methylated to form 5-methylcytosine"
gtacttcttctttggcaaaactacatctttccttggtgcagtggaccacaacctgcttcacgaggcatctgcagaaggagctaaccccaaacgcccactgtgctgataaatttatgctagaa

SEQ ID NO: 21255 - DNA, 122 bp, Homo sapiens
  misc_feature (61)..(62): /note="This region represents a CpG dinucleotide"
  misc_feature (61)..(61): /note="Nucleotide may be methylated to form 5-methylcytosine"
agattgagatcatttttaaaggagcttgtccctacctgcttctgtaacatatctgctacacgtggaaagaaggtagccagtgaacatgcaaacaacacagacacagtgagaattgtagagaa

SEQ ID NO: 21256 - DNA, 122 bp, Homo sapiens
  misc_feature (61)..(62): /note="This region represents a CpG dinucleotide"
  misc_feature (61)..(61): /note="Nucleotide may be methylated to form 5-methylcytosine"
ttaggtttgatctgatgaacaatggataatcactgcaggctcctcagcagggaagatatacgaaggaagaaaaggcatttaagtggattaatctagcccacgtgaacaactggttcaacgtg

SEQ ID NO: 21257 - DNA, 122 bp, Homo sapiens
  misc_feature (61)..(62): /note="This region represents a CpG dinucleotide"
  misc_feature (61)..(61): /note="Nucleotide may be methylated to form 5-methylcytosine"
tcctcatcagccatatttgtggtccttattcctgttgctgcctctgaggccctgtctctacgtaatgagtccttatgaggtttgcttgagcaaatagttataaaacacttagaacagtggct

SEQ ID NO: 21258 - DNA, 122 bp, Homo sapiens
  misc_feature (61)..(62): /note="This region represents a CpG dinucleotide"
  misc_feature (61)..(61): /note="Nucleotide may be methylated to form 5-methylcytosine"
gaagcactctccctgtgggttggtggcatgagggagagtccaggcaggggcataagcagacgtgcaggacagtaaacaaaacccatgagataagactcctgcttagtggttatgttggggat

SEQ ID NO: 21259 - DNA, 122 bp, Homo sapiens
  misc_feature (61)..(62): /note="This region represents a CpG dinucleotide"
  misc_feature (61)..(61): /note="Nucleotide may be methylated to form 5-methylcytosine"
agcaccaccacctgttcctaaaatagctcgtggtgaaagagaagaaaatgagaaagctggcgacgtgactaacacactgtgcagggaagtgctctacaactactggcatgcagtgaccgtca

SEQ ID NO: 21260 - DNA, 122 bp, Homo sapiens
  misc_feature (61)..(62): /note="This region represents a CpG dinucleotide"
  misc_feature (61)..(61): /note="Nucleotide may be methylated to form 5-methylcytosine"
cacaagaaggaacaactatttataggaagtattaggaaatctgggcactaccattgattgcggatttaccaagaactgtgctaggcattgtgggagctacctaagaagaataaaacagaatc

SEQ ID NO: 21261 - DNA, 122 bp, Homo sapiens
  misc_feature (61)..(62): /note="This region represents a CpG dinucleotide"
  misc_feature (61)..(61): /note="Nucleotide may be methylated to form 5-methylcytosine"
ttcagaagtgatggtgatctttgaggaagtgaatttatagcagtgattaacagctgtgggcgattttgcccccaggggacacatgtcaatgtcaggacacattttggttttcacaaatgaag

SEQ ID NO: 21262 - DNA, 122 bp, Homo sapiens
  misc_feature (61)..(62): /note="This region represents a CpG dinucleotide"
  misc_feature (61)..(61): /note="Nucleotide may be methylated to form 5-methylcytosine"
ctggagtcaaaacaaaccttatagatttgcctcaaaaactaccactgcaaagaggcttgacgtcaactggattagactgtgggacaatatatgcccccagggcattattgaaatgaatgagg

SEQ ID NO: 21263 - DNA, 122 bp, Homo sapiens
  misc_feature (61)..(62): /note="This region represents a CpG dinucleotide"
  misc_feature (61)..(61): /note="Nucleotide may be methylated to form 5-methylcytosine"
aatgctgatgaataaagcttctgcttaagtcactggcccacgtctgtgctgtgctgggcacgcacagtggccctcttgcctcaagctcatttcctcttctgttatctgaccctaatctagtt

SEQ ID NO: 21264 - DNA, 122 bp, Homo sapiens
  misc_feature (61)..(62): /note="This region represents a CpG dinucleotide"
  misc_feature (61)..(61): /note="Nucleotide may be methylated to form 5-methylcytosine"
atagatgtgtgcacacattatgtcttttctctggatttctgcttagatgaggcaggtgcacgttttaaggatgggtttctttcccatttttcagcttctgtcattgggggttggtgtgtttc

SEQ ID NO: 21265 - DNA, 122 bp, Homo sapiens
  misc_feature (61)..(62): /note="This region represents a CpG dinucleotide"
  misc_feature (61)..(61): /note="Nucleotide may be methylated to form 5-methylcytosine"
cagcagttttacataactgccaaactgttattcaaggtggctggaccgttttacagcccccgttgtatgcgtcccagttgcctcccccagcagcatgtggtgtggttggtctttttcgtggc

SEQ ID NO: 21266 - DNA, 122 bp, Homo sapiens
  misc_feature (61)..(62): /note="This region represents a CpG dinucleotide"
  misc_feature (61)..(61): /note="Nucleotide may be methylated to form 5-methylcytosine"
ctttaaaccacaccttttatctcttcgccagagtgcctttccactcccattctatttttacgcagttggactatgtcttggaactgaagccttctactgagcacagagcaaagttatatttc

SEQ ID NO: 21267 - DNA, 122 bp, Homo sapiens
  misc_feature (61)..(62): /note="This region represents a CpG dinucleotide"
  misc_feature (61)..(61): /note="Nucleotide may be methylated to form 5-methylcytosine"
gctatttcctgggggcactacggaccacagtgaacgacctggcatgctctgataagaaaacgctttataatctcgccaactaccttaactgccgtacactcccaacacgctcccgccaaaga

SEQ ID NO: 21268 - DNA, 122 bp, Homo sapiens
  misc_feature (61)..(62): /note="This region represents a CpG dinucleotide"
  misc_feature (61)..(61): /note="Nucleotide may be methylated to form 5-methylcytosine"
aatcttactcctcactcaagaacttcctgctggcatatatgatgacttagcttttttccccgacagatcgactatgttgatctaacttttctaagccagtttctgtctgatatgccagcttg

SEQ ID NO: 21269 - DNA, 122 bp, Homo sapiens
  misc_feature (61)..(62): /note="This region represents a CpG dinucleotide"
  misc_feature (61)..(61): /note="Nucleotide may be methylated to form 5-methylcytosine"
tgggcaggtataatcccggaagcctttctgcaagaggtagcatgattcagccaaaggcatcgggaggacattagggcaagggcataacagcatcagggtaaaggtgcctggcatgagtgtgc

SEQ ID NO: 21270 - DNA, 122 bp, Homo sapiens
  misc_feature (61)..(62): /note="This region represents a CpG dinucleotide"
  misc_feature (61)..(61): /note="Nucleotide may be methylated to form 5-methylcytosine"
atcagccagacgttttccgccaccaacgctcccgagaccccactcctgtcaccagttccccgaacattcctgcgagcaatgtcgcagatactgctcacagacgtccccataaccaacttctt

SEQ ID NO: 21271 - DNA, 122 bp, Homo sapiens
  misc_feature (61)..(62): /note="This region represents a CpG dinucleotide"
  misc_feature (61)..(61): /note="Nucleotide may be methylated to form 5-methylcytosine"
accctcttactagcaggaaaaaccctgcctagccttcaggcccattcaagtcttaatctacgtcattttgagctcctatttatagctagagacattgttatgtaagttacccatggcatttg

SEQ ID NO: 21272 - DNA, 122 bp, Homo sapiens
  misc_feature (61)..(62): /note="This region represents a CpG dinucleotide"
  misc_feature (61)..(61): /note="Nucleotide may be methylated to form 5-methylcytosine"
ttagtgagttattgaggatgcagtgacaaggaaaacataagacactgtgcaatcgctgtccgagcccctttattctgaaggctcctagggcacatacgaacaggatacagaaagccactgtg

SEQ ID NO: 21273 - DNA, 122 bp, Homo sapiens
  misc_feature (61)..(62): /note="This region represents a CpG dinucleotide"
  misc_feature (61)..(61): /note="Nucleotide may be methylated to form 5-methylcytosine"
tcaggattgtctcataaatgatgtgctgtggggcattggtgctggctacacatcaagctgcgaaatagccaagtttggtctggtgccttttcttctcttttttcacactgtaagcattaaaa

SEQ ID NO: 21274 - DNA, 122 bp, Homo sapiens
  misc_feature (61)..(62): /note="This region represents a CpG dinucleotide"
  misc_feature (61)..(61): /note="Nucleotide may be methylated to form 5-methylcytosine"
atcatgtgtgtgcagacaagggatgcagtcagagccaacagacagagacatcctatgaatcgtcacctcagatcatatgctatcaactcaggcacagatgccaagaggaggccccacaagaa

SEQ ID NO: 21275 - DNA, 122 bp, Homo sapiens
  misc_feature (61)..(62): /note="This region represents a CpG dinucleotide"
  misc_feature (61)..(61): /note="Nucleotide may be methylated to form 5-methylcytosine"
tgtattcgaaacatagcgagactgggtttcgctgtgttgcccaggctggtctgacctccccggctcaaagcggtccaccctcctcagcgtttcaaagtactgggattacaggcgtgagccac

SEQ ID NO: 21276 - DNA, 122 bp, Homo sapiens
  misc_feature (61)..(62): /note="This region represents a CpG dinucleotide"
  misc_feature (61)..(61): /note="Nucleotide may be methylated to form 5-methylcytosine"
aaatttcccttgaagcccgacttcatggccggtgagagtcaagagacatggcctggatcccgtgacttacacaaatccctgtggctgactcagaccttagtttctctgcctctgcttgcatg

SEQ ID NO: 21277 - DNA, 122 bp, Homo sapiens
  misc_feature (61)..(62): /note="This region represents a CpG dinucleotide"
  misc_feature (61)..(61): /note="Nucleotide may be methylated to form 5-methylcytosine"
gcatggaggaaacaggtctggttagtctgtctggacaggatcctcacatggggagaagagcggagatttcaaaggactagaaaacagagtacaaagtagaaaagtaagcagagggaaaaagg

SEQ ID NO: 21278 - DNA, 122 bp, Homo sapiens
  misc_feature (61)..(62): /note="This region represents a CpG dinucleotide"
  misc_feature (61)..(61): /note="Nucleotide may be methylated to form 5-methylcytosine"
aatgtcagagatcctgtctatagggacaacagggatgcaaacagtcagtaactagtgctacgtgatttttagcaacaaggaagtgaatcagagcacagcctggtgagtgcttaattatgact

SEQ ID NO: 21279 - DNA, 122 bp, Homo sapiens
  misc_feature (61)..(62): /note="This region represents a CpG dinucleotide"
  misc_feature (61)..(61): /note="Nucleotide may be methylated to form 5-methylcytosine"
gggtgacagggcttggcagccatggtggcagcttgctggggcactggcacaaagtgacttcgtaaataccgcagctttgataatttcttgcttcactggtctcttgggattctttccatctg

SEQ ID NO: 21280 - DNA, 122 bp, Homo sapiens
  misc_feature (61)..(62): /note="This region represents a CpG dinucleotide"
  misc_feature (61)..(61): /note="Nucleotide may be methylated to form 5-methylcytosine"
gacaagcaggcaacatgtgcatgctgataggagagacagtcactttcagcaccagcaccccgagagccacacgagagatatgcagacacaggcatgcactatcagatcctgacacgcaagag

SEQ ID NO: 21281 - DNA, 122 bp, Homo sapiens
  misc_feature (61)..(62): /note="This region represents a CpG dinucleotide"
  misc_feature (61)..(61): /note="Nucleotide may be methylated to form 5-methylcytosine"
ttctctatgtgtatatttgattcaatttctgtcattccttctaggtccttgatccaacaacgattcctttctctgtatcaacagattcttactttctataaatcaccttccacttgacttag

SEQ ID NO: 21282 - DNA, 122 bp, Homo sapiens
  misc_feature (61)..(62): /note="This region represents a CpG dinucleotide"
  misc_feature (61)..(61): /note="Nucleotide may be methylated to form 5-methylcytosine"
cctaagattacacagcttagtaagtggcagaaccacagctggaagccaggtccttcctcacgcaagtcctggctcattcattcctcttccaaagacttgctgagcaccttctaggtgccaga

SEQ ID NO: 21283 - DNA, 122 bp, Homo sapiens
  misc_feature (61)..(62): /note="This region represents a CpG dinucleotide"
  misc_feature (61)..(61): /note="Nucleotide may be methylated to form 5-methylcytosine"
aacagccacacaattacagtaacaggtggtcagtttcaaaacaaatttcaaggtctgactcgcctggcacctgctctagaaccacagacagcagtttgacactgtctgggtccaagttaggt

SEQ ID NO: 21284 - DNA, 122 bp, Homo sapiens
  misc_feature (61)..(62): /note="This region represents a CpG dinucleotide"
  misc_feature (61)..(61): /note="Nucleotide may be methylated to form 5-methylcytosine"
aggtagtagaaattcgtgtttgacattaaaaagcagtcagttatgcaattctgtgtttcccgctgcaaccagctccagggtgccctgacactgacagctcagcagaagggcacgaggtacct

SEQ ID NO: 21285 - DNA, 122 bp, Homo sapiens
  misc_feature (61)..(62): /note="This region represents a CpG dinucleotide"
  misc_feature (61)..(61): /note="Nucleotide may be methylated to form 5-methylcytosine"
taactaatgggagatatgtgtgtcatcaaaacaagggagtaaaccaagaaagggaagatgcgaaatccaaagacaaggttctcacagaggaaaaaggtgaaggaaattcttaggatggtagc

SEQ ID NO: 21286 - DNA, 122 bp, Homo sapiens
  misc_feature (61)..(62): /note="This region represents a CpG dinucleotide"
  misc_feature (61)..(61): /note="Nucleotide may be methylated to form 5-methylcytosine"
ctccatcacccattccgactacccgccctacgctccacctcttgacccgtcatcaccgaccggggggcgggactgcccgacttttcaatcgctgcctaccattggtagaactctccatccgt

SEQ ID NO: 21287 - DNA, 122 bp, Homo sapiens
  misc_feature (61)..(62): /note="This region represents a CpG dinucleotide"
  misc_feature (61)..(61): /note="Nucleotide may be methylated to form 5-methylcytosine"
cagtctttaagccttgtgggccacttggtccgtcacagctactcagctctgctgttgaagcgtgaaagcagccacagacaatacaaaatgaatgtgtgtggctgtgttccaataaaactcga

SEQ ID NO: 21288 - DNA, 122 bp, Homo sapiens
  misc_feature (61)..(62): /note="This region represents a CpG dinucleotide"
  misc_feature (61)..(61): /note="Nucleotide may be methylated to form 5-methylcytosine"
ttggttttagtgcttctgtgaataaacaactttgcaactctcttgtgctttgggggaacacgtcctctcagtttctcatgttgcctcacctttgtttgcactggactcaagctctgcaagca

SEQ ID NO: 21289 - DNA, 122 bp, Homo sapiens
  misc_feature (61)..(62): /note="This region represents a CpG dinucleotide"
  misc_feature (61)..(61): /note="Nucleotide may be methylated to form 5-methylcytosine"
catttgctggaatctcttgaatggaaggggaagcaaggaggacactacaaacagaacctgcgcttctcttagactttatttctggatctaggggaaagggacaaaaaatgaaaaaccaactg

SEQ ID NO: 21290 - DNA, 122 bp, Homo sapiens
  misc_feature (61)..(62): /note="This region represents a CpG dinucleotide"
  misc_feature (61)..(61): /note="Nucleotide may be methylated to form 5-methylcytosine"
acgccattgcataacactctatggcacaataaccactttacaaggctgtgtaatactctacgccacaataaccctttcatgtggttgtgtaatcttccatggtgcaataaccacttcacttg

SEQ ID NO: 21291 - DNA, 122 bp, Homo sapiens
  misc_feature (61)..(62): /note="This region represents a CpG dinucleotide"
  misc_feature (61)..(61): /note="Nucleotide may be methylated to form 5-methylcytosine"
ccacccaacatacctggagtgcaggcgaggtccaggcaaacgggaaagcgacttcttgtacgaatagccatctcaagatgaagccaggctgtggaaaacttaaggccatctagatgggaagg

SEQ ID NO: 21292 - DNA, 122 bp, Homo sapiens
  misc_feature (61)..(62): /note="This region represents a CpG dinucleotide"
  misc_feature (61)..(61): /note="Nucleotide may be methylated to form 5-methylcytosine"
gccgccgggaacctcgcagagcggcggggtggccctggcgaggcgcggttgttgggggttcgctcgagcctcacgacgcccgcgactggggactcggaacctgggccaggctgggacgaggc

SEQ ID NO: 21293 - DNA, 122 bp, Homo sapiens
  misc_feature (61)..(62): /note="This region represents a CpG dinucleotide"
  misc_feature (61)..(61): /note="Nucleotide may be methylated to form 5-methylcytosine"
caatggatctgataaccaaaatgcttactaagtgactaatacacaggtacatatacagtgcggctactgtgcacaaaggggatgattaatggtttgagtgcaatgaagcaagatggcacaag

SEQ ID NO: 21294 - DNA, 122 bp, Homo sapiens
  misc_feature (61)..(62): /note="This region represents a CpG dinucleotide"
  misc_feature (61)..(61): /note="Nucleotide may be methylated to form 5-methylcytosine"
aggcccaagtccagtaaccggagctgttgccactcttgactgtgaaggttccagtgcttgcgtggaggggtttctcacctctcccgggagggcgtgatgctggcagtcaccactaggcaggg

SEQ ID NO: 21295 - DNA, 122 bp, Homo sapiens
  misc_feature (61)..(62): /note="This region represents a CpG dinucleotide"
  misc_feature (61)..(61): /note="Nucleotide may be methylated to form 5-methylcytosine"
actatagatttcacaactctcttaccttggctgccactataaaatgccacaggccaggtacggtggctcatgcctataatctcagcactttgggaggctgaagcgggtggatcacccgaggt

SEQ ID NO: 21296 - DNA, 122 bp, Homo sapiens
  misc_feature (61)..(62): /note="This region represents a CpG dinucleotide"
  misc_feature (61)..(61): /note="Nucleotide may be methylated to form 5-methylcytosine"
tcctgtccttgatgggctgaactggctagtcccaaagtgaggcttcagtctagtcacagacggaccctcggccttggctgaagactgagccttgacttcgataacaaaataagataaagcat

SEQ ID NO: 21297 - DNA, 122 bp, Homo sapiens
  misc_feature (61)..(62): /note="This region represents a CpG dinucleotide"
  misc_feature (61)..(61): /note="Nucleotide may be methylated to form 5-methylcytosine"
cagatctggcacttgagtcagtagaaaatggggagcctctgtgggctcctggtcctgcaccgtgataaatagcctgtcctgcaacctggcttaaaacagggaaagccggagttaggcaacag

SEQ ID NO: 21298 - DNA, 122 bp, Homo sapiens
  misc_feature (61)..(62): /note="This region represents a CpG dinucleotide"
  misc_feature (61)..(61): /note="Nucleotide may be methylated to form 5-methylcytosine"
tctttgttcagcctctgaaatgtccccagctattagaagctttagttgggcatgcagtaacggagccaacatcaaaggggccaagactcctaatcacataatcactgctgtcttgaagtttt

SEQ ID NO: 21299 - DNA, 122 bp, Homo sapiens
  misc_feature (61)..(62): /note="This region represents a CpG dinucleotide"
  misc_feature (61)..(61): /note="Nucleotide may be methylated to form 5-methylcytosine"
tggcactcagtgcccatctgccggatctcctccgtcgtctccttcaggcatttctcagtccggccccagagaacaatctggaagaagataataacaacgcagaacaaatggtcattaagcca

SEQ ID NO: 21300 - DNA, 122 bp, Homo sapiens
  misc_feature (61)..(62): /note="This region represents a CpG dinucleotide"
  misc_feature (61)..(61): /note="Nucleotide may be methylated to form 5-methylcytosine"
tttccctttggttctttatttttctttctacccccttcttcttccctgggctttgcagggcggaaaatgggtcagcagcttgtccaaaacattcttgagtgtttaattcttcagctgtttta

SEQ ID NO: 21301 - DNA, 122 bp, Homo sapiens
  misc_feature (61)..(62): /note="This region represents a CpG dinucleotide"
  misc_feature (61)..(61): /note="Nucleotide may be methylated to form 5-methylcytosine"
ggttaaaatctaccattctctgccacaatgctgaaaagaaacctttgctccagcttgaaacgcagcatctgtcagcaaatggggagtcaaatcaagaagtctgaactcactgacagggaaag

SEQ ID NO: 21302 - DNA, 122 bp, Homo sapiens
  misc_feature (61)..(62): /note="This region represents a CpG dinucleotide"
  misc_feature (61)..(61): /note="Nucleotide may be methylated to form 5-methylcytosine"
ggattgtaggaggtcaaacacggaagtggggagatctgggaggagcctatggcagaagtccgggtgacagacactggcagcttggcctagggtttcatcaacaggccactaccggctcatac

SEQ ID NO: 21303 - DNA, 122 bp, Homo sapiens
  misc_feature (61)..(62): /note="This region represents a CpG dinucleotide"
  misc_feature (61)..(61): /note="Nucleotide may be methylated to form 5-methylcytosine"
cggaagaacaggaagttgggcggaagtgagtcccacattgtataggtgaagaagctgaggcgttgatagaggaagtgattttactgtggtgacatagtatacaaaaaggaacacggctctgc

SEQ ID NO: 21304 - DNA, 122 bp, Homo sapiens
  misc_feature (61)..(62): /note="This region represents a CpG dinucleotide"
  misc_feature (61)..(61): /note="Nucleotide may be methylated to form 5-methylcytosine"
gctgggaaatgttccccgctcttgagacaaattatgtgtgcttgtgtgtgcacatgcacacgtgtgtgtaaattccaaatatctggcttacacatttcccctcttccttgctttgtgtttct

SEQ ID NO: 21305 - DNA, 122 bp, Homo sapiens
  misc_feature (61)..(62): /note="This region represents a CpG dinucleotide"
  misc_feature (61)..(61): /note="Nucleotide may be methylated to form 5-methylcytosine"
tgctgcggcttcagtcttcctccacctcccctctcttgggcatggcatccccatggaggacgtgcagcctcagccaggtgctgctcaccactgctgagagctgatctccagcggccaggacc

SEQ ID NO: 21306 - DNA, 122 bp, Homo sapiens
  misc_feature (61)..(62): /note="This region represents a CpG dinucleotide"
  misc_feature (61)..(61): /note="Nucleotide may be methylated to form 5-methylcytosine"
ttgacctagggattttatagctctgtacataaggaaacaggaaaaaaaaaattgggggagcggggaggttaatccagatcagcaattttgtattatctttgaggaacaggtgggtaaataag

SEQ ID NO: 21307 - DNA, 122 bp, Homo sapiens
  misc_feature (61)..(62): /note="This region represents a CpG dinucleotide"
  misc_feature (61)..(61): /note="Nucleotide may be methylated to form 5-methylcytosine"
cctaatcgcctcccaaaggccccagctcctaataccatcgcactggggtcagggcttcaacgcaggaacttggggctcgtaacagagcctgcatcttgaatgttactattaggcagaataat

SEQ ID NO: 21308 - DNA, 122 bp, Homo sapiens
  misc_feature (61)..(62): /note="This region represents a CpG dinucleotide"
  misc_feature (61)..(61): /note="Nucleotide may be methylated to form 5-methylcytosine"
atttgaaggaacagggaaatacaaattttaaaaagacaaattttctgtagttgtataaagcgacatctacatttaatggacatgctaggctgttgtgggagaaatgtggttagagatgagga

SEQ ID NO: 21309 - DNA, 122 bp, Homo sapiens
  misc_feature (61)..(62): /note="This region represents a CpG dinucleotide"
  misc_feature (61)..(61): /note="Nucleotide may be methylated to form 5-methylcytosine"
tggagtagtcagtcatggattagctgcaggggcattacatttactagaatgccttactctcgttgtgcttaggagggaaccaaatagaaaaaaattacaaagcccagaactgcagaatgatt

SEQ ID NO: 21310 - DNA, 122 bp, Homo sapiens
  misc_feature (61)..(62): /note="This region represents a CpG dinucleotide"
  misc_feature (61)..(61): /note="Nucleotide may be methylated to form 5-methylcytosine"
acgttcagcatgttcagctctcctgttctttgttctccattttaaagtttaaaacttcctcgttctttatgtctccttgcccctagtttcagtaaacaaccccctcttagcctctatcatct

SEQ ID NO: 21311 - DNA, 122 bp, Homo sapiens
  misc_feature (61)..(62): /note="This region represents a CpG dinucleotide"
  misc_feature (61)..(61): /note="Nucleotide may be methylated to form 5-methylcytosine"
ttataaaagaaaaagtaagcgtcttacaattctggaacctcctttcctcttgggagtctacgtatgggccccggcttcgtcctgaagcagtgtcaagagtcctgtgccgtctgctcatgccc

SEQ ID NO: 21312 - DNA, 122 bp, Homo sapiens
  misc_feature (61)..(62): /note="This region represents a CpG dinucleotide"
  misc_feature (61)..(61): /note="Nucleotide may be methylated to form 5-methylcytosine"
ttagtatcaattagcctatggccaaattggtttccttatacatcgttttgcttgaagttgcgtttccaagattttattgacaatgttaagtgaggacttactgtacagcgtgggggtcaggt

SEQ ID NO: 21313 - DNA, 122 bp, Homo sapiens
  misc_feature (61)..(62): /note="This region represents a CpG dinucleotide"
  misc_feature (61)..(61): /note="Nucleotide may be methylated to form 5-methylcytosine"
cagtcaaaaaagagatgagtaaggcatggctcccagctcacagggccatgaaccatgatacgctggagtaaaggaaggacaaggccctcaaagcaagaagctaccgactctgggaactgcaa

SEQ ID NO: 21314 - DNA, 122 bp, Homo sapiens
  misc_feature (61)..(62): /note="This region represents a CpG dinucleotide"
  misc_feature (61)..(61): /note="Nucleotide may be methylated to form 5-methylcytosine"
gaaagaatacatgtatgctgattgaaaaatccactagatacctatttatctttccccagccggacaccattcctcttctcccttgaagtggtcatgtgactgagttctggccagtggaatga

SEQ ID NO: 21315 - DNA, 122 bp, Homo sapiens
  misc_feature (61)..(62): /note="This region represents a CpG dinucleotide"
  misc_feature (61)..(61): /note="Nucleotide may be methylated to form 5-methylcytosine"
ttacctgtcaggcgccccccgcgccgccccccgtgtgcgcccagacacacgagcacagcgcggcacctgacatttagtggtctggcaaacaactgtgtgacagatattacagtagctgtcag

SEQ ID NO: 21316 - DNA, 122 bp, Homo sapiens
  misc_feature (61)..(62): /note="This region represents a CpG dinucleotide"
  misc_feature (61)..(61): /note="Nucleotide may be methylated to form 5-methylcytosine"
gcaaacagggcagatgcttgcacgtgcgcttgcatgtgtgcttttgagatgaaggaaatacgtgatgtgagtgagacagcccttgtggatgctgtcttaatcctaactccaactcctcccca

SEQ ID NO: 21317 - DNA, 122 bp, Homo sapiens
  misc_feature (61)..(62): /note="This region represents a CpG dinucleotide"
  misc_feature (61)..(61): /note="Nucleotide may be methylated to form 5-methylcytosine"
tgccctccgggtcttgggagcacagtagttatcgggagcgtcgcctccggcgtgggctctcgggcgcgagtttcggacgaggcctgggcgcggtggcaggggtctgcccacgccgggatctc

SEQ ID NO: 21318 - DNA, 122 bp, Homo sapiens
  misc_feature (61)..(62): /note="This region represents a CpG dinucleotide"
  misc_feature (61)..(61): /note="Nucleotide may be methylated to form 5-methylcytosine"
gagaaacaggaattatgccaaaaagcctctcagcaacccaaaggtatcgcaatattcacacgcagtatttatgtgagaaatactacaccaactcctttactttctctatacacaatgttaat

SEQ ID NO: 21319 - DNA, 122 bp, Homo sapiens
  misc_feature (61)..(62): /note="This region represents a CpG dinucleotide"
  misc_feature (61)..(61): /note="Nucleotide may be methylated to form 5-methylcytosine"
ttgtttcagtttggaaaccataggcaatatactccctaaaaccgaaagtcaggaaatgcacgtgccaggactccatagataacatagtcacacagagtcaggcaaagagcacataatgtcca

SEQ ID NO: 21320 - DNA, 122 bp, Homo sapiens
  misc_feature (61)..(62): /note="This region represents a CpG dinucleotide"
  misc_feature (61)..(61): /note="Nucleotide may be methylated to form 5-methylcytosine"
agtttttgttctctgtgatgttaatatgccctagggttgaactttggtctcaggagagcccgagtcctatgcttgctttaagcagccaaactaatccacatgccttttttcggaatatgaat

SEQ ID NO: 21321 - DNA, 122 bp, Homo sapiens
  misc_feature (61)..(62): /note="This region represents a CpG dinucleotide"
  misc_feature (61)..(61): /note="Nucleotide may be methylated to form 5-methylcytosine"
tggtttctgctgccactactcaagcttgccattgtagtgtcaaagtagccgtagacaatacgtaaatgaatgtgactgtgtcccaataaaactttatttacaaaaggaagcagtgggctgga

SEQ ID NO: 21322 - DNA, 122 bp, Homo sapiens
  misc_feature (61)..(62): /note="This region represents a CpG dinucleotide"
  misc_feature (61)..(61): /note="Nucleotide may be methylated to form 5-methylcytosine"
tgctagggagggagcaggggtgaggtctgggggcttaggctgggctttggtgggagccaccgctgtgatggcccctggcaccaggctgattcctaccagactgggcatgtgaggagcccctt

SEQ ID NO: 21323 - DNA, 122 bp, Homo sapiens
  misc_feature (61)..(62): /note="This region represents a CpG dinucleotide"
  misc_feature (61)..(61): /note="Nucleotide may be methylated to form 5-methylcytosine"
gcagcactcagagccaggctccactcactcaggagctcccaggcaggtgctggggcctggcgcggcacagcggctgtccgtgtgtccccagacaggcaaggcaggacaggggtcctggaaag

SEQ ID NO: 21324 - DNA, 122 bp, Homo sapiens
  misc_feature (61)..(62): /note="This region represents a CpG dinucleotide"
  misc_feature (61)..(61): /note="Nucleotide may be methylated to form 5-methylcytosine"
tatccctttctctttctgtattcacctatttgggctatctttcaattaagactaatcccacgagcattcacagtataggcaggggtttatcttcctcactacttagcaagaggtcctaagaa

SEQ ID NO: 21325 - DNA, 122 bp, Homo sapiens
  misc_feature (61)..(62): /note="This region represents a CpG dinucleotide"
  misc_feature (61)..(61): /note="Nucleotide may be methylated to form 5-methylcytosine"
gctgcggcaagggggcagcgcccagggcccaggtgccgggagatgcagcttcctgcccgccgctacagctgctatttatagctgagcagggagaagccaagacagacagggtcagcttcctg

SEQ ID NO: 21326 - DNA, 122 bp, Homo sapiens
  misc_feature (61)..(62): /note="This region represents a CpG dinucleotide"
  misc_feature (61)..(61): /note="Nucleotide may be methylated to form 5-methylcytosine"
tgggaagggcagtatattagccagctaccactctagtaagaattagtttctgtaattaatcgttgttaagacatggagtatggaagccttagagattgagtcctaggccaggaaggtttggt

SEQ ID NO: 21327 - DNA, 122 bp, Homo sapiens
  misc_feature (61)..(62): /note="This region represents a CpG dinucleotide"
  misc_feature (61)..(61): /note="Nucleotide may be methylated to form 5-methylcytosine"
ggctgccagcacagtttcgcatccctcccacacatgtccgcattccaggcccagacactccgtgccctgggctcctatgaagggcaagaaaccactgattaggaagcaagaagaagaaaaag

SEQ ID NO: 21328 - DNA, 122 bp, Homo sapiens
  misc_feature (61)..(62): /note="This region represents a CpG dinucleotide"
  misc_feature (61)..(61): /note="Nucleotide may be methylated to form 5-methylcytosine"
tgttttcttctttgtgctgttgggtgtgttgtgacccttcagacttcttcagctccactccgctgatagaggctgtgccttctcagggcgtgctcttgaaatgcaacctgctggagaaagac

SEQ ID NO: 21329 - DNA, 122 bp, Homo sapiens
  misc_feature (61)..(62): /note="This region represents a CpG dinucleotide"
  misc_feature (61)..(61): /note="Nucleotide may be methylated to form 5-methylcytosine"
ggccgggctgggagcgggcccctccagagaggacaccgtggccgtggtgacaggagggaccggaggggacgagggggccatgggaggtttggtctcggcggccgaggccggaaaggcagcct

SEQ ID NO: 21330 - DNA, 122 bp, Homo sapiens
  misc_feature (61)..(62): /note="This region represents a CpG dinucleotide"
  misc_feature (61)..(61): /note="Nucleotide may be methylated to form 5-methylcytosine"
cgggctgaccttgactgttgactccaggaatgtgtgcaaatccttgactcccatgaggaccgcattcccctggtgatcatgcacaaactggttagttgaggcaaaggcatgtgacccaagct

SEQ ID NO: 21331 - DNA, 122 bp, Homo sapiens
  misc_feature (61)..(62): /note="This region represents a CpG dinucleotide"
  misc_feature (61)..(61): /note="Nucleotide may be methylated to form 5-methylcytosine"
cttctttttctctcatacactttatccatcagaaaagtctagtcacctttacttacaaaacgtatccagaatcctgccacttcacaccacctccactgctacccaccatcatctctgtcttt

SEQ ID NO: 21332 - DNA, 122 bp, Homo sapiens
  misc_feature (61)..(62): /note="This region represents a CpG dinucleotide"
  misc_feature (61)..(61): /note="Nucleotide may be methylated to form 5-methylcytosine"
cttggtttttaaaaaattgttgtgttttatttcagcagatgagaatttcacaaaatgccacgttatcacaaatttctgaagaggctgacaggttattaatcaggataaaccacattgaataa

SEQ ID NO: 21333 - DNA, 122 bp, Homo sapiens
  misc_feature (61)..(62): /note="This region represents a CpG dinucleotide"
  misc_feature (61)..(61): /note="Nucleotide may be methylated to form 5-methylcytosine"
gttccattcctcaggcacctagcaaggcctgcagccagcaggaagtagtcagaatgaagtcgacaccctgataccccgtagaaatggaatggacattgacagtgggaagtttgtaatctata

SEQ ID NO: 21334 - DNA, 122 bp, Homo sapiens
  misc_feature (61)..(62): /note="This region represents a CpG dinucleotide"
  misc_feature (61)..(61): /note="Nucleotide may be methylated to form 5-methylcytosine"
cacatctctgcacttggactgactgacttcaggcaggtctatcccttatactacagggcacgaagcaagagttcaaatgaagggccctgtggctccagcccacctgccttctcttgactcct

SEQ ID NO: 21335 - DNA, 122 bp, Homo sapiens
  misc_feature (61)..(62): /note="This region represents a CpG dinucleotide"
  misc_feature (61)..(61): /note="Nucleotide may be methylated to form 5-methylcytosine"
tcattaaaacctctgagctcctgggttggtgctcatcttctagcagtcaaaccagattgccgcttaggattctcaacttggatataaactaaatctcaagggtgttggttccaaacattgga

SEQ ID NO: 21336 - DNA, 122 bp, Homo sapiens
  misc_feature (61)..(62): /note="This region represents a CpG dinucleotide"
  misc_feature (61)..(61): /note="Nucleotide may be methylated to form 5-methylcytosine"
ccatctgagtaggtggcctaggctagtgtgctggctccaggcaggtttcttctctcttgtcgctctctctcttttgacccacattttctatcttgagatctaaactagttgctccaggtcct

SEQ ID NO: 21337 - DNA, 122 bp, Homo sapiens
  misc_feature (61)..(62): /note="This region represents a CpG dinucleotide"
  misc_feature (61)..(61): /note="Nucleotide may be methylated to form 5-methylcytosine"
aaaacgagctcatggtcattaatttgtgaagtgcaaaaatactaatttttctcgcgttgtcgttttttctgggcttgccgaggcccctccccctcctgcctcgcttcccatccccctttcct

SEQ ID NO: 21338 - DNA, 122 bp, Homo sapiens
  misc_feature (61)..(62): /note="This region represents a CpG dinucleotide"
  misc_feature (61)..(61): /note="Nucleotide may be methylated to form 5-methylcytosine"
cgagtgatgcttgctcggcaggctgtggatgtggattcctatgtggattgcgaggccgggcgcaacagggatgtcgcttcctagggacaaagaggggtgaggggagagacggccaggaacca

SEQ ID NO: 21339 - DNA, 122 bp, Homo sapiens
  misc_feature (61)..(62): /note="This region represents a CpG dinucleotide"
  misc_feature (61)..(61): /note="Nucleotide may be methylated to form 5-methylcytosine"
atcagaaggagtctgacaaaggtgagaggagaggggaaagtgtcatttcactctctaatgcgtcctgcacagtactgccaagttaatttcctaaaacattgtcctgttcaacagtccattca

SEQ ID NO: 21340 - DNA, 122 bp, Homo sapiens
  misc_feature (61)..(62): /note="This region represents a CpG dinucleotide"
  misc_feature (61)..(61): /note="Nucleotide may be methylated to form 5-methylcytosine"
ggtctgtagttgctgcagagtaaatggtattcatgtgtctattcagtgaatcaacaaatacgtactgagcacctgctaaatgacagttactgtgcttgacagtgggtatgtgcaatggtgaa

SEQ ID NO: 21341 - DNA, 122 bp, Homo sapiens
  misc_feature (61)..(62): /note="This region represents a CpG dinucleotide"
  misc_feature (61)..(61): /note="Nucleotide may be methylated to form 5-methylcytosine"
gcgtggtagctagagccctgctgtcatcagcagtgccccaaacgcagtaggaacacgtaccgtatttcaaagcccaggcaggcagagaagggggaaggaactggtggcgcgctgtgacctgc

SEQ ID NO: 21342 - DNA, 122 bp, Homo sapiens
  misc_feature (61)..(62): /note="This region represents a CpG dinucleotide"
  misc_feature (61)..(61): /note="Nucleotide may be methylated to form 5-methylcytosine"
gcaacttagacacaatcacacccacagaaaaccgccacagtccatgacttgctgtgtgtgcgtgtgtgtgttaaaatgggagactcattcttgagcaatctgagaagatgactcaggacaat

SEQ ID NO: 21343 - DNA, 122 bp, Homo sapiens
  misc_feature (61)..(62): /note="This region represents a CpG dinucleotide"
  misc_feature (61)..(61): /note="Nucleotide may be methylated to form 5-methylcytosine"
agccacagttccatcacctgcgtgatgggacgagagactggatcaggtgttctccacagccggttatgaagtgagtaacctgagttcataaatgagcagttgggcgggctcctcttccaggc

SEQ ID NO: 21344 - DNA, 122 bp, Homo sapiens
  misc_feature (61)..(62): /note="This region represents a CpG dinucleotide"
  misc_feature (61)..(61): /note="Nucleotide may be methylated to form 5-methylcytosine"
ggtagatgtggggtaagatctaatgtggcatgtacagatgactctggtggaactgaggaacgtgagctcttgaaggggtgctgagatcacttcattcactttctcatcccaacccaggtcct

SEQ ID NO: 21345 - DNA, 122 bp, Homo sapiens
  misc_feature (61)..(62): /note="This region represents a CpG dinucleotide"
  misc_feature (61)..(61): /note="Nucleotide may be methylated to form 5-methylcytosine"
aaatcgaaaggcttaaatcagaggtatttcccagtcaatagattccttctcattgtttcacgtttaccgtcatttcctcatgattacttaaggcctattcagggcaacattttaatcccagg

SEQ ID NO: 21346 - DNA, 122 bp, Homo sapiens
  misc_feature (61)..(62): /note="This region represents a CpG dinucleotide"
  misc_feature (61)..(61): /note="Nucleotide may be methylated to form 5-methylcytosine"
ggagtcttttagtcctcaaagagtccttaagtctctctctctacttaattatagctatcacggaagagctggcttcatgtgaaaaatatggtcttcgctaagctttaaagtttctatccaaa

SEQ ID NO: 21347 - DNA, 122 bp, Homo sapiens
  misc_feature (61)..(62): /note="This region represents a CpG dinucleotide"
  misc_feature (61)..(61): /note="Nucleotide may be methylated to form 5-methylcytosine"
tggggcctgtgcagcctgaacaagagcccaaaagtgaccttgggagcatctaagactagacgctcttagcagagcatgggtcccttttccttaccccttattccatagcctacaggttctct

SEQ ID NO: 21348 - DNA, 122 bp, Homo sapiens
  misc_feature (61)..(62): /note="This region represents a CpG dinucleotide"
  misc_feature (61)..(61): /note="Nucleotide may be methylated to form 5-methylcytosine"
ctcggctctccttcctgagatatttatagactccttgactgcaaagaggcgattatgcagcggcctgagggatttgcacaaatgtggcgcctgcttaaagatttagtcccaagctcatccaa

SEQ ID NO: 21349 - DNA, 122 bp, Homo sapiens
  misc_feature (61)..(62): /note="This region represents a CpG dinucleotide"
  misc_feature (61)..(61): /note="Nucleotide may be methylated to form 5-methylcytosine"
cacagtcacacacgttcacgcccaggcgctgtgcctgcggggcagaggatgcgggaactccgctcagtctctatcaacccgaaactgctctgatggtcaggcctactaatgttaaaaatatt

SEQ ID NO: 21350 - DNA, 122 bp, Homo sapiens
  misc_feature (61)..(62): /note="This region represents a CpG dinucleotide"
  misc_feature (61)..(61): /note="Nucleotide may be methylated to form 5-methylcytosine"
gagtgtttctgtattgtagaaggaaaattccatatttgtattgccgtgggcacaaaaaaccgagcgctctcatgccgaaacccgggatcgaaccagggacctttagatcttcagtctaacgc

SEQ ID NO: 21351 - DNA, 122 bp, Homo sapiens
  misc_feature (61)..(62): /note="This region represents a CpG dinucleotide"
  misc_feature (61)..(61): /note="Nucleotide may be methylated to form 5-methylcytosine"
cacaatgtcctcttgaaattcagggcactgtgactgccccttcctctggcagcctgggtacgcgtctcttctgtgttttaggaagtcactccactctgcttctgaatgactcatatacatct

SEQ ID NO: 21352 - DNA, 122 bp, Homo sapiens
  misc_feature (61)..(62): /note="This region represents a CpG dinucleotide"
  misc_feature (61)..(61): /note="Nucleotide may be methylated to form 5-methylcytosine"
agccagatatagaaagccaaataccacatgatctcatctagatgtgtgtatatatacaaacgtacatatctatatgtgaaatctaaaacagtcaaacccatggaagcagacagtagataggt

SEQ ID NO: 21353 - DNA, 122 bp, Homo sapiens
  misc_feature (61)..(62): /note="This region represents a CpG dinucleotide"
  misc_feature (61)..(61): /note="Nucleotide may be methylated to form 5-methylcytosine"
aaccactgtgggaggtagtttatcataacccattttatgagtaagagcaataaggctcagcgtagggtgaccaactgcccaggatttcccaagatgtggggctttcagtgctcatggcagga

SEQ ID NO: 21354 - DNA, 122 bp, Homo sapiens
  misc_feature (61)..(62): /note="This region represents a CpG dinucleotide"
  misc_feature (61)..(61): /note="Nucleotide may be methylated to form 5-methylcytosine"
aatccctctcctctgccttcatctctgttttccttggtgcaccttcatgtgcctcttccccggtccacgtgcatcttcatcaacacttgatttgtttgtttctgtgtctcttcccatctgca

SEQ ID NO: 21355 - DNA, 122 bp, Homo sapiens
  misc_feature (61)..(62): /note="This region represents a CpG dinucleotide"
  misc_feature (61)..(61): /note="Nucleotide may be methylated to form 5-methylcytosine"
gagtagctttgacgtgctgaaaaggtgggagagacatacttcttccttctacttttagaacgctgaagtttataagccaaagaccccagtccacatgtgtaaggaagcagccactgatgctg

SEQ ID NO: 21356 - DNA, 122 bp, Homo sapiens
  misc_feature (61)..(62): /note="This region represents a CpG dinucleotide"
  misc_feature (61)..(61): /note="Nucleotide may be methylated to form 5-methylcytosine"
ttactactcaaaatagattgtccttctttttaacacaagcatattatttgttaccagaaacggaggatttctccaaatactaactgtattcagtagcctcagcaatctgtcagttaaacctt

SEQ ID NO: 21357 - DNA, 122 bp, Homo sapiens
  misc_feature (61)..(62): /note="This region represents a CpG dinucleotide"
  misc_feature (61)..(61): /note="Nucleotide may be methylated to form 5-methylcytosine"
caggtgtgcctcctttgtaacaatccattgagctgtacactcctgaactgtgcatgtgtgcgtgtatgtgtgcatgtgtgtgtgtgccgtgtgtgtgtgtacgtgttactttaatttaaaaa

SEQ ID NO: 21358 - DNA, 122 bp, Homo sapiens
  misc_feature (61)..(62): /note="This region represents a CpG dinucleotide"
  misc_feature (61)..(61): /note="Nucleotide may be methylated to form 5-methylcytosine"
agggaggggcagagtgttaacgtcaggtaggaatgaccctcccagaagtcagaatgctcccgtgtccacccgtgttcactgtgctctgctatttatcttcttaagcctctttctgtgattat

SEQ ID NO: 21359 - DNA, 122 bp, Homo sapiens
  misc_feature (61)..(62): /note="This region represents a CpG dinucleotide"
  misc_feature (61)..(61): /note="Nucleotide may be methylated to form 5-methylcytosine"
agacaaaaatagacacggaagccgcgatcgaggaggagggggaacaaaagggtcagcttccgctaagaaagcctcagccacgtccctggggaagtttcatgtctttcctcacacgtggcagg

SEQ ID NO: 21360 - DNA, 122 bp, Homo sapiens
  misc_feature (61)..(62): /note="This region represents a CpG dinucleotide"
  misc_feature (61)..(61): /note="Nucleotide may be methylated to form 5-methylcytosine"
atgtgccggaactgttctagatgccgagaatactaccatgaatgaaatagacagaaatcccggctgtcattgggctttgtctgagggccattggggaaggcctctcaaaggaagtgatagct

SEQ ID NO: 21361 - DNA, 122 bp, Homo sapiens
  misc_feature (61)..(62): /note="This region represents a CpG dinucleotide"
  misc_feature (61)..(61): /note="Nucleotide may be methylated to form 5-methylcytosine"
tatcaaaaaaaggtgtactgatttttagctgcttcctcccccggtctggttgccctagtgcgttaagttcagagagatcagcagctgtcagattggaatctccccagcctcagtacaaactg

SEQ ID NO: 21362 - DNA, 122 bp, Homo sapiens
  misc_feature (61)..(62): /note="This region represents a CpG dinucleotide"
  misc_feature (61)..(61): /note="Nucleotide may be methylated to form 5-methylcytosine"
agcggtgtcaccttaaaacttacgaattgtttatttctggaattttccatttttggattacgtgcaatcaaaactgcaggaagcaaaacaacagattaaggggtactactgaacttattttt

SEQ ID NO: 21363 - DNA, 122 bp, Homo sapiens
  misc_feature (61)..(62): /note="This region represents a CpG dinucleotide"
  misc_feature (61)..(61): /note="Nucleotide may be methylated to form 5-methylcytosine"
gtacacatgaatagaaagcaccacaggtaataaaaacacctaaaaaggtcagcagaaactcggggagctgctggaaattcacctcctctgcctttctatgggactcagtgggcagtgatcag

SEQ ID NO: 21364 - DNA, 122 bp, Homo sapiens
  misc_feature (61)..(62): /note="This region represents a CpG dinucleotide"
  misc_feature (61)..(61): /note="Nucleotide may be methylated to form 5-methylcytosine"
ttcggccaaggagtgtctcttttatgactgctggctgaaaggacttgaagtgggggagggcggtggccagacctgcttttaggtagattctgactacagcaatgtcaaggatggattaagag

SEQ ID NO: 21365 - DNA, 122 bp, Homo sapiens
  misc_feature (61)..(62): /note="This region represents a CpG dinucleotide"
  misc_feature (61)..(61): /note="Nucleotide may be methylated to form 5-methylcytosine"
caaaatacgaagtggctaatttacacagtacttagccagatgaccgaaggactcagtacccgagggcccctaacagaaaacacagaccacatttcctttactctggcccttttcctgggggt

SEQ ID NO: 21366 - DNA, 122 bp, Homo sapiens
  misc_feature (61)..(62): /note="This region represents a CpG dinucleotide"
  misc_feature (61)..(61): /note="Nucleotide may be methylated to form 5-methylcytosine"
ttgccaactcaaacacaccctcacaccttctctggctccagcctaccctctcctctctcccgccccacacagccccagagcgttggtcctggtacactccagtccaaggattcctgggcctc

SEQ ID NO: 21367 - DNA, 122 bp, Homo sapiens
  misc_feature (61)..(62): /note="This region represents a CpG dinucleotide"
  misc_feature (61)..(61): /note="Nucleotide may be methylated to form 5-methylcytosine"
aaaatatatgcagcttggcataaaaatatttctgaaatgaatgctatcttccctctcctccgttaaaagagtatacaatgtaatttgccttttatgaatgattcagtatccttatgatgcct

SEQ ID NO: 21368 - DNA, 122 bp, Homo sapiens
  misc_feature (61)..(62): /note="This region represents a CpG dinucleotide"
  misc_feature (61)..(61): /note="Nucleotide may be methylated to form 5-methylcytosine"
ataacgctgccaggtctttcaaatgctgaggcatttcctcatagctccaagtagctgctgcgggtcagattctgcttgaaccgagggttcaattacaacatccgtatgctttccagcccact

SEQ ID NO: 21369 - DNA, 122 bp, Homo sapiens
  misc_feature (61)..(62): /note="This region represents a CpG dinucleotide"
  misc_feature (61)..(61): /note="Nucleotide may be methylated to form 5-methylcytosine"
tacaaaaattagtcaggtgtggtggtgcacgcctgtggtttcagctactccagaggcaggcgggatcgcttgagccaggaggttgacgccacagtgagtcctgaccaagccactgcactcaa

SEQ ID NO: 21370 - DNA, 122 bp, Homo sapiens
  misc_feature (61)..(62): /note="This region represents a CpG dinucleotide"
  misc_feature (61)..(61): /note="Nucleotide may be methylated to form 5-methylcytosine"
ctcctggccaaggcatggcagtgactaagtggtcattcattgctgaatgtgtggatagatcgtggaatcccttcacctgttccctcccccactgctgtgctttttctttcccttgctttctt

SEQ ID NO: 21371 - DNA, 122 bp, Homo sapiens
  misc_feature (61)..(62): /note="This region represents a CpG dinucleotide"
  misc_feature (61)..(61): /note="Nucleotide may be methylated to form 5-methylcytosine"
agctgtggttccagggccagagagtcctgggctcttactctgaccatatcacctgcaagacggtgtgacccagagcaccgcagcattgagctctcagagcctccacttcctcatctgagggt

SEQ ID NO: 21372 - DNA, 122 bp, Homo sapiens
  misc_feature (61)..(62): /note="This region represents a CpG dinucleotide"
  misc_feature (61)..(61): /note="Nucleotide may be methylated to form 5-methylcytosine"
tggttaagaacgctgagatttgtggcatttaaatttgctctatgcgcatctgcccaacctcggcaacacaggagtcttgaaaaacaatagccacaatcaacaatgactgtccaagaagttga

SEQ ID NO: 21373 - DNA, 122 bp, Homo sapiens
  misc_feature (61)..(62): /note="This region represents a CpG dinucleotide"
  misc_feature (61)..(61): /note="Nucleotide may be methylated to form 5-methylcytosine"
ccagagaaagcactcattcccttccttgggattcctttcctgcccatcagttatatacatcggggcagcttaagtgattattaaatactgaaaaacttctataccaattggtaaaaagcagt

SEQ ID NO: 21374 - DNA, 122 bp, Homo sapiens
  misc_feature (61)..(62): /note="This region represents a CpG dinucleotide"
  misc_feature (61)..(61): /note="Nucleotide may be methylated to form 5-methylcytosine"
cattttatatatcttaaattagtaatactggaactgtcctgctcaacttcatttgccatccgttgtttgctagagactttctcagtgctcactcttacatgcttgtaaatctgtgctgcttt

SEQ ID NO: 21375 - DNA, 122 bp, Homo sapiens
  misc_feature (61)..(62): /note="This region represents a CpG dinucleotide"
  misc_feature (61)..(61): /note="Nucleotide may be methylated to form 5-methylcytosine"
atcaacatttaagaaaaaaaatactatttaaataaatgctgaatacacaaccaggcacaccgtaattagggttgtaaagtcgattccagctcagcactgtacatgtcaatctggaatgtagt

SEQ ID NO: 21376 - DNA, 122 bp, Homo sapiens
  misc_feature (61)..(62): /note="This region represents a CpG dinucleotide"
  misc_feature (61)..(61): /note="Nucleotide may be methylated to form 5-methylcytosine"
acgcacgttatctcatttaagccctacaaaatactatgaggtcagtaccagcattgtttccgtttatagatgaggcaaatgagactcagagagcaaagcaacttgctcaagttctttttttg

SEQ ID NO: 21377 - DNA, 122 bp, Homo sapiens
  misc_feature (61)..(62): /note="This region represents a CpG dinucleotide"
  misc_feature (61)..(61): /note="Nucleotide may be methylated to form 5-methylcytosine"
ttgtgacaggtaagattgctattgtaattctccaccctcttccagtaacatgattggacacgcatacctttctctatgtatttttgtagtgatcttccactgtggggtggtgtgagggggtt

SEQ ID NO: 21378 - DNA, 122 bp, Homo sapiens
  misc_feature (61)..(62): /note="This region represents a CpG dinucleotide"
  misc_feature (61)..(61): /note="Nucleotide may be methylated to form 5-methylcytosine"
tgggtacaggttgtgtcttattcatctctgaatcatcagatcctagtgcagtccttgcctcgcaggagatactggcctagaagcttgctgaatgaatgaatgaatgaatgagcacacaatca

SEQ ID NO: 21379 - DNA, 122 bp, Homo sapiens
  misc_feature (61)..(62): /note="This region represents a CpG dinucleotide"
  misc_feature (61)..(61): /note="Nucleotide may be methylated to form 5-methylcytosine"
gcactctttaagttcctgaatgcatgtttactattgtcctcttatctaaagcaaattatgcggccaagcctaaattcaagagatgaaaaaatacactctgcttctttgtaggtacagctgca

SEQ ID NO: 21380 - DNA, 122 bp, Homo sapiens
  misc_feature (61)..(62): /note="This region represents a CpG dinucleotide"
  misc_feature (61)..(61): /note="Nucleotide may be methylated to form 5-methylcytosine"
gtaatgacaggcattggtggcagctcttcctcctctgtgtgaggtgctggaactgtgctgcggacacatctgtaggtcaggaatgtgatccaggggtccacttaccaagtcaccataaacct

SEQ ID NO: 21381 - DNA, 122 bp, Homo sapiens
  misc_feature (61)..(62): /note="This region represents a CpG dinucleotide"
  misc_feature (61)..(61): /note="Nucleotide may be methylated to form 5-methylcytosine"
aatttaatttttggttacatttcaaactcatttaaaaaccattcataggagcacaaataacgtggctatataaagaagtacagaaatgacctgataatcaggctcagtgtacacagctgcga

SEQ ID NO: 21382 - DNA, 122 bp, Homo sapiens
  misc_feature (61)..(62): /note="This region represents a CpG dinucleotide"
  misc_feature (61)..(61): /note="Nucleotide may be methylated to form 5-methylcytosine"
acgatgtgagtgaacttaacactactcaactgaacacttaaaaatgtttaagaggccgggcgtggtggctcacacctataatcccaacactttgggagaccaaggcgggcagatcacctgag

SEQ ID NO: 21383 - DNA, 122 bp, Homo sapiens
  misc_feature (61)..(62): /note="This region represents a CpG dinucleotide"
  misc_feature (61)..(61): /note="Nucleotide may be methylated to form 5-methylcytosine"
tgcttaatgcaaattatgcccgatgctatcatagcatgtctaactctttctatagattcacgttttctcttctgtaatataagtgcccattggccatcagatagcagtgggacgttttttaa

SEQ ID NO: 21384 - DNA, 122 bp, Homo sapiens
  misc_feature (61)..(62): /note="This region represents a CpG dinucleotide"
  misc_feature (61)..(61): /note="Nucleotide may be methylated to form 5-methylcytosine"
gccgcggcggcagcaggagcatcgcggccgccgcgcggcagtggcgatatttaaaggggacgcagcctatctctcaggagtggagcgcaaatcgtctcacccaatgcgcatgcgcgaggcgc

SEQ ID NO: 21385 - DNA, 122 bp, Homo sapiens
  misc_feature (61)..(62): /note="This region represents a CpG dinucleotide"
  misc_feature (61)..(61): /note="Nucleotide may be methylated to form 5-methylcytosine"
ggcagggctctgttctttcctatattttcccttccttcacacactaatctctttggattacgcaaacccccaagttgttgggcaattgtgtaccagagagtagagggagatgagaggcctta

SEQ ID NO: 21386 - DNA, 122 bp, Homo sapiens
  misc_feature (61)..(62): /note="This region represents a CpG dinucleotide"
  misc_feature (61)..(61): /note="Nucleotide may be methylated to form 5-methylcytosine"
ctagggaacagaaagaattcttttaagtaaacataaaatgctttgataaatcaaaacatgcgaatgagatttctgttaaaaatgttccaatctgttttgagacttgaaataaagctgtcttt

SEQ ID NO: 21387 - DNA, 122 bp, Homo sapiens
  misc_feature (61)..(62): /note="This region represents a CpG dinucleotide"
  misc_feature (61)..(61): /note="Nucleotide may be methylated to form 5-methylcytosine"
aacaaacatatgctttcattcctgagttcctcatattgtttatttacttgtgtttacctacgttatccatgcacaaaagatttgagccatcttactatcatgacaacacatcctacactgta

SEQ ID NO: 21388 - DNA, 122 bp, Homo sapiens
  misc_feature (61)..(62): /note="This region represents a CpG dinucleotide"
  misc_feature (61)..(61): /note="Nucleotide may be methylated to form 5-methylcytosine"
tgtgttttaaaaacatgcagcttggctttagaaatttcctggctgtttccttcttccagccgtatctgaaccttctctttcctgtttctcaactgccccttttcttcaaactgtttattcca

SEQ ID NO: 21389 - DNA, 122 bp, Homo sapiens
  misc_feature (61)..(62): /note="This region represents a CpG dinucleotide"
  misc_feature (61)..(61): /note="Nucleotide may be methylated to form 5-methylcytosine"
gcctccctaggagacaatctgcatgtcctaaataacctcttccagatccagcagctcccccgcctcctccccaggctccttctgaggcgggacagaaccggtgactttcctgcccggcctga

SEQ ID NO: 21390 - DNA, 122 bp, Homo sapiens
  misc_feature (61)..(62): /note="This region represents a CpG dinucleotide"
  misc_feature (61)..(61): /note="Nucleotide may be methylated to form 5-methylcytosine"
acaaaacaattagagatatcgggccatataatgcaagcacatgatgtgataaagggagaccgggctggtgatacgttgcatggaagctggttaaacctgaaggaagcccttatcttggttgc

SEQ ID NO: 21391 - DNA, 122 bp, Homo sapiens
  misc_feature (61)..(62): /note="This region represents a CpG dinucleotide"
  misc_feature (61)..(61): /note="Nucleotide may be methylated to form 5-methylcytosine"
ggggaaccacatgttccctggctctggtgaggagaagttaggagacttggacttgtgggacgattctaaggtggtgctactgtccagtgtcacaaaggatatccaggcaccgtgcaaagccc

SEQ ID NO: 21392 - DNA, 122 bp, Homo sapiens
  misc_feature (61)..(62): /note="This region represents a CpG dinucleotide"
  misc_feature (61)..(61): /note="Nucleotide may be methylated to form 5-methylcytosine"
aggagtaagcatgtggttgtgttgcttccttgtcttcagtgataaacccacatgacatttcgcaaaactagataataggaagtggaaactgaccaacaaagatcaaagtccagaggagaaca

SEQ ID NO: 21393 - DNA, 122 bp, Homo sapiens
  misc_feature (61)..(62): /note="This region represents a CpG dinucleotide"
  misc_feature (61)..(61): /note="Nucleotide may be methylated to form 5-methylcytosine"
cagctaccatctaaccaggcaactgagggaaaagcacaaggacttgtcattactgagtggcggttgcttgaactgaagactgggcaaggctgaaaacctggggcttgatagagcctgtaggg

SEQ ID NO: 21394 - DNA, 122 bp, Homo sapiens
  misc_feature (61)..(62): /note="This region represents a CpG dinucleotide"
  misc_feature (61)..(61): /note="Nucleotide may be methylated to form 5-methylcytosine"
agaaccggtgggtgcgggagccggcgagggtctggcgggcggaaggagcggcagggtccgcgccaacaggctcttcccactcgcaggtacctgccagtggtggggcacacggacggcacgct

SEQ ID NO: 21395 - DNA, 122 bp, Homo sapiens
  misc_feature (61)..(62): /note="This region represents a CpG dinucleotide"
  misc_feature (61)..(61): /note="Nucleotide may be methylated to form 5-methylcytosine"
ggcttatgggcaaggacattaagccaggcctttttgctgcaaagacacattcttggctggcgagtgcagcaccaacctgaaagtagtgtgttgagaatccaaattcctgaggaacatatatt

SEQ ID NO: 21396 - DNA, 122 bp, Homo sapiens
  misc_feature (61)..(62): /note="This region represents a CpG dinucleotide"
  misc_feature (61)..(61): /note="Nucleotide may be methylated to form 5-methylcytosine"
ggtccctgtctcaggctggtctaatcatagtacccagcactcctggacacagtgactggtcgaggtgtagaactatgacccaattcagcttggaaaaatccctccacaaggtttttgtagct

SEQ ID NO: 21397 - DNA, 122 bp, Homo sapiens
  misc_feature (61)..(62): /note="This region represents a CpG dinucleotide"
  misc_feature (61)..(61): /note="Nucleotide may be methylated to form 5-methylcytosine"
atctcagcgctttccaacaatggaatagctacctccagagtagtgagtttcccattaccacgaacagtcaaggacagttggacacagaggcagaatgtgataaatgaaaatactttggaggt

SEQ ID NO: 21398 - DNA, 122 bp, Homo sapiens
  misc_feature (61)..(62): /note="This region represents a CpG dinucleotide"
  misc_feature (61)..(61): /note="Nucleotide may be methylated to form 5-methylcytosine"
ttgtctggcgggaaagtccttggccagcgagaggacactgcgggtgagctgccaaggacacgcaggcctctgtagctcctctgtttgaggttaggatttctccggaaggcgtggtatcactg

SEQ ID NO: 21399 - DNA, 122 bp, Homo sapiens
  misc_feature (61)..(62): /note="This region represents a CpG dinucleotide"
  misc_feature (61)..(61): /note="Nucleotide may be methylated to form 5-methylcytosine"
tccttatatgaaactaatatgtatctcccagattgtgatgaggattacaggcacaagatacgagaaaaagcttgctgacagaaatcactatacctgtataagataggaggggagggcttgcc

SEQ ID NO: 21400 - DNA, 122 bp, Homo sapiens
  misc_feature (61)..(62): /note="This region represents a CpG dinucleotide"
  misc_feature (61)..(61): /note="Nucleotide may be methylated to form 5-methylcytosine"
taaaagtcacggggtggaagctggatgattctgagtggtttgcaacataatagtatttatcgcactgtaagttgagctggtcatgtgaaccatccagcaggaagcttgttaggaattccaag

SEQ ID NO: 21401 - DNA, 122 bp, Homo sapiens
  misc_feature (61)..(62): /note="This region represents a CpG dinucleotide"
  misc_feature (61)..(61): /note="Nucleotide may be methylated to form 5-methylcytosine"
aactgcaaaattatcgctgtttatgataaggctttggcacaaaacaagcggcatacccagcgtgaataaataaaatatatacaggctgggtgcagtggctcacgcctgtaatcccagcactt

SEQ ID NO: 21402 - DNA, 122 bp, Homo sapiens
  misc_feature (61)..(62): /note="This region represents a CpG dinucleotide"
  misc_feature (61)..(61): /note="Nucleotide may be methylated to form 5-methylcytosine"
gataagagcccttaagctctttataagaaagtggtacttttcacttctgtgaagcaggaacgtctttataggtgatacacccctactttatggtaattgcttatttaatgcctgccttattt

SEQ ID NO: 21403 - DNA, 122 bp, Homo sapiens
  misc_feature (61)..(62): /note="This region represents a CpG dinucleotide"
  misc_feature (61)..(61): /note="Nucleotide may be methylated to form 5-methylcytosine"
taatgctttagtattaatgtaaataagtctgacatatcaaatccacttagaacagcactccgcagaggaaaagaccaaatttaaaacatagataaattccctatgacttatttattgcaagt

SEQ ID NO: 21404 - DNA, 122 bp, Homo sapiens
  misc_feature (61)..(62): /note="This region represents a CpG dinucleotide"
  misc_feature (61)..(61): /note="Nucleotide may be methylated to form 5-methylcytosine"
tgtgtagatctggggaagttacttaatctctcctgatatcagtatcacctttcgtcaaagcggtagaacagcagtaactatctcatagggttatgataaggactaaaggaaataagaaatat

SEQ ID NO: 21405 - DNA, 122 bp, Homo sapiens
  misc_feature (61)..(62): /note="This region represents a CpG dinucleotide"
  misc_feature (61)..(61): /note="Nucleotide may be methylated to form 5-methylcytosine"
ctgccttcggagcgcacaaagcagagctgcagggctcagatgaggacgagcacgtgcgagcgcctaccggccaccaccaggctggtcactgcctcatgtgggcctgcaaagcctgcaagagg

SEQ ID NO: 21406 - DNA, 122 bp, Homo sapiens
  misc_feature (61)..(62): /note="This region represents a CpG dinucleotide"
  misc_feature (61)..(61): /note="Nucleotide may be methylated to form 5-methylcytosine"
catgactcagccactcagctccctgcccttgggcaatttatttaactgtatggtacttaacggcttcccacttctgaattagggcttgctggaaagatacaggcaggaataaagaaattaaa

SEQ ID NO: 21407 - DNA, 122 bp, Homo sapiens
  misc_feature (61)..(62): /note="This region represents a CpG dinucleotide"
  misc_feature (61)..(61): /note="Nucleotide may be methylated to form 5-methylcytosine"
atggaatcaggaaggaaattaccaagtctgtaaaataagatgtgaaattgtgtataaacacggggtaatattcagagtcatttaataatgtataggaaattgggtaatgtttagagtcattt

SEQ ID NO: 21408 - DNA, 122 bp, Homo sapiens
  misc_feature (61)..(62): /note="This region represents a CpG dinucleotide"
  misc_feature (61)..(61): /note="Nucleotide may be methylated to form 5-methylcytosine"
ctttggccacgcaggagactgagttttgtgaggggttgtccttctcccagtctctcttcccgctgggaacagaagtgtccagtaaacccacctgcattccacgtgtcctgtggccgcctcca

SEQ ID NO: 21409 - DNA, 122 bp, Homo sapiens
  misc_feature (61)..(62): /note="This region represents a CpG dinucleotide"
  misc_feature (61)..(61): /note="Nucleotide may be methylated to form 5-methylcytosine"
gtgacaatgcgggtgtttcaggaaatggtgtgactacagtctagtgggtggggaagtgaccgaaaatgagactgagtctggactgaaaagtgacctgagtgacacacataaaggaactgaaa

SEQ ID NO: 21410 - DNA, 122 bp, Homo sapiens
  misc_feature (61)..(62): /note="This region represents a CpG dinucleotide"
  misc_feature (61)..(61): /note="Nucleotide may be methylated to form 5-methylcytosine"
acctgcaagttaggtcgtttccaattctgctttcttcaacattgagttgttggccaggtgcggtggctcatgcctgtaatcccagcactttgggaggccgaggtgggcggatcacttgaggt

SEQ ID NO: 21411 - DNA, 122 bp, Homo sapiens
  misc_feature (61)..(62): /note="This region represents a CpG dinucleotide"
  misc_feature (61)..(61): /note="Nucleotide may be methylated to form 5-methylcytosine"
gcagcagcttgaggcagtcgggctggttgtagagtgctgcgtagtgcagagccgtgttcccgtcagcagccttggcatccaggtgaccactggggagaggagggttcagggagaaaggaagg

SEQ ID NO: 21412 - DNA, 122 bp, Homo sapiens
  misc_feature (61)..(62): /note="This region represents a CpG dinucleotide"
  misc_feature (61)..(61): /note="Nucleotide may be methylated to form 5-methylcytosine"
gtgtgtgtgtgtgtaaagagagagagggaactagagactaggggaccaactcagccaaatcgcctccttgcaagcctttccagcagccccaggtatcttggaaagagccaactcacctcctt

SEQ ID NO: 21413 - DNA, 122 bp, Homo sapiens
  misc_feature (61)..(62): /note="This region represents a CpG dinucleotide"
  misc_feature (61)..(61): /note="Nucleotide may be methylated to form 5-methylcytosine"
caacaagatgttcactaatactatcatttcttgagggctttctttatgccaggcgctttacgttaattctctcattgactcatcataactttttaaaatataggaaaatcttcatgttagag

SEQ ID NO: 21414 - DNA, 122 bp, Homo sapiens
  misc_feature (61)..(62): /note="This region represents a CpG dinucleotide"
  misc_feature (61)..(61): /note="Nucleotide may be methylated to form 5-methylcytosine"
agccactgtggccggcctaaatggctatttcatggtgaataaaccattagcctcaggcttcgtctcctctctctgtttgaagacaataaagtatgatgtaattgtattattttgataaggta

SEQ ID NO: 21415 - DNA, 122 bp, Homo sapiens
  misc_feature (61)..(62): /note="This region represents a CpG dinucleotide"
  misc_feature (61)..(61): /note="Nucleotide may be methylated to form 5-methylcytosine"
ggtgcggaggctcaccagccacttagttgccatctctgtctacatgcatgatgatctaatcgtgcctgatgatggtctgtctgatgtaggtcctgacctcactgccacatcttagccacagc

SEQ ID NO: 21416 - DNA, 122 bp, Homo sapiens
  misc_feature (61)..(62): /note="This region represents a CpG dinucleotide"
  misc_feature (61)..(61): /note="Nucleotide may be methylated to form 5-methylcytosine"
tatagctgggagttcataaccataaaacctaaagtcaccagctcctacagtgtagaatcacgtggcatcttccttatcaccaccagctctgacattggtgcaaaacatcttacgcattttct

SEQ ID NO: 21417 - DNA, 122 bp, Homo sapiens
  misc_feature (61)..(62): /note="This region represents a CpG dinucleotide"
  misc_feature (61)..(61): /note="Nucleotide may be methylated to form 5-methylcytosine"
aaacttgaactcaaatgtctgggttaaaaattgtttcttggctggggacacagtggcacacgcctgcaatcccagccctttgggaggccaagacaggggcatcgcttgagcccaggagttca

SEQ ID NO: 21418 - DNA, 122 bp, Homo sapiens
  misc_feature (61)..(62): /note="This region represents a CpG dinucleotide"
  misc_feature (61)..(61): /note="Nucleotide may be methylated to form 5-methylcytosine"
tatgagtaagtaaaaacaaataagcacagctgccagttatcctgttcaacagatgtacagcgtgcaaagctgaccacagccaggtcctccttccagaaattaattccccataaaatgtcagc

SEQ ID NO: 21419 - DNA, 122 bp, Homo sapiens
  misc_feature (61)..(62): /note="This region represents a CpG dinucleotide"
  misc_feature (61)..(61): /note="Nucleotide may be methylated to form 5-methylcytosine"
tcagattttggagcatgttggatttgggatactcaccctgtacatccttagatccagaatcgttactggaatagacagaagaaactggcagaatccccatgttgcttcccttactcgtggaa

SEQ ID NO: 21420 - DNA, 122 bp, Homo sapiens
  misc_feature (61)..(62): /note="This region represents a CpG dinucleotide"
  misc_feature (61)..(61): /note="Nucleotide may be methylated to form 5-methylcytosine"
ttactgcacctccaaagagaaaacgctttaaacaaatccagttttagccctctgtgataacggagacgtttgctcactcatcaaccattagccctgagcttaaggaagagtgagtacttagg

SEQ ID NO: 21421 - DNA, 122 bp, Homo sapiens
  misc_feature (61)..(62): /note="This region represents a CpG dinucleotide"
  misc_feature (61)..(61): /note="Nucleotide may be methylated to form 5-methylcytosine"
aaccgcagttctcagatgttgctctgagggttaagtggatcgtgtgtgatgtgcctggctcggttcctggctcactgggtgagctctgttaagtggcagctgttgttgctgccactgccact

SEQ ID NO: 21422 - DNA, 122 bp, Homo sapiens
  misc_feature (61)..(62): /note="This region represents a CpG dinucleotide"
  misc_feature (61)..(61): /note="Nucleotide may be methylated to form 5-methylcytosine"
ctgcttcaggacttctgtttcctctcttgtttcatgcggccatcgatcttgaactagagacgttaggcatcaaagttccagagtgcagtggaaagaatgctgggacatggggacaggaccca

SEQ ID NO: 21423 - DNA, 122 bp, Homo sapiens
  misc_feature (61)..(62): /note="This region represents a CpG dinucleotide"
  misc_feature (61)..(61): /note="Nucleotide may be methylated to form 5-methylcytosine"
ctgagcagggcaagagcttcatgagccgctctttaatgctgcgcttggtgctgttctgagcgtacaggaaacctagaagatacaggatcagttctgttaatgctgtctgcagagagaaaagg

SEQ ID NO: 21424 - DNA, 122 bp, Homo sapiens
  misc_feature (61)..(62): /note="This region represents a CpG dinucleotide"
  misc_feature (61)..(61): /note="Nucleotide may be methylated to form 5-methylcytosine"
agacaaagtctagagttcagcccaactcctctgtttcacagatgtggaaatgatggccagcgaggtcacagtctgaccagccaagaccaaaacctacatctcagttcctaaccagtcctctt

SEQ ID NO: 21425 - DNA, 122 bp, Homo sapiens
  misc_feature (61)..(62): /note="This region represents a CpG dinucleotide"
  misc_feature (61)..(61): /note="Nucleotide may be methylated to form 5-methylcytosine"
tgtgctaggcactgtgcttggtgctggaaaccccgaaatgacttaagaactggttccaaccgttaaacagcttcagggctattgggaaagagacacataaatgtttacttcagtataacctg

SEQ ID NO: 21426 - DNA, 122 bp, Homo sapiens
  misc_feature (61)..(62): /note="This region represents a CpG dinucleotide"
  misc_feature (61)..(61): /note="Nucleotide may be methylated to form 5-methylcytosine"
gtgtgattctgcacgtcattcctggctcaacagcctgaatgagtcctgctggatcactctcgtttctgactcacttctcatatctctgtttagatgaagggaaatcttatagataaacaaga

SEQ ID NO: 21427 - DNA, 122 bp, Homo sapiens
  misc_feature (61)..(62): /note="This region represents a CpG dinucleotide"
  misc_feature (61)..(61): /note="Nucleotide may be methylated to form 5-methylcytosine"
ttcctgccaggatacccagaccagaataaaactcatttgggggccgggtacggtggttcacgcctgtaatcccagcactttgggaggccgaggcgggtggatcacctgaggtcaggagtttt

SEQ ID NO: 21428 - DNA, 122 bp, Homo sapiens
  misc_feature (61)..(62): /note="This region represents a CpG dinucleotide"
  misc_feature (61)..(61): /note="Nucleotide may be methylated to form 5-methylcytosine"
gatcctttactactgaactcacagggctgtaacactgttactgtacagagaggaccaggacgatgccagcaccccgtttatcctgagtgaactctccggaggcctcttcaagcttgtgggtt

SEQ ID NO: 21429 - DNA, 122 bp, Homo sapiens
  misc_feature (61)..(62): /note="This region represents a CpG dinucleotide"
  misc_feature (61)..(61): /note="Nucleotide may be methylated to form 5-methylcytosine"
caaatattaagtcagacagagcaaggaaggggaaacaagatgttcctggactgcagatggcggtattgtaggcggaagtttggcaatacctaaagatgctgaacatgcacatactccatgac

SEQ ID NO: 21430 - DNA, 122 bp, Homo sapiens
  misc_feature (61)..(62): /note="This region represents a CpG dinucleotide"
  misc_feature (61)..(61): /note="Nucleotide may be methylated to form 5-methylcytosine"
agtcttgctctgttgcccaggctggagtacatttgcctgatgtcagctccctgcaacctccgcctcctgggttcaagcgattctcctgcctcagcctcctgagtagctgggattacaggtgt

SEQ ID NO: 21431 - DNA, 122 bp, Homo sapiens
  misc_feature (61)..(62): /note="This region represents a CpG dinucleotide"
  misc_feature (61)..(61): /note="Nucleotide may be methylated to form 5-methylcytosine"
ccaaaacatgcaagtctatttcagggcaatcagttttaagcctctcagatcagtcaatctcgatgttcaacaaactcagttattagtttgatagtttctctttttcttttgaacacatgttc

SEQ ID NO: 21432 - DNA, 122 bp, Homo sapiens
  misc_feature (61)..(62): /note="This region represents a CpG dinucleotide"
  misc_feature (61)..(61): /note="Nucleotide may be methylated to form 5-methylcytosine"
ttgactttagcagggaacttcctcttaaaatacctaggactgagtgtatcaggcagtcagcgggtgtttatttcatgctcacattgtacaaagcactacactaggtctagggtaaagataca

SEQ ID NO: 21433 - DNA, 122 bp, Homo sapiens
  misc_feature (61)..(62): /note="This region represents a CpG dinucleotide"
  misc_feature (61)..(61): /note="Nucleotide may be methylated to form 5-methylcytosine"
gagggcaacatttggagcagagggacccctcttgccctggttaagttaagaagaaatgaacgaggaactcagggcaagaccaagagaggtgattcatcaactggccttcaactagaaaggag

SEQ ID NO: 21434 - DNA, 122 bp, Homo sapiens
  misc_feature (61)..(62): /note="This region represents a CpG dinucleotide"
  misc_feature (61)..(61): /note="Nucleotide may be methylated to form 5-methylcytosine"
cattaccctccaggggcctgagaggtcgagtcatttgtccaagtttgggtggtaagtaagcggcagtgccaggaggcaaacccacaagtagtgccttatcactaagtcacattgttacacaa

SEQ ID NO: 21435 - DNA, 122 bp, Homo sapiens
  misc_feature (61)..(62): /note="This region represents a CpG dinucleotide"
  misc_feature (61)..(61): /note="Nucleotide may be methylated to form 5-methylcytosine"
ttcctcctaagctaggtgcttggcttttatttttaaattgtttctcctgatactttgaaacgctgttgtgttctgagtcactgaagagttggaagaagtcaattaatttttaatgcaaaatg

SEQ ID NO: 21436 - DNA, 122 bp, Homo sapiens
  misc_feature (61)..(62): /note="This region represents a CpG dinucleotide"
  misc_feature (61)..(61): /note="Nucleotide may be methylated to form 5-methylcytosine"
aatgggggagcccttctttagttgataaggtagtgaagagatgccaaacactagggcctgcgtggagctttatggagcagttaaccttgagacttacctgtatgtaaagataaaactgcaac

SEQ ID NO: 21437 - DNA, 122 bp, Homo sapiens
  misc_feature (61)..(62): /note="This region represents a CpG dinucleotide"
  misc_feature (61)..(61): /note="Nucleotide may be methylated to form 5-methylcytosine"
atttgggtggcagacatggccgtgaatgggaaggagaagggcctgacctcactgcaaggccgtctgcattaaagaggccaatttctgagcacaaggcaggttgccaggaaatgcagcttgac

SEQ ID NO: 21438 - DNA, 122 bp, Homo sapiens
  misc_feature (61)..(62): /note="This region represents a CpG dinucleotide"
  misc_feature (61)..(61): /note="Nucleotide may be methylated to form 5-methylcytosine"
atggtgaccaaacaatgttggactatggcttagcttctgtaataggatgaccgactctcccgtcacaaagagctgagaaaggaaagagaaaaccacagtgatgacaaagtacgacaaatggc

SEQ ID NO: 21439 - DNA, 122 bp, Homo sapiens
  misc_feature (61)..(62): /note="This region represents a CpG dinucleotide"
  misc_feature (61)..(61): /note="Nucleotide may be methylated to form 5-methylcytosine"
ctgctgtgctgctggcagctctggctggttgtgctccccatctgcctaacttctcccttccgtcaatctcttggaatttgcccacagggctgaaatccctaatgttgaagcttcctgaccag

SEQ ID NO: 21440 - DNA, 122 bp, Homo sapiens
  misc_feature (61)..(62): /note="This region represents a CpG dinucleotide"
  misc_feature (61)..(61): /note="Nucleotide may be methylated to form 5-methylcytosine"
gggaggttctgataggacaggcatctgcactgtggctttttaaccagcctggttggaggacggaaaatggaggcaagagaatgtgctcaatgattttgtcaattagaagtgattaagtttcc

SEQ ID NO: 21441 - DNA, 122 bp, Homo sapiens
  misc_feature (61)..(62): /note="This region represents a CpG dinucleotide"
  misc_feature (61)..(61): /note="Nucleotide may be methylated to form 5-methylcytosine"
agtaactgcaccctcctgacagttctcacaactccagattctattctgagtaaagccatccgtcattgtaatttactgtttctatcttccccaaaggcagcaagctcgagcaagataaactt

SEQ ID NO: 21442 - DNA, 122 bp, Homo sapiens
  misc_feature (61)..(62): /note="This region represents a CpG dinucleotide"
  misc_feature (61)..(61): /note="Nucleotide may be methylated to form 5-methylcytosine"
cctggtatgggtgaagtcaggggcaaggttggggctgacgtggattctctcttcctctctcgggcacaggagccaagccgccatggcctaccacagcttcctggtggagcccatcagctgcc

SEQ ID NO: 21443 - DNA, 122 bp, Homo sapiens
  misc_feature (61)..(62): /note="This region represents a CpG dinucleotide"
  misc_feature (61)..(61): /note="Nucleotide may be methylated to form 5-methylcytosine"
ttttatcaaatgcctactaagcatcattttttaaatgccatagtggattaatccttgtcccgcctgtatcaaagtacacttagactggcactcagtgacagtttgggaagaagccagagctg

SEQ ID NO: 21444 - DNA, 122 bp, Homo sapiens
  misc_feature (61)..(62): /note="This region represents a CpG dinucleotide"
  misc_feature (61)..(61): /note="Nucleotide may be methylated to form 5-methylcytosine"
tgacatttcccttcactaccaccctcccacaaaccgctcctcccccgttcctctgccacgcgcagcctcacttccttgctgaaatcatgcaaggccgtttgccctgggtaaaaatgctcatg

SEQ ID NO: 21445 - DNA, 122 bp, Homo sapiens
  misc_feature (61)..(62): /note="This region represents a CpG dinucleotide"
  misc_feature (61)..(61): /note="Nucleotide may be methylated to form 5-methylcytosine"
aatcagctttccacttgattgctagttttgatttgacatttgattgatcacctgtcatctcgctgcctttgatctattcattcttgatatatatcaataaatcactcaccatggtaactcag

SEQ ID NO: 21446 - DNA, 122 bp, Homo sapiens
  misc_feature (61)..(62): /note="This region represents a CpG dinucleotide"
  misc_feature (61)..(61): /note="Nucleotide may be methylated to form 5-methylcytosine"
ggaggggtggggcaggcagggaggaggagggtggctgagaaagcttcccctttgtgggggcgtgtggccacctccagaggatcagggtgagggaagcttccagaagtggcatgaggagggag

SEQ ID NO: 21447 - DNA, 122 bp, Homo sapiens
  misc_feature (61)..(62): /note="This region represents a CpG dinucleotide"
  misc_feature (61)..(61): /note="Nucleotide may be methylated to form 5-methylcytosine"
ggttgatgtcttgtgtttgccatgttccgctgggaggctaaatctgtaagaaaacaaatacgcttggagggaggagactgcccttaagccccactcaatcacaagtcagctggcccattgtg

SEQ ID NO: 21448 - DNA, 122 bp, Homo sapiens
  misc_feature (61)..(62): /note="This region represents a CpG dinucleotide"
  misc_feature (61)..(61): /note="Nucleotide may be methylated to form 5-methylcytosine"
gagtcttggctattattgatgattttgcattgtcatatacattttcaagccaaatccaatcggttagtccagttccactataaaccctgttgggattacattgattctatagagcagtactg

SEQ ID NO: 21449 - DNA, 122 bp, Homo sapiens
  misc_feature (61)..(62): /note="This region represents a CpG dinucleotide"
  misc_feature (61)..(61): /note="Nucleotide may be methylated to form 5-methylcytosine"
gctgaatggattttttttttaactcgaggcagatgcagatacaatagtctatgggcaaagcgattttgatttgcaagagctagagcttaagagagaaacagtttagctttaaattccaagaa

SEQ ID NO: 21450 - DNA, 122 bp, Homo sapiens
  misc_feature (61)..(62): /note="This region represents a CpG dinucleotide"
  misc_feature (61)..(61): /note="Nucleotide may be methylated to form 5-methylcytosine"
ttaagttgacagggacacctctaccccatcctctaaaaaatacactgaacaccagtgaatcgtctttaaaagcacccatccttgcctgtcaggttgagaacgtgtgctcccagctgaatcat

SEQ ID NO: 21451 - DNA, 122 bp, Homo sapiens
  misc_feature (61)..(62): /note="This region represents a CpG dinucleotide"
  misc_feature (61)..(61): /note="Nucleotide may be methylated to form 5-methylcytosine"
acaggggcttggagaggtcaaggaacttgcccaaagtcacagcatagaagtgacagaatccgagttttgacccagatttgatgggttccaaagcgtgaacttatttctccactccacaaaaa

SEQ ID NO: 21452 - DNA, 122 bp, Homo sapiens
  misc_feature (61)..(62): /note="This region represents a CpG dinucleotide"
  misc_feature (61)..(61): /note="Nucleotide may be methylated to form 5-methylcytosine"
gaagagaaaactttcttaggaaaaatgtattcacctgtgataacgttagaaagtctttcccgagagcccaagtaacattagctgaactgacattcaccagtagggggatgcatctctgcaca

SEQ ID NO: 21453 - DNA, 122 bp, Homo sapiens
  misc_feature (61)..(62): /note="This region represents a CpG dinucleotide"
  misc_feature (61)..(61): /note="Nucleotide may be methylated to form 5-methylcytosine"
aaagtatgtggcgacagtcaactagatttaagttcattttctgtagcttggggtcagaatcgactgaagcactctgatgatcaagttttctgcaattccctattccacgcattagctcgctg

SEQ ID NO: 21454 - DNA, 122 bp, Homo sapiens
  misc_feature (61)..(62): /note="This region represents a CpG dinucleotide"
  misc_feature (61)..(61): /note="Nucleotide may be methylated to form 5-methylcytosine"
tttagatatgttcagattcacaaataccattgtgttacagtcgcctgcagtgttcagtaccgtctcatgctgtacgggtatgaggcctaggagcaacaggctgtacagcatgacttaggtgt

SEQ ID NO: 21455 - DNA, 122 bp, Homo sapiens
  misc_feature (61)..(62): /note="This region represents a CpG dinucleotide"
  misc_feature (61)..(61): /note="Nucleotide may be methylated to form 5-methylcytosine"
gctctggcagagagcaagccaactgggggcatttctttccagccccgtggctgatggtctcgccgtgcgtgatggtgaattttatgtgtcgccttgatgggaccttgggggtgctcagacat

SEQ ID NO: 21456 - DNA, 122 bp, Homo sapiens
  misc_feature (61)..(62): /note="This region represents a CpG dinucleotide"
  misc_feature (61)..(61): /note="Nucleotide may be methylated to form 5-methylcytosine"
taggagtcatgcagttggaggctacaagattctgaccgcccctaaactgctcctaagacccgtgcttcagaaacattgcagaccctgccttgatggatcagctggcaccacccagatagata

SEQ ID NO: 21457 - DNA, 122 bp, Homo sapiens
  misc_feature (61)..(62): /note="This region represents a CpG dinucleotide"
  misc_feature (61)..(61): /note="Nucleotide may be methylated to form 5-methylcytosine"
gctaggcagagacgccccaggccatgttagagctttgagtgaggcctggtaacagggaggcgctgtcacctactggccttgccaatccagctccaagatgctgagcctgaagctccccaggc

SEQ ID NO: 21458 - DNA, 122 bp, Homo sapiens
  misc_feature (61)..(62): /note="This region represents a CpG dinucleotide"
  misc_feature (61)..(61): /note="Nucleotide may be methylated to form 5-methylcytosine"
aggtcagcacacgtgagtcaccaggcactttggctagccctggctactaccttatgttgacggcagcgtttacatgcatcactagcagcatgaggcttatgcaatgtttagccttaagcaac

SEQ ID NO: 21459 - DNA, 122 bp, Homo sapiens
  misc_feature (61)..(62): /note="This region represents a CpG dinucleotide"
  misc_feature (61)..(61): /note="Nucleotide may be methylated to form 5-methylcytosine"
acacacacacagagagaaatcaaactcttctttttcaaggatgcctcttcacactaacaacgacagaagtgtacacttaaacatcctttctattaagaggacaaattctaaaaatttgttat

SEQ ID NO: 21460 - DNA, 122 bp, Homo sapiens
  misc_feature (61)..(62): /note="This region represents a CpG dinucleotide"
  misc_feature (61)..(61): /note="Nucleotide may be methylated to form 5-methylcytosine"
ttcatatgcagactctactttcctttgtggtttccttttctctgtgcagttgccttcagtcgagtttgatagagtggaagggtggggaaatagaggaaatggaagagaagaaagagagtgat

SEQ ID NO: 21461 - DNA, 122 bp, Homo sapiens
  misc_feature (61)..(62): /note="This region represents a CpG dinucleotide"
  misc_feature (61)..(61): /note="Nucleotide may be methylated to form 5-methylcytosine"
tcatttaaggcttttgcttataagcatgctagctagtggtccaccctatgtggcaggagacgcttttctgagtaagttgaccagctattcaagtttcactactgaacattgtgaaattgaac

SEQ ID NO: 21462 - DNA, 122 bp, Homo sapiens
  misc_feature (61)..(62): /note="This region represents a CpG dinucleotide"
  misc_feature (61)..(61): /note="Nucleotide may be methylated to form 5-methylcytosine"
ttgctggtctgcgggaaatcgagctttcaaaacaagtcctgaagcaggaatgctggggaacgagatgtcacaattaccaggtgagaccagcggccctgctcaagctgtctcctgacaggcag

SEQ ID NO: 21463 - DNA, 122 bp, Homo sapiens
  misc_feature (61)..(62): /note="This region represents a CpG dinucleotide"
  misc_feature (61)..(61): /note="Nucleotide may be methylated to form 5-methylcytosine"
ttcatttcctaatctttaaaaaaaaccattaaactacacctatttttcttcagttagtatcgtaaaagagactgcactgacatggttacgttcccaggaccctcagttctttagggatggac

SEQ ID NO: 21464 - DNA, 122 bp, Homo sapiens
  misc_feature (61)..(62): /note="This region represents a CpG dinucleotide"
  misc_feature (61)..(61): /note="Nucleotide may be methylated to form 5-methylcytosine"
cacgattatatttcacctgggacatgctggtaagtgccccaggctgctaattacctgtaacgtcctctgacatttagcctgcccacgcaaaagccctgttaagtagacccacaacctattac

SEQ ID NO: 21465 - DNA, 122 bp, Homo sapiens
  misc_feature (61)..(62): /note="This region represents a CpG dinucleotide"
  misc_feature (61)..(61): /note="Nucleotide may be methylated to form 5-methylcytosine"
ggggcctccagttggagctgacactggatgtaccttggtgaattgagggtcacaccaggtcggggtgggtaccccagaaaccatggtctgccgtttgccatctccatgacaccatctgtcac

SEQ ID NO: 21466 - DNA, 122 bp, Homo sapiens
  misc_feature (61)..(62): /note="This region represents a CpG dinucleotide"
  misc_feature (61)..(61): /note="Nucleotide may be methylated to form 5-methylcytosine"
aaaatgtttttttttaagtactttgggaaaaatatgtaagcctaaactgcactttatagacgctgtacaataacattcatgagtcctgtgtggcacagagctgcagttgttacttaaacaac

SEQ ID NO: 21467 - DNA, 122 bp, Homo sapiens
  misc_feature (61)..(62): /note="This region represents a CpG dinucleotide"
  misc_feature (61)..(61): /note="Nucleotide may be methylated to form 5-methylcytosine"
ttcttctaattatcccccaaagcacagatacttggggtttcagtttagcataataggagacgtggagaaaagagggaacaatgtgtgtaagtgaatattttcaacaccggcctcaccgccgc

SEQ ID NO: 21468 - DNA, 122 bp, Homo sapiens
  misc_feature (61)..(62): /note="This region represents a CpG dinucleotide"
  misc_feature (61)..(61): /note="Nucleotide may be methylated to form 5-methylcytosine"
agaggtcttgctatgttgcccaggctggtctcaaactcctggcctcatgccatcttcctgcgtaagcttcccaaagcactgagattatatgccttagccactgtgcctggccccattgtgct

SEQ ID NO: 21469 - DNA, 122 bp, Homo sapiens
  misc_feature (61)..(62): /note="This region represents a CpG dinucleotide"
  misc_feature (61)..(61): /note="Nucleotide may be methylated to form 5-methylcytosine"
ggcatggagaaatgactttgaatgtgagatatgcacttagagaagggctgcagtatcacacgcctgcagcagagtatcaggaggctttcacttctgattaggaaatcccctttggtttaagc

SEQ ID NO: 21470 - DNA, 122 bp, Homo sapiens
  misc_feature (61)..(62): /note="This region represents a CpG dinucleotide"
  misc_feature (61)..(61): /note="Nucleotide may be methylated to form 5-methylcytosine"
aatattgcctctgtgtaatgttctgagaccattcagagcccggttaagaaaacacagcgacgactctcctcagagctggggctgttgattttgttaggtgagatcacttgaggaatataaaa

SEQ ID NO: 21471 - DNA, 122 bp, Homo sapiens
  misc_feature (61)..(62): /note="This region represents a CpG dinucleotide"
  misc_feature (61)..(61): /note="Nucleotide may be methylated to form 5-methylcytosine"
accacaaacctccgggagcagccaggccttcctgcccgtggttttgcccttcccgccttccggccgccccagcatcccaggcaaatcagccaaggcacctgctggtgtccagcccccacccc

SEQ ID NO: 21472 - DNA, 122 bp, Homo sapiens
  misc_feature (61)..(62): /note="This region represents a CpG dinucleotide"
  misc_feature (61)..(61): /note="Nucleotide may be methylated to form 5-methylcytosine"
ccagagatgcagaaccagaaagatacatacacagtcataccttgtttaacgatgggaatacgttctgagaaatgagtcatgaggttattttgtcattgtgtgaacatcagagtgtacttaca

SEQ ID NO: 21473 - DNA, 122 bp, Homo sapiens
  misc_feature (61)..(62): /note="This region represents a CpG dinucleotide"
  misc_feature (61)..(61): /note="Nucleotide may be methylated to form 5-methylcytosine"
tctggaaaacaatttggcagtgtttcacaaagttaaacatacacttacctatagccctgtcgtcccacatcggtatttacctgagagaaattaaaacttaaattcacacaaaaacctgtaca

SEQ ID NO: 21474 - DNA, 122 bp, Homo sapiens
  misc_feature (61)..(62): /note="This region represents a CpG dinucleotide"
  misc_feature (61)..(61): /note="Nucleotide may be methylated to form 5-methylcytosine"
agtgcccttagaggaagaggaagagaccaggttctttctgctctaagccatgtgagtatacggagagaaggtgccatctatgaagtagaaagtggccccattagacaacaactgtgccagca

SEQ ID NO: 21475 - DNA, 122 bp, Homo sapiens
  misc_feature (61)..(62): /note="This region represents a CpG dinucleotide"
  misc_feature (61)..(61): /note="Nucleotide may be methylated to form 5-methylcytosine"
tagtttctgaggctggcagcctgtagtacatgtatcagggagggcctgaggaacaattcccgtctgcacataggaactgccctgtccagtgtccatgggttcagaggcaccagaagcacctg

SEQ ID NO: 21476 - DNA, 122 bp, Homo sapiens
  misc_feature (61)..(62): /note="This region represents a CpG dinucleotide"
  misc_feature (61)..(61): /note="Nucleotide may be methylated to form 5-methylcytosine"
aagagatagctggggaagaacaaacatatttggcattagtaatcctgaccaaggagccctcgccattacagcaaggaagttccaagagatttattaaaagcttacgcaaaggaaggcagctt

SEQ ID NO: 21477 - DNA, 122 bp, Homo sapiens
  misc_feature (61)..(62): /note="This region represents a CpG dinucleotide"
  misc_feature (61)..(61): /note="Nucleotide may be methylated to form 5-methylcytosine"
gagggagatttggcagaaaatgagaaggcagtgtgatcaccgaggcagagattggagtgacgcagccacaaaccaaagaatgctggcagcagtccaggtgtggtggctcatgcctgtaatcc

SEQ ID NO: 21478 - DNA, 122 bp, Homo sapiens
  misc_feature (61)..(62): /note="This region represents a CpG dinucleotide"
  misc_feature (61)..(61): /note="Nucleotide may be methylated to form 5-methylcytosine"
acctcaggtgattcacccgccttggcctcccaaagttctgggattacaggtggaagccaccgtgcctggcctgagtgtgtctatttgatagagctttctgctctgattctcccttgctatac

SEQ ID NO: 21479 - DNA, 122 bp, Homo sapiens
  misc_feature (61)..(62): /note="This region represents a CpG dinucleotide"
  misc_feature (61)..(61): /note="Nucleotide may be methylated to form 5-methylcytosine"
atattttttaatatatctagtgaatttgtaaaaccaagaaaggtatagatgtgttgaatacggaacaattcctggaaagctaggactataggcccgcattgtatttactgaaagaagcataa

SEQ ID NO: 21480 - DNA, 122 bp, Homo sapiens
  misc_feature (61)..(62): /note="This region represents a CpG dinucleotide"
  misc_feature (61)..(61): /note="Nucleotide may be methylated to form 5-methylcytosine"
ggcaactacagtgtggatctgctggacaaagggatgagtcatgtcccaggcgggacagagcggtacggcgtgagattttgctattccaaatggtgcacggtttaggatttatagattgttta

SEQ ID NO: 21481 - DNA, 122 bp, Homo sapiens
  misc_feature (61)..(62): /note="This region represents a CpG dinucleotide"
  misc_feature (61)..(61): /note="Nucleotide may be methylated to form 5-methylcytosine"
gcttagattgcctctgtaggaagggcaacttgggaccaacaggcaccatgaaaaagccaacgaggtggactgtgacctcaaaaggcaacactctgcttgtaaaatgacaaattttgctttgg

SEQ ID NO: 21482 - DNA, 122 bp, Homo sapiens
  misc_feature (61)..(62): /note="This region represents a CpG dinucleotide"
  misc_feature (61)..(61): /note="Nucleotide may be methylated to form 5-methylcytosine"
tttgcctgcttatctagtatcttttactgctaacacgaatttatgttcatcttttctctccgtcacccttaagtcctttgctggctaatccttccaccccccaccatcattgctttttccaa

SEQ ID NO: 21483 - DNA, 122 bp, Homo sapiens
  misc_feature (61)..(62): /note="This region represents a CpG dinucleotide"
  misc_feature (61)..(61): /note="Nucleotide may be methylated to form 5-methylcytosine"
ctctgcacacagtacgtgttcaattaggtgttcctttcctgggttcaggtcatcagcctccgtacagctcaggaggacagcagcaggcagggaagggcccgggcctggaaactcctcctagc

SEQ ID NO: 21484 - DNA, 122 bp, Homo sapiens
  misc_feature (61)..(62): /note="This region represents a CpG dinucleotide"
  misc_feature (61)..(61): /note="Nucleotide may be methylated to form 5-methylcytosine"
ctctgagaatctgatgcactcagtctttgtgatctcacagaataaagaggctgcagcattcggacgaaggcccctcgctctggtgtgtttgcagagctcagggtggtttgctgtgacctgat

SEQ ID NO: 21485 - DNA, 122 bp, Homo sapiens
  misc_feature (61)..(62): /note="This region represents a CpG dinucleotide"
  misc_feature (61)..(61): /note="Nucleotide may be methylated to form 5-methylcytosine"
cccggaggtacctcgaggagggcaagggtaatgaaatgaatgaaatgaacccctgcacagcgagggagcacttacaccctgacaccctcctgcagggagaaggaagatgacaaggatctctc

SEQ ID NO: 21486 - DNA, 122 bp, Homo sapiens
  misc_feature (61)..(62): /note="This region represents a CpG dinucleotide"
  misc_feature (61)..(61): /note="Nucleotide may be methylated to form 5-methylcytosine"
gcgtgtgctggtctgtaatctgctattggcggaaatgatcaccgttttacaccttcactgcgtgtgctagtctgtaatctgctatttgcacttatgagtgcatgtgaatatttttcagtcac

SEQ ID NO: 21487 - DNA, 122 bp, Homo sapiens
  misc_feature (61)..(62): /note="This region represents a CpG dinucleotide"
  misc_feature (61)..(61): /note="Nucleotide may be methylated to form 5-methylcytosine"
tacagagggagccagtgagcagccttgacctcctgaggcctcacagactcactgcaagagcggcttctaggcagtgaagctaagctgcgtcctggagggggcgccacagtccatcatatgct

SEQ ID NO: 21488 - DNA, 122 bp, Homo sapiens
  misc_feature (61)..(62): /note="This region represents a CpG dinucleotide"
  misc_feature (61)..(61): /note="Nucleotide may be methylated to form 5-methylcytosine"
atgctgaaaatatatggactgcttaaagcctattatgaatcagccaacactggggagagacgcactggctgcatcctcaccggacgggtcatcctggctgctaagacctagacccacccggg

SEQ ID NO: 21489 - DNA, 122 bp, Homo sapiens
  misc_feature (61)..(62): /note="This region represents a CpG dinucleotide"
  misc_feature (61)..(61): /note="Nucleotide may be methylated to form 5-methylcytosine"
gatagggtgttacggcatgctaattagctcttttagtccacacgtctacagcccgataggcggcagtgtgtgaacaactcagttctgtgattctgctctggcctgcagctccatggctggct

SEQ ID NO: 21490 - DNA, 122 bp, Homo sapiens
  misc_feature (61)..(62): /note="This region represents a CpG dinucleotide"
  misc_feature (61)..(61): /note="Nucleotide may be methylated to form 5-methylcytosine"
actgcagtcttttccagagtgctagtggagggctgtcaggccggctagaagaattcaaagcgttcagggaacccacaaaagatttcttgcagccttttagctgcctggcaggcagtagaaac

SEQ ID NO: 21491 - DNA, 122 bp, Homo sapiens
  misc_feature (61)..(62): /note="This region represents a CpG dinucleotide"
  misc_feature (61)..(61): /note="Nucleotide may be methylated to form 5-methylcytosine"
ggggcaggacagagtgtaccggcgggggggtgggggcgaggttggagccctggtcaggggcgcacaagccgcagaactgaaggtggaggtgtggatggagacttgatttcaaggccgcccac

SEQ ID NO: 21492 - DNA, 122 bp, Homo sapiens
  misc_feature (61)..(62): /note="This region represents a CpG dinucleotide"
  misc_feature (61)..(61): /note="Nucleotide may be methylated to form 5-methylcytosine"
gtttttgtgttccaggagctgttggtttccaccgaatttttgctgtggtcagtcctctttcgccatggagaagtgagaagttattcataaagaggggtggaaacaacttttagaactatttt

SEQ ID NO: 21493 - DNA, 122 bp, Homo sapiens
  misc_feature (61)..(62): /note="This region represents a CpG dinucleotide"
  misc_feature (61)..(61): /note="Nucleotide may be methylated to form 5-methylcytosine"
atgcccttcaccctggggtgtccctctgccagctcagcctgcaaaccatgatcccttgtacgactgcagcccagctgtgttgcagaagtaaaggtgtctgcccccatgaagccagcccagag

SEQ ID NO: 21494 - DNA, 122 bp, Homo sapiens
  misc_feature (61)..(62): /note="This region represents a CpG dinucleotide"
  misc_feature (61)..(61): /note="Nucleotide may be methylated to form 5-methylcytosine"
ccagaattttcttcctttttaaggccgaataatattccattgtatggctagatcatatttcgcttacccattcatctgtccatggactgtctgagtaaccttttggctattgtgaatcatgc

SEQ ID NO: 21495 - DNA, 122 bp, Homo sapiens
  misc_feature (61)..(62): /note="This region represents a CpG dinucleotide"
  misc_feature (61)..(61): /note="Nucleotide may be methylated to form 5-methylcytosine"
tattatttctctaggcttttgcaatcagatgctgggttggctggaagctggctggtatagcgtggccatgcagcaggctagtctaggcttagtcacatagtgattgcagggtttcaggaaaa

SEQ ID NO: 21496 - DNA, 122 bp, Homo sapiens
  misc_feature (61)..(62): /note="This region represents a CpG dinucleotide"
  misc_feature (61)..(61): /note="Nucleotide may be methylated to form 5-methylcytosine"
gactggaaatcctaagtaccatcttccttcaacacagctaatccattcttacatgcctgtcgcacaaaagagagcaacaagtcatggtgtgggtgtggccctcatgggagttggtggcagca

SEQ ID NO: 21497 - DNA, 122 bp, Homo sapiens
  misc_feature (61)..(62): /note="This region represents a CpG dinucleotide"
  misc_feature (61)..(61): /note="Nucleotide may be methylated to form 5-methylcytosine"
aaaactgaactttttctattctgttcctgaaaagggcaataatagaaacttgacagacatcgctcttaaaattaaagcaagagataagaatctttatacattatatatacaaggaaaagaaa

SEQ ID NO: 21498 - DNA, 122 bp, Homo sapiens
  misc_feature (61)..(62): /note="This region represents a CpG dinucleotide"
  misc_feature (61)..(61): /note="Nucleotide may be methylated to form 5-methylcytosine"
ctctataccaccgcctgtgctcctgggctgctaacctatgcagcctgggactgtaccgcacgctgcaggcaactgtaacacaggggtaagtatttgtgcatgtaaacacagaaagggtgcca

SEQ ID NO: 21499 - DNA, 122 bp, Homo sapiens
  misc_feature (61)..(62): /note="This region represents a CpG dinucleotide"
  misc_feature (61)..(61): /note="Nucleotide may be methylated to form 5-methylcytosine"
acctagtggggttggtgctcagccagctaatgcttactcagggcaaattatgtgcgaggccgttacaaatgtcaacgcacttcatcctcaccataatcctttgagatagcagctgctgccgc

SEQ ID NO: 21500 - DNA, 122 bp, Homo sapiens
  misc_feature (61)..(62): /note="This region represents a CpG dinucleotide"
  misc_feature (61)..(61): /note="Nucleotide may be methylated to form 5-methylcytosine"
agcttccatttcctcctgtgtaaaagcagactgttaaaaccgctacttcctaaaggctgtcgtgggaattaaagtatgacacatgcttatctcagtgtctagcacagggaagcatcaataaa

SEQ ID NO: 21501 - DNA, 122 bp, Homo sapiens
  misc_feature (61)..(62): /note="This region represents a CpG dinucleotide"
  misc_feature (61)..(61): /note="Nucleotide may be methylated to form 5-methylcytosine"
gtctccgcaggttttaaatcagacgccgctcaggctgtgcccaggctgctgagccaaaagcgggatcagaaccacaaggaggaagaaattactgatggggatgaaagaccgaaataactttt

SEQ ID NO: 21502 - DNA, 122 bp, Homo sapiens
  misc_feature (61)..(62): /note="This region represents a CpG dinucleotide"
  misc_feature (61)..(61): /note="Nucleotide may be methylated to form 5-methylcytosine"
cttttgccaaggtggatgtgttagtctcaggccctcctgggccacactgccaaactcacacggacttctgcattttatgtatttagataagatgtgtgaaaatatatttgaataaaagaagt

SEQ ID NO: 21503 - DNA, 122 bp, Homo sapiens
  misc_feature (61)..(62): /note="This region represents a CpG dinucleotide"
  misc_feature (61)..(61): /note="Nucleotide may be methylated to form 5-methylcytosine"
caatatgttctcgagtaattctgtgaggattattgattggtgctgcagttatccccactccgcagatgtggaaagagagctgcctagagacttggaaactttccctaattttgttatgggaa

SEQ ID NO: 21504 - DNA, 122 bp, Homo sapiens
  misc_feature (61)..(62): /note="This region represents a CpG dinucleotide"
  misc_feature (61)..(61): /note="Nucleotide may be methylated to form 5-methylcytosine"
gatggtgggtgggggtgggttgtgttctgtgtgcaaagagcaataacacccccctttccccgcaagcacacaggagaggactgtcttcccaagggacagctgggggtaggtggccacatccc

SEQ ID NO: 21505 - DNA, 122 bp, Homo sapiens
  misc_feature (61)..(62): /note="This region represents a CpG dinucleotide"
  misc_feature (61)..(61): /note="Nucleotide may be methylated to form 5-methylcytosine"
tttggcaagatggtcagggcagtttttaaacacctcatgtagctgtccagggttcctgagcgcccaagtattaattcacctcatttttgagcaggattcttccttctgtgaaagcaagagaa

SEQ ID NO: 21506 - DNA, 122 bp, Homo sapiens
  misc_feature (61)..(62): /note="This region represents a CpG dinucleotide"
  misc_feature (61)..(61): /note="Nucleotide may be methylated to form 5-methylcytosine"
tcaaatcttactggcagcaaggtcagagtagttaagaacagtagctaacagcatgggctacgttgggtaataaggtagctgtgggactttaggcaaattgttaatcctctctgattctcaat

SEQ ID NO: 21507 - DNA, 122 bp, Homo sapiens
  misc_feature (61)..(62): /note="This region represents a CpG dinucleotide"
  misc_feature (61)..(61): /note="Nucleotide may be methylated to form 5-methylcytosine"
aatgcaaacaaaaggggtgggggttcccagcaggaaggctcacacctgcaggaggccacacgtgagcgtgtgtacatgtgcgtgtgtgcttgtgcagggcgctcccagcctccaggtgatct

SEQ ID NO: 21508 - DNA, 122 bp, Homo sapiens
  misc_feature (61)..(62): /note="This region represents a CpG dinucleotide"
  misc_feature (61)..(61): /note="Nucleotide may be methylated to form 5-methylcytosine"
aaatgcacctcttgtcactaagggttgcaactgtcgccaagtgcttgtccatcagtgtcacgtaaagattttttaacctcacatatggcatcatgcagtttgtctgcctaaaaaggcaacct

SEQ ID NO: 21509 - DNA, 122 bp, Homo sapiens
  misc_feature (61)..(62): /note="This region represents a CpG dinucleotide"
  misc_feature (61)..(61): /note="Nucleotide may be methylated to form 5-methylcytosine"
gaggagtgtaaagggaattagattgtgtgggagtcaagctgggtccaaaaaaaacaggaacgggaatgtttcaagaagggatctgaagagatacaatgagttactaagtgaagaagggaaag

SEQ ID NO: 21510 - DNA, 122 bp, Homo sapiens
  misc_feature (61)..(62): /note="This region represents a CpG dinucleotide"
  misc_feature (61)..(61): /note="Nucleotide may be methylated to form 5-methylcytosine"
agtaggtacagaaataatgggtgacactgcaataacagacatggcacataggggtgcccacgcctccaggcagctttccaggaaacagcttcactgggaactggcaggccttaggagccatg

SEQ ID NO: 21511 - DNA, 122 bp, Homo sapiens
  misc_feature (61)..(62): /note="This region represents a CpG dinucleotide"
  misc_feature (61)..(61): /note="Nucleotide may be methylated to form 5-methylcytosine"
aggaggagcagagctgaagaccgccacgaggcccaggccctggcagtcattcctgtaacacgaatgtcacctgccactgtgcaagaccccaggaggggacaaaatgtaatctcctcccagca

SEQ ID NO: 21512 - DNA, 122 bp, Homo sapiens
  misc_feature (61)..(62): /note="This region represents a CpG dinucleotide"
  misc_feature (61)..(61): /note="Nucleotide may be methylated to form 5-methylcytosine"
aggtcgatgggcacagcaggcactccctgagggtccccgtcccagcgacctcgccgcccgcgcccccaggtcaggcctgagaaatgactgtggccgccagagagagggagcccctgggagcc

SEQ ID NO: 21513 - DNA, 122 bp, Homo sapiens
  misc_feature (61)..(62): /note="This region represents a CpG dinucleotide"
  misc_feature (61)..(61): /note="Nucleotide may be methylated to form 5-methylcytosine"
cgcagatctcattttacagatgagaaaactgaggctcaagatttatagcttaggcaagggcgcctatctagtaagtggtaaaggtatgagtcaaagcccatagtatgaaccatattatgcta

SEQ ID NO: 21514 - DNA, 122 bp, Homo sapiens
  misc_feature (61)..(62): /note="This region represents a CpG dinucleotide"
  misc_feature (61)..(61): /note="Nucleotide may be methylated to form 5-methylcytosine"
ctttacctggctctcttcaggtctgaaagagtcaccatcctggcactcttataagacaatcgtgactcagaggcaaaggctggggagctctgctaggaaataatcatggtataacaaaattc

SEQ ID NO: 21515 - DNA, 122 bp, Homo sapiens
  misc_feature (61)..(62): /note="This region represents a CpG dinucleotide"
  misc_feature (61)..(61): /note="Nucleotide may be methylated to form 5-methylcytosine"
agagaacatgcaggatctacagctttagtttcattgtgaagaccttcctcagactagttccgttccttctgtctattaataatgatgagtccaatctctcttcacccattacctaatgaaac

SEQ ID NO: 21516 - DNA, 122 bp, Homo sapiens
  misc_feature (61)..(62): /note="This region represents a CpG dinucleotide"
  misc_feature (61)..(61): /note="Nucleotide may be methylated to form 5-methylcytosine"
atgtccacaaagacattgaagttctagagaatactacagtaacattcttgacaatgaaaacggaattcatatataggggttcagctgagggtagtataaacaaagtatcaaaccatgttttc

SEQ ID NO: 21517 - DNA, 122 bp, Homo sapiens
  misc_feature (61)..(62): /note="This region represents a CpG dinucleotide"
  misc_feature (61)..(61): /note="Nucleotide may be methylated to form 5-methylcytosine"
cttagttatcagattgaaaaagcatgggaaatataggattcagcactgtgggcagcctcacgcattcactggaggtcttagaacatgtgtgtcacagataaggggggactattgtatcacac

SEQ ID NO: 21518 - DNA, 122 bp, Homo sapiens
  misc_feature (61)..(62): /note="This region represents a CpG dinucleotide"
  misc_feature (61)..(61): /note="Nucleotide may be methylated to form 5-methylcytosine"
taacagtaatgagtcgtaatttattaatgagtagtagtgtattgtacaaatttgtttattcgttctcttgttggtatttggattgtttccagtttgggactattgttaataaacctgtgaat

SEQ ID NO: 21519 - DNA, 122 bp, Homo sapiens
  misc_feature (61)..(62): /note="This region represents a CpG dinucleotide"
  misc_feature (61)..(61): /note="Nucleotide may be methylated to form 5-methylcytosine"
gtcactgcctgatacgtgatagcatctgactccatgttagggcccgaattgtgtccatcccgccaaatccgtatgttgaagccagaaacttcaggacttcagaacttgactattagaaaaaa

SEQ ID NO: 21520 - DNA, 122 bp, Homo sapiens
  misc_feature (61)..(62): /note="This region represents a CpG dinucleotide"
  misc_feature (61)..(61): /note="Nucleotide may be methylated to form 5-methylcytosine"
tgactcaccttccacattaaattgtggctagcctgtgtgactaaaagaatactgagaaagcgacagtgtttgccttctgaggctgggttatgaaagatattgcagctttctccttgttctct

SEQ ID NO: 21521 - DNA, 122 bp, Homo sapiens
  misc_feature (61)..(62): /note="This region represents a CpG dinucleotide"
  misc_feature (61)..(61): /note="Nucleotide may be methylated to form 5-methylcytosine"
cctcatagggacggggcttcggcctggaggcctgaaaacgtcctgaaactagctggaggtcgtggttacgcaacaccatgaatgtctaaacacccccaagctgtgcacctgaaaatgattca

SEQ ID NO: 21522 - DNA, 122 bp, Homo sapiens
  misc_feature (61)..(62): /note="This region represents a CpG dinucleotide"
  misc_feature (61)..(61): /note="Nucleotide may be methylated to form 5-methylcytosine"
ccctaagggcaggaatctcagccattgtactatatcatcagcagctgaaacagctcctggcgcctgggaggactctgaatattttcagcataatgcatgtatgcgtgggtgagcaaatccct

SEQ ID NO: 21523 - DNA, 122 bp, Homo sapiens
  misc_feature (61)..(62): /note="This region represents a CpG dinucleotide"
  misc_feature (61)..(61): /note="Nucleotide may be methylated to form 5-methylcytosine"
agttgcaaagcaggtaggcctagtacacaatccagtttcaacagtcaaccagtcaacccacgtttcccataatgcagaagtgcataatggcctacctaatgtaaataagtctgagcaattag

SEQ ID NO: 21524 - DNA, 122 bp, Homo sapiens
  misc_feature (61)..(62): /note="This region represents a CpG dinucleotide"
  misc_feature (61)..(61): /note="Nucleotide may be methylated to form 5-methylcytosine"
aagtagaaattcttgtttcttaccatagctgtgaagaagacctaacccttaagaaaggtacgtatattaaataaataccttgttctaaaaactaccaattaaaatacaatgattctgcatta

SEQ ID NO: 21525 - DNA, 122 bp, Homo sapiens
  misc_feature (61)..(62): /note="This region represents a CpG dinucleotide"
  misc_feature (61)..(61): /note="Nucleotide may be methylated to form 5-methylcytosine"
gctaaccctcccgttcctcctttcacttcttgccattttcttacaaaactttggttgttccgcatgggtcttgagaggtggggccgttatagtagctgatagcagtgtcacttgggccacgt

SEQ ID NO: 21526 - DNA, 122 bp, Homo sapiens
  misc_feature (61)..(62): /note="This region represents a CpG dinucleotide"
  misc_feature (61)..(61): /note="Nucleotide may be methylated to form 5-methylcytosine"
gagtgaaggaagtctagccaaaggctgcgggccttattggttagggttttgacaccaatgcgaggataggggaaaaaatcatgggacatgcaaggtaggtacgtcttaggtatttatgacat

SEQ ID NO: 21527 - DNA, 122 bp, Homo sapiens
  misc_feature (61)..(62): /note="This region represents a CpG dinucleotide"
  misc_feature (61)..(61): /note="Nucleotide may be methylated to form 5-methylcytosine"
ggtgactgggcttttactattaatgtaaactgcctgggacgcagcccctgccatgggaaacgcagggcacttcctgttctcagcatagagtgacaaggaaatttactcagagcggttactct

SEQ ID NO: 21528 - DNA, 122 bp, Homo sapiens
  misc_feature (61)..(62): /note="This region represents a CpG dinucleotide"
  misc_feature (61)..(61): /note="Nucleotide may be methylated to form 5-methylcytosine"
atgaatagcaagagagccagctcccatggtgccctccgtctcatgaataactaacaagggcgaggttcctggagcccaaactcaggcctcagccacccttcgctccaagctgaagacaagaa

SEQ ID NO: 21529 - DNA, 122 bp, Homo sapiens
  misc_feature (61)..(62): /note="This region represents a CpG dinucleotide"
  misc_feature (61)..(61): /note="Nucleotide may be methylated to form 5-methylcytosine"
ccttgtcactttgggtgaattattgaacctttgtaagctttagtttcctcatctgtaaaacgcagataatagtacttacctcatagagttgttgagaggattaagtgagtaaatgtaagtaa

SEQ ID NO: 21530 - DNA, 122 bp, Homo sapiens
  misc_feature (61)..(62): /note="This region represents a CpG dinucleotide"
  misc_feature (61)..(61): /note="Nucleotide may be methylated to form 5-methylcytosine"
ccccagttagcctgctctaaaagacaaaaacacaaacaaaaaacccacttgactttagcacgtacagtaatgagtttcaaacatgtctgtgtgcaatctacagtaagaaatagatgtcttct

SEQ ID NO: 21531 - DNA, 122 bp, Homo sapiens
  misc_feature (61)..(62): /note="This region represents a CpG dinucleotide"
  misc_feature (61)..(61): /note="Nucleotide may be methylated to form 5-methylcytosine"
ccctagtgctcccctgcactgtttgcatttcagaacaaatgcttcatgtctcttgaaaagcgccaggaaatctcttctctagctatgcaggcctcaattttatgtgtgtagtatgacacacc

SEQ ID NO: 21532 - DNA, 122 bp, Homo sapiens
  misc_feature (61)..(62): /note="This region represents a CpG dinucleotide"
  misc_feature (61)..(61): /note="Nucleotide may be methylated to form 5-methylcytosine"
actcccagtagaaacaccattgtggatacttaggtgactcagtagctatggaagataagacggatcagagaccaggatcaagggagataaatattttcaaagagctttgagttattcaagaa

SEQ ID NO: 21533 - DNA, 122 bp, Homo sapiens
  misc_feature (61)..(62): /note="This region represents a CpG dinucleotide"
  misc_feature (61)..(61): /note="Nucleotide may be methylated to form 5-methylcytosine"
cttgcccaaggccacatgtttgcatggtggtgattacaccacatggccttttgaaactgacgcttttgttcctgaactctctcctctttttaaatcatcattaccacttctctacccaccac

SEQ ID NO: 21534 - DNA, 122 bp, Homo sapiens
  misc_feature (61)..(62): /note="This region represents a CpG dinucleotide"
  misc_feature (61)..(61): /note="Nucleotide may be methylated to form 5-methylcytosine"
caaaactctcaacttccaaaccaaggcttctattacctaataagcactaatgacacaaaacgagtcataatgctgtgacagttaagtagttcaaggtgtaaataaagaaacgctacagcaca

SEQ ID NO: 21535 - DNA, 122 bp, Homo sapiens
  misc_feature (61)..(62): /note="This region represents a CpG dinucleotide"
  misc_feature (61)..(61): /note="Nucleotide may be methylated to form 5-methylcytosine"
agacggcaacattctgagaagagtcaacagtgcccctttgatcaatggacttgggtgagccgggttgagatactggaggaggcaagcggtggggaggaggtgttcgggaaagtgatttccta

SEQ ID NO: 21536 - DNA, 122 bp, Homo sapiens
  misc_feature (61)..(62): /note="This region represents a CpG dinucleotide"
  misc_feature (61)..(61): /note="Nucleotide may be methylated to form 5-methylcytosine"
tgacctcatgatccacctgcctcggcctcccaaaatgttgggattacaggcatgaggcaccgcgcccggctagaagccactttcctaatgtcaggaaggtagaaggtggtagatttaaaggg

SEQ ID NO: 21537 - DNA, 122 bp, Homo sapiens
  misc_feature (61)..(62): /note="This region represents a CpG dinucleotide"
  misc_feature (61)..(61): /note="Nucleotide may be methylated to form 5-methylcytosine"
cctgcttggctgttttgctcacagtgggaacctggtctggggtgattcactatcactcatcgctccacagaaggatggtgcccggtgcacatccccaggatagtgttaaccgtcacctttac

SEQ ID NO: 21538 - DNA, 122 bp, Homo sapiens
  misc_feature (61)..(62): /note="This region represents a CpG dinucleotide"
  misc_feature (61)..(61): /note="Nucleotide may be methylated to form 5-methylcytosine"
ctgccgctgctctgcatccccaattccggcgggcacgggtgcagctccgcgtagtgctcccgaatccccatcgccggccaggccccgcccctactgtccggtttccccgcctgccccggcgg

SEQ ID NO: 21539 - DNA, 122 bp, Homo sapiens
  misc_feature (61)..(62): /note="This region represents a CpG dinucleotide"
  misc_feature (61)..(61): /note="Nucleotide may be methylated to form 5-methylcytosine"
tggggcctcaggttttacagacccttttgggccaggttttactaaaagagccataagaagcgggcccagcccaggcaggagactggagacgaggtcttgcaggcggaactcaggatgctctg

SEQ ID NO: 21540 - DNA, 122 bp, Homo sapiens
  misc_feature (61)..(62): /note="This region represents a CpG dinucleotide"
  misc_feature (61)..(61): /note="Nucleotide may be methylated to form 5-methylcytosine"
ggaagtatactgtttactctttattaccttgaaacaatagggtattcactttttcttccccgtaactcagtttaacagtcttcatttgaaagaaacaaggcagaatacattactagtccttc

SEQ ID NO: 21541 - DNA, 122 bp, Homo sapiens
  misc_feature (61)..(62): /note="This region represents a CpG dinucleotide"
  misc_feature (61)..(61): /note="Nucleotide may be methylated to form 5-methylcytosine"
actacagcccatcttcttcttctagagctaccaagggattaatagcatatcacacctaggcgtgctatggtgggaagcagaatgccaggggaacgtgtacttcattcaagtcattgcaaatt

SEQ ID NO: 21542 - DNA, 122 bp, Homo sapiens
  misc_feature (61)..(62): /note="This region represents a CpG dinucleotide"
  misc_feature (61)..(61): /note="Nucleotide may be methylated to form 5-methylcytosine"
ggaaggtctgattgaggctgggtccctgatgactgtggggccaacacaccagccctggaccgccagcctccaggtcttctaggtgatctaccttatggaagcctgtgatttgtgggtgttcc

SEQ ID NO: 21543 - DNA, 122 bp, Homo sapiens
  misc_feature (61)..(62): /note="This region represents a CpG dinucleotide"
  misc_feature (61)..(61): /note="Nucleotide may be methylated to form 5-methylcytosine"
ggaattttaccaggggcacaagactgggagtgttctagaaggacaaccagtggaaagatacggagatgagaaatatcaaagctgacatgtttctgggattgaaaaggatatagcaaaaacat

SEQ ID NO: 21544 - DNA, 122 bp, Homo sapiens
  misc_feature (61)..(62): /note="This region represents a CpG dinucleotide"
  misc_feature (61)..(61): /note="Nucleotide may be methylated to form 5-methylcytosine"
ggatgacctaggtgtggaaaacataaattctaagatcttgatgtgaaatcatgcttgatacgtttgtgacacagtaagaatgacagtgtgggagaatacgactattgataaagataataagg

SEQ ID NO: 21545 - DNA, 122 bp, Homo sapiens
  misc_feature (61)..(62): /note="This region represents a CpG dinucleotide"
  misc_feature (61)..(61): /note="Nucleotide may be methylated to form 5-methylcytosine"
aacaaggaggaacgggtttgccagcagttctggtgtggcagctgtggcggcaatgccaaccggtttgaaaccaaggaagaatgtgaggcttggtgtgtcccaatacagtaacagtacaagca

SEQ ID NO: 21546 - DNA, 122 bp, Homo sapiens
  misc_feature (61)..(62): /note="This region represents a CpG dinucleotide"
  misc_feature (61)..(61): /note="Nucleotide may be methylated to form 5-methylcytosine"
cacagctgtcccagaaaggtgcccacagcctcctagatctgtcactttctataaaagcctcgtctactcagagtggatatctggttcagaagacaaaaactccttccagctcaggtgttggg

SEQ ID NO: 21547 - DNA, 122 bp, Homo sapiens
  misc_feature (61)..(62): /note="This region represents a CpG dinucleotide"
  misc_feature (61)..(61): /note="Nucleotide may be methylated to form 5-methylcytosine"
tggctttgccacctgctgactgcagagccctaggcacttagcaaacataagtggctggtacgtagtggttacagcaggccttgagcaataactaagtactgtgctggcttcaggtctgactc

SEQ ID NO: 21548 - DNA, 122 bp, Homo sapiens
  misc_feature (61)..(62): /note="This region represents a CpG dinucleotide"
  misc_feature (61)..(61): /note="Nucleotide may be methylated to form 5-methylcytosine"
attcattgtcgttttgttttatttgttgtgttttgtttttgcaactatgggaaactggaacgagcttataggaaaggggaagcaggaggggtcagcaaggagaaataacttggagtctcagt

SEQ ID NO: 21549 - DNA, 122 bp, Homo sapiens
  misc_feature (61)..(62): /note="This region represents a CpG dinucleotide"
  misc_feature (61)..(61): /note="Nucleotide may be methylated to form 5-methylcytosine"
gtctcaactgcagactacaatctaagacactgctgctgactcactgttacacaattaaagcggtttcccaaagtagactcattttctaccacatgaaaatctatcccgaactgttttccaat

SEQ ID NO: 21550 - DNA, 122 bp, Homo sapiens
  misc_feature (61)..(62): /note="This region represents a CpG dinucleotide"
  misc_feature (61)..(61): /note="Nucleotide may be methylated to form 5-methylcytosine"
actcaacaagcagattttatggagaccccagtaaaaccccaaggatggcaataaataaatcgccagccggttctcccatacagctgcctcttccacaagacctcaagcctctgaaggcagag

SEQ ID NO: 21551 - DNA, 122 bp, Homo sapiens
  misc_feature (61)..(62): /note="This region represents a CpG dinucleotide"
  misc_feature (61)..(61): /note="Nucleotide may be methylated to form 5-methylcytosine"
ttttctggcaacttggctaccaatccttatgtcactgccttagcacatttttttttccaacgtgaataatacaggtgaaaagaggaaagaacataacagactttaacatgtacgtaataaga

SEQ ID NO: 21552 - DNA, 122 bp, Homo sapiens
  misc_feature (61)..(62): /note="This region represents a CpG dinucleotide"
  misc_feature (61)..(61): /note="Nucleotide may be methylated to form 5-methylcytosine"
tgatgcaaggagtgccagaactcctttctgttggaggttgcagaaagattcagttcctagcgaatcaatgtctgtgctgctaatggtggcatctaaaatctagtactgtccattattagtaa

SEQ ID NO: 21553 - DNA, 122 bp, Homo sapiens
  misc_feature (61)..(62): /note="This region represents a CpG dinucleotide"
  misc_feature (61)..(61): /note="Nucleotide may be methylated to form 5-methylcytosine"
caaggcagtgtcatattaattctcagttaaccctcctaagtagcctaacaagttaggtggcgtagagattattatctccattttacaaataagaaaactgaggctcagagactagaagcgat

SEQ ID NO: 21554 - DNA, 122 bp, Homo sapiens
  misc_feature (61)..(62): /note="This region represents a CpG dinucleotide"
  misc_feature (61)..(61): /note="Nucleotide may be methylated to form 5-methylcytosine"
acagctcctgggaagttcagtgcctctccctggagacagttgtgggcatctgcatctgcacgggggaaaggtccaaaaaacgatgtggaggagacacgggcaggaaggcaagcggagcaggc

SEQ ID NO: 21555 - DNA, 122 bp, Homo sapiens
  misc_feature (61)..(62): /note="This region represents a CpG dinucleotide"
  misc_feature (61)..(61): /note="Nucleotide may be methylated to form 5-methylcytosine"
aggcatgttgaaagctgaaatagaccgaaagctgagataaactgaaggctgggtctctagcgacagttaaccaagttttgaaagcaaaagaaatgttgttgaagggaatgagaagtgctatt

SEQ ID NO: 21556 - DNA, 122 bp, Homo sapiens
  misc_feature (61)..(62): /note="This region represents a CpG dinucleotide"
  misc_feature (61)..(61): /note="Nucleotide may be methylated to form 5-methylcytosine"
agcctaaagtggcctccttacatattttaggttctgcctaaaagtgtctccatgcatagtcgactgtgacctgactggatgtgtaaaaagactgtaaactacccttgtgtcaatcactgagt

SEQ ID NO: 21557 - DNA, 122 bp, Homo sapiens
  misc_feature (61)..(62): /note="This region represents a CpG dinucleotide"
  misc_feature (61)..(61): /note="Nucleotide may be methylated to form 5-methylcytosine"
atgactgggacatgtacttggttccctcctacgtaggcacccaaatatggggtacgacttcgaatcacgtgcttttgttgtccagtcgtaaatcctgcctgatgacctctagaggtaaactc

SEQ ID NO: 21558 - DNA, 122 bp, Homo sapiens
  misc_feature (61)..(62): /note="This region represents a CpG dinucleotide"
  misc_feature (61)..(61): /note="Nucleotide may be methylated to form 5-methylcytosine"
aggcgtgagccaccgtgcccggcctatctatatataattctatgtattctatctatatagcgatatataatttctatctgtaatgcaaatctacatgtgatttctatctatatatacatgta

SEQ ID NO: 21559 - DNA, 122 bp, Homo sapiens
  misc_feature (61)..(62): /note="This region represents a CpG dinucleotide"
  misc_feature (61)..(61): /note="Nucleotide may be methylated to form 5-methylcytosine"
aaagtgaagttagggccgagccacgtggaatggctaatgctgggcaggcgtccaaggaaccgaccttggagccctgcaggagcgtgggatgagagcctgcttgcaaacaagatcaccgagtt

SEQ ID NO: 21560 - DNA, 122 bp, Homo sapiens
  misc_feature (61)..(62): /note="This region represents a CpG dinucleotide"
  misc_feature (61)..(61): /note="Nucleotide may be methylated to form 5-methylcytosine"
cttgaactcgattaacctcggtgctgccagacctgccttgatggaacacagcacccagggcgcccccacaggcatctctaccttggaatgaggtctggggcttttgtctgaccacagcagag

SEQ ID NO: 21561 - DNA, 122 bp, Homo sapiens
  misc_feature (61)..(62): /note="This region represents a CpG dinucleotide"
  misc_feature (61)..(61): /note="Nucleotide may be methylated to form 5-methylcytosine"
cgtttttatcccatttcttcctgtaggcgtttcaaagtttgcaaaggcagcaaacttttacgtagtgtagttatctgtgcaaagaaattttccaagctgccattgcccccagatggcagaca

SEQ ID NO: 21562 - DNA, 122 bp, Homo sapiens
  misc_feature (61)..(62): /note="This region represents a CpG dinucleotide"
  misc_feature (61)..(61): /note="Nucleotide may be methylated to form 5-methylcytosine"
ttaaccaaaattagtaatgtgcaagacatcatcctaagtactttaggtctatcctcacggcgctcctaccatgcaggtataactgtatcccaaaaaaagaaagtgaggcagagaggagttat

SEQ ID NO: 21563 - DNA, 122 bp, Homo sapiens
  misc_feature (61)..(62): /note="This region represents a CpG dinucleotide"
  misc_feature (61)..(61): /note="Nucleotide may be methylated to form 5-methylcytosine"
tgagtcatccgggagagtgctctgtgatgtgcactgactggccaacccatgaggctgctccgcgggttgctacttggccgatcttggctcactgcaacctccgcctcctgggttcaagccat

SEQ ID NO: 21564 - DNA, 122 bp, Homo sapiens
  misc_feature (61)..(62): /note="This region represents a CpG dinucleotide"
  misc_feature (61)..(61): /note="Nucleotide may be methylated to form 5-methylcytosine"
gttactctttcacttgggattgaatgctagccttgagccagaccgggggcaacaatgacccgtatgacaacggatctaacccctccacaaacttccggaaccttcagtcaccctttcgccta

SEQ ID NO: 21565 - DNA, 122 bp, Homo sapiens
  misc_feature (61)..(62): /note="This region represents a CpG dinucleotide"
  misc_feature (61)..(61): /note="Nucleotide may be methylated to form 5-methylcytosine"
caagctccccacacccgtgctccccgcgcccatctctgctccccatgcccatgctccccacgcccgtcctccctgcagccatgctccccacactcgtgatccccgtgcccatctctgctccc

SEQ ID NO: 21566 - DNA, 122 bp, Homo sapiens
  misc_feature (61)..(62): /note="This region represents a CpG dinucleotide"
  misc_feature (61)..(61): /note="Nucleotide may be methylated to form 5-methylcytosine"
gcttcaggggtggaggaaaaaaatctgcaacttattgttatcctatattcacacaatatacgctgtgtgcctactacaaactggaaaccgttctcagctgtaagatccatcaatgcggagtt

SEQ ID NO: 21567 - DNA, 122 bp, Homo sapiens
  misc_feature (61)..(62): /note="This region represents a CpG dinucleotide"
  misc_feature (61)..(61): /note="Nucleotide may be methylated to form 5-methylcytosine"
ctgaatgcatgggacggagaatagaaggatggttaccagaggctgggaagagttgcaggacgggcatggttaatgggtataaaactatcgttagaataaataagatctagtatttgatagca

SEQ ID NO: 21568 - DNA, 122 bp, Homo sapiens
  misc_feature (61)..(62): /note="This region represents a CpG dinucleotide"
  misc_feature (61)..(61): /note="Nucleotide may be methylated to form 5-methylcytosine"
ccccactgatgccaggtcctggtatcattgctgtctgactactcacacaccatgaggtagcgtccctgcttttttttttttttttttcctgagacagagtctcgctctgtcacccaggctgg

SEQ ID NO: 21569 - DNA, 122 bp, Homo sapiens
  misc_feature (61)..(62): /note="This region represents a CpG dinucleotide"
  misc_feature (61)..(61): /note="Nucleotide may be methylated to form 5-methylcytosine"
tggagatgacactgtagatactgaactttccacagtctgcttagagttaatactgtaccccgccttgtgcagtgtaagaagctggtcactgtcttgcaaccaggtgccttcccggtccttgc

SEQ ID NO: 21570 - DNA, 122 bp, Homo sapiens
  misc_feature (61)..(62): /note="This region represents a CpG dinucleotide"
  misc_feature (61)..(61): /note="Nucleotide may be methylated to form 5-methylcytosine"
acatgctcagagaagtgatgtaacctccttggggtcacacagccggcagtggccagggctcggggcagaaaggggaaaccaatgctcaggaaggggctaggggtgggaaggaagtcagagtc

SEQ ID NO: 21571 - DNA, 122 bp, Homo sapiens
  misc_feature (61)..(62): /note="This region represents a CpG dinucleotide"
  misc_feature (61)..(61): /note="Nucleotide may be methylated to form 5-methylcytosine"
ttccagttacataggccaatacatttcctttttggttaaactcatttgagttggcttttccgttagttgccgctgaaagcacgctaccagatacagtaagcattataatccctacttttaca

SEQ ID NO: 21572 - DNA, 122 bp, Homo sapiens
  misc_feature (61)..(62): /note="This region represents a CpG dinucleotide"
  misc_feature (61)..(61): /note="Nucleotide may be methylated to form 5-methylcytosine"
ttgggaccccactccccactaacagcgccacagaaagagaagtgacagcacccggggccacgaccctcagtggagctctggtcacagttagcaggaatccccttgaagaaacctcagccctc

SEQ ID NO: 21573 - DNA, 122 bp, Homo sapiens
  misc_feature (61)..(62): /note="This region represents a CpG dinucleotide"
  misc_feature (61)..(61): /note="Nucleotide may be methylated to form 5-methylcytosine"
tctggattattcatctgaaggctcagctgggtctacaggatcctcatacagtgaatgcaccgttgagctggcaaattggtgctggtattgctttggacctcacctcatgccacggaggctac

SEQ ID NO: 21574 - DNA, 122 bp, Homo sapiens
  misc_feature (61)..(62): /note="This region represents a CpG dinucleotide"
  misc_feature (61)..(61): /note="Nucleotide may be methylated to form 5-methylcytosine"
atttgtcattcaacaggagagttttaatccatgtaatctctctgagtctctgttttaccacggataagatggggataatactatctagcatcttgaagaactatttgaggattagaagtaat

SEQ ID NO: 21575 - DNA, 122 bp, Homo sapiens
  misc_feature (61)..(62): /note="This region represents a CpG dinucleotide"
  misc_feature (61)..(61): /note="Nucleotide may be methylated to form 5-methylcytosine"
gggcagagagttgagccatccatctgtgtcagccagcaaaggggcctcctccgtgctccacggtatcactagcaccaccaccacgctgggaaccacgtgaagaacctggatttccggcctgt

SEQ ID NO: 21576 - DNA, 122 bp, Homo sapiens
  misc_feature (61)..(62): /note="This region represents a CpG dinucleotide"
  misc_feature (61)..(61): /note="Nucleotide may be methylated to form 5-methylcytosine"
cactgaagaattgaagagaatagggagatcagagatggcttgcttatttaggcaaggcttcgaggaatcagaacagactataaaagggctgtgctgatagagaacgtgtgtgtgtgtgtgtg

SEQ ID NO: 21577 - DNA, 122 bp, Homo sapiens
  misc_feature (61)..(62): /note="This region represents a CpG dinucleotide"
  misc_feature (61)..(61): /note="Nucleotide may be methylated to form 5-methylcytosine"
gcccacgggtcgtcgggtggcctgcgcggggaaagcaagtcgccgtgcaggtccctagggcggtgttcgccccgcggctggagctgcaggccgggcggaggcgggaggtcgcccggggagaa

SEQ ID NO: 21578 - DNA, 122 bp, Homo sapiens
  misc_feature (61)..(62): /note="This region represents a CpG dinucleotide"
  misc_feature (61)..(61): /note="Nucleotide may be methylated to form 5-methylcytosine"
gaaaaggagccagacagcagctctgcacctgcagaaagtggctgcactgccccataggaccgatttagcctcagtcagcccgtcacagcctggctcccattcccttggcaacctgagctctg

SEQ ID NO: 21579 - DNA, 122 bp, Homo sapiens
  misc_feature (61)..(62): /note="This region represents a CpG dinucleotide"
  misc_feature (61)..(61): /note="Nucleotide may be methylated to form 5-methylcytosine"
ctccacatccttgcaaatacttgtaattgttcatctttttattccagccatcccagtggccgtgaggaggtatctcattgtgtgtgggtgttttctttttgagacagaatttcactcttgtc

SEQ ID NO: 21580 - DNA, 122 bp, Homo sapiens
  misc_feature (61)..(62): /note="This region represents a CpG dinucleotide"
  misc_feature (61)..(61): /note="Nucleotide may be methylated to form 5-methylcytosine"
caaaagcttatgttactcatccttttattttgtaaggggaggaaatggagatccagtgtgcgttaatttgttggcctaagattacacagctactaaatggcagagccaggatccggtttttc

SEQ ID NO: 21581 - DNA, 122 bp, Homo sapiens
  misc_feature (61)..(62): /note="This region represents a CpG dinucleotide"
  misc_feature (61)..(61): /note="Nucleotide may be methylated to form 5-methylcytosine"
ggcataacagacacatgatataagacaattaatgtgatttctcaaggaagatactccagccgtgaatcattattatctaagtaaatgggaatttaatgacttttcggacaaggaactcgaaa

SEQ ID NO: 21582 - DNA, 122 bp, Homo sapiens
  misc_feature (61)..(62): /note="This region represents a CpG dinucleotide"
  misc_feature (61)..(61): /note="Nucleotide may be methylated to form 5-methylcytosine"
acaaagtttggggaggatgaggcttcaccacactagatatccacacttattataaagctacggtaaataagacagtgtaatattgacatagggataggcaaataacacaagaacaggctcac

SEQ ID NO: 21583 - DNA, 122 bp, Homo sapiens
  misc_feature (61)..(62): /note="This region represents a CpG dinucleotide"
  misc_feature (61)..(61): /note="Nucleotide may be methylated to form 5-methylcytosine"
acacattgggcagaaaatgcatttgcttagtccttccagtgtgacagttttaaatatccccgggcaacaaccacacaaaggcttctggctcatctgtgacccaacaacatgcaaaaacaaaa

SEQ ID NO: 21584 - DNA, 122 bp, Homo sapiens
  misc_feature (61)..(62): /note="This region represents a CpG dinucleotide"
  misc_feature (61)..(61): /note="Nucleotide may be methylated to form 5-methylcytosine"
tggggatggttggttcagtacccaacatcctgacagcacatctgaccatgtatattgtatcggagaccacatcctcagctcagaaaaagagctgaactcatttcaaatagaaagcacactgc

SEQ ID NO: 21585 - DNA, 122 bp, Homo sapiens
  misc_feature (61)..(62): /note="This region represents a CpG dinucleotide"
  misc_feature (61)..(61): /note="Nucleotide may be methylated to form 5-methylcytosine"
agggagaatatttcctttgatgtgtttctgatgtccactatatgaaagacaccttctagtcgttgtaaggatgcaaggataaataactgatctttaccgtttaggcgtctatggagtaggac

SEQ ID NO: 21586 - DNA, 122 bp, Homo sapiens
  misc_feature (61)..(62): /note="This region represents a CpG dinucleotide"
  misc_feature (61)..(61): /note="Nucleotide may be methylated to form 5-methylcytosine"
tgattcgcctgcctcagctacccaaagtgctgggatgccctagagatgttttcttgttatcgcaactgggagagggaagtatgtgcttctggcatctagccagggatgttactaaatatccc

SEQ ID NO: 21587 - DNA, 122 bp, Homo sapiens
  misc_feature (61)..(62): /note="This region represents a CpG dinucleotide"
  misc_feature (61)..(61): /note="Nucleotide may be methylated to form 5-methylcytosine"
cagctcaactgactaagccagttaggaatctacaccccaggggtgattaattaacattcacgcagaagggtcacacctcaggacacctgctgctagctcttctgttttccatatcactgacc

SEQ ID NO: 21588 - DNA, 122 bp, Homo sapiens
  misc_feature (61)..(62): /note="This region represents a CpG dinucleotide"
  misc_feature (61)..(61): /note="Nucleotide may be methylated to form 5-methylcytosine"
aaccattttcaaatcagaagggataaacaaataacttcaggagattactgaaggtccaaacgagaccataagggacagtaagctgctttaaataagtatgcatatccagacccagaagaatt

SEQ ID NO: 21589 - DNA, 122 bp, Homo sapiens
  misc_feature (61)..(62): /note="This region represents a CpG dinucleotide"
  misc_feature (61)..(61): /note="Nucleotide may be methylated to form 5-methylcytosine"
caacagttctagggcctggctattcctctctcccagaggggcaggggaggcttgggctggcggggcatccccatcccggactaagccccagagctgagtcagtcactcatcccacagccttg

SEQ ID NO: 21590 - DNA, 122 bp, Homo sapiens
  misc_feature (61)..(62): /note="This region represents a CpG dinucleotide"
  misc_feature (61)..(61): /note="Nucleotide may be methylated to form 5-methylcytosine"
gcaaaatcaagtccatcgaagccaaaagatgcacagtggccacgtctctcctgcctgccacggattttacatgcctggtgaccccggagcagcagaggctataaatttttttacacgtggcc

SEQ ID NO: 21591 - DNA, 122 bp, Homo sapiens
  misc_feature (61)..(62): /note="This region represents a CpG dinucleotide"
  misc_feature (61)..(61): /note="Nucleotide may be methylated to form 5-methylcytosine"
aaggtgtctaatttgtcagtatacagaaaaaagtaaacatagcaggtttgaactactatccgtcgaaaggcctgcttacaatcttggcccttgggtggcatctgggaacatgggtttgggga

SEQ ID NO: 21592 - DNA, 122 bp, Homo sapiens
  misc_feature (61)..(62): /note="This region represents a CpG dinucleotide"
  misc_feature (61)..(61): /note="Nucleotide may be methylated to form 5-methylcytosine"
ctcatatgtcaccttccttatgactaacaatgacatttaaaactgcactacctggcccggcgtggtggctcatgcctgtaatcccaacactttgggaggctgaggcgggcggatgcctgagc

SEQ ID NO: 21593 - DNA, 122 bp, Homo sapiens
  misc_feature (61)..(62): /note="This region represents a CpG dinucleotide"
  misc_feature (61)..(61): /note="Nucleotide may be methylated to form 5-methylcytosine"
tacttatgttcttacattgactggttactcaccagctcttcagaacaattgtggctgaaacgtggcagctggcagacttctacgtatatgaagttaatccatggggcataagagcacagtgg

SEQ ID NO: 21594 - DNA, 122 bp, Homo sapiens
  misc_feature (61)..(62): /note="This region represents a CpG dinucleotide"
  misc_feature (61)..(61): /note="Nucleotide may be methylated to form 5-methylcytosine"
acctcggggatatgtcctgcaccagacagaggcgtgtctcagtgcattgggtcagcacagcgatcccgcaggagggtgttgctggcctcaagacaagaaaaataacccttaggagaggtaag

SEQ ID NO: 21595 - DNA, 122 bp, Homo sapiens
  misc_feature (61)..(62): /note="This region represents a CpG dinucleotide"
  misc_feature (61)..(61): /note="Nucleotide may be methylated to form 5-methylcytosine"
tttcctttcactagtggctatctcacttttttgttggtttgttttgctatatttacagcacgggataggttggttttatttttccattgcacacaatagcatttaatatttagcatttcatc

SEQ ID NO: 21596 - DNA, 122 bp, Homo sapiens
  misc_feature (61)..(62): /note="This region represents a CpG dinucleotide"
  misc_feature (61)..(61): /note="Nucleotide may be methylated to form 5-methylcytosine"
tttgctgtcgcagaacctgccaggaaaggcgcacacaggatgttttagggcccaattcaccgcaggctcctggagagcccccagtgaagaaatgagtctcactgaggtcaaatgttgcccca

SEQ ID NO: 21597 - DNA, 122 bp, Homo sapiens
  misc_feature (61)..(62): /note="This region represents a CpG dinucleotide"
  misc_feature (61)..(61): /note="Nucleotide may be methylated to form 5-methylcytosine"
gtggtcataattagtcactgctcatttgtgtcatcagtcatcccagttgttttgacacaacgtaacctttggtcatagctttctttcactcttctggttttcacatatgactttgtttagag

SEQ ID NO: 21598 - DNA, 122 bp, Homo sapiens
  misc_feature (61)..(62): /note="This region represents a CpG dinucleotide"
  misc_feature (61)..(61): /note="Nucleotide may be methylated to form 5-methylcytosine"
taagtgtttaccccttcgaatttttgttggaaaactacgagggtaggtatttcagtgcatcgtctataaaacatattaaacttaatgtacgacttaagggtgtcttggaaatgccatgtatg

SEQ ID NO: 21599 - DNA, 122 bp, Homo sapiens
  misc_feature (61)..(62): /note="This region represents a CpG dinucleotide"
  misc_feature (61)..(61): /note="Nucleotide may be methylated to form 5-methylcytosine"
catggcatctgctcctcagtttcatacacacagtctagggcttactcctttcactgtctacgtgtctcttcttcatctcatttccttagtcaatctacacatgaatgattacctaaaccact

SEQ ID NO: 21600 - DNA, 122 bp, Homo sapiens
  misc_feature (61)..(62): /note="This region represents a CpG dinucleotide"
  misc_feature (61)..(61): /note="Nucleotide may be methylated to form 5-methylcytosine"
gcaagtttttgtacttctttgtgtttgaaattgatacaggagatagaaagaaattatttacgcagataatgagggcaaaagaatccttggtggaatgtcccttgtaacaaaaagcagcccaa

SEQ ID NO: 21601 - DNA, 122 bp, Homo sapiens
  misc_feature (61)..(62): /note="This region represents a CpG dinucleotide"
  misc_feature (61)..(61): /note="Nucleotide may be methylated to form 5-methylcytosine"
ggcaggccagcctcatgctttagacatccttgctcttagcaaatctttcgtgttctgctacgtcagcctctgtgtgacacccattggaccttctctctgtagcacaattgcataccttgctc

SEQ ID NO: 21602 - DNA, 122 bp, Homo sapiens
  misc_feature (61)..(62): /note="This region represents a CpG dinucleotide"
  misc_feature (61)..(61): /note="Nucleotide may be methylated to form 5-methylcytosine"
cctgatgagagtcccaatcagcaccttcagcgcattactcaatgatgtgctcagagcctgcgtgagctcccgccgcacaaacatcctatcccatctcagcccttctatcgcatccccagtgc

SEQ ID NO: 21603 - DNA, 122 bp, Homo sapiens
  misc_feature (61)..(62): /note="This region represents a CpG dinucleotide"
  misc_feature (61)..(61): /note="Nucleotide may be methylated to form 5-methylcytosine"
tctaatatgcattccagtggttaaagaacaggaaataatcctgaaatcaaagcttggagacgggttatttgcccttgagttccaggactcctgtgtgtttggaattgttttacataaatcca

SEQ ID NO: 21604 - DNA, 122 bp, Homo sapiens
  misc_feature (61)..(62): /note="This region represents a CpG dinucleotide"
  misc_feature (61)..(61): /note="Nucleotide may be methylated to form 5-methylcytosine"
gggaaaagaaagagtctaaaattgatcctgggtgactgagataatagaaaagtcacaaggcgtaggtttccagggaagatgagtttttagcctatttgttagtctcatgggatgagtgaaga

SEQ ID NO: 21605 - DNA, 122 bp, Homo sapiens
  misc_feature (61)..(62): /note="This region represents a CpG dinucleotide"
  misc_feature (61)..(61): /note="Nucleotide may be methylated to form 5-methylcytosine"
tcttcattattttccattactcttggaatgaaagtcaaactttttacccagggccagagccggtcccacctaccttggtaaccacacctcccgtgctctctgcctccctcactaagctccag

SEQ ID NO: 21606 - DNA, 122 bp, Homo sapiens
  misc_feature (61)..(62): /note="This region represents a CpG dinucleotide"
  misc_feature (61)..(61): /note="Nucleotide may be methylated to form 5-methylcytosine"
ctcaaacaaccctcccaccttggcctctcaaagtgctgggattacaggcatgagtcactacgcccagccacaaattcttgagaagggaggaaatacacaaattgatttaatgtgtgataaaa

SEQ ID NO: 21607 - DNA, 122 bp, Homo sapiens
  misc_feature (61)..(62): /note="This region represents a CpG dinucleotide"
  misc_feature (61)..(61): /note="Nucleotide may be methylated to form 5-methylcytosine"
cttagctctggcttagctagctgtgccccagaagagctgggtcctcagggagtcttcttgcggcccggtttggatgttcctaagcatagaagactctgccagtgtgtccctcattcgtttca

SEQ ID NO: 21608 - DNA, 122 bp, Homo sapiens
  misc_feature (61)..(62): /note="This region represents a CpG dinucleotide"
  misc_feature (61)..(61): /note="Nucleotide may be methylated to form 5-methylcytosine"
attagaaataatgtgtgccaactagatggcacatagttggcattcagtgaaagcagccatcgcttggttgagctaggagggaaaataatgacttgcaataattttggaacagcaactgaaga

SEQ ID NO: 21609 - DNA, 122 bp, Homo sapiens
  misc_feature (61)..(62): /note="This region represents a CpG dinucleotide"
  misc_feature (61)..(61): /note="Nucleotide may be methylated to form 5-methylcytosine"
tggctggcgagcaatcatcaggggctaggttgaagctagtcttgcccacctggaagttgccggcctccattacaggagcaaggacaaacagcagtgtagcactgcagcggatccaattctgc

SEQ ID NO: 21610 - DNA, 122 bp, Homo sapiens
  misc_feature (61)..(62): /note="This region represents a CpG dinucleotide"
  misc_feature (61)..(61): /note="Nucleotide may be methylated to form 5-methylcytosine"
ttagtccggagtgcacagtaacatgcaaagaacattgcagtaaataaggagcatatggaccggtattcagcttctcagcacagcgcaagccccacacacacgatcctgggcatgtgctacta

SEQ ID NO: 21611 - DNA, 122 bp, Homo sapiens
  misc_feature (61)..(62): /note="This region represents a CpG dinucleotide"
  misc_feature (61)..(61): /note="Nucleotide may be methylated to form 5-methylcytosine"
ctggggtgagccacagaatctttgcaagatccagtggccttacctactgcatggagttatcgtgaaaacctccactaagggagttggcctcttggcagtgcattctcttactctgtgatcta

SEQ ID NO: 21612 - DNA, 122 bp, Homo sapiens
  misc_feature (61)..(62): /note="This region represents a CpG dinucleotide"
  misc_feature (61)..(61): /note="Nucleotide may be methylated to form 5-methylcytosine"
agaaaatgaatgacaggattgttagagaccaggcatttcctttacagggtgctgtggctgcgacaggcatgtggtgttatctaaacactgaactcaaaaacaatgagaggctttcaatccaa

SEQ ID NO: 21613 - DNA, 122 bp, Homo sapiens
  misc_feature (61)..(62): /note="This region represents a CpG dinucleotide"
  misc_feature (61)..(61): /note="Nucleotide may be methylated to form 5-methylcytosine"
gattggagatcctttccttaccctgaatgccacatttctaatcaggatagcctgatagtgcgttaacttttacagggccttgtcacactgagtcattgagcttgtgggcaacccaatccctt

SEQ ID NO: 21614 - DNA, 122 bp, Homo sapiens
  misc_feature (61)..(62): /note="This region represents a CpG dinucleotide"
  misc_feature (61)..(61): /note="Nucleotide may be methylated to form 5-methylcytosine"
atataatacataatcaaatatctgcttattcatgtttcctgtgtaaatatttatacaccacgtaggtcggacttgaaaagcgaggaagtgaatgaatcattatatttcactttcaaggaaag

SEQ ID NO: 21615 - DNA, 122 bp, Homo sapiens
  misc_feature (61)..(62): /note="This region represents a CpG dinucleotide"
  misc_feature (61)..(61): /note="Nucleotide may be methylated to form 5-methylcytosine"
ccatcactgaaagcactgctcatgaatagtccatttcctcttccagaattggccaaatcacgccattgttgacagcccagctaggcagcgcctgatgacatttttggccctggaaatgacag

SEQ ID NO: 21616 - DNA, 122 bp, Homo sapiens
  misc_feature (61)..(62): /note="This region represents a CpG dinucleotide"
  misc_feature (61)..(61): /note="Nucleotide may be methylated to form 5-methylcytosine"
ttagtggaaggaaatatcacccaaggactgcaatactataggtgcgtctgtgattagtcacggagcatatttgagtactgagacctaattgcaggcctaaggtcaaggaatacagggttgta

SEQ ID NO: 21617 - DNA, 122 bp, Homo sapiens
  misc_feature (61)..(62): /note="This region represents a CpG dinucleotide"
  misc_feature (61)..(61): /note="Nucleotide may be methylated to form 5-methylcytosine"
catacaagtcactctggttagagtaagcaaggaattagatatctacaaaatatttgaaagcgttgaggaagcagtttctagactgagcctccagagatatctcccagaattataccatagaa

SEQ ID NO: 21618 - DNA, 122 bp, Homo sapiens
  misc_feature (61)..(62): /note="This region represents a CpG dinucleotide"
  misc_feature (61)..(61): /note="Nucleotide may be methylated to form 5-methylcytosine"
ttagatcacgcgagccatgctcaggggcttagagctgagcctgaaaccagaggacaaccacggaatgattcgaatcagaggagggacataatccatttcagcaagatggctcaggcacaagt

SEQ ID NO: 21619 - DNA, 122 bp, Homo sapiens
  misc_feature (61)..(62): /note="This region represents a CpG dinucleotide"
  misc_feature (61)..(61): /note="Nucleotide may be methylated to form 5-methylcytosine"
tatttcagctgcaggtctgatctccataacagaagcacacctgaaaaatactgccttagccgctgaattttgatagagcaattctatattcctggtaacttcctctgtaattaatcgtcaat

SEQ ID NO: 21620 - DNA, 122 bp, Homo sapiens
  misc_feature (61)..(62): /note="This region represents a CpG dinucleotide"
  misc_feature (61)..(61): /note="Nucleotide may be methylated to form 5-methylcytosine"
gactaagaacaatagcccagtgaatacttagagcagtgttctcaaggaatcctgcagaggcggcttctgaaaagccaaggtagtatctgcctgctgaaggtgttctcaggatttcatttgct

SEQ ID NO: 21621 - DNA, 122 bp, Homo sapiens
  misc_feature (61)..(62): /note="This region represents a CpG dinucleotide"
  misc_feature (61)..(61): /note="Nucleotide may be methylated to form 5-methylcytosine"
agctagcactctgtcactgttagtaggtgtccggcagccaaaccattttgctctgtgctccgctggcaaggacttgcggcatcgattgctcaggatgcaggcagcctgcagcaaggtgtgtc

SEQ ID NO: 21622 - DNA, 122 bp, Homo sapiens
  misc_feature (61)..(62): /note="This region represents a CpG dinucleotide"
  misc_feature (61)..(61): /note="Nucleotide may be methylated to form 5-methylcytosine"
atccatgatgcagagataattgaagagaagtgcaaagggaaatgcagccccctggtaaaacgatataggatggagaaagaacagccaaagccactccattaggaaccagaacaaaagagcct

SEQ ID NO: 21623 - DNA, 122 bp, Homo sapiens
  misc_feature (61)..(62): /note="This region represents a CpG dinucleotide"
  misc_feature (61)..(61): /note="Nucleotide may be methylated to form 5-methylcytosine"
ctaattggcaaggaaaatcttcaggaccttatgaacaactttttgtaaagtcatgcacttcggcctctgttgttttcattgtgacttttaatgtactcactgactcaaggttcaagcaattt

SEQ ID NO: 21624 - DNA, 122 bp, Homo sapiens
  misc_feature (61)..(62): /note="This region represents a CpG dinucleotide"
  misc_feature (61)..(61): /note="Nucleotide may be methylated to form 5-methylcytosine"
tatcactggtgtgaccagctcctccagaggtacctaaggtgatctcatagcaaagacccacgccctggacccatcctgctagtgatgaatctgaaggttctgaaggttctgtgcataaccat

SEQ ID NO: 21625 - DNA, 122 bp, Homo sapiens
  misc_feature (61)..(62): /note="This region represents a CpG dinucleotide"
  misc_feature (61)..(61): /note="Nucleotide may be methylated to form 5-methylcytosine"
ccccacttcccattcaaggagactaaggcagagagatcaaataacttgcacaaggccacacgaatagtaagtggcagatgcaagagctaaatccagtagtctgagtctgaagctcacaagtt

SEQ ID NO: 21626 - DNA, 122 bp, Homo sapiens
  misc_feature (61)..(62): /note="This region represents a CpG dinucleotide"
  misc_feature (61)..(61): /note="Nucleotide may be methylated to form 5-methylcytosine"
cttgatgagagaagatgaaatacaaacaggcaaaaccttctccctaatgcttctagtgaacgaacacaccactgcacctcttccaccgctcttgccaaacctctagcccctctgacagggaa

SEQ ID NO: 21627 - DNA, 122 bp, Homo sapiens
  misc_feature (61)..(62): /note="This region represents a CpG dinucleotide"
  misc_feature (61)..(61): /note="Nucleotide may be methylated to form 5-methylcytosine"
accagcctggccaacatggtgaaacctcgtctctactaaaaatacaaaaaattagctgggcgtggtggtgatcacctgtaatctcaggaggctgaggcacgaaaatcacttgaagctgggag

SEQ ID NO: 21628 - DNA, 122 bp, Homo sapiens
  misc_feature (61)..(62): /note="This region represents a CpG dinucleotide"
  misc_feature (61)..(61): /note="Nucleotide may be methylated to form 5-methylcytosine"
tatgtgttcaatccattcaaattagacaaatacttatggagtgctactatgtgccagccacgttctaggatctgctgactcagcagtgaactaaacagacaaaaatccctgctttcgtggag

SEQ ID NO: 21629 - DNA, 122 bp, Homo sapiens
  misc_feature (61)..(62): /note="This region represents a CpG dinucleotide"
  misc_feature (61)..(61): /note="Nucleotide may be methylated to form 5-methylcytosine"
gattctgttcagcagtgtacagaattggagccatagtagaaggaggtggagattggagagcgcctagctcagcacccttggcgactagttgtagccctgactccttggagtgatctgtatgt

SEQ ID NO: 21630 - DNA, 122 bp, Homo sapiens
  misc_feature (61)..(62): /note="This region represents a CpG dinucleotide"
  misc_feature (61)..(61): /note="Nucleotide may be methylated to form 5-methylcytosine"
gctgcagccacccaatcttgtgatgtgtgtccttcaatggacagggagaccatcacactccgcttgggtttttttcttcattgtgatgcaatccagagagttcttcctgccaggaagggtaa

SEQ ID NO: 21631 - DNA, 122 bp, Homo sapiens
  misc_feature (61)..(62): /note="This region represents a CpG dinucleotide"
  misc_feature (61)..(61): /note="Nucleotide may be methylated to form 5-methylcytosine"
cttagtacatgcggaagatgagaacagtggacaacggctttgctaagccctgaattgttccgaagtttgaagttgtaacccatgagctacctcttttacaaaaacagtcaaaactggatgtt

SEQ ID NO: 21632 - DNA, 122 bp, Homo sapiens
  misc_feature (61)..(62): /note="This region represents a CpG dinucleotide"
  misc_feature (61)..(61): /note="Nucleotide may be methylated to form 5-methylcytosine"
cccaaacctgctactgagtcagcatctccataggtacggctggaactggtcaacataatccgtaattatctcatattctgaaatatattctatcaaaataagtttcttttcctttctttttt

SEQ ID NO: 21633 - DNA, 122 bp, Homo sapiens
  misc_feature (61)..(62): /note="This region represents a CpG dinucleotide"
  misc_feature (61)..(61): /note="Nucleotide may be methylated to form 5-methylcytosine"
cactggcaggtggggctgcagctgcgagagggggcgggcctgggaaccaccgcgggtgtgcgggccttgccattctcaagattcctgcggaaacgctgtgcgctggctgcgctccaggagca

SEQ ID NO: 21634 - DNA, 122 bp, Homo sapiens
  misc_feature (61)..(62): /note="This region represents a CpG dinucleotide"
  misc_feature (61)..(61): /note="Nucleotide may be methylated to form 5-methylcytosine"
gctatgtggcccagatgggacaggctccaggataaccccaggacagcgggtagtatgccacgctgcttttcagctcacccatgcatttatccacaagaacacatcatgagctttctttgcgc

SEQ ID NO: 21635 - DNA, 122 bp, Homo sapiens
  misc_feature (61)..(62): /note="This region represents a CpG dinucleotide"
  misc_feature (61)..(61): /note="Nucleotide may be methylated to form 5-methylcytosine"
ttaaaacttgctgaattcaggtacatctcgattgctcgtggtaataaaggagacattaggcgtggataacaagaccgcaaatggtgagtaaagcaagacaccaggtatcatttctttcctgt

SEQ ID NO: 21636 - DNA, 122 bp, Homo sapiens
  misc_feature (61)..(62): /note="This region represents a CpG dinucleotide"
  misc_feature (61)..(61): /note="Nucleotide may be methylated to form 5-methylcytosine"
ccgcgcccgcccacatctcttcttacaggtcaactggctttccttgacacccagttacttcgttcttcaggtgttgcaaaactcatcagcaagcacctaggcaattactgttcaaaatatct

SEQ ID NO: 21637 - DNA, 122 bp, Homo sapiens
  misc_feature (61)..(62): /note="This region represents a CpG dinucleotide"
  misc_feature (61)..(61): /note="Nucleotide may be methylated to form 5-methylcytosine"
ccgcgccccttcagggagcgggatcccaaatacagtgagaaggactcgcagcagcgggagcgcgagcgagcgcgtcggagacgtcggtcctactcgcctatgagaaagcgccggagagactc

SEQ ID NO: 21638 - DNA, 122 bp, Homo sapiens
  misc_feature (61)..(62): /note="This region represents a CpG dinucleotide"
  misc_feature (61)..(61): /note="Nucleotide may be methylated to form 5-methylcytosine"
ctgctggaggctgcccaggatcttctcacccaagagatgaatcagccgagtcaccacctgcgggcagacacaggagccaagagccacacgttttaaactgagaaacactgggaaccaaagac

SEQ ID NO: 21639 - DNA, 122 bp, Homo sapiens
  misc_feature (61)..(62): /note="This region represents a CpG dinucleotide"
  misc_feature (61)..(61): /note="Nucleotide may be methylated to form 5-methylcytosine"
tcctgtgggactgagcgcttaacctgtgtggcaactgtgctaacttcaggcaattagtaacgaaattgaattgcattgtaggacattcagctggtgtcagggaattgctattggaatgatgt

SEQ ID NO: 21640 - DNA, 122 bp, Homo sapiens
  misc_feature (61)..(62): /note="This region represents a CpG dinucleotide"
  misc_feature (61)..(61): /note="Nucleotide may be methylated to form 5-methylcytosine"
aaggacaagttgctatgactagtcaacttttcatgggacaggccagcagaaagtcatcgccgctggctgcccaaggtacctcaaatgactcatgcaagtcctttagatctctgtgtatctct

SEQ ID NO: 21641 - DNA, 122 bp, Homo sapiens
  misc_feature (61)..(62): /note="This region represents a CpG dinucleotide"
  misc_feature (61)..(61): /note="Nucleotide may be methylated to form 5-methylcytosine"
gttttaagtcctatatcttgacatcccgagtataaatgcgggtaccagacacagtacaaacgttctcaaagcccagttacgtattccaaaccaaacgcgggctcttgaagggtgatgaggta

SEQ ID NO: 21642 - DNA, 122 bp, Homo sapiens
  misc_feature (61)..(62): /note="This region represents a CpG dinucleotide"
  misc_feature (61)..(61): /note="Nucleotide may be methylated to form 5-methylcytosine"
tgtgggaaggaagcaggaagaccagctggaaggagtgagagagaccctctggtaggaagacgtcacctgaggtgacacagcaaagcccggccaggtaacatagtgtctaatctccgccgtga

SEQ ID NO: 21643 - DNA, 122 bp, Homo sapiens
  misc_feature (61)..(62): /note="This region represents a CpG dinucleotide"
  misc_feature (61)..(61): /note="Nucleotide may be methylated to form 5-methylcytosine"
gtgcaccaccagaaagttcactgacccttcacaagcaggggtcataggtccatttcccagcgtcatcaggaatcactccaggctgtgcactgacccagctcagggagcagtggccagcgatg

SEQ ID NO: 21644 - DNA, 122 bp, Homo sapiens
  misc_feature (61)..(62): /note="This region represents a CpG dinucleotide"
  misc_feature (61)..(61): /note="Nucleotide may be methylated to form 5-methylcytosine"
tgacaaaattgcctaatgatgcctttctcagaacggcattattcctgtcgttaagcaacacgtggctgtatcatataagttcttgactgtggcttgagtcttttgggcaatgtccagttggg

SEQ ID NO: 21645 - DNA, 122 bp, Homo sapiens
  misc_feature (61)..(62): /note="This region represents a CpG dinucleotide"
  misc_feature (61)..(61): /note="Nucleotide may be methylated to form 5-methylcytosine"
atagcatttggctagcttgttcttcagctcttctgacatggatgacacagcaacaaggcccgtgtcagatcaaatgccagtgccttgatctcagacttctcagcttccagattgtgagaaat

SEQ ID NO: 21646 - DNA, 122 bp, Homo sapiens
  misc_feature (61)..(62): /note="This region represents a CpG dinucleotide"
  misc_feature (61)..(61): /note="Nucleotide may be methylated to form 5-methylcytosine"
cacaagccatccccctccttcaactggaagtcaccccaaccctttcacttcccttgcttacggcacctgcccagaccacagccacagctgggctcaggtttcaattcttgtttcctccacac

SEQ ID NO: 21647 - DNA, 122 bp, Homo sapiens
  misc_feature (61)..(62): /note="This region represents a CpG dinucleotide"
  misc_feature (61)..(61): /note="Nucleotide may be methylated to form 5-methylcytosine"
ctcaggtgatccgcccgccttggcctcccaaagtactgggattacaggcgtgagtcaccacgcccgtcccattgtgtgttttaaggcagcaacaggggagcattaaaccaagcatgaggccc

SEQ ID NO: 21648 - DNA, 122 bp, Homo sapiens
  misc_feature (61)..(62): /note="This region represents a CpG dinucleotide"
  misc_feature (61)..(61): /note="Nucleotide may be methylated to form 5-methylcytosine"
catagaaataatttatatttccaccagcagggtataatcattcccttttctctgcagtctcgccagcatctgtggttttctgaccagccattctgactgatgtgagatggtatctcattgtg

SEQ ID NO: 21649 - DNA, 122 bp, Homo sapiens
  misc_feature (61)..(62): /note="This region represents a CpG dinucleotide"
  misc_feature (61)..(61): /note="Nucleotide may be methylated to form 5-methylcytosine"
ctgattctctgctgtaaccatctcaacttctctgaacttcctatcaatataaatcaatcacgacacccccacagtgcccaggcatgtacagggagaaaaaaagtaatcagtaactgaccact

SEQ ID NO: 21650 - DNA, 122 bp, Homo sapiens
  misc_feature (61)..(62): /note="This region represents a CpG dinucleotide"
  misc_feature (61)..(61): /note="Nucleotide may be methylated to form 5-methylcytosine"
tgaggaggaagaggggagtgctagtacccggggctagtggaagagggtagggtgtgggcccggctcgttgtggggcagctgtttacttcactgcagcctgcagccctcccatttccctacag

SEQ ID NO: 21651 - DNA, 122 bp, Homo sapiens
  misc_feature (61)..(62): /note="This region represents a CpG dinucleotide"
  misc_feature (61)..(61): /note="Nucleotide may be methylated to form 5-methylcytosine"
cttctttcttaagtcaaaaggaattgtttggcaaaatacctcttggcaatctagcgtccccgcataattctcattcatattaagaatggttggatataattagaaatatttttcttattgag

SEQ ID NO: 21652 - DNA, 122 bp, Homo sapiens
  misc_feature (61)..(62): /note="This region represents a CpG dinucleotide"
  misc_feature (61)..(61): /note="Nucleotide may be methylated to form 5-methylcytosine"
attgttgtgggcatgagatggcagaaagtgggatatggaaaatgttgccgtgcgccattccgaatactactgtggcttccctgcagcattactttccatattggctgttttccatttcagga

SEQ ID NO: 21653 - DNA, 122 bp, Homo sapiens
  misc_feature (61)..(62): /note="This region represents a CpG dinucleotide"
  misc_feature (61)..(61): /note="Nucleotide may be methylated to form 5-methylcytosine"
ggatcaatcaagatcccataattactgggagttttaatcaactcatgccaattcagctgccgctcaatttgtgctggacttcggtgctcacaaggagggaagcggcgagggtggggtggggc

SEQ ID NO: 21654 - DNA, 122 bp, Homo sapiens
  misc_feature (61)..(62): /note="This region represents a CpG dinucleotide"
  misc_feature (61)..(61): /note="Nucleotide may be methylated to form 5-methylcytosine"
atgattttcctcctaaagcctcctttgctcccagcttcagaagcaaactctgcaagggtacgagtgtggcaaaaagagaaatggagatttctctcttttgctgcaatcccaaggcgtcaacg

SEQ ID NO: 21655 - DNA, 122 bp, Homo sapiens
  misc_feature (61)..(62): /note="This region represents a CpG dinucleotide"
  misc_feature (61)..(61): /note="Nucleotide may be methylated to form 5-methylcytosine"
aaatagtgcaaaacaaagcctattttacaataaagtgttacggttgggtgcagtggctcacgcctgtaatcccaacactttgggaggccaaggcaggtggatcctgaagtgaggagttcaag

SEQ ID NO: 21656 - DNA, 122 bp, Homo sapiens
  misc_feature (61)..(62): /note="This region represents a CpG dinucleotide"
  misc_feature (61)..(61): /note="Nucleotide may be methylated to form 5-methylcytosine"
gggagggacggctaccatagtgtcagggaatgatgccaaggaaagagctcccaggaaggacgaagtcatacctttgccaccagatcaagaagttaaggccaaaggcaggggggaaaaaaaag

SEQ ID NO: 21657 - DNA, 122 bp, Homo sapiens
  misc_feature (61)..(62): /note="This region represents a CpG dinucleotide"
  misc_feature (61)..(61): /note="Nucleotide may be methylated to form 5-methylcytosine"
ctgactccatggtgtagtctaggtcatactttatgttgtgaggctgtgactggattatgtcgcacttcatgaaacctaaggcttcctgttcagacctgaaaggcagaaactgtgtctccttc

SEQ ID NO: 21658 - DNA, 122 bp, Homo sapiens
  misc_feature (61)..(62): /note="This region represents a CpG dinucleotide"
  misc_feature (61)..(61): /note="Nucleotide may be methylated to form 5-methylcytosine"
tgcagacgcctcccagggccctgctcccacccctcgctcaccctcactcttctcagctgacggcgtggagactcgaacctgctgcttctccatccgctcccggaactgctgctgcagctgct

SEQ ID NO: 21659 - DNA, 122 bp, Homo sapiens
  misc_feature (61)..(62): /note="This region represents a CpG dinucleotide"
  misc_feature (61)..(61): /note="Nucleotide may be methylated to form 5-methylcytosine"
aataaataaataaacaaataagcaatcaggaagataaaatgcataaatttcagcaactgacgtcaatgatggaaatagctgctggtgggaaagattagaggcaaccacacctccaatgagtg

SEQ ID NO: 21660 - DNA, 122 bp, Homo sapiens
  misc_feature (61)..(62): /note="This region represents a CpG dinucleotide"
  misc_feature (61)..(61): /note="Nucleotide may be methylated to form 5-methylcytosine"
caggaacctcaggcccctcagtaacacattccctgcggtcttcgagaactttcctcagggcgcccacagccctgtgccatcttctccacccgcgcttcacgctctgattctcgccgcggctg

SEQ ID NO: 21661 - DNA, 122 bp, Homo sapiens
  misc_feature (61)..(62): /note="This region represents a CpG dinucleotide"
  misc_feature (61)..(61): /note="Nucleotide may be methylated to form 5-methylcytosine"
tccaatttaaagccagggcgagcaattaacttttctatcatcttgtcaggggagaaggttcgtgtttaatttgagacaaagtgacagaaatatatatacactgtatgtattactccaattta

SEQ ID NO: 21662 - DNA, 122 bp, Homo sapiens
  misc_feature (61)..(62): /note="This region represents a CpG dinucleotide"
  misc_feature (61)..(61): /note="Nucleotide may be methylated to form 5-methylcytosine"
gctgtgggctcctggcacgaaagggtgaagtccgtctgagtccaccgaccaatggtgacgcgcagcgccttcgcggcgcttcctgattggcgggcatgcagggtgggcgggagggaggagaa

SEQ ID NO: 21663 - DNA, 122 bp, Homo sapiens
  misc_feature (61)..(62): /note="This region represents a CpG dinucleotide"
  misc_feature (61)..(61): /note="Nucleotide may be methylated to form 5-methylcytosine"
ggacgtggtgcaaagcacagctctttagtttccaaatgaatgaaaatgacatattgaaagcggggctggccacagtatctagctagaaaacaataatgactcacaggaaagacaaagactga

SEQ ID NO: 21664 - DNA, 122 bp, Homo sapiens
  misc_feature (61)..(62): /note="This region represents a CpG dinucleotide"
  misc_feature (61)..(61): /note="Nucleotide may be methylated to form 5-methylcytosine"
tacaaagacagcagcaacacgtactcattcaacaaacactccctgagtgcttgctatgtgcgtggattgtcctgggtgctgcagatgacacagggatgagccagatgtcttggccaacagag

SEQ ID NO: 21665 - DNA, 122 bp, Homo sapiens
  misc_feature (61)..(62): /note="This region represents a CpG dinucleotide"
  misc_feature (61)..(61): /note="Nucleotide may be methylated to form 5-methylcytosine"
tatctattttaaagtgctgcatgtggtatgttcaggagacgaaaactctctgatgaggcacgtgtggatgggatggcagggctgagaaggccggctcccccacggggtgtgcacaacctacc

SEQ ID NO: 21666 - DNA, 122 bp, Homo sapiens
  misc_feature (61)..(62): /note="This region represents a CpG dinucleotide"
  misc_feature (61)..(61): /note="Nucleotide may be methylated to form 5-methylcytosine"
cagagagtgggggtgggggtttcatgctgccagggcccctcccagttgggactcatgccacgcttaagctgagtaagttaaggactctgcctctggacccccgtcagcacatcctgtgctcc

SEQ ID NO: 21667 - DNA, 122 bp, Homo sapiens
  misc_feature (61)..(62): /note="This region represents a CpG dinucleotide"
  misc_feature (61)..(61): /note="Nucleotide may be methylated to form 5-methylcytosine"
tttttttttttggttggagtcttgctctattgcctaggctagattgcaatggggagatctcggctcactgcaacctccgccttctgggttcaagcgattctcctgcctcagcctccggagta

SEQ ID NO: 21668 - DNA, 122 bp, Homo sapiens
  misc_feature (61)..(62): /note="This region represents a CpG dinucleotide"
  misc_feature (61)..(61): /note="Nucleotide may be methylated to form 5-methylcytosine"
gaaggggagtgggggaggggaggggagggaaagggaagggaatagaagaaacaggagagacgcaaagtgatggcgaaggaaaatcacaggatcaaaaacagcaaatgtagaaagcaactgat

SEQ ID NO: 21669 - DNA, 122 bp, Homo sapiens
  misc_feature (61)..(62): /note="This region represents a CpG dinucleotide"
  misc_feature (61)..(61): /note="Nucleotide may be methylated to form 5-methylcytosine"
ctacaaacaaaaaacagctcactgatatacgccctatctgaccaagcttagtcaccagagcggttatggaaagtgactagactgcagcacacatattcacctgccagaggaatcagataatt

SEQ ID NO: 21670 - DNA, 122 bp, Homo sapiens
  misc_feature (61)..(62): /note="This region represents a CpG dinucleotide"
  misc_feature (61)..(61): /note="Nucleotide may be methylated to form 5-methylcytosine"
gaggattagatgagataatgtgcattaactgcccagcacagggtaactgctcagctccagcgaaagacttgcaggttcagtgcaagctgtgctttgccccatggttcccctccctctgcccc

SEQ ID NO: 21671 - DNA, 122 bp, Homo sapiens
  misc_feature (61)..(62): /note="This region represents a CpG dinucleotide"
  misc_feature (61)..(61): /note="Nucleotide may be methylated to form 5-methylcytosine"
ccacggcagaggaacctgcaactagcttccccatgggggcctcctgactctgacattctacgagcctatgacacaccctttgtgtggtggacgctgtattgaattcaagtctctaagttaca

SEQ ID NO: 21672 - DNA, 122 bp, Homo sapiens
  misc_feature (61)..(62): /note="This region represents a CpG dinucleotide"
  misc_feature (61)..(61): /note="Nucleotide may be methylated to form 5-methylcytosine"
atcttttatgaccagtctcagggtcacgcatcacttccaccacattctattcattagaagcgagtcagtaagtctagcctatactcaaagggagaggaattaggttctactttttgaagaga

SEQ ID NO: 21673 - DNA, 122 bp, Homo sapiens
  misc_feature (61)..(62): /note="This region represents a CpG dinucleotide"
  misc_feature (61)..(61): /note="Nucleotide may be methylated to form 5-methylcytosine"
gaagaccctagggctcagatggacatttgtcaggctgcctgttgcttactctgtacttgccgcagggtaggaaacaaagtggttgcttgttcctggaaattctttatactaggtatcatctt

SEQ ID NO: 21674 - DNA, 122 bp, Homo sapiens
  misc_feature (61)..(62): /note="This region represents a CpG dinucleotide"
  misc_feature (61)..(61): /note="Nucleotide may be methylated to form 5-methylcytosine"
ttaagcttgcaaaatgagtcaaagctattacgtgaatatgtgtttccaaagaccagcccacgttcaacctgtgggattgagataatagacaagaaagtgtatttgaaaagaagagttacaca

SEQ ID NO: 21675 - DNA, 122 bp, Homo sapiens
  misc_feature (61)..(62): /note="This region represents a CpG dinucleotide"
  misc_feature (61)..(61): /note="Nucleotide may be methylated to form 5-methylcytosine"
aaaagtgtcaaatgccttgatgtctcccacagatcctagccaagagtcatactacaaattcgcaaaggaagattaagtttttcagataacaattaaagtaacaattaatccattgagataat

SEQ ID NO: 21676 - DNA, 122 bp, Homo sapiens
  misc_feature (61)..(62): /note="This region represents a CpG dinucleotide"
  misc_feature (61)..(61): /note="Nucleotide may be methylated to form 5-methylcytosine"
tagcaaaacagcacataacaaaatgtaccaccttgaccatttctaagtgtacagctcagtcgtggtaagtatagtcacattgttatgcaaccagtatccagaactttttcatcttgcaaaac

SEQ ID NO: 21677 - DNA, 122 bp, Homo sapiens
  misc_feature (61)..(62): /note="This region represents a CpG dinucleotide"
  misc_feature (61)..(61): /note="Nucleotide may be methylated to form 5-methylcytosine"
ctttcccaggccatggggtgtttctgttttctattagacactgtctcttagttatataaacgtggctgctctcagaagttctccacacctttgtttcctggaagaggaaatggcatttcctg

SEQ ID NO: 21678 - DNA, 122 bp, Homo sapiens
  misc_feature (61)..(62): /note="This region represents a CpG dinucleotide"
  misc_feature (61)..(61): /note="Nucleotide may be methylated to form 5-methylcytosine"
gagggtgagttaccctgtgccaacaacagcggggtgagctaaggtgcttgagggtagagacgcagtcaagcctctcaagcaaaaaatgcagcagctaatttcagagtgggaaatgcccctct

SEQ ID NO: 21679 - DNA, 122 bp, Homo sapiens
  misc_feature (61)..(62): /note="This region represents a CpG dinucleotide"
  misc_feature (61)..(61): /note="Nucleotide may be methylated to form 5-methylcytosine"
tatgatcaactggagtcaggcccagctgtatttgtctacactgaaagcattcatgggaagcggtaggtggcagatgaacatggaaagagcatgtgaaggagaaaggataagggttaggtttt

SEQ ID NO: 21680 - DNA, 122 bp, Homo sapiens
  misc_feature (61)..(62): /note="This region represents a CpG dinucleotide"
  misc_feature (61)..(61): /note="Nucleotide may be methylated to form 5-methylcytosine"
caagagtaaaactgctgttgctgctgctgatgtgaatggatttaaacctttgtcaggcaacgagcagctgaagaacaatgggaactctactagcctgcctttggctagaaaggttcttaagt

SEQ ID NO: 21681 - DNA, 122 bp, Homo sapiens
  misc_feature (61)..(62): /note="This region represents a CpG dinucleotide"
  misc_feature (61)..(61): /note="Nucleotide may be methylated to form 5-methylcytosine"
ggtcccttttcctggtatactggcctatgtcctacctaccatattaagaattctttaccacgtaaatttattcatgcaatacatgaaccattccattttactcataatatatgttaccaaac

SEQ ID NO: 21682 - DNA, 122 bp, Homo sapiens
  misc_feature (61)..(62): /note="This region represents a CpG dinucleotide"
  misc_feature (61)..(61): /note="Nucleotide may be methylated to form 5-methylcytosine"
tcttgttgggtgtcacctagtttgggcggagtgggagccgtgactcttgactcattgggccgtctggctttcccgggacacctccacctggagagtgcctctgagaacctcccagagtctgc

SEQ ID NO: 21683 - DNA, 122 bp, Homo sapiens
  misc_feature (61)..(62): /note="This region represents a CpG dinucleotide"
  misc_feature (61)..(61): /note="Nucleotide may be methylated to form 5-methylcytosine"
tgtattaggttggcgcaaaagttatcgtggttttggtggccaaaaccacgataacttttgcgccaacctaatagcattgaggaaggtgctagcacagctttggtaatataaggaactctaat

SEQ ID NO: 21684 - DNA, 122 bp, Homo sapiens
  misc_feature (61)..(62): /note="This region represents a CpG dinucleotide"
  misc_feature (61)..(61): /note="Nucleotide may be methylated to form 5-methylcytosine"
agcctgagctaagacagtaagtaacctaaaacacttccctaaacacctctataaacttaacgcaagtgccggtcatgtttatgacactttgattgtgtatggttgtagcaatgtgaaaaatg

SEQ ID NO: 21685 - DNA, 122 bp, Homo sapiens
  misc_feature (61)..(62): /note="This region represents a CpG dinucleotide"
  misc_feature (61)..(61): /note="Nucleotide may be methylated to form 5-methylcytosine"
ttcaagaacattcctgtgtgttgagagtggcaggagcagtggagatccccaggcctgaaacgtgatgttgatggggaccacagaacagagtagccgggagagtgcacagagcataaccagca

SEQ ID NO: 21686 - DNA, 122 bp, Homo sapiens
  misc_feature (61)..(62): /note="This region represents a CpG dinucleotide"
  misc_feature (61)..(61): /note="Nucleotide may be methylated to form 5-methylcytosine"
atgttagtgactattaggaaataaataatatttcccagaagtgccataagatcattcatacgtcttatagtttgatgagttgctttgcattttgccaaggtggactactgtttgattctgta

SEQ ID NO: 21687 - DNA, 122 bp, Homo sapiens
  misc_feature (61)..(62): /note="This region represents a CpG dinucleotide"
  misc_feature (61)..(61): /note="Nucleotide may be methylated to form 5-methylcytosine"
aagatgccacgtgcccacaggcctgggaatgcttggcttcctgtgaccttggattgcacacgcattcaagaggctcccaagaagcttacccagccagaggttcccacgccaaggagttgggc

SEQ ID NO: 21688 - DNA, 122 bp, Homo sapiens
  misc_feature (61)..(62): /note="This region represents a CpG dinucleotide"
  misc_feature (61)..(61): /note="Nucleotide may be methylated to form 5-methylcytosine"
taggtttagctcctggatcgataacttttttccaaagtttgatcccattgtagctattatcgctgcagacaaaacttcctttattgatatgatatgtagaagtgggtttactaaggtttaat

SEQ ID NO: 21689 - DNA, 122 bp, Homo sapiens
  misc_feature (61)..(62): /note="This region represents a CpG dinucleotide"
  misc_feature (61)..(61): /note="Nucleotide may be methylated to form 5-methylcytosine"
ctagctactagtctcatgggtctacttccagattcatatcttcctgagccactgtggcatcggctcatgaagttacacagctggcttcacatttcctcattgctttttgcaccaagagagtt

SEQ ID NO: 21690 - DNA, 122 bp, Homo sapiens
  misc_feature (61)..(62): /note="This region represents a CpG dinucleotide"
  misc_feature (61)..(61): /note="Nucleotide may be methylated to form 5-methylcytosine"
tgtgtgccaagcccaaaccaggttggagtggctctgggttgaggacctgcccttcctttacgtggtccacaggcagcaagacctgaaaatgccctctcctactatttctaaggcattctcaa

SEQ ID NO: 21691 - DNA, 122 bp, Homo sapiens
  misc_feature (61)..(62): /note="This region represents a CpG dinucleotide"
  misc_feature (61)..(61): /note="Nucleotide may be methylated to form 5-methylcytosine"
ccctcctaggaggtggtgaacccacaggcgtggctcaccatagggagccctcggccaatgcgggttcctctcccgtggtccaccggccagcctgtccctgcttactcactgaacaagcactc

SEQ ID NO: 21692 - DNA, 122 bp, Homo sapiens
  misc_feature (61)..(62): /note="This region represents a CpG dinucleotide"
  misc_feature (61)..(61): /note="Nucleotide may be methylated to form 5-methylcytosine"
cctccccgacctcgtagttgactcctgggctgactcctcccctggaagggaaagaagagccgggctcacccacacccaacaggtgcagcagctgcttgaggtcacagttgctgagaagggaa

SEQ ID NO: 21693 - DNA, 122 bp, Homo sapiens
  misc_feature (61)..(62): /note="This region represents a CpG dinucleotide"
  misc_feature (61)..(61): /note="Nucleotide may be methylated to form 5-methylcytosine"
tccatccatccatccatccatccatccatccatccatcttttcattatcaattcattcaacgaaaatttttgagtgcctattatgagccaggcattgtactaggtactgactcatagaaata

SEQ ID NO: 21694 - DNA, 122 bp, Homo sapiens
  misc_feature (61)..(62): /note="This region represents a CpG dinucleotide"
  misc_feature (61)..(61): /note="Nucleotide may be methylated to form 5-methylcytosine"
aaactgcaacccacctgcccccagccctgcccctcgccctgatgcgaagctggagaggggcgtgctgcggggccctgatgcccccacccacctcggtccagcgcggccctgcccaggaggcg

SEQ ID NO: 21695 - DNA, 122 bp, Homo sapiens
  misc_feature (61)..(62): /note="This region represents a CpG dinucleotide"
  misc_feature (61)..(61): /note="Nucleotide may be methylated to form 5-methylcytosine"
tcactctgattcttttccattcaagtctattttatttcatttctaaacacactggttgcccgccaggcatggtggctcacgcctataatccaggcgctttgggaggctgaggcggacagatc

SEQ ID NO: 21696 - DNA, 122 bp, Homo sapiens
  misc_feature (61)..(62): /note="This region represents a CpG dinucleotide"
  misc_feature (61)..(61): /note="Nucleotide may be methylated to form 5-methylcytosine"
acaaggaaatggagttagtctgtgtctcaaaatagatggtatagtgtctgtaggtgtttacgtggcctccttagtggccttaatgttcaactttttaaattaccacgctggatttccaggtt

SEQ ID NO: 21697 - DNA, 122 bp, Homo sapiens
  misc_feature (61)..(62): /note="This region represents a CpG dinucleotide"
  misc_feature (61)..(61): /note="Nucleotide may be methylated to form 5-methylcytosine"
tggccaggaacctgttttttaaccctgggcccttaacagaggctgtgtagaaatggggggcgtcacaggccaagggcttagtccacttcagtccagcatccatggggaagcctggttgcagg

SEQ ID NO: 21698 - DNA, 122 bp, Homo sapiens
  misc_feature (61)..(62): /note="This region represents a CpG dinucleotide"
  misc_feature (61)..(61): /note="Nucleotide may be methylated to form 5-methylcytosine"
gtggctgagccacaggaatcactgttgttcctgctcctactcctgcagaactgggctgtccggaggacattgctgtttgaagaattggctgctgttgtacatactctgaagcaggattttga

SEQ ID NO: 21699 - DNA, 122 bp, Homo sapiens
  misc_feature (61)..(62): /note="This region represents a CpG dinucleotide"
  misc_feature (61)..(61): /note="Nucleotide may be methylated to form 5-methylcytosine"
cctaatttcctcctcacctatcttggtaaatccaaatggctcaaacaatggttgctaatccgcaagaagaatttgtttttttggccagttgtttctgactcaagctagagttcggctgactt

SEQ ID NO: 21700 - DNA, 122 bp, Homo sapiens
  misc_feature (61)..(62): /note="This region represents a CpG dinucleotide"
  misc_feature (61)..(61): /note="Nucleotide may be methylated to form 5-methylcytosine"
cacgctggagactgacagaccattttcaggaatatgtggtccaggcagctgtttctgcttcgttgaaggcttggcctgctttctcagtttgagcaccagatgaaggagatgacatgtgtttg

SEQ ID NO: 21701 - DNA, 122 bp, Homo sapiens
  misc_feature (61)..(62): /note="This region represents a CpG dinucleotide"
  misc_feature (61)..(61): /note="Nucleotide may be methylated to form 5-methylcytosine"
acttttaatacagcatctcaaccaccacctctgggttaggtccttcataatctgtagaaccgaaatcttttaatgtggcattcaggaccctccaaggtggtcccaccccacccaccactctc

SEQ ID NO: 21702 - DNA, 122 bp, Homo sapiens
  misc_feature (61)..(62): /note="This region represents a CpG dinucleotide"
  misc_feature (61)..(61): /note="Nucleotide may be methylated to form 5-methylcytosine"
aaaaagtggatgctgcaaatgacttctgatcgagttttctctttgggtaactccgaggtgcgtatattattaattcttccacccaacgcacgtaaccgggaggtcataactatcgctgaata

SEQ ID NO: 21703 - DNA, 122 bp, Homo sapiens
  misc_feature (61)..(62): /note="This region represents a CpG dinucleotide"
  misc_feature (61)..(61): /note="Nucleotide may be methylated to form 5-methylcytosine"
cccttttaggtttacatcatccaggtcactgatggcagccatgagtggacagtaaagcaccgctacagcgacttccatgacctgcatgaaaaggtaactgttaagagctgggagcacgtatc

SEQ ID NO: 21704 - DNA, 122 bp, Homo sapiens
  misc_feature (61)..(62): /note="This region represents a CpG dinucleotide"
  misc_feature (61)..(61): /note="Nucleotide may be methylated to form 5-methylcytosine"
aaaaggtgtggtgtggcagggacacacagagtaaggtcaaaggcaaaacagctgggagagcggtggagccagacagatgaaaagtcctcaaagagaattaggggcgagatcagggtagaaag

SEQ ID NO: 21705 - DNA, 122 bp, Homo sapiens
  misc_feature (61)..(62): /note="This region represents a CpG dinucleotide"
  misc_feature (61)..(61): /note="Nucleotide may be methylated to form 5-methylcytosine"
atatcatatcatgctttataattaaacttttcatttccttctacaattggtcctcatatacgttatagtatttaatgagataagccaacacaaagacaggcgagaaacgtctcactaaaaac

SEQ ID NO: 21706 - DNA, 122 bp, Homo sapiens
  misc_feature (61)..(62): /note="This region represents a CpG dinucleotide"
  misc_feature (61)..(61): /note="Nucleotide may be methylated to form 5-methylcytosine"
acacacacaccccggccaaaccttcaaagttactacttctttaactgtttaaagtgatgtcgaagatagttttggtcagagcctcaggccagagcacctgggctttctcctctgaacaagtt

SEQ ID NO: 21707 - DNA, 122 bp, Homo sapiens
  misc_feature (61)..(62): /note="This region represents a CpG dinucleotide"
  misc_feature (61)..(61): /note="Nucleotide may be methylated to form 5-methylcytosine"
ccggctgaagaagcaggcttcttttctggaagcagagggcggtgcaaagaccttgagcggcggccggccgggcgcaggcccggagctggagctgggcacagctggcagcccaggtggggccc

SEQ ID NO: 21708 - DNA, 122 bp, Homo sapiens
  misc_feature (61)..(62): /note="This region represents a CpG dinucleotide"
  misc_feature (61)..(61): /note="Nucleotide may be methylated to form 5-methylcytosine"
ctcttcttggttttctggctttcttgctatcactctgtttgtcttgcctcagctgatgtgcgcctcccatttggtaagggcctttgtcatggccaagacatctaaagaaatcctagtctgtg

SEQ ID NO: 21709 - DNA, 122 bp, Homo sapiens
  misc_feature (61)..(62): /note="This region represents a CpG dinucleotide"
  misc_feature (61)..(61): /note="Nucleotide may be methylated to form 5-methylcytosine"
gtggcctgcatagtaggccttgatctccagctcatcatctacctgtggaggacagggctgcgctcaggctgtgtcctcacagcagaggggcggggagtgagggaggcgggggacgggaagcg

SEQ ID NO: 21710 - DNA, 122 bp, Homo sapiens
  misc_feature (61)..(62): /note="This region represents a CpG dinucleotide"
  misc_feature (61)..(61): /note="Nucleotide may be methylated to form 5-methylcytosine"
tgcttttttgttgtccttgtttgagacggacagagtttcgttctgttgccctggctggagcgcagtggtgcgaccttggctcactgcagcctccacctcccgggttcaagcgattattgtgt

SEQ ID NO: 21711 - DNA, 122 bp, Homo sapiens
  misc_feature (61)..(62): /note="This region represents a CpG dinucleotide"
  misc_feature (61)..(61): /note="Nucleotide may be methylated to form 5-methylcytosine"
ttgatgattcagtggttagttgttttactgaatgaatgggacagatgcacctgaatgagacgtgagtcagcacccaactacgcagaagaccagcaactcagggaattttgtgtccctcccca

SEQ ID NO: 21712 - DNA, 122 bp, Homo sapiens
  misc_feature (61)..(62): /note="This region represents a CpG dinucleotide"
  misc_feature (61)..(61): /note="Nucleotide may be methylated to form 5-methylcytosine"
aactattttcctaataacagtaaaaagtaagttgtatttttaactgtgttgacatttgcacggatgctacaaaagcaatggtgtactcgatgaagcagttaatttttaccaaatattagttt

SEQ ID NO: 21713 - DNA, 122 bp, Homo sapiens
  misc_feature (61)..(62): /note="This region represents a CpG dinucleotide"
  misc_feature (61)..(61): /note="Nucleotide may be methylated to form 5-methylcytosine"
taacaattagagctgcttgaacatgggatgaatagctttgaagtatggtgagtttctcaccgctgaagatgttgaaatagcctgaatgggtaacttccttgagcaggctgaacaagggctta

SEQ ID NO: 21714 - DNA, 122 bp, Homo sapiens
  misc_feature (61)..(62): /note="This region represents a CpG dinucleotide"
  misc_feature (61)..(61): /note="Nucleotide may be methylated to form 5-methylcytosine"
tggggaagaggaattctggtttctgtgaatcacctcagaggagaaagactggtggaaaaccgaaggatgggagaggtcagagagccccgccttctgagaccttccagtctccttcagtttaa

SEQ ID NO: 21715 - DNA, 122 bp, Homo sapiens
  misc_feature (61)..(62): /note="This region represents a CpG dinucleotide"
  misc_feature (61)..(61): /note="Nucleotide may be methylated to form 5-methylcytosine"
ttcagccagatgcctttccagtcaggccatgtggatgtgtgagtgtgttcaagagatcagcggcatagatttcagtgagaacaggggctacggtttggttgaaggggtaggagtttggggtt

SEQ ID NO: 21716 - DNA, 122 bp, Homo sapiens
  misc_feature (61)..(62): /note="This region represents a CpG dinucleotide"
  misc_feature (61)..(61): /note="Nucleotide may be methylated to form 5-methylcytosine"
taaaataacatttcaagtcagcatagtgtggtggttaagataagccaggggcttcggaatcgttgatccttggcttcatattctggttctgtcacttcctattaatagctgtgtgcccttgg

SEQ ID NO: 21717 - DNA, 122 bp, Homo sapiens
  misc_feature (61)..(62): /note="This region represents a CpG dinucleotide"
  misc_feature (61)..(61): /note="Nucleotide may be methylated to form 5-methylcytosine"
gttaatccttacaacagagcataacatggggattattactgattatccttattttacacacgggaaagactcaagtacagagaaactaaggatcttgcttgaggtcatgtgactagtagaca

SEQ ID NO: 21718 - DNA, 122 bp, Homo sapiens
  misc_feature (61)..(62): /note="This region represents a CpG dinucleotide"
  misc_feature (61)..(61): /note="Nucleotide may be methylated to form 5-methylcytosine"
ctggcccaagctcctgtgaccggaagagcttgttttgccctgttcccccagagccagcagcgcagaccacagggggcttgcattatgttagcaaatgaagaaatgctttaacaggaataggc

SEQ ID NO: 21719 - DNA, 122 bp, Homo sapiens
  misc_feature (61)..(62): /note="This region represents a CpG dinucleotide"
  misc_feature (61)..(61): /note="Nucleotide may be methylated to form 5-methylcytosine"
aacacttcctgcttcactgggtggttgagaggatcaaataagatagaaaaggaattgctacgtaacacctaaagcaaggcccaactgctagttgtggctgctgctgttacttggagagaaga

SEQ ID NO: 21720 - DNA, 122 bp, Homo sapiens
  misc_feature (61)..(62): /note="This region represents a CpG dinucleotide"
  misc_feature (61)..(61): /note="Nucleotide may be methylated to form 5-methylcytosine"
ccctgtgcagagcaggtgaatacagttttctgagaggcatgaataatcaccaccctgctccgttatcttgccggtgtggtcatggttgggcaaggacaagtagccaggcatgtacagggcgt

SEQ ID NO: 21721 - DNA, 122 bp, Homo sapiens
  misc_feature (61)..(62): /note="This region represents a CpG dinucleotide"
  misc_feature (61)..(61): /note="Nucleotide may be methylated to form 5-methylcytosine"
tccattctactgacaattcttgatctgttgaccatcagaagtcatagacttgaaacagaacggtttataattcctgtttggcactccttgtcaatgtggataaactgacttgtgcctttgaa

SEQ ID NO: 21722 - DNA, 122 bp, Homo sapiens
  misc_feature (61)..(62): /note="This region represents a CpG dinucleotide"
  misc_feature (61)..(61): /note="Nucleotide may be methylated to form 5-methylcytosine"
ttgtcggggtgagtactggccagctttatgtgatgggaaaccgcacacctgccaacttgtcgtttacagtcagaacgtttggggattgactcgatatattccagaaccttcccacagatacg

SEQ ID NO: 21723 - DNA, 122 bp, Homo sapiens
  misc_feature (61)..(62): /note="This region represents a CpG dinucleotide"
  misc_feature (61)..(61): /note="Nucleotide may be methylated to form 5-methylcytosine"
tctctgcctgaaaagctcttcttgccaccagttcacttagatcctagagagctcattagccgtccccatctcaatgtctagttcaaattcaatttttacaagttcttctttagagtacttag

SEQ ID NO: 21724 - DNA, 122 bp, Homo sapiens
  misc_feature (61)..(62): /note="This region represents a CpG dinucleotide"
  misc_feature (61)..(61): /note="Nucleotide may be methylated to form 5-methylcytosine"
tccagcgtgggacaggtgactcctcctctaacctgggcatggagcagatgggctggcagacgcagaagtgcctggaatggcaagaacccctccccccacagaccgaggttatgcaagtaagg

SEQ ID NO: 21725 - DNA, 122 bp, Homo sapiens
  misc_feature (61)..(62): /note="This region represents a CpG dinucleotide"
  misc_feature (61)..(61): /note="Nucleotide may be methylated to form 5-methylcytosine"
tgtgaaggcacttacggtgggtcttagtgtttacagaaggaaaaggtaatcattaacacacgtattccaccttccatgctaagtgtacgctaataaccgtggtttttctgagcaacagatca

SEQ ID NO: 21726 - DNA, 122 bp, Homo sapiens
  misc_feature (61)..(62): /note="This region represents a CpG dinucleotide"
  misc_feature (61)..(61): /note="Nucleotide may be methylated to form 5-methylcytosine"
tgaagacagctgaatgttggtttgggcaacagggccctggagattgccttcctgaagacacggcagatcccaaagccagcttgtggggagcccaccggtgtggggtaaccaggttgcatcaa

SEQ ID NO: 21727 - DNA, 122 bp, Homo sapiens
  misc_feature (61)..(62): /note="This region represents a CpG dinucleotide"
  misc_feature (61)..(61): /note="Nucleotide may be methylated to form 5-methylcytosine"
aacaaacacagagtgcaatcttagggaaatgccaagaccttcaccttgagcgtgtgcatgcgctgctctacagaacccaggaggcgccttccgcccacccacaggtactacagcactagctc

SEQ ID NO: 21728 - DNA, 122 bp, Homo sapiens
  misc_feature (61)..(62): /note="This region represents a CpG dinucleotide"
  misc_feature (61)..(61): /note="Nucleotide may be methylated to form 5-methylcytosine"
gctttatagcaatgcttgaggttgggctgctaacaagctcactcaactagtgtttcctgacggccaacgtcagaataattccatctccatgagaagtacagaaagaaccacaaaccaaacct

SEQ ID NO: 21729 - DNA, 122 bp, Homo sapiens
  misc_feature (61)..(62): /note="This region represents a CpG dinucleotide"
  misc_feature (61)..(61): /note="Nucleotide may be methylated to form 5-methylcytosine"
actgtataaataagtcctgagatggagaggggaaaagaacttctgccacatctgggcccacgagaatcatgagtgcaggtgcctgtttctagatggaagagcaactaggttatccaaaatgg

SEQ ID NO: 21730 - DNA, 122 bp, Homo sapiens
  misc_feature (61)..(62): /note="This region represents a CpG dinucleotide"
  misc_feature (61)..(61): /note="Nucleotide may be methylated to form 5-methylcytosine"
ggacagtgttgtgcacttttaatatgttagctcatcgcattcctgtaagtacaatagggacgataatatgcatggggctgtttcatgaggattgaatagataacaagcacatgataggcatt

SEQ ID NO: 21731 - DNA, 122 bp, Homo sapiens
  misc_feature (61)..(62): /note="This region represents a CpG dinucleotide"
  misc_feature (61)..(61): /note="Nucleotide may be methylated to form 5-methylcytosine"
ctgaggtagagctttatcgaaggtttctcttggtaaacgttagctttctgaactaagggccgtcttttttttttttcccgcttaagcccattgcataacaatctcttgttttaatcttttgc

SEQ ID NO: 21732 - DNA, 122 bp, Homo sapiens
  misc_feature (61)..(62): /note="This region represents a CpG dinucleotide"
  misc_feature (61)..(61): /note="Nucleotide may be methylated to form 5-methylcytosine"
gtgtgagcccattgtggaaagtctgttgctgggaaacacaaggaagcaacttcccctgaacggatcctttcagtttgtatagacaagagtaacactggatttaatgggcagtaggtagaggg

SEQ ID NO: 21733 - DNA, 122 bp, Homo sapiens
  misc_feature (61)..(62): /note="This region represents a CpG dinucleotide"
  misc_feature (61)..(61): /note="Nucleotide may be methylated to form 5-methylcytosine"
gagacagatggtacatgttaatacttagcacagaccctagtgcatggcaagtgcccatagcgttaattatcattattgctcaagattatacagcagctgttggcagaggtacaacttacttc

SEQ ID NO: 21734 - DNA, 122 bp, Homo sapiens
  misc_feature (61)..(62): /note="This region represents a CpG dinucleotide"
  misc_feature (61)..(61): /note="Nucleotide may be methylated to form 5-methylcytosine"
gtggtgtcattggtgatccctgggagcgccggtggagtaacgttggtccatggaaagcagcgccccagagctggaagggagagccgggctgctgggttgggggccaggagctctgcctggag

SEQ ID NO: 21735 - DNA, 122 bp, Homo sapiens
  misc_feature (61)..(62): /note="This region represents a CpG dinucleotide"
  misc_feature (61)..(61): /note="Nucleotide may be methylated to form 5-methylcytosine"
gaaatgactcacttccgcatggacaagcatgagatggcaaagccgaaatcaatccacaagcgtcctgagatactgaaaatgggacgcagctgtatcgctggaaatgtgtggatcaactgaac

SEQ ID NO: 21736 - DNA, 122 bp, Homo sapiens
  misc_feature (61)..(62): /note="This region represents a CpG dinucleotide"
  misc_feature (61)..(61): /note="Nucleotide may be methylated to form 5-methylcytosine"
taagcatgagctggccaagtgcatgatgacagacacatggcccagccacccctccacccccgcctgtggccagccatcccccaggcacatgtgtgaagggcctcaggctgccccagcagctg

SEQ ID NO: 21737 - DNA, 122 bp, Homo sapiens
  misc_feature (61)..(62): /note="This region represents a CpG dinucleotide"
  misc_feature (61)..(61): /note="Nucleotide may be methylated to form 5-methylcytosine"
agaggccaccagacacattttctcaaccgcagatcccccttccccacaccctgctccttgcgtgtcagcctgagagcccttgctttgagaagcttggcagaagctgcaaagggtgggcgggc

SEQ ID NO: 21738 - DNA, 122 bp, Homo sapiens
  misc_feature (61)..(62): /note="This region represents a CpG dinucleotide"
  misc_feature (61)..(61): /note="Nucleotide may be methylated to form 5-methylcytosine"
ttttgcaacccttgaaagaattcaagttggagattagcagaaaccaggctcagttctgtccgtaatcccctttatctgtcttctagccaacaaaatgaaaaccttaaagccaaactgacaaa

SEQ ID NO: 21739 - DNA, 122 bp, Homo sapiens
  misc_feature (61)..(62): /note="This region represents a CpG dinucleotide"
  misc_feature (61)..(61): /note="Nucleotide may be methylated to form 5-methylcytosine"
catctgaatgcagttggggagtgagacacacacacacacacacacacagactggtggaaacggaactgcaggtgcaaaggcactgaagtcaggacaagtttggtacatttaaggaacagaaa

SEQ ID NO: 21740 - DNA, 122 bp, Homo sapiens
  misc_feature (61)..(62): /note="This region represents a CpG dinucleotide"
  misc_feature (61)..(61): /note="Nucleotide may be methylated to form 5-methylcytosine"
cagaaacaaaaggaggtgtgacaactgtgtcagaagtctgagtgacgcaaggccatgagccgaggaatgcagacaccctctagaaactggaaaaggcaaggaaataaattctctcctggagc

SEQ ID NO: 21741 - DNA, 122 bp, Homo sapiens
  misc_feature (61)..(62): /note="This region represents a CpG dinucleotide"
  misc_feature (61)..(61): /note="Nucleotide may be methylated to form 5-methylcytosine"
cagctctatggagccccagagtgcttaaagggctggcactaaatgaaccaggacctcttgcggcctacaaggaacattgtaagggggtagcagaaaaagtccatttcagtgattcatcatct

SEQ ID NO: 21742 - DNA, 122 bp, Homo sapiens
  misc_feature (61)..(62): /note="This region represents a CpG dinucleotide"
  misc_feature (61)..(61): /note="Nucleotide may be methylated to form 5-methylcytosine"
gaaaggaccttggaaagggacaagtctaggtgtgacgccacagccacagcaggagtcttacgggttgagggactgaagactgacagatctgtaaacagtacattcaccagagtggaatgagc

SEQ ID NO: 21743 - DNA, 122 bp, Homo sapiens
  misc_feature (61)..(62): /note="This region represents a CpG dinucleotide"
  misc_feature (61)..(61): /note="Nucleotide may be methylated to form 5-methylcytosine"
atctgggtttcagtttctcatttgttcttttttaaaaatgatgccaaattaatgggtcaccgaagcctggttgaattagagaaagccctccctccaaatgctcctgtcaaaaaaagaaacac

SEQ ID NO: 21744 - DNA, 122 bp, Homo sapiens
  misc_feature (61)..(62): /note="This region represents a CpG dinucleotide"
  misc_feature (61)..(61): /note="Nucleotide may be methylated to form 5-methylcytosine"
attgtctgtggcatcctggaaggcatgggcatccttctggcctgagcattcagtgagccccgggtcatgtaacctgctgagtcagttcctagtagcagcactgaaaatcctcatgtgccatg

SEQ ID NO: 21745 - DNA, 122 bp, Homo sapiens
  misc_feature (61)..(62): /note="This region represents a CpG dinucleotide"
  misc_feature (61)..(61): /note="Nucleotide may be methylated to form 5-methylcytosine"
aataaaaaagaaaagcatcaagccggttttaggatagataatcagcctttctttgcaggccgaagtcctctcattcttactcagccagtcagcccacaaatataagcaagctcgccagatcc

SEQ ID NO: 21746 - DNA, 122 bp, Homo sapiens
  misc_feature (61)..(62): /note="This region represents a CpG dinucleotide"
  misc_feature (61)..(61): /note="Nucleotide may be methylated to form 5-methylcytosine"
cccagcctcaataaatctaaagttattttgaaatcaaaagtttcttatctaacaaactaacgggataaaggggaaagtctttgagcctgagctcctggatgccctgcctctcactgatgacg

SEQ ID NO: 21747 - DNA, 122 bp, Homo sapiens
  misc_feature (61)..(62): /note="This region represents a CpG dinucleotide"
  misc_feature (61)..(61): /note="Nucleotide may be methylated to form 5-methylcytosine"
cccatgaaaagagttttttggtgtctggggacaactatcctccccccaaccctggatatccgggggggccccagccacccatgcccccctatgctcagcctccctaccctggggccccttac

SEQ ID NO: 21748 - DNA, 122 bp, Homo sapiens
  misc_feature (61)..(62): /note="This region represents a CpG dinucleotide"
  misc_feature (61)..(61): /note="Nucleotide may be methylated to form 5-methylcytosine"
gaccagtgcaagagaacttttaccaggtagcgagtactgccatttattgagttcctactacgtgcctcagtctgtttctgttatgctgtcatatttaattttcattgccatgtattgtggta

SEQ ID NO: 21749 - DNA, 122 bp, Homo sapiens
  misc_feature (61)..(62): /note="This region represents a CpG dinucleotide"
  misc_feature (61)..(61): /note="Nucleotide may be methylated to form 5-methylcytosine"
gtgcgatttttgcgccaatccctttgctctttcaaataagcattaccgtacccattttagcggtgaggcaactgaagcccagagaggttaaataacttgcccaaagcctcacagcaaagttg

SEQ ID NO: 21750 - DNA, 122 bp, Homo sapiens
  misc_feature (61)..(62): /note="This region represents a CpG dinucleotide"
  misc_feature (61)..(61): /note="Nucleotide may be methylated to form 5-methylcytosine"
gacagaggctgagatcctttccagacgtcttggcttctgggcaagttctggagaatctctcgcttcaatattgaattgtataacaacagtacaaggtctaggagaaaagaaatggaagtgta

SEQ ID NO: 21751 - DNA, 122 bp, Homo sapiens
  misc_feature (61)..(62): /note="This region represents a CpG dinucleotide"
  misc_feature (61)..(61): /note="Nucleotide may be methylated to form 5-methylcytosine"
atgatttttcctactccttctttcaatattttataaatgacttcctcagttgttttctgacgtaagccacacatatgttaccaagcagggcataggttttctaagctcagtaggagatggaa

SEQ ID NO: 21752 - DNA, 122 bp, Homo sapiens
  misc_feature (61)..(62): /note="This region represents a CpG dinucleotide"
  misc_feature (61)..(61): /note="Nucleotide may be methylated to form 5-methylcytosine"
cttaaaccatgaggctgcatagctctggttgatgactgaaggccaaattgcatgcagtaccggggacaggattggtaccgtcacctgtaagcttgggcctggtgggagtggacagacctgcc

SEQ ID NO: 21753 - DNA, 122 bp, Homo sapiens
  misc_feature (61)..(62): /note="This region represents a CpG dinucleotide"
  misc_feature (61)..(61): /note="Nucleotide may be methylated to form 5-methylcytosine"
aaacagtggcatcaatctaccctgtatgaattttcagttcatgcagcactgtggtactaccgaatgggtttgatgaaaagatgaagggacaagaaataataccagttaatctctaatgagca

SEQ ID NO: 21754 - DNA, 122 bp, Homo sapiens
  misc_feature (61)..(62): /note="This region represents a CpG dinucleotide"
  misc_feature (61)..(61): /note="Nucleotide may be methylated to form 5-methylcytosine"
actaatttgactaactttcccaccaaactgatttttaagctgcattgcataactgtgttacgtcatgtgggtgtgtctatgagctaacttttcacattgcattgtggtgatatttgaattga

SEQ ID NO: 21755 - DNA, 122 bp, Homo sapiens
  misc_feature (61)..(62): /note="This region represents a CpG dinucleotide"
  misc_feature (61)..(61): /note="Nucleotide may be methylated to form 5-methylcytosine"
aaacaccatacttaaaacaacaaaaaagatgcactcaactttccagccactgcttaagaacggggcagcttactaatcctgggaaacttacacctggggacaaagtttattattggtttaac

SEQ ID NO: 21756 - DNA, 122 bp, Homo sapiens
  misc_feature (61)..(62): /note="This region represents a CpG dinucleotide"
  misc_feature (61)..(61): /note="Nucleotide may be methylated to form 5-methylcytosine"
taccaagcgttataaacagcatgtgatccatgggtctgctatcaaaacaaatacatttcacgagatgtgaagcgtcatttaacttgagcaatgacttgagattattacttagggtttagatg

SEQ ID NO: 21757 - DNA, 122 bp, Homo sapiens
  misc_feature (61)..(62): /note="This region represents a CpG dinucleotide"
  misc_feature (61)..(61): /note="Nucleotide may be methylated to form 5-methylcytosine"
cagtgccctttccatccgcaccacagttcatgtctaacggtgaaagttcaagggtggtgacggctgataagatagtttttgtctggaggaacctcgataatgttttgcaagctatgaagctc

SEQ ID NO: 21758 - DNA, 122 bp, Homo sapiens
  misc_feature (61)..(62): /note="This region represents a CpG dinucleotide"
  misc_feature (61)..(61): /note="Nucleotide may be methylated to form 5-methylcytosine"
ggcagcctggctctggaaccccagtgccggggcttgcctgggaaagtgagatgcaaaccgcggccattgcccaacacacccaccctgccagccctgggtcaggaaggagccagggccaggcc

SEQ ID NO: 21759 - DNA, 122 bp, Homo sapiens
  misc_feature (61)..(62): /note="This region represents a CpG dinucleotide"
  misc_feature (61)..(61): /note="Nucleotide may be methylated to form 5-methylcytosine"
tcacacatgtgagggtttactggctggtagcaattcattgacatcagctttatcatgggtcggtgtatatagtgccatttatagatgcatcatgacatggtacaatgacacaagttgggaaa

SEQ ID NO: 21760 - DNA, 122 bp, Homo sapiens
  misc_feature (61)..(62): /note="This region represents a CpG dinucleotide"
  misc_feature (61)..(61): /note="Nucleotide may be methylated to form 5-methylcytosine"
aaggaggaggcttgtcggctgagagagctaagggagggagctgaatgtgaattgagtagacgtcagtatgcagaacaggaattggaacaggtatttacattaaaaaaaaaatcacttgtaaa

SEQ ID NO: 21761 - DNA, 122 bp, Homo sapiens
  misc_feature (61)..(62): /note="This region represents a CpG dinucleotide"
  misc_feature (61)..(61): /note="Nucleotide may be methylated to form 5-methylcytosine"
ggctgagtagtttccttcccctactgaaataggaagatcctacaattatgtgcttccccacggtcgagatgtcagggattagactcataaaaggcaaatcttagccaattggatgaatatca

SEQ ID NO: 21762 - DNA, 122 bp, Homo sapiens
  misc_feature (61)..(62): /note="This region represents a CpG dinucleotide"
  misc_feature (61)..(61): /note="Nucleotide may be methylated to form 5-methylcytosine"
taaaaagaggagccggaggataagtctacgctgggacctacttagtcattacaaatgatacgtactaatgataaagaggacgccagaggataagtgtattcatctgtctcagcattgtccag

SEQ ID NO: 21763 - DNA, 122 bp, Homo sapiens
  misc_feature (61)..(62): /note="This region represents a CpG dinucleotide"
  misc_feature (61)..(61): /note="Nucleotide may be methylated to form 5-methylcytosine"
gtatctctgagacaccccgattggctggagaattgacttgggagagataaggagggagggcgggtgccagcatgctatgggctcctgcgtgaggcctgtggtacacagagattaggttgtga

SEQ ID NO: 21764 - DNA, 122 bp, Homo sapiens
  misc_feature (61)..(62): /note="This region represents a CpG dinucleotide"
  misc_feature (61)..(61): /note="Nucleotide may be methylated to form 5-methylcytosine"
tgaagttgcttaattggttgccttgacacaggcttattacatcttacatcattaagccttcgctgtaacaatatttttgaagcacagacaaaagatgaatttgagtagctattattttcctg

SEQ ID NO: 21765 - DNA, 122 bp, Homo sapiens
  misc_feature (61)..(62): /note="This region represents a CpG dinucleotide"
  misc_feature (61)..(61): /note="Nucleotide may be methylated to form 5-methylcytosine"
tgtggtttgaattaaaaatggtcatttggtaggatttgtaaccatatttggcccctgttacgatataagagtatggtgtgccagacacacaggcctttgcacctaaagggagttctgctcac

SEQ ID NO: 21766 - DNA, 122 bp, Homo sapiens
  misc_feature (61)..(62): /note="This region represents a CpG dinucleotide"
  misc_feature (61)..(61): /note="Nucleotide may be methylated to form 5-methylcytosine"
tagttgttactatctgagataccacagcaatcccttaatcttctttggctttccaacacacgtgtatctagttccttttattcaattccctttgtttgcaattcctagcatggattctgctt

SEQ ID NO: 21767 - DNA, 122 bp, Homo sapiens
  misc_feature (61)..(62): /note="This region represents a CpG dinucleotide"
  misc_feature (61)..(61): /note="Nucleotide may be methylated to form 5-methylcytosine"
aacatcaatttcactgcagacaaacccagtcacacagattaagcaagcacaatactggtgcgtcttatctctgaccacaggaggagggtagacagattctacaggatgaagaaattcagact

SEQ ID NO: 21768 - DNA, 122 bp, Homo sapiens
  misc_feature (61)..(62): /note="This region represents a CpG dinucleotide"
  misc_feature (61)..(61): /note="Nucleotide may be methylated to form 5-methylcytosine"
tgcctgaggaagtagatctgagcttcatactcaggtctgtctgcctctagagtccaagtgcgtctccccagccacatgtactggggagaaaggcgtgttcctgcaccccattccacctgacc

SEQ ID NO: 21769 - DNA, 122 bp, Homo sapiens
  misc_feature (61)..(62): /note="This region represents a CpG dinucleotide"
  misc_feature (61)..(61): /note="Nucleotide may be methylated to form 5-methylcytosine"
ccatgttgtagacaccatcctgcctgtcaatacccatttcagtttgactgtggtagtatccgtcttgtgtttaagtcacccttatttgacttactcatgacccaaaatgcaagagtagtgag

SEQ ID NO: 21770 - DNA, 122 bp, Homo sapiens
  misc_feature (61)..(62): /note="This region represents a CpG dinucleotide"
  misc_feature (61)..(61): /note="Nucleotide may be methylated to form 5-methylcytosine"
ctatggaatgccattccccttcaaccaccacaaacaaactttcaacaggttttgttctgccgagtattctgtttccacagcttcaggtcacaagaagtttggataggagagagggattgttt

SEQ ID NO: 21771 - DNA, 122 bp, Homo sapiens
  misc_feature (61)..(62): /note="This region represents a CpG dinucleotide"
  misc_feature (61)..(61): /note="Nucleotide may be methylated to form 5-methylcytosine"
gtctactggattatttgtctcagatcttaggggaggaagtggaagagctggagaacagcacgtgttattttagagttataactggaagtatttggaatggcttctatgaaagtttatttcac

SEQ ID NO: 21772 - DNA, 122 bp, Homo sapiens
  misc_feature (61)..(62): /note="This region represents a CpG dinucleotide"
  misc_feature (61)..(61): /note="Nucleotide may be methylated to form 5-methylcytosine"
tttccactcatatgtttgttcagctttctttgcttttctcccaaaccataacgaaatagacgctatcaattttcccaagatggcaacctaacagctagccaggtgttctcagataagaaggg

SEQ ID NO: 21773 - DNA, 122 bp, Homo sapiens
  misc_feature (61)..(62): /note="This region represents a CpG dinucleotide"
  misc_feature (61)..(61): /note="Nucleotide may be methylated to form 5-methylcytosine"
tgctcctcacccatccggtctcactgggacgccacgttcctcagggaagccagtcgggaacgttttttttgtttgtttgtttgtttttgagacggagttctatgttatccaggctggtgtcg

SEQ ID NO: 21774 - DNA, 122 bp, Homo sapiens
  misc_feature (61)..(62): /note="This region represents a CpG dinucleotide"
  misc_feature (61)..(61): /note="Nucleotide may be methylated to form 5-methylcytosine"
gaaggaaagcatggaaaacaaatagcagctttctcttagaatgcaaagaacagaagctgccgacacctgaaaataaaagctatgccctgtgctttgaggaagaccagagtcagctctgaatc

SEQ ID NO: 21775 - DNA, 122 bp, Homo sapiens
  misc_feature (61)..(62): /note="This region represents a CpG dinucleotide"
  misc_feature (61)..(61): /note="Nucleotide may be methylated to form 5-methylcytosine"
cgtgaactccgcgtccatggcctaccctgtgattgtcatcatttctatgtgagaaaaaagcggctactgattcacagcgaaaggaaacggactaggttctgaaacttcctgtttgtctggta

SEQ ID NO: 21776 - DNA, 122 bp, Homo sapiens
  misc_feature (61)..(62): /note="This region represents a CpG dinucleotide"
  misc_feature (61)..(61): /note="Nucleotide may be methylated to form 5-methylcytosine"
ctctgcctgtgacaagctgcacaagcctcactcagtgcctggcggggttgcagctggagacgtgggaggaaaaacaatttctaatcctggtgtttgtgcaatagagtatcaggtggacggtg

SEQ ID NO: 21777 - DNA, 122 bp, Homo sapiens
  misc_feature (61)..(62): /note="This region represents a CpG dinucleotide"
  misc_feature (61)..(61): /note="Nucleotide may be methylated to form 5-methylcytosine"
gcctgcaagcacactgacttccacatccctagcatttaggcctttgaatagaagctgacacgtagcagccagctgaacaagtatttaatgaggagcaacacaactccaagaagggctcctta

SEQ ID NO: 21778 - DNA, 122 bp, Homo sapiens
  misc_feature (61)..(62): /note="This region represents a CpG dinucleotide"
  misc_feature (61)..(61): /note="Nucleotide may be methylated to form 5-methylcytosine"
caacctttgtgcctggatgatgctctacaaatgcagatcctacttccataactccaatagcgctgctgtagtagcaggtttctgacatactccaaggaagggagaattttagctggccattc

SEQ ID NO: 21779 - DNA, 122 bp, Homo sapiens
  misc_feature (61)..(62): /note="This region represents a CpG dinucleotide"
  misc_feature (61)..(61): /note="Nucleotide may be methylated to form 5-methylcytosine"
tatggcgtgtttgatttgcttttctctaaagcactgctctgtaagttcctatggggggggcgggcagagctgctagaaatacagaagcataagagagtaaataatggtaccttcatatgcaa

SEQ ID NO: 21780 - DNA, 122 bp, Homo sapiens
  misc_feature (61)..(62): /note="This region represents a CpG dinucleotide"
  misc_feature (61)..(61): /note="Nucleotide may be methylated to form 5-methylcytosine"
gagcagtaatgtcatgttagttgtgacagtactcaggtgagtaacaccagtaccacctgccgggtgttgtggcctagctgtgtgctaagtgccatgttgggctcctcacacatgatcgtgtt

SEQ ID NO: 21781 - DNA, 122 bp, Homo sapiens
  misc_feature (61)..(62): /note="This region represents a CpG dinucleotide"
  misc_feature (61)..(61): /note="Nucleotide may be methylated to form 5-methylcytosine"
gatgacaccaccaactgtaattactctccatgtgtgaaacggtggccgaggacactgaagcgtgacaagtggccagtctttcccacactgccgacattggaagattgctctttgatttatgt

SEQ ID NO: 21782 - DNA, 122 bp, Homo sapiens
  misc_feature (61)..(62): /note="This region represents a CpG dinucleotide"
  misc_feature (61)..(61): /note="Nucleotide may be methylated to form 5-methylcytosine"
ttcctaattgggaaactctgttttaccttctctagagaatagacatgcaagtttatgctgcggtaggagagggacagttacccagaggtgcagagagagaagggaatctaggaatccacctg

SEQ ID NO: 21783 - DNA, 122 bp, Homo sapiens
  misc_feature (61)..(62): /note="This region represents a CpG dinucleotide"
  misc_feature (61)..(61): /note="Nucleotide may be methylated to form 5-methylcytosine"
ccaatcccggcttcaacaggttctccccagaacccaaacttgggtgaagtttcaccccctcgcggggcgcgggctggccgggtgcgcccggagtcctggagccgcgccgctcagtccgtgga

SEQ ID NO: 21784 - DNA, 122 bp, Homo sapiens
  misc_feature (61)..(62): /note="This region represents a CpG dinucleotide"
  misc_feature (61)..(61): /note="Nucleotide may be methylated to form 5-methylcytosine"
aaaagtctaaaccctgggtgtgcatgttaattcgtatttctctatccacacctgggaacccgcctctcaaagcagtcacttccaagaaggaggaatgtttgtgctgtgtagggcatctgtgg

SEQ ID NO: 21785 - DNA, 122 bp, Homo sapiens
  misc_feature (61)..(62): /note="This region represents a CpG dinucleotide"
  misc_feature (61)..(61): /note="Nucleotide may be methylated to form 5-methylcytosine"
attttgtaataacatgttcaaatgaagacaaaaattttacagtttaagacttaaattcttcgtccacagcaagtgaattcatggtattttacttttttgggaaatactggaaatgaagacct

SEQ ID NO: 21786 - DNA, 122 bp, Homo sapiens
  misc_feature (61)..(62): /note="This region represents a CpG dinucleotide"
  misc_feature (61)..(61): /note="Nucleotide may be methylated to form 5-methylcytosine"
aagaggtcatcacctgcagatgcggttaagcaacttgcagaggccccagggctgagccaccgcagaaccggagctggaaaccagtcctatgactcctgaggcagtgctctttctactacctg

SEQ ID NO: 21787 - DNA, 122 bp, Homo sapiens
  misc_feature (61)..(62): /note="This region represents a CpG dinucleotide"
  misc_feature (61)..(61): /note="Nucleotide may be methylated to form 5-methylcytosine"
cctgcccgcccttctcctccagggcatcctacaaatgtcctgtgccaccacctctcatagcgctgccaggagcagtgtgagaaggactcatgaccacgcctcaatcctgaattcccctcgcc

SEQ ID NO: 21788 - DNA, 122 bp, Homo sapiens
  misc_feature (61)..(62): /note="This region represents a CpG dinucleotide"
  misc_feature (61)..(61): /note="Nucleotide may be methylated to form 5-methylcytosine"
tctttttgttataggcttgtgctataaacatccatcttactcttagtttgacctttgtgccgtgggctcatgtctgtaatacaggaacccaatcatttctgaaagtctgtctaacagtgata

SEQ ID NO: 21789 - DNA, 122 bp, Homo sapiens
  misc_feature (61)..(62): /note="This region represents a CpG dinucleotide"
  misc_feature (61)..(61): /note="Nucleotide may be methylated to form 5-methylcytosine"
gtattggttcttggtcagtctgctgaattcaaaacactattacctttaatcagcaacttgcgggtgttttattaatagagctgaaaaaggctcatctaacatataagaatttcctggtttcc

SEQ ID NO: 21790 - DNA, 122 bp, Homo sapiens
  misc_feature (61)..(62): /note="This region represents a CpG dinucleotide"
  misc_feature (61)..(61): /note="Nucleotide may be methylated to form 5-methylcytosine"
acagatgaggaaactgaggttccaactagcccagcagcctgtctgaaattatagttcatacgaggctgagccaaggttcagacttggaagcacattcacttttgatacactccattcactca

SEQ ID NO: 21791 - DNA, 122 bp, Homo sapiens
  misc_feature (61)..(62): /note="This region represents a CpG dinucleotide"
  misc_feature (61)..(61): /note="Nucleotide may be methylated to form 5-methylcytosine"
tgaaatgaattgtgtcattcatacatgctaagatccagtgaatgctaagaaaataacatacgatttaataaataatagtgttactgagtaagcaaacattatttttcactaaaattataaaa

SEQ ID NO: 21792 - DNA, 122 bp, Homo sapiens
  misc_feature (61)..(62): /note="This region represents a CpG dinucleotide"
  misc_feature (61)..(61): /note="Nucleotide may be methylated to form 5-methylcytosine"
agctgagctgtcatacaacttaatcctttcgcaagtgatagacatcagatccagttctcccgtgcggcaaggtaaagcttgcactatccttgcccaaaatttacgtcacctacttaatgtgg

SEQ ID NO: 21793 - DNA, 122 bp, Homo sapiens
  misc_feature (61)..(62): /note="This region represents a CpG dinucleotide"
  misc_feature (61)..(61): /note="Nucleotide may be methylated to form 5-methylcytosine"
tgctgtgccttgatgtgcacgtaggccacatttatgattgactttacacaaacatctcagcgcagtaaagagcagtattggccgggcgcggtggctcacgcctgtaatcccagcactttggg

SEQ ID NO: 21794 - DNA, 122 bp, Homo sapiens
  misc_feature (61)..(62): /note="This region represents a CpG dinucleotide"
  misc_feature (61)..(61): /note="Nucleotide may be methylated to form 5-methylcytosine"
accctccagaaggctaaatcgccccgttcctactctatgattcaccgtcagcagagcacacgccagacaaggaaagcacaaagcctgacttggggtggggtaccttgattaaagaagtgtct

SEQ ID NO: 21795 - DNA, 122 bp, Homo sapiens
  misc_feature (61)..(62): /note="This region represents a CpG dinucleotide"
  misc_feature (61)..(61): /note="Nucleotide may be methylated to form 5-methylcytosine"
ctactgtgttttttatttctggactcttcatatccgagggccaggatgcagctctacaaacggcaatggagctgaggtgaattcatttgctgaaagatagctcatgcaccttgcctcagaca

SEQ ID NO: 21796 - DNA, 122 bp, Homo sapiens
  misc_feature (61)..(62): /note="This region represents a CpG dinucleotide"
  misc_feature (61)..(61): /note="Nucleotide may be methylated to form 5-methylcytosine"
tctaggattaacaatagtatattgttttgtgaaactttcagttttatgcatatgcacacacgtctctatatactggctcatgatataaaatgtgtttcttactgtgggtcatggccaaaaaa

SEQ ID NO: 21797 - DNA, 122 bp, Homo sapiens
  misc_feature (61)..(62): /note="This region represents a CpG dinucleotide"
  misc_feature (61)..(61): /note="Nucleotide may be methylated to form 5-methylcytosine"
gcttgagttgaatgacttttccaccctctttccttggcaggaacaagtgaccctgtcttccgtggcctcgtggggctggctctgctcctcctcccttgactgagagacgtcatggagattgg

SEQ ID NO: 21798 - DNA, 122 bp, Homo sapiens
  misc_feature (61)..(62): /note="This region represents a CpG dinucleotide"
  misc_feature (61)..(61): /note="Nucleotide may be methylated to form 5-methylcytosine"
aagtcaattatgctccaattttcaaagccctgcaagcacccaaccagattcctttccttacgcagatcacaggttcgtactgcaactcactactgtctcagaactaaagctttcctgtttct

SEQ ID NO: 21799 - DNA, 122 bp, Homo sapiens
  misc_feature (61)..(62): /note="This region represents a CpG dinucleotide"
  misc_feature (61)..(61): /note="Nucleotide may be methylated to form 5-methylcytosine"
gtgtgtttgctgtgaggctacaattaggcactggatctggttatccggactaggaagtgacgaaagaaccttcaggcatatcagtaaagataaagatcagagtgtatcttctaatatgtcag

SEQ ID NO: 21800 - DNA, 122 bp, Homo sapiens
  misc_feature (61)..(62): /note="This region represents a CpG dinucleotide"
  misc_feature (61)..(61): /note="Nucleotide may be methylated to form 5-methylcytosine"
ttgagggaagtacaaagcttaaccgtagacaggaacctggaaatgctgggtcagcctcttcgtctacccgtacatgacatacaaaattattccatgttacttcaatacttttacccagagcc

SEQ ID NO: 21801 - DNA, 122 bp, Homo sapiens
  misc_feature (61)..(62): /note="This region represents a CpG dinucleotide"
  misc_feature (61)..(61): /note="Nucleotide may be methylated to form 5-methylcytosine"
gctcactcatgcttggactactgcccaagtcctgtgacatcattgctcccctctctgacccgtcttcatcccaggaaggaccttcatgttaccctccccaagcagcacttccacaacctcac

SEQ ID NO: 21802 - DNA, 122 bp, Homo sapiens
  misc_feature (61)..(62): /note="This region represents a CpG dinucleotide"
  misc_feature (61)..(61): /note="Nucleotide may be methylated to form 5-methylcytosine"
acaaggaaacatcttcataacgctgtagttggaaggtgaagatgatgtattttgagctgacgtgtatgttgaagtgaatatgctcaacagcactctatgtggaaaccaaattaaatttaatt

SEQ ID NO: 21803 - DNA, 122 bp, Homo sapiens
  misc_feature (61)..(62): /note="This region represents a CpG dinucleotide"
  misc_feature (61)..(61): /note="Nucleotide may be methylated to form 5-methylcytosine"
tatgtactttaccttcctgttctgcttataaatactcattgcttacagttgcagagctctcggaacctcttctggttctgagtactgcctgattcaagaatcattctttactcaaataaact

SEQ ID NO: 21804 - DNA, 122 bp, Homo sapiens
  misc_feature (61)..(62): /note="This region represents a CpG dinucleotide"
  misc_feature (61)..(61): /note="Nucleotide may be methylated to form 5-methylcytosine"
gcttgggcttcagtcttgctgtttggctctgtcgaatattctatgggccacctaaaatcccgtggtaggttaatttactgcctaaataagtctgagtggattcgttcttgcagtgactgaaa

SEQ ID NO: 21805 - DNA, 122 bp, Homo sapiens
  misc_feature (61)..(62): /note="This region represents a CpG dinucleotide"
  misc_feature (61)..(61): /note="Nucleotide may be methylated to form 5-methylcytosine"
aggtcagtttaacctgactcacccatggccagaagtgtcacaatgtggacatgactagaccgcctttgcaaatccccaaagcttgaccactcccttggccaactgcagggttgcggttttcg

SEQ ID NO: 21806 - DNA, 122 bp, Homo sapiens
  misc_feature (61)..(62): /note="This region represents a CpG dinucleotide"
  misc_feature (61)..(61): /note="Nucleotide may be methylated to form 5-methylcytosine"
gaagcacgagagtcttgatcattagagcaaggagtcatcacgtggctgccatcctctgagcgtagatccagatcacttcctagctgcatgatgtgggtcagaatttcactagcctgagcctc

SEQ ID NO: 21807 - DNA, 122 bp, Homo sapiens
  misc_feature (61)..(62): /note="This region represents a CpG dinucleotide"
  misc_feature (61)..(61): /note="Nucleotide may be methylated to form 5-methylcytosine"
gtcacggcccccgtttacacaagagtaaagctgaggcctggagaaatccagtcacctgcccgagggccacacaactggtccggtgagggctgtgagtaaccctggatgtccctctgcagagt

SEQ ID NO: 21808 - DNA, 122 bp, Homo sapiens
  misc_feature (61)..(62): /note="This region represents a CpG dinucleotide"
  misc_feature (61)..(61): /note="Nucleotide may be methylated to form 5-methylcytosine"
aaagagggagaagcattccaggcaaagaaaacagaatatgcaacagggcagaagcatgaacgagcattatgcctttgggaagctataaatagttcagcttggctgaagcacaggatatgtgt

SEQ ID NO: 21809 - DNA, 122 bp, Homo sapiens
  misc_feature (61)..(62): /note="This region represents a CpG dinucleotide"
  misc_feature (61)..(61): /note="Nucleotide may be methylated to form 5-methylcytosine"
atacagatgagaaatcaagcacagagaggttaaatcactcatcaaagcttagacagtaagcgctggggctggtcttgaaacccaagtgccctggccctggagcacatgcccttagccactgt

SEQ ID NO: 21810 - DNA, 122 bp, Homo sapiens
  misc_feature (61)..(62): /note="This region represents a CpG dinucleotide"
  misc_feature (61)..(61): /note="Nucleotide may be methylated to form 5-methylcytosine"
gatccacattgtaggctctgatgcaatacctatgctggggtagtcctcaagctaagaggccgtttctactttagagacttaatgaccatctagtttggtgttttcctcaggtccattatctc

SEQ ID NO: 21811 - DNA, 122 bp, Homo sapiens
  misc_feature (61)..(62): /note="This region represents a CpG dinucleotide"
  misc_feature (61)..(61): /note="Nucleotide may be methylated to form 5-methylcytosine"
gaggacgtcgaagtgcgcactagccctccatggaagacgggagcagaggacggtggagtgcgcaccagtcctccgtggtagacaggagcagagaatgcctggagtgtgtactagccctccat

SEQ ID NO: 21812 - DNA, 122 bp, Homo sapiens
  misc_feature (61)..(62): /note="This region represents a CpG dinucleotide"
  misc_feature (61)..(61): /note="Nucleotide may be methylated to form 5-methylcytosine"
gaggctctcgctgaaaccagtcccaggctccacagagtcagatcacggcttcacaccagtcgttctggtcacttaggcgttcgcgtgagcgctcaaccccttaccgccacctcatcgtcact

SEQ ID NO: 21813 - DNA, 122 bp, Homo sapiens
  misc_feature (61)..(62): /note="This region represents a CpG dinucleotide"
  misc_feature (61)..(61): /note="Nucleotide may be methylated to form 5-methylcytosine"
atgaagcttacgtttgggaaagcaggaaaagtaagatcataaacactataaagcctactacgtctcagacattctgttttcagagggcaaggaagacttcagaaagagttcattcaaagtga

SEQ ID NO: 21814 - DNA, 122 bp, Homo sapiens
  misc_feature (61)..(62): /note="This region represents a CpG dinucleotide"
  misc_feature (61)..(61): /note="Nucleotide may be methylated to form 5-methylcytosine"
gaaaattcaccagtaccttctccgcttttgtctaaattcatctgtgagaagctttactcacgctttggctgccggtgactcacggttaaatcatctctctcaacttttttccttttcggttt

SEQ ID NO: 21815 - DNA, 122 bp, Homo sapiens
  misc_feature (61)..(62): /note="This region represents a CpG dinucleotide"
  misc_feature (61)..(61): /note="Nucleotide may be methylated to form 5-methylcytosine"
ataaaacccaacaacatagaaggaagcctgccttcactctgtgaagagtgtctggacaaacgagagtagtttccaaacactgatcaaggatttctcccatccacacagtaagacaccagttg

SEQ ID NO: 21816 - DNA, 122 bp, Homo sapiens
  misc_feature (61)..(62): /note="This region represents a CpG dinucleotide"
  misc_feature (61)..(61): /note="Nucleotide may be methylated to form 5-methylcytosine"
aaataaacattatgtacttggtcttgttattatgaaaaaaaaccctgcctctaaacatggcgagatatatcttgcactaccagtatttcctgatggggctgctgttggccttttagtccaag

SEQ ID NO: 21817 - DNA, 122 bp, Homo sapiens
  misc_feature (61)..(62): /note="This region represents a CpG dinucleotide"
  misc_feature (61)..(61): /note="Nucleotide may be methylated to form 5-methylcytosine"
tttgggctgctcaaaatgaatttcctggataattttcctaagccctcactgactcctactcgcatgtattgctaggagccagctttcactcctgggactggtttgggcttccagaaagcatg

SEQ ID NO: 21818 - DNA, 122 bp, Homo sapiens
  misc_feature (61)..(62): /note="This region represents a CpG dinucleotide"
  misc_feature (61)..(61): /note="Nucleotide may be methylated to form 5-methylcytosine"
agtagactggcaatcaagaaagtggacagggcccattgctgggtggggtttggggctttacgactgcagtctggcatatgcaatctggcgtatgtggtcaaatcaagcttatgtgtgaatgc

SEQ ID NO: 21819 - DNA, 122 bp, Homo sapiens
  misc_feature (61)..(62): /note="This region represents a CpG dinucleotide"
  misc_feature (61)..(61): /note="Nucleotide may be methylated to form 5-methylcytosine"
attacttacaacattatttacgtacaataaagttgagacagccaaagtgaaatcttgttacgcaagcatgggcacttgttagatctaactacaaacactgctgtgtggtttttatctttaga

SEQ ID NO: 21820 - DNA, 122 bp, Homo sapiens
  misc_feature (61)..(62): /note="This region represents a CpG dinucleotide"
  misc_feature (61)..(61): /note="Nucleotide may be methylated to form 5-methylcytosine"
aaccctggacaggtcctgacagattaccgagactgaggtttttaactcatcatccttgggcgtgcattaaagggtccatgaggcctttgaaagtatgtgtatgggtgtgtatacataattcc

SEQ ID NO: 21821 - DNA, 122 bp, Homo sapiens
  misc_feature (61)..(62): /note="This region represents a CpG dinucleotide"
  misc_feature (61)..(61): /note="Nucleotide may be methylated to form 5-methylcytosine"
gtggatgggtgtggctcctaacacccggggaactgcggtggtggtatttgtttgaagtgccgtgtatgtgtgctttgtgtattcccacacacacacttatagcagagtgcagtttcctggat

SEQ ID NO: 21822 - DNA, 122 bp, Homo sapiens
  misc_feature (61)..(62): /note="This region represents a CpG dinucleotide"
  misc_feature (61)..(61): /note="Nucleotide may be methylated to form 5-methylcytosine"
gatcttcaagatctgctgattgccaaagaggagcaagaagacctcttgagaaagcgagagcgtgaactcaccgccctgaagggagccctgaaagaagaggtttccagccatgatcaggagat

SEQ ID NO: 21823 - DNA, 122 bp, Homo sapiens
  misc_feature (61)..(62): /note="This region represents a CpG dinucleotide"
  misc_feature (61)..(61): /note="Nucleotide may be methylated to form 5-methylcytosine"
ggtgaaagtcccggaccttgagacagtcggggagctgatccatgagcaaccatcgcatgccgggtacagccgcaaacaatgtacacagctgcggaattatttttctttcttttttcttttct

SEQ ID NO: 21824 - DNA, 122 bp, Homo sapiens
  misc_feature (61)..(62): /note="This region represents a CpG dinucleotide"
  misc_feature (61)..(61): /note="Nucleotide may be methylated to form 5-methylcytosine"
gccatgaatttgaagtgaaccagagggaggtggcagaagaagcttaatggggaatagttccggtagagaaatgaggcttaagatgaactaccctggcccttatgtgtcagagagaacggctt

SEQ ID NO: 21825 - DNA, 122 bp, Homo sapiens
  misc_feature (61)..(62): /note="This region represents a CpG dinucleotide"
  misc_feature (61)..(61): /note="Nucleotide may be methylated to form 5-methylcytosine"
agaacttaccgacagcaaatgacagctttgcatgacaaagctaagtccaggaaatactgtcgtactccaaaggttaaggcatatttgagggttttcccatcaattataagagcaaaatcatt

SEQ ID NO: 21826 - DNA, 122 bp, Homo sapiens
  misc_feature (61)..(62): /note="This region represents a CpG dinucleotide"
  misc_feature (61)..(61): /note="Nucleotide may be methylated to form 5-methylcytosine"
agaagtagccttgtcaccagggacgctccgggggcaggcgaggtgggtgtcaggtggcggcgttcacatccgcttggcagcacggccagcgtggcagggcaaggtgcagctgggacaagggc

SEQ ID NO: 21827 - DNA, 122 bp, Homo sapiens
  misc_feature (61)..(62): /note="This region represents a CpG dinucleotide"
  misc_feature (61)..(61): /note="Nucleotide may be methylated to form 5-methylcytosine"
tgtcacagttcttaaaaatggtgtgtccagagtttgtcccttctgacgttcggacctgtccggagtttcttcctgctggtgggtttgtggtctcacttcgtggtctggctgactttaggagt

SEQ ID NO: 21828 - DNA, 122 bp, Homo sapiens
  misc_feature (61)..(62): /note="This region represents a CpG dinucleotide"
  misc_feature (61)..(61): /note="Nucleotide may be methylated to form 5-methylcytosine"
cagatgaagaaactgagacatagatagagaggtggagagaacttgaccagggctctatagcgagtagtggtaaagtgagggctgaaatcagatctggttagcctcagggcctgaggagtatt

SEQ ID NO: 21829 - DNA, 122 bp, Homo sapiens
  misc_feature (61)..(62): /note="This region represents a CpG dinucleotide"
  misc_feature (61)..(61): /note="Nucleotide may be methylated to form 5-methylcytosine"
ctcacaggaggccacatggtgcagtagagtcagactttgattcaaagcccaactctgtcacgtgacagtaggcttgagtttcctcatctgtaaaaagggaagatttcctacttcataaagtg

SEQ ID NO: 21830 - DNA, 122 bp, Homo sapiens
  misc_feature (61)..(62): /note="This region represents a CpG dinucleotide"
  misc_feature (61)..(61): /note="Nucleotide may be methylated to form 5-methylcytosine"
tcttttacaaaattgtttgggctgtcatacgttgtttttagaatcaatttgttatttttacgaaaaacagcatgctgggttttttattgggatagtactgagtctgtagatcaactttaaca

SEQ ID NO: 21831 - DNA, 122 bp, Homo sapiens
  misc_feature (61)..(62): /note="This region represents a CpG dinucleotide"
  misc_feature (61)..(61): /note="Nucleotide may be methylated to form 5-methylcytosine"
tggggtgagccgcaggatctaggtcaccgtgctctggccctgctctctgcctttcgcaagcgcttgctcccgtgggatgtttgtcatgcttccatgcatgacacaggagaatatcaacattg

SEQ ID NO: 21832 - DNA, 122 bp, Homo sapiens
  misc_feature (61)..(62): /note="This region represents a CpG dinucleotide"
  misc_feature (61)..(61): /note="Nucleotide may be methylated to form 5-methylcytosine"
ctcctgacattgctaaagatgatcatgaagacatttatccagtctctcctgcctccctttcgcccatcccttcagaagcttatgtcaagtgtgacaggctaggtgatgaatgggtagaaagt

SEQ ID NO: 21833 - DNA, 122 bp, Homo sapiens
  misc_feature (61)..(62): /note="This region represents a CpG dinucleotide"
  misc_feature (61)..(61): /note="Nucleotide may be methylated to form 5-methylcytosine"
aggtgctctgcaaggtaggcgattgtttattagagcagcctggcccttatatgatctcagcgtatcaataggaacattgtgttgggagggaagagccataaaatgcctcgggagatgctgag

SEQ ID NO: 21834 - DNA, 122 bp, Homo sapiens
  misc_feature (61)..(62): /note="This region represents a CpG dinucleotide"
  misc_feature (61)..(61): /note="Nucleotide may be methylated to form 5-methylcytosine"
ctatcaaaagaactggtgttgaagccaccaacattcctgtgatataactcagagaacctccgtcaacacatataaggacctggcagaatccctgctgattaattcagcattcatcccaagat

SEQ ID NO: 21835 - DNA, 122 bp, Homo sapiens
  misc_feature (61)..(62): /note="This region represents a CpG dinucleotide"
  misc_feature (61)..(61): /note="Nucleotide may be methylated to form 5-methylcytosine"
ttttttcatttcaggtttattgttggccaaaaccaggctttgattgaaccaggatgaatgcgggtgttggaagtagaatatatatatacatataaaattggtaagtggtgccaacacgtctt

SEQ ID NO: 21836 - DNA, 122 bp, Homo sapiens
  misc_feature (61)..(62): /note="This region represents a CpG dinucleotide"
  misc_feature (61)..(61): /note="Nucleotide may be methylated to form 5-methylcytosine"
gcaggacctcagatttccttatgcgcaaaatgtccccattttttgcagagtttcttggagcgtccttctaaggttgagctcagctcacttcactaggttgtcatttaagagcatattgtggg

SEQ ID NO: 21837 - DNA, 122 bp, Homo sapiens
  misc_feature (61)..(62): /note="This region represents a CpG dinucleotide"
  misc_feature (61)..(61): /note="Nucleotide may be methylated to form 5-methylcytosine"
caaaagttgagccttggagaatcagtcaataggattttaaaagcttaggaagaaaataaacgacaataacaggtactctcaatagtgtgataaggataggggtgatatctccaggaaattaa

SEQ ID NO: 21838 - DNA, 122 bp, Homo sapiens
  misc_feature (61)..(62): /note="This region represents a CpG dinucleotide"
  misc_feature (61)..(61): /note="Nucleotide may be methylated to form 5-methylcytosine"
gggccctatggagccaaagggagtaaacagaatagtactgttctgggttgttgagggattcggtgagattccctaggtaggttttggtcaacaagcaggcatttcataatcctctctacctc

SEQ ID NO: 21839 - DNA, 122 bp, Homo sapiens
  misc_feature (61)..(62): /note="This region represents a CpG dinucleotide"
  misc_feature (61)..(61): /note="Nucleotide may be methylated to form 5-methylcytosine"
ggaggaagtaaccactgtaacagatacagcagatagtggaataaggtaaggactgatcatcggttattgatggagatcactggagaccttgataaacagcagttttggtggtgtggtaggga

SEQ ID NO: 21840 - DNA, 122 bp, Homo sapiens
  misc_feature (61)..(62): /note="This region represents a CpG dinucleotide"
  misc_feature (61)..(61): /note="Nucleotide may be methylated to form 5-methylcytosine"
acatatattcttgccctttaatccagcttctagcaagttatctaagtgattcatcagatacgtgcaaagactagtattcatcacagcactgttcacaaaagtaaaactctgggaacagccta

SEQ ID NO: 21841 - DNA, 122 bp, Homo sapiens
  misc_feature (61)..(62): /note="This region represents a CpG dinucleotide"
  misc_feature (61)..(61): /note="Nucleotide may be methylated to form 5-methylcytosine"
gtcaagggcctctgtttaataatggcaccttacttgattggggtccccatggttatcttacgtctgcaaatcagactatattgggtttgggagtccctccaatagttctatcacctggtcag

SEQ ID NO: 21842 - DNA, 122 bp, Homo sapiens
  misc_feature (61)..(62): /note="This region represents a CpG dinucleotide"
  misc_feature (61)..(61): /note="Nucleotide may be methylated to form 5-methylcytosine"
gggaagcaggcaggggctgagcctgccaggcctgcccgagggagggggctgtgggcccctcgccattcactgctaagcctggatccgggcgcctttgtgccaagaacaaaacccgggggatc

SEQ ID NO: 21843 - DNA, 122 bp, Homo sapiens
  misc_feature (61)..(62): /note="This region represents a CpG dinucleotide"
  misc_feature (61)..(61): /note="Nucleotide may be methylated to form 5-methylcytosine"
cgtatgagggtttcagtttctccatatcctcaccagtactatgtgtatgcttatagcaatcgtacagggtgtgacgtgttatctttttgtggtttttatttgcattttcctgatggctcaag

SEQ ID NO: 21844 - DNA, 122 bp, Homo sapiens
  misc_feature (61)..(62): /note="This region represents a CpG dinucleotide"
  misc_feature (61)..(61): /note="Nucleotide may be methylated to form 5-methylcytosine"
aggcaggagaattgcctgaacccaggaggtgaaggttgcagtgagccaagattgtgccgtcgcactccagccttggcaagagcgaaactctctcaaagaaaagaaaaagagaaaagaaaaaa

SEQ ID NO: 21845 - DNA, 122 bp, Homo sapiens
  misc_feature (61)..(62): /note="This region represents a CpG dinucleotide"
  misc_feature (61)..(61): /note="Nucleotide may be methylated to form 5-methylcytosine"
gaaggtctcctttgaatggatgctgcagaggaagcattgaagacgctgcttcagtgaaatcgaccttgttctcaactttcctttatttccccttgtatctatctgtaccctccacttactta

SEQ ID NO: 21846 - DNA, 122 bp, Homo sapiens
  misc_feature (61)..(62): /note="This region represents a CpG dinucleotide"
  misc_feature (61)..(61): /note="Nucleotide may be methylated to form 5-methylcytosine"
tagaaacgaaagacacttgtttccactgcaagaatgagcctgatcaagttttctggtatccgcacctgtgttagttctgtattaaaagctgtttacacagctgagtcaggaattgtccttca

SEQ ID NO: 21847 - DNA, 122 bp, Homo sapiens
  misc_feature (61)..(62): /note="This region represents a CpG dinucleotide"
  misc_feature (61)..(61): /note="Nucleotide may be methylated to form 5-methylcytosine"
ctttatcaggcactctattcttcaacaaaaatcttcaaatacaggaataatatactgttacgccactcacagcttgtttcagtcaaggaactaattaagagtaagagtattttggcagttag

SEQ ID NO: 21848 - DNA, 122 bp, Homo sapiens
  misc_feature (61)..(62): /note="This region represents a CpG dinucleotide"
  misc_feature (61)..(61): /note="Nucleotide may be methylated to form 5-methylcytosine"
ctgccacagttcttatatacttaaggcttacatcaccactcagaggacttacatcattttcgcccttaagaagagatatttggccgggcgtggtggctcacgcctgtaatcccagcactctg

SEQ ID NO: 21849 - DNA, 122 bp, Homo sapiens
  misc_feature (61)..(62): /note="This region represents a CpG dinucleotide"
  misc_feature (61)..(61): /note="Nucleotide may be methylated to form 5-methylcytosine"
gagtagattccacttcaaaaacttcttcattttctcagttataggaaacaaatgttcatccgttttaccatgagactgcagcaattcagtcacatcttcagtctccacttctaattccagtt

SEQ ID NO: 21850 - DNA, 122 bp, Homo sapiens
  misc_feature (61)..(62): /note="This region represents a CpG dinucleotide"
  misc_feature (61)..(61): /note="Nucleotide may be methylated to form 5-methylcytosine"
gggtgggaatttcctgaaactgaggcttcctcccccttttagacaatatagggtaatttccggacattgccatggtatttgtaggctgtcttggtgctggtagaagtgtgttttagcaagct

SEQ ID NO: 21851 - DNA, 122 bp, Homo sapiens
  misc_feature (61)..(62): /note="This region represents a CpG dinucleotide"
  misc_feature (61)..(61): /note="Nucleotide may be methylated to form 5-methylcytosine"
agtacaaacagacaaagcaatccagattctaacaacacaatgaacaaacttgccttattacgtagaacgctgtactcaatgaagatgataaacaaacaaaaagtattcagtctcggtcgttg

SEQ ID NO: 21852 - DNA, 122 bp, Homo sapiens
  misc_feature (61)..(62): /note="This region represents a CpG dinucleotide"
  misc_feature (61)..(61): /note="Nucleotide may be methylated to form 5-methylcytosine"
caaagaccatttctaaatgtcaaaaactgttcttcagctttagctatggcctacttacttcgcataatacttaatattagagcattctagtatgacaatagaattgggacaatctctgagag

SEQ ID NO: 21853 - DNA, 122 bp, Homo sapiens
  misc_feature (61)..(62): /note="This region represents a CpG dinucleotide"
  misc_feature (61)..(61): /note="Nucleotide may be methylated to form 5-methylcytosine"
aaaaatgactttttaaagttagaggtgagataacatcactccctgctttgaatcccccagcggttgcccaggcacctataataaaacccaaatgacacattgtggcctacaagccatgaatc

SEQ ID NO: 21854 - DNA, 122 bp, Homo sapiens
  misc_feature (61)..(62): /note="This region represents a CpG dinucleotide"
  misc_feature (61)..(61): /note="Nucleotide may be methylated to form 5-methylcytosine"
tgagattacaggcgtgagccatggcacctggccttaaattgtttttaaccacagctaatacggtacacctttcagagacggagcactccacatcacaggtggcaagagtcttgattcttcct

SEQ ID NO: 21855 - DNA, 122 bp, Homo sapiens
  misc_feature (61)..(62): /note="This region represents a CpG dinucleotide"
  misc_feature (61)..(61): /note="Nucleotide may be methylated to form 5-methylcytosine"
agggatgtgggctcgtgtctcagattcaacccgtatgcattgagtcacagttttctcttccgtcagttaagatcatgacaatgagaatgtgtgcccctaaggtggttgtgaggattaaatgg

SEQ ID NO: 21856 - DNA, 122 bp, Homo sapiens
  misc_feature (61)..(62): /note="This region represents a CpG dinucleotide"
  misc_feature (61)..(61): /note="Nucleotide may be methylated to form 5-methylcytosine"
cacccagccaatatcttgcatttgaatcaagtagtggacatttattggatcccttggggccgatgccatttctaaaagtgattgagtaaatatcacaggtgggcaaatcaaagagaaggata

SEQ ID NO: 21857 - DNA, 122 bp, Homo sapiens
  misc_feature (61)..(62): /note="This region represents a CpG dinucleotide"
  misc_feature (61)..(61): /note="Nucleotide may be methylated to form 5-methylcytosine"
cggggtttcaccacgttggctggcatggtcttgatctcttgacctcatgatctgcccattcggtctcccaaagtgctgggattacaggtgtgagcgaccgcacccagccccattaattatat

SEQ ID NO: 21858 - DNA, 122 bp, Homo sapiens
  misc_feature (61)..(62): /note="This region represents a CpG dinucleotide"
  misc_feature (61)..(61): /note="Nucleotide may be methylated to form 5-methylcytosine"
ctgtgtgtatttgggcaagttactttacctctgtgagactcagttttctcatctttaaagcgggaataataatcatatcgatcttgtagggctgataggaaggttatataagacagtgattg

SEQ ID NO: 21859 - DNA, 122 bp, Homo sapiens
  misc_feature (61)..(62): /note="This region represents a CpG dinucleotide"
  misc_feature (61)..(61): /note="Nucleotide may be methylated to form 5-methylcytosine"
ttgactgtgatggaattcttatggtttaatatgcttaaatattactgtttaacattttgacgtttttgaggacagggataattaggagaatgcacttataagtttctatgccaactgtttcc

SEQ ID NO: 21860 - DNA, 122 bp, Homo sapiens
  misc_feature (61)..(62): /note="This region represents a CpG dinucleotide"
  misc_feature (61)..(61): /note="Nucleotide may be methylated to form 5-methylcytosine"
acacttagctatgacacagctgcaggctaaaggcgtggtaagtggtcagtgaaaatctggcgaggccatagttgtcatgcctgaagttatctggacccaggaaatgcagggaagagtagctg

SEQ ID NO: 21861 - DNA, 122 bp, Homo sapiens
  misc_feature (61)..(62): /note="This region represents a CpG dinucleotide"
  misc_feature (61)..(61): /note="Nucleotide may be methylated to form 5-methylcytosine"
cacccaaaaagacccagaagacaaatggaagttaagaaggtgaagaggggacctagggaacggcattccaggcggaacaactgaagactgatgtatgaaaaggtccttacatgagaacttga

SEQ ID NO: 21862 - DNA, 122 bp, Homo sapiens
  misc_feature (61)..(62): /note="This region represents a CpG dinucleotide"
  misc_feature (61)..(61): /note="Nucleotide may be methylated to form 5-methylcytosine"
ccttggcccccagctggcttcctgctcattcccgtgccaattccgcaggcgagaatgaagcgtgttttggcaatggtgcagaaggcacccagctactgtacttgccgtatctgctggagctt

SEQ ID NO: 21863 - DNA, 122 bp, Homo sapiens
  misc_feature (61)..(62): /note="This region represents a CpG dinucleotide"
  misc_feature (61)..(61): /note="Nucleotide may be methylated to form 5-methylcytosine"
gttatttgttgccatttgtgcaaatgatcaattgtgcttctagaccaaatttcttccagccgaggctccggctaaatcactgggctttgtacaaagccctgctcaaaaaagtgtttggcatg

SEQ ID NO: 21864 - DNA, 122 bp, Homo sapiens
  misc_feature (61)..(62): /note="This region represents a CpG dinucleotide"
  misc_feature (61)..(61): /note="Nucleotide may be methylated to form 5-methylcytosine"
caaggctctaactgtagtaagaaaagctgaactgaaaccatcaaccaggctccctctttacggtctgatcaatcctgacagtaccatgtgagcagaagggcacagaattgacaaacaacatt

SEQ ID NO: 21865 - DNA, 122 bp, Homo sapiens
  misc_feature (61)..(62): /note="This region represents a CpG dinucleotide"
  misc_feature (61)..(61): /note="Nucleotide may be methylated to form 5-methylcytosine"
tttttggtttcacagaagccattgccagaggccacgtctctaacctgctgctcaaaactgcgtttgctgcagttttacggaagaatttggtgcattattttctagagtaatttactttccta

SEQ ID NO: 21866 - DNA, 122 bp, Homo sapiens
  misc_feature (61)..(62): /note="This region represents a CpG dinucleotide"
  misc_feature (61)..(61): /note="Nucleotide may be methylated to form 5-methylcytosine"
gcattgtaaagccatgacagacatgacatctatctgtaagggtggtgcttcaggtgactacgtagcttgtgtgtaatgttcctgtgatttagtcagattctttaagtagacgatatggttgc

SEQ ID NO: 21867 - DNA, 122 bp, Homo sapiens
  misc_feature (61)..(62): /note="This region represents a CpG dinucleotide"
  misc_feature (61)..(61): /note="Nucleotide may be methylated to form 5-methylcytosine"
agtgaggtagatgctattatttcattttacaaatgcaggtactgaagatcagagatgttacgtcactcaccaaagtcacacagctggttagcgcagggtcaggaatcaaccctaagtctgta

SEQ ID NO: 21868 - DNA, 122 bp, Homo sapiens
  misc_feature (61)..(62): /note="This region represents a CpG dinucleotide"
  misc_feature (61)..(61): /note="Nucleotide may be methylated to form 5-methylcytosine"
ctttcacctcagtttgttgttttctttggcttccatatgatatttttctaaagtcatcctcgaacagtctgtttattaaaaatgttacagtgagaactagatagtgatggatataaacagcc

SEQ ID NO: 21869 - DNA, 122 bp, Homo sapiens
  misc_feature (61)..(62): /note="This region represents a CpG dinucleotide"
  misc_feature (61)..(61): /note="Nucleotide may be methylated to form 5-methylcytosine"
cacgtcagcaggaggtcgcaagtcagcaccggccacgcccggcacagcagccacgccgctcgaaccacagcaggggctactcgccctcccaggccctcttcagagctggcctgagttgaagc

SEQ ID NO: 21870 - DNA, 122 bp, Homo sapiens
  misc_feature (61)..(62): /note="This region represents a CpG dinucleotide"
  misc_feature (61)..(61): /note="Nucleotide may be methylated to form 5-methylcytosine"
cagacacaggtattttgcctgagcgtgtggctagggaactgcacggcttagcgccactgacgagagtgcagcacccataagccagagatgtttgtatttatttagtacagatttaatgacaa

SEQ ID NO: 21871 - DNA, 122 bp, Homo sapiens
  misc_feature (61)..(62): /note="This region represents a CpG dinucleotide"
  misc_feature (61)..(61): /note="Nucleotide may be methylated to form 5-methylcytosine"
aatttggtagaacttggcaggtgggtaacattgtccttggcttggtggccgtgtgccgatcggcatcatcgtcatatctgtaaacgtgttggtccattttcattccagctctgttcttagcc

SEQ ID NO: 21872 - DNA, 122 bp, Homo sapiens
  misc_feature (61)..(62): /note="This region represents a CpG dinucleotide"
  misc_feature (61)..(61): /note="Nucleotide may be methylated to form 5-methylcytosine"
ataaaccataacatgaggaggcctgttttagactggctggggaaggctatgcagaggtgacgtttggcatgagagttgaagcattatgtaaacagagaccatgtacaaaggttttagggtag

SEQ ID NO: 21873 - DNA, 122 bp, Homo sapiens
  misc_feature (61)..(62): /note="This region represents a CpG dinucleotide"
  misc_feature (61)..(61): /note="Nucleotide may be methylated to form 5-methylcytosine"
ctaattgtttatgtccagaaaaacacatcacgtttgtttgattttaatgaataccatcagcgaaggaagcagaaagccataggtgcaaaaagaattgaagggctaatttttccatattggct

SEQ ID NO: 21874 - DNA, 122 bp, Homo sapiens
  misc_feature (61)..(62): /note="This region represents a CpG dinucleotide"
  misc_feature (61)..(61): /note="Nucleotide may be methylated to form 5-methylcytosine"
attatttttccttggtgagtcctactcttgacttcgctagctaacaggacagtaacacaacgcaaggataaagtgacacgccaccacgcctagctcggtgcatgttggctaacagacgatgg

SEQ ID NO: 21875 - DNA, 122 bp, Homo sapiens
  misc_feature (61)..(62): /note="This region represents a CpG dinucleotide"
  misc_feature (61)..(61): /note="Nucleotide may be methylated to form 5-methylcytosine"
gtagattgacaataaagaactagtctagcacatttggatcttaaacataaaacaaggcaacgtagattgttttaaaaatgaagtttgtgctagtctgagacctcaggtattaaatgtcttca

SEQ ID NO: 21876 - DNA, 122 bp, Homo sapiens
  misc_feature (61)..(62): /note="This region represents a CpG dinucleotide"
  misc_feature (61)..(61): /note="Nucleotide may be methylated to form 5-methylcytosine"
ttggagaccctccttgtacccccaccccccctttaattgaaactgtgtgcatgcagtgagcgcaggattctagtaatccgacgggaggatccacttaaaagactaaaatccagaaaccccag

SEQ ID NO: 21877 - DNA, 122 bp, Homo sapiens
  misc_feature (61)..(62): /note="This region represents a CpG dinucleotide"
  misc_feature (61)..(61): /note="Nucleotide may be methylated to form 5-methylcytosine"
ccaagcagactataaagtctctaaatgcaggacctgtattttactcatctctgaatagcacggtaattacttctgagcctccttggaattcagtcagattctggcttgaatattgatcccac

SEQ ID NO: 21878 - DNA, 122 bp, Homo sapiens
  misc_feature (61)..(62): /note="This region represents a CpG dinucleotide"
  misc_feature (61)..(61): /note="Nucleotide may be methylated to form 5-methylcytosine"
taacaaacctactgccctaccagtcacataaaagtctggcacatatgattgtgtatagtacgtaatacttgataaagataataaacgactgtgttattggtttatgcatttacaatactatt

SEQ ID NO: 21879 - DNA, 122 bp, Homo sapiens
  misc_feature (61)..(62): /note="This region represents a CpG dinucleotide"
  misc_feature (61)..(61): /note="Nucleotide may be methylated to form 5-methylcytosine"
agaacttccggggctcataaaggatctccactgtccatcactcacttccttccttcggtgcgatgactgactggcttcttgactctcaggaaatcagtgtctggggagaagagacaaggagg

SEQ ID NO: 21880 - DNA, 122 bp, Homo sapiens
  misc_feature (61)..(62): /note="This region represents a CpG dinucleotide"
  misc_feature (61)..(61): /note="Nucleotide may be methylated to form 5-methylcytosine"
gtaggtattaatgcctgtattctatagacgaggaaactgaggctcagggagattgagtcacgtgcccaatgtcacgtagctggtaaatgacagaactaggatttgaaaccagatgagctggg

SEQ ID NO: 21881 - DNA, 122 bp, Homo sapiens
  misc_feature (61)..(62): /note="This region represents a CpG dinucleotide"
  misc_feature (61)..(61): /note="Nucleotide may be methylated to form 5-methylcytosine"
ttctagtggagtcaacatattacatatctaattcctccagccgcaagttgtgataacatgcgtgaaatgttgtctaccggagaagctcacttgagattcagtgcccaagttgttaaattggg

SEQ ID NO: 21882 - DNA, 122 bp, Homo sapiens
  misc_feature (61)..(62): /note="This region represents a CpG dinucleotide"
  misc_feature (61)..(61): /note="Nucleotide may be methylated to form 5-methylcytosine"
gaaagtagcataaaaacaagaatgtgaactgaacatgaatgtgtagtagaaaaactacagcggggagcagttcagcttcaggaaaagtactaaagacaatcaaaggactttgccgtaattat

SEQ ID NO: 21883 - DNA, 122 bp, Homo sapiens
  misc_feature (61)..(62): /note="This region represents a CpG dinucleotide"
  misc_feature (61)..(61): /note="Nucleotide may be methylated to form 5-methylcytosine"
actcctcaactgtcaccttgatccagccagtgtcaacactgggctccctgctccccgcctcgcccctggctattctcatcagccaggcagccagggggtcctgttcaaacccaaagcagctc

SEQ ID NO: 21884 - DNA, 122 bp, Homo sapiens
  misc_feature (61)..(62): /note="This region represents a CpG dinucleotide"
  misc_feature (61)..(61): /note="Nucleotide may be methylated to form 5-methylcytosine"
atctaagagggtgggggaggctttaagctccatctccattcttccttcaggatctgaagtcggtatataagtggagactcagtattggatggcttgtataaagcaaataatgctttttgctt

SEQ ID NO: 21885 - DNA, 122 bp, Homo sapiens
  misc_feature (61)..(62): /note="This region represents a CpG dinucleotide"
  misc_feature (61)..(61): /note="Nucleotide may be methylated to form 5-methylcytosine"
ggtcagacaggcagcattgcatttgctgtctccctttgctgaaggattgatgccctatgacgggaaatgggagcaacaggacacctagatgaagcagcaaacacaatgctggatgttgccaa

SEQ ID NO: 21886 - DNA, 122 bp, Homo sapiens
  misc_feature (61)..(62): /note="This region represents a CpG dinucleotide"
  misc_feature (61)..(61): /note="Nucleotide may be methylated to form 5-methylcytosine"
aacttggcccatgcctgctctgaagctttgacagctgcaggctggattaactgatccattcgtcaaactggttgtcagagccagcatgttttagttatccttcagtttctaacagaaaaatc

SEQ ID NO: 21887 - DNA, 122 bp, Homo sapiens
  misc_feature (61)..(62): /note="This region represents a CpG dinucleotide"
  misc_feature (61)..(61): /note="Nucleotide may be methylated to form 5-methylcytosine"
tgcagatccgggacaaaggaagatctctcccaactctcagggtggtgcactgtgctatctcgcctccagatgagaagtgacttgagagattttctcattagttactttacttcccagtttgc

SEQ ID NO: 21888 - DNA, 122 bp, Homo sapiens
  misc_feature (61)..(62): /note="This region represents a CpG dinucleotide"
  misc_feature (61)..(61): /note="Nucleotide may be methylated to form 5-methylcytosine"
tctatactttgtgctctctgcttttaaatatcctgaggctatctccactgaacacattctcgcttttactctctgatggctgcagagcactgggcttcgggaaaccataatttacttaatca

SEQ ID NO: 21889 - DNA, 122 bp, Homo sapiens
  misc_feature (61)..(62): /note="This region represents a CpG dinucleotide"
  misc_feature (61)..(61): /note="Nucleotide may be methylated to form 5-methylcytosine"
tatgcatagcaatcagcctggtacttacagaatgaaatttgattcagaggagaagaccttcgtaacatctggaaactttctgatgcctgtgttacagatgctcctgtgattagggacaggat

SEQ ID NO: 21890 - DNA, 122 bp, Homo sapiens
  misc_feature (61)..(62): /note="This region represents a CpG dinucleotide"
  misc_feature (61)..(61): /note="Nucleotide may be methylated to form 5-methylcytosine"
gtgtttcctagggagcccctaacagtttactgcttctttaggacaatgtaccagcttttgcgaagaaaaaagaaaggaaggaagagaaagaaatcaaaagaaggagagaaaagagaaagaaa

SEQ ID NO: 21891 - DNA, 122 bp, Homo sapiens
  misc_feature (61)..(62): /note="This region represents a CpG dinucleotide"
  misc_feature (61)..(61): /note="Nucleotide may be methylated to form 5-methylcytosine"
aacaaatgccaaacaggtttgtgtcagacaacaatataggaagcccctctgcctgaccttcgcttgatggtaatactcactatttagctatgtaaaacctgtggtgacttgtctaggatctg

SEQ ID NO: 21892 - DNA, 122 bp, Homo sapiens
  misc_feature (61)..(62): /note="This region represents a CpG dinucleotide"
  misc_feature (61)..(61): /note="Nucleotide may be methylated to form 5-methylcytosine"
tgtcctctcggtttttcttggtcacctcgacagacagacacatcttgtccaggggccactcgttcttcctggccatggactgcatgatggccgtgaggaacgactgggggttgaagaagccg

SEQ ID NO: 21893 - DNA, 122 bp, Homo sapiens
  misc_feature (61)..(62): /note="This region represents a CpG dinucleotide"
  misc_feature (61)..(61): /note="Nucleotide may be methylated to form 5-methylcytosine"
atataactactgtcaacatactttctgtagatgtatgataaaccacttatgatacatctacggagtcatgctgtatatttggttttgtaaggcacttggtggttttaatagcttttttctca

SEQ ID NO: 21894 - DNA, 122 bp, Homo sapiens
  misc_feature (61)..(62): /note="This region represents a CpG dinucleotide"
  misc_feature (61)..(61): /note="Nucleotide may be methylated to form 5-methylcytosine"
ctcttctaatccattaatccttgatcataaattggtatagttgcatactccagggcatctcgccttctacagtaagtggacaacagatgtactgcttaaaattctgcctattaagaggattt

SEQ ID NO: 21895 - DNA, 122 bp, Homo sapiens
  misc_feature (61)..(62): /note="This region represents a CpG dinucleotide"
  misc_feature (61)..(61): /note="Nucleotide may be methylated to form 5-methylcytosine"
caaggttttaccatgttggtcaggcagttcttgtactctggacttcaagtgatccgcccacgtcggcatctgaaagtgctgggattacaggagtgagtcaccgtacccagctagcagttgtt

SEQ ID NO: 21896 - DNA, 122 bp, Homo sapiens
  misc_feature (61)..(62): /note="This region represents a CpG dinucleotide"
  misc_feature (61)..(61): /note="Nucleotide may be methylated to form 5-methylcytosine"
cttgaagtaggtcatatttgacatatttgaatttttcattcagtgatattgttcagcttacggtaaatttgagtgaattggtgtgagtaaatgaggctctatttttttggcctttgatactt

SEQ ID NO: 21897 - DNA, 122 bp, Homo sapiens
  misc_feature (61)..(62): /note="This region represents a CpG dinucleotide"
  misc_feature (61)..(61): /note="Nucleotide may be methylated to form 5-methylcytosine"
ccaagactatagttttctttttaagttcagctcccaccctacatttcaggctgtgtgctgcgcagagggtcctaggaaatgtagttgtttctagtaatccatgtaagccttgacatgccagc

SEQ ID NO: 21898 - DNA, 122 bp, Homo sapiens
  misc_feature (61)..(62): /note="This region represents a CpG dinucleotide"
  misc_feature (61)..(61): /note="Nucleotide may be methylated to form 5-methylcytosine"
cagtggccttccttcccaggcactgatgatgcatagactcaccctggctgttttgcttggcgctcagcacgtggctggcactccacacctgtggcgtcaccatcacccccactgagcaccag

SEQ ID NO: 21899 - DNA, 122 bp, Homo sapiens
  misc_feature (61)..(62): /note="This region represents a CpG dinucleotide"
  misc_feature (61)..(61): /note="Nucleotide may be methylated to form 5-methylcytosine"
tcccatgctgctgaagtgtcttagctggcttagctcaacatttctgttgtgtggttaacacggtcctgttctaagccttaagaacccatgactagaacaatgggatgatgcagcccagcggg

SEQ ID NO: 21900 - DNA, 122 bp, Homo sapiens
  misc_feature (61)..(62): /note="This region represents a CpG dinucleotide"
  misc_feature (61)..(61): /note="Nucleotide may be methylated to form 5-methylcytosine"
agaagatatggctctaagtaagttgtgttctagatccatttacactgtgagtaacattcacgacaccctctgggactcctggatgcagctggtgacccagacccaggaatgacacagccagg

SEQ ID NO: 21901 - DNA, 122 bp, Homo sapiens
  misc_feature (61)..(62): /note="This region represents a CpG dinucleotide"
  misc_feature (61)..(61): /note="Nucleotide may be methylated to form 5-methylcytosine"
gtttataaaacctggcctttgcctgcctggaccgaaccgtgtggttctggggctctgatgcgccccagagaagggaatgggccctatcctgaggttggtaccacccttttggcggctttttg

SEQ ID NO: 21902 - DNA, 122 bp, Homo sapiens
  misc_feature (61)..(62): /note="This region represents a CpG dinucleotide"
  misc_feature (61)..(61): /note="Nucleotide may be methylated to form 5-methylcytosine"
ccacccgcctcagcctcccaaagtgctaggattaaaggcgtgagccactgcacccagccacgatttttgttgagattaggaaacaaaaccaagtcagaaggagccaaattaggactgtaagg

SEQ ID NO: 21903 - DNA, 122 bp, Homo sapiens
  misc_feature (61)..(62): /note="This region represents a CpG dinucleotide"
  misc_feature (61)..(61): /note="Nucleotide may be methylated to form 5-methylcytosine"
cctcccgccccacggggagtcatctgcttgaggaaggaaagacacattgccgggctacagcgcagggcccattgtcatgctgagccacccttgcttccctgcaggcctcctgagtcgcagcc

SEQ ID NO: 21904 - DNA, 122 bp, Homo sapiens
  misc_feature (61)..(62): /note="This region represents a CpG dinucleotide"
  misc_feature (61)..(61): /note="Nucleotide may be methylated to form 5-methylcytosine"
cttcaatcacccagaagccaaccaggaactagaaacagaaagcttctgcagaactgatcacgactcatcagaggccgtgagagcaaggaaagaatcaggaactgccacaaattggaagagtc

SEQ ID NO: 21905 - DNA, 122 bp, Homo sapiens
  misc_feature (61)..(62): /note="This region represents a CpG dinucleotide"
  misc_feature (61)..(61): /note="Nucleotide may be methylated to form 5-methylcytosine"
tgccataaagtctttgcccaacatcagtggagtttgtcaaaatgagcgtatctggctccacgtaaggcaaactatctcaacttcatttttcaagcctgtccaaaataatatctattatgcct

SEQ ID NO: 21906 - DNA, 122 bp, Homo sapiens
  misc_feature (61)..(62): /note="This region represents a CpG dinucleotide"
  misc_feature (61)..(61): /note="Nucleotide may be methylated to form 5-methylcytosine"
cattgccatctgggttttggctgccttctttaccgcatcctgttttatcagcagggctttcgtgacctgtactttgtgaaaccagtcttgctgaactcctttcttactttgaaatggacaaa

SEQ ID NO: 21907 - DNA, 122 bp, Homo sapiens
  misc_feature (61)..(62): /note="This region represents a CpG dinucleotide"
  misc_feature (61)..(61): /note="Nucleotide may be methylated to form 5-methylcytosine"
tcttttcacccctgccattgggagggttccgggttcttgacctgcaaccatgaagaatgacgttatgctgacaccagagagtgaacaaggcagggaagaattttattgagtaacagaaaagc

SEQ ID NO: 21908 - DNA, 122 bp, Homo sapiens
  misc_feature (61)..(62): /note="This region represents a CpG dinucleotide"
  misc_feature (61)..(61): /note="Nucleotide may be methylated to form 5-methylcytosine"
tctaagggcatggaaggggaggaggattaaggttcagatgaggaaactggtcatgcaatccgtggagatagagcaagcacagcacccaggaaaatttggcccaggacctgctaccccacaga

SEQ ID NO: 21909 - DNA, 122 bp, Homo sapiens
  misc_feature (61)..(62): /note="This region represents a CpG dinucleotide"
  misc_feature (61)..(61): /note="Nucleotide may be methylated to form 5-methylcytosine"
gtgagtccggcagcgtctaggaacggcatgtccgtggcagggaacagacagagtgagccgcgcctggccagccatgtggcagcagacacagcccaacccaggccgactggcgaaaaaggagg

SEQ ID NO: 21910 - DNA, 122 bp, Homo sapiens
  misc_feature (61)..(62): /note="This region represents a CpG dinucleotide"
  misc_feature (61)..(61): /note="Nucleotide may be methylated to form 5-methylcytosine"
ctcaagtaatcctgccacctcagtttgcaggcagctgggactataggtatgcaccatccccggcttgcatctggcattgattgtttctgtgttaccataaacttgcagaaatacttgctttt

SEQ ID NO: 21911 - DNA, 122 bp, Homo sapiens
  misc_feature (61)..(62): /note="This region represents a CpG dinucleotide"
  misc_feature (61)..(61): /note="Nucleotide may be methylated to form 5-methylcytosine"
ggttaagatataaacaatactatattataactctctgtccctctggtgaattttctatttcgtaaagtgatttcaagttctttatatcctctgaatttcgtaagaatccagtaaggtcagca

SEQ ID NO: 21912 - DNA, 122 bp, Homo sapiens
  misc_feature (61)..(62): /note="This region represents a CpG dinucleotide"
  misc_feature (61)..(61): /note="Nucleotide may be methylated to form 5-methylcytosine"
tctttaattgtgaggctgcatgagccataatgcatttaaaaagatcctctcaagcacacacggcttccttgtaaaaggtgatatcctcaggcacctctaatcaggcttacagcagcattcca

SEQ ID NO: 21913 - DNA, 122 bp, Homo sapiens
  misc_feature (61)..(62): /note="This region represents a CpG dinucleotide"
  misc_feature (61)..(61): /note="Nucleotide may be methylated to form 5-methylcytosine"
agctcccctctgccagagagatctgagcatttcatcactggcttaaaaccctccagcctccgccttgctccctcatcctgtgaataaactccaaatcccttcccgggtcacactggcctctc

SEQ ID NO: 21914 - DNA, 122 bp, Homo sapiens
  misc_feature (61)..(62): /note="This region represents a CpG dinucleotide"
  misc_feature (61)..(61): /note="Nucleotide may be methylated to form 5-methylcytosine"
ctcaaggagctagagctttgctttagtaaaattagacaagtcattcatttctgggtgtcacggaatggagtggccaatggcctgcagagcaacatgcccaagttttattgtgactactgcaa

SEQ ID NO: 21915 - DNA, 122 bp, Homo sapiens
  misc_feature (61)..(62): /note="This region represents a CpG dinucleotide"
  misc_feature (61)..(61): /note="Nucleotide may be methylated to form 5-methylcytosine"
tctcacagctcctatattctgcttcttcctacagatccatttcctgtctattggcagcttcgtctgcattatcattgtttcttgtctcttgaactttggttggcaacttgcaatccttttga

SEQ ID NO: 21916 - DNA, 122 bp, Homo sapiens
  misc_feature (61)..(62): /note="This region represents a CpG dinucleotide"
  misc_feature (61)..(61): /note="Nucleotide may be methylated to form 5-methylcytosine"
ctgcaggagaagatcgcacactgcaaattgagcaagtcgctgtgatttcgcaactggctgcgcttctgcatttctgaatagagagtgacaggaaaatcctaacatgagctcgagaaatactg

SEQ ID NO: 21917 - DNA, 122 bp, Homo sapiens
  misc_feature (61)..(62): /note="This region represents a CpG dinucleotide"
  misc_feature (61)..(61): /note="Nucleotide may be methylated to form 5-methylcytosine"
ttacccccgaggtggtctgctctcttgcatgtctcaggagaagctctcctgatgaagcagcgtgctattccgagcactgggtgactaacctttatgagaagttcctagaggaactattgcaa

SEQ ID NO: 21918 - DNA, 122 bp, Homo sapiens
  misc_feature (61)..(62): /note="This region represents a CpG dinucleotide"
  misc_feature (61)..(61): /note="Nucleotide may be methylated to form 5-methylcytosine"
tgtcctgctgggagtggctcccacaaagcactaagtgatgttggactagccaaggggccccgcccagccaggcctaaggccctcctgggtccaggcttagaggaagcagctttccaattagc

SEQ ID NO: 21919 - DNA, 122 bp, Homo sapiens
  misc_feature (61)..(62): /note="This region represents a CpG dinucleotide"
  misc_feature (61)..(61): /note="Nucleotide may be methylated to form 5-methylcytosine"
aggtctaatgggggaggcggcgtcccagtctgtgttgcagcagcattctcatcgggggtgcgcacaccatcgttactgtcgggcagtaactgccgcttgccttgccgcagtaggagggaaat

SEQ ID NO: 21920 - DNA, 122 bp, Homo sapiens
  misc_feature (61)..(62): /note="This region represents a CpG dinucleotide"
  misc_feature (61)..(61): /note="Nucleotide may be methylated to form 5-methylcytosine"
gtctgtctgactccagagcctctgcctgaaacttcacaacctgtttgagtttctgatggacgttctcaatgtgggcccaagaggttgaactataggatcactatagtcttttccagctccag

SEQ ID NO: 21921 - DNA, 122 bp, Homo sapiens
  misc_feature (61)..(62): /note="This region represents a CpG dinucleotide"
  misc_feature (61)..(61): /note="Nucleotide may be methylated to form 5-methylcytosine"
gacaatgtcatacctactgtttggggctgttatgcggattatttattgttttttgcatgacgtcaccacattggtcatgagatgttgtgaggattaaatgaatatggtaggtggagtagggc

SEQ ID NO: 21922 - DNA, 122 bp, Homo sapiens
  misc_feature (61)..(62): /note="This region represents a CpG dinucleotide"
  misc_feature (61)..(61): /note="Nucleotide may be methylated to form 5-methylcytosine"
ccaaggacataagaagctacacagtagccagcacaggacagtgtaaattcctcaatggctcggtccaggtcatccctgaacaagagaaaagaacagaagcaaaaaaggttttcagcctccaa

SEQ ID NO: 21923 - DNA, 122 bp, Homo sapiens
  misc_feature (61)..(62): /note="This region represents a CpG dinucleotide"
  misc_feature (61)..(61): /note="Nucleotide may be methylated to form 5-methylcytosine"
gatgttaatattgatttcctcattccagtgaggaaaggagaactaggtcatttgtgtttgcgtgccttagttattttcggatgtgtgtttgaatttgattgcttctgatagtaaaagtcaag

SEQ ID NO: 21924 - DNA, 122 bp, Homo sapiens
  misc_feature (61)..(62): /note="This region represents a CpG dinucleotide"
  misc_feature (61)..(61): /note="Nucleotide may be methylated to form 5-methylcytosine"
gaggtaggaaaaaatgaaaagaggtatctatttccctcctctaccctcatttccattcctcgccacaaggtgttctaatctgattgaacaaagtgaatgctctagtatgtaactctaaatgc

SEQ ID NO: 21925 - DNA, 122 bp, Homo sapiens
  misc_feature (61)..(62): /note="This region represents a CpG dinucleotide"
  misc_feature (61)..(61): /note="Nucleotide may be methylated to form 5-methylcytosine"
tcttttatacaagctttcagatctcctcttggttctcatctagctcttgcatctttatgccgtgggttgattcctctgcctgcctatctgtagtagcttgtctcctaggatggctgccatca

SEQ ID NO: 21926 - DNA, 122 bp, Homo sapiens
  misc_feature (61)..(62): /note="This region represents a CpG dinucleotide"
  misc_feature (61)..(61): /note="Nucleotide may be methylated to form 5-methylcytosine"
ccgtacccctattctcccagttgtatgcatggctgtgatctctcacctccctaaagtcttcgctcatatgtcaccttccttatgactaacaatgacatttaaaactgcactacctggcccgg

SEQ ID NO: 21927 - DNA, 122 bp, Homo sapiens
  misc_feature (61)..(62): /note="This region represents a CpG dinucleotide"
  misc_feature (61)..(61): /note="Nucleotide may be methylated to form 5-methylcytosine"
ccaagaagggggacatgtgagttggaaaaattcccctctgactattgccaaatctccttccgttgctttatatctaagactctttaacagcacagtctccactccctactccacagtttctc

SEQ ID NO: 21928 - DNA, 122 bp, Homo sapiens
  misc_feature (61)..(62): /note="This region represents a CpG dinucleotide"
  misc_feature (61)..(61): /note="Nucleotide may be methylated to form 5-methylcytosine"
tggatccagctgaatcgaacacggccaaccctttgaactgcttcagcaaataatatttgacgcttggaatgcagatagcactgtacatattgtgtatgtttcaaagtggcagagcacacctt

SEQ ID NO: 21929 - DNA, 122 bp, Homo sapiens
  misc_feature (61)..(62): /note="This region represents a CpG dinucleotide"
  misc_feature (61)..(61): /note="Nucleotide may be methylated to form 5-methylcytosine"
ctgcctttgagtcagcctgagctgatgtgttttctggaatgactttttcttttttgaagtcgatctacaggaatcggcctcatcagctgtgtgtgttgagaggtggggacgggggagggatg

SEQ ID NO: 21930 - DNA, 122 bp, Homo sapiens
  misc_feature (61)..(62): /note="This region represents a CpG dinucleotide"
  misc_feature (61)..(61): /note="Nucleotide may be methylated to form 5-methylcytosine"
aaattggaataacaagaaaggacgacatggacatttttattgtaagtcaactttgagccacgtagagttcaagcaaggtaacatttgaaagaggcttagacatcatttggcccatccccttc

SEQ ID NO: 21931 - DNA, 122 bp, Homo sapiens
  misc_feature (61)..(62): /note="This region represents a CpG dinucleotide"
  misc_feature (61)..(61): /note="Nucleotide may be methylated to form 5-methylcytosine"
acaacttcaagaaaatgctcgttaaaaccagagtgacttgcaccagcacccgccccagaacggccgaatgcccatcagtgctggcaagtctgaagcagtctggcctcacaccctgcgtgtag

SEQ ID NO: 21932 - DNA, 122 bp, Homo sapiens
  misc_feature (61)..(62): /note="This region represents a CpG dinucleotide"
  misc_feature (61)..(61): /note="Nucleotide may be methylated to form 5-methylcytosine"
attaaaagagaaaaccttcataatgctgtttatagcacttcattaacaaaaaacaaattacgcagatccttgaaagttaaattgtaactaacagatggctgctagtgagtcaaataaaaatg

SEQ ID NO: 21933 - DNA, 122 bp, Homo sapiens
  misc_feature (61)..(62): /note="This region represents a CpG dinucleotide"
  misc_feature (61)..(61): /note="Nucleotide may be methylated to form 5-methylcytosine"
aactacttcttacttctctttcctgtatacaagctgtagggcactgagccaaaggtgaaccgtccagagaaagaagaccgtatctgctaacttctcctggtccacgtgccagcaggagagaa

SEQ ID NO: 21934 - DNA, 122 bp, Homo sapiens
  misc_feature (61)..(62): /note="This region represents a CpG dinucleotide"
  misc_feature (61)..(61): /note="Nucleotide may be methylated to form 5-methylcytosine"
aggatgtatatgtagcagttgtctgaatcttcaagtagctgatctgtgcggatgcagtgacggagccacagcttgctgaccgcagcagttttaaagtgactcatcagcaaggtcaggccacc

SEQ ID NO: 21935 - DNA, 122 bp, Homo sapiens
  misc_feature (61)..(62): /note="This region represents a CpG dinucleotide"
  misc_feature (61)..(61): /note="Nucleotide may be methylated to form 5-methylcytosine"
acaggaccctgtgccagcatggtgccacatgccagctggtcagtacagccaaggagcatacgtatgctgggccctgtatcagcagtctcagctggtcactgacaaggcaaccatgctgaaga

SEQ ID NO: 21936 - DNA, 122 bp, Homo sapiens
  misc_feature (61)..(62): /note="This region represents a CpG dinucleotide"
  misc_feature (61)..(61): /note="Nucleotide may be methylated to form 5-methylcytosine"
tacgggtagaggccagtgactgagactctcattgcgggagggggcgattagtcgcaaagccgcccattccaggatttggagatgcagctccagcacacccttctttctctgtctgcccttag

SEQ ID NO: 21937 - DNA, 122 bp, Homo sapiens
  misc_feature (61)..(62): /note="This region represents a CpG dinucleotide"
  misc_feature (61)..(61): /note="Nucleotide may be methylated to form 5-methylcytosine"
gccagtccctgactgggcctgagtcatttgtttctgaatcctagtttgaatcctagttcccgtttttatcatggtgtgatcttggctgggcccttccctctctctggtctcagtttgtctct

SEQ ID NO: 21938 - DNA, 122 bp, Homo sapiens
  misc_feature (61)..(62): /note="This region represents a CpG dinucleotide"
  misc_feature (61)..(61): /note="Nucleotide may be methylated to form 5-methylcytosine"
ttgcctccaggattttggacagattgacctttctgcctggaatgctcttccccattagcccgtgtttctccttcaggtctcagggatcttaaagatcacttcctctagggagtctctctgat

SEQ ID NO: 21939 - DNA, 122 bp, Homo sapiens
  misc_feature (61)..(62): /note="This region represents a CpG dinucleotide"
  misc_feature (61)..(61): /note="Nucleotide may be methylated to form 5-methylcytosine"
ctccagatgatctcaatgcttgctcaagtttgagaaccactgaaccgcagtatgactctccgtgtcacctggctaactctgcctcactttcaggtctcagtgtagacaccacctcttctagg

SEQ ID NO: 21940 - DNA, 122 bp, Homo sapiens
  misc_feature (61)..(62): /note="This region represents a CpG dinucleotide"
  misc_feature (61)..(61): /note="Nucleotide may be methylated to form 5-methylcytosine"
tttgttcatctcacattttctctcatctagtcgttaccccaactctccttatgaccaggacgtgaccaggacgtgaccaggacacatactctgcaaagaaggagtagtttttatttaaatat

SEQ ID NO: 21941 - DNA, 122 bp, Homo sapiens
  misc_feature (61)..(62): /note="This region represents a CpG dinucleotide"
  misc_feature (61)..(61): /note="Nucleotide may be methylated to form 5-methylcytosine"
cccgggagccctcagagtggcctccgctgttttctctctgagccactgatcctcagcccccgggcacgaagctggccccgcatggcctgcaattgccacgcctgcctgagccccacccttcc

SEQ ID NO: 21942 - DNA, 122 bp, Homo sapiens
  misc_feature (61)..(62): /note="This region represents a CpG dinucleotide"
  misc_feature (61)..(61): /note="Nucleotide may be methylated to form 5-methylcytosine"
cccagcctgggcaataaagcgagaccctgtttcataaaaaaaaaaaaaaaaaaaaaaaaacgatgcagaagaaccatgtattaagtgaaaagtgtgcattacaaatcaacatttagcaaaat

SEQ ID NO: 21943 - DNA, 122 bp, Homo sapiens
  misc_feature (61)..(62): /note="This region represents a CpG dinucleotide"
  misc_feature (61)..(61): /note="Nucleotide may be methylated to form 5-methylcytosine"
aggatttttccttctcaagtttcaggttttgatggagaacagatgtgcacacatctggctcggcaacccccagcctcacctttctacttctccaaaccgtcagacagagcagggagataagg

SEQ ID NO: 21944 - DNA, 122 bp, Homo sapiens
  misc_feature (61)..(62): /note="This region represents a CpG dinucleotide"
  misc_feature (61)..(61): /note="Nucleotide may be methylated to form 5-methylcytosine"
agaaagaagaaattaatttgacaactcatagagtttcgtcctgggagggagcgagtagtgcggtgctgcactctatgggctgctgcagaaacatacaggatgcattttgtctatctgccaag

SEQ ID NO: 21945 - DNA, 122 bp, Homo sapiens
  misc_feature (61)..(62): /note="This region represents a CpG dinucleotide"
  misc_feature (61)..(61): /note="Nucleotide may be methylated to form 5-methylcytosine"
agatgaacatcggggaagagaatatgccaggcttctgtacaaactctgaaaagggaaagacgaagacttgtctgaagagctgccaaaatgccaccatggctacagtggaaaatggaaacgtg

SEQ ID NO: 21946 - DNA, 122 bp, Homo sapiens
  misc_feature (61)..(62): /note="This region represents a CpG dinucleotide"
  misc_feature (61)..(61): /note="Nucleotide may be methylated to form 5-methylcytosine"
tttttccttccccacaaatcctcttttctgtgcatacagtgtgcccaagttcatcccttacgtgcctacaagaattcagacgttagggaattcaagaccatgccttagacctggctgttgta

SEQ ID NO: 21947 - DNA, 122 bp, Homo sapiens
  misc_feature (61)..(62): /note="This region represents a CpG dinucleotide"
  misc_feature (61)..(61): /note="Nucleotide may be methylated to form 5-methylcytosine"
acatccacctctgctaccaatttaggcaatcgagtctctgcactagagaaaatgacatcccggacagctgatttcagacagactttgttcctgtgtcaggtaccacacctttccagtttggg

SEQ ID NO: 21948 - DNA, 122 bp, Homo sapiens
  misc_feature (61)..(62): /note="This region represents a CpG dinucleotide"
  misc_feature (61)..(61): /note="Nucleotide may be methylated to form 5-methylcytosine"
tctggtcggcggtaaaagctcggttcccggccctcccggaagttgttgcacagttgtttccgggaagcgggactccaaatgggtcgcagtcgcagccgctctccacggaggggtgagtcctg

SEQ ID NO: 21949 - DNA, 122 bp, Homo sapiens
  misc_feature (61)..(62): /note="This region represents a CpG dinucleotide"
  misc_feature (61)..(61): /note="Nucleotide may be methylated to form 5-methylcytosine"
ccagaatgagaaagggcagatgtggaaacaacttccaggctatttctacggccattaaaacgaggtctccaaagaatgatgactatgtgggaatgcttacatgtaatattaactttccagaa

SEQ ID NO: 21950 - DNA, 122 bp, Homo sapiens
  misc_feature (61)..(62): /note="This region represents a CpG dinucleotide"
  misc_feature (61)..(61): /note="Nucleotide may be methylated to form 5-methylcytosine"
ctgcataaggtcagcaccctccgtatgaccccaccccaaatccagccactccgggtatgtcgtgatgaactaagcattagagcatggggcctaacgatggcatggctgcaggccaaatcctg

SEQ ID NO: 21951 - DNA, 122 bp, Homo sapiens
  misc_feature (61)..(62): /note="This region represents a CpG dinucleotide"
  misc_feature (61)..(61): /note="Nucleotide may be methylated to form 5-methylcytosine"
agtcaacctaaagaagataaagtaaaacactgagttgagtagtaaaacaccagaagagtgcgatgggtactatagcaggtaaatatatatgatttagggacatacaaaacccaaaatttttt

SEQ ID NO: 21952 - DNA, 122 bp, Homo sapiens
  misc_feature (61)..(62): /note="This region represents a CpG dinucleotide"
  misc_feature (61)..(61): /note="Nucleotide may be methylated to form 5-methylcytosine"
gagactctgtctcaaaacaaacaaacaaacaccatccgttgagttcctgtgcatggcaggcgctgcaactacaaagatcaggaagttgtgcctgaccctggggacctgacaggctagtgtat

SEQ ID NO: 21953 - DNA, 122 bp, Homo sapiens
  misc_feature (61)..(62): /note="This region represents a CpG dinucleotide"
  misc_feature (61)..(61): /note="Nucleotide may be methylated to form 5-methylcytosine"
aatgaaggccttttcccatctgggacatttgttttcatagcagaggcggctgttaatcagcgtattccaaaaaagccaacgtgctccccagtttgagcgtgtgtttctgtcgccctgctgct

SEQ ID NO: 21954 - DNA, 122 bp, Homo sapiens
  misc_feature (61)..(62): /note="This region represents a CpG dinucleotide"
  misc_feature (61)..(61): /note="Nucleotide may be methylated to form 5-methylcytosine"
ccactgtggggctctctgattccacagtgggcgagacccagaggccagtccctaataggacgtgttcaaatgtgggcccaggaaaacctccagaggcctgggggctccaggaggcttcaatg

SEQ ID NO: 21955 - DNA, 122 bp, Homo sapiens
  misc_feature (61)..(62): /note="This region represents a CpG dinucleotide"
  misc_feature (61)..(61): /note="Nucleotide may be methylated to form 5-methylcytosine"
gaatgtttactctctccttaaagagggccttcgtgttgctcttttttctttgaaatggaacgtctgtctctgtattcttcacacagaatcctagaaagtcaggcatgatggttaaaattaaa

SEQ ID NO: 21956 - DNA, 122 bp, Homo sapiens
  misc_feature (61)..(62): /note="This region represents a CpG dinucleotide"
  misc_feature (61)..(61): /note="Nucleotide may be methylated to form 5-methylcytosine"
atattagcaaagttttactttttttttttctgctcataaatgactctgaaaaagccaatacgcaagaggctaacacaactgtagtctaaaggcaacgtcgaggtcactgatatgtccctcag

SEQ ID NO: 21957 - DNA, 122 bp, Homo sapiens
  misc_feature (61)..(62): /note="This region represents a CpG dinucleotide"
  misc_feature (61)..(61): /note="Nucleotide may be methylated to form 5-methylcytosine"
caggcctctagtcaaaatgcccacacccttcccttctgctggatggaagctgggggatggcgaatgggagttacaaggtattgagtgccactgtcatacatcatacacacgtctcatcctaa

SEQ ID NO: 21958 - DNA, 122 bp, Homo sapiens
  misc_feature (61)..(62): /note="This region represents a CpG dinucleotide"
  misc_feature (61)..(61): /note="Nucleotide may be methylated to form 5-methylcytosine"
gtgtttccacgctctctcccagctcctcaccagatgggttggcagcaatgatgatgatgacgctcatcttgcgtcattcgagattgcccaactgggatattgtatcaggttggtgcaaaagt

SEQ ID NO: 21959 - DNA, 122 bp, Homo sapiens
  misc_feature (61)..(62): /note="This region represents a CpG dinucleotide"
  misc_feature (61)..(61): /note="Nucleotide may be methylated to form 5-methylcytosine"
ccgttcttatgatagcgagttctcacgagatctgatggttttataagtgccagttcctcccgcccgctctggtgaagaaggggttcgctccgccttctgctatgattgtaaatttcctgaga

SEQ ID NO: 21960 - DNA, 122 bp, Homo sapiens
  misc_feature (61)..(62): /note="This region represents a CpG dinucleotide"
  misc_feature (61)..(61): /note="Nucleotide may be methylated to form 5-methylcytosine"
gcatttgttgatttgaaaaacaactttctcaaaaggccatcaaaaagaaaactgaaacctcggccacaagtcagttgtgaagaatgtactgtcctttaaccagcttcaagtagaagttcata

SEQ ID NO: 21961 - DNA, 122 bp, Homo sapiens
  misc_feature (61)..(62): /note="This region represents a CpG dinucleotide"
  misc_feature (61)..(61): /note="Nucleotide may be methylated to form 5-methylcytosine"
ttttcctttatttccatgcttgccccctccccacttcctgcaggcctgtaagaggggtgccggctccatgtcagtttggaagaataaatgaagtgattctagccaagaagttatgaagaata

SEQ ID NO: 21962 - DNA, 122 bp, Homo sapiens
  misc_feature (61)..(62): /note="This region represents a CpG dinucleotide"
  misc_feature (61)..(61): /note="Nucleotide may be methylated to form 5-methylcytosine"
catgtggcttgatttttagtgaaataccatagtgtcacaactagtgctgtctctgccccacgccaaaaggaaaagtcaagtgaaataggctgggtagaattcccccagggtaggcaaaatgc

SEQ ID NO: 21963 - DNA, 122 bp, Homo sapiens
  misc_feature (61)..(62): /note="This region represents a CpG dinucleotide"
  misc_feature (61)..(61): /note="Nucleotide may be methylated to form 5-methylcytosine"
tcaataagataagcccactaaccacatgcttggatgccacagcagaatgaaattgctctacgtttccagacacttgctcttcagttctacatttagctcatggtgcctggtgccaagctgca

SEQ ID NO: 21964 - DNA, 122 bp, Homo sapiens
  misc_feature (61)..(62): /note="This region represents a CpG dinucleotide"
  misc_feature (61)..(61): /note="Nucleotide may be methylated to form 5-methylcytosine"
cttgggttatgggtgaatcaaaatctcagaaaccatcactaaagaacttacacatgtaaccgaaaaccacctgttccccaaaactattgaaataaaataaaataaaataaaaatagcagata

SEQ ID NO: 21965 - DNA, 122 bp, Homo sapiens
  misc_feature (61)..(62): /note="This region represents a CpG dinucleotide"
  misc_feature (61)..(61): /note="Nucleotide may be methylated to form 5-methylcytosine"
gacttgaaaaacgccctattatttagactgacctaattcaaagttctttgcagcttacctcgtgctaatcactggcaagtggtctccagctgctctttggttttggttgtttcacgtccttg

SEQ ID NO: 21966 - DNA, 122 bp, Homo sapiens
  misc_feature (61)..(62): /note="This region represents a CpG dinucleotide"
  misc_feature (61)..(61): /note="Nucleotide may be methylated to form 5-methylcytosine"
agagggctccttggtctagccgtaatgccagcgtctgggaagatgccattgccaagcggacgtggtgtagcggtagcatctgtgtcaaggaaaaacacccactacttagcagaccaggaaag

SEQ ID NO: 21967 - DNA, 122 bp, Homo sapiens
  misc_feature (61)..(62): /note="This region represents a CpG dinucleotide"
  misc_feature (61)..(61): /note="Nucleotide may be methylated to form 5-methylcytosine"
catacttctgatccttggagtgaccctcagtgtctaaaaatcctattaaaaacgttgctgcgtgagctactcacttgtttgattaacatgaaagggagtttaatgtaaacaatacttctgga

SEQ ID NO: 21968 - DNA, 122 bp, Homo sapiens
  misc_feature (61)..(62): /note="This region represents a CpG dinucleotide"
  misc_feature (61)..(61): /note="Nucleotide may be methylated to form 5-methylcytosine"
aaaaaaaaaaaaaaaaaaatctaagtttccgcgacccaaatttacattcctaggtcagaacgtgtctgactggaccagctggagttacgtgcctgcccacgatctaatcagctgtggcagac

SEQ ID NO: 21969 - DNA, 122 bp, Homo sapiens
  misc_feature (61)..(62): /note="This region represents a CpG dinucleotide"
  misc_feature (61)..(61): /note="Nucleotide may be methylated to form 5-methylcytosine"
taaatttaaaatacataaattactttaatccaaccaagacttttatttccacgttcatgccgtgggtataatgttaacaatgaagggcactagcaagagatttctgggtttttctccccttt

SEQ ID NO: 21970 - DNA, 122 bp, Homo sapiens
  misc_feature (61)..(62): /note="This region represents a CpG dinucleotide"
  misc_feature (61)..(61): /note="Nucleotide may be methylated to form 5-methylcytosine"
cattttgtctccctcggaagttttcaagttctccagtgaatcatttaggagcagaagcagcgtaattcaacagatgccttgggaggaaaatatgaggcacaaaagtaaacaggaaagaacaa

SEQ ID NO: 21971 - DNA, 122 bp, Homo sapiens
  misc_feature (61)..(62): /note="This region represents a CpG dinucleotide"
  misc_feature (61)..(61): /note="Nucleotide may be methylated to form 5-methylcytosine"
acaaaagcagcaaaaagtacacccaaggcatttaaaaaacaaattgcgtgcttgcatactcggcatcccctctccctcgcctctctctgcttctttggtgggctcacgaccacctgtcgcat

SEQ ID NO: 21972 - DNA, 122 bp, Homo sapiens
  misc_feature (61)..(62): /note="This region represents a CpG dinucleotide"
  misc_feature (61)..(61): /note="Nucleotide may be methylated to form 5-methylcytosine"
gagcaaatagttgtagcagtttcttccagatggctagattacaccacaggcagtatgtaccgcaagtagcagctgcactgacagcttcctgatttcctagctttctaattacatttagggac

SEQ ID NO: 21973 - DNA, 122 bp, Homo sapiens
  misc_feature (61)..(62): /note="This region represents a CpG dinucleotide"
  misc_feature (61)..(61): /note="Nucleotide may be methylated to form 5-methylcytosine"
ttcttttttattttatattttttataattttttgttttcaatttttgttggtacgtagtacgtgtatacaaacttctgggaatgtaaatgagcacatttctgaagggcattttggtaatact

SEQ ID NO: 21974 - DNA, 122 bp, Homo sapiens
  misc_feature (61)..(62): /note="This region represents a CpG dinucleotide"
  misc_feature (61)..(61): /note="Nucleotide may be methylated to form 5-methylcytosine"
tcttgataataacttatgttgttcttattcctagtaattgctggcctccttatgaccttccgcctagtttcaggcagtagctaggagagctagactaactgctccagagaagtgaggccaag

SEQ ID NO: 21975 - DNA, 122 bp, Homo sapiens
  misc_feature (61)..(62): /note="This region represents a CpG dinucleotide"
  misc_feature (61)..(61): /note="Nucleotide may be methylated to form 5-methylcytosine"
gctcctccaccctttgtctataggattaaccgtctaagattcttagcaaggcattaagagcgctcttgagatctagcccctgcctccatcctccatctcgtttccccagggatgggacggaa

SEQ ID NO: 21976 - DNA, 122 bp, Homo sapiens
  misc_feature (61)..(62): /note="This region represents a CpG dinucleotide"
  misc_feature (61)..(61): /note="Nucleotide may be methylated to form 5-methylcytosine"
ggcatctgttgctcttataaggtcacttcctttcttggtcacctcttaggcagaggtggccgctcccattctcttgccccataactcacttgtcatagagcctgcttatctgatacatgttg

SEQ ID NO: 21977 - DNA, 122 bp, Homo sapiens
  misc_feature (61)..(62): /note="This region represents a CpG dinucleotide"
  misc_feature (61)..(61): /note="Nucleotide may be methylated to form 5-methylcytosine"
taagcacatatgtgctctgccacattgcaatattgtggactcattcacagtggaaaccaccggcagaccatctccctagagatctcacagagtattgctcattctgggattaactgaccatg

SEQ ID NO: 21978 - DNA, 122 bp, Homo sapiens
  misc_feature (61)..(62): /note="This region represents a CpG dinucleotide"
  misc_feature (61)..(61): /note="Nucleotide may be methylated to form 5-methylcytosine"
cattacttaagccctcaacaccatcaaatatttatttaacatccactgtgggttaagaatcgcaacccagggccccaaagcaacttacaagctaaaggaaggagtggaggcacagttccttg

SEQ ID NO: 21979 - DNA, 122 bp, Homo sapiens
  misc_feature (61)..(62): /note="This region represents a CpG dinucleotide"
  misc_feature (61)..(61): /note="Nucleotide may be methylated to form 5-methylcytosine"
ggtcagctatttttaggcaaaagccccaaggcttgttttcataccccttttgaatcatgccgagtggccccagtcatatgaagagatgtcatcagtaaagcaccaggaactgtggtcagtgc

SEQ ID NO: 21980 - DNA, 122 bp, Homo sapiens
  misc_feature (61)..(62): /note="This region represents a CpG dinucleotide"
  misc_feature (61)..(61): /note="Nucleotide may be methylated to form 5-methylcytosine"
acagaagaatctaaagccagtaatctcctggactttccagttaagtctgtttgagtctatcgccacatccagtgcccagcatagggcttggcacagagcaggcactctgtgaatgttgaatg

SEQ ID NO: 21981 - DNA, 122 bp, Homo sapiens
  misc_feature (61)..(62): /note="This region represents a CpG dinucleotide"
  misc_feature (61)..(61): /note="Nucleotide may be methylated to form 5-methylcytosine"
cttcttcattgaatgaaatatcagtttgatctcagtatgtccctgcctaaaccctatagtcgcaagttctctatatgataaaggttgtactgcatgatatgtcctaaaaggcttggtgactg

SEQ ID NO: 21982 - DNA, 122 bp, Homo sapiens
  misc_feature (61)..(62): /note="This region represents a CpG dinucleotide"
  misc_feature (61)..(61): /note="Nucleotide may be methylated to form 5-methylcytosine"
gggtttttgggaatgtagcacctcagtgggcgggccttcagggcatactgtacacattggcgctgtgacacatacaacaggacaggtcagcaccaagaggcccctccctccctctccacacc

SEQ ID NO: 21983 - DNA, 122 bp, Homo sapiens
  misc_feature (61)..(62): /note="This region represents a CpG dinucleotide"
  misc_feature (61)..(61): /note="Nucleotide may be methylated to form 5-methylcytosine"
tctgctggaacaccactgtgacatggcagacatgagcctcagcttcccttatctacaagtcgtccctgagctgtgcttattgatggaaactacctggcacaggtgccacaggacaatgatca

SEQ ID NO: 21984 - DNA, 122 bp, Homo sapiens
  misc_feature (61)..(62): /note="This region represents a CpG dinucleotide"
  misc_feature (61)..(61): /note="Nucleotide may be methylated to form 5-methylcytosine"
agtgatagaaaaaaaggactcaacctgctcttggtggctttgaaaatggagagaaggagccgtgagccagagaatgtgggtggcctttagaagagcaggaaaaaagaagcagattagtgtga

SEQ ID NO: 21985 - DNA, 122 bp, Homo sapiens
  misc_feature (61)..(62): /note="This region represents a CpG dinucleotide"
  misc_feature (61)..(61): /note="Nucleotide may be methylated to form 5-methylcytosine"
tggacattttactcatatctgcaaaagactagcagtaacatagcacctactctatcactccgagtccagtaaggcagtagaatccacatgaggcatttcaagcagaggggactatttacaaa

SEQ ID NO: 21986 - DNA, 122 bp, Homo sapiens
  misc_feature (61)..(62): /note="This region represents a CpG dinucleotide"
  misc_feature (61)..(61): /note="Nucleotide may be methylated to form 5-methylcytosine"
aggggagtaaactggttctggggtataacattgataggccttactaggcagtgggaaatacggttttggaactcaggtggggttgggcataagaaaatactggcataagaaaagttgttagg

SEQ ID NO: 21987 - DNA, 122 bp, Homo sapiens
  misc_feature (61)..(62): /note="This region represents a CpG dinucleotide"
  misc_feature (61)..(61): /note="Nucleotide may be methylated to form 5-methylcytosine"
gaggtagaattcaaatttgttccatgtgatagtctgactagtgttgagtaagtcgctacacgcaaatttgcttagaacaataatgtctcagggcataatctgtgttttgggtaaagtgctat

SEQ ID NO: 21988 - DNA, 122 bp, Homo sapiens
  misc_feature (61)..(62): /note="This region represents a CpG dinucleotide"
  misc_feature (61)..(61): /note="Nucleotide may be methylated to form 5-methylcytosine"
gctattcctacgctttgtgcaaaaagccttcttcctattatgacagtgctagctgcagaccgcaatttagttacaactgtggtaagcaaaatgtgtgtccaaattgattaatcttatatcca

SEQ ID NO: 21989 - DNA, 122 bp, Homo sapiens
  misc_feature (61)..(62): /note="This region represents a CpG dinucleotide"
  misc_feature (61)..(61): /note="Nucleotide may be methylated to form 5-methylcytosine"
atttctaccacaacacactacaatcgcatagggacgaaatacaatgaagccaagactaaccgatccccaacaagaggaagtgaattctctggaaagggtgatgttcccaatacatctttaaa

SEQ ID NO: 21990 - DNA, 122 bp, Homo sapiens
  misc_feature (61)..(62): /note="This region represents a CpG dinucleotide"
  misc_feature (61)..(61): /note="Nucleotide may be methylated to form 5-methylcytosine"
tctgatgagcttagatctcttcctgccctaatagtctatacttctatgacagcctttgaccgtcacttgctttaatccttctaagccctttgaaggcaaggccgaagagttggtcttcttaa

SEQ ID NO: 21991 - DNA, 122 bp, Homo sapiens
  misc_feature (61)..(62): /note="This region represents a CpG dinucleotide"
  misc_feature (61)..(61): /note="Nucleotide may be methylated to form 5-methylcytosine"
atggtctctgcccacacagagctcactctgtggtacaatatacaaacaaatataagatttcgtcaggagcggtgctccctcagtagagggtacttaattgtcatattaccatttacatatgc

SEQ ID NO: 21992 - DNA, 122 bp, Homo sapiens
  misc_feature (61)..(62): /note="This region represents a CpG dinucleotide"
  misc_feature (61)..(61): /note="Nucleotide may be methylated to form 5-methylcytosine"
aagcagaaaggaatttgtttgagggcattaaaatgcttccagaaatcatcaggagatacacggaaacctctaggttgtgcttttgggaacagccctcagagctatgcagcagatctgggtct

SEQ ID NO: 21993 - DNA, 122 bp, Homo sapiens
  misc_feature (61)..(62): /note="This region represents a CpG dinucleotide"
  misc_feature (61)..(61): /note="Nucleotide may be methylated to form 5-methylcytosine"
gaaagccccttgagtttaccttatcattctggtatgcagtcacagcgatgaattcagtttcggggaacaagtatgtccgaaatgtactataagggagtttcaagatgtcattggctcttaca

SEQ ID NO: 21994 - DNA, 122 bp, Homo sapiens
  misc_feature (61)..(62): /note="This region represents a CpG dinucleotide"
  misc_feature (61)..(61): /note="Nucleotide may be methylated to form 5-methylcytosine"
tggcaaattgtgggaaggcaaaataatgatagatgaagtccacttagcaaagcttattaacgtagattcctcttgtgccatctccagccagatgagggctacagttgtcttcagtggttaac

SEQ ID NO: 21995 - DNA, 122 bp, Homo sapiens
  misc_feature (61)..(62): /note="This region represents a CpG dinucleotide"
  misc_feature (61)..(61): /note="Nucleotide may be methylated to form 5-methylcytosine"
tgttgttcccttacatattaaaactattcagctcatttctttggaatcactcccccatgccgccatcctcaatgtttaaattccttattactcatcaggttaatgtgagaatcctattgcaa

SEQ ID NO: 21996 - DNA, 122 bp, Homo sapiens
  misc_feature (61)..(62): /note="This region represents a CpG dinucleotide"
  misc_feature (61)..(61): /note="Nucleotide may be methylated to form 5-methylcytosine"
gctgctgcagcggcaggtgctgggtcgggggcgctgggggctgctggtagccggggcccccgcccgggccgccgtctgcgccgcccgagccgctgtgctgcgcgtactcctcgaagggaggg

SEQ ID NO: 21997 - DNA, 122 bp, Homo sapiens
  misc_feature (61)..(62): /note="This region represents a CpG dinucleotide"
  misc_feature (61)..(61): /note="Nucleotide may be methylated to form 5-methylcytosine"
tcttcatcatgtcttttttctatgccatcaatcagtcgaggataccacattgtgtttagccgtggttgaatttttaaatgatttctgattataagttctcatctactgctgagaaaaataac

SEQ ID NO: 21998 - DNA, 122 bp, Homo sapiens
  misc_feature (61)..(62): /note="This region represents a CpG dinucleotide"
  misc_feature (61)..(61): /note="Nucleotide may be methylated to form 5-methylcytosine"
gcagccagcttattgtaagacaccacaggcaaagtgcactttatcagattagactggggccggtatcaaatatacatgagaataaggatgcatttgtgagttagactagacttttcttccct

SEQ ID NO: 21999 - DNA, 122 bp, Homo sapiens
  misc_feature (61)..(62): /note="This region represents a CpG dinucleotide"
  misc_feature (61)..(61): /note="Nucleotide may be methylated to form 5-methylcytosine"
attgagaccatccctagggaggtggcgacgaggagcctggctcggcttaattactgctggcggggcttggctgccatctcatcgctgccatctgttagttgcttgcttcagccagacacaag

SEQ ID NO: 22000 - DNA, 122 bp, Homo sapiens
  misc_feature (61)..(62): /note="This region represents a CpG dinucleotide"
  misc_feature (61)..(61): /note="Nucleotide may be methylated to form 5-methylcytosine"
atttccgccacctcggcagcatgagtcaaaatggatcatcctccccgcctcaccgcttaacgaactgaggtgtgtgttggagctgaatgtttacaacacaaaaccaccaaccatcttgtttc

SEQ ID NO: 22001 - DNA, 122 bp, Homo sapiens
  misc_feature (61)..(62): /note="This region represents a CpG dinucleotide"
  misc_feature (61)..(61): /note="Nucleotide may be methylated to form 5-methylcytosine"
agagactcctcttcctctctttgactcatcttaaataagcatgttcaatttcaaaacaaacgtgactcattttgactaaaagccctaccaccaacagctactacagcttacaacaaaccggt

SEQ ID NO: 22002 - DNA, 122 bp, Homo sapiens
  misc_feature (61)..(62): /note="This region represents a CpG dinucleotide"
  misc_feature (61)..(61): /note="Nucleotide may be methylated to form 5-methylcytosine"
caaaatatgattctgctacttcccagttgtgcgatcctgggcatgtacacaggatgttcacgacagcacagcatctactactgtttgcagtagcaatgcatgaggaacaactttactgtcta

SEQ ID NO: 22003 - DNA, 122 bp, Homo sapiens
  misc_feature (61)..(62): /note="This region represents a CpG dinucleotide"
  misc_feature (61)..(61): /note="Nucleotide may be methylated to form 5-methylcytosine"
gtgaagctttattgtttctgagactctacctgggctcagggttcaaaatcaaaagcttcccgcaggtaagattagctaagtgaaaaccactgcactttctctaaagtagaatggcttaaaaa

SEQ ID NO: 22004 - DNA, 122 bp, Homo sapiens
  misc_feature (61)..(62): /note="This region represents a CpG dinucleotide"
  misc_feature (61)..(61): /note="Nucleotide may be methylated to form 5-methylcytosine"
tgaatgacttttccaccctctttccttggcaggaacaagtgaccctgtcttccgtggcctcgtggggctggctctgctcctcctcccttgactgagagacgtcatggagattgggtggaggg

SEQ ID NO: 22005 - DNA, 122 bp, Homo sapiens
  misc_feature (61)..(62): /note="This region represents a CpG dinucleotide"
  misc_feature (61)..(61): /note="Nucleotide may be methylated to form 5-methylcytosine"
taaggggaaactcctttcacttgactcttattatcttctcttgtttgccaccatgtgagacgtgccttcaccttccaccatgattatgaggcctccccagccacatggaactgtgcctcttt

SEQ ID NO: 22006 - DNA, 122 bp, Homo sapiens
  misc_feature (61)..(62): /note="This region represents a CpG dinucleotide"
  misc_feature (61)..(61): /note="Nucleotide may be methylated to form 5-methylcytosine"
aagaaatatagaaaacacctaacattgctggaaactgaagaggtgttcaactcatttatccgaccttgaagccagtagagtgcaggagacatctgagtgttgtcaaggatcaacaaatctgg

SEQ ID NO: 22007 - DNA, 122 bp, Homo sapiens
  misc_feature (61)..(62): /note="This region represents a CpG dinucleotide"
  misc_feature (61)..(61): /note="Nucleotide may be methylated to form 5-methylcytosine"
acccccaagactccagagccagtggggcatggctcatctacttacagatattcacgggcccgatgccttcgcacagcctggggatgagaggaaaaagaaaacaggtatctacatcaaacaga

SEQ ID NO: 22008 - DNA, 122 bp, Homo sapiens
  misc_feature (61)..(62): /note="This region represents a CpG dinucleotide"
  misc_feature (61)..(61): /note="Nucleotide may be methylated to form 5-methylcytosine"
aatgtaataaataataaatgtaaaaacaatattatatatatttgagatgctaggtcaccacggaatgaggtgacaacatggtatagaagacaacatagtttatagtttcgtaatacttgttt

SEQ ID NO: 22009 - DNA, 122 bp, Homo sapiens
  misc_feature (61)..(62): /note="This region represents a CpG dinucleotide"
  misc_feature (61)..(61): /note="Nucleotide may be methylated to form 5-methylcytosine"
aggtggactctgtgatatagggcttgccgtgcaggtggagtaggagggagcataacctggcgtgaactgaaagtctataaagaaggaagtgcacttctcaaggaagagcacccaaagggcag

SEQ ID NO: 22010 - DNA, 122 bp, Homo sapiens
  misc_feature (61)..(62): /note="This region represents a CpG dinucleotide"
  misc_feature (61)..(61): /note="Nucleotide may be methylated to form 5-methylcytosine"
gagtcagaaatattttcctaaaaattatttcattgctgataaacttgacatcattcccctcgtctaaaccacacattatagcattaactatagggaaaccataactaatatcattattttgg

SEQ ID NO: 22011 - DNA, 122 bp, Homo sapiens
  misc_feature (61)..(62): /note="This region represents a CpG dinucleotide"
  misc_feature (61)..(61): /note="Nucleotide may be methylated to form 5-methylcytosine"
agagctgaggaggtggctccctcccgcagaggtgcatgacttggctggagtgttttgcttcgctggcacacgtcttctcttttcaagttagctgagctcacacatcccccttgcttgtttgc

SEQ ID NO: 22012 - DNA, 122 bp, Homo sapiens
  misc_feature (61)..(62): /note="This region represents a CpG dinucleotide"
  misc_feature (61)..(61): /note="Nucleotide may be methylated to form 5-methylcytosine"
ctggtcttggcctgcaagggcaggggacacagctgtaagagggctgcctggcaggagccacgcccaccaaagaaggcagcaaatgcccagcagcctggcccagagcagggaggcactcggga

SEQ ID NO: 22013 - DNA, 122 bp, Homo sapiens
  misc_feature (61)..(62): /note="This region represents a CpG dinucleotide"
  misc_feature (61)..(61): /note="Nucleotide may be methylated to form 5-methylcytosine"
ctcctcttctgctcccttcacaacactgtcagagcaatggctatgttgaggagctgagctcgcgggtgctatatttaaccagtgttctcagcaagtcaagcctgtcaacagctgagaagttt

SEQ ID NO: 22014 - DNA, 122 bp, Homo sapiens
  misc_feature (61)..(62): /note="This region represents a CpG dinucleotide"
  misc_feature (61)..(61): /note="Nucleotide may be methylated to form 5-methylcytosine"
aaaaccctacacaattaaaaatgggcaaacgatctgaacagacacagcaccaaagacatacgtatggcaaatgagcacatgagaagatgcccgacaacatgagtcattaaggaaatacaaat

SEQ ID NO: 22015 - DNA, 122 bp, Homo sapiens
  misc_feature (61)..(62): /note="This region represents a CpG dinucleotide"
  misc_feature (61)..(61): /note="Nucleotide may be methylated to form 5-methylcytosine"
tgggctagctgccctggaagatcacctgtctgatagcttgcaatctgaggtgtgtgtgcgcgcccgcgtgagagagagggagcggaacgtgcctgagcatggggggaattgggccatgcccc

SEQ ID NO: 22016 - DNA, 122 bp, Homo sapiens
  misc_feature (61)..(62): /note="This region represents a CpG dinucleotide"
  misc_feature (61)..(61): /note="Nucleotide may be methylated to form 5-methylcytosine"
tctggtatgtctttatcagcagcgcgaaaacagactagtacgtatggtaagcccattattcgttttaaaaggaacttctaaaccattttccagagtgactaccattttgctactccagcaac

SEQ ID NO: 22017 - DNA, 122 bp, Homo sapiens
  misc_feature (61)..(62): /note="This region represents a CpG dinucleotide"
  misc_feature (61)..(61): /note="Nucleotide may be methylated to form 5-methylcytosine"
ttgacctcaacatcttagtcaacgcttatatgaaattttagcaaaacagtgattgaaaagcggagaatgtaaagtcccagagttggaggagtagttcatccggaagcatccgccaagtgatc

SEQ ID NO: 22018 - DNA, 122 bp, Homo sapiens
  misc_feature (61)..(62): /note="This region represents a CpG dinucleotide"
  misc_feature (61)..(61): /note="Nucleotide may be methylated to form 5-methylcytosine"
aggcaagtggcttaacctctctgaacctgtgtctttaccagtcaaaataaggattataaacgtatccacctcaaagggttgttgtgaaggaagtgcacagcttggtgctgcggtaagaggtc

SEQ ID NO: 22019 - DNA, 122 bp, Homo sapiens
  misc_feature (61)..(62): /note="This region represents a CpG dinucleotide"
  misc_feature (61)..(61): /note="Nucleotide may be methylated to form 5-methylcytosine"
tgacgggaaatcaattaatcttgatgtattattttatgcagaacagggtgcaagaacctgcggagagaatggctacagctgttcttgttggtcaggccatatattatcgttggcgggtttga

SEQ ID NO: 22020 - DNA, 122 bp, Homo sapiens
  misc_feature (61)..(62): /note="This region represents a CpG dinucleotide"
  misc_feature (61)..(61): /note="Nucleotide may be methylated to form 5-methylcytosine"
gaacatgctatagttttaaaagaggtctctgttttaataaataaacagatcatacttccccgaagcaaataagagaaaataaaaattccttagcagggtgtattaggacatttatattctgg

SEQ ID NO: 22021 - DNA, 122 bp, Homo sapiens
  misc_feature (61)..(62): /note="This region represents a CpG dinucleotide"
  misc_feature (61)..(61): /note="Nucleotide may be methylated to form 5-methylcytosine"
ctccgagctttcaggaggaaccaacgctgcccgacaccttgattttagctctttaagtatcggtttagacactactgaccttcagaagtgcaagaagataaatctattgttttaagccacca

SEQ ID NO: 22022 - DNA, 122 bp, Homo sapiens
  misc_feature (61)..(62): /note="This region represents a CpG dinucleotide"
  misc_feature (61)..(61): /note="Nucleotide may be methylated to form 5-methylcytosine"
ttccctggagccgtgtcctgggagagggactaagcctgtgttggggaggtccctgtgcagcgtctctcagctgagcaaagggcattgcaggggggcctcctgtgccaaagctgtggagtgac

SEQ ID NO: 22023 - DNA, 122 bp, Homo sapiens
  misc_feature (61)..(62): /note="This region represents a CpG dinucleotide"
  misc_feature (61)..(61): /note="Nucleotide may be methylated to form 5-methylcytosine"
tctactttctgtgggaccttgaacaatcacttaacttttcctgggtttagtttcctcatgcgccctgacagctttacaaggctgcctttgcaatggaacatggtcatgtatgaacacctgta

SEQ ID NO: 22024 - DNA, 122 bp, Homo sapiens
  misc_feature (61)..(62): /note="This region represents a CpG dinucleotide"
  misc_feature (61)..(61): /note="Nucleotide may be methylated to form 5-methylcytosine"
ttagggagcaaaaattgcaaaaaaattgccagagcctctgtggcctggctccagtccctccgcattcatcactgagggcaggtgacttaagcctgcagaggcagtgcatgcttcttccttca

SEQ ID NO: 22025 - DNA, 122 bp, Homo sapiens
  misc_feature (61)..(62): /note="This region represents a CpG dinucleotide"
  misc_feature (61)..(61): /note="Nucleotide may be methylated to form 5-methylcytosine"
ttgaaagaagatgataattccatcaaataattttgctgtatatttataaacagacagaagcgaagtttatgatgttagggcttaatttaatggattttggattgcatgtatagtgagttatg

SEQ ID NO: 22026 - DNA, 122 bp, Homo sapiens
  misc_feature (61)..(62): /note="This region represents a CpG dinucleotide"
  misc_feature (61)..(61): /note="Nucleotide may be methylated to form 5-methylcytosine"
ctcagtcactggacatcttaggatcaccctatcatgaatcagagctcgaagcagggagagcggcaagaggttgagacttgctaatgttatgaggtacctgttgtatgccaggcacccactgg

SEQ ID NO: 22027 - DNA, 122 bp, Homo sapiens
  misc_feature (61)..(62): /note="This region represents a CpG dinucleotide"
  misc_feature (61)..(61): /note="Nucleotide may be methylated to form 5-methylcytosine"
cggcaacagtcttccctaaaaccattcctaaaacgaaacaaagctacttcagaccaacagcgttgaacaagggaaaagaacagataaaacacagtgccatgtgcatgtagcaatatactaga

SEQ ID NO: 22028 - DNA, 122 bp, Homo sapiens
  misc_feature (61)..(62): /note="This region represents a CpG dinucleotide"
  misc_feature (61)..(61): /note="Nucleotide may be methylated to form 5-methylcytosine"
ctgctcaacaacatgagcctgggtcagtttcctaaactacaaaatgggaaggcaacagaacggcctcaaagagttgtgaggacagtgaaaaacctatgtgtacactaaggagaagctacctg

SEQ ID NO: 22029 - DNA, 122 bp, Homo sapiens
  misc_feature (61)..(62): /note="This region represents a CpG dinucleotide"
  misc_feature (61)..(61): /note="Nucleotide may be methylated to form 5-methylcytosine"
gaagtttggctgtactatttcctagtcatgtgaccttgggtaagttatttaagagcctcacgttcaaggaagggacatcatttgaacaagaccttgaaggttgcacaaaatttaagcatgtg

SEQ ID NO: 22030 - DNA, 122 bp, Homo sapiens
  misc_feature (61)..(62): /note="This region represents a CpG dinucleotide"
  misc_feature (61)..(61): /note="Nucleotide may be methylated to form 5-methylcytosine"
agcccatttgcttgaggatccaaaaggcttaaaatatgctgacttaatgcctatgctgagcgactgtgggtgtaattgcgacatttctccagatctttggcattttgtccatttatatatca

SEQ ID NO: 22031 - DNA, 122 bp, Homo sapiens
  misc_feature (61)..(62): /note="This region represents a CpG dinucleotide"
  misc_feature (61)..(61): /note="Nucleotide may be methylated to form 5-methylcytosine"
cctgtgaaatgatcctgccctaggcagctgcgttcccagaggagtgtccacctgggagcacgccacaagcccagaggaacattctgatttcctaatggaaccagatgtcccagtttgggcaa

SEQ ID NO: 22032 - DNA, 122 bp, Homo sapiens
  misc_feature (61)..(62): /note="This region represents a CpG dinucleotide"
  misc_feature (61)..(61): /note="Nucleotide may be methylated to form 5-methylcytosine"
ataagaagaaaagcacaaacagaaaaataaagccatgtgtaagaaaggcagggattagaacgatatagctgcaggccaaggaaccccaaggattgtcagtcatcctagaagcaacagagaag

SEQ ID NO: 22033 - DNA, 122 bp, Homo sapiens
  misc_feature (61)..(62): /note="This region represents a CpG dinucleotide"
  misc_feature (61)..(61): /note="Nucleotide may be methylated to form 5-methylcytosine"
tgaggcaattgctgggaaagctcatcaaaaagcaatggacacaagccagataaaagataacgcagtaaactcacttgcatgcactgtaaaactaaaagacttccttttagttttaacttccc

SEQ ID NO: 22034 - DNA, 122 bp, Homo sapiens
  misc_feature (61)..(62): /note="This region represents a CpG dinucleotide"
  misc_feature (61)..(61): /note="Nucleotide may be methylated to form 5-methylcytosine"
tgcctctccaccctattttttgtcttggttgtaagtagacagcagacatattttctttcccgaaggtatcaatcccatgcacagtgcaaagcctaagctgtaaaggccacctgctaatggca

SEQ ID NO: 22035 - DNA, 122 bp, Homo sapiens
  misc_feature (61)..(62): /note="This region represents a CpG dinucleotide"
  misc_feature (61)..(61): /note="Nucleotide may be methylated to form 5-methylcytosine"
cacctgtggcaggaactggggagatgtatattaaaggatacgaagtctcagtgatacagacgcatgcatccagagatctgaagtacaacatgagggctatagtcaatgatattgtagtgtat

SEQ ID NO: 22036 - DNA, 122 bp, Homo sapiens
  misc_feature (61)..(62): /note="This region represents a CpG dinucleotide"
  misc_feature (61)..(61): /note="Nucleotide may be methylated to form 5-methylcytosine"
attcctcttgcccttcaagtaaaggcccaaaactacagccagctgtctcatgtgataccacggactctgccattgtgtcagcccacctgggcactgctattctgtatctgttacaaggaaca

SEQ ID NO: 22037 - DNA, 122 bp, Homo sapiens
  misc_feature (61)..(62): /note="This region represents a CpG dinucleotide"
  misc_feature (61)..(61): /note="Nucleotide may be methylated to form 5-methylcytosine"
gcttcccccagttctgctccgaggactgggtctaagggacgagggccaggaactgagcagcgggttcacctcccaggtccttcatgatcctggtgtccctgccgcggctgccacttctggga

SEQ ID NO: 22038 - DNA, 122 bp, Homo sapiens
  misc_feature (61)..(62): /note="This region represents a CpG dinucleotide"
  misc_feature (61)..(61): /note="Nucleotide may be methylated to form 5-methylcytosine"
caaccgccttaatccacaaagcccagaggtaaaaactcacaagctgtttcttctctgaaccgcagaaacaaacctggttgcagttggggcactgtggaccagagaaagatgcagtgtttcat

SEQ ID NO: 22039 - DNA, 122 bp, Homo sapiens
  misc_feature (61)..(62): /note="This region represents a CpG dinucleotide"
  misc_feature (61)..(61): /note="Nucleotide may be methylated to form 5-methylcytosine"
atggccagggcctggtgagggcctcttcccagcttgcagttggccactgcatgttcacatcgcctttcctctacgcacatggagagtgaggaagctctcacttcctcttcctgtaaggcact

SEQ ID NO: 22040 - DNA, 122 bp, Homo sapiens
  misc_feature (61)..(62): /note="This region represents a CpG dinucleotide"
  misc_feature (61)..(61): /note="Nucleotide may be methylated to form 5-methylcytosine"
aggtagcaggccagaccagtgtcctgtggctccacatgtccgagctgcagagccattgagcgtccatccttcaggacaggcgaacttgcacacagtgccaaacacgggctccccactgcagc

SEQ ID NO: 22041 - DNA, 122 bp, Homo sapiens
  misc_feature (61)..(62): /note="This region represents a CpG dinucleotide"
  misc_feature (61)..(61): /note="Nucleotide may be methylated to form 5-methylcytosine"
tatttcctcaatcagtcagtcaacgaacattcgagatcctgtcatgtgtcagacactgtgcggagagctggagataaaactgtcaacaagatgaatgcagcctctaaaataaagagtttcta

SEQ ID NO: 22042 - DNA, 122 bp, Homo sapiens
  misc_feature (61)..(62): /note="This region represents a CpG dinucleotide"
  misc_feature (61)..(61): /note="Nucleotide may be methylated to form 5-methylcytosine"
ccacacagcagcatcgcctggtctgactacagaacagtagcctagtagcaggcgtggatccgtgcccttgctctggggaatgccttccttcctcgcagcccgaacctcgtcccttctagccc

SEQ ID NO: 22043 - DNA, 122 bp, Homo sapiens
  misc_feature (61)..(62): /note="This region represents a CpG dinucleotide"
  misc_feature (61)..(61): /note="Nucleotide may be methylated to form 5-methylcytosine"
ccagggctggctgtgtgcgactgagcaagtcacttatctctgacgaacaccttcactgggcgtccactttagactgtctggacaatggtttcttatcaggaagggatgatggtcagttattg

SEQ ID NO: 22044 - DNA, 122 bp, Homo sapiens
  misc_feature (61)..(62): /note="This region represents a CpG dinucleotide"
  misc_feature (61)..(61): /note="Nucleotide may be methylated to form 5-methylcytosine"
tccacttataccactcaagtttttctcctagagtgtctgccctgggcctctcctctctctcgaagcctggtgttgttagggtaatattgtttatacactatacagttgaaccatgcctctta

SEQ ID NO: 22045 - DNA, 122 bp, Homo sapiens
  misc_feature (61)..(62): /note="This region represents a CpG dinucleotide"
  misc_feature (61)..(61): /note="Nucleotide may be methylated to form 5-methylcytosine"
aatcagcaggaggtaggggcacacccgtgcataactttctggtgaagccttccctgcaatcgcaagagaagggttacgaaatctcggatctcatcagtgagggggtcaagtcaagagaaatt

SEQ ID NO: 22046 - DNA, 122 bp, Homo sapiens
  misc_feature (61)..(62): /note="This region represents a CpG dinucleotide"
  misc_feature (61)..(61): /note="Nucleotide may be methylated to form 5-methylcytosine"
aagaacctgcagagtgacacaagcagcaggcttctgaggttgctctagcctcagaatggccgtcccttctccaccctggccctcattgctgaggtttcctttgaagcaacagtgccggaaca

SEQ ID NO: 22047 - DNA, 122 bp, Homo sapiens
  misc_feature (61)..(62): /note="This region represents a CpG dinucleotide"
  misc_feature (61)..(61): /note="Nucleotide may be methylated to form 5-methylcytosine"
agtagttaagatttatagacttgtttaccagttacctggggctcttcggttccatccaggcgtctctgaggttcttcagatactatttgttttattttattttttttgagacggagtcacct

SEQ ID NO: 22048 - DNA, 122 bp, Homo sapiens
  misc_feature (61)..(62): /note="This region represents a CpG dinucleotide"
  misc_feature (61)..(61): /note="Nucleotide may be methylated to form 5-methylcytosine"
tgctgctggctcgggctggactcgggaagccgggtgagctcggggcgctacaggcgggaccgggggcagcgaggaggccgggaggtggaggccgcgagggtcacttcttgtgtcctgcagag

SEQ ID NO: 22049 - DNA, 122 bp, Homo sapiens
  misc_feature (61)..(62): /note="This region represents a CpG dinucleotide"
  misc_feature (61)..(61): /note="Nucleotide may be methylated to form 5-methylcytosine"
agacagctgcagtcttagagcagacacataaatttatgccctgcattttagtgggagagccgaataaataacagaacctcatgaatgaggtgctctaacctagtggactgtctgatatttct

SEQ ID NO: 22050 - DNA, 122 bp, Homo sapiens
  misc_feature (61)..(62): /note="This region represents a CpG dinucleotide"
  misc_feature (61)..(61): /note="Nucleotide may be methylated to form 5-methylcytosine"
tcaagctaccagcacccataagagaactagcatagggtgttgtgcctggagacatgcccacggctgcacagatggaaaaacctctggcccatttggataaaagcttgcacaaaacttcagct

SEQ ID NO: 22051 - DNA, 122 bp, Homo sapiens
  misc_feature (61)..(62): /note="This region represents a CpG dinucleotide"
  misc_feature (61)..(61): /note="Nucleotide may be methylated to form 5-methylcytosine"
cagattttaggcgcttcacattcctgtcctattttatttacagtcaaaaacaatgttgttcgatgggcaggaaaaccaattcagcctttgcacaatgatcccctagagatcagaatccaggg

SEQ ID NO: 22052 - DNA, 122 bp, Homo sapiens
  misc_feature (61)..(62): /note="This region represents a CpG dinucleotide"
  misc_feature (61)..(61): /note="Nucleotide may be methylated to form 5-methylcytosine"
cccaaattagtcatgtaaatttactgaaggccaacagtagcagaaacttgtcaacaagaccgaggaagcaaaggaaggcagcatctttacatttttagtgtttataacacttcaaaagccta

SEQ ID NO: 22053 - DNA, 122 bp, Homo sapiens
  misc_feature (61)..(62): /note="This region represents a CpG dinucleotide"
  misc_feature (61)..(61): /note="Nucleotide may be methylated to form 5-methylcytosine"
ctgaattaccactgagcgttatctgaatacaggctgcccttgaagtccctaatttcattgcgctgacagaggctttagtgagtctataattggaaaaggaagcatttgtgcctcaggtacag

SEQ ID NO: 22054 - DNA, 122 bp, Homo sapiens
  misc_feature (61)..(62): /note="This region represents a CpG dinucleotide"
  misc_feature (61)..(61): /note="Nucleotide may be methylated to form 5-methylcytosine"
cgtgccccactcctggctaaaactcctcctgtttcaggactcctgaggcaactggttttgcgtctcagaagggatcaccctcactagtgtatgtctttcacctttcatcagccacttcccct

SEQ ID NO: 22055 - DNA, 122 bp, Homo sapiens
  misc_feature (61)..(62): /note="This region represents a CpG dinucleotide"
  misc_feature (61)..(61): /note="Nucleotide may be methylated to form 5-methylcytosine"
acagacgattcaggaaggaaaacaagaaactagggaccctggtgttcaggtaggcagctccggttgcagtctgcccctctgagtcactccaggcggtgacctcccccaacccgccctcattc

SEQ ID NO: 22056 - DNA, 122 bp, Homo sapiens
  misc_feature (61)..(62): /note="This region represents a CpG dinucleotide"
  misc_feature (61)..(61): /note="Nucleotide may be methylated to form 5-methylcytosine"
acaaggtaccccaattctcagcaacagtggtggaagctggaaagccattgagcaaacacccgaatattctggggggaaataactgctctctagaattctgtatccagacaaccatcaacgaa

SEQ ID NO: 22057 - DNA, 122 bp, Homo sapiens
  misc_feature (61)..(62): /note="This region represents a CpG dinucleotide"
  misc_feature (61)..(61): /note="Nucleotide may be methylated to form 5-methylcytosine"
cttttaggttctccatctcccactatgtccccagtcaaaagtcttgggcccttctactgacggatcttccaagtacagaaggaacagaagtagttattagacctattattaagtaacacatt

SEQ ID NO: 22058 - DNA, 122 bp, Homo sapiens
  misc_feature (61)..(62): /note="This region represents a CpG dinucleotide"
  misc_feature (61)..(61): /note="Nucleotide may be methylated to form 5-methylcytosine"
cttgtgtgtacctctctagtactccccagtatgttccttttgcacaaacatgtagtactgcgtaactactgttctacagatgaactccagttatttaagtgaggcctgttttttagaactaa

SEQ ID NO: 22059 - DNA, 122 bp, Homo sapiens
  misc_feature (61)..(62): /note="This region represents a CpG dinucleotide"
  misc_feature (61)..(61): /note="Nucleotide may be methylated to form 5-methylcytosine"
gccggtgcccgaaattgggctcctgcacacagtggcccgctacaagttctacctggctttcgagaactcgcagcacctggattatatcaccgagaagctctggcgcaacgcgttgctcgctg

SEQ ID NO: 22060 - DNA, 122 bp, Homo sapiens
  misc_feature (61)..(62): /note="This region represents a CpG dinucleotide"
  misc_feature (61)..(61): /note="Nucleotide may be methylated to form 5-methylcytosine"
tgtatatagagatctatatctagacactctcatgcagagcaatgcatactgagtgtggcccgtgtgttatggtggtagcagggccacctggcaggtagttgcagtgtgaccactgaaaatcc

SEQ ID NO: 22061 - DNA, 122 bp, Homo sapiens
  misc_feature (61)..(62): /note="This region represents a CpG dinucleotide"
  misc_feature (61)..(61): /note="Nucleotide may be methylated to form 5-methylcytosine"
ggactgtcttgcagtattacagctctaagctacaaatgctttcctaaccacagaggtaaccgctatacagatactttgaaagacaaatgagaatgctgccacatgcaaggtcaatcacaaac

SEQ ID NO: 22062 - DNA, 122 bp, Homo sapiens
  misc_feature (61)..(62): /note="This region represents a CpG dinucleotide"
  misc_feature (61)..(61): /note="Nucleotide may be methylated to form 5-methylcytosine"
attaagtatggggtgtcaggatgcaagccctaacaaggaagtgtgaaaaaagaaacatggcggggcatttttttcagtaggaaaaggccaaatctattccattgaatacaatgacattgtta

SEQ ID NO: 22063 - DNA, 122 bp, Homo sapiens
  misc_feature (61)..(62): /note="This region represents a CpG dinucleotide"
  misc_feature (61)..(61): /note="Nucleotide may be methylated to form 5-methylcytosine"
caggcttttttctgtaatacatgatacaaaacaatcagtaacactcaattccaggaccaacgagaagggagacattataaaaaatttaaaatgtctcaaaattctgtcactacagattggcc

SEQ ID NO: 22064 - DNA, 122 bp, Homo sapiens
  misc_feature (61)..(62): /note="This region represents a CpG dinucleotide"
  misc_feature (61)..(61): /note="Nucleotide may be methylated to form 5-methylcytosine"
aaggattttgtagcagcaagagtactaacacagaagcaagtgactatgttcttaaccctacgtaaacacaaaccagactagtcattttactttgggcaacaccagatacattctctgtgcca

SEQ ID NO: 22065 - DNA, 122 bp, Homo sapiens
  misc_feature (61)..(62): /note="This region represents a CpG dinucleotide"
  misc_feature (61)..(61): /note="Nucleotide may be methylated to form 5-methylcytosine"
gcctggtaaattgcaatcaacatgtcattgaatcctggcatcctgtctgcactaggtgtacgtattacctattgcttcacagtaaaattccccaaaacgtattagattgagctggtccacct

SEQ ID NO: 22066 - DNA, 122 bp, Homo sapiens
  misc_feature (61)..(62): /note="This region represents a CpG dinucleotide"
  misc_feature (61)..(61): /note="Nucleotide may be methylated to form 5-methylcytosine"
atgtcaacaaagagtcgtatttgcttacaaacagatttcaattgttgagagaccaatttacgaacggttgctagaaacatgggcagcatttgctatctgttcatagaactactttgcattta

SEQ ID NO: 22067 - DNA, 122 bp, Homo sapiens
  misc_feature (61)..(62): /note="This region represents a CpG dinucleotide"
  misc_feature (61)..(61): /note="Nucleotide may be methylated to form 5-methylcytosine"
ccctccttcctctttactgacccaaaatgccaactattatagtaactcttttgggttagacgaatccagtgaataaacacctactaagcattggaggtccaagaggaataagatatgcctga

SEQ ID NO: 22068 - DNA, 122 bp, Homo sapiens
  misc_feature (61)..(62): /note="This region represents a CpG dinucleotide"
  misc_feature (61)..(61): /note="Nucleotide may be methylated to form 5-methylcytosine"
ctccaaccttattgaatctctccccttctttttgttatctggtcatttgatctataatttcgattccttttcctgaaattccctcctttttccttttcccctaaaccatcattctagtcctc

SEQ ID NO: 22069 - DNA, 122 bp, Homo sapiens
  misc_feature (61)..(62): /note="This region represents a CpG dinucleotide"
  misc_feature (61)..(61): /note="Nucleotide may be methylated to form 5-methylcytosine"
cagctgctaagtatgtatatgccaattatgcattctggcactggggaaatgaccacaggacgagtccagggacccactggaccgaggtcagacctgagctaaaactctattaattacctgac

SEQ ID NO: 22070 - DNA, 122 bp, Homo sapiens
  misc_feature (61)..(62): /note="This region represents a CpG dinucleotide"
  misc_feature (61)..(61): /note="Nucleotide may be methylated to form 5-methylcytosine"
cagcgagacgccctgggcgtaggaccctcggagccaggtgcgggatataagcttgttgtgcgccgttttttaaatccgtcggaaaagcgcagtattcggttgggagtgacctgattttccag

SEQ ID NO: 22071 - DNA, 122 bp, Homo sapiens
  misc_feature (61)..(62): /note="This region represents a CpG dinucleotide"
  misc_feature (61)..(61): /note="Nucleotide may be methylated to form 5-methylcytosine"
agggcaagcgagggaggtctgggctggtaatcgagcaaggcaaatgaagtctccgggggccgcaggaaaatggagacagcagaaaccctagggctcctattcaatatgaacgtcactcccac

SEQ ID NO: 22072 - DNA, 122 bp, Homo sapiens
  misc_feature (61)..(62): /note="This region represents a CpG dinucleotide"
  misc_feature (61)..(61): /note="Nucleotide may be methylated to form 5-methylcytosine"
gtggagtacttttaaatataatgtatatgaaatgtgtacttacagagtatctgctttccacggcatctacaaaacaaaggatgacatggcagtgagcaacgcaaataacccagttcaactgc

SEQ ID NO: 22073 - DNA, 122 bp, Homo sapiens
  misc_feature (61)..(62): /note="This region represents a CpG dinucleotide"
  misc_feature (61)..(61): /note="Nucleotide may be methylated to form 5-methylcytosine"
gcaacttgtagctgctgaaagacgcctaaagcaaatacaagccaggtgccaggaccttgacgacgctggggttggttctgttattctgcatggttcccgtgtttagatctttcacaatcatt

SEQ ID NO: 22074 - DNA, 122 bp, Homo sapiens
  misc_feature (61)..(62): /note="This region represents a CpG dinucleotide"
  misc_feature (61)..(61): /note="Nucleotide may be methylated to form 5-methylcytosine"
cataattttgtcgttccttgctaccacatgattgtgacatcaaaacagtctaacagttaacgctggtaacaggatcgttccaagaacccaagctctggagacgagcataaaggcacaaaaca

SEQ ID NO: 22075 - DNA, 122 bp, Homo sapiens
  misc_feature (61)..(62): /note="This region represents a CpG dinucleotide"
  misc_feature (61)..(61): /note="Nucleotide may be methylated to form 5-methylcytosine"
aacattacattgacagctcttaaaacccttccagaagagaatcatttgaccacatgatatcgcatgtctgttatataaagcctgtggtatgatttccacggggaatgtatttgtcattagtc

SEQ ID NO: 22076 - DNA, 122 bp, Homo sapiens
  misc_feature (61)..(62): /note="This region represents a CpG dinucleotide"
  misc_feature (61)..(61): /note="Nucleotide may be methylated to form 5-methylcytosine"
aagctaagcataacacgaggaagaacacttagtgcctgctcccaggaagcccggagttggcgatgtttcacaatcagtcaaccaccacttgagggctgaagtgcatgccaagcattcaacta

SEQ ID NO: 22077 - DNA, 122 bp, Homo sapiens
  misc_feature (61)..(62): /note="This region represents a CpG dinucleotide"
  misc_feature (61)..(61): /note="Nucleotide may be methylated to form 5-methylcytosine"
atccagtgctcagggccagtccctgctctgcacatggaagtgcaactgagattagaaacacggtgagacacctaatccctgcactgccctttcatgaatctcgacctgctaacatattcatc

SEQ ID NO: 22078 - DNA, 122 bp, Homo sapiens
  misc_feature (61)..(62): /note="This region represents a CpG dinucleotide"
  misc_feature (61)..(61): /note="Nucleotide may be methylated to form 5-methylcytosine"
cctaagtgtcactttgctaaggcaatacaatggatttcaacaaagaaatattcgtttccacgtagtttgatactgaaagcagaaaactttctttttactgcatgcaggaaatggttttcata

SEQ ID NO: 22079 - DNA, 122 bp, Homo sapiens
  misc_feature (61)..(62): /note="This region represents a CpG dinucleotide"
  misc_feature (61)..(61): /note="Nucleotide may be methylated to form 5-methylcytosine"
gcactaatggagaaggccaggaaagcctggattctgtgtgtcctcattgtgctccctcatcgatacactgtctctcaccagcctttggaatttccttcctttggttttctgccatttttttc

SEQ ID NO: 22080 - DNA, 122 bp, Homo sapiens
  misc_feature (61)..(62): /note="This region represents a CpG dinucleotide"
  misc_feature (61)..(61): /note="Nucleotide may be methylated to form 5-methylcytosine"
ccactgtcagcagtagggcctaaagcttggtcagaaggcaaaatgaaactgttagcaaagcgaagcctgggaattccagatcctgggtccttatgtgcccattataactgagaacagccttt

SEQ ID NO: 22081 - DNA, 122 bp, Homo sapiens
  misc_feature (61)..(62): /note="This region represents a CpG dinucleotide"
  misc_feature (61)..(61): /note="Nucleotide may be methylated to form 5-methylcytosine"
gactgtgggagtagctcagagacttcagcacatataaccaggtacaacgtgacacggggccgcacagacctgtatttgtaccggaaaaaaattttctatttatctactcttgtctgatgcca

SEQ ID NO: 22082 - DNA, 122 bp, Homo sapiens
  misc_feature (61)..(62): /note="This region represents a CpG dinucleotide"
  misc_feature (61)..(61): /note="Nucleotide may be methylated to form 5-methylcytosine"
taaagttctagtaactggtgtttacagagacagagacagagatagagagatcccaaaacacgaaagaaaacaagtcaccatgagaaggatcaatagaaccaataaattgcaaaaccagacca

SEQ ID NO: 22083 - DNA, 122 bp, Homo sapiens
  misc_feature (61)..(62): /note="This region represents a CpG dinucleotide"
  misc_feature (61)..(61): /note="Nucleotide may be methylated to form 5-methylcytosine"
gtaaagatgcctttactgataaaagaccactcaccagaaatgtttaggagattattccctcgaaggggtgagcaggtgtcctacccaatgactgactgatacaggaacccaaaagcccagct

SEQ ID NO: 22084 - DNA, 122 bp, Homo sapiens
  misc_feature (61)..(62): /note="This region represents a CpG dinucleotide"
  misc_feature (61)..(61): /note="Nucleotide may be methylated to form 5-methylcytosine"
ggtctacctgtggttattttatttgtgctgccctctgcccttgctatggccactatctatcgcaccctcagaaccgaagatagatgttagtagagagaggctgtctcctcacctctggcaga

SEQ ID NO: 22085 - DNA, 122 bp, Homo sapiens
  misc_feature (61)..(62): /note="This region represents a CpG dinucleotide"
  misc_feature (61)..(61): /note="Nucleotide may be methylated to form 5-methylcytosine"
attttatccacctccatttcagcatgtggctcgcgtggacaggtggacggacgctgtggccgcatggaaccttgagaacccagggacgagccagtgccgggaaggaactgccgggactcacc

SEQ ID NO: 22086 - DNA, 122 bp, Homo sapiens
  misc_feature (61)..(62): /note="This region represents a CpG dinucleotide"
  misc_feature (61)..(61): /note="Nucleotide may be methylated to form 5-methylcytosine"
ccagggtcttcctgaatcgtcatacaccatgctggctgccaaggcataaggtgacctaagcgaagctttcacacaggccatgtgcacagtcataaaatctcgagagaatgtggcaacagaga

SEQ ID NO: 22087 - DNA, 122 bp, Homo sapiens
  misc_feature (61)..(62): /note="This region represents a CpG dinucleotide"
  misc_feature (61)..(61): /note="Nucleotide may be methylated to form 5-methylcytosine"
ggcacattttctattgctcacatagcttcaagtgacaatgttactaactttcttccaccacgtaataagggtttgtcccctttcctcctgcttctaataaaaatttctcactttcctttaag

SEQ ID NO: 22088 - DNA, 122 bp, Homo sapiens
  misc_feature (61)..(62): /note="This region represents a CpG dinucleotide"
  misc_feature (61)..(61): /note="Nucleotide may be methylated to form 5-methylcytosine"
cggatgcacagacacacactcacacacttaattacagcccggcacaccaactgcctctaacgctttgacatagaaattaatctagagacggaagacagagcataaataaggaaaataaacaa

SEQ ID NO: 22089 - DNA, 122 bp, Homo sapiens
  misc_feature (61)..(62): /note="This region represents a CpG dinucleotide"
  misc_feature (61)..(61): /note="Nucleotide may be methylated to form 5-methylcytosine"
gacggaagcgttcacactcaagtgtttatggttgcgtgtcttcttgcacagggatgtctgcgtttccaataccggcttctggacaggactcactccgagaaataaatgtgtaatggatattt

SEQ ID NO: 22090 - DNA, 122 bp, Homo sapiens
  misc_feature (61)..(62): /note="This region represents a CpG dinucleotide"
  misc_feature (61)..(61): /note="Nucleotide may be methylated to form 5-methylcytosine"
atggattttggagtcagacagatctagattagaatcttattccatcacttcctaaatttccgttgttctggcagctccccacctccagaacttaaatgtctctgtttctttcctaagggcat

SEQ ID NO: 22091 - DNA, 122 bp, Homo sapiens
  misc_feature (61)..(62): /note="This region represents a CpG dinucleotide"
  misc_feature (61)..(61): /note="Nucleotide may be methylated to form 5-methylcytosine"
tgccagttcaacagactgagtaaagctacacgatttagctttactaaataaacgcccatgcgttttattttgactgcatgcttcaagaagctttcactttcaaattactcattacaaaaaag

SEQ ID NO: 22092 - DNA, 122 bp, Homo sapiens
  misc_feature (61)..(62): /note="This region represents a CpG dinucleotide"
  misc_feature (61)..(61): /note="Nucleotide may be methylated to form 5-methylcytosine"
gtggtcgatttaacccgttccctattgatagacgctgtgtgggctccagccttttgcagtcgactctgcgatgcataacttcgtgtatagatagcagtctgcagctgcacgtgggggtgtgt

SEQ ID NO: 22093 - DNA, 122 bp, Homo sapiens
  misc_feature (61)..(62): /note="This region represents a CpG dinucleotide"
  misc_feature (61)..(61): /note="Nucleotide may be methylated to form 5-methylcytosine"
tgaagtttctctttagatctttgtttccttcccctgagttctgcattttcttcccatgtacgtgtgccgtggaggagaatgaaaagaggaaatggcacaaaagtgaaccttgttgggtggct

SEQ ID NO: 22094 - DNA, 122 bp, Homo sapiens
  misc_feature (61)..(62): /note="This region represents a CpG dinucleotide"
  misc_feature (61)..(61): /note="Nucleotide may be methylated to form 5-methylcytosine"
catattcttcattgtttgtaaataacttttatgcctttatctgcaataaggacttgaaaacgtctgtttcagaagtgttcctaggagatgtttgctgctaaatttttaagaaatgtattata

SEQ ID NO: 22095 - DNA, 122 bp, Homo sapiens
  misc_feature (61)..(62): /note="This region represents a CpG dinucleotide"
  misc_feature (61)..(61): /note="Nucleotide may be methylated to form 5-methylcytosine"
gagctgcaggcgggccctgatgaggtggccatgaggatcagcagtcatctgcttggtcaccgtggttgcatcccagtccctgtcccatgatcacacagagctgtccccccaactttgaggag

SEQ ID NO: 22096 - DNA, 122 bp, Homo sapiens
  misc_feature (61)..(62): /note="This region represents a CpG dinucleotide"
  misc_feature (61)..(61): /note="Nucleotide may be methylated to form 5-methylcytosine"
gtccacgaagtcaccacctgaaagaaacaagacagcaatagacgtcattcataagcaatacgttttgttttaggagagacttttatggatgtgattaagccctgttaaacatcctatgccac

SEQ ID NO: 22097 - DNA, 122 bp, Homo sapiens
  misc_feature (61)..(62): /note="This region represents a CpG dinucleotide"
  misc_feature (61)..(61): /note="Nucleotide may be methylated to form 5-methylcytosine"
gacaccacagccccacaaacaactctataactgtatggattttagtggtttctgtacaaacgttcagcaactgggcagaagctggtcatcatacaatgttgttaaagaaaaagaaagataca

SEQ ID NO: 22098 - DNA, 122 bp, Homo sapiens
  misc_feature (61)..(62): /note="This region represents a CpG dinucleotide"
  misc_feature (61)..(61): /note="Nucleotide may be methylated to form 5-methylcytosine"
aaactgaaaactagtacctgacttgcagcgtcagcatttggaaagtgcttgtcggcaaatcgactgtatgaaggcgtgtagcttcatcccctgccatttttgtgggttctagcactttaaaa

SEQ ID NO: 22099 - DNA, 122 bp, Homo sapiens
  misc_feature (61)..(62): /note="This region represents a CpG dinucleotide"
  misc_feature (61)..(61): /note="Nucleotide may be methylated to form 5-methylcytosine"
tgcccttggacagataagaaaactgcagccccaggcacagaggcacaagctgagaggtgacgtcaggactgaactgtgagcctgggagtccaaatctaggctcacccagtctttctggctcc

SEQ ID NO: 22100 - DNA, 122 bp, Homo sapiens
  misc_feature (61)..(62): /note="This region represents a CpG dinucleotide"
  misc_feature (61)..(61): /note="Nucleotide may be methylated to form 5-methylcytosine"
cttcagagtcctgactctccattattcatttgatctgcaggatctggcacatctcccagccgtagtagagtttataagctcaattgtcagccaccttgtaagatcgaagagtatcggcctat

SEQ ID NO: 22101 - DNA, 122 bp, Homo sapiens
  misc_feature (61)..(62): /note="This region represents a CpG dinucleotide"
  misc_feature (61)..(61): /note="Nucleotide may be methylated to form 5-methylcytosine"
tcaacacagttgccaagcagtgtgctgttgatagccactctgccacccagcaaaggtcagcgggtctggaagacagctctttgacaaggagatcatgatctaacctccgggccaccaaagat

SEQ ID NO: 22102 - DNA, 122 bp, Homo sapiens
  misc_feature (61)..(62): /note="This region represents a CpG dinucleotide"
  misc_feature (61)..(61): /note="Nucleotide may be methylated to form 5-methylcytosine"
tgggctggaaggctcggaagcaggtggaaccggtcaagcagcgtgtttttgttggggtgacgttatgtaggggctgcacagtcatggggacatcgtgaagctggcaggagggtggctgtgga

SEQ ID NO: 22103 - DNA, 122 bp, Homo sapiens
  misc_feature (61)..(62): /note="This region represents a CpG dinucleotide"
  misc_feature (61)..(61): /note="Nucleotide may be methylated to form 5-methylcytosine"
tgagggcagggattatgacatattcatctccaggtccctttggcctaatttagggactgacgtgtcatagccagtaaatgttggttggattggattgaatggtaataaagagcattttctta

SEQ ID NO: 22104 - DNA, 122 bp, Homo sapiens
  misc_feature (61)..(62): /note="This region represents a CpG dinucleotide"
  misc_feature (61)..(61): /note="Nucleotide may be methylated to form 5-methylcytosine"
tgattgccaaattgacgcccagaaaaggtatacctgtttctgctcctaccagtggccctacgaatgctcctttccccacattcacacccccaccgagttttatcattcttttaaatctttat

SEQ ID NO: 22105 - DNA, 122 bp, Homo sapiens
  misc_feature (61)..(62): /note="This region represents a CpG dinucleotide"
  misc_feature (61)..(61): /note="Nucleotide may be methylated to form 5-methylcytosine"
gaactcctggcctcaagtgattctcctcccttggcatccacaaattactaggattacaggcgtgaaccaccatgcctggccttgaactgtatctttaaagcccctgaaatattgttcctacc

SEQ ID NO: 22106 - DNA, 122 bp, Homo sapiens
  misc_feature (61)..(62): /note="This region represents a CpG dinucleotide"
  misc_feature (61)..(61): /note="Nucleotide may be methylated to form 5-methylcytosine"
aagttaacacttggtgtgaactgagaacctgtcatcgaggctagagtcacgcttgggtatcggctattgcctgagtgtgctagagtcctcgaagagtaactgctgaccttattcactggctg

SEQ ID NO: 22107 - DNA, 122 bp, Homo sapiens
  misc_feature (61)..(62): /note="This region represents a CpG dinucleotide"
  misc_feature (61)..(61): /note="Nucleotide may be methylated to form 5-methylcytosine"
atctcggctcactgccagctctgcccccggggttcgtgccattctcctgcctcagcctcccgaataactgggctgattcccccacaagattcaaaaacaaaagaaaactggctgactcaccg

SEQ ID NO: 22108 - DNA, 122 bp, Homo sapiens
  misc_feature (61)..(62): /note="This region represents a CpG dinucleotide"
  misc_feature (61)..(61): /note="Nucleotide may be methylated to form 5-methylcytosine"
ttcttggttcagggaaccacccactgagggggctggctgggagatgcctctcgacactgacgctgtcaaccctgtgtggaattgagaattccactggcttttgttcctggttcctgggaggt

SEQ ID NO: 22109 - DNA, 122 bp, Homo sapiens
  misc_feature (61)..(62): /note="This region represents a CpG dinucleotide"
  misc_feature (61)..(61): /note="Nucleotide may be methylated to form 5-methylcytosine"
tggtccaagtggtcaatttgagcagtctgttgaatatagaggtttaaggagaaaagtctacgatgcatgaatggattttggctagcacagttttacacattgtaggcttccagtaaatattt

SEQ ID NO: 22110 - DNA, 122 bp, Homo sapiens
  misc_feature (61)..(62): /note="This region represents a CpG dinucleotide"
  misc_feature (61)..(61): /note="Nucleotide may be methylated to form 5-methylcytosine"
ttggccaaggcaaaaatagtaattggcacggtgacagtgtgatgggccaggcccaggccccgcctgcaggagcctgtcatgctgaggtgggcagcccttctcagatgtcactgtgcctgggc

SEQ ID NO: 22111 - DNA, 122 bp, Homo sapiens
  misc_feature (61)..(62): /note="This region represents a CpG dinucleotide"
  misc_feature (61)..(61): /note="Nucleotide may be methylated to form 5-methylcytosine"
catgtcctgtgccagattctcgctggtgcccgagacactccccgatggagggttagggctcggagccctttaactccttcggcacagtggagaaaggtttaggaaatagcagaacaaacgca

SEQ ID NO: 22112 - DNA, 122 bp, Homo sapiens
  misc_feature (61)..(62): /note="This region represents a CpG dinucleotide"
  misc_feature (61)..(61): /note="Nucleotide may be methylated to form 5-methylcytosine"
tgggcttgtccttcctctccacccttgtccttttccactccctccccatacccaaatccacgcagcttacccggtggcggcttctgagcttttgcacatgctcttgctccctcctcctgcct

SEQ ID NO: 22113 - DNA, 122 bp, Homo sapiens
  misc_feature (61)..(62): /note="This region represents a CpG dinucleotide"
  misc_feature (61)..(61): /note="Nucleotide may be methylated to form 5-methylcytosine"
ggctctgccaaacaccccagtctcttgcaggatctgaggtctgctggttgtgggactttgcgcaaattatttaaacgttgtgcgcctcagtttccttatctgtaaaatgggattaataatct

SEQ ID NO: 22114 - DNA, 122 bp, Homo sapiens
  misc_feature (61)..(62): /note="This region represents a CpG dinucleotide"
  misc_feature (61)..(61): /note="Nucleotide may be methylated to form 5-methylcytosine"
gctgcaagtctaggtgtggctcagcaactgcaatatgtgggttggcttgaaacattagtacggaaaggtctgtgctgctcttggaattcctgtctgctaattcctgtgaacttacctaactc

SEQ ID NO: 22115 - DNA, 122 bp, Homo sapiens
  misc_feature (61)..(62): /note="This region represents a CpG dinucleotide"
  misc_feature (61)..(61): /note="Nucleotide may be methylated to form 5-methylcytosine"
cccacagacccccgataggccccagtgtgtgttgttcctctccctgtgtctatgttaaaacgtacatcttttaatatgactgctaaaaatgataatttcagagcctctaatattctcaagca

SEQ ID NO: 22116 - DNA, 122 bp, Homo sapiens
  misc_feature (61)..(62): /note="This region represents a CpG dinucleotide"
  misc_feature (61)..(61): /note="Nucleotide may be methylated to form 5-methylcytosine"
actctagttgtagggatgctattcaaacctatactcgaatactcatctacctggtgttttcgtgcctgctgttcctggatttgctgtgcatggtgtgacaaggtgacatgatgactatgccc

SEQ ID NO: 22117 - DNA, 122 bp, Homo sapiens
  misc_feature (61)..(62): /note="This region represents a CpG dinucleotide"
  misc_feature (61)..(61): /note="Nucleotide may be methylated to form 5-methylcytosine"
ataagtcggagtttctccaggctgggtcttaggtcacctgaaagcatcacccatggggagcggcctgcactgcagatgtcccgggccctgcccagatcagtcattctgagggtggggcctgc

SEQ ID NO: 22118 - DNA, 122 bp, Homo sapiens
  misc_feature (61)..(62): /note="This region represents a CpG dinucleotide"
  misc_feature (61)..(61): /note="Nucleotide may be methylated to form 5-methylcytosine"
actggcaggaacactgtctgggtgttcgggaacttcgcatttccagccagcatgtgaaggcgcgttcttccactttaaggtccgctgcagaagtggcaaagccatgtgccttgagctctgct

SEQ ID NO: 22119 - DNA, 122 bp, Homo sapiens
  misc_feature (61)..(62): /note="This region represents a CpG dinucleotide"
  misc_feature (61)..(61): /note="Nucleotide may be methylated to form 5-methylcytosine"
ttagggaggccgaggtgggcagatcaactgagttcaggagttcgagaccaccatggctaacgtggtaaaaccccatttctactaaaaatacaaaaaagtagccggcgtggtggcgctcgcct

SEQ ID NO: 22120 - DNA, 122 bp, Homo sapiens
  misc_feature (61)..(62): /note="This region represents a CpG dinucleotide"
  misc_feature (61)..(61): /note="Nucleotide may be methylated to form 5-methylcytosine"
gctggacttggaaccatatgacctgagttttactttctgctctgccctgggccacattttcgtcttaatatttcatgttttaaaggcataatgatgtcactgactggctgatgaaatcccaa

SEQ ID NO: 22121 - DNA, 122 bp, Homo sapiens
  misc_feature (61)..(62): /note="This region represents a CpG dinucleotide"
  misc_feature (61)..(61): /note="Nucleotide may be methylated to form 5-methylcytosine"
ttattatgctagggactgcatttgaaaagccaaactctagtatctgtctgtaattgcaagcggatatctcagcacatgcacaagcttatgtcaggaggatgtttatgaaaaactcaccaagc

SEQ ID NO: 22122 - DNA, 122 bp, Homo sapiens
  misc_feature (61)..(62): /note="This region represents a CpG dinucleotide"
  misc_feature (61)..(61): /note="Nucleotide may be methylated to form 5-methylcytosine"
aaagggcaaagatatgcccttattgtgaaatatcatgaacttaatataactgcaattactcgttgccatggagagatgtccatatatatcactaactagaaaaagcagcttaggtatagtac

SEQ ID NO: 22123 - DNA, 122 bp, Homo sapiens
  misc_feature (61)..(62): /note="This region represents a CpG dinucleotide"
  misc_feature (61)..(61): /note="Nucleotide may be methylated to form 5-methylcytosine"
cagtgagaacttgaagatatctacacaaacgaaaatgttgaaatgagcgatcattgcaaacgtgaataagtctatgtacccaacatacttctgtattttattttggttgcataatgctgagg

SEQ ID NO: 22124 - DNA, 122 bp, Homo sapiens
  misc_feature (61)..(62): /note="This region represents a CpG dinucleotide"
  misc_feature (61)..(61): /note="Nucleotide may be methylated to form 5-methylcytosine"
tttgaagtctggcagagacgtttgagtggcttctgtccacctcctcagtgactcacagtgcgatgctcatggttgaacctgagtgatgccagcagcaaggaaactgacagagctcgccgatc

SEQ ID NO: 22125 - DNA, 122 bp, Homo sapiens
  misc_feature (61)..(62): /note="This region represents a CpG dinucleotide"
  misc_feature (61)..(61): /note="Nucleotide may be methylated to form 5-methylcytosine"
ttcatactgaagcagccaggaactgagagaaagaggaagcctcggctgtgctccgggctgcgctgccagggttgcgtctgtagcaggtccagcagcaaaaacaaaacagggcagagcccagg

SEQ ID NO: 22126 - DNA, 122 bp, Homo sapiens
  misc_feature (61)..(62): /note="This region represents a CpG dinucleotide"
  misc_feature (61)..(61): /note="Nucleotide may be methylated to form 5-methylcytosine"
tggattcctcactagacctagcccaagagggcgagggctgtgtctgtcctcttcctgccgcggcagctcctgccaccactggcagagggattgtgaaatagtcattccttcttttaacaaat

SEQ ID NO: 22127 - DNA, 122 bp, Homo sapiens
  misc_feature (61)..(62): /note="This region represents a CpG dinucleotide"
  misc_feature (61)..(61): /note="Nucleotide may be methylated to form 5-methylcytosine"
tcctaccttatgtggatgggttccatcttattttcaatgtcctcctgttgcagaagcttccggttagtcctgggactaaagggcaattgacctcactcctcctgggtctgactgactaatct

SEQ ID NO: 22128 - DNA, 122 bp, Homo sapiens
  misc_feature (61)..(62): /note="This region represents a CpG dinucleotide"
  misc_feature (61)..(61): /note="Nucleotide may be methylated to form 5-methylcytosine"
tcttctattggcaaagccagtgcttcaagcctgtatcctctgccctgttaaatttggtcccgcgttctcctggaacaacccatgctgagtcagatgaacaacccatgctgagtcagatacac

SEQ ID NO: 22129 - DNA, 122 bp, Homo sapiens
  misc_feature (61)..(62): /note="This region represents a CpG dinucleotide"
  misc_feature (61)..(61): /note="Nucleotide may be methylated to form 5-methylcytosine"
atgtacaaatgaaatagctaattcctactatttcagaagagggtattttctttctggtaacgcttgtaagttggcatgctcactgtaggtgaggtaaggagcaatgtcaaatgatgtcattc

SEQ ID NO: 22130 - DNA, 122 bp, Homo sapiens
  misc_feature (61)..(62): /note="This region represents a CpG dinucleotide"
  misc_feature (61)..(61): /note="Nucleotide may be methylated to form 5-methylcytosine"
gctatggtctgtagttcccatagaccacaataccctaccctctcagtcctcagttccgggcgattctagaaagatggacacataggccccagtccctcaggtcaccccaggccaaccttggc

SEQ ID NO: 22131 - DNA, 122 bp, Homo sapiens
  misc_feature (61)..(62): /note="This region represents a CpG dinucleotide"
  misc_feature (61)..(61): /note="Nucleotide may be methylated to form 5-methylcytosine"
accttctgctgatcactccattcaagctgctcaaatagtccttccaaggtcacaggccagcgacagcagggatgactaacaaaaacctgaaatgcatagtatgcaagaaggagtgttgtaag

SEQ ID NO: 22132 - DNA, 122 bp, Homo sapiens
  misc_feature (61)..(62): /note="This region represents a CpG dinucleotide"
  misc_feature (61)..(61): /note="Nucleotide may be methylated to form 5-methylcytosine"
caagattcacagatggtggctgagtggtcgagtcagaattcaagctgaaactcttcctcacgctcagctgcctctagaagttgatggttaacaagcaaaagaaaaggcactgaagcagatac

SEQ ID NO: 22133 - DNA, 122 bp, Homo sapiens
  misc_feature (61)..(62): /note="This region represents a CpG dinucleotide"
  misc_feature (61)..(61): /note="Nucleotide may be methylated to form 5-methylcytosine"
cttacatgtcttgattggtgtcttatgtctccctaaattgtataaacccaagctgtagcccgaccatcataggtacatgttcttaggacctcttgagactgtaccttgggccattggtcact

SEQ ID NO: 22134 - DNA, 122 bp, Homo sapiens
  misc_feature (61)..(62): /note="This region represents a CpG dinucleotide"
  misc_feature (61)..(61): /note="Nucleotide may be methylated to form 5-methylcytosine"
tcatataggcattgcagcttctgccccactctctggaaccacttcctttaggggaagccacgggtctggcaccctgtgcagaggaactgagtcctcccaccaacagctagcaccgactccca

SEQ ID NO: 22135 - DNA, 122 bp, Homo sapiens
  misc_feature (61)..(62): /note="This region represents a CpG dinucleotide"
  misc_feature (61)..(61): /note="Nucleotide may be methylated to form 5-methylcytosine"
aacttccttgggttgttatgaggattaaatgagttaacattagtaatgctcttggaacagcgtctgacacatcataagcacaaaagtgtttgttagataaaaagtgattttttttcctgcct

SEQ ID NO: 22136 - DNA, 122 bp, Homo sapiens
  misc_feature (61)..(62): /note="This region represents a CpG dinucleotide"
  misc_feature (61)..(61): /note="Nucleotide may be methylated to form 5-methylcytosine"
cgatggtctcaggtggtggctggtaataatcatgttgataataatcattgtcccctagtccggaaacagggagaggaggagacagctctggggctgcaagtgacctcgggaaggcaattgac

SEQ ID NO: 22137 - DNA, 122 bp, Homo sapiens
  misc_feature (61)..(62): /note="This region represents a CpG dinucleotide"
  misc_feature (61)..(61): /note="Nucleotide may be methylated to form 5-methylcytosine"
agccccagtgtcctcactgaaaaacaggaaaggtgataacagtgctttctctgttgtcatcggaggattaaataaattactatatatgtaaggtgcctaggcaagtgtcagtcgtgtactac

SEQ ID NO: 22138 - DNA, 122 bp, Homo sapiens
  misc_feature (61)..(62): /note="This region represents a CpG dinucleotide"
  misc_feature (61)..(61): /note="Nucleotide may be methylated to form 5-methylcytosine"
atgaaacttggatgttaccagcctgagctgtcaggcctcagtgtactcatttgtaaaaggcggataataatgacacctgcttcacgaggttgttatgcaaagcacttagactaatttctaac

SEQ ID NO: 22139 - DNA, 122 bp, Homo sapiens
  misc_feature (61)..(62): /note="This region represents a CpG dinucleotide"
  misc_feature (61)..(61): /note="Nucleotide may be methylated to form 5-methylcytosine"
cttgggaggccttaggaaacttacaatcatggcagaaggcaagggaaagcaaggcaggcacgtcttacatggtggaaggggagagtgagagtgaggaagtgccacttcctcactctctttaa

SEQ ID NO: 22140 - DNA, 122 bp, Homo sapiens
  misc_feature (61)..(62): /note="This region represents a CpG dinucleotide"
  misc_feature (61)..(61): /note="Nucleotide may be methylated to form 5-methylcytosine"
caccctcaccccgtgggctccgggacccctcgactagctccatcacccattccgactacccgccctacgctccacctcttgacccgtcatcaccgaccggggggcgggactgcccgactttt

SEQ ID NO: 22141 - DNA, 122 bp, Homo sapiens
  misc_feature (61)..(62): /note="This region represents a CpG dinucleotide"
  misc_feature (61)..(61): /note="Nucleotide may be methylated to form 5-methylcytosine"
tctatggagttctcctaagccatgtgatcacttcagcacattttcttttcttctccttaccgtctaaattttgttgaaataatgagaaacatttgttcattttttttacattatgctccttc

SEQ ID NO: 22142 - DNA, 122 bp, Homo sapiens
  misc_feature (61)..(62): /note="This region represents a CpG dinucleotide"
  misc_feature (61)..(61): /note="Nucleotide may be methylated to form 5-methylcytosine"
tccagagactgcatgtccaggcagacagcgctgacattttctctcctgcgtggggaccagcgctgagccatacaggctccctcagggtggggtctcttgcgcgcccctcgccttcccacggc

SEQ ID NO: 22143 - DNA, 122 bp, Homo sapiens
  misc_feature (61)..(62): /note="This region represents a CpG dinucleotide"
  misc_feature (61)..(61): /note="Nucleotide may be methylated to form 5-methylcytosine"
ggaagggctgggatgatgcttttgggttctgggagaggcaagaactggtctagtcacccccgctgccttcaggtctgccttgtacctgacatcgctgcaggaacactgctggaggctggggc

SEQ ID NO: 22144 - DNA, 122 bp, Homo sapiens
  misc_feature (61)..(62): /note="This region represents a CpG dinucleotide"
  misc_feature (61)..(61): /note="Nucleotide may be methylated to form 5-methylcytosine"
ttcagatgttaaacactttctcatgcacaaaccacttaagcagcatagacacagagtccacgtcagggaatgttacattcagtataggcacctattatttggtaactcagaagtaggaaaat

SEQ ID NO: 22145 - DNA, 122 bp, Homo sapiens
  misc_feature (61)..(62): /note="This region represents a CpG dinucleotide"
  misc_feature (61)..(61): /note="Nucleotide may be methylated to form 5-methylcytosine"
gaagaatgtgagagatgcaaaattatcaggcccagacagcagtgagcatgatacttcagtcgcatcccccacacccatgccccagggtaattgtttaaaaatttttttttttcattccttcc

SEQ ID NO: 22146 - DNA, 122 bp, Homo sapiens
  misc_feature (61)..(62): /note="This region represents a CpG dinucleotide"
  misc_feature (61)..(61): /note="Nucleotide may be methylated to form 5-methylcytosine"
tccacaaacgtaatttggttttatcaaaaacttcctgcattcttcttgcttctctcactccgttgcaggctgcagtgaaagcagacttccttgatgagtcggggaagtggatgatatccccg

SEQ ID NO: 22147 - DNA, 122 bp, Homo sapiens
  misc_feature (61)..(62): /note="This region represents a CpG dinucleotide"
  misc_feature (61)..(61): /note="Nucleotide may be methylated to form 5-methylcytosine"
tgtctgtggtgaggtgctgtgccaacactgcagctcagttacctgtaaacacagaccccacggctacccaagtaaggtgacagtgacgaaaagcacttacaactgaatcattctcattgctg

SEQ ID NO: 22148 - DNA, 122 bp, Homo sapiens
  misc_feature (61)..(62): /note="This region represents a CpG dinucleotide"
  misc_feature (61)..(61): /note="Nucleotide may be methylated to form 5-methylcytosine"
taatatgggacatagtcaaatttacataacttataagctcttggtgtatttcagtcatttcgtttcagtacacacagatataatagtagtacttatttcttcacaggttttacaactgccta

SEQ ID NO: 22149 - DNA, 122 bp, Homo sapiens
  misc_feature (61)..(62): /note="This region represents a CpG dinucleotide"
  misc_feature (61)..(61): /note="Nucleotide may be methylated to form 5-methylcytosine"
tgggctacagcatgtaccacctgacatagagggtcccaggtcgcccacctgtgggccagccgattcctccagccctggtgctgtacccccgacgtgctcccctgctcggcaccgccagccgc

SEQ ID NO: 22150 - DNA, 122 bp, Homo sapiens
  misc_feature (61)..(62): /note="This region represents a CpG dinucleotide"
  misc_feature (61)..(61): /note="Nucleotide may be methylated to form 5-methylcytosine"
tggagttccttcaagctacatacccctaaaattctaattatgtgaactctgatggttcctcggaagaccccactctcaagtttgttgttatttgttctgactcagaatttacctaatgcaaa

SEQ ID NO: 22151 - DNA, 122 bp, Homo sapiens
  misc_feature (61)..(62): /note="This region represents a CpG dinucleotide"
  misc_feature (61)..(61): /note="Nucleotide may be methylated to form 5-methylcytosine"
caggggaaacactgtgatgggtattatgcaatatgcctttccctctctctctgctttttccgcactgctgtagcacttgaccttctgtggtagtggtttctgtgtgggcccctcagtaacag

SEQ ID NO: 22152 - DNA, 122 bp, Homo sapiens
  misc_feature (61)..(62): /note="This region represents a CpG dinucleotide"
  misc_feature (61)..(61): /note="Nucleotide may be methylated to form 5-methylcytosine"
aaattagagaaaagagtcttggtgaggacgtcggtgctgagacgaaatcgcgccagtgaacgtgtttcatgaggaaagcagcttctgccgacatctatgcagcgattttcctgctgacccta

SEQ ID NO: 22153 - DNA, 122 bp, Homo sapiens
  misc_feature (61)..(62): /note="This region represents a CpG dinucleotide"
  misc_feature (61)..(61): /note="Nucleotide may be methylated to form 5-methylcytosine"
cacctgttatttgcatggtgctctgtgttccctggtttacaaagcattttcagatatcatcgcaactgatccttaccacacctgtgaagggggaactcacgtccccattttatagacgagga

SEQ ID NO: 22154 - DNA, 122 bp, Homo sapiens
  misc_feature (61)..(62): /note="This region represents a CpG dinucleotide"
  misc_feature (61)..(61): /note="Nucleotide may be methylated to form 5-methylcytosine"
gcctagtcagcaagaggacgcatttcccaaaagtccacatctgtgtgggggttgggtgcacgaagcatagcactgagtgattatcaggggagacacagtagttcaaattgcagttcaacttc

SEQ ID NO: 22155 - DNA, 122 bp, Homo sapiens
  misc_feature (61)..(62): /note="This region represents a CpG dinucleotide"
  misc_feature (61)..(61): /note="Nucleotide may be methylated to form 5-methylcytosine"
gagcagaggcagtggccggcttcatgttcatgtgcttgtggaggccccagccctcggcctcggcttttatgctagggaggtcctcccaccctgctcctcagtgactcacggcttctccctct

SEQ ID NO: 22156 - DNA, 122 bp, Homo sapiens
  misc_feature (61)..(62): /note="This region represents a CpG dinucleotide"
  misc_feature (61)..(61): /note="Nucleotide may be methylated to form 5-methylcytosine"
caggagcagagttgttcaaaatatttgtaatgctcagacctcaaataatcttttggttcacgagaatagttttggatcttatcatgcaagtcagcagttttcaacatgtgtttctctgtagc

SEQ ID NO: 22157 - DNA, 122 bp, Homo sapiens
  misc_feature (61)..(62): /note="This region represents a CpG dinucleotide"
  misc_feature (61)..(61): /note="Nucleotide may be methylated to form 5-methylcytosine"
atgactgagcacatgatgtgtacaagtatgtgtatgagtctgggggaccccggtgagggacgaattaattgtacttggagatccttgaaggatggagttccaggtgacacaaattttgcttc

SEQ ID NO: 22158 - DNA, 122 bp, Homo sapiens
  misc_feature (61)..(62): /note="This region represents a CpG dinucleotide"
  misc_feature (61)..(61): /note="Nucleotide may be methylated to form 5-methylcytosine"
taagcactaagcaaatcatgtagagacttccgtggccacatacaaaaaaaatacactgtacggaactggttctgaaaagacactaaacaaacaacaaaacccagcaataacatccctgaagg

SEQ ID NO: 22159 - DNA, 122 bp, Homo sapiens
  misc_feature (61)..(62): /note="This region represents a CpG dinucleotide"
  misc_feature (61)..(61): /note="Nucleotide may be methylated to form 5-methylcytosine"
ctctttttgtaagcagaggtggctggctctgcagccttaaggccattttttaagtcaccacgtctagaagtcacatgaactctgctcagcaataatctgttctcagaacagacttttcaacc

SEQ ID NO: 22160 - DNA, 122 bp, Homo sapiens
  misc_feature (61)..(62): /note="This region represents a CpG dinucleotide"
  misc_feature (61)..(61): /note="Nucleotide may be methylated to form 5-methylcytosine"
ttcagtcatttacccaaaatatttcttggatttttaaaaagttctccacaaagcatgtatcgtgtgctttatattcaaatatgaacaaataggatgaaaagtatttcattttagtatttgat

SEQ ID NO: 22161 - DNA, 122 bp, Homo sapiens
  misc_feature (61)..(62): /note="This region represents a CpG dinucleotide"
  misc_feature (61)..(61): /note="Nucleotide may be methylated to form 5-methylcytosine"
cctttaggtttccagactggcttgctctttggctgaccttcaattccctctccaggactccgcaccactcccctacacccagagcattctcttcccctcatctcttggggctgttcctggtt

SEQ ID NO: 22162 - DNA, 122 bp, Homo sapiens
  misc_feature (61)..(62): /note="This region represents a CpG dinucleotide"
  misc_feature (61)..(61): /note="Nucleotide may be methylated to form 5-methylcytosine"
cactgcacttggctgtgattcatcagcatgaacccttcctggattttcttctaggcttctcggccggcactgagtacatggacctgcagaatgacctaggccaggtgagccacgagggatgg

SEQ ID NO: 22163 - DNA, 122 bp, Homo sapiens
  misc_feature (61)..(62): /note="This region represents a CpG dinucleotide"
  misc_feature (61)..(61): /note="Nucleotide may be methylated to form 5-methylcytosine"
aagtgttcccagaggaaggtcatacacccattaaactctgctgttttgcctcttagtgaacgtgccttagtccacttgcccaactccaaagatcttaccaggaagctgctgattaccagttt

SEQ ID NO: 22164 - DNA, 122 bp, Homo sapiens
  misc_feature (61)..(62): /note="This region represents a CpG dinucleotide"
  misc_feature (61)..(61): /note="Nucleotide may be methylated to form 5-methylcytosine"
gacgtggcctctctgtttgtgtttcttcctgctgtttcccctaagcccatcagacgtatgcgtgtgtctgaactccagcaataaacaggcattaggatcttttccctgagagccgcgggcac

SEQ ID NO: 22165 - DNA, 122 bp, Homo sapiens
  misc_feature (61)..(62): /note="This region represents a CpG dinucleotide"
  misc_feature (61)..(61): /note="Nucleotide may be methylated to form 5-methylcytosine"
tataagaggttgctgacctaatgccagctgactcagtgactgaatctgtgatgttctcaacgtcaccatggggccagggctctgacccactaacacagacctgattctgatctgggaactcc

SEQ ID NO: 22166 - DNA, 122 bp, Homo sapiens
  misc_feature (61)..(62): /note="This region represents a CpG dinucleotide"
  misc_feature (61)..(61): /note="Nucleotide may be methylated to form 5-methylcytosine"
cattattctgccaagtgaaaaatgtagcattaaggaggaggaggggtaaaaatctcatcacgtggagtcttgttctaatgacctgggaaaatctgttctaatgacctgggaaaatcggcatg

SEQ ID NO: 22167 - DNA, 122 bp, Homo sapiens
  misc_feature (61)..(62): /note="This region represents a CpG dinucleotide"
  misc_feature (61)..(61): /note="Nucleotide may be methylated to form 5-methylcytosine"
gggcactgggaggcataaagtgctctgggcatcctccctgggctgggtgtgagtctggggcggggctgtggctggtccagtttccaggcctgtttggcatcttgggcattaatttaaatggc

SEQ ID NO: 22168 - DNA, 122 bp, Homo sapiens
  misc_feature (61)..(62): /note="This region represents a CpG dinucleotide"
  misc_feature (61)..(61): /note="Nucleotide may be methylated to form 5-methylcytosine"
acaccagacacacacacacacacacacaaacacacacacatacactccgcggtgtctgtccgtctgggatttgtgtctcaactgtttctgcccagtgtgtaaatatttgtgggggcctggtg

SEQ ID NO: 22169 - DNA, 122 bp, Homo sapiens
  misc_feature (61)..(62): /note="This region represents a CpG dinucleotide"
  misc_feature (61)..(61): /note="Nucleotide may be methylated to form 5-methylcytosine"
aaatgaggcacagagtggttgacttgccagtcatcactcactggtaatccatgttagacacgaatcctatcagtctgatcctatagcctagtgaaggttgaatgtcattaactaagtggtaa

SEQ ID NO: 22170 - DNA, 122 bp, Homo sapiens
  misc_feature (61)..(62): /note="This region represents a CpG dinucleotide"
  misc_feature (61)..(61): /note="Nucleotide may be methylated to form 5-methylcytosine"
atcaatttgtgagtcacaaagggcttttcttacctagtgaaaatgtgctttggcataatgcgtcaaagcatggcactattgagtcatgtcagagtttacaaaagcaaaagatccataggttt

SEQ ID NO: 22171 - DNA, 122 bp, Homo sapiens
  misc_feature (61)..(62): /note="This region represents a CpG dinucleotide"
  misc_feature (61)..(61): /note="Nucleotide may be methylated to form 5-methylcytosine"
ccaagcctggtccagcctatagtttccccagagctctttgtggcctcctcagtggccacccggctcagacgtggtgttgactgccccacaagcttgacattgtggtctttacccacccactc

SEQ ID NO: 22172 - DNA, 122 bp, Homo sapiens
  misc_feature (61)..(62): /note="This region represents a CpG dinucleotide"
  misc_feature (61)..(61): /note="Nucleotide may be methylated to form 5-methylcytosine"
cagtttttgtttcattgtgtttttgccttccatgaagactgaatctgccatatcaggaaccgtaaagtatacatttcttgacttgactactatgatgtctgtatgaagatatgcatgcattt

SEQ ID NO: 22173 - DNA, 122 bp, Homo sapiens
  misc_feature (61)..(62): /note="This region represents a CpG dinucleotide"
  misc_feature (61)..(61): /note="Nucleotide may be methylated to form 5-methylcytosine"
ggttatgaaaaagtttactactcacatgaggccttctagggaaagcaaagcgggcacccacgccagtctgttgggcttcagtgaaaggacgaacaagtggctctggtttttgttgtggttat

SEQ ID NO: 22174 - DNA, 122 bp, Homo sapiens
  misc_feature (61)..(62): /note="This region represents a CpG dinucleotide"
  misc_feature (61)..(61): /note="Nucleotide may be methylated to form 5-methylcytosine"
gaatcagtaactccaatgagcccctattatgtgccaggccttgtacaattctcaggtaatcgtcactggccccagggtaaggcagggcagaatatcctccctatgtcaccagaccagggtca

SEQ ID NO: 22175 - DNA, 122 bp, Homo sapiens
  misc_feature (61)..(62): /note="This region represents a CpG dinucleotide"
  misc_feature (61)..(61): /note="Nucleotide may be methylated to form 5-methylcytosine"
tgagctattgtgaagctgaattagcacacccaaatgggatttaaacccatgatctgccctcgtgagtgggaaccggtggagtgaccgtgtccgacgctctcaaggctaggtcaggcttttct

SEQ ID NO: 22176 - DNA, 122 bp, Homo sapiens
  misc_feature (61)..(62): /note="This region represents a CpG dinucleotide"
  misc_feature (61)..(61): /note="Nucleotide may be methylated to form 5-methylcytosine"
ctggcccagatactttttcttgagtaggaatttcgagtcaccctgaacattgcatgccttcgtagtggggaagacaataggaaaccacaggctgtaggctaaaatgggttgtgtttcttgta

SEQ ID NO: 22177 - DNA, 122 bp, Homo sapiens
  misc_feature (61)..(62): /note="This region represents a CpG dinucleotide"
  misc_feature (61)..(61): /note="Nucleotide may be methylated to form 5-methylcytosine"
cttttttcatcatcattcttggttggtttttaaaaaatcactcgtttatcttcctctttccgtccatattgccaatggatttactcaaactctttgttgctttccttctagattatcatggc

SEQ ID NO: 22178 - DNA, 122 bp, Homo sapiens
  misc_feature (61)..(62): /note="This region represents a CpG dinucleotide"
  misc_feature (61)..(61): /note="Nucleotide may be methylated to form 5-methylcytosine"
gctgggactacaggtgtgtgccatgacacccggctaagtttttgtacttttttgtagagacggggttttaccatgttgcccaggctgggctcaaactcctgagctcaagcaatccgcctacc

SEQ ID NO: 22179 - DNA, 122 bp, Homo sapiens
  misc_feature (61)..(62): /note="This region represents a CpG dinucleotide"
  misc_feature (61)..(61): /note="Nucleotide may be methylated to form 5-methylcytosine"
aggtcagggtcagggtcagacgtggagccccgtggagtgcggagtggtgaccccttcgttcgggggcggagggatgactgagcatttataacttttgtgtatctccccgtgggtgcagccct

SEQ ID NO: 22180 - DNA, 122 bp, Homo sapiens
  misc_feature (61)..(62): /note="This region represents a CpG dinucleotide"
  misc_feature (61)..(61): /note="Nucleotide may be methylated to form 5-methylcytosine"
agccaatgaaacagagcaaacataatgcatggaatttattgctggtggtcatttttatcacgctctcactcagcactgagttctctgaattaattggcttgcatcagaaactccaagctagg

SEQ ID NO: 22181 - DNA, 122 bp, Homo sapiens
  misc_feature (61)..(62): /note="This region represents a CpG dinucleotide"
  misc_feature (61)..(61): /note="Nucleotide may be methylated to form 5-methylcytosine"
gctcaaacagttcaggatccaggacagttccaggcatcatgggagagggatgctgtgatgcgtgctctcagttcttttatgtgtttggggagcctgactggaatggatagtaggtggccaca

SEQ ID NO: 22182 - DNA, 122 bp, Homo sapiens
  misc_feature (61)..(62): /note="This region represents a CpG dinucleotide"
  misc_feature (61)..(61): /note="Nucleotide may be methylated to form 5-methylcytosine"
ctgcctgtcctgaggatgagggtcatcaactgagtcggggccacagggcagccatgggtgcgcgagtgcagggccgggcctgtctcctccgggcggcgtggcaggtggctgggccaagatgg

SEQ ID NO: 22183 - DNA, 122 bp, Homo sapiens
  misc_feature (61)..(62): /note="This region represents a CpG dinucleotide"
  misc_feature (61)..(61): /note="Nucleotide may be methylated to form 5-methylcytosine"
gattacaggcgtgagccaccgcgcctggccaactacacaattgttgagagcctacccactcgaggctgatcaacagccaaggctaggacagttctgctgggacaaccagtcccacgtcttcc

SEQ ID NO: 22184 - DNA, 122 bp, Homo sapiens
  misc_feature (61)..(62): /note="This region represents a CpG dinucleotide"
  misc_feature (61)..(61): /note="Nucleotide may be methylated to form 5-methylcytosine"
tcgtacctgctacaggtgttcagggctcagacagtgcaagtcacaagcttatagcagcaccgtgtctgtcatgtggtgagaacccactacatggtggctatttctggtgtcatcttctgcag

SEQ ID NO: 22185 - DNA, 122 bp, Homo sapiens
  misc_feature (61)..(62): /note="This region represents a CpG dinucleotide"
  misc_feature (61)..(61): /note="Nucleotide may be methylated to form 5-methylcytosine"
ctcagcaacatctcaaatgtgaagagttattatacttttgtctttcttctatttgtcatccgtatcatcactgttattgtatttctctagaatattggctttttaaaaaatgaaatcataaa

SEQ ID NO: 22186 - DNA, 122 bp, Homo sapiens
  misc_feature (61)..(62): /note="This region represents a CpG dinucleotide"
  misc_feature (61)..(61): /note="Nucleotide may be methylated to form 5-methylcytosine"
gtcacggaatccttaacctagaagtaaccttaaatgtaatctcacagaacttcctcatgacggatatggaaactgatgttaccaaatgtcaaatgacttcggaagggtcagaaagttagcta

SEQ ID NO: 22187 - DNA, 122 bp, Homo sapiens
  misc_feature (61)..(62): /note="This region represents a CpG dinucleotide"
  misc_feature (61)..(61): /note="Nucleotide may be methylated to form 5-methylcytosine"
ctggggaggactgcctctcctttctctcctggagacgtgtcagccttcttgctggacagccgggattgcttgatgcttcactcctcagcccacagtggatcacgagcagcagaccacctgaa

SEQ ID NO: 22188 - DNA, 122 bp, Homo sapiens
  misc_feature (61)..(62): /note="This region represents a CpG dinucleotide"
  misc_feature (61)..(61): /note="Nucleotide may be methylated to form 5-methylcytosine"
tgctaaaatataagatccatgggggctggtcttatctaaaattgtaacctcctttccccccgtgcctagtacatagtaggtgctcaataaatatttgttgaatagatgagtgaattgattga

SEQ ID NO: 22189 - DNA, 122 bp, Homo sapiens
  misc_feature (61)..(62): /note="This region represents a CpG dinucleotide"
  misc_feature (61)..(61): /note="Nucleotide may be methylated to form 5-methylcytosine"
aacataactccaaaggctggatgtaatcagaccaacagcattcagcgtcaatcaaaatgacggccaagaaacaggtgatttaataggtagccggtttttgaaactttctgacagtaaagcca

SEQ ID NO: 22190 - DNA, 122 bp, Homo sapiens
  misc_feature (61)..(62): /note="This region represents a CpG dinucleotide"
  misc_feature (61)..(61): /note="Nucleotide may be methylated to form 5-methylcytosine"
taacttatgatgttaacacgtgtgttaaactaaaattgaaaaattaaatatcaaagtaaacggatatgtggcagataatattttttaaatagccacagcaatatttctagttccacctggtc

SEQ ID NO: 22191 - DNA, 122 bp, Homo sapiens
  misc_feature (61)..(62): /note="This region represents a CpG dinucleotide"
  misc_feature (61)..(61): /note="Nucleotide may be methylated to form 5-methylcytosine"
atccttttctcaaggtggtgagtagaaatctaatgtgtgccttccttgtaatcatccttgcgtatgacaaaggtgtcttaagactttagtgtagcagttactaggaacagaacaggaaatgc

SEQ ID NO: 22192 - DNA, 122 bp, Homo sapiens
  misc_feature (61)..(62): /note="This region represents a CpG dinucleotide"
  misc_feature (61)..(61): /note="Nucleotide may be methylated to form 5-methylcytosine"
tgtaaaaacttcaaaagatgtggagtatagaatataagcaggaaagtatcagagaacatgcggtattcagattctgaaggagtttaaggtccaattaagcaatttaggggaaacagatgcac

SEQ ID NO: 22193 - DNA, 122 bp, Homo sapiens
  misc_feature (61)..(62): /note="This region represents a CpG dinucleotide"
  misc_feature (61)..(61): /note="Nucleotide may be methylated to form 5-methylcytosine"
acccaccctgggttcctcgtagtgaacacgtcattcgaacttggtatcttgttactctcacgtctcacttgagcttcacttggcgatgataagaaggcctggtttttaggcttgcagtggcc

SEQ ID NO: 22194 - DNA, 122 bp, Homo sapiens
  misc_feature (61)..(62): /note="This region represents a CpG dinucleotide"
  misc_feature (61)..(61): /note="Nucleotide may be methylated to form 5-methylcytosine"
gcaatagcttttcataggtttctccacaaactccccttcatatctctagctggaaggacacggcttctctaattgactgcttggtgactcaatctctgattcaatccctcatctggaactgt

SEQ ID NO: 22195 - DNA, 122 bp, Homo sapiens
  misc_feature (61)..(62): /note="This region represents a CpG dinucleotide"
  misc_feature (61)..(61): /note="Nucleotide may be methylated to form 5-methylcytosine"
ggcaaagtgttcatggtaacttggagctccccaatacatggccatgtcttctaaagacaacgtaatgagcccaagtgaactgaaggtcatactggcaggtgctgatgacagtttgtccttga

SEQ ID NO: 22196 - DNA, 122 bp, Homo sapiens
  misc_feature (61)..(62): /note="This region represents a CpG dinucleotide"
  misc_feature (61)..(61): /note="Nucleotide may be methylated to form 5-methylcytosine"
ggttagtattctatatcaactgactcttagtctatcttgagagtggcaaaatgggaatggcgaagaaagggagagaattcctaggtttgtcctgtctccagacaggaagttggattagtgct

SEQ ID NO: 22197 - DNA, 122 bp, Homo sapiens
  misc_feature (61)..(62): /note="This region represents a CpG dinucleotide"
  misc_feature (61)..(61): /note="Nucleotide may be methylated to form 5-methylcytosine"
atataaattactttttactttggcacagcacttacgcttctgctaacactgaaatgggttcgcattcctgaccacaaaaggacagagatgaaattctacattcacacagcccgccaagttag

SEQ ID NO: 22198 - DNA, 122 bp, Homo sapiens
  misc_feature (61)..(62): /note="This region represents a CpG dinucleotide"
  misc_feature (61)..(61): /note="Nucleotide may be methylated to form 5-methylcytosine"
acaggttgctgagcacttcccatattgaatctgtgcatactctggtttcttacaaggtcacgtgaaggataagattcagagcattccagggagattacgctccaactgcagaaacctgaaaa

SEQ ID NO: 22199 - DNA, 122 bp, Homo sapiens
  misc_feature (61)..(62): /note="This region represents a CpG dinucleotide"
  misc_feature (61)..(61): /note="Nucleotide may be methylated to form 5-methylcytosine"
aggcatgtcactgcctcttgttgggcctcagctttctcacctgtcaaacagagataaagacgcctacttgacctcactagggaagagaggcaagatagtgtcttgagcaaggagttgggttc

SEQ ID NO: 22200 - DNA, 122 bp, Homo sapiens
  misc_feature (61)..(62): /note="This region represents a CpG dinucleotide"
  misc_feature (61)..(61): /note="Nucleotide may be methylated to form 5-methylcytosine"
atgaagtaggtgcagttattaacacctccctttttcaggtggagaaactgaggcacagggcggataagcaatttcttagggtcatatggcaaatcaacatcaaagccaggactccaccccaa

SEQ ID NO: 22201 - DNA, 122 bp, Homo sapiens
  misc_feature (61)..(62): /note="This region represents a CpG dinucleotide"
  misc_feature (61)..(61): /note="Nucleotide may be methylated to form 5-methylcytosine"
tgcaaagccctttaatgtttttcccaatacttcctgtgacctgcacatgcctgtaagagccgcaaaaagccttacagagacaactgggggattgaggttcttgccacacttccaattaaagc

SEQ ID NO: 22202 - DNA, 122 bp, Homo sapiens
  misc_feature (61)..(62): /note="This region represents a CpG dinucleotide"
  misc_feature (61)..(61): /note="Nucleotide may be methylated to form 5-methylcytosine"
tgctcaactcctataagcatcttgaaagaagtagagcgatttagacgataatgcatttgacgtctaaacccaagcagtaacagtgtttgtgaaggaaaacctccaggaagagcttgctaaaa

SEQ ID NO: 22203 - DNA, 122 bp, Homo sapiens
  misc_feature (61)..(62): /note="This region represents a CpG dinucleotide"
  misc_feature (61)..(61): /note="Nucleotide may be methylated to form 5-methylcytosine"
tgaaggcagtgcggcgagtttgtcttagccttctctccaagtccagcaagtttattgctacgcttgttccggccttctgcttcaaaggaaacagaaccaaaacaagcacctcttcgctccgc

SEQ ID NO: 22204 - DNA, 122 bp, Homo sapiens
  misc_feature (61)..(62): /note="This region represents a CpG dinucleotide"
  misc_feature (61)..(61): /note="Nucleotide may be methylated to form 5-methylcytosine"
gcgaggactgagatcacccgttaccccgccctggtctacaagtgtttgctgatatagaaacggaataacggcgctgtgggctggggaggacggagttgccttcaggcttctggtctccagcc

SEQ ID NO: 22205 - DNA, 122 bp, Homo sapiens
  misc_feature (61)..(62): /note="This region represents a CpG dinucleotide"
  misc_feature (61)..(61): /note="Nucleotide may be methylated to form 5-methylcytosine"
tgctggcactctcatctctattgtacaggtaagaaatggaaactcagagagggcaagtaacgtgcccaaggtcacacagctattaattggcacagctgggatttgcacgcagtccagttcca

SEQ ID NO: 22206 - DNA, 122 bp, Homo sapiens
  misc_feature (61)..(62): /note="This region represents a CpG dinucleotide"
  misc_feature (61)..(61): /note="Nucleotide may be methylated to form 5-methylcytosine"
ctcctgtcggggtcaggcgggctttctgtttgtccagttagaggacctgtctctccaggacgcaggtccagtggtggcaaccagtgctgctacccagtatcggcagggctttgtggggtgag

SEQ ID NO: 22207 - DNA, 122 bp, Homo sapiens
  misc_feature (61)..(62): /note="This region represents a CpG dinucleotide"
  misc_feature (61)..(61): /note="Nucleotide may be methylated to form 5-methylcytosine"
ggggccacctgatgagtgctcgggatgaggtcagactcgggcatcccagggtggggtcctcgcctggggccacctgatgagtgcttggcgtgaggtccagattggaggaccctggccaaggc

SEQ ID NO: 22208 - DNA, 122 bp, Homo sapiens
  misc_feature (61)..(62): /note="This region represents a CpG dinucleotide"
  misc_feature (61)..(61): /note="Nucleotide may be methylated to form 5-methylcytosine"
gacacctttgatgtcagtaaatcctactcactttatcttccaaatagatgtgaagcgggccgctgcatctgcaccactgatccaagacatcatcatctctctcttgggtgacagagtggatt

SEQ ID NO: 22209 - DNA, 122 bp, Homo sapiens
  misc_feature (61)..(62): /note="This region represents a CpG dinucleotide"
  misc_feature (61)..(61): /note="Nucleotide may be methylated to form 5-methylcytosine"
ctgttgaggaactactcctgtcctagaatctggcaatctggttttaacagcaggggcccacggatggcatgtgaacaaccctggattgagtgatgatgaatgattcagaggtggacaggagc

SEQ ID NO: 22210 - DNA, 122 bp, Homo sapiens
  misc_feature (61)..(62): /note="This region represents a CpG dinucleotide"
  misc_feature (61)..(61): /note="Nucleotide may be methylated to form 5-methylcytosine"
ccactcccagcccaggggactcagtaaacaagcagaaaattcttgtccctgggagctgtgcggggatcgtgcgtttggtgaggaattttcctctgtgcaagctggaggggaaacacagagat

SEQ ID NO: 22211 - DNA, 122 bp, Homo sapiens
  misc_feature (61)..(62): /note="This region represents a CpG dinucleotide"
  misc_feature (61)..(61): /note="Nucleotide may be methylated to form 5-methylcytosine"
gaggggtgacagactcattgcagatatcaggtgatcactgcagatatcatgtgatcgctgcggccttggagccagaggcgtccctgtttctgcttccccaagaggacattctcctcccatgg

SEQ ID NO: 22212 - DNA, 122 bp, Homo sapiens
  misc_feature (61)..(62): /note="This region represents a CpG dinucleotide"
  misc_feature (61)..(61): /note="Nucleotide may be methylated to form 5-methylcytosine"
agacatgacttgcttaaacatgggactgtattgtaacaggctttagcccagcctttgtcacgcagacaaggctttgtcctcactggacaaaaacataggaaatgcgatgactactcaatgac

SEQ ID NO: 22213 - DNA, 122 bp, Homo sapiens
  misc_feature (61)..(62): /note="This region represents a CpG dinucleotide"
  misc_feature (61)..(61): /note="Nucleotide may be methylated to form 5-methylcytosine"
atttagaatacaaatctgctctattgaacgaatgtaacaagcaaggaggcttaagactggcgcaggcaagagcactcatcaagatagatgtgaacaaaacccggaaaatctatgatttcctc

SEQ ID NO: 22214 - DNA, 122 bp, Homo sapiens
  misc_feature (61)..(62): /note="This region represents a CpG dinucleotide"
  misc_feature (61)..(61): /note="Nucleotide may be methylated to form 5-methylcytosine"
gcagtttctttccttcagaaatggaaaacaggagctggctcaagatcatgttcttcgagacggaagaccgctggacagactttgatactcagatgctgtgaatagctctatggacaacatca

SEQ ID NO: 22215 - DNA, 122 bp, Homo sapiens
  misc_feature (61)..(62): /note="This region represents a CpG dinucleotide"
  misc_feature (61)..(61): /note="Nucleotide may be methylated to form 5-methylcytosine"
tcaccctgcggagtatcaacgagcacatgcacacgacgccgtggaatactcgccctgcagcgtatcaatcagcacatgcacacgaccccctggagtactcgccctgcagcgtatcaatgagc

SEQ ID NO: 22216 - DNA, 122 bp, Homo sapiens
  misc_feature (61)..(62): /note="This region represents a CpG dinucleotide"
  misc_feature (61)..(61): /note="Nucleotide may be methylated to form 5-methylcytosine"
agaagttagagggaaaataagaactatacaaaagtaggaggaagaaaataaatagaagcgcgtaagtcaatgaaacaggaaataaagtagagggatttctgactggttaggttatttgggct

SEQ ID NO: 22217 - DNA, 122 bp, Homo sapiens
  misc_feature (61)..(62): /note="This region represents a CpG dinucleotide"
  misc_feature (61)..(61): /note="Nucleotide may be methylated to form 5-methylcytosine"
ggcttcagtgagagagccaagttcaacttttctctgtgtttgtgtgcatgcacacgtgcacgcatgcccatacatgtgtgtttgtgacatctacatggatggatgccagagggcaaggaggt

SEQ ID NO: 22218 - DNA, 122 bp, Homo sapiens
  misc_feature (61)..(62): /note="This region represents a CpG dinucleotide"
  misc_feature (61)..(61): /note="Nucleotide may be methylated to form 5-methylcytosine"
tatttccaaactttgacaagacaacttaatacgctgaaactttaaaatcttgttcccacccgtaagacacagattccaaagaagagatgcagatctcaaatacctactgggattattatgtt

SEQ ID NO: 22219 - DNA, 122 bp, Homo sapiens
  misc_feature (61)..(62): /note="This region represents a CpG dinucleotide"
  misc_feature (61)..(61): /note="Nucleotide may be methylated to form 5-methylcytosine"
tctctaaggaagtcagatgaaaacacagaacactgctgtgcatccagctggtcagtgtgtcggttctttttgcaaggaaatctttttttttttttttttttgagacagagtctcactctgtt

SEQ ID NO: 22220 - DNA, 122 bp, Homo sapiens
  misc_feature (61)..(62): /note="This region represents a CpG dinucleotide"
  misc_feature (61)..(61): /note="Nucleotide may be methylated to form 5-methylcytosine"
atacagtaagtgctatgtaagtgtctgttaaataaatcatagtctgttccctctgcccttcgaggcccttcaggggaaaagttagaagataacagcttcaaagcgagacaagtaatttccag

SEQ ID NO: 22221 - DNA, 122 bp, Homo sapiens
  misc_feature (61)..(62): /note="This region represents a CpG dinucleotide"
  misc_feature (61)..(61): /note="Nucleotide may be methylated to form 5-methylcytosine"
ctcagacccagggaggagggatttgctgctttcagcctccccctcctgctttggtgccgacgtccatatgtggcatctcgggttggtttcccctggcacccagcatgtcccggcctcaccca

SEQ ID NO: 22222 - DNA, 122 bp, Homo sapiens
  misc_feature (61)..(62): /note="This region represents a CpG dinucleotide"
  misc_feature (61)..(61): /note="Nucleotide may be methylated to form 5-methylcytosine"
catgaatgtgaggatgttctcattcattcctgcttacccagatatgtggagagacctctgcgtcttggtttgggggtcatgtgtattgttcccccatgccatttcttcatgaccggccagaa

SEQ ID NO: 22223 - DNA, 122 bp, Homo sapiens
  misc_feature (61)..(62): /note="This region represents a CpG dinucleotide"
  misc_feature (61)..(61): /note="Nucleotide may be methylated to form 5-methylcytosine"
gtgcacattttctaaactgacatcttctacatcactcatgagcttgatcttattggcagccgtagctgcacatcttcgagtaatcctcaggagacctgttctggcttttgatgatttcttaa

SEQ ID NO: 22224 - DNA, 122 bp, Homo sapiens
  misc_feature (61)..(62): /note="This region represents a CpG dinucleotide"
  misc_feature (61)..(61): /note="Nucleotide may be methylated to form 5-methylcytosine"
gttcctgttacagaatttctgcttctcttaacatagattgtagcagctactgagttgaggcgttatctaatgcagtcatctgttgggaccagagtaattgcagtcatattttggctgtgtgc

SEQ ID NO: 22225 - DNA, 122 bp, Homo sapiens
  misc_feature (61)..(62): /note="This region represents a CpG dinucleotide"
  misc_feature (61)..(61): /note="Nucleotide may be methylated to form 5-methylcytosine"
atgtgccctttgactctcccttccattaagataactttccttgtggatttccggctctctcgtaggcttgctaaataccagggtaaacacaatttgtgtgtgttgctcaaacgttgcataat

SEQ ID NO: 22226 - DNA, 122 bp, Homo sapiens
  misc_feature (61)..(62): /note="This region represents a CpG dinucleotide"
  misc_feature (61)..(61): /note="Nucleotide may be methylated to form 5-methylcytosine"
agcccctggcaaccacgaatctgctttctgcctctaggatttccttgtttgagatggcagcgtgtgcaaatggggcgtgtcacactcagtcttttattccagcttctttcacttgcaggatg

SEQ ID NO: 22227 - DNA, 122 bp, Homo sapiens
  misc_feature (61)..(62): /note="This region represents a CpG dinucleotide"
  misc_feature (61)..(61): /note="Nucleotide may be methylated to form 5-methylcytosine"
ttaaactcaattttattttctttaatcttcagtttctagttttcatcgttggctctctaacgtttatcatttgttattaattcttggcttttactttgccattttatagtgctcattttata

SEQ ID NO: 22228 - DNA, 122 bp, Homo sapiens
  misc_feature (61)..(62): /note="This region represents a CpG dinucleotide"
  misc_feature (61)..(61): /note="Nucleotide may be methylated to form 5-methylcytosine"
ctgctgttacacacactctgttgacttaaaacacaacctcaccagaaaacactttgttctcgcaggtcctttttttttttttttttttttaagatggagtctagctctgtcgcccagggtgg

SEQ ID NO: 22229 - DNA, 122 bp, Homo sapiens
  misc_feature (61)..(62): /note="This region represents a CpG dinucleotide"
  misc_feature (61)..(61): /note="Nucleotide may be methylated to form 5-methylcytosine"
tactcttgtgtcttggggccattatgaagtcaaatgatagttccgtgaacacaagcatggcgatgcctccacagtcaatctgatgacccggtcggctactaagtgactaaccgcagggagtg

SEQ ID NO: 22230 - DNA, 122 bp, Homo sapiens
  misc_feature (61)..(62): /note="This region represents a CpG dinucleotide"
  misc_feature (61)..(61): /note="Nucleotide may be methylated to form 5-methylcytosine"
ggttgtgggacttgaggctttaccgggtggaggcctgtaggaggcttttctttacaaatccgtctttgcaggagaggctaaaccagggcatccctcaaataggaaattatagaatatagtca

SEQ ID NO: 22231 - DNA, 122 bp, Homo sapiens
  misc_feature (61)..(62): /note="This region represents a CpG dinucleotide"
  misc_feature (61)..(61): /note="Nucleotide may be methylated to form 5-methylcytosine"
tcatcaccatttttattgctattataactggaagaattaccctcccaaccttcctgcatgcgcatacacacacagacacacacacacacacacacacagacacacacacctctgccccctca

SEQ ID NO: 22232 - DNA, 122 bp, Homo sapiens
  misc_feature (61)..(62): /note="This region represents a CpG dinucleotide"
  misc_feature (61)..(61): /note="Nucleotide may be methylated to form 5-methylcytosine"
cctggaggcacagggctgtgaagtaacttcctaaactcactcagctgtggcaaaaccaagcgaggcccttgtagctggggttacactggagagtcacactcttccacggactgcctcaacta

SEQ ID NO: 22233 - DNA, 122 bp, Homo sapiens
  misc_feature (61)..(62): /note="This region represents a CpG dinucleotide"
  misc_feature (61)..(61): /note="Nucleotide may be methylated to form 5-methylcytosine"
cctaactaagctgaaggtcctcctggtggccttggacagctgggccacaccttcctctgccgtctaagtgccagcaccacagcttaatcagacgacaaacatgtcatggacgctacacctct

SEQ ID NO: 22234 - DNA, 122 bp, Homo sapiens
  misc_feature (61)..(62): /note="This region represents a CpG dinucleotide"
  misc_feature (61)..(61): /note="Nucleotide may be methylated to form 5-methylcytosine"
acccagaatgctccagtgctgctgtgcagcaagtgcctcagaaacgcagcttggcaaaggcgtgcagccctgtagcctctaagaagcgtccagctatagctcagtgtgaacatcttcctaaa

SEQ ID NO: 22235 - DNA, 122 bp, Homo sapiens
  misc_feature (61)..(62): /note="This region represents a CpG dinucleotide"
  misc_feature (61)..(61): /note="Nucleotide may be methylated to form 5-methylcytosine"
agacagatggtccttttggaccaggatcagcacttacttggagaatatttccacaatagccgatgacttgttcttgttgacaagagaaagttctttggctgttaccctcaatgatagtgagg

SEQ ID NO: 22236 - DNA, 122 bp, Homo sapiens
  misc_feature (61)..(62): /note="This region represents a CpG dinucleotide"
  misc_feature (61)..(61): /note="Nucleotide may be methylated to form 5-methylcytosine"
ccaaaatgcaaaagatgggtcattgattcatacactatatcaaactcttttatgacttggcgtttgttcagtactactttatatattcacaaaatactgtattgttggaaattaacacctaa

SEQ ID NO: 22237 - DNA, 122 bp, Homo sapiens
  misc_feature (61)..(62): /note="This region represents a CpG dinucleotide"
  misc_feature (61)..(61): /note="Nucleotide may be methylated to form 5-methylcytosine"
gcctcccaggttcaaatgattcttctgcctcagcctcctgagtagctgggattacaggcacgtgccaccacacccagctaattttgagtagagacagggtttcaccatgttggccaggctgg

SEQ ID NO: 22238 - DNA, 122 bp, Homo sapiens
  misc_feature (61)..(62): /note="This region represents a CpG dinucleotide"
  misc_feature (61)..(61): /note="Nucleotide may be methylated to form 5-methylcytosine"
tacacgtgtgggaaggggaagggtccattcacacagagacatgtgcacacacacggggcccgtagactttccttaccaccccaccctctgctcaagaaaagtccagcctaggagacaatgtg

SEQ ID NO: 22239 - DNA, 122 bp, Homo sapiens
  misc_feature (61)..(62): /note="This region represents a CpG dinucleotide"
  misc_feature (61)..(61): /note="Nucleotide may be methylated to form 5-methylcytosine"
caacacgttagccatctctagttgttactttaaatttgtatttcaatttcaagtttggctcggtctaagaccttactatacttagcaaaggtgtgttttttgctggtaatttgcccttaaat

SEQ ID NO: 22240 - DNA, 122 bp, Homo sapiens
  misc_feature (61)..(62): /note="This region represents a CpG dinucleotide"
  misc_feature (61)..(61): /note="Nucleotide may be methylated to form 5-methylcytosine"
tgatctttccatttcattgcattatccatatgacctttttttctcttaccagattgctctcgcattagtcctcagacatgccaggtattgaaatgagtcacttacaaccaaatatagttgac

SEQ ID NO: 22241 - DNA, 122 bp, Homo sapiens
  misc_feature (61)..(62): /note="This region represents a CpG dinucleotide"
  misc_feature (61)..(61): /note="Nucleotide may be methylated to form 5-methylcytosine"
gtccacgttcccggcagccaagggcaccagtggaatttgcttcctctaaatcctgctttccgcaatttttttttcctttgttagtttcctcagccggagggagggattgggggagagagagc

SEQ ID NO: 22242 - DNA, 122 bp, Homo sapiens
  misc_feature (61)..(62): /note="This region represents a CpG dinucleotide"
  misc_feature (61)..(61): /note="Nucleotide may be methylated to form 5-methylcytosine"
agggccagctagtcttaggctaaagggatggtatatgggtggacacttggaggggtagttcgcagttatctcttcatccaaagcatgacctgaggccaaagcatgacctgaggccggtcctg

SEQ ID NO: 22243 - DNA, 122 bp, Homo sapiens
  misc_feature (61)..(62): /note="This region represents a CpG dinucleotide"
  misc_feature (61)..(61): /note="Nucleotide may be methylated to form 5-methylcytosine"
caagaacctatctcaaaaaaaaaaaaaaaaaaaaaaaaaaaaaaaaagaatgagatcaagcggtaagtaatgacatgtggccttgtttctgctaagtcagacctgccctcccctacgttact

SEQ ID NO: 22244 - DNA, 122 bp, Homo sapiens
  misc_feature (61)..(62): /note="This region represents a CpG dinucleotide"
  misc_feature (61)..(61): /note="Nucleotide may be methylated to form 5-methylcytosine"
tacttcagtttatgagaaacaagttcactcatccaaacccaaagaatggactcagagacccggagaactgcaaaagtgagacttttaacgacagtcttgcaagatagggtatctgatggaca

SEQ ID NO: 22245 - DNA, 122 bp, Homo sapiens
  misc_feature (61)..(62): /note="This region represents a CpG dinucleotide"
  misc_feature (61)..(61): /note="Nucleotide may be methylated to form 5-methylcytosine"
aacatgatcttatttaatcctcatgctcattcattttacagaagagggatctaaggctcacggtggttaatcaacttgtccaaggtcacatagctagaaaaataaagatgttcaaaccagaa

SEQ ID NO: 22246 - DNA, 122 bp, Homo sapiens
  misc_feature (61)..(62): /note="This region represents a CpG dinucleotide"
  misc_feature (61)..(61): /note="Nucleotide may be methylated to form 5-methylcytosine"
cccagaaacacgcaagggaatggagcaaagagtttaatcacatccacacatcaaaaccaacgagaaaaggtctattgtttaatagagcctctgtttgtgagctacagggagaaaaacaaagt

SEQ ID NO: 22247 - DNA, 122 bp, Homo sapiens
  misc_feature (61)..(62): /note="This region represents a CpG dinucleotide"
  misc_feature (61)..(61): /note="Nucleotide may be methylated to form 5-methylcytosine"
actaacaatgactagcttaaagtgactttccagagccctcgtccttcctgtcatcagaaccgactgactggaaggccagtaatttgatatcggaaatttacaattgataaagtcatcaatgg

SEQ ID NO: 22248 - DNA, 122 bp, Homo sapiens
  misc_feature (61)..(62): /note="This region represents a CpG dinucleotide"
  misc_feature (61)..(61): /note="Nucleotide may be methylated to form 5-methylcytosine"
ggcagcccccaaacccaccccaactctgggccggccctgtcctccccaccccattagatccggagaggaaagacaggagccacgtgaatctacagtacatcatggcagggcacattcccctt

SEQ ID NO: 22249 - DNA, 122 bp, Homo sapiens
  misc_feature (61)..(62): /note="This region represents a CpG dinucleotide"
  misc_feature (61)..(61): /note="Nucleotide may be methylated to form 5-methylcytosine"
cgaacttctgacctcaagtgatccacccacctcggcctcccaaattgctgggattacagacgtgagccatggcacctgcccaccagtgactttaaaagatagccaccgattcctatcttaca

SEQ ID NO: 22250 - DNA, 122 bp, Homo sapiens
  misc_feature (61)..(62): /note="This region represents a CpG dinucleotide"
  misc_feature (61)..(61): /note="Nucleotide may be methylated to form 5-methylcytosine"
cactgttattggtaattctttcactgaacgcacagtcattaagccagttcttactgagtccgtatgagtactgtgctgggtgtgcccttttgtaatcctgttgaaaaagcacagctcacaag

SEQ ID NO: 22251 - DNA, 122 bp, Homo sapiens
  misc_feature (61)..(62): /note="This region represents a CpG dinucleotide"
  misc_feature (61)..(61): /note="Nucleotide may be methylated to form 5-methylcytosine"
tgaactcctgacctcaagcgatccacccgcctcagtctcccaaagtgctgggattccaggcgtgagccagcgtgcccagcctgctgactgtattcttacaatgtgacttaacatgtttgttt

SEQ ID NO: 22252 - DNA, 122 bp, Homo sapiens
  misc_feature (61)..(62): /note="This region represents a CpG dinucleotide"
  misc_feature (61)..(61): /note="Nucleotide may be methylated to form 5-methylcytosine"
atctcacagcctgaagcaccgctgccttcactcctgatgcatcactaacatggtacccaacgtgctgaactttggagactgtggttaaattggaggagagccctccctgttaatcttaagtt

SEQ ID NO: 22253 - DNA, 122 bp, Homo sapiens
  misc_feature (61)..(62): /note="This region represents a CpG dinucleotide"
  misc_feature (61)..(61): /note="Nucleotide may be methylated to form 5-methylcytosine"
tcccactgccaggaatgcccttccctcttctgtcccagtgtttgaaattctgtctttggtcgaccgcactctcctgcccgcaccccctccctgccatggcccttttggtgtccccacacttt

SEQ ID NO: 22254 - DNA, 122 bp, Homo sapiens
  misc_feature (61)..(62): /note="This region represents a CpG dinucleotide"
  misc_feature (61)..(61): /note="Nucleotide may be methylated to form 5-methylcytosine"
ttttacaaaaaaagcatctgagctagcattgagcactgagttttcagcagatcctggaggcgtctgcctctgctctgcatagatgatgagcagctgattgtgctgtctccatgtggatgcag

SEQ ID NO: 22255 - DNA, 122 bp, Homo sapiens
  misc_feature (61)..(62): /note="This region represents a CpG dinucleotide"
  misc_feature (61)..(61): /note="Nucleotide may be methylated to form 5-methylcytosine"
gatgctgtctctgtaattggcagagagggacatcttgataatggaagtgtgaaggtgtaacgtgtgttaattgatacttcttaatcacttttaggtattaagtcatgatgcaggaatctgcg

SEQ ID NO: 22256 - DNA, 122 bp, Homo sapiens
  misc_feature (61)..(62): /note="This region represents a CpG dinucleotide"
  misc_feature (61)..(61): /note="Nucleotide may be methylated to form 5-methylcytosine"
ttccagtgtcacctgcaggatgccatgggatacccatgagcccaggcaaatctcccaagacgctgccaagccactctgcagagctgctctgggtcctgccccaggtgctgtgtgagggagct

SEQ ID NO: 22257 - DNA, 122 bp, Homo sapiens
  misc_feature (61)..(62): /note="This region represents a CpG dinucleotide"
  misc_feature (61)..(61): /note="Nucleotide may be methylated to form 5-methylcytosine"
gtctgtgccttcatgctttgctgtctccacacagcaagcaagctcttgcttggaagtgtgcgtgagagacttgttgtctctagccagcttgaaatgctcctcccgtttcttcccgtgatttg

SEQ ID NO: 22258 - DNA, 122 bp, Homo sapiens
  misc_feature (61)..(62): /note="This region represents a CpG dinucleotide"
  misc_feature (61)..(61): /note="Nucleotide may be methylated to form 5-methylcytosine"
gctcagcctctgggcataccatgtttggagcccaagggcagttttccatgcaacgaggcacgtatcactctctaccaccttgtcaccttctgggacctgcgtggactccaaatccctctctc

SEQ ID NO: 22259 - DNA, 122 bp, Homo sapiens
  misc_feature (61)..(62): /note="This region represents a CpG dinucleotide"
  misc_feature (61)..(61): /note="Nucleotide may be methylated to form 5-methylcytosine"
tggagctcccagtcaagtggctgacattcaattccagctgagctccttattattctctctcgtcattcttgtgagtcatgttcccaatttgatttgagcagtaggaaggctgcgtgtgccac

SEQ ID NO: 22260 - DNA, 122 bp, Homo sapiens
  misc_feature (61)..(62): /note="This region represents a CpG dinucleotide"
  misc_feature (61)..(61): /note="Nucleotide may be methylated to form 5-methylcytosine"
cacttatagggcgtcttgtgtcgcgtgatccctcagctctttacacacattaattaattacgcatcacagcacccctgtgaggtagagtaggtaagcattattatgtgcaaaggatttattg

SEQ ID NO: 22261 - DNA, 122 bp, Homo sapiens
  misc_feature (61)..(62): /note="This region represents a CpG dinucleotide"
  misc_feature (61)..(61): /note="Nucleotide may be methylated to form 5-methylcytosine"
tcacaggtcccagagcaagggaatccagaatacaaaattcattttccactttgcttagcacggcacaatcaaatgtatttaatgacaggacaagaataaagagagaataagactttgaaatt

SEQ ID NO: 22262 - DNA, 122 bp, Homo sapiens
  misc_feature (61)..(62): /note="This region represents a CpG dinucleotide"
  misc_feature (61)..(61): /note="Nucleotide may be methylated to form 5-methylcytosine"
atctgctgcccatacatggagtctcactccatttaacgcctgcagtcatgagaatcattgcgttttcttttataagccaggaagtggaagggttatagctatagtttcttgtgtctcttctt

SEQ ID NO: 22263 - DNA, 122 bp, Homo sapiens
  misc_feature (61)..(62): /note="This region represents a CpG dinucleotide"
  misc_feature (61)..(61): /note="Nucleotide may be methylated to form 5-methylcytosine"
gttcacttaaagttgtaaattatggttttcagaggaagttgattttatttactcaccttgcgattaatccactgtgaactctggcctctaggaagctgtccaagaaatagggacatagttgg

SEQ ID NO: 22264 - DNA, 122 bp, Homo sapiens
  misc_feature (61)..(62): /note="This region represents a CpG dinucleotide"
  misc_feature (61)..(61): /note="Nucleotide may be methylated to form 5-methylcytosine"
tggaggaaatgaaacatatgctatgtaaagcaggagtccccagactctaggtcacaaacccgtgccagtccatgggctgttagtaactgggccgcacagcaggcagtaagcagcaggcaagc

SEQ ID NO: 22265 - DNA, 122 bp, Homo sapiens
  misc_feature (61)..(62): /note="This region represents a CpG dinucleotide"
  misc_feature (61)..(61): /note="Nucleotide may be methylated to form 5-methylcytosine"
aaaaactgatgcttaggctttaaactatgtggagcacgcccaaggctactttgtagaaagcgaaggtctgtgcaatgacctgctccctggagcccttgtaatagttgttgggaaggtctcag

SEQ ID NO: 22266 - DNA, 122 bp, Homo sapiens
  misc_feature (61)..(62): /note="This region represents a CpG dinucleotide"
  misc_feature (61)..(61): /note="Nucleotide may be methylated to form 5-methylcytosine"
ggcaagtcccttatcccctcggaggacctgtttcttccttctgtaggatgacgtggagctcgctggaggttcccctgacatgatgcagcacacttcctgagtgctcagcagggcagagctca

SEQ ID NO: 22267 - DNA, 122 bp, Homo sapiens
  misc_feature (61)..(62): /note="This region represents a CpG dinucleotide"
  misc_feature (61)..(61): /note="Nucleotide may be methylated to form 5-methylcytosine"
tacaattttggaagaggagcttgttcaaacccttatataatagacgagtagaccaaggcccggaagggtgatgtggcttgttcaaacccctccgccagccgaggcagagccagggctgctga

SEQ ID NO: 22268 - DNA, 122 bp, Homo sapiens
  misc_feature (61)..(62): /note="This region represents a CpG dinucleotide"
  misc_feature (61)..(61): /note="Nucleotide may be methylated to form 5-methylcytosine"
tagaccttgtaggttcaatttcttgaaagaagttgagatgtataaacagttcctgatttacggtggtttgacttatgatttttgctagatactggatatacattaaagagcaaaaacagttg

SEQ ID NO: 22269 - DNA, 122 bp, Homo sapiens
  misc_feature (61)..(62): /note="This region represents a CpG dinucleotide"
  misc_feature (61)..(61): /note="Nucleotide may be methylated to form 5-methylcytosine"
catcaggaagtcttagggagcgttcttgggctgggccaccccaaagggactttggctgctcgcgacagacccctgccccaccaagggcaggcacgtcctgtctcctttcatctccccagtgc

SEQ ID NO: 22270 - DNA, 122 bp, Homo sapiens
  misc_feature (61)..(62): /note="This region represents a CpG dinucleotide"
  misc_feature (61)..(61): /note="Nucleotide may be methylated to form 5-methylcytosine"
gcctccatttgctgtttgttcatttggtgatagcgcaacacttaaaaaaatattttaagccgcttctgaagtaatcacttcagtgacttttaatggaggagtatttgttatgggaaattcac

SEQ ID NO: 22271 - DNA, 122 bp, Homo sapiens
  misc_feature (61)..(62): /note="This region represents a CpG dinucleotide"
  misc_feature (61)..(61): /note="Nucleotide may be methylated to form 5-methylcytosine"
atcctccttttccaggatcatggtgtagaccaagagtacctgcagtcacgccaggaatgacgtccattcttacctcacccatctgtttttgcacaatttgcatttagatgtagcaaactaaa

SEQ ID NO: 22272 - DNA, 122 bp, Homo sapiens
  misc_feature (61)..(62): /note="This region represents a CpG dinucleotide"
  misc_feature (61)..(61): /note="Nucleotide may be methylated to form 5-methylcytosine"
aatcagaggagaacatcacttcaccagctgagcagagctactgccactgccaaagacccccggctgaccagctgctctggagcctctgcccactctgccctccagcaaagtgcccatcctct

SEQ ID NO: 22273 - DNA, 122 bp, Homo sapiens
  misc_feature (61)..(62): /note="This region represents a CpG dinucleotide"
  misc_feature (61)..(61): /note="Nucleotide may be methylated to form 5-methylcytosine"
catcagagcaaagcaggactatagcttcctccttttgggacctatcgctttgcactcctgcgataaagttcttggcacccatactgttgactcatattgggcttgcagtcaaccaaaacctc

SEQ ID NO: 22274 - DNA, 122 bp, Homo sapiens
  misc_feature (61)..(62): /note="This region represents a CpG dinucleotide"
  misc_feature (61)..(61): /note="Nucleotide may be methylated to form 5-methylcytosine"
gcttttccataagctataatgactcttcacctatttcacaatattgctaaaggcaggtcccgttcatcttcaaataaactgggatgagtaaaactattcatgaaatacttacaatttgctaa

SEQ ID NO: 22275 - DNA, 122 bp, Homo sapiens
  misc_feature (61)..(62): /note="This region represents a CpG dinucleotide"
  misc_feature (61)..(61): /note="Nucleotide may be methylated to form 5-methylcytosine"
cagttcacagtagcgttcacagtcctatgagactaatgccaccactcatctgacaggaagcggagctcaggcagtaatgagagcaatggggagtggctgtagatacagacgaagcttcactt

SEQ ID NO: 22276 - DNA, 122 bp, Homo sapiens
  misc_feature (61)..(62): /note="This region represents a CpG dinucleotide"
  misc_feature (61)..(61): /note="Nucleotide may be methylated to form 5-methylcytosine"
gaaagggagaggggctggagattgagctaataatccatcacgcgtaagtaatgaagcctccgtaaaaatccctgaactacaggatccagagagcttctgggctggtggacacatccgcatgc

SEQ ID NO: 22277 - DNA, 122 bp, Homo sapiens
  misc_feature (61)..(62): /note="This region represents a CpG dinucleotide"
  misc_feature (61)..(61): /note="Nucleotide may be methylated to form 5-methylcytosine"
gtcagttttgcttctcccctcacccctttaactccatcatgggaggcatagcagaggaaacggcaggtcagtgatgtaagaattagaagcccaacaactgaagaactggaaacagcatcatt

SEQ ID NO: 22278 - DNA, 122 bp, Homo sapiens
  misc_feature (61)..(62): /note="This region represents a CpG dinucleotide"
  misc_feature (61)..(61): /note="Nucleotide may be methylated to form 5-methylcytosine"
tacttaaaattttggctactacatttttttcaggctttctgaaacctacatgtgaatcatcggaggatatttgctgaatgaattcagaataggcaacctaatccacttggaaagcactaggc

SEQ ID NO: 22279 - DNA, 122 bp, Homo sapiens
  misc_feature (61)..(62): /note="This region represents a CpG dinucleotide"
  misc_feature (61)..(61): /note="Nucleotide may be methylated to form 5-methylcytosine"
gggtgcctcgcaaccctggagctgcatttaagtggactgtctcccagtgacagaggcgggcggctgcacttagctgtgccgtgggcttactcacagggggtggagacaagatgacatcacac

SEQ ID NO: 22280 - DNA, 122 bp, Homo sapiens
  misc_feature (61)..(62): /note="This region represents a CpG dinucleotide"
  misc_feature (61)..(61): /note="Nucleotide may be methylated to form 5-methylcytosine"
agcggggacccagggagtcctcacgccccatggccttggctgcagagaacacgccagcaccgccacagcaggcacccacatggagccgggcgggtacacacccctcacacccacacaggcct

SEQ ID NO: 22281 - DNA, 122 bp, Homo sapiens
  misc_feature (61)..(62): /note="This region represents a CpG dinucleotide"
  misc_feature (61)..(61): /note="Nucleotide may be methylated to form 5-methylcytosine"
tttgtcttactagttaaatcctcacctaatctcttgggtatgaatataaatgtgtgtcatcgttatattgttcagctagatgagcaagtatcttagggtagtaggtagcctggtggttttag

SEQ ID NO: 22282 - DNA, 122 bp, Homo sapiens
  misc_feature (61)..(62): /note="This region represents a CpG dinucleotide"
  misc_feature (61)..(61): /note="Nucleotide may be methylated to form 5-methylcytosine"
cctttgttctatgacaggcaagtcagcaggatgtcaggcctggcttgatcttacacccctcgactgaatgcccgggagtccctgagcgttggggcaggaggagccttagagactgtaaggac

SEQ ID NO: 22283 - DNA, 122 bp, Homo sapiens
  misc_feature (61)..(62): /note="This region represents a CpG dinucleotide"
  misc_feature (61)..(61): /note="Nucleotide may be methylated to form 5-methylcytosine"
aaccgagtctgaggaaatgactctcagatgagaaaaagctttgtgcacacagatgtccatcgtggcatgacttgcagcactgggaaactggaaaccaattgtcaaggaccggttggaaaatg

SEQ ID NO: 22284 - DNA, 122 bp, Homo sapiens
  misc_feature (61)..(62): /note="This region represents a CpG dinucleotide"
  misc_feature (61)..(61): /note="Nucleotide may be methylated to form 5-methylcytosine"
aaattcatttcttgtcgccacctagattaacaaatctcagattaagaactggccttttttcgcctcctctttgaattcactgtctaaagaaacggccattgccctttccgtaaaccaggaca

SEQ ID NO: 22285 - DNA, 122 bp, Homo sapiens
  misc_feature (61)..(62): /note="This region represents a CpG dinucleotide"
  misc_feature (61)..(61): /note="Nucleotide may be methylated to form 5-methylcytosine"
cacccagttgctgtgggtgctgggccgacccaatcctttctcttgtgtgatccatggactcgcagcattgcgtcacctgtgagcttttggaattgaagacttccagggctcacccgggagga

SEQ ID NO: 22286 - DNA, 122 bp, Homo sapiens
  misc_feature (61)..(62): /note="This region represents a CpG dinucleotide"
  misc_feature (61)..(61): /note="Nucleotide may be methylated to form 5-methylcytosine"
aggtctctagccacagtcggttttatgttccaggcatcaatccacactcatgattgttaccgtacacctgtatgtcattcggaggttcacccagctcaagcaaattatattttaaaactgca

SEQ ID NO: 22287 - DNA, 122 bp, Homo sapiens
  misc_feature (61)..(62): /note="This region represents a CpG dinucleotide"
  misc_feature (61)..(61): /note="Nucleotide may be methylated to form 5-methylcytosine"
gccaaggttctatggggatgtttttgcatggtttagaggctgctttctcagcacagtacacgtagttgtctttctcaatacatggtccttgcacatgccctggagtcaggatgagcctctga

SEQ ID NO: 22288 - DNA, 122 bp, Homo sapiens
  misc_feature (61)..(62): /note="This region represents a CpG dinucleotide"
  misc_feature (61)..(61): /note="Nucleotide may be methylated to form 5-methylcytosine"
gtgtctggttagggcctgcttcctcataggtgaggctttctcactgtaacctcatatggccgaaggggcgagggagtctctcaggtctcttttataaaagcactgatctcattcctaaggcc

SEQ ID NO: 22289 - DNA, 122 bp, Homo sapiens
  misc_feature (61)..(62): /note="This region represents a CpG dinucleotide"
  misc_feature (61)..(61): /note="Nucleotide may be methylated to form 5-methylcytosine"
accggtcaccatctttgtatctgcgctttgtatctggggtgacagtgtcccagcgacatgcgtcacatctacagcagtgtttttctgggtgtctgtgcgtcacggcaaagagtgtatccgtg

SEQ ID NO: 22290 - DNA, 122 bp, Homo sapiens
  misc_feature (61)..(62): /note="This region represents a CpG dinucleotide"
  misc_feature (61)..(61): /note="Nucleotide may be methylated to form 5-methylcytosine"
ggggcagccagaagactccacttttggggagtggggttatagtttcccaaggtccttttccgtgccatcgtcatatccagaatgtaatttttgaagctatcaatacccgctgcctccaatac

SEQ ID NO: 22291 - DNA, 122 bp, Homo sapiens
  misc_feature (61)..(62): /note="This region represents a CpG dinucleotide"
  misc_feature (61)..(61): /note="Nucleotide may be methylated to form 5-methylcytosine"
aagccagctgtctccctgccccattcctccacctgaactaatttgttagcttatgggagacgcattatcacaggtattagggaaatgctagctagaaaaactggaaggtctactagggactg

SEQ ID NO: 22292 - DNA, 122 bp, Homo sapiens
  misc_feature (61)..(62): /note="This region represents a CpG dinucleotide"
  misc_feature (61)..(61): /note="Nucleotide may be methylated to form 5-methylcytosine"
aaggcatgggaggtgagtgggtcaccgacgtgaggctgcatgacttagtgccttcagctgcgagtgtcagcaattcttttcaggggatcaggaaaaagaagggaagtatggcccgaactaaa

SEQ ID NO: 22293 - DNA, 122 bp, Homo sapiens
  misc_feature (61)..(62): /note="This region represents a CpG dinucleotide"
  misc_feature (61)..(61): /note="Nucleotide may be methylated to form 5-methylcytosine"
aaaaaggtcaaacaaagttacttccctttagggagtcctacaacacttgagggcttgttacgcaatgccccagtgggaggattaaggccacacaggctcctcattgcttcacttccaagctt

SEQ ID NO: 22294 - DNA, 122 bp, Homo sapiens
  misc_feature (61)..(62): /note="This region represents a CpG dinucleotide"
  misc_feature (61)..(61): /note="Nucleotide may be methylated to form 5-methylcytosine"
gttagcagggcccacccccttttgttctgccctggcttcctctgagaggctcccaggggccgctgccccagatccaccagccccggtagccccaaacactgtttgaggtgctagggtggagg

SEQ ID NO: 22295 - DNA, 122 bp, Homo sapiens
  misc_feature (61)..(62): /note="This region represents a CpG dinucleotide"
  misc_feature (61)..(61): /note="Nucleotide may be methylated to form 5-methylcytosine"
aacagcttttcaaatgtttgctgcctgtttgtatctcttcctctgtgacttatctttctccgtgatttgccagtaggcatttgcagtcctttttttcttttttttttgacttggagtctcgc

SEQ ID NO: 22296 - DNA, 122 bp, Homo sapiens
  misc_feature (61)..(62): /note="This region represents a CpG dinucleotide"
  misc_feature (61)..(61): /note="Nucleotide may be methylated to form 5-methylcytosine"
gtggaagagctgtattatgctcaggaaaaacagcaagggatcccagggagttgctgtgggcgggagactgaagattgaagtaaagtaagcctgagggttaaggaaagatatgtggcaggaaa

SEQ ID NO: 22297 - DNA, 122 bp, Homo sapiens
  misc_feature (61)..(62): /note="This region represents a CpG dinucleotide"
  misc_feature (61)..(61): /note="Nucleotide may be methylated to form 5-methylcytosine"
cctgtcattttagaaatcaggaatagaagtctccacagttatgattgttcccaacttcctcgtttttgggttgaagtaacagaggctgagagatgtgagaatacttgcccaaggtgccctgg

SEQ ID NO: 22298 - DNA, 122 bp, Homo sapiens
  misc_feature (61)..(62): /note="This region represents a CpG dinucleotide"
  misc_feature (61)..(61): /note="Nucleotide may be methylated to form 5-methylcytosine"
caagattatatatactattcctgaccttaccaggtaggtaagattctttgtgcttaattccgcactcaggacagacttggtgagtctgttgcttattttcctgtatcttattagtgagggaa

SEQ ID NO: 22299 - DNA, 122 bp, Homo sapiens
  misc_feature (61)..(62): /note="This region represents a CpG dinucleotide"
  misc_feature (61)..(61): /note="Nucleotide may be methylated to form 5-methylcytosine"
tggaactcaggatatatgttcccacagccacagtggccccaagttggtcaggctgtcaggcggctccagaaaccacacaccccatgacatgaggaagccacagacagagacacccagtttcc

SEQ ID NO: 22300 - DNA, 122 bp, Homo sapiens
  misc_feature (61)..(62): /note="This region represents a CpG dinucleotide"
  misc_feature (61)..(61): /note="Nucleotide may be methylated to form 5-methylcytosine"
tcagagttttgtttgtttgtttcttagcacaacgtattgctgaagctttcaagaaaaccacgattgtaggctttatatcatactgtctgtggttcccatcacataatgcaaatacacctgtt

SEQ ID NO: 22301 - DNA, 122 bp, Homo sapiens
  misc_feature (61)..(62): /note="This region represents a CpG dinucleotide"
  misc_feature (61)..(61): /note="Nucleotide may be methylated to form 5-methylcytosine"
cctggctgggctgcagcattctcgagaccacggtcacccggattcttggcgtctgtaccacgtccagattctggccacggacgcatatctcacgtcctccactgaaacagaccgtgagctta

SEQ ID NO: 22302 - DNA, 122 bp, Homo sapiens
  misc_feature (61)..(62): /note="This region represents a CpG dinucleotide"
  misc_feature (61)..(61): /note="Nucleotide may be methylated to form 5-methylcytosine"
ttgataagcaaggggatgaaagtaccaagaggtgaaagcttataaaattgtggttatatgcgtggaatattaaggtttatgatttcagagatggagaaccattgcattataataagaaacct

SEQ ID NO: 22303 - DNA, 122 bp, Homo sapiens
  misc_feature (61)..(62): /note="This region represents a CpG dinucleotide"
  misc_feature (61)..(61): /note="Nucleotide may be methylated to form 5-methylcytosine"
tcatttttaaaatatctgaagtcctttcatattcatgacctcattcaccatcatgtgagacgggttgggtggctttgttgttgcttaagattctcagaatcctagaagctgaacttcactat

SEQ ID NO: 22304 - DNA, 122 bp, Homo sapiens
  misc_feature (61)..(62): /note="This region represents a CpG dinucleotide"
  misc_feature (61)..(61): /note="Nucleotide may be methylated to form 5-methylcytosine"
taggtgggggcggtgggtggcagcaacctcttgggcccagcttcctggtacctggattgtcgctagaacagaatgtcctacaactcagcgttcctgtgggtgacagataatgactccattgg

SEQ ID NO: 22305 - DNA, 122 bp, Homo sapiens
  misc_feature (61)..(62): /note="This region represents a CpG dinucleotide"
  misc_feature (61)..(61): /note="Nucleotide may be methylated to form 5-methylcytosine"
acttatcctgacaatccaactcaagtgttctttgctctgtgaggctttcctcattctccacgttgattgaggaactcccttctctttgcttccaaggactttgtacacaacctgatgacagt

SEQ ID NO: 22306 - DNA, 122 bp, Homo sapiens
  misc_feature (61)..(62): /note="This region represents a CpG dinucleotide"
  misc_feature (61)..(61): /note="Nucleotide may be methylated to form 5-methylcytosine"
agctagcctgaactcaggggcctagcagagatctcatgacaacagcttccagagtctcaacgccctgtgcttgccccaggccaagtcactgctgcccagagaggattatgggcaaaatagaa

SEQ ID NO: 22307 - DNA, 122 bp, Homo sapiens
  misc_feature (61)..(62): /note="This region represents a CpG dinucleotide"
  misc_feature (61)..(61): /note="Nucleotide may be methylated to form 5-methylcytosine"
gtgggattaagttatcgagaatagcctccttgtgatctgacgcagactcactggctgggccgtgtcttccaccagggcatctgagttgactactgagttgtatgctagtcacccagattcca

SEQ ID NO: 22308 - DNA, 122 bp, Homo sapiens
  misc_feature (61)..(62): /note="This region represents a CpG dinucleotide"
  misc_feature (61)..(61): /note="Nucleotide may be methylated to form 5-methylcytosine"
ggcttcgtccaccgaggtcccctcacccacgctgaggcgtcggaagctgcggacactgctcgcttcagggctttgctcagctgcagctggtgacctccagagagggagtctctgatgtcccg

SEQ ID NO: 22309 - DNA, 122 bp, Homo sapiens
  misc_feature (61)..(62): /note="This region represents a CpG dinucleotide"
  misc_feature (61)..(61): /note="Nucleotide may be methylated to form 5-methylcytosine"
cggtaatctaggactcccaggctttcaggaagcttaagccctggcccaaccttgattttacgtgacttcatagaaggtcctcattaccctagatgtcatatttatggacttcacaatggcat

SEQ ID NO: 22310 - DNA, 122 bp, Homo sapiens
  misc_feature (61)..(62): /note="This region represents a CpG dinucleotide"
  misc_feature (61)..(61): /note="Nucleotide may be methylated to form 5-methylcytosine"
tgcaatgccggccaacttccaaattctgattttaaaaaaaaaaaaagccaaagcctgcatcgctaagcctaacagtcaacaaaaagaaagcagaatgaagacaagaaagcggtaagaaatgg

SEQ ID NO: 22311 - DNA, 122 bp, Homo sapiens
  misc_feature (61)..(62): /note="This region represents a CpG dinucleotide"
  misc_feature (61)..(61): /note="Nucleotide may be methylated to form 5-methylcytosine"
gaaatcacattccctatcttacttttgggaccagtgggctgagccttgctaagtggagaacgctgtgtgacttaggaaaccaggtttggcttgtgagctgcaaactaccttgacatggcctc

SEQ ID NO: 22312 - DNA, 122 bp, Homo sapiens
  misc_feature (61)..(62): /note="This region represents a CpG dinucleotide"
  misc_feature (61)..(61): /note="Nucleotide may be methylated to form 5-methylcytosine"
ttgtccttaagatagtagtcacagctaagtagagtaatcttaagattgaacagaaaagatcgaacaaacattatctttgcttgatgatagacattaattagtagatgggcattagtcaccac

SEQ ID NO: 22313 - DNA, 122 bp, Homo sapiens
  misc_feature (61)..(62): /note="This region represents a CpG dinucleotide"
  misc_feature (61)..(61): /note="Nucleotide may be methylated to form 5-methylcytosine"
tctcacctgctgccttgtaacatttgcctacttcctctttcactgtgattgtaagtttcccgaggcctccccagccatgcagaactgtgagtcaattaaaactcttgcctttataaattacc

SEQ ID NO: 22314 - DNA, 122 bp, Homo sapiens
  misc_feature (61)..(62): /note="This region represents a CpG dinucleotide"
  misc_feature (61)..(61): /note="Nucleotide may be methylated to form 5-methylcytosine"
agagtgaccaagttttacactttttgcaaatacctttgtttggcttaatagaagacaggccgattcttacatctgtttttacattcagtctgttatgacatgttatactggttgaagtacat

SEQ ID NO: 22315 - DNA, 122 bp, Homo sapiens
  misc_feature (61)..(62): /note="This region represents a CpG dinucleotide"
  misc_feature (61)..(61): /note="Nucleotide may be methylated to form 5-methylcytosine"
actttaaagattctttcaaacccctatttagtatttgttcttcgtgggattagaagaattcgatttttcccttggctccataatcttgtgtaatagtacccctatacacaagggatacacac

SEQ ID NO: 22316 - DNA, 122 bp, Homo sapiens
  misc_feature (61)..(62): /note="This region represents a CpG dinucleotide"
  misc_feature (61)..(61): /note="Nucleotide may be methylated to form 5-methylcytosine"
caaactcttgacatcaggtgatccgcccgccttggcctcccaaagtgttgggattacaggcgtaagccactgtgcctggccaggctgttatttttggaagcatgatagttatataggcctaa

SEQ ID NO: 22317 - DNA, 122 bp, Homo sapiens
  misc_feature (61)..(62): /note="This region represents a CpG dinucleotide"
  misc_feature (61)..(61): /note="Nucleotide may be methylated to form 5-methylcytosine"
ctctccacaggctccacttttaattgcagtttccatgacagtgagattgttgcaagaaagcgagaaagattgtgcgtgtactaggaaaatgtttatgaaaattcacatgtttctttttttct

SEQ ID NO: 22318 - DNA, 122 bp, Homo sapiens
  misc_feature (61)..(62): /note="This region represents a CpG dinucleotide"
  misc_feature (61)..(61): /note="Nucleotide may be methylated to form 5-methylcytosine"
ttggacaggatagaggtgcttgaaactcacttgtgggacacaatttcttcattgcacatccgtgaatcagagatacctttactgttccaccccggtcctcataaatgcatgtgtttcagtaa

SEQ ID NO: 22319 - DNA, 122 bp, Homo sapiens
  misc_feature (61)..(62): /note="This region represents a CpG dinucleotide"
  misc_feature (61)..(61): /note="Nucleotide may be methylated to form 5-methylcytosine"
taaggcagaacccaaggaagccttaggctcaggtctctgcctgaaggtaggctggggaggcggagagggacagagggaagaatcccctggacaccgcgcctcagggaggcccaggggtaagg

SEQ ID NO: 22320 - DNA, 122 bp, Homo sapiens
  misc_feature (61)..(62): /note="This region represents a CpG dinucleotide"
  misc_feature (61)..(61): /note="Nucleotide may be methylated to form 5-methylcytosine"
acgtcctaccctccccaattctgcattatggatggggtgaatcatctggtaaataattaacgagtcatcgaggcactgagggtaacaggagagcaggggtggaggcatgggcagggctaaag

SEQ ID NO: 22321 - DNA, 122 bp, Homo sapiens
  misc_feature (61)..(62): /note="This region represents a CpG dinucleotide"
  misc_feature (61)..(61): /note="Nucleotide may be methylated to form 5-methylcytosine"
cgtgcagccacttcagtgaggcaatgtgtgctctcttctactatccactatcgcctccaccgccctcaatgagcagaagcaacgtgaccttagtttcaagggcaactacaaaagcaagttaa

SEQ ID NO: 22322 - DNA, 122 bp, Homo sapiens
  misc_feature (61)..(62): /note="This region represents a CpG dinucleotide"
  misc_feature (61)..(61): /note="Nucleotide may be methylated to form 5-methylcytosine"
gcctcagtctgtgagtcttccctgggacctgtttccccaagtggtgccgaggcaaatggccggatgacgacatttcaagggtgttattggccatctgaaggatctgggactttccctttttt

SEQ ID NO: 22323 - DNA, 122 bp, Homo sapiens
  misc_feature (61)..(62): /note="This region represents a CpG dinucleotide"
  misc_feature (61)..(61): /note="Nucleotide may be methylated to form 5-methylcytosine"
tctcacagggaggaagaggccaatgggctcgtggtcactgccagagctatgacaggcacccgcgtgcctttgagggggtccaggtctcagctgccttctgggtcacctgaggcaccttcatg

SEQ ID NO: 22324 - DNA, 122 bp, Homo sapiens
  misc_feature (61)..(62): /note="This region represents a CpG dinucleotide"
  misc_feature (61)..(61): /note="Nucleotide may be methylated to form 5-methylcytosine"
tgtactgcagatacatttagcaggatacatttacactgcttgtggttaaaggttatagcacggatacagacagctgatcatgcatttttctacaagcctgccggcaccatttaggattttga

SEQ ID NO: 22325 - DNA, 122 bp, Homo sapiens
  misc_feature (61)..(62): /note="This region represents a CpG dinucleotide"
  misc_feature (61)..(61): /note="Nucleotide may be methylated to form 5-methylcytosine"
catctactcacctttcaagtttctcatgccagtgcctgactccattagttacccatattacgcatgtgaaaaacctggtggcacctaagatgtcttcatctcccacagcccctacttacaat

SEQ ID NO: 22326 - DNA, 122 bp, Homo sapiens
  misc_feature (61)..(62): /note="This region represents a CpG dinucleotide"
  misc_feature (61)..(61): /note="Nucleotide may be methylated to form 5-methylcytosine"
tcatagttcactttgctttattctgccctttaagaagatattcacagtctttgggaacaacgaatagagttctggtcaatttggctttagttaagaaggtgactctgttatcctctccctag

SEQ ID NO: 22327 - DNA, 122 bp, Homo sapiens
  misc_feature (61)..(62): /note="This region represents a CpG dinucleotide"
  misc_feature (61)..(61): /note="Nucleotide may be methylated to form 5-methylcytosine"
tctcagagctccctgccccagccagcctctctaatggctcctacggtgaagttctgttagcgcttccattggaaacctaccagaatggctgggttctggcatggtgccctctcacgaaagct

SEQ ID NO: 22328 - DNA, 122 bp, Homo sapiens
  misc_feature (61)..(62): /note="This region represents a CpG dinucleotide"
  misc_feature (61)..(61): /note="Nucleotide may be methylated to form 5-methylcytosine"
tgggtgaggcagtgtggggagagggcaggggcacacatacctgagccgagacaccacccccgcccgccgtcagagcatccggagtgtggtgaccatgttagtattcagcacaagcgcgcgcg

SEQ ID NO: 22329 - DNA, 122 bp, Homo sapiens
  misc_feature (61)..(62): /note="This region represents a CpG dinucleotide"
  misc_feature (61)..(61): /note="Nucleotide may be methylated to form 5-methylcytosine"
actgaagaactagagtgtcactgctggtgaactgtggcacggttgctcaacacatcacctcggacaaattcaggaagcatttctttagcccacaagtccagacccaggtgctctgtatgttt

SEQ ID NO: 22330 - DNA, 122 bp, Homo sapiens
  misc_feature (61)..(62): /note="This region represents a CpG dinucleotide"
  misc_feature (61)..(61): /note="Nucleotide may be methylated to form 5-methylcytosine"
acacggtcactcagccgtctttattttcagtgagtcataggtaaaatattcttcaccaggcgaggattgagtcgcagtcgcgtcaggaactcgcctccaggtactgagcgagcgagccccga

SEQ ID NO: 22331 - DNA, 122 bp, Homo sapiens
  misc_feature (61)..(62): /note="This region represents a CpG dinucleotide"
  misc_feature (61)..(61): /note="Nucleotide may be methylated to form 5-methylcytosine"
gttgaggttactcagttcaggaaactctttcagctaggggtgccctatcattcagcagaccgtgtgtttcctggaaacagagcaggggtagctggtgaagggctgtcagtgaggccaggggc

SEQ ID NO: 22332 - DNA, 122 bp, Homo sapiens
  misc_feature (61)..(62): /note="This region represents a CpG dinucleotide"
  misc_feature (61)..(61): /note="Nucleotide may be methylated to form 5-methylcytosine"
aggaccatttcatcacttccctggggagcccactcattcattcagtgaagatttctctcccgatacccacttcaggaacccaggggccatctggaacagctctgggcaatggttcttatcct

SEQ ID NO: 22333 - DNA, 122 bp, Homo sapiens
  misc_feature (61)..(62): /note="This region represents a CpG dinucleotide"
  misc_feature (61)..(61): /note="Nucleotide may be methylated to form 5-methylcytosine"
ctgggcccctcagacctggcctagctcctgctgggtggaggcacagcatgaggtgaggcgcgtgtgtctatctccatcagctagatcctcaaagcattcaaggtcagaactggggtcttccc

SEQ ID NO: 22334 - DNA, 122 bp, Homo sapiens
  misc_feature (61)..(62): /note="This region represents a CpG dinucleotide"
  misc_feature (61)..(61): /note="Nucleotide may be methylated to form 5-methylcytosine"
tgaggacttccagaaccaaaacttgttatagattggttattattttcagtttctccttcccgccctaggaaagtattattacatatccacaccctttgccatgttacttggcagtgcttccc

SEQ ID NO: 22335 - DNA, 122 bp, Homo sapiens
  misc_feature (61)..(62): /note="This region represents a CpG dinucleotide"
  misc_feature (61)..(61): /note="Nucleotide may be methylated to form 5-methylcytosine"
tatgtcacaagtgtattccattaggccagtggttctcaactgggggcaattttgcccacccgtagagtatattttgcaatgtctgaaggcatttttcgttgtcacatcttggaggttgctac

SEQ ID NO: 22336 - DNA, 122 bp, Homo sapiens
  misc_feature (61)..(62): /note="This region represents a CpG dinucleotide"
  misc_feature (61)..(61): /note="Nucleotide may be methylated to form 5-methylcytosine"
cctctgctgtaggctgtggttgagctccacactgaggctctttactgcactgcattctgacggctgagaatgaaagtgtccttctgaacagatgaacttgaaatcgactcacctcagagccg

SEQ ID NO: 22337 - DNA, 122 bp, Homo sapiens
  misc_feature (61)..(62): /note="This region represents a CpG dinucleotide"
  misc_feature (61)..(61): /note="Nucleotide may be methylated to form 5-methylcytosine"
cgagttctgcagccaaagcaaaatggcatacagtatcttcttatttgggaagaggatgtccgtttgttacccaaaagaagcatagcttttcctagcgctgaatttcaaaagcaatttttaat

SEQ ID NO: 22338 - DNA, 122 bp, Homo sapiens
  misc_feature (61)..(62): /note="This region represents a CpG dinucleotide"
  misc_feature (61)..(61): /note="Nucleotide may be methylated to form 5-methylcytosine"
cacccacaaggaagggaggtggacacgtacacacacaaacacacacttcaatcaggaactcggtgatcacatgcccacggtgagagagaaaaaaggaaacacgaccccacagcttcctctgc

SEQ ID NO: 22339 - DNA, 122 bp, Homo sapiens
  misc_feature (61)..(62): /note="This region represents a CpG dinucleotide"
  misc_feature (61)..(61): /note="Nucleotide may be methylated to form 5-methylcytosine"
gagtgcgcctggctagtgtgtagtttcagagtgcggtctatggggctcccctgggcccttcgcaggtgcagcctgcctggggtttcccacaggcagtactctacacagcctgccttttggtt

SEQ ID NO: 22340 - DNA, 122 bp, Homo sapiens
  misc_feature (61)..(62): /note="This region represents a CpG dinucleotide"
  misc_feature (61)..(61): /note="Nucleotide may be methylated to form 5-methylcytosine"
agagattttaaagcaggaatgaggctgagttctctgcggccggagcctcagttttcgactcgctacaaagttatgaacacactggcagccaagaagtatttatactcaccccatgccatcca

SEQ ID NO: 22341 - DNA, 122 bp, Homo sapiens
  misc_feature (61)..(62): /note="This region represents a CpG dinucleotide"
  misc_feature (61)..(61): /note="Nucleotide may be methylated to form 5-methylcytosine"
agtcatatgtgtgacaaaacccagctgcttcaactggaaatgagtttggcagcaatggtccggaacaccaataaattgaatacccaagagctaaaggtcatcctgcccccagaaccagtgct

SEQ ID NO: 22342 - DNA, 122 bp, Homo sapiens
  misc_feature (61)..(62): /note="This region represents a CpG dinucleotide"
  misc_feature (61)..(61): /note="Nucleotide may be methylated to form 5-methylcytosine"
caggagtcagcaatgcacagatgaggcccaacagagaattccccatgatgatggggacaccgctcagttgccaccaatgccttcttcagactagttcacaggtcatactatgcaaagccagg

SEQ ID NO: 22343 - DNA, 122 bp, Homo sapiens
  misc_feature (61)..(62): /note="This region represents a CpG dinucleotide"
  misc_feature (61)..(61): /note="Nucleotide may be methylated to form 5-methylcytosine"
ggctttattcttatgatcagaaagttaagtgtgacagagttatgactaattcacaggtaacgcaagctccagaggagagcactcaggaaatagattggcatgtgtgctatttttactgcctc

SEQ ID NO: 22344 - DNA, 122 bp, Homo sapiens
  misc_feature (61)..(62): /note="This region represents a CpG dinucleotide"
  misc_feature (61)..(61): /note="Nucleotide may be methylated to form 5-methylcytosine"
aaaaagtaaagtggcctggggcccctgagtaatgattagcccagctctaatcctgtagtccgtgaagcctccgtgatctcaaattgtcattattcactatgtaaaatagtaaggaagttagt

SEQ ID NO: 22345 - DNA, 122 bp, Homo sapiens
  misc_feature (61)..(62): /note="This region represents a CpG dinucleotide"
  misc_feature (61)..(61): /note="Nucleotide may be methylated to form 5-methylcytosine"
tgttttggcagataaacctctcataatgaaggcccccgctgtgcttgcacctggcatcctcgtgctcctgtttaccttggtgcagaggagcaatggggagtgtaaagaggcactagcaaagt

SEQ ID NO: 22346 - DNA, 122 bp, Homo sapiens
  misc_feature (61)..(62): /note="This region represents a CpG dinucleotide"
  misc_feature (61)..(61): /note="Nucleotide may be methylated to form 5-methylcytosine"
cacatttctgtagtttcaagacaggagttaacccaagaatgacaaacttccttgacttggcgatttagaaaaaattacggcccagtttggtcagctaagaggcacacccaagaaacagcttt

SEQ ID NO: 22347 - DNA, 122 bp, Homo sapiens
  misc_feature (61)..(62): /note="This region represents a CpG dinucleotide"
  misc_feature (61)..(61): /note="Nucleotide may be methylated to form 5-methylcytosine"
gagcccatttccctgcagcacagttacatcatcatcaagagaatgcattccccaaatccacggcttcctaatccattagcacaacaggctggtggagagcttggctttctcagtcacatggg

SEQ ID NO: 22348 - DNA, 122 bp, Homo sapiens
  misc_feature (61)..(62): /note="This region represents a CpG dinucleotide"
  misc_feature (61)..(61): /note="Nucleotide may be methylated to form 5-methylcytosine"
caggcgtgcgtccctccccacgtcctggtgaggccagccatgtttctaggagtctcaggccgactcagtgtgtagtgagagaaggtaaacgtaggggaaagaaaattaaaatgctcaaagag

SEQ ID NO: 22349 - DNA, 122 bp, Homo sapiens
  misc_feature (61)..(62): /note="This region represents a CpG dinucleotide"
  misc_feature (61)..(61): /note="Nucleotide may be methylated to form 5-methylcytosine"
ttgctgggaggtagtattttgaagaaaatttaaaacctctttggagtgatagcctataatcggtgttcctgcatgtgaaataaaaccacaaaactgtgaacatgcagtacaaaggtaaacac

SEQ ID NO: 22350 - DNA, 122 bp, Homo sapiens
  misc_feature (61)..(62): /note="This region represents a CpG dinucleotide"
  misc_feature (61)..(61): /note="Nucleotide may be methylated to form 5-methylcytosine"
cagcacagattataggcagggctccatttacataaattatgcaatgtagtcttcatgaggcgctgacctgagactgaagttatgcaaggccactggcattaactttgttgttcattacagcg

SEQ ID NO: 22351 - DNA, 122 bp, Homo sapiens
  misc_feature (61)..(62): /note="This region represents a CpG dinucleotide"
  misc_feature (61)..(61): /note="Nucleotide may be methylated to form 5-methylcytosine"
ccagaactccatggtgaaccctcccacatatttgccctaaagacacaaacactggttgaacggagttgtggcaaataagaaagaggaaaacccaacccagaatactgcgctgtgtgtcaaat

SEQ ID NO: 22352 - DNA, 122 bp, Homo sapiens
  misc_feature (61)..(62): /note="This region represents a CpG dinucleotide"
  misc_feature (61)..(61): /note="Nucleotide may be methylated to form 5-methylcytosine"
gtgtctgctgccactgggaaccagatgcagctgctattgctgctgtggccctggccagagcggattctgcatcatccctgatgctctgagtcaccagccccgaaccaaagtcaacagaggat

SEQ ID NO: 22353 - DNA, 122 bp, Homo sapiens
  misc_feature (61)..(62): /note="This region represents a CpG dinucleotide"
  misc_feature (61)..(61): /note="Nucleotide may be methylated to form 5-methylcytosine"
cccctattttacagataaggaaactaaatgtcagagagttcaataattttcccaagatcacgaagccaataagtgatggagtcatgacttaaattcaggtcttttggtgacacaacccagac

SEQ ID NO: 22354 - DNA, 122 bp, Homo sapiens
  misc_feature (61)..(62): /note="This region represents a CpG dinucleotide"
  misc_feature (61)..(61): /note="Nucleotide may be methylated to form 5-methylcytosine"
tactggcaggtctggcagcatctggcagtttccgtgacatatttaggacactggactattcggcaaagctctgcaacccattgcctagggctttgttttcctagatgaactgagtacctcct

SEQ ID NO: 22355 - DNA, 122 bp, Homo sapiens
  misc_feature (61)..(62): /note="This region represents a CpG dinucleotide"
  misc_feature (61)..(61): /note="Nucleotide may be methylated to form 5-methylcytosine"
gtggcatgtgccaataatcccagctactcaggaggctgaggcaggagaattacttgaacccgggagacagagtttgtggtaaactgggatcacaccagtgcactccatcctgggcaacagaa

SEQ ID NO: 22356 - DNA, 122 bp, Homo sapiens
  misc_feature (61)..(62): /note="This region represents a CpG dinucleotide"
  misc_feature (61)..(61): /note="Nucleotide may be methylated to form 5-methylcytosine"
cacgtcgtctttgacctgcttttaaagcacattcccgtgtgtcgtgaacaacgctgtccccggcgtctgctcatcaagaggtgcgaggtgcttctgccggtttctcctccgctggggacgca

SEQ ID NO: 22357 - DNA, 122 bp, Homo sapiens
  misc_feature (61)..(62): /note="This region represents a CpG dinucleotide"
  misc_feature (61)..(61): /note="Nucleotide may be methylated to form 5-methylcytosine"
ctccattattgtttcttagatttccttgtgaccaaactctcattactgctatctctctgacggcagttgtaaaatactgtcaattgtagggcatatcctgatttcagggctgtaattggaaa

SEQ ID NO: 22358 - DNA, 122 bp, Homo sapiens
  misc_feature (61)..(62): /note="This region represents a CpG dinucleotide"
  misc_feature (61)..(61): /note="Nucleotide may be methylated to form 5-methylcytosine"
ggctttattacagatcttttcttacccaaatttcttgcttctaggttagaaatcaccctacgaagaaattagccatgttattcacagacagcattgcttttaaaaaatttaaagccacatca

SEQ ID NO: 22359 - DNA, 122 bp, Homo sapiens
  misc_feature (61)..(62): /note="This region represents a CpG dinucleotide"
  misc_feature (61)..(61): /note="Nucleotide may be methylated to form 5-methylcytosine"
aggctttggaagtaacaacgacagcatgtggacctcatcacatccttactagaccccaagcggtaaccactgctctaaagttagtaacagctgattcataatcaaataagctgaggttgaaa

SEQ ID NO: 22360 - DNA, 122 bp, Homo sapiens
  misc_feature (61)..(62): /note="This region represents a CpG dinucleotide"
  misc_feature (61)..(61): /note="Nucleotide may be methylated to form 5-methylcytosine"
gagcgactgtaaatacagataaagcttcgctgactcattcgctgctcacctcctgctgtgcggaccagttcctaacaggccatggacccataccagtttgtgacccaggggattagggaccc

SEQ ID NO: 22361 - DNA, 122 bp, Homo sapiens
  misc_feature (61)..(62): /note="This region represents a CpG dinucleotide"
  misc_feature (61)..(61): /note="Nucleotide may be methylated to form 5-methylcytosine"
cggggtttcaccatgttggccaggctggtcttgaactcctgtcttctgagtcgatccacccgcctcagcctctcaaagtgctgggattacaggcgtgagccactgcacccggcctgttctag

SEQ ID NO: 22362 - DNA, 122 bp, Homo sapiens
  misc_feature (61)..(62): /note="This region represents a CpG dinucleotide"
  misc_feature (61)..(61): /note="Nucleotide may be methylated to form 5-methylcytosine"
tgggaaccgaggcctcagtggctgctcaaggtcccttccgtcatttgaatctcaaagagtcgcagtcagtgacactcagaggcaggattccaactcagagagactgagtatcaatgaccaca

SEQ ID NO: 22363 - DNA, 122 bp, Homo sapiens
  misc_feature (61)..(62): /note="This region represents a CpG dinucleotide"
  misc_feature (61)..(61): /note="Nucleotide may be methylated to form 5-methylcytosine"
acaaggagtagtcagccagctcatagctgtgacttttctgttccgagggaaagcagcttgcgagctgcagtgtccaggagcagagaaaagcacagtcactgaaccctatgaaattttaacaa

SEQ ID NO: 22364 - DNA, 122 bp, Homo sapiens
  misc_feature (61)..(62): /note="This region represents a CpG dinucleotide"
  misc_feature (61)..(61): /note="Nucleotide may be methylated to form 5-methylcytosine"
aacacctctgatagtcttgctctgtcacccaggctggagtgttgttggttcactggaacacgagtatttatgttttatttcttaagcttagtgatgtgtgtcagacctctgagcccaagcaa

SEQ ID NO: 22365 - DNA, 122 bp, Homo sapiens
  misc_feature (61)..(62): /note="This region represents a CpG dinucleotide"
  misc_feature (61)..(61): /note="Nucleotide may be methylated to form 5-methylcytosine"
caggaaacaaggtttcctataactcagacccatgaatcagcatttcctctgtcaataatacgcagccagaaatgcaacagcacagagctcggggaatggaagaaaggaaggaatattccatg

SEQ ID NO: 22366 - DNA, 122 bp, Homo sapiens
  misc_feature (61)..(62): /note="This region represents a CpG dinucleotide"
  misc_feature (61)..(61): /note="Nucleotide may be methylated to form 5-methylcytosine"
accagattaacaacaacaacaaagcatacaaatttattttttatgtgatacctgagccttcggaaacaaagacccaaagaaacagggaagcctgtgtgttgttaaatttaacaagtggacag

SEQ ID NO: 22367 - DNA, 122 bp, Homo sapiens
  misc_feature (61)..(62): /note="This region represents a CpG dinucleotide"
  misc_feature (61)..(61): /note="Nucleotide may be methylated to form 5-methylcytosine"
gcaacaatgacaaacataccctgggatgctttccctctgtggtttgttatagtaagatagcggctacagcttatatatcatcaacagaggactggctaaatgatggcacttcattctgcaga

SEQ ID NO: 22368 - DNA, 122 bp, Homo sapiens
  misc_feature (61)..(62): /note="This region represents a CpG dinucleotide"
  misc_feature (61)..(61): /note="Nucleotide may be methylated to form 5-methylcytosine"
gtaactgccaatgagtaagaaagagccaacctcagcttctttaatctctccccaaatgggcggaagaaccgtaggctctcactgaggttcctgcagtatctataaaaagaaccggaaggaca

SEQ ID NO: 22369 - DNA, 122 bp, Homo sapiens
  misc_feature (61)..(62): /note="This region represents a CpG dinucleotide"
  misc_feature (61)..(61): /note="Nucleotide may be methylated to form 5-methylcytosine"
tggaatctggaatctgggactggcttgctgggtggcttcagctcagcctcatgaggttgccgtcaggccatgggctggagtcgctgtcttcccagggctgtagaatctgctttcagggtgac

SEQ ID NO: 22370 - DNA, 122 bp, Homo sapiens
  misc_feature (61)..(62): /note="This region represents a CpG dinucleotide"
  misc_feature (61)..(61): /note="Nucleotide may be methylated to form 5-methylcytosine"
cattaatgctagtcagctgttgagtctaaattccaaaatggagggggtagacttcccttccggctgtagctagaaactcagctttaaggtttttctggggtctgcttggccaaggaggtcca

SEQ ID NO: 22371 - DNA, 122 bp, Homo sapiens
  misc_feature (61)..(62): /note="This region represents a CpG dinucleotide"
  misc_feature (61)..(61): /note="Nucleotide may be methylated to form 5-methylcytosine"
cctgtgatttttctcaagctgccaacacaggtacagaatgcagctttcttagcttggggacgtttaccttcctgtgatggtgttaagatagatgggttggaggaaccaaagttttatggcct

SEQ ID NO: 22372 - DNA, 122 bp, Homo sapiens
  misc_feature (61)..(62): /note="This region represents a CpG dinucleotide"
  misc_feature (61)..(61): /note="Nucleotide may be methylated to form 5-methylcytosine"
ttgcactgcaaataatccttttcattctggtcacctgcatgctcttcactcaggtgaccacgtggcttacttcctcactcccttccagtctttgctcaaaagtcatctcctcaatgagacct

SEQ ID NO: 22373 - DNA, 122 bp, Homo sapiens
  misc_feature (61)..(62): /note="This region represents a CpG dinucleotide"
  misc_feature (61)..(61): /note="Nucleotide may be methylated to form 5-methylcytosine"
gcatggcgtgtcagaagacttggggctgtggcgtgaccttgagtgagtcactccacttcccgcagcttcaaagtcttcatctaaaatgcaggtcatgctgcctgcattgtggggaagattag

SEQ ID NO: 22374 - DNA, 122 bp, Homo sapiens
  misc_feature (61)..(62): /note="This region represents a CpG dinucleotide"
  misc_feature (61)..(61): /note="Nucleotide may be methylated to form 5-methylcytosine"
agcacagctttatacaacaaacacagtaaagactgatttgcctccaccctcctctgaaagcgagcaaatagatttgactgaggaacagaaggatgactcagaatggttaagcagcgatgtga

SEQ ID NO: 22375 - DNA, 122 bp, Homo sapiens
  misc_feature (61)..(62): /note="This region represents a CpG dinucleotide"
  misc_feature (61)..(61): /note="Nucleotide may be methylated to form 5-methylcytosine"
tcaaaatacttagtgaataaggaaggaactgaaacttgaatttgacttctcttgctgccacgcttcagcagacaactattcctgtggaattaagtccactgaataaccaaatagaccaattc

SEQ ID NO: 22376 - DNA, 122 bp, Homo sapiens
  misc_feature (61)..(62): /note="This region represents a CpG dinucleotide"
  misc_feature (61)..(61): /note="Nucleotide may be methylated to form 5-methylcytosine"
tttctatttctaactcaatgccaggcactgagcactgtgctcaacctagtaatttggagacggaggtggatatgcatataacagaacaggatgctctccggacaaacgttctgaaggaaaag

SEQ ID NO: 22377 - DNA, 122 bp, Homo sapiens
  misc_feature (61)..(62): /note="This region represents a CpG dinucleotide"
  misc_feature (61)..(61): /note="Nucleotide may be methylated to form 5-methylcytosine"
gacaggggtaaggaggaagctgctgaaccctgctaagaagatgggaggcctggtctaattcgagaaccagacacggcaggccctgtcttctgggctcagcccagtgagaagctggagcagca

SEQ ID NO: 22378 - DNA, 122 bp, Homo sapiens
  misc_feature (61)..(62): /note="This region represents a CpG dinucleotide"
  misc_feature (61)..(61): /note="Nucleotide may be methylated to form 5-methylcytosine"
agggtattgaatcttgtgggggtgagtcaaacattcagaatctgaaggttatgaggtggacggagaacttggggagaatggaacagtcattcacaacacatgtactgtagacagctcaggca

SEQ ID NO: 22379 - DNA, 122 bp, Homo sapiens
  misc_feature (61)..(62): /note="This region represents a CpG dinucleotide"
  misc_feature (61)..(61): /note="Nucleotide may be methylated to form 5-methylcytosine"
attaaatagtgctagatactggaaaagtgacaacatttataactcatatattaccatgcacggggaaaacagtatacacattattaaatctaatataatccacttttttaatgagttaaaaa

SEQ ID NO: 22380 - DNA, 122 bp, Homo sapiens
  misc_feature (61)..(62): /note="This region represents a CpG dinucleotide"
  misc_feature (61)..(61): /note="Nucleotide may be methylated to form 5-methylcytosine"
agccctttaactctctgaggctccgtgttctcagagtgactcgaggattcactgaggtgccgtgtgagaagtgggtggcccagacctggacacaaagaagccttgatcaatgtttgcagttt

SEQ ID NO: 22381 - DNA, 122 bp, Homo sapiens
  misc_feature (61)..(62): /note="This region represents a CpG dinucleotide"
  misc_feature (61)..(61): /note="Nucleotide may be methylated to form 5-methylcytosine"
tgaattgtaacaagacttgaaatacaggacttttttaatctagtggttctttatttataacgtaggctgaagcaattgttacaatgtaggagggagacacattacacaattgttatttatac

SEQ ID NO: 22382 - DNA, 122 bp, Homo sapiens
  misc_feature (61)..(62): /note="This region represents a CpG dinucleotide"
  misc_feature (61)..(61): /note="Nucleotide may be methylated to form 5-methylcytosine"
gtcactcaaggctacaccataaagggtgaatcattcaaggttacaataagaagggtgaatcgttaaaggctatagcatgaagggtgcattattcatggttacaacagagagaaggatgcatc

SEQ ID NO: 22383 - DNA, 122 bp, Homo sapiens
  misc_feature (61)..(62): /note="This region represents a CpG dinucleotide"
  misc_feature (61)..(61): /note="Nucleotide may be methylated to form 5-methylcytosine"
ggctgggtgtgtgtgccgcctctgtgtgagcatgtgctagtcacacagctgggatatggccgtgttttggttccagctctttgggctagagccacgccgcagtagtgatagctccatttggg

SEQ ID NO: 22384 - DNA, 122 bp, Homo sapiens
  misc_feature (61)..(62): /note="This region represents a CpG dinucleotide"
  misc_feature (61)..(61): /note="Nucleotide may be methylated to form 5-methylcytosine"
cctgtctttctgttcctcaatgttaagttgtgctgctgtatcaccagcgtcacgtgaaagcgtcactctctgcacgacctcctctcccagtttttttaacccacttttgccactgaaccttc

SEQ ID NO: 22385 - DNA, 122 bp, Homo sapiens
  misc_feature (61)..(62): /note="This region represents a CpG dinucleotide"
  misc_feature (61)..(61): /note="Nucleotide may be methylated to form 5-methylcytosine"
ataagataaaccttttaataaccatttcttataggcactgagtagtttgtaggtgggcatcgaatttccaatgtggaaattatgctgaaaaaactgtctcccagcaggggtatttattttct

SEQ ID NO: 22386 - DNA, 122 bp, Homo sapiens
  misc_feature (61)..(62): /note="This region represents a CpG dinucleotide"
  misc_feature (61)..(61): /note="Nucleotide may be methylated to form 5-methylcytosine"
tgcaaagattcagctctaatttcatttccatcacaaaagaattggcaaataactaaagcacgggaacacataactaaagtgcggctgtgctagtcataagcctataataaagcacagatttg

SEQ ID NO: 22387 - DNA, 122 bp, Homo sapiens
  misc_feature (61)..(62): /note="This region represents a CpG dinucleotide"
  misc_feature (61)..(61): /note="Nucleotide may be methylated to form 5-methylcytosine"
caacgtgatgtattaattttagggcaaaatgaatggtgctgtgatcattgtgggtaattacgagtctcctcaaagaggaagtgatttctggagggacttttctgacctccttcgcggcagga

SEQ ID NO: 22388 - DNA, 122 bp, Homo sapiens
  misc_feature (61)..(62): /note="This region represents a CpG dinucleotide"
  misc_feature (61)..(61): /note="Nucleotide may be methylated to form 5-methylcytosine"
atgtatattccttacgtctattttcccagggactgactccttttaaataagcatctcaggcgggcgcggtggctcacacctgtaatcccagcactttgcagggcggaggtgggcggatcacc

SEQ ID NO: 22389 - DNA, 122 bp, Homo sapiens
  misc_feature (61)..(62): /note="This region represents a CpG dinucleotide"
  misc_feature (61)..(61): /note="Nucleotide may be methylated to form 5-methylcytosine"
acaccctgtaggcactgagtgattactctgtataactgtttcctgatgtatatcaaaccacgctgtaatgtaaagcctgccacaaaaccacactcatgttaaagaagtaaatacagcaagta

SEQ ID NO: 22390 - DNA, 122 bp, Homo sapiens
  misc_feature (61)..(62): /note="This region represents a CpG dinucleotide"
  misc_feature (61)..(61): /note="Nucleotide may be methylated to form 5-methylcytosine"
tggtatttccttactatccttctagagttgggagaatatgattaatcaaacctgacctgacgaccatgagttttcagagtggttccataggagcttagtgaacctgcatcataggtagaaag

SEQ ID NO: 22391 - DNA, 122 bp, Homo sapiens
  misc_feature (61)..(62): /note="This region represents a CpG dinucleotide"
  misc_feature (61)..(61): /note="Nucleotide may be methylated to form 5-methylcytosine"
gatatcatttacccatatgttattgcatgccagatattgtgtcagtctgagatacacagacgaatgatccctaccttgggtatcttgtttaacagactatggaagacagacatgtgaataag

SEQ ID NO: 22392 - DNA, 122 bp, Homo sapiens
  misc_feature (61)..(62): /note="This region represents a CpG dinucleotide"
  misc_feature (61)..(61): /note="Nucleotide may be methylated to form 5-methylcytosine"
cacatgtattaactgtcttctgtgttgcagcatctgagttctttctcatgttcggacatgcgctgtccttgaagaatttgagtagacagtgtaaacgcccatgcgtggcgaacagcataagc

SEQ ID NO: 22393 - DNA, 122 bp, Homo sapiens
  misc_feature (61)..(62): /note="This region represents a CpG dinucleotide"
  misc_feature (61)..(61): /note="Nucleotide may be methylated to form 5-methylcytosine"
aattaactgtacactatttaatccaccagttccggttcattagaaaaatgcagttctcgccggacatggtggctcacacctgtaatcccagcaattctggaggccaaggtgggcagattgct

SEQ ID NO: 22394 - DNA, 122 bp, Homo sapiens
  misc_feature (61)..(62): /note="This region represents a CpG dinucleotide"
  misc_feature (61)..(61): /note="Nucleotide may be methylated to form 5-methylcytosine"
caaacataatcaagaaagaaaacaattttactattgaataaacattaaaccagaacgtaacgcgtatcacgaacaattcactggagagattgcaatggtgaaaagaaatctttcatagagca

SEQ ID NO: 22395 - DNA, 122 bp, Homo sapiens
  misc_feature (61)..(62): /note="This region represents a CpG dinucleotide"
  misc_feature (61)..(61): /note="Nucleotide may be methylated to form 5-methylcytosine"
gatgaatgaaaatcaaaattatcataaatgtgtttacctccatctagactcctggagacccgtttactagaagtgcgctcaaagtgtggtgctggcctatctatgagggtgctggcctggcg

SEQ ID NO: 22396 - DNA, 122 bp, Homo sapiens
  misc_feature (61)..(62): /note="This region represents a CpG dinucleotide"
  misc_feature (61)..(61): /note="Nucleotide may be methylated to form 5-methylcytosine"
tattttacacacatcagcaagactaacttttaacaacatgaatcagatgcggtcattcctcggctcacccttctctcatggtttcccgttcctgttataatggcccacaggcttcactggat

SEQ ID NO: 22397 - DNA, 122 bp, Homo sapiens
  misc_feature (61)..(62): /note="This region represents a CpG dinucleotide"
  misc_feature (61)..(61): /note="Nucleotide may be methylated to form 5-methylcytosine"
ttgtgtttttatttgatctttaataaagaatattaagactgagctgactgcctgctatgacgctctaaacacagacttacatttgagaggctgaagggaggaaatggcagccccgtggaaag

SEQ ID NO: 22398 - DNA, 122 bp, Homo sapiens
  misc_feature (61)..(62): /note="This region represents a CpG dinucleotide"
  misc_feature (61)..(61): /note="Nucleotide may be methylated to form 5-methylcytosine"
agggtgagtcagtcggaagttgagtccaggctcctttctttcttacaactttgtgactcccgcaagctcattcccctagaggcatcactttcatgtattgtctggagcagttcctggtatat

SEQ ID NO: 22399 - DNA, 122 bp, Homo sapiens
  misc_feature (61)..(62): /note="This region represents a CpG dinucleotide"
  misc_feature (61)..(61): /note="Nucleotide may be methylated to form 5-methylcytosine"
tccagggggtcctcaggaagcaacctgagtaaggaaatcccaccagagctaaaggacagccgcaaggctagccaagcaggtttccttccttcccagagcctccactgtgaagtgggaggttt

SEQ ID NO: 22400 - DNA, 122 bp, Homo sapiens
  misc_feature (61)..(62): /note="This region represents a CpG dinucleotide"
  misc_feature (61)..(61): /note="Nucleotide may be methylated to form 5-methylcytosine"
tgcaaatgagtttaatttatatgttacctgtctaatcacagacagatatatattaacatacgtaagagtacaaacccacattcacccatataatttataaattcagtaacaagttatgatcc

SEQ ID NO: 22401 - DNA, 122 bp, Homo sapiens
  misc_feature (61)..(62): /note="This region represents a CpG dinucleotide"
  misc_feature (61)..(61): /note="Nucleotide may be methylated to form 5-methylcytosine"
attctcaggagatgcaaatcactactgaaagctcaaaccatcagaaatttctttacaatacgttccccaggatttccaggttgtgttgttgcaatggatttggtttaagtaatggttctcaa

SEQ ID NO: 22402 - DNA, 122 bp, Homo sapiens
  misc_feature (61)..(62): /note="This region represents a CpG dinucleotide"
  misc_feature (61)..(61): /note="Nucleotide may be methylated to form 5-methylcytosine"
atgtcattacaaggcggaagtcctgcccgagaggacagtccccaggccttgctaagcatgcgtggtatcaagaggtgcattgaggcgctcctgcagcctcctcccggcacgggactcctcac

SEQ ID NO: 22403 - DNA, 122 bp, Homo sapiens
  misc_feature (61)..(62): /note="This region represents a CpG dinucleotide"
  misc_feature (61)..(61): /note="Nucleotide may be methylated to form 5-methylcytosine"
tttgttgatttttcctgctgcttaaaagcatgctcagataacgttttgaaattttccacacgtatcactcttttgaaaaggccttaacagccatgaataacctaattataaaacttttagcc

SEQ ID NO: 22404 - DNA, 122 bp, Homo sapiens
  misc_feature (61)..(62): /note="This region represents a CpG dinucleotide"
  misc_feature (61)..(61): /note="Nucleotide may be methylated to form 5-methylcytosine"
attatatttattacctgtctacagtcatgaacttgtgccattcagattcttcttattctacgttctgctttcaatactctaaaattatccttagcagttttgggaaactgttggtatcaata

SEQ ID NO: 22405 - DNA, 122 bp, Homo sapiens
  misc_feature (61)..(62): /note="This region represents a CpG dinucleotide"
  misc_feature (61)..(61): /note="Nucleotide may be methylated to form 5-methylcytosine"
agcaagcaagttaatccacatgaagggctgcaccgtctggcaggggctttatatagtaagcgagtggctgaaagatgatgggtaaatcacacaagcactcagcttgtttctccttatgtgag

SEQ ID NO: 22406 - DNA, 122 bp, Homo sapiens
  misc_feature (61)..(62): /note="This region represents a CpG dinucleotide"
  misc_feature (61)..(61): /note="Nucleotide may be methylated to form 5-methylcytosine"
tatggccgtgaaatggggggtcagttagtgcctggcagcgagccatcactgtttccataccgcttgtctcaggccagtgcctgcttaactgctagaggaaaagaaaacccaagccttattct

SEQ ID NO: 22407 - DNA, 122 bp, Homo sapiens
  misc_feature (61)..(62): /note="This region represents a CpG dinucleotide"
  misc_feature (61)..(61): /note="Nucleotide may be methylated to form 5-methylcytosine"
ccatggctaccactttgaatttattgataacttttttattattctcacatttcatgacagcgttatcaatttctgagagatgatataaagacacttcagactttatttcctgcttccttaaa

SEQ ID NO: 22408 - DNA, 122 bp, Homo sapiens
  misc_feature (61)..(62): /note="This region represents a CpG dinucleotide"
  misc_feature (61)..(61): /note="Nucleotide may be methylated to form 5-methylcytosine"
cctcctgcacaacacggttaagtcagaactcagtgatagaactgctggaccagggccaggcgcagtggctcacgcctgtaatcccagcactttgggaggctgaggcgggtggatcacctgag

SEQ ID NO: 22409 - DNA, 122 bp, Homo sapiens
  misc_feature (61)..(62): /note="This region represents a CpG dinucleotide"
  misc_feature (61)..(61): /note="Nucleotide may be methylated to form 5-methylcytosine"
tgtcagaggctgtctgaccacgcgtgaggctcgttgatggtgataggtttctatgtgtgacgctaaaacgccaggaaagaaaaggatagaaactgctaaacatgagtggaaatgagtgaaat

SEQ ID NO: 22410 - DNA, 122 bp, Homo sapiens
  misc_feature (61)..(62): /note="This region represents a CpG dinucleotide"
  misc_feature (61)..(61): /note="Nucleotide may be methylated to form 5-methylcytosine"
gacaatagtaacaagtactttataggctcattgggaggattaaataagagaatgtatacacgctgcttaacctggtgagaggtacctagctagcactcaataaatgtcagcaatcgtcatta

SEQ ID NO: 22411 - DNA, 122 bp, Homo sapiens
  misc_feature (61)..(62): /note="This region represents a CpG dinucleotide"
  misc_feature (61)..(61): /note="Nucleotide may be methylated to form 5-methylcytosine"
gcaaagacgcctgcgatttcctttggtctacagttctgtcctagacttcgttcggctgatcgatgaaggagacaagctggcccacggggaggtcaatacaatcgatgcggacctcgacgaaa

SEQ ID NO: 22412 - DNA, 122 bp, Homo sapiens
  misc_feature (61)..(62): /note="This region represents a CpG dinucleotide"
  misc_feature (61)..(61): /note="Nucleotide may be methylated to form 5-methylcytosine"
cagaagcaaccccaccccgctcaggactggagctgaggccctgcaggagaatctagtgcacgtgtgccctccctcactgaaaccaaggcccagcacatcacgcatgagcaggatgtgcagtt

SEQ ID NO: 22413 - DNA, 122 bp, Homo sapiens
  misc_feature (61)..(62): /note="This region represents a CpG dinucleotide"
  misc_feature (61)..(61): /note="Nucleotide may be methylated to form 5-methylcytosine"
tgatgtgatacaaccagaaaactgcatgggttggcacacaatgagagactcctggggacacgtccctaaaagtagctccaaggcaggaattaaaaatggttctggaagcttttgagcaactg

SEQ ID NO: 22414 - DNA, 122 bp, Homo sapiens
  misc_feature (61)..(62): /note="This region represents a CpG dinucleotide"
  misc_feature (61)..(61): /note="Nucleotide may be methylated to form 5-methylcytosine"
aactaacagctcactggctaagttttaattgcttccaatgaggtcagcaaaggtatttatcgaaaagccctgaataaaaggctcacacacacacacaagcacacacgcgctcacacacagag

SEQ ID NO: 22415 - DNA, 122 bp, Homo sapiens
  misc_feature (61)..(62): /note="This region represents a CpG dinucleotide"
  misc_feature (61)..(61): /note="Nucleotide may be methylated to form 5-methylcytosine"
cagagactgccactgacctcgaccagcagtttcagtggaatggtgagatcagaacgcagacgggagtggggcaggccatgaaggtcagggtgatgatgcagtgaagacagacaactcttgtc

SEQ ID NO: 22416 - DNA, 122 bp, Homo sapiens
  misc_feature (61)..(62): /note="This region represents a CpG dinucleotide"
  misc_feature (61)..(61): /note="Nucleotide may be methylated to form 5-methylcytosine"
ctgtgctatcacatgcatatgggaattgctaagatatctcccttttcctgactagttttccgacttttttataccattaaccattttcaggctatataaagaaagaaagattgatagaaaaa

SEQ ID NO: 22417 - DNA, 122 bp, Homo sapiens
  misc_feature (61)..(62): /note="This region represents a CpG dinucleotide"
  misc_feature (61)..(61): /note="Nucleotide may be methylated to form 5-methylcytosine"
aacaagatgttgaataaacccccagggaagaagtgagtaattgtttcttaccttatagtgcggcgtacatagagcttaacagaaagccttgtgtcttagtccattcatgctgctataataac

SEQ ID NO: 22418 - DNA, 122 bp, Homo sapiens
  misc_feature (61)..(62): /note="This region represents a CpG dinucleotide"
  misc_feature (61)..(61): /note="Nucleotide may be methylated to form 5-methylcytosine"
taaccctgctgagacagtcagtgctgtgtgggggccggggaggggccggggttccatctccgggaagaatctcatgggatctgggccctgcaacacaagggcctttgaagtgagacgaggag

SEQ ID NO: 22419 - DNA, 122 bp, Homo sapiens
  misc_feature (61)..(62): /note="This region represents a CpG dinucleotide"
  misc_feature (61)..(61): /note="Nucleotide may be methylated to form 5-methylcytosine"
aatccttaagaagctccagccgcaggcacggaaataaacagcttctccctgccctgtatacgtctccgattttacccaggatggggctgaggaagcaacacagattcccaaacgttactttt

SEQ ID NO: 22420 - DNA, 122 bp, Homo sapiens
  misc_feature (61)..(62): /note="This region represents a CpG dinucleotide"
  misc_feature (61)..(61): /note="Nucleotide may be methylated to form 5-methylcytosine"
cttaggtctaatcaacatggggttcatataatgggccactgtggtgttctgcagactgtccgggtggtctgggtcaccaccagctatattgcaacagagcagaattaatggagtcctgggga

SEQ ID NO: 22421 - DNA, 122 bp, Homo sapiens
  misc_feature (61)..(62): /note="This region represents a CpG dinucleotide"
  misc_feature (61)..(61): /note="Nucleotide may be methylated to form 5-methylcytosine"
aaagaaattccaagtctgagcccagatctatccaaaaaccttttcatattatctggagagcgtttgccaagcaaatattcctagagactaagtcaaacaaatagaacccatgcagaaacaac

SEQ ID NO: 22422 - DNA, 122 bp, Homo sapiens
  misc_feature (61)..(62): /note="This region represents a CpG dinucleotide"
  misc_feature (61)..(61): /note="Nucleotide may be methylated to form 5-methylcytosine"
taaactccaactattgtagcattttaacacatggctccatttgtgtctatttccacctagcgtattgtgaatattttctacaggcgcacactaatcaccaactgaagtgagaatcacatttt

SEQ ID NO: 22423 - DNA, 122 bp, Homo sapiens
  misc_feature (61)..(62): /note="This region represents a CpG dinucleotide"
  misc_feature (61)..(61): /note="Nucleotide may be methylated to form 5-methylcytosine"
tataaatatattccaatgtttccatgagttttcctatataaatattagctcaagattgtacgacatatatttatgttgtggctttatccagagtaagaaatgcagctcttgcaggaattgag

SEQ ID NO: 22424 - DNA, 122 bp, Homo sapiens
  misc_feature (61)..(62): /note="This region represents a CpG dinucleotide"
  misc_feature (61)..(61): /note="Nucleotide may be methylated to form 5-methylcytosine"
gcccagaaggcaagaattgcagcaggtgtgggaaattgaatggtgtggctgctcttctcccgagctgtcagctgttggcaggctgaatgaatctagctctagagctggctgcagacaatgca

SEQ ID NO: 22425 - DNA, 122 bp, Homo sapiens
  misc_feature (61)..(62): /note="This region represents a CpG dinucleotide"
  misc_feature (61)..(61): /note="Nucleotide may be methylated to form 5-methylcytosine"
gtgaacaaggtttctcagaacttacatctataataagcaagcacagaatcaatgctaaaccgtttcattctaacaacaaataatattcaaacatggatacataagttaattgaaaaaatagt

SEQ ID NO: 22426 - DNA, 122 bp, Homo sapiens
  misc_feature (61)..(62): /note="This region represents a CpG dinucleotide"
  misc_feature (61)..(61): /note="Nucleotide may be methylated to form 5-methylcytosine"
cagttaacttcctgccccaacagtaggctcacacagcagggaggacacaaaagaaaacatcgactctaaacccttcagagggaattattttgaaagaaatcaaaattagctccaacaaatat

SEQ ID NO: 22427 - DNA, 122 bp, Homo sapiens
  misc_feature (61)..(62): /note="This region represents a CpG dinucleotide"
  misc_feature (61)..(61): /note="Nucleotide may be methylated to form 5-methylcytosine"
gcatagatgtcactttagtttttcccttcactgcttctgtgaagtatgcggcttgatccccgctttacagatgaagaattgatactgaaggtttctatgtggctgacagtcactaaaccaac

SEQ ID NO: 22428 - DNA, 122 bp, Homo sapiens
  misc_feature (61)..(62): /note="This region represents a CpG dinucleotide"
  misc_feature (61)..(61): /note="Nucleotide may be methylated to form 5-methylcytosine"
acagcaaaaagggaagagacgggaaatgtgccaagatactccagggggtcagcccgggagcgggtgtaacacatacaataagcaatggccccgtgagaaggctcaggatttgcaccctcagc

SEQ ID NO: 22429 - DNA, 122 bp, Homo sapiens
  misc_feature (61)..(62): /note="This region represents a CpG dinucleotide"
  misc_feature (61)..(61): /note="Nucleotide may be methylated to form 5-methylcytosine"
gcaaaaacagacaatggagattacatcaagctaaaaagtttctgtgcagcaaacaatcaacgtaatgaagagacaacctacagaatggaagaaaatataaggaaactatacttctgacaaga

SEQ ID NO: 22430 - DNA, 122 bp, Homo sapiens
  misc_feature (61)..(62): /note="This region represents a CpG dinucleotide"
  misc_feature (61)..(61): /note="Nucleotide may be methylated to form 5-methylcytosine"
agcactcagagccaggctccactcactcaggagctcccaggcaggtgctggggcctggcgcggcacagcggctgtccgtgtgtccccagacaggcaaggcaggacaggggtcctggaaaggc

SEQ ID NO: 22431 - DNA, 122 bp, Homo sapiens
  misc_feature (61)..(62): /note="This region represents a CpG dinucleotide"
  misc_feature (61)..(61): /note="Nucleotide may be methylated to form 5-methylcytosine"
gcaggcatcacaacctgcttctctctcttcccccttcccccttccctctgtaggagtccccggtcctgacaacagatgtcccttccatcagcctgcagcagacgcccagtagcaccttgaca

SEQ ID NO: 22432 - DNA, 122 bp, Homo sapiens
  misc_feature (61)..(62): /note="This region represents a CpG dinucleotide"
  misc_feature (61)..(61): /note="Nucleotide may be methylated to form 5-methylcytosine"
gagtcagaatgattgaaaatataattcctgaataataggcacacaccaccaagttcggcacgagtgaagggtgttcactgagagtatctggaagccaaaataaaaagactcagcaggcccgt

SEQ ID NO: 22433 - DNA, 122 bp, Homo sapiens
  misc_feature (61)..(62): /note="This region represents a CpG dinucleotide"
  misc_feature (61)..(61): /note="Nucleotide may be methylated to form 5-methylcytosine"
cgcagcctcataggaaatgttacctgtcaggtgcctgtccgggaagccatgtggtgatgccgccttggcttctccgattcgcggaggccaaaaccctcagaaacacctgctggggagccaca

SEQ ID NO: 22434 - DNA, 122 bp, Homo sapiens
  misc_feature (61)..(62): /note="This region represents a CpG dinucleotide"
  misc_feature (61)..(61): /note="Nucleotide may be methylated to form 5-methylcytosine"
gcaccagggagctggggatgtgggccttatctttaaagggcctgcagtccacagtgggagcgggggagaccaggtatgtagcaaaacttatacttaaatagaatataagcaaacataaaata

SEQ ID NO: 22435 - DNA, 122 bp, Homo sapiens
  misc_feature (61)..(62): /note="This region represents a CpG dinucleotide"
  misc_feature (61)..(61): /note="Nucleotide may be methylated to form 5-methylcytosine"
taagttatctgtgtttgaatagaaatatacaggtcctatgttgtattactttatcttccacgatagtctagacaacagaaaattccaaccttcagctatgtcaacaggaaggtcaagccttt

SEQ ID NO: 22436 - DNA, 122 bp, Homo sapiens
  misc_feature (61)..(62): /note="This region represents a CpG dinucleotide"
  misc_feature (61)..(61): /note="Nucleotide may be methylated to form 5-methylcytosine"
gttctgaccataccactgctatctcagtcttagaggctgattttgtggcccagagtgtttcgttcagatatctttgtgttgaggtgatattgagccagcagccaaagaaatgcatggccaag

SEQ ID NO: 22437 - DNA, 122 bp, Homo sapiens
  misc_feature (61)..(62): /note="This region represents a CpG dinucleotide"
  misc_feature (61)..(61): /note="Nucleotide may be methylated to form 5-methylcytosine"
cagtatcaccccacgggctggcctcctatccaggttctgcctgatgatgggttgagctgtcgcaccagccaggccctgtctgtgctgtcctctcggctgtaaaataaagaggccgtggtctg

SEQ ID NO: 22438 - DNA, 122 bp, Homo sapiens
  misc_feature (61)..(62): /note="This region represents a CpG dinucleotide"
  misc_feature (61)..(61): /note="Nucleotide may be methylated to form 5-methylcytosine"
aattcacttgtctaacatgagcttatttgactagtagacctacatagaatcaaagttgtacgtctgccttatgtctaatgctgacaactctgaaggcatattggttttttaaactaaaccaa

SEQ ID NO: 22439 - DNA, 122 bp, Homo sapiens
  misc_feature (61)..(62): /note="This region represents a CpG dinucleotide"
  misc_feature (61)..(61): /note="Nucleotide may be methylated to form 5-methylcytosine"
ttgttgaggaattgcttgttgagaacatgcaggtgtgttaagtgctcagtaaacatcagccgcctgagaccaggatcagggattatgccaccccgctgctgcccactgctcctggagtggcc

SEQ ID NO: 22440 - DNA, 122 bp, Homo sapiens
  misc_feature (61)..(62): /note="This region represents a CpG dinucleotide"
  misc_feature (61)..(61): /note="Nucleotide may be methylated to form 5-methylcytosine"
tttcccatctgctgacgtaggcccagggctgccctgcccctgctgccagtgtaccgtgagcggggctccagccagttcaagctcagagccagagctggacgggccagaactgcgctgcacac

SEQ ID NO: 22441 - DNA, 122 bp, Homo sapiens
  misc_feature (61)..(62): /note="This region represents a CpG dinucleotide"
  misc_feature (61)..(61): /note="Nucleotide may be methylated to form 5-methylcytosine"
ttttcaaaggaagccaaacctcagatttgcctcagaacttgtacttttcttctaagcaaacgccgtccaccacgagaaccgcctggcatttggctgggaaagaacaaactggaagcttgcaa

SEQ ID NO: 22442 - DNA, 122 bp, Homo sapiens
  misc_feature (61)..(62): /note="This region represents a CpG dinucleotide"
  misc_feature (61)..(61): /note="Nucleotide may be methylated to form 5-methylcytosine"
agaaagacccatgaaatgtcatactcttttgtgaaccagtaaattatattgatggaatgacgggtaaccaaagcccaacaagagctctttattcagcatgtgaaaaccacatgacccccaaa

SEQ ID NO: 22443 - DNA, 122 bp, Homo sapiens
  misc_feature (61)..(62): /note="This region represents a CpG dinucleotide"
  misc_feature (61)..(61): /note="Nucleotide may be methylated to form 5-methylcytosine"
gggagcctcagcacagtatagccttgtatgtgcacaggccatttccacacggggcggggacgtggcagctgtgctttggcggtcatctctggagaagggcggctggggctcaggaggctgag

SEQ ID NO: 22444 - DNA, 122 bp, Homo sapiens
  misc_feature (61)..(62): /note="This region represents a CpG dinucleotide"
  misc_feature (61)..(61): /note="Nucleotide may be methylated to form 5-methylcytosine"
ccggagctcaagcgatctgcccacctcccgaaatgttgggactagaggtgtgagccaccacgccaggccaatttgaactatatttgaaaaagagggttccattgtttaaaaataagtcttgg

SEQ ID NO: 22445 - DNA, 122 bp, Homo sapiens
  misc_feature (61)..(62): /note="This region represents a CpG dinucleotide"
  misc_feature (61)..(61): /note="Nucleotide may be methylated to form 5-methylcytosine"
atgaggcacaagaacaagaggccaccttatgctgtggccagcagaggcattcaaacattccgtcagcaggattccagccaacctccgaagctcacttttataagccagccccaggcatccca

SEQ ID NO: 22446 - DNA, 122 bp, Homo sapiens
  misc_feature (61)..(62): /note="This region represents a CpG dinucleotide"
  misc_feature (61)..(61): /note="Nucleotide may be methylated to form 5-methylcytosine"
tgaaatatatgtagtatgaaactggagacacagccccattttaacaccaaattattcttccgtatgaagatctatgattcatggtaatagtcagtgttaatagagtaatgttatttggttaa

SEQ ID NO: 22447 - DNA, 122 bp, Homo sapiens
  misc_feature (61)..(62): /note="This region represents a CpG dinucleotide"
  misc_feature (61)..(61): /note="Nucleotide may be methylated to form 5-methylcytosine"
aatacctatgacaaatattaggatgtgatggtgctgggctaggaagagtggacgtgacaacgagcactcactctaggacgtagtatctgaaggcttcaactctgaaagtctagtgactcagc

SEQ ID NO: 22448 - DNA, 122 bp, Homo sapiens
  misc_feature (61)..(62): /note="This region represents a CpG dinucleotide"
  misc_feature (61)..(61): /note="Nucleotide may be methylated to form 5-methylcytosine"
ttttaaattgtaagcccttctgaatgttgtgacgaaatcttgagtcaccctgctctgtctcgctggataggagtcatccctttgtccagcatatccatgctgcacacactgtctgcccatta

SEQ ID NO: 22449 - DNA, 122 bp, Homo sapiens
  misc_feature (61)..(62): /note="This region represents a CpG dinucleotide"
  misc_feature (61)..(61): /note="Nucleotide may be methylated to form 5-methylcytosine"
cgctgacccacaggatgtgactcaaatttctaaagctctcacaactctcccctccttccccgtgacactgctctaatcccacctctgggtgtaccagatacctctcgctcctgccttggccc

SEQ ID NO: 22450 - DNA, 122 bp, Homo sapiens
  misc_feature (61)..(62): /note="This region represents a CpG dinucleotide"
  misc_feature (61)..(61): /note="Nucleotide may be methylated to form 5-methylcytosine"
agcacctagcatcttagtgtggagctgaacaggtactgcctgtgtttcagagagctcagccgctgttacagaatactgcaggctgcatggtttacgcaatagaaatttatttcttgtagctc

SEQ ID NO: 22451 - DNA, 122 bp, Homo sapiens
  misc_feature (61)..(62): /note="This region represents a CpG dinucleotide"
  misc_feature (61)..(61): /note="Nucleotide may be methylated to form 5-methylcytosine"
gccccaccctgactcaccgggggcagtgctgacagctggttccggtcaagccacagctcccgaagattgggcagagcccccagagtgtctggctgcaagaaggaacagagaaaatagtgact

SEQ ID NO: 22452 - DNA, 122 bp, Homo sapiens
  misc_feature (61)..(62): /note="This region represents a CpG dinucleotide"
  misc_feature (61)..(61): /note="Nucleotide may be methylated to form 5-methylcytosine"
acccaggacagcctagccaccaattctgtggggtggcatctcctgatgtccccacatgggcggactcccaactgcatgaaggaagtcttaccccggtgcagcctctgccacccagctctttg

SEQ ID NO: 22453 - DNA, 122 bp, Homo sapiens
  misc_feature (61)..(62): /note="This region represents a CpG dinucleotide"
  misc_feature (61)..(61): /note="Nucleotide may be methylated to form 5-methylcytosine"
gatgatttagaaaataatgataatgtagatgcctttagagagggtggctatgttccccaccgctctgctacctcacgtctccttggcccttgaaggcatttgacattatgactctgatttat

SEQ ID NO: 22454 - DNA, 122 bp, Homo sapiens
  misc_feature (61)..(62): /note="This region represents a CpG dinucleotide"
  misc_feature (61)..(61): /note="Nucleotide may be methylated to form 5-methylcytosine"
agtggagcagagtgagcacaaggaggagcattcggagatgaagtcagaggctgggccgtgcgccctgttgtaggtcagtgaaaggactttaggttttactctagggttaaaagtccctaaag

SEQ ID NO: 22455 - DNA, 122 bp, Homo sapiens
  misc_feature (61)..(62): /note="This region represents a CpG dinucleotide"
  misc_feature (61)..(61): /note="Nucleotide may be methylated to form 5-methylcytosine"
ccccaagcacagtcaggagcagatctttgccaggctctgtgactcactcacagcccaacacgggtcaagttcacagttcgtctgtgcactcagcacatgcaaaggtaaattattctttccta

SEQ ID NO: 22456 - DNA, 122 bp, Homo sapiens
  misc_feature (61)..(62): /note="This region represents a CpG dinucleotide"
  misc_feature (61)..(61): /note="Nucleotide may be methylated to form 5-methylcytosine"
tcctctttgtcgctgagaatatttcgttgtgtggatctaccagtgtgtttatcccttccccgctcaggcctgtttgggtggtttccagtttggggcgatgacaaatacaggcactaacaaac

SEQ ID NO: 22457 - DNA, 122 bp, Homo sapiens
  misc_feature (61)..(62): /note="This region represents a CpG dinucleotide"
  misc_feature (61)..(61): /note="Nucleotide may be methylated to form 5-methylcytosine"
ttacataggaggagtaagttctagtgttctattgcacagtagggggactacagttaataacgtattgtatatttcaacatagaagagaggattttgaatgttctcaccacaaaaaaacaatg

SEQ ID NO: 22458 - DNA, 122 bp, Homo sapiens
  misc_feature (61)..(62): /note="This region represents a CpG dinucleotide"
  misc_feature (61)..(61): /note="Nucleotide may be methylated to form 5-methylcytosine"
ctctgagctgcttttctgggcacactgcctgtagggtagtcctggtcttaaggagcagtacgtctgctgctgtacactgctgcttcaatacaaattgctgtttaacccacctgtttaacacc

SEQ ID NO: 22459 - DNA, 122 bp, Homo sapiens
  misc_feature (61)..(62): /note="This region represents a CpG dinucleotide"
  misc_feature (61)..(61): /note="Nucleotide may be methylated to form 5-methylcytosine"
tgtgtgccagatgtccctgaaatttacaaagaaccaagaaccaaaaatgacagttagctccgtaagcccaacaaaagaaaaaaaaaaaaaaaaggaaaagagcaaaaaagcaaaagaacaaa

SEQ ID NO: 22460 - DNA, 122 bp, Homo sapiens
  misc_feature (61)..(62): /note="This region represents a CpG dinucleotide"
  misc_feature (61)..(61): /note="Nucleotide may be methylated to form 5-methylcytosine"
acctcctcttgtcgtttattgtatgagtgtacccctgtgccttatttacttttcctttcacggttgggtacttcccccattgcttagactttttggcccttaaacagtgctgggacaaacat

SEQ ID NO: 22461 - DNA, 122 bp, Homo sapiens
  misc_feature (61)..(62): /note="This region represents a CpG dinucleotide"
  misc_feature (61)..(61): /note="Nucleotide may be methylated to form 5-methylcytosine"
tgtatgagcccagagaactggctggcagtcactaagcaggctctggacagcatgaagccacgtgagattaatcacggggaggacctggccagccatctactgcaattgagagcacacctgac

SEQ ID NO: 22462 - DNA, 122 bp, Homo sapiens
  misc_feature (61)..(62): /note="This region represents a CpG dinucleotide"
  misc_feature (61)..(61): /note="Nucleotide may be methylated to form 5-methylcytosine"
tataaattacccaatctgtggtagtctgttatagtaacagcaaacaggccgggacacatacgcaacgtgatattcaagggagtgtgacagaattgcctatggaataaaaataagcaaatcgg

SEQ ID NO: 22463 - DNA, 122 bp, Homo sapiens
  misc_feature (61)..(62): /note="This region represents a CpG dinucleotide"
  misc_feature (61)..(61): /note="Nucleotide may be methylated to form 5-methylcytosine"
aagtagtctcaactttagcctttttgactcaaaatatcccagacctggcaatggaatgagcgggattatctgcctttttgtttcacggcagtccagtcattctgaatgttacctttggtgtt

SEQ ID NO: 22464 - DNA, 122 bp, Homo sapiens
  misc_feature (61)..(62): /note="This region represents a CpG dinucleotide"
  misc_feature (61)..(61): /note="Nucleotide may be methylated to form 5-methylcytosine"
agtcacagagccgggcctcaacctggcctttaaaaagacgctacccgtttacattctcagcgtgagtagaagaaactgcccatgtcccttcacctttcccagtattcaatattatattttta

SEQ ID NO: 22465 - DNA, 122 bp, Homo sapiens
  misc_feature (61)..(62): /note="This region represents a CpG dinucleotide"
  misc_feature (61)..(61): /note="Nucleotide may be methylated to form 5-methylcytosine"
cagtttatccacgagactccattctaaagcatgagtcacacttagtatgcataggtccttcggtttcttgaatcagcttagttttctgctctcatttcacaagaatcactctcttccctcag

SEQ ID NO: 22466 - DNA, 122 bp, Homo sapiens
  misc_feature (61)..(62): /note="This region represents a CpG dinucleotide"
  misc_feature (61)..(61): /note="Nucleotide may be methylated to form 5-methylcytosine"
taaatatctcagatgtttcagtgttgtgacatataaagcgtcctccatagtacataataccgtaagcactccataaggtaattcttgtccttttaaaaagtatacacttttgagttcaggac

SEQ ID NO: 22467 - DNA, 122 bp, Homo sapiens
  misc_feature (61)..(62): /note="This region represents a CpG dinucleotide"
  misc_feature (61)..(61): /note="Nucleotide may be methylated to form 5-methylcytosine"
aactcattgcttcaaattgtcgccaagcccattaggctacctgaactgtctcagaaagtgcgggtggctgcgtcgaacggtggtggctcagaggaagagattggggccggcagcgacctagg

SEQ ID NO: 22468 - DNA, 122 bp, Homo sapiens
  misc_feature (61)..(62): /note="This region represents a CpG dinucleotide"
  misc_feature (61)..(61): /note="Nucleotide may be methylated to form 5-methylcytosine"
tgtagaaccattaccattttaaagacagcaatcccccttttaaaaaactactgaggccttcgaagaaaccacacggctgccttgggccccaaaagctgcggaaaagcgcagtattcagttaa

SEQ ID NO: 22469 - DNA, 122 bp, Homo sapiens
  misc_feature (61)..(62): /note="This region represents a CpG dinucleotide"
  misc_feature (61)..(61): /note="Nucleotide may be methylated to form 5-methylcytosine"
taggccatggatcatctctgcagagaatcctaccatgctgcattcttgctttaaacctttcgccctctaaaacaatgcccaagagccaatgttagtcatggtcttcctgtatttgctctagg

SEQ ID NO: 22470 - DNA, 122 bp, Homo sapiens
  misc_feature (61)..(62): /note="This region represents a CpG dinucleotide"
  misc_feature (61)..(61): /note="Nucleotide may be methylated to form 5-methylcytosine"
aaatacttcagggtctgcagatctgtaggatctttagcaactacctactctgttgtaaggcgaaagcaggcagagaagccaggtaaacgcgtgggcgtgtctgtgtgctaataaaactttat

SEQ ID NO: 22471 - DNA, 122 bp, Homo sapiens
  misc_feature (61)..(62): /note="This region represents a CpG dinucleotide"
  misc_feature (61)..(61): /note="Nucleotide may be methylated to form 5-methylcytosine"
tcccaggacattcactaaactgcaacaagccagaaactctactaggtgcaggatacatagcgtaaaaaaaatacagcatgtttgtgtctctgtgaagtctaccagcaagtgtctagcatgct

SEQ ID NO: 22472 - DNA, 122 bp, Homo sapiens
  misc_feature (61)..(62): /note="This region represents a CpG dinucleotide"
  misc_feature (61)..(61): /note="Nucleotide may be methylated to form 5-methylcytosine"
attacaggcatgagccaccgttgccaccgcgcccggcccatgacacttttaaagtcacctcggtcttgtgcatcttttgttgctgacaggaagtctactctcaagccggtcgttgttcgttt

SEQ ID NO: 22473 - DNA, 122 bp, Homo sapiens
  misc_feature (61)..(62): /note="This region represents a CpG dinucleotide"
  misc_feature (61)..(61): /note="Nucleotide may be methylated to form 5-methylcytosine"
tggcccgggacagaaacagttgcgttgcgcatgttgtgagaccccagtgaccaggaaccccggggagaagtctcctccatgagtcatgatagccgcaggcagctgcgaaggagggggacgtg

SEQ ID NO: 22474 - DNA, 122 bp, Homo sapiens
  misc_feature (61)..(62): /note="This region represents a CpG dinucleotide"
  misc_feature (61)..(61): /note="Nucleotide may be methylated to form 5-methylcytosine"
tttggctacagtcaagtggttattgtctgaaaggttttagtcttgctaggcttcctctttcgtggtcattttggtaaagagagcagacttttgttggggcttttttggttggcttccattgg

SEQ ID NO: 22475 - DNA, 122 bp, Homo sapiens
  misc_feature (61)..(62): /note="This region represents a CpG dinucleotide"
  misc_feature (61)..(61): /note="Nucleotide may be methylated to form 5-methylcytosine"
caatagatattctgaacagaaagtgctgacttgaaaattccctaaactgaggattgctgccgttacagctgcatgagctctgacattagttgttggtaaagtgcatggggtcagggttcacc

SEQ ID NO: 22476 - DNA, 122 bp, Homo sapiens
  misc_feature (61)..(62): /note="This region represents a CpG dinucleotide"
  misc_feature (61)..(61): /note="Nucleotide may be methylated to form 5-methylcytosine"
tcccttccttgaatgactgaatcacaatactttgatggtgcattcatttgttcgtttgttcgtttgttcattcattcattcattcattcgagacaggatcttgatctgttgcccaggctggg

SEQ ID NO: 22477 - DNA, 122 bp, Homo sapiens
  misc_feature (61)..(62): /note="This region represents a CpG dinucleotide"
  misc_feature (61)..(61): /note="Nucleotide may be methylated to form 5-methylcytosine"
caaaaacttcccatggatcaagtggcattgcgtgcctcacagtaagaacgtgctgctgtacgactcactctagagggagctttgcaggttcactctacagagagcccctctgcagatgctag

SEQ ID NO: 22478 - DNA, 122 bp, Homo sapiens
  misc_feature (61)..(62): /note="This region represents a CpG dinucleotide"
  misc_feature (61)..(61): /note="Nucleotide may be methylated to form 5-methylcytosine"
ctgtcacctggagcttgtgctgtgcttgggcagggcttgaactggggagtcctgggacaccgttctttttttatgaggctttgggatggttcctatttgtttgacaaggagagataaacagc

SEQ ID NO: 22479 - DNA, 122 bp, Homo sapiens
  misc_feature (61)..(62): /note="This region represents a CpG dinucleotide"
  misc_feature (61)..(61): /note="Nucleotide may be methylated to form 5-methylcytosine"
aagcacagacattggaaccagtttccttgaattcaaactctgtctttgacacttattaaccgtgtaaggcacttcatctgtaaaacaaggatagtaatggcacctacctcatagggtcattg

SEQ ID NO: 22480 - DNA, 122 bp, Homo sapiens
  misc_feature (61)..(62): /note="This region represents a CpG dinucleotide"
  misc_feature (61)..(61): /note="Nucleotide may be methylated to form 5-methylcytosine"
atcaccccatcactccagccaacaggcaaccaatgaccagatatgtgactagctagttaccgcttgtgaatcctccagctacaaaagtgagctcagccaagatcagctgagcctggcttatg

SEQ ID NO: 22481 - DNA, 122 bp, Homo sapiens
  misc_feature (61)..(62): /note="This region represents a CpG dinucleotide"
  misc_feature (61)..(61): /note="Nucleotide may be methylated to form 5-methylcytosine"
ccttgccttctctgcacttgtgagacctggtgtgcaatgcagacatggaaccaatggtgacgagactttgttctgacagagctttacagctacacggaagggccagaattcctgatgaatcg

SEQ ID NO: 22482 - DNA, 122 bp, Homo sapiens
  misc_feature (61)..(62): /note="This region represents a CpG dinucleotide"
  misc_feature (61)..(61): /note="Nucleotide may be methylated to form 5-methylcytosine"
tggaaatccctgccctgttcagccccacagctcccaactatttggttcctgctccatggtcgggcctctgacagccactttgaataaaccagacaccgcacatgtgtcttgagaattatttg

SEQ ID NO: 22483 - DNA, 122 bp, Homo sapiens
  misc_feature (61)..(62): /note="This region represents a CpG dinucleotide"
  misc_feature (61)..(61): /note="Nucleotide may be methylated to form 5-methylcytosine"
agagggatgagctcatctctggatcccaagagacagccccaccccaaccttctaggagaccggaatcaagttcttgactcatctgaattcatatgcttcaatggaacctgcagtcgagtagc

SEQ ID NO: 22484 - DNA, 122 bp, Homo sapiens
  misc_feature (61)..(62): /note="This region represents a CpG dinucleotide"
  misc_feature (61)..(61): /note="Nucleotide may be methylated to form 5-methylcytosine"
tcatgggcctttcagttttgaaagaatttctggcttgacagcctttgtgtgagtagttttcgcagtcctgaatgtgctttctctggttgcctcctgcccaccttagtgatcttagctcactt

SEQ ID NO: 22485 - DNA, 122 bp, Homo sapiens
  misc_feature (61)..(62): /note="This region represents a CpG dinucleotide"
  misc_feature (61)..(61): /note="Nucleotide may be methylated to form 5-methylcytosine"
ctgtctcttcctccatgccctcaaagagaaaaaggaacctaataataacacaaaataaagcgaaagcatacttgcttgactggtttaaatgtgccatctggccgggcattttggaggccgag

SEQ ID NO: 22486 - DNA, 122 bp, Homo sapiens
  misc_feature (61)..(62): /note="This region represents a CpG dinucleotide"
  misc_feature (61)..(61): /note="Nucleotide may be methylated to form 5-methylcytosine"
taaggttctcatacagcatatctacttaccttttcttcttgacagcagataagtaaaccacggcttaggagtagatttgccaatgtattttactggagacttttgtagtaagactttttact

SEQ ID NO: 22487 - DNA, 122 bp, Homo sapiens
  misc_feature (61)..(62): /note="This region represents a CpG dinucleotide"
  misc_feature (61)..(61): /note="Nucleotide may be methylated to form 5-methylcytosine"
agacaaaatacatgctggtgactcagtgtgaggtgttctctcctccttggggggacgaagcgggagcagagaacactgaagccagaggcactgacttaaaatggagcatctgatccttaaag

SEQ ID NO: 22488 - DNA, 122 bp, Homo sapiens
  misc_feature (61)..(62): /note="This region represents a CpG dinucleotide"
  misc_feature (61)..(61): /note="Nucleotide may be methylated to form 5-methylcytosine"
ttgccatggaacatgtgacccatatgaataacgtctgcctggtgtgcggtgctgaataaacgtttgaggatccctgggccaactgccctcagggtgcttccagctgatataatcttgaattc

SEQ ID NO: 22489 - DNA, 122 bp, Homo sapiens
  misc_feature (61)..(62): /note="This region represents a CpG dinucleotide"
  misc_feature (61)..(61): /note="Nucleotide may be methylated to form 5-methylcytosine"
cccaggaaaggcagcatacaatgtgctgggtgtttcctcatctacaaatctaatcttcgacggctttcaaacagcatgtgagtgtgtttacaagaagatgaacagcactaagaaaatgacat

SEQ ID NO: 22490 - DNA, 122 bp, Homo sapiens
  misc_feature (61)..(62): /note="This region represents a CpG dinucleotide"
  misc_feature (61)..(61): /note="Nucleotide may be methylated to form 5-methylcytosine"
caagcagattaggagtaacgttatcccttgacttaggcctgtatgactgagacacacatacgcacacacatgcacggcactgcatgtgctcagaaggacctggtctcatcctgaaggtggag

SEQ ID NO: 22491 - DNA, 122 bp, Homo sapiens
  misc_feature (61)..(62): /note="This region represents a CpG dinucleotide"
  misc_feature (61)..(61): /note="Nucleotide may be methylated to form 5-methylcytosine"
atgatcttatttttaccttcctgctcctaaactaaacgatataaaaagcttagttctggccgggcgccgtggttcacgcctgtaatcctagcactttggggtaacaccgtgaaaccccgtct

SEQ ID NO: 22492 - DNA, 122 bp, Homo sapiens
  misc_feature (61)..(62): /note="This region represents a CpG dinucleotide"
  misc_feature (61)..(61): /note="Nucleotide may be methylated to form 5-methylcytosine"
gaaaggctgctccaggctcctccctctcctagggtctgggctgggcgcccaagttggtggcggcctcggctcccacaccaggtcatgggcagaccctccccgcagagcagcggacgccactg

SEQ ID NO: 22493 - DNA, 122 bp, Homo sapiens
  misc_feature (61)..(62): /note="This region represents a CpG dinucleotide"
  misc_feature (61)..(61): /note="Nucleotide may be methylated to form 5-methylcytosine"
ctggactccagggtgtcccagcatcctcctgatggctctcctggccacagcagggcaaatcgcgacacaccctgagctgacacaccctcagcactttcagagaagccgagagcgacccgagg

SEQ ID NO: 22494 - DNA, 122 bp, Homo sapiens
  misc_feature (61)..(62): /note="This region represents a CpG dinucleotide"
  misc_feature (61)..(61): /note="Nucleotide may be methylated to form 5-methylcytosine"
gggctcaagcaatcctttgccttgacctcccaaagtgctgggataataggtgtgaaccaccgagcccaactaataaggattattttaattggcatctttggtctttgacctctgagcttcta

SEQ ID NO: 22495 - DNA, 122 bp, Homo sapiens
  misc_feature (61)..(62): /note="This region represents a CpG dinucleotide"
  misc_feature (61)..(61): /note="Nucleotide may be methylated to form 5-methylcytosine"
cgaccttcctcttccctatcttcccggcaggaccagtccatgggcaattggcagatcaagcgccagaatggagatgatcccttgctgacttaccggttcccaccaaagttcaccctgaaggc

SEQ ID NO: 22496 - DNA, 122 bp, Homo sapiens
  misc_feature (61)..(62): /note="This region represents a CpG dinucleotide"
  misc_feature (61)..(61): /note="Nucleotide may be methylated to form 5-methylcytosine"
gcagcctcttgaggggagggtctcccccacctcgggctggacaaagacagcttttccccacgtccctctgggttctctagagcaacagcaatacccgcccggcaggggtgtggcttagagcc

SEQ ID NO: 22497 - DNA, 122 bp, Homo sapiens
  misc_feature (61)..(62): /note="This region represents a CpG dinucleotide"
  misc_feature (61)..(61): /note="Nucleotide may be methylated to form 5-methylcytosine"
cctgcacctctgtcattggcagattcctgtgttgccaggggattacactggccattggaacgcttgcctgagtgtaatgtaagtatggcctggagtgacggagtgacaagatgcctatccag

SEQ ID NO: 22498 - DNA, 122 bp, Homo sapiens
  misc_feature (61)..(62): /note="This region represents a CpG dinucleotide"
  misc_feature (61)..(61): /note="Nucleotide may be methylated to form 5-methylcytosine"
aattcagtttaagtggcttcagttctgaattcctggattatatcgaaatgttgcagatggcggtgtgtgggctttgagctcgtaaattttttgtgtggtactaattcaagacgattgagagc

SEQ ID NO: 22499 - DNA, 122 bp, Homo sapiens
  misc_feature (61)..(62): /note="This region represents a CpG dinucleotide"
  misc_feature (61)..(61): /note="Nucleotide may be methylated to form 5-methylcytosine"
ggggaggcctgaagttcctttagcttgtccatgtgaaacagaggaagagcccacaaggaacgcattcatctcagagttaggtgaccttggctttgggatctagttgctcattacttccactt

SEQ ID NO: 22500 - DNA, 122 bp, Homo sapiens
  misc_feature (61)..(62): /note="This region represents a CpG dinucleotide"
  misc_feature (61)..(61): /note="Nucleotide may be methylated to form 5-methylcytosine"
agcctggcctgttacacacccccaccccagtccctcaaatgaatcattcaaagccttcagcggaggggtgtccaggactgagaaatgagcacgttcccttatccaccacagctgcatgaatc

SEQ ID NO: 22501 - DNA, 122 bp, Homo sapiens
  misc_feature (61)..(62): /note="This region represents a CpG dinucleotide"
  misc_feature (61)..(61): /note="Nucleotide may be methylated to form 5-methylcytosine"
caggaattcacttcctggtttcagccgaggttttctgtcaaataaggggattagaatggacgctctgaagcatttgggctctcagagtttgcaccctgagatgtactagctttggttaaaga

SEQ ID NO: 22502 - DNA, 122 bp, Homo sapiens
  misc_feature (61)..(62): /note="This region represents a CpG dinucleotide"
  misc_feature (61)..(61): /note="Nucleotide may be methylated to form 5-methylcytosine"
agatggacaaacatgacctcatgatccctctgctaatgtgaatctttgtgaaaaattaagcgtattttttaaacaatcggtttaaggtttaagtgcattgaggtagataaaatgggatcacc

SEQ ID NO: 22503 - DNA, 122 bp, Homo sapiens
  misc_feature (61)..(62): /note="This region represents a CpG dinucleotide"
  misc_feature (61)..(61): /note="Nucleotide may be methylated to form 5-methylcytosine"
aacactttgatggatggtagagttaacaggctccttgcctgcagctgcttcagacaagagcgtccccaagccctgggcctgacctggaatgtggggatggaaggggagggggaggaaccaag

SEQ ID NO: 22504 - DNA, 122 bp, Homo sapiens
  misc_feature (61)..(62): /note="This region represents a CpG dinucleotide"
  misc_feature (61)..(61): /note="Nucleotide may be methylated to form 5-methylcytosine"
tggaaggtaaatctcaaagcttgaggaccagccatcaaaacttttgtaaaaggttttccccgcgtttagggcctcatccatcaccactgagatgtaataacgtaaaaaccaagacggtttgg

SEQ ID NO: 22505 - DNA, 122 bp, Homo sapiens
  misc_feature (61)..(62): /note="This region represents a CpG dinucleotide"
  misc_feature (61)..(61): /note="Nucleotide may be methylated to form 5-methylcytosine"
gaggattgctgagcacagggattgtaaagagaaagtgctggtgcgttgggagtttagtgacggtgattcaatcttgttttagcggtggtgactgccatttatgcagctagctctgtgcgctg

SEQ ID NO: 22506 - DNA, 122 bp, Homo sapiens
  misc_feature (61)..(62): /note="This region represents a CpG dinucleotide"
  misc_feature (61)..(61): /note="Nucleotide may be methylated to form 5-methylcytosine"
gcattaggacagaagtcctcaaaaggaactaaaatgttgaaacatgctcatctggggaaacgggatcagagaaagaagatgtatcatgctcagtcacagaaagtcaccacatacttttcttc

SEQ ID NO: 22507 - DNA, 122 bp, Homo sapiens
  misc_feature (61)..(62): /note="This region represents a CpG dinucleotide"
  misc_feature (61)..(61): /note="Nucleotide may be methylated to form 5-methylcytosine"
cagcggcctgctggactctgagaactgggaaagatcagagcaagccttgcctcttatcttcgggaaaccagaatatgtttggggtggtaggagccacacagactcttctgagccccctcact

SEQ ID NO: 22508 - DNA, 122 bp, Homo sapiens
  misc_feature (61)..(62): /note="This region represents a CpG dinucleotide"
  misc_feature (61)..(61): /note="Nucleotide may be methylated to form 5-methylcytosine"
atctgtgaagtggggatgagagcaatgataatcatgctactcttccaactgacaacagtacggcaggcgctaacatctgctggggccaggcacccatgctgagaacttcccatgtgggttga

SEQ ID NO: 22509 - DNA, 122 bp, Homo sapiens
  misc_feature (61)..(62): /note="This region represents a CpG dinucleotide"
  misc_feature (61)..(61): /note="Nucleotide may be methylated to form 5-methylcytosine"
ctgtaggaacaccttctcctgtctgctgctgccacagagggtagcaaatcccatgctaggcgtggagaggagacttgggcatgtccctggagggacactgctgcagtcacttcacttacaga

SEQ ID NO: 22510 - DNA, 122 bp, Homo sapiens
  misc_feature (61)..(62): /note="This region represents a CpG dinucleotide"
  misc_feature (61)..(61): /note="Nucleotide may be methylated to form 5-methylcytosine"
ttcaccaaatccatttctctttcctccagggcacttagtcaccttttccagcctcccttacggttagatattgccactgagtctggccttatggaatgcagctatgtcacttccaggtctga

SEQ ID NO: 22511 - DNA, 122 bp, Homo sapiens
  misc_feature (61)..(62): /note="This region represents a CpG dinucleotide"
  misc_feature (61)..(61): /note="Nucleotide may be methylated to form 5-methylcytosine"
ggccaagcccagcctgactcatggcaagccttcaacagatgtcagtaaaaggaactcaaccgtcaaatgcatagaatgaacatggggtcaactctcctccgtagctctcttccgcatgtggg

SEQ ID NO: 22512 - DNA, 122 bp, Homo sapiens
  misc_feature (61)..(62): /note="This region represents a CpG dinucleotide"
  misc_feature (61)..(61): /note="Nucleotide may be methylated to form 5-methylcytosine"
gctccctggtcactgcagcagtcaggtagaatggcaggtcatgccctggcccttaaagtccgcttgggtgtgtgcacgttcttccgttcacatttcattggccaaagcaaatcacaaaccca

SEQ ID NO: 22513 - DNA, 122 bp, Homo sapiens
  misc_feature (61)..(62): /note="This region represents a CpG dinucleotide"
  misc_feature (61)..(61): /note="Nucleotide may be methylated to form 5-methylcytosine"
gcccttggagatagatgaccaatagtgtagaaaacataagccttcataacaggaaggcagcgactgctctctgggtgtttacgggatctctctgtgttagattagaagataatatttctcca

SEQ ID NO: 22514 - DNA, 122 bp, Homo sapiens
  misc_feature (61)..(62): /note="This region represents a CpG dinucleotide"
  misc_feature (61)..(61): /note="Nucleotide may be methylated to form 5-methylcytosine"
cagagatttcttaatgaatctgcaattgttaccagtctatcaacttttcatcctgggacacgtaagacttttggggagtggagggaagggtctgtcacccaagctggcgtacagtgacacaa

SEQ ID NO: 22515 - DNA, 122 bp, Homo sapiens
  misc_feature (61)..(62): /note="This region represents a CpG dinucleotide"
  misc_feature (61)..(61): /note="Nucleotide may be methylated to form 5-methylcytosine"
ctcaagtagtactgccatctcagcctcccagagtgtgggggttataggtgtgagccaccacgcctggcctactatgagaaatctgtatggtcagcacattcttgccccatgggcaagcctat

SEQ ID NO: 22516 - DNA, 122 bp, Homo sapiens
  misc_feature (61)..(62): /note="This region represents a CpG dinucleotide"
  misc_feature (61)..(61): /note="Nucleotide may be methylated to form 5-methylcytosine"
tggcatgctcacagagaggaagccgagcaatttcctgtgctggcctggagttagtactggcgtgagcaatgagcctgggaagacgggtgctctcggagggaggacacctggtctgaggggta

SEQ ID NO: 22517 - DNA, 122 bp, Homo sapiens
  misc_feature (61)..(62): /note="This region represents a CpG dinucleotide"
  misc_feature (61)..(61): /note="Nucleotide may be methylated to form 5-methylcytosine"
agcctcgcttgctaaagtctcattggccaaatcaagtcacatgatcaagcccagattcaacgcaggagagaactttaccaggggtaaatatcaggaagtgtcattcattggcgaagccacag

SEQ ID NO: 22518 - DNA, 122 bp, Homo sapiens
  misc_feature (61)..(62): /note="This region represents a CpG dinucleotide"
  misc_feature (61)..(61): /note="Nucleotide may be methylated to form 5-methylcytosine"
ctccggaagagtctggttttgactggcgtctctgtcctctcacttaggtcgctgagattacgggtgttgtggaaactgccaaagtttaccaactaggtggcaccagaacaaacaaagggctg

SEQ ID NO: 22519 - DNA, 122 bp, Homo sapiens
  misc_feature (61)..(62): /note="This region represents a CpG dinucleotide"
  misc_feature (61)..(61): /note="Nucleotide may be methylated to form 5-methylcytosine"
gcccacagggaggggagggaggtaggggcttgggaagtgcttaccttgctctgggcaggacggagagtccaatggccctgaaacagatgttgtttcttctgctgctgttgctggtactggaa

SEQ ID NO: 22520 - DNA, 122 bp, Homo sapiens
  misc_feature (61)..(62): /note="This region represents a CpG dinucleotide"
  misc_feature (61)..(61): /note="Nucleotide may be methylated to form 5-methylcytosine"
ttctctgtcatcaaatttgctttctgatttctcctctgtattaactgatccaatggcttccgtcattctgaggaaaaagttcaagctccttttcaaggcctacagtgcttgctccttggctc

SEQ ID NO: 22521 - DNA, 122 bp, Homo sapiens
  misc_feature (61)..(62): /note="This region represents a CpG dinucleotide"
  misc_feature (61)..(61): /note="Nucleotide may be methylated to form 5-methylcytosine"
aagcatatcatttaagaattttcctgtgactgtggttttgcgtgcacgcatgtgtgtgcacgcgcgcgcacacacacacacacacacacacacacatcaggccagctttggctggacagagt

SEQ ID NO: 22522 - DNA, 122 bp, Homo sapiens
  misc_feature (61)..(62): /note="This region represents a CpG dinucleotide"
  misc_feature (61)..(61): /note="Nucleotide may be methylated to form 5-methylcytosine"
taactcagcatgttcccggccacatcccggtgaaccatgcagcctaactcaccacgttcccggccacacagggccaagaacagcccaggcaatgttaaggagcattgcatggaggagccact

SEQ ID NO: 22523 - DNA, 122 bp, Homo sapiens
  misc_feature (61)..(62): /note="This region represents a CpG dinucleotide"
  misc_feature (61)..(61): /note="Nucleotide may be methylated to form 5-methylcytosine"
catctcatatatataaaatggacacgtggctataaaacaccatataagagatgagtagtgcgttttattttatatgccaatctactttgtttaaaaaaggtctgaatcaggacttgtgaaaa

SEQ ID NO: 22524 - DNA, 122 bp, Homo sapiens
  misc_feature (61)..(62): /note="This region represents a CpG dinucleotide"
  misc_feature (61)..(61): /note="Nucleotide may be methylated to form 5-methylcytosine"
gttccttcctgtgagggctttccgctaggccggcgaaggctggtgagaaagccggctctgcgccctgccctgtgctggccgccctcacctggcgctttgtaccctgaggcagctccggactc

SEQ ID NO: 22525 - DNA, 122 bp, Homo sapiens
  misc_feature (61)..(62): /note="This region represents a CpG dinucleotide"
  misc_feature (61)..(61): /note="Nucleotide may be methylated to form 5-methylcytosine"
gagccccagcaaggggaagtggttaacccagggtcatgaggggaggtggggacaggggtgcgggaggacccaggtctcctcactgtctgcctcaccactctgacttcctggaggtgactcag

SEQ ID NO: 22526 - DNA, 122 bp, Homo sapiens
  misc_feature (61)..(62): /note="This region represents a CpG dinucleotide"
  misc_feature (61)..(61): /note="Nucleotide may be methylated to form 5-methylcytosine"
ggctcacttgtgcctccagcgcagcagtgagttcaggtagcatgtgtgcctgtctctgagcgggagcatcctcccccggctgtggcacctgggcaacgggacatcaattcctgctctttaat

SEQ ID NO: 22527 - DNA, 122 bp, Homo sapiens
  misc_feature (61)..(62): /note="This region represents a CpG dinucleotide"
  misc_feature (61)..(61): /note="Nucleotide may be methylated to form 5-methylcytosine"
ccatagtagagaaatggactaagggctttaatccctgagtttctgagctgtcgaattgtccgaatatttctcatcatattcagcagttctgtatgagctgaatgagtcagcaggacctaagg

SEQ ID NO: 22528 - DNA, 122 bp, Homo sapiens
  misc_feature (61)..(62): /note="This region represents a CpG dinucleotide"
  misc_feature (61)..(61): /note="Nucleotide may be methylated to form 5-methylcytosine"
ttcctaatgctctccctcccaggagcctggtctctaggcgcaactgagctggtgactcaccggacaactgtgcaaggtacctctctatgactcagttgcctcatctgcaaaatgaaaggaat

SEQ ID NO: 22529 - DNA, 122 bp, Homo sapiens
  misc_feature (61)..(62): /note="This region represents a CpG dinucleotide"
  misc_feature (61)..(61): /note="Nucleotide may be methylated to form 5-methylcytosine"
tgtctgcctgtggatctcagccaggcctgtctgtacatatgctctgtaggaacaagctttcgtagtcattttttgtttttttgttttttgttttcccaagatggagtctcgccctgtcaccc

SEQ ID NO: 22530 - DNA, 122 bp, Homo sapiens
  misc_feature (61)..(62): /note="This region represents a CpG dinucleotide"
  misc_feature (61)..(61): /note="Nucleotide may be methylated to form 5-methylcytosine"
acaagaagtttttacataaacagacacagtaccagagggttattgctatgggcagtcacacgtacacgacacccagtcagtattgcttttctcagtgccagtgcctaagtaagtctgacctg

SEQ ID NO: 22531 - DNA, 122 bp, Homo sapiens
  misc_feature (61)..(62): /note="This region represents a CpG dinucleotide"
  misc_feature (61)..(61): /note="Nucleotide may be methylated to form 5-methylcytosine"
agttaaacccagaatgtcattaactctgtgttctttatgtggataatgaacttcctcttacgcccatcagtgggctctgaagggtcattgattgtaaactcctttggcttaagaaattctag

SEQ ID NO: 22532 - DNA, 122 bp, Homo sapiens
  misc_feature (61)..(62): /note="This region represents a CpG dinucleotide"
  misc_feature (61)..(61): /note="Nucleotide may be methylated to form 5-methylcytosine"
gagtttgagctcactcccaggagggaggataaatttgaggtttctttcctacttctaggacgacagagggcagttttagcctgaaacccatccgtaggtaaatagctgaattggggttttgt

SEQ ID NO: 22533 - DNA, 122 bp, Homo sapiens
  misc_feature (61)..(62): /note="This region represents a CpG dinucleotide"
  misc_feature (61)..(61): /note="Nucleotide may be methylated to form 5-methylcytosine"
gactgacaatgctgtgactttttcagacagacaatgagccatctagcttttgaactctttcgtattctgtaaacattaggaagcaccagtgtgtctcctaatgtaaacacactgatccagac

SEQ ID NO: 22534 - DNA, 122 bp, Homo sapiens
  misc_feature (61)..(62): /note="This region represents a CpG dinucleotide"
  misc_feature (61)..(61): /note="Nucleotide may be methylated to form 5-methylcytosine"
gaaggacctgaggcttgaaaccagaggtgtcttttagccatgagggaaagttcagagatgcggacacagcaactcagcctcatgtggctgctaaatcaacccccaaactgcccttcctgact

SEQ ID NO: 22535 - DNA, 122 bp, Homo sapiens
  misc_feature (61)..(62): /note="This region represents a CpG dinucleotide"
  misc_feature (61)..(61): /note="Nucleotide may be methylated to form 5-methylcytosine"
ccagctgcccctgccccgtaccatcttccttccccctccactcaggaacaaaaggtcccacggttcaggccatctggatttggagctgtcatttatagtcgcccaaactttgaggatgactt

SEQ ID NO: 22536 - DNA, 122 bp, Homo sapiens
  misc_feature (61)..(62): /note="This region represents a CpG dinucleotide"
  misc_feature (61)..(61): /note="Nucleotide may be methylated to form 5-methylcytosine"
tttcgggtgttgcttgttttttggcctgagactatgtcacctttgagtttttgtgcacctcgaaataaagcacaagtgactcctttcctcacgtgcttgggtggtgagtcagtcagctgccc

SEQ ID NO: 22537 - DNA, 122 bp, Homo sapiens
  misc_feature (61)..(62): /note="This region represents a CpG dinucleotide"
  misc_feature (61)..(61): /note="Nucleotide may be methylated to form 5-methylcytosine"
aggcttttcagagcaagccgtattaaatgtacccagtcccaccttagaagtgtagaacagcgtctttgagttgagaaagtgtggtgtgagtcgcgtgtgtcatcattgtgccttctctccct

SEQ ID NO: 22538 - DNA, 122 bp, Homo sapiens
  misc_feature (61)..(62): /note="This region represents a CpG dinucleotide"
  misc_feature (61)..(61): /note="Nucleotide may be methylated to form 5-methylcytosine"
gaccccaggagcctcactacctgtccccatagagctcctaaccagatgcaacagtgactgcgtcaccattccccacttttcccaactacgcagtgacaaacctaccagctttaccccacttc

SEQ ID NO: 22539 - DNA, 122 bp, Homo sapiens
  misc_feature (61)..(62): /note="This region represents a CpG dinucleotide"
  misc_feature (61)..(61): /note="Nucleotide may be methylated to form 5-methylcytosine"
gcggctgaactgaacttcacaaccccagttccacgtaggctttgcctggtgagctcgtagcgttacctccgttttacagggatagcaaggtactgacactgcagagtggatgccacctgcct

SEQ ID NO: 22540 - DNA, 122 bp, Homo sapiens
  misc_feature (61)..(62): /note="This region represents a CpG dinucleotide"
  misc_feature (61)..(61): /note="Nucleotide may be methylated to form 5-methylcytosine"
acacacaacaacagttggcatcgctcgcatataaacagctcttccatgtcactgagaaaacgagcaagatccagggaggaaaaatggatacaggatataaatagaaaatcctcaaaacagga

SEQ ID NO: 22541 - DNA, 122 bp, Homo sapiens
  misc_feature (61)..(62): /note="This region represents a CpG dinucleotide"
  misc_feature (61)..(61): /note="Nucleotide may be methylated to form 5-methylcytosine"
atttatctcattatattttcacaacaacttgagacctaactattagtatctttattttcccgccgaaaagctaaaagttaggttaaaaacttggccccttatcagtcagtatttcattttgt

SEQ ID NO: 22542 - DNA, 122 bp, Homo sapiens
  misc_feature (61)..(62): /note="This region represents a CpG dinucleotide"
  misc_feature (61)..(61): /note="Nucleotide may be methylated to form 5-methylcytosine"
gacacgtaggcttggctttctctgggacgggcgggtcccgtgcttggaggtgaaacatttcggttggtgggaggccggcgcgctgtatctgagtgtgaggcctaccgggagggactggtggc

SEQ ID NO: 22543 - DNA, 122 bp, Homo sapiens
  misc_feature (61)..(62): /note="This region represents a CpG dinucleotide"
  misc_feature (61)..(61): /note="Nucleotide may be methylated to form 5-methylcytosine"
aactattagttgttaatagttcttaatatgaaatttcaatttacccccaaatttaggcctcggaaacatcacagacatatgtaacggggcattggtatttaaattgggattacatctttgac

SEQ ID NO: 22544 - DNA, 122 bp, Homo sapiens
  misc_feature (61)..(62): /note="This region represents a CpG dinucleotide"
  misc_feature (61)..(61): /note="Nucleotide may be methylated to form 5-methylcytosine"
gttaaacttgcttgtgacctctttaaatatacaattgtaaattttttagttggtggtttacgctgatgtcccggattataggttaaattaggaggaaattttcagcatgtacatccatgaca

SEQ ID NO: 22545 - DNA, 122 bp, Homo sapiens
  misc_feature (61)..(62): /note="This region represents a CpG dinucleotide"
  misc_feature (61)..(61): /note="Nucleotide may be methylated to form 5-methylcytosine"
aggaagagcaggttcacccacacattcacaagtcaccctaaagctcgctccagccaggcacggtctatacactgtgataaggatgtggccgcacagaacagacccacaggaacacagcagat

SEQ ID NO: 22546 - DNA, 122 bp, Homo sapiens
  misc_feature (61)..(62): /note="This region represents a CpG dinucleotide"
  misc_feature (61)..(61): /note="Nucleotide may be methylated to form 5-methylcytosine"
cgtgagccaccgcgcccggcctcccagagtgctggggttacaggcctgagccaccacacccggcctggccagcatattttttgtggcgggaggtagatgttatctttcatcttctctcaggg

SEQ ID NO: 22547 - DNA, 122 bp, Homo sapiens
  misc_feature (61)..(62): /note="This region represents a CpG dinucleotide"
  misc_feature (61)..(61): /note="Nucleotide may be methylated to form 5-methylcytosine"
catcctggctaacatggtgaaacctcgtctctactaaaaatactctacaaattagcccggcgtggtggcaggcacctgtagtcccagctactcgggaggctgaggcaggagaatggcgtgaa

SEQ ID NO: 22548 - DNA, 122 bp, Homo sapiens
  misc_feature (61)..(62): /note="This region represents a CpG dinucleotide"
  misc_feature (61)..(61): /note="Nucleotide may be methylated to form 5-methylcytosine"
aaagtgacaatttggtttatccaataatcagattaataaaggtataccatttctaaggcacgagagcaggaatcttaagctgaggtagccctgggactaaatatgccatcctcttgtatcaa

SEQ ID NO: 22549 - DNA, 122 bp, Homo sapiens
  misc_feature (61)..(62): /note="This region represents a CpG dinucleotide"
  misc_feature (61)..(61): /note="Nucleotide may be methylated to form 5-methylcytosine"
gtgtccctgtcataccctagcacttgcacaggggctggcccatgtgggtctcagtgagcacgcaaatgacagaagacagagaagacaagagtacagaaacagatgagacctctagttccgga

SEQ ID NO: 22550 - DNA, 122 bp, Homo sapiens
  misc_feature (61)..(62): /note="This region represents a CpG dinucleotide"
  misc_feature (61)..(61): /note="Nucleotide may be methylated to form 5-methylcytosine"
ttcatgggaactcattctttgccctaggtgctttatgaacattctcccatttaatgcccccgattacagggtactccactggcctttctggttacagggcatccaaggcagtctgcatactg

SEQ ID NO: 22551 - DNA, 122 bp, Homo sapiens
  misc_feature (61)..(62): /note="This region represents a CpG dinucleotide"
  misc_feature (61)..(61): /note="Nucleotide may be methylated to form 5-methylcytosine"
gtatttgattgttcaactaggcttcttccatgaggatcttattttccctggcatttatcacgtcagtaaggtagaggagctcctatctgaaaatagcacctagcgctaagtctgtctaaggc

SEQ ID NO: 22552 - DNA, 122 bp, Homo sapiens
  misc_feature (61)..(62): /note="This region represents a CpG dinucleotide"
  misc_feature (61)..(61): /note="Nucleotide may be methylated to form 5-methylcytosine"
ctgggtcaggcgcaggccacagaaacatgtcagcaaacgttttattaagcaactgcagtgcgccaggcaccgttctagacacaggtggacaacagcaaggccctgcccacagtgactcacag

SEQ ID NO: 22553 - DNA, 122 bp, Homo sapiens
  misc_feature (61)..(62): /note="This region represents a CpG dinucleotide"
  misc_feature (61)..(61): /note="Nucleotide may be methylated to form 5-methylcytosine"
taaactgaagtcatccgtggtttgccgtgaggtctcctgagtttattggagcctttattgcgtctatgacagagagagagaaagtgctcacatttcacctgcatgggaattataaatgtcaa

SEQ ID NO: 22554 - DNA, 122 bp, Homo sapiens
  misc_feature (61)..(62): /note="This region represents a CpG dinucleotide"
  misc_feature (61)..(61): /note="Nucleotide may be methylated to form 5-methylcytosine"
gctacaatttttatttatttttgcctaagctgttttaattcccacttagcttgtttgccacgcagctttatagtcattgaacaggttgactccttcagtttcatggttgtaaaattttatgt

SEQ ID NO: 22555 - DNA, 122 bp, Homo sapiens
  misc_feature (61)..(62): /note="This region represents a CpG dinucleotide"
  misc_feature (61)..(61): /note="Nucleotide may be methylated to form 5-methylcytosine"
agactctctaaaagacaattacgtttatttgggaatagggcgttgtaatgggaatatgcacgccatagtcaagtgtgtgcgaattcagggagattaatttaaaaggcttttaaaggaaaatg

SEQ ID NO: 22556 - DNA, 122 bp, Homo sapiens
  misc_feature (61)..(62): /note="This region represents a CpG dinucleotide"
  misc_feature (61)..(61): /note="Nucleotide may be methylated to form 5-methylcytosine"
tggtatatctaaacaggaacaaacatgtacaagactcagttcaaactagaaggcccttttcgcgaatgttttttaaagtgagtggtaaactgcaaaagtcacaatatgagatccattcctcc

SEQ ID NO: 22557 - DNA, 122 bp, Homo sapiens
  misc_feature (61)..(62): /note="This region represents a CpG dinucleotide"
  misc_feature (61)..(61): /note="Nucleotide may be methylated to form 5-methylcytosine"
aagaaatcatttgagagaaggtcgggaaaggggtgtgctcatcctgcatcacaattactacgagaaaggggaaactggaaagtacagagggaaacttgcaaggatgaacaagaagagaaaac

SEQ ID NO: 22558 - DNA, 122 bp, Homo sapiens
  misc_feature (61)..(62): /note="This region represents a CpG dinucleotide"
  misc_feature (61)..(61): /note="Nucleotide may be methylated to form 5-methylcytosine"
ccaatgcaaatgagtcagaggatttgcttcagacactgagataattgtgtaactctacagcggaaaatgccattggagagtacttgctgacctcacagttgaaaaaaactatttaaaagatg

SEQ ID NO: 22559 - DNA, 122 bp, Homo sapiens
  misc_feature (61)..(62): /note="This region represents a CpG dinucleotide"
  misc_feature (61)..(61): /note="Nucleotide may be methylated to form 5-methylcytosine"
cacactgcattaaacttatcagacccatcatattcacttctgtttgcaaacatctgcagacgtaactgttcttcaatgcctgaatcattcattcctgcgtttaaagcccctcactgtcagtt

SEQ ID NO: 22560 - DNA, 122 bp, Homo sapiens
  misc_feature (61)..(62): /note="This region represents a CpG dinucleotide"
  misc_feature (61)..(61): /note="Nucleotide may be methylated to form 5-methylcytosine"
caagctgtgcctgccattcttccagactctcctgtccagtgtgactcactttgccaacaacggaggcccagagtgcttctgtctcctcccagctgcgcagggaaacagaacccagaccagct

SEQ ID NO: 22561 - DNA, 122 bp, Homo sapiens
  misc_feature (61)..(62): /note="This region represents a CpG dinucleotide"
  misc_feature (61)..(61): /note="Nucleotide may be methylated to form 5-methylcytosine"
agtagtcaaaaccaaagaaaaagccacaaggcagtaaagcattccttaattaagacattccgaaaaaagagaaaccacaatggggggtaaagcattccttagtcaggactaaggaaagaaag

SEQ ID NO: 22562 - DNA, 122 bp, Homo sapiens
  misc_feature (61)..(62): /note="This region represents a CpG dinucleotide"
  misc_feature (61)..(61): /note="Nucleotide may be methylated to form 5-methylcytosine"
gtcctctggagggcacaaacactgtgtcagaaggtggcaaggcaaaagggaggaatgctgcgtcctcaaaggcacacaggcaaaagggcctcactaattcccagctcttttataaggcacta

SEQ ID NO: 22563 - DNA, 122 bp, Homo sapiens
  misc_feature (61)..(62): /note="This region represents a CpG dinucleotide"
  misc_feature (61)..(61): /note="Nucleotide may be methylated to form 5-methylcytosine"
ctccataatgatctgctgaataccaggtgtgtgtccttccagatgggcttccgtgctgagcgcctgcacttgtgcatggagagggcacattctctatagtctacactaaggagtgacatttc

SEQ ID NO: 22564 - DNA, 122 bp, Homo sapiens
  misc_feature (61)..(62): /note="This region represents a CpG dinucleotide"
  misc_feature (61)..(61): /note="Nucleotide may be methylated to form 5-methylcytosine"
tgcttgctcagctaagcactgatcctgctactgccagccattcgctgtgtggccttgtaacgtatgtaactgctctgtgcctcagctgtgtcatctgtgaaatgggaacaccaattattgct

SEQ ID NO: 22565 - DNA, 122 bp, Homo sapiens
  misc_feature (61)..(62): /note="This region represents a CpG dinucleotide"
  misc_feature (61)..(61): /note="Nucleotide may be methylated to form 5-methylcytosine"
gtttcctcatttgtaaaacaaggacaatgtgatctctagctcacaggattaaatgaaatacgtaagcaaactgccagcccagtgcttcatgtggaagtttcataggagtttccattttgcaa

SEQ ID NO: 22566 - DNA, 122 bp, Homo sapiens
  misc_feature (61)..(62): /note="This region represents a CpG dinucleotide"
  misc_feature (61)..(61): /note="Nucleotide may be methylated to form 5-methylcytosine"
tggctaaggtatgtgcaagggtgatgagagggagaggaaggtggagcttcccagaggaggcgacactgcagctgggtctcaggcatgcaatcagacaccatgaaagaactccttggcagggt

SEQ ID NO: 22567 - DNA, 122 bp, Homo sapiens
  misc_feature (61)..(62): /note="This region represents a CpG dinucleotide"
  misc_feature (61)..(61): /note="Nucleotide may be methylated to form 5-methylcytosine"
tcctctcactccagcgccaacactgactggtcccctgggctcgtgggccgccggcagcctcggctcgttctccagacagtgttccaagaagccacttccagcgaggaagcgttggcctgaga

SEQ ID NO: 22568 - DNA, 122 bp, Homo sapiens
  misc_feature (61)..(62): /note="This region represents a CpG dinucleotide"
  misc_feature (61)..(61): /note="Nucleotide may be methylated to form 5-methylcytosine"
ggagctggcctgggaggcagctgagcccagcccaggaagggtggtagagaccacattccacgtgggggctggacaaaagggtatggattctattccaagtatatcatgatttgaaaatgatg

SEQ ID NO: 22569 - DNA, 122 bp, Homo sapiens
  misc_feature (61)..(62): /note="This region represents a CpG dinucleotide"
  misc_feature (61)..(61): /note="Nucleotide may be methylated to form 5-methylcytosine"
acctgtatagtctctaaaagtttgtatgccctagaagttcacattgaatttcgatgaaaacgactcgcttcccttccatccaattgcttgcgactgtcttacccgatctttccctttccttt

SEQ ID NO: 22570 - DNA, 122 bp, Homo sapiens
  misc_feature (61)..(62): /note="This region represents a CpG dinucleotide"
  misc_feature (61)..(61): /note="Nucleotide may be methylated to form 5-methylcytosine"
aatctgctactgtattcaacactctaagggagtgaggagtttacttgattcagcggtaaacgcagagctctggtaggaggtattaatactacttatcagcaaaggttactagcttgcaaaat

SEQ ID NO: 22571 - DNA, 122 bp, Homo sapiens
  misc_feature (61)..(62): /note="This region represents a CpG dinucleotide"
  misc_feature (61)..(61): /note="Nucleotide may be methylated to form 5-methylcytosine"
gatgcctggggaaggcagtgtcatccccacatgctacccagggcctgagacgccactgtacgccaccaccaacttgagactttcagttccacactgcctttcaaaaccccttccccaagaga

SEQ ID NO: 22572 - DNA, 122 bp, Homo sapiens
  misc_feature (61)..(62): /note="This region represents a CpG dinucleotide"
  misc_feature (61)..(61): /note="Nucleotide may be methylated to form 5-methylcytosine"
cactctctctctcttcctgctctgctacggtaagacgtgctttgctttccctttgccttccgccatgattctaagtttcctgaggcctccccagccatgcagaactgtgagtcaatctaacc

SEQ ID NO: 22573 - DNA, 122 bp, Homo sapiens
  misc_feature (61)..(62): /note="This region represents a CpG dinucleotide"
  misc_feature (61)..(61): /note="Nucleotide may be methylated to form 5-methylcytosine"
tgtaataaacagaggtggaatgcatcacttggagatgtgaccattagatagaaaagttttcgtaactgattgagcagtgtgatgccacgtagcttccttgctgtatttcaaagagaacaaaa

SEQ ID NO: 22574 - DNA, 122 bp, Homo sapiens
  misc_feature (61)..(62): /note="This region represents a CpG dinucleotide"
  misc_feature (61)..(61): /note="Nucleotide may be methylated to form 5-methylcytosine"
ggtgattcaaagggggcgttttctaaaggagctgtttacaaaggagtggacatggtacaacgtacagggtacagggacagggaaaccaccaggcacagtgcacactccaaggccaggggcct

SEQ ID NO: 22575 - DNA, 122 bp, Homo sapiens
  misc_feature (61)..(62): /note="This region represents a CpG dinucleotide"
  misc_feature (61)..(61): /note="Nucleotide may be methylated to form 5-methylcytosine"
aatacaataccttttgttaagccactgtgatgagggcgggacggtatgtggcgtgattgccgcaaaaatcagactaacacaccatcttcaggtggagcctatgcccctttgaaagctttctc

SEQ ID NO: 22576 - DNA, 122 bp, Homo sapiens
  misc_feature (61)..(62): /note="This region represents a CpG dinucleotide"
  misc_feature (61)..(61): /note="Nucleotide may be methylated to form 5-methylcytosine"
tttatagcaaaatttctggcccatgtccccaatcaggtttgattatgcaaatgaagggggcgggtcaaacttgcttagttctgattggctgacacagctgagttctgattggtgatacagct

SEQ ID NO: 22577 - DNA, 122 bp, Homo sapiens
  misc_feature (61)..(62): /note="This region represents a CpG dinucleotide"
  misc_feature (61)..(61): /note="Nucleotide may be methylated to form 5-methylcytosine"
atactggcctaagcaaagaagagatttatataacagaaacagaaaagttcacagggcttccggtgcaactggattcaggaactcaaacaatgtcatcagaaatctgtctatctctatcgctt

SEQ ID NO: 22578 - DNA, 122 bp, Homo sapiens
  misc_feature (61)..(62): /note="This region represents a CpG dinucleotide"
  misc_feature (61)..(61): /note="Nucleotide may be methylated to form 5-methylcytosine"
attatatattggctacgattaatcaagatttaattgtataccagctgccgaaatgtttcccgtacaataaaaatcctcaatatgaaataaaggtttcatattactagtcgagttctttacta

SEQ ID NO: 22579 - DNA, 122 bp, Homo sapiens
  misc_feature (61)..(62): /note="This region represents a CpG dinucleotide"
  misc_feature (61)..(61): /note="Nucleotide may be methylated to form 5-methylcytosine"
tgctctgaagggtatttgcctatgagggaattaactgtacactatttaatccaccagttccggttcattagaaaaatgcagttctcgccggacatggtggctcacacctgtaatcccagcaa

SEQ ID NO: 22580 - DNA, 122 bp, Homo sapiens
  misc_feature (61)..(62): /note="This region represents a CpG dinucleotide"
  misc_feature (61)..(61): /note="Nucleotide may be methylated to form 5-methylcytosine"
ctaagtgactcacaggtgtgaatctgcttgataaaggaaggattcatgtcctgagagggacggagtggtgtgatgcagtatttcatcatgctagtcagaatggtgcacaacttaaaactgta

SEQ ID NO: 22581 - DNA, 122 bp, Homo sapiens
  misc_feature (61)..(62): /note="This region represents a CpG dinucleotide"
  misc_feature (61)..(61): /note="Nucleotide may be methylated to form 5-methylcytosine"
ctcaggtgatccacccacctcggcctcccaaagtgctgggattacaggcgtgagccactgcgcctggcctactagggtgagtttctaaggcaggagctgagagtagacatggctagtagggt

SEQ ID NO: 22582 - DNA, 122 bp, Homo sapiens
  misc_feature (61)..(62): /note="This region represents a CpG dinucleotide"
  misc_feature (61)..(61): /note="Nucleotide may be methylated to form 5-methylcytosine"
gttcttgggagccctctattggccttctgggtaatagcaggcagcctctgctgggggctgcgctccgtgagtcctggggagttacaatgaacaagagccttagtgctgtctgaaacacaaag

SEQ ID NO: 22583 - DNA, 122 bp, Homo sapiens
  misc_feature (61)..(62): /note="This region represents a CpG dinucleotide"
  misc_feature (61)..(61): /note="Nucleotide may be methylated to form 5-methylcytosine"
gaacaggagatgtccctcctgggacatcaactcttccacaacagggctgggcacgcaggacgctcagaagaaggagcatgtgcctgccttcagcttgtactgttcttgttgaggggaacagg

SEQ ID NO: 22584 - DNA, 122 bp, Homo sapiens
  misc_feature (61)..(62): /note="This region represents a CpG dinucleotide"
  misc_feature (61)..(61): /note="Nucleotide may be methylated to form 5-methylcytosine"
gtcttggttcccttgagaaatgcagggaaggaggcacccccacagtgaacgcctcttcttcgccagagacgcctgagaattcacatcagggacacttcacatcagggacaggccggggcaga

SEQ ID NO: 22585 - DNA, 122 bp, Homo sapiens
  misc_feature (61)..(62): /note="This region represents a CpG dinucleotide"
  misc_feature (61)..(61): /note="Nucleotide may be methylated to form 5-methylcytosine"
actcacatcttgtattctgaatattactcttcacaaaaaataactagggctccttggagacgtgactaattatagaactgagtcagagaaagtataagatgagtctgaaatattttgtgcca

SEQ ID NO: 22586 - DNA, 122 bp, Homo sapiens
  misc_feature (61)..(62): /note="This region represents a CpG dinucleotide"
  misc_feature (61)..(61): /note="Nucleotide may be methylated to form 5-methylcytosine"
actgtgtacaatagcttctgaagttttggagggtattggtgtagctgttatttctgagaccggagaaaatgacggtagagtgacagtttctctaatcatcagttttcaaagagtatgttttt

SEQ ID NO: 22587 - DNA, 122 bp, Homo sapiens
  misc_feature (61)..(62): /note="This region represents a CpG dinucleotide"
  misc_feature (61)..(61): /note="Nucleotide may be methylated to form 5-methylcytosine"
caaaggaggaatttgaggcccagaaaagttaagtactttgtccaagtcacacagctggtacgtggaagagccaagattccaactcaggccatctgactcatcggccaggtttctcaccagca

SEQ ID NO: 22588 - DNA, 122 bp, Homo sapiens
  misc_feature (61)..(62): /note="This region represents a CpG dinucleotide"
  misc_feature (61)..(61): /note="Nucleotide may be methylated to form 5-methylcytosine"
tttagatacataaattttaccattgtgttgtaactgcctatagtattcagtacagtgacacggtgtgcagatgtgtagcctaggagcaaaaaggtataccatatagcctaggtgtgtagtag

SEQ ID NO: 22589 - DNA, 122 bp, Homo sapiens
  misc_feature (61)..(62): /note="This region represents a CpG dinucleotide"
  misc_feature (61)..(61): /note="Nucleotide may be methylated to form 5-methylcytosine"
cccacaacaaccctacgaggttaagtcttaccatcatcctcattttctagatagggaaaacgaggcagaagtgtggtcaagtaacttggccatgtttactcaacgagtggctgtgctggggt

SEQ ID NO: 22590 - DNA, 122 bp, Homo sapiens
  misc_feature (61)..(62): /note="This region represents a CpG dinucleotide"
  misc_feature (61)..(61): /note="Nucleotide may be methylated to form 5-methylcytosine"
gctcttggttcccttcacaacttcctcagtagggaaaggattaatccatcatgaacaccacgctgaatattgtggttttgtttcatggaattactcaatatagctgtatttcttcttttagt

SEQ ID NO: 22591 - DNA, 122 bp, Homo sapiens
  misc_feature (61)..(62): /note="This region represents a CpG dinucleotide"
  misc_feature (61)..(61): /note="Nucleotide may be methylated to form 5-methylcytosine"
ctctcagtggccgtgtgggccaccactgttgctctgctactactggactgtcattgttttcgatcttggcctgggtcctgctgcaggctgccaggccaaccacttggcatgcatgtgcccct

SEQ ID NO: 22592 - DNA, 122 bp, Homo sapiens
  misc_feature (61)..(62): /note="This region represents a CpG dinucleotide"
  misc_feature (61)..(61): /note="Nucleotide may be methylated to form 5-methylcytosine"
tttgccagggctcctttcttcgtgccctccgggtcttgggagcacagtagttatcgggagcgtcgcctccggcgtgggctctcgggcgcgagtttcggacgaggcctgggcgcggtggcagg

SEQ ID NO: 22593 - DNA, 122 bp, Homo sapiens
  misc_feature (61)..(62): /note="This region represents a CpG dinucleotide"
  misc_feature (61)..(61): /note="Nucleotide may be methylated to form 5-methylcytosine"
tacaaatgaaagagcactaatgcctacattaacacctgtttgtcattatcttcaatttaacggctttatttcagacacgaagtatctgacaaattatccatccaaattcactggtcaggaca

SEQ ID NO: 22594 - DNA, 122 bp, Homo sapiens
  misc_feature (61)..(62): /note="This region represents a CpG dinucleotide"
  misc_feature (61)..(61): /note="Nucleotide may be methylated to form 5-methylcytosine"
taaaacaaagtttgacttctggacaattatccagggagagggcggggaacacaccttgcccggactgtctgggaatcccattgacaggtcatctcaggttcaccatcttcctgtcgtgggct

SEQ ID NO: 22595 - DNA, 122 bp, Homo sapiens
  misc_feature (61)..(62): /note="This region represents a CpG dinucleotide"
  misc_feature (61)..(61): /note="Nucleotide may be methylated to form 5-methylcytosine"
aagccgggttgcagattcccagcttctgaggcaatgctctagacatgagtcaattttatacgcaggaacagtgcttgttattcgaagcatttcaatggaaagtccatgtataaagtgactca

SEQ ID NO: 22596 - DNA, 122 bp, Homo sapiens
  misc_feature (61)..(62): /note="This region represents a CpG dinucleotide"
  misc_feature (61)..(61): /note="Nucleotide may be methylated to form 5-methylcytosine"
cgcccatctcctgccatccttctctggagagaggcgaggtgcttgaagtcccaaattcctcgtgtagtgagaaaacaggggaggcagaaaatccccaagatatcttcagaaacgaaggtgga

SEQ ID NO: 22597 - DNA, 122 bp, Homo sapiens
  misc_feature (61)..(62): /note="This region represents a CpG dinucleotide"
  misc_feature (61)..(61): /note="Nucleotide may be methylated to form 5-methylcytosine"
gatgattaaccattgtgaggaaggtatgttgaaagccaaggtacgctgaaaatgaggcctcgtctccaaaaatgttaaccaagctgtgaatgcaaaggaaaatttcttgaaggaaactaaag

SEQ ID NO: 22598 - DNA, 122 bp, Homo sapiens
  misc_feature (61)..(62): /note="This region represents a CpG dinucleotide"
  misc_feature (61)..(61): /note="Nucleotide may be methylated to form 5-methylcytosine"
agcactttggataaaaactcttaagacctggccatgcctaatgaagtactcttacttgaacggacagaaatctggaaggatcctcctgcttaaaaggttaggaatgataagcaagatgggaa

SEQ ID NO: 22599 - DNA, 122 bp, Homo sapiens
  misc_feature (61)..(62): /note="This region represents a CpG dinucleotide"
  misc_feature (61)..(61): /note="Nucleotide may be methylated to form 5-methylcytosine"
aaaagtttcctcatgcctccgtagtcaacctctctaaccagcccttggcaaccaatgattcgctttctgtcctaatagttttgtcttttccagactgtcttatgagtggtatcatacagtat

SEQ ID NO: 22600 - DNA, 122 bp, Homo sapiens
  misc_feature (61)..(62): /note="This region represents a CpG dinucleotide"
  misc_feature (61)..(61): /note="Nucleotide may be methylated to form 5-methylcytosine"
atggcgattctgtggatagagtcctgtcctcaaggaactacatttagtggagaaaagtaacgtacataaataatacaagaaaatgaacataaatgaggaaggaggaagtgctcagcggggga

SEQ ID NO: 22601 - DNA, 122 bp, Homo sapiens
  misc_feature (61)..(62): /note="This region represents a CpG dinucleotide"
  misc_feature (61)..(61): /note="Nucleotide may be methylated to form 5-methylcytosine"
cacatccccaccattccccaccgtggcaccatggagtcttccttacctgatctaggaaggcggcgctggagcttgctgccccctgtctgatccagcccctcatgttgtaggagggaggtggg

SEQ ID NO: 22602 - DNA, 122 bp, Homo sapiens
  misc_feature (61)..(62): /note="This region represents a CpG dinucleotide"
  misc_feature (61)..(61): /note="Nucleotide may be methylated to form 5-methylcytosine"
cttatcttttatcagtaaataaacatgagttcttgatattctttttcctgtggagcccctcgtttggacaatactatagtctcattttaaggtacaaaattcagtgcctgcttagaggatta

SEQ ID NO: 22603 - DNA, 122 bp, Homo sapiens
  misc_feature (61)..(62): /note="This region represents a CpG dinucleotide"
  misc_feature (61)..(61): /note="Nucleotide may be methylated to form 5-methylcytosine"
gacctgacctcccttcaaaatatgaaacagatgggcccaactagaattctccagctattccggacattattgtcaaggtttctcacattctaaaacctggtgagatgaggctagctcttgaa

SEQ ID NO: 22604 - DNA, 122 bp, Homo sapiens
  misc_feature (61)..(62): /note="This region represents a CpG dinucleotide"
  misc_feature (61)..(61): /note="Nucleotide may be methylated to form 5-methylcytosine"
agtaagaaaaactgggtgtcccagtaagattttcaatgggaacgtctttcccattgaagacgtggttgggtttcattttttcaccttccctccccctgtttctttttatgggctggtttgga

SEQ ID NO: 22605 - DNA, 122 bp, Homo sapiens
  misc_feature (61)..(62): /note="This region represents a CpG dinucleotide"
  misc_feature (61)..(61): /note="Nucleotide may be methylated to form 5-methylcytosine"
tcttcaagatccagctgaaattctagctcctaatggagcttcctcaactatcctggcccacgttgagttcttcctgctctaatgctcacattacttaccagagcttttatttgggcatttaa

SEQ ID NO: 22606 - DNA, 122 bp, Homo sapiens
  misc_feature (61)..(62): /note="This region represents a CpG dinucleotide"
  misc_feature (61)..(61): /note="Nucleotide may be methylated to form 5-methylcytosine"
tcctcccaaccctaggatttgatggtccttattttctgagtaacattaggttcctaatggcggtcactcttagtggctatgactgagggaggtgtcaaattatgttctacagtgtgagttca

SEQ ID NO: 22607 - DNA, 122 bp, Homo sapiens
  misc_feature (61)..(62): /note="This region represents a CpG dinucleotide"
  misc_feature (61)..(61): /note="Nucleotide may be methylated to form 5-methylcytosine"
aacaaacaaacaagcaaaaaaacctgactctgacaaatgatgcattgttcccagtcctttcgtctgatacctttttttgttgttcttttaaatctctctctgattctgctgaaacaacttga

SEQ ID NO: 22608 - DNA, 122 bp, Homo sapiens
  misc_feature (61)..(62): /note="This region represents a CpG dinucleotide"
  misc_feature (61)..(61): /note="Nucleotide may be methylated to form 5-methylcytosine"
actcacctgcagctgctgcatgacaggggccccaggcagtagacgggacactgtgaacatcgcccaattgccaattttcataatttggaagacctagaaatgggaaaacagactacaataag

SEQ ID NO: 22609 - DNA, 122 bp, Homo sapiens
  misc_feature (61)..(62): /note="This region represents a CpG dinucleotide"
  misc_feature (61)..(61): /note="Nucleotide may be methylated to form 5-methylcytosine"
gtatcctgcctattgcctgactatcatctacagctgggagctctgtgtgattaaaggccacgtagtgcaatccccgtctgaggctaacacatacctacactcacacatcaactgcagtagac

SEQ ID NO: 22610 - DNA, 122 bp, Homo sapiens
  misc_feature (61)..(62): /note="This region represents a CpG dinucleotide"
  misc_feature (61)..(61): /note="Nucleotide may be methylated to form 5-methylcytosine"
agagatggctgatgactgttggagtcgaagaggaatgaaatgccagaggtgtcatcaagacggacttgcttctggggtgggaatgactcaaagagccctgcccagggccacatctcaccaga

SEQ ID NO: 22611 - DNA, 122 bp, Homo sapiens
  misc_feature (61)..(62): /note="This region represents a CpG dinucleotide"
  misc_feature (61)..(61): /note="Nucleotide may be methylated to form 5-methylcytosine"
ctgttggtgtctcgatgctcctctcttctgctctggctcttatatacccatctccctgggcgtcagcctattactgagggtttttcccccatgtttcagtttatagttatttccataaaaaa

SEQ ID NO: 22612 - DNA, 122 bp, Homo sapiens
  misc_feature (61)..(62): /note="This region represents a CpG dinucleotide"
  misc_feature (61)..(61): /note="Nucleotide may be methylated to form 5-methylcytosine"
caaatatttgcacttcattgctacatctgcaaaaatcaaggcccaatgtattgagtgtcacggcaatccagaggagagagtgttgacttttcctggaattatgaggaaatgcttggaaggac

SEQ ID NO: 22613 - DNA, 122 bp, Homo sapiens
  misc_feature (61)..(62): /note="This region represents a CpG dinucleotide"
  misc_feature (61)..(61): /note="Nucleotide may be methylated to form 5-methylcytosine"
aagacgagaaatagcagttgactcaagacctactggagggttctgcttgccctgctgaggcgcctttgtttgtggaactgcattgttttgtttctgtggttatatttagagcagtgcacaga

SEQ ID NO: 22614 - DNA, 122 bp, Homo sapiens
  misc_feature (61)..(62): /note="This region represents a CpG dinucleotide"
  misc_feature (61)..(61): /note="Nucleotide may be methylated to form 5-methylcytosine"
tgaagtgagttgtccacaattaggagcagagtggggattagaaaccagttgtcagtttcccgggtcagggatctttccacacagttccagagaggaagtcctggctccaggcagaggaatga

SEQ ID NO: 22615 - DNA, 122 bp, Homo sapiens
  misc_feature (61)..(62): /note="This region represents a CpG dinucleotide"
  misc_feature (61)..(61): /note="Nucleotide may be methylated to form 5-methylcytosine"
ccaagtgatcaaggctaacatcaccagtggtgagtcatgttgacatcgtcatgttgacctcgtcctccccgctatggtacgatatgaaggacacttcacttctgtggtattttcccccaaaa

SEQ ID NO: 22616 - DNA, 122 bp, Homo sapiens
  misc_feature (61)..(62): /note="This region represents a CpG dinucleotide"
  misc_feature (61)..(61): /note="Nucleotide may be methylated to form 5-methylcytosine"
aagtactgcagggccaccagcccccagccagcagctgcagcaccacctccacaagagaagcgagatgcagccgcacttcctgtccccgcactgcactggcatagttctgagccaccagcttc

SEQ ID NO: 22617 - DNA, 122 bp, Homo sapiens
  misc_feature (61)..(62): /note="This region represents a CpG dinucleotide"
  misc_feature (61)..(61): /note="Nucleotide may be methylated to form 5-methylcytosine"
ccatccgtgcctcagggcccataaggataatttctccctaacacaaatgcgaatgggaaacgaggattaagcataccattcagagaagcaagtccatgatagagtccatataactgccttcc

SEQ ID NO: 22618 - DNA, 122 bp, Homo sapiens
  misc_feature (61)..(62): /note="This region represents a CpG dinucleotide"
  misc_feature (61)..(61): /note="Nucleotide may be methylated to form 5-methylcytosine"
tgaataattcacttaccttgaggaagaaaaggtatctcacataactaaaggggccttaaacgggcattcccacagagctctactgggccacgaagttagcaaataaaaggaaggcaacatta

SEQ ID NO: 22619 - DNA, 122 bp, Homo sapiens
  misc_feature (61)..(62): /note="This region represents a CpG dinucleotide"
  misc_feature (61)..(61): /note="Nucleotide may be methylated to form 5-methylcytosine"
atacaaaatatgcatgttggcatcatgcaaaagtcagtggatcagaggcatcatatggagcggcttagctgctctcaaaatcttgttatgcaggctttagtcagacaggctaatacagctgc

SEQ ID NO: 22620 - DNA, 122 bp, Homo sapiens
  misc_feature (61)..(62): /note="This region represents a CpG dinucleotide"
  misc_feature (61)..(61): /note="Nucleotide may be methylated to form 5-methylcytosine"
gtgagccagcaagtacttctgactcaacctggacatccaaatccatctgggtcgctactgcggttttgcagttgctactgaagtttaaacacctgtggagacactactgggtcttgaggctg

SEQ ID NO: 22621 - DNA, 122 bp, Homo sapiens
  misc_feature (61)..(62): /note="This region represents a CpG dinucleotide"
  misc_feature (61)..(61): /note="Nucleotide may be methylated to form 5-methylcytosine"
gtctatgttgtatttgagaatgtacaggcactaggagtgcgtgaactcttgtgcagctgacgttgattggagggcaaaaggggaaggggaaggcccttaggacaatgaattcagtcatgggg

SEQ ID NO: 22622 - DNA, 122 bp, Homo sapiens
  misc_feature (61)..(62): /note="This region represents a CpG dinucleotide"
  misc_feature (61)..(61): /note="Nucleotide may be methylated to form 5-methylcytosine"
gtgggaggcatgggaggcaccctccacaaggtgcattagaggatctccagtgggactgaacgccacgtcgcccacagtcataatgaaggaaactcagctggaatttctcccttccttgtcac

SEQ ID NO: 22623 - DNA, 122 bp, Homo sapiens
  misc_feature (61)..(62): /note="This region represents a CpG dinucleotide"
  misc_feature (61)..(61): /note="Nucleotide may be methylated to form 5-methylcytosine"
ggaggagtgctgcaggcgggcgcgtctggcacgggcccctccgggtggcggcaagggcgccggtggcccaggctcagggcctctgtctggcgccacgtcctgctgcccagagctggggcgct

SEQ ID NO: 22624 - DNA, 122 bp, Homo sapiens
  misc_feature (61)..(62): /note="This region represents a CpG dinucleotide"
  misc_feature (61)..(61): /note="Nucleotide may be methylated to form 5-methylcytosine"
ttaacaaagcaacagtagtttctataagccactacctctggaaggtcgtttttatctctccgcttccctgtctttgaggcgatactgttcacaactcttttaatgtttggataaagtccaag

SEQ ID NO: 22625 - DNA, 122 bp, Homo sapiens
  misc_feature (61)..(62): /note="This region represents a CpG dinucleotide"
  misc_feature (61)..(61): /note="Nucleotide may be methylated to form 5-methylcytosine"
cacttcagggccagagcatctaattaccaatttatcaccctctggagctctctgtcttttcgtttttgagttgggcaatgttcaagattatgactgctccatcagcctagttcctagcatga

SEQ ID NO: 22626 - DNA, 122 bp, Homo sapiens
  misc_feature (61)..(62): /note="This region represents a CpG dinucleotide"
  misc_feature (61)..(61): /note="Nucleotide may be methylated to form 5-methylcytosine"
tgaacccctgacctcaagtgatccgcccgcctcggcctctgaaggtgctggcattacaggcgtgagccaccgcacccagcagatcaccatgataaggatacagaacaattccatcactccct

SEQ ID NO: 22627 - DNA, 122 bp, Homo sapiens
  misc_feature (61)..(62): /note="This region represents a CpG dinucleotide"
  misc_feature (61)..(61): /note="Nucleotide may be methylated to form 5-methylcytosine"
aagccaaaatatttttcttaaatatattattttcttttcagccttatgtttacacaacaccgccctttgtcagagtgacacatggaaggatttattcggaagtgacttgcttttttgaccat

SEQ ID NO: 22628 - DNA, 122 bp, Homo sapiens
  misc_feature (61)..(62): /note="This region represents a CpG dinucleotide"
  misc_feature (61)..(61): /note="Nucleotide may be methylated to form 5-methylcytosine"
aaacagaaactgggtggagactgtctcaaaatatgtaggacatttgtgacaagctggggacggaccaagaaggtggtgctgaggcagcactaatatgaattagcgttacaacaatgtcccag

SEQ ID NO: 22629 - DNA, 122 bp, Homo sapiens
  misc_feature (61)..(62): /note="This region represents a CpG dinucleotide"
  misc_feature (61)..(61): /note="Nucleotide may be methylated to form 5-methylcytosine"
gaaataaacctgggagaatgatagatcagggatgactgactcacctataacacacattttcggtacatggattatgcactttgactatgacaaagacatgctgaaagtgagaccggatgctt

SEQ ID NO: 22630 - DNA, 122 bp, Homo sapiens
  misc_feature (61)..(62): /note="This region represents a CpG dinucleotide"
  misc_feature (61)..(61): /note="Nucleotide may be methylated to form 5-methylcytosine"
acctacagctgatgggctagtctgacaccctgttcaaggccaactcacagttccaggtgacgtgaataactgccctggcctggccattcacccttgcctgcaggtgtcccacacccagaagt

SEQ ID NO: 22631 - DNA, 122 bp, Homo sapiens
  misc_feature (61)..(62): /note="This region represents a CpG dinucleotide"
  misc_feature (61)..(61): /note="Nucleotide may be methylated to form 5-methylcytosine"
gctcaataacaagttattcttagtaagcttggatggctagaggaagataattgataaagtcggtttaggagcagcagtgacagtgggtgcttcttgattcaaaaaagaaaatcatcattttg

SEQ ID NO: 22632 - DNA, 122 bp, Homo sapiens
  misc_feature (61)..(62): /note="This region represents a CpG dinucleotide"
  misc_feature (61)..(61): /note="Nucleotide may be methylated to form 5-methylcytosine"
cccccggaacccccccgtgcgatccttccaatccagggcagcctcactgtcctggacgcccggccactgcatcctctgcccttgtgtgacctcctgcaagaaggcgggagcacgccgttccc

SEQ ID NO: 22633 - DNA, 122 bp, Homo sapiens
  misc_feature (61)..(62): /note="This region represents a CpG dinucleotide"
  misc_feature (61)..(61): /note="Nucleotide may be methylated to form 5-methylcytosine"
ggctcagcatttcaaccccatatcaagccacactttcacaatcacttcaactgagtgggacgagctagaggtttaagtatcagcaaccagatgtttccatatggaaatgccacttaccactt

SEQ ID NO: 22634 - DNA, 122 bp, Homo sapiens
  misc_feature (61)..(62): /note="This region represents a CpG dinucleotide"
  misc_feature (61)..(61): /note="Nucleotide may be methylated to form 5-methylcytosine"
gaaatccattaacgagctcctgggctgggcacgtggtgtgaggtaaccgatcacttctgtcgtctgaaactttggagacattgattttcagactcacaggcgcgactgagaagtgaggctcg

SEQ ID NO: 22635 - DNA, 122 bp, Homo sapiens
  misc_feature (61)..(62): /note="This region represents a CpG dinucleotide"
  misc_feature (61)..(61): /note="Nucleotide may be methylated to form 5-methylcytosine"
cccatcttagtaaatggcagttcatccttctggttgctgtgacccaaagccttagagtcacgctgactcttcacttccatatttgccctcttagaggcgaatctcaacacagcagacagagt

SEQ ID NO: 22636 - DNA, 122 bp, Homo sapiens
  misc_feature (61)..(62): /note="This region represents a CpG dinucleotide"
  misc_feature (61)..(61): /note="Nucleotide may be methylated to form 5-methylcytosine"
tgtgctgtaagagattcatacaaagtgctgcaattacacagaagacagtgaccttatgtacgatagagatgtgtgtacaaacttccaacacatgatggataagaacacattctcctctctca

SEQ ID NO: 22637 - DNA, 122 bp, Homo sapiens
  misc_feature (61)..(62): /note="This region represents a CpG dinucleotide"
  misc_feature (61)..(61): /note="Nucleotide may be methylated to form 5-methylcytosine"
gggtgtaacgctgcggtctgaggaccctgaaccctttttccttccttaaaaatgagatagcggccaggcgcggtgactcatgcctgtaatcccagcactttgggaggccaaggcagaaggtc

SEQ ID NO: 22638 - DNA, 122 bp, Homo sapiens
  misc_feature (61)..(62): /note="This region represents a CpG dinucleotide"
  misc_feature (61)..(61): /note="Nucleotide may be methylated to form 5-methylcytosine"
gagggctgaaccagccaaagcctttaagaacctggcactccagggttggtacagagcaggcgctcaacagccgccacttatcaatggtagtgacttgctaataaactcatccctgctgatct

SEQ ID NO: 22639 - DNA, 122 bp, Homo sapiens
  misc_feature (61)..(62): /note="This region represents a CpG dinucleotide"
  misc_feature (61)..(61): /note="Nucleotide may be methylated to form 5-methylcytosine"
cgtagcctatatggtttctgctgccactactcaagcttgccattgtagtgtcaaagtagccgtagacaatacgtaaatgaatgtgactgtgtcccaataaaactttatttacaaaaggaagc

SEQ ID NO: 22640 - DNA, 122 bp, Homo sapiens
  misc_feature (61)..(62): /note="This region represents a CpG dinucleotide"
  misc_feature (61)..(61): /note="Nucleotide may be methylated to form 5-methylcytosine"
caagccaaagaccatgccgaaggaaagggccatctgcccactgtgccaagccgagctcaacgtgggcagcaagagcccagccaactataacacatgcaccacctgcaggctccaggtgtgca

SEQ ID NO: 22641 - DNA, 122 bp, Homo sapiens
  misc_feature (61)..(62): /note="This region represents a CpG dinucleotide"
  misc_feature (61)..(61): /note="Nucleotide may be methylated to form 5-methylcytosine"
tttagcaagagaaaaagccagacctttgccctggcccagctcacaggtgatggggttaatcgggaattctttccctcctcagggctgctggtaggggtccagctccccgatgacctggggac

SEQ ID NO: 22642 - DNA, 122 bp, Homo sapiens
  misc_feature (61)..(62): /note="This region represents a CpG dinucleotide"
  misc_feature (61)..(61): /note="Nucleotide may be methylated to form 5-methylcytosine"
gggattggcaagggtctcttgtctgtcaaggtcttgggcgcttttggtttcagccggcaccgagccaaggccaggggcagacagcccagggctccagctgcctcctgcctgctgccctgtgt

SEQ ID NO: 22643 - DNA, 122 bp, Homo sapiens
  misc_feature (61)..(62): /note="This region represents a CpG dinucleotide"
  misc_feature (61)..(61): /note="Nucleotide may be methylated to form 5-methylcytosine"
aggctgtcacctgtcatccaggcaaatgtaatcggtcctacctctaagcctttacaatgtcgtgtccacatcttttacagggcaactgccagccctgcacagctacctccttctgcctcaag

SEQ ID NO: 22644 - DNA, 122 bp, Homo sapiens
  misc_feature (61)..(62): /note="This region represents a CpG dinucleotide"
  misc_feature (61)..(61): /note="Nucleotide may be methylated to form 5-methylcytosine"
actggaatgtaagctccatgagaatgaggatgtgtcttattcactgctgtgtccctagcacgtggcacatggtttatactgtcaatacatgtgagtgaatttgagtagtcttcttttcacac

SEQ ID NO: 22645 - DNA, 122 bp, Homo sapiens
  misc_feature (61)..(62): /note="This region represents a CpG dinucleotide"
  misc_feature (61)..(61): /note="Nucleotide may be methylated to form 5-methylcytosine"
aaccccgtgaggcatcactatggccatggggcgctcgaggcccagagaggtggaaccacacgcccaggtcccacagcaggtcaacagccagtgagccatgtaggcagcaccaggacagcctg

SEQ ID NO: 22646 - DNA, 122 bp, Homo sapiens
  misc_feature (61)..(62): /note="This region represents a CpG dinucleotide"
  misc_feature (61)..(61): /note="Nucleotide may be methylated to form 5-methylcytosine"
aggtagcatatatagtgtggatactctggacagaatggatgattcacgtcctgggcggaacggagcaagagggtgagatttcatcatgaattcagaatggcacttagtttagaacttatgaa

SEQ ID NO: 22647 - DNA, 122 bp, Homo sapiens
  misc_feature (61)..(62): /note="This region represents a CpG dinucleotide"
  misc_feature (61)..(61): /note="Nucleotide may be methylated to form 5-methylcytosine"
taggattccaatctcaaaggacatttattcatcacgatggcagactggtcaggtgtttggcgatcatccctagtcttcagctttttaatcatgagattttaaaaaatgtcaccatctgtagg

SEQ ID NO: 22648 - DNA, 122 bp, Homo sapiens
  misc_feature (61)..(62): /note="This region represents a CpG dinucleotide"
  misc_feature (61)..(61): /note="Nucleotide may be methylated to form 5-methylcytosine"
tggagtagcaaagttctatgagaaatgagaaagttgagtgaatcaggaaagtactgagtgcgtaacagcattaaacatctactggagttcattgctgttaactgaaagtgaaactaatcaga

SEQ ID NO: 22649 - DNA, 122 bp, Homo sapiens
  misc_feature (61)..(62): /note="This region represents a CpG dinucleotide"
  misc_feature (61)..(61): /note="Nucleotide may be methylated to form 5-methylcytosine"
cctggggataatcagcacccttgtcatgatctgcatggccactcctgtcttcaccatcatcgtcattcctcttggcattatttatgtatctgttcaggtaggtttggaaatggctaagtcat

SEQ ID NO: 22650 - DNA, 122 bp, Homo sapiens
  misc_feature (61)..(62): /note="This region represents a CpG dinucleotide"
  misc_feature (61)..(61): /note="Nucleotide may be methylated to form 5-methylcytosine"
atgggttttaacactctttctcattatgacttctcaagactagcctactaacccttgacacgcaactctaggtagagttgcaacacagttttccagcacagtgagacctgaataatccaggg

SEQ ID NO: 22651 - DNA, 122 bp, Homo sapiens
  misc_feature (61)..(62): /note="This region represents a CpG dinucleotide"
  misc_feature (61)..(61): /note="Nucleotide may be methylated to form 5-methylcytosine"
cctgcaggctgagctggggacactgcactatttatgtggtcaccggggcaacagggagctcgtctggagccttgggacgctatcggtggcagctgaggacaatgagatgaggcaggaagctg

SEQ ID NO: 22652 - DNA, 122 bp, Homo sapiens
  misc_feature (61)..(62): /note="This region represents a CpG dinucleotide"
  misc_feature (61)..(61): /note="Nucleotide may be methylated to form 5-methylcytosine"
actcacatatggctcattcaaagccactggcttgtacatggcatttatcgttaatctagccgtgcccccagcatcataaaaagaccccatggaaactcatccatcagatcccagcccttgac

SEQ ID NO: 22653 - DNA, 122 bp, Homo sapiens
  misc_feature (61)..(62): /note="This region represents a CpG dinucleotide"
  misc_feature (61)..(61): /note="Nucleotide may be methylated to form 5-methylcytosine"
gcaggtcttgacaagcatcatattcctgatgactgacctgaaccatttccggaggggagccgctggatagctggaaatcttgctgagcagtttcaggaaatacagcgtcatcatctttcaga

SEQ ID NO: 22654 - DNA, 122 bp, Homo sapiens
  misc_feature (61)..(62): /note="This region represents a CpG dinucleotide"
  misc_feature (61)..(61): /note="Nucleotide may be methylated to form 5-methylcytosine"
gtgtgatacaagggccctgactcatcttgagctcaacttagcatttagatatatctggagcgggatagaggcagggctctggggaaagaactcaccttcagggaagaaggaatagagactgg

SEQ ID NO: 22655 - DNA, 122 bp, Homo sapiens
  misc_feature (61)..(62): /note="This region represents a CpG dinucleotide"
  misc_feature (61)..(61): /note="Nucleotide may be methylated to form 5-methylcytosine"
ctgacaccagcccctcagcggggccgtattgctgtggtaatctgggtgagccggacagagcgtcctgcttacaagttcaatataatggaacagcagggggcgaagggctggcagaaaagctt

SEQ ID NO: 22656 - DNA, 122 bp, Homo sapiens
  misc_feature (61)..(62): /note="This region represents a CpG dinucleotide"
  misc_feature (61)..(61): /note="Nucleotide may be methylated to form 5-methylcytosine"
ctcctcaaaatcaaaggttaattctggataacagcagcaaaacattgtctatacaaaaaacgaagagaaatgaaaattttaatggaaaagactatcataatataaaatatcctattttagaa

SEQ ID NO: 22657 - DNA, 122 bp, Homo sapiens
  misc_feature (61)..(62): /note="This region represents a CpG dinucleotide"
  misc_feature (61)..(61): /note="Nucleotide may be methylated to form 5-methylcytosine"
ctgtggtttctacaaaataaccggccagcattccttcctgataagagaccatggaggatgcgcagtaagggttttcatgtcctctgcttcaacttttgacctcagagggctgaaaactcctc

SEQ ID NO: 22658 - DNA, 122 bp, Homo sapiens
  misc_feature (61)..(62): /note="This region represents a CpG dinucleotide"
  misc_feature (61)..(61): /note="Nucleotide may be methylated to form 5-methylcytosine"
acaaaactataggataaaaaccacaaaggggtagggggctaactagaaacaggcacagggcgctttttgggttgatggattgttctacagcctgattctggatgtagatgactgcagacttg

SEQ ID NO: 22659 - DNA, 122 bp, Homo sapiens
  misc_feature (61)..(62): /note="This region represents a CpG dinucleotide"
  misc_feature (61)..(61): /note="Nucleotide may be methylated to form 5-methylcytosine"
atcatcaaggatcagtcttcaatggtctttccatcttttggagctgtcatagtaaccatacgaaatgacttcctttgtggtcataaaatgcctgtcacagctctaggtcttatatcctcaca

SEQ ID NO: 22660 - DNA, 122 bp, Homo sapiens
  misc_feature (61)..(62): /note="This region represents a CpG dinucleotide"
  misc_feature (61)..(61): /note="Nucleotide may be methylated to form 5-methylcytosine"
gtattacttgtcttaaagaatagggtagtattactcactcttgaagtggtactcttgaatcgggtagtattactcttgaatagggtagtattactcacgcctgaatcgctatggcaaaatcc

SEQ ID NO: 22661 - DNA, 122 bp, Homo sapiens
  misc_feature (61)..(62): /note="This region represents a CpG dinucleotide"
  misc_feature (61)..(61): /note="Nucleotide may be methylated to form 5-methylcytosine"
atgctggactgtaccgtaagcaacaagtgaaatgagttcagtgatctcattctagtccttcgactcctgtccacatcactaagcgactgcacagcttggcacaggccaggatgagtcagcag

SEQ ID NO: 22662 - DNA, 122 bp, Homo sapiens
  misc_feature (61)..(62): /note="This region represents a CpG dinucleotide"
  misc_feature (61)..(61): /note="Nucleotide may be methylated to form 5-methylcytosine"
gggcctgactttttccctttctctgtagacaccttatgaatgtcccttatagttggattgcgtgtgtgagcacagtgagtggatggactagcaggagtatatgataccatgtcagccctgat

SEQ ID NO: 22663 - DNA, 122 bp, Homo sapiens
  misc_feature (61)..(62): /note="This region represents a CpG dinucleotide"
  misc_feature (61)..(61): /note="Nucleotide may be methylated to form 5-methylcytosine"
tacttcactcccactccatcctccccatccccctctccctgcctcgtgcaaatcccagcacgccgcccaccatatgcagcgatccctcactatcacacagagcccaacatctggcgggcgct

SEQ ID NO: 22664 - DNA, 122 bp, Homo sapiens
  misc_feature (61)..(62): /note="This region represents a CpG dinucleotide"
  misc_feature (61)..(61): /note="Nucleotide may be methylated to form 5-methylcytosine"
aatgctctgcaatcccatccaattcaatctggagtgagcatgaagtaagacacgtgctctcgtgtgtcacaggagagacgctcagggctctctgcatgcagatagccaaaatgcacatgctc

SEQ ID NO: 22665 - DNA, 122 bp, Homo sapiens
  misc_feature (61)..(62): /note="This region represents a CpG dinucleotide"
  misc_feature (61)..(61): /note="Nucleotide may be methylated to form 5-methylcytosine"
gggtgtggtcttcccactggagcatggaaactgcaaagccaccagcttgagggaggggcacgtggttaaggaagcaaagaaaaagctgacatgagaactgtttccaggaacaaaccatgaat

SEQ ID NO: 22666 - DNA, 122 bp, Homo sapiens
  misc_feature (61)..(62): /note="This region represents a CpG dinucleotide"
  misc_feature (61)..(61): /note="Nucleotide may be methylated to form 5-methylcytosine"
aaagggcacatctgatgagttgcagaatcctagagcctgcgtctgtgccgtgacctcccacgcccagttccccggtgcctagcatgtagtaggagctcagtaaatatctgttgtgtaatata

SEQ ID NO: 22667 - DNA, 122 bp, Homo sapiens
  misc_feature (61)..(62): /note="This region represents a CpG dinucleotide"
  misc_feature (61)..(61): /note="Nucleotide may be methylated to form 5-methylcytosine"
ttcagagcttccctccttcccatgagaggctgaacaattaattgccactttaaacaatagcgcattctttttttttttttttacagtaaacgttgggaacagctgcaagggagggaaggctg

SEQ ID NO: 22668 - DNA, 122 bp, Homo sapiens
  misc_feature (61)..(62): /note="This region represents a CpG dinucleotide"
  misc_feature (61)..(61): /note="Nucleotide may be methylated to form 5-methylcytosine"
tccatcacggtgggtgaatccgaggccccaggatggcgtgtgagcgggatcagccgcatgcgctgttttcctctggcttctcccacccggcacaatggccttgacattcaccgcacttccgc

SEQ ID NO: 22669 - DNA, 122 bp, Homo sapiens
  misc_feature (61)..(62): /note="This region represents a CpG dinucleotide"
  misc_feature (61)..(61): /note="Nucleotide may be methylated to form 5-methylcytosine"
cccccaccccccctttaattgaaactgtgtgcatgcagtgagcgcaggattctagtaatccgacgggaggatccacttaaaagactaaaatccagaaaccccaggaaaaaagaataggaccg

SEQ ID NO: 22670 - DNA, 122 bp, Homo sapiens
  misc_feature (61)..(62): /note="This region represents a CpG dinucleotide"
  misc_feature (61)..(61): /note="Nucleotide may be methylated to form 5-methylcytosine"
cgagactccgtctcaaataataataatgtctatttttttaagtttctttaaaaagaaatacgcaaaggacaaagcaggggcccctgaagtttcatcacttagagcagtggtctccaaactac

SEQ ID NO: 22671 - DNA, 122 bp, Homo sapiens
  misc_feature (61)..(62): /note="This region represents a CpG dinucleotide"
  misc_feature (61)..(61): /note="Nucleotide may be methylated to form 5-methylcytosine"
catggctgtgtggaatagcagaagggcccccgctggagatgtgggggtgctttccaactgcgctctgccagctttgaggctctgggcaagcacttccactctgggagcttcagcttcctcct

SEQ ID NO: 22672 - DNA, 122 bp, Homo sapiens
  misc_feature (61)..(62): /note="This region represents a CpG dinucleotide"
  misc_feature (61)..(61): /note="Nucleotide may be methylated to form 5-methylcytosine"
gtgtgagccactgtgcccaacccaaatcctctttttgtgttccactcttaaataggagtacgtagtgggccgggtgtggtggctcacctctaatcccagcattttgggaggctgaggtggga

SEQ ID NO: 22673 - DNA, 122 bp, Homo sapiens
  misc_feature (61)..(62): /note="This region represents a CpG dinucleotide"
  misc_feature (61)..(61): /note="Nucleotide may be methylated to form 5-methylcytosine"
gctgtggttgcatagggaggatcatgcagggggtggggctatagagcttccaagagattacgtcctgtgtctttagctaccaggatgagtcgagaaagactaccagctgggggcatggctga

SEQ ID NO: 22674 - DNA, 122 bp, Homo sapiens
  misc_feature (61)..(62): /note="This region represents a CpG dinucleotide"
  misc_feature (61)..(61): /note="Nucleotide may be methylated to form 5-methylcytosine"
ggtttgcacagaaagacaatttcaaggacttatcttgaatacaacaaagggcaaccttgccgtaaatacatttaattatctgtcaatccctccagttctcttctactaaattgtgtgtgact

SEQ ID NO: 22675 - DNA, 122 bp, Homo sapiens
  misc_feature (61)..(62): /note="This region represents a CpG dinucleotide"
  misc_feature (61)..(61): /note="Nucleotide may be methylated to form 5-methylcytosine"
tgccagtacatcatgccaaaggtgcagagccacagcactgcccagaaggccgtcttcatgcggttgtgctgggagcacaccaggcggatggcgccgtggatggtggtgttgttgcagaagaa

SEQ ID NO: 22676 - DNA, 122 bp, Homo sapiens
  misc_feature (61)..(62): /note="This region represents a CpG dinucleotide"
  misc_feature (61)..(61): /note="Nucleotide may be methylated to form 5-methylcytosine"
ttttagtttgtaaaatagattgttttgagtaaattctgtcttgaatgaatatttagttaacgttgtttaaagaaacctaataaccaaaaaggggtaagggtgccatttatgctatccaaatt

SEQ ID NO: 22677 - DNA, 122 bp, Homo sapiens
  misc_feature (61)..(62): /note="This region represents a CpG dinucleotide"
  misc_feature (61)..(61): /note="Nucleotide may be methylated to form 5-methylcytosine"
aggttggtaacttttctctgtaaagggccagatcgtaaatattttaggctgtgtggaccacgtggtctccgatgcaacgactcaattctgccactgcagtgcaaaagcagcctcggacaata

SEQ ID NO: 22678 - DNA, 122 bp, Homo sapiens
  misc_feature (61)..(62): /note="This region represents a CpG dinucleotide"
  misc_feature (61)..(61): /note="Nucleotide may be methylated to form 5-methylcytosine"
ggaggcagctgggggcaagacagtgaaaacaggtgggcatccaaccctcaggccccttagcgtttctaaggcaaacaagaaagacttctgtttcctatcactgatgaggtgggctaagctgc

SEQ ID NO: 22679 - DNA, 122 bp, Homo sapiens
  misc_feature (61)..(62): /note="This region represents a CpG dinucleotide"
  misc_feature (61)..(61): /note="Nucleotide may be methylated to form 5-methylcytosine"
ctcactcccagtcctggaaaacatcccactttctgtattgttttcttacaaacattgagtcgaatctctgaattgataagctgcctagctgataacgaggctaaagtaaacccagcaacttt

SEQ ID NO: 22680 - DNA, 122 bp, Homo sapiens
  misc_feature (61)..(62): /note="This region represents a CpG dinucleotide"
  misc_feature (61)..(61): /note="Nucleotide may be methylated to form 5-methylcytosine"
taggagtttgttcttgcaggcattactaaaacagcttcaaaacatcttatggccatgggtcgtgactggcaaggaatgtgccttgctggttttaagctggagttgattttaaaatggtgtca

SEQ ID NO: 22681 - DNA, 122 bp, Homo sapiens
  misc_feature (61)..(62): /note="This region represents a CpG dinucleotide"
  misc_feature (61)..(61): /note="Nucleotide may be methylated to form 5-methylcytosine"
gtggaaacactcgctgctccaggcgtgcagctccagcccaggcctctggctgccagctcacgcactgctactcacacacatctggcccgaggcggcgtggggaactttccaatggcaagcag

SEQ ID NO: 22682 - DNA, 122 bp, Homo sapiens
  misc_feature (61)..(62): /note="This region represents a CpG dinucleotide"
  misc_feature (61)..(61): /note="Nucleotide may be methylated to form 5-methylcytosine"
cggagacggctgggacagaagctgcttgtcaggccagcctgggcaccttgggtgtctcgtcggtgcacgatgcattacacggcctttctgagaaggaggtgagctgcccgtggggagggaga

SEQ ID NO: 22683 - DNA, 122 bp, Homo sapiens
  misc_feature (61)..(62): /note="This region represents a CpG dinucleotide"
  misc_feature (61)..(61): /note="Nucleotide may be methylated to form 5-methylcytosine"
taagcaaaaccatctcaacgaggctgctttcttcactaaattcaataatagccagcaagtcgctattttgtagtcactatttactaatcttgatttttataggcacaggcctagaataagaa

SEQ ID NO: 22684 - DNA, 122 bp, Homo sapiens
  misc_feature (61)..(62): /note="This region represents a CpG dinucleotide"
  misc_feature (61)..(61): /note="Nucleotide may be methylated to form 5-methylcytosine"
ggaaggagttttcagtggggatggaatccaggctgcaaagagaaagcatttgtatgtgaacgcttctggaaaattacttaaagctgggctcagtggcacacgcctgtagtcccagctgccca

SEQ ID NO: 22685 - DNA, 122 bp, Homo sapiens
  misc_feature (61)..(62): /note="This region represents a CpG dinucleotide"
  misc_feature (61)..(61): /note="Nucleotide may be methylated to form 5-methylcytosine"
atggcccagggcacatggccctcctgtacataactcacaaacttcctgcttaccatcaaacgcctcgatttatcaagcaccttggctgacagaagaatgcgggttaagcttcctgctacctt

SEQ ID NO: 22686 - DNA, 122 bp, Homo sapiens
  misc_feature (61)..(62): /note="This region represents a CpG dinucleotide"
  misc_feature (61)..(61): /note="Nucleotide may be methylated to form 5-methylcytosine"
ctaggtttgatttttttccccttgttctaaagttgctgtttccgaatctccttctattgtcgtgtttataaaatgtatgagaaacagggacatttaaagacatcatagaaatggccactctt

SEQ ID NO: 22687 - DNA, 122 bp, Homo sapiens
  misc_feature (61)..(62): /note="This region represents a CpG dinucleotide"
  misc_feature (61)..(61): /note="Nucleotide may be methylated to form 5-methylcytosine"
gtgctacagagctgacggaagcctcctcaccacagggcggcctcactgtggggtggttggcgggtgggggtgggggtcactgggcaggaatcccgaaacattggcagcatctggaaggcttt

SEQ ID NO: 22688 - DNA, 122 bp, Homo sapiens
  misc_feature (61)..(62): /note="This region represents a CpG dinucleotide"
  misc_feature (61)..(61): /note="Nucleotide may be methylated to form 5-methylcytosine"
cctactcctctgatggactccccaatttcagttcatggcaacttcatctttcccgttgctcggaacaaaaagcctcttttgattacaccccacacccaatctgatggcaaactggtttgtgt

SEQ ID NO: 22689 - DNA, 122 bp, Homo sapiens
  misc_feature (61)..(62): /note="This region represents a CpG dinucleotide"
  misc_feature (61)..(61): /note="Nucleotide may be methylated to form 5-methylcytosine"
ggcagcggcggtgagcgatgccttccctctgccacaaggcgccgcctgcagagcctgccgcgtccgccacgcccagagcgtacccgcagctcagcgccgagttactcctgctggcggtggcc

SEQ ID NO: 22690 - DNA, 122 bp, Homo sapiens
  misc_feature (61)..(62): /note="This region represents a CpG dinucleotide"
  misc_feature (61)..(61): /note="Nucleotide may be methylated to form 5-methylcytosine"
gtgactcttgggtcaagttgggctgcctcaccctgtccaagtctgggtggaccaaggccacgtagtcattgcaggtggtgacattgcccaaggctgagagccgctcctccacccgcctaatc

SEQ ID NO: 22691 - DNA, 122 bp, Homo sapiens
  misc_feature (61)..(62): /note="This region represents a CpG dinucleotide"
  misc_feature (61)..(61): /note="Nucleotide may be methylated to form 5-methylcytosine"
ctcttttgtaaaataaacactttgtactttactgaaagaacactagtgttctttcctttccgttgtgaaaaaagttgtttctgaggaattgaaaccccagaagataactacaacaaaaacat

SEQ ID NO: 22692 - DNA, 122 bp, Homo sapiens
  misc_feature (61)..(62): /note="This region represents a CpG dinucleotide"
  misc_feature (61)..(61): /note="Nucleotide may be methylated to form 5-methylcytosine"
gcagggatagcaggggactgctccttcctgcggcgggcaggtggagttgctgagcagcttcgtcattaggagagagatgcccactaccttaaaaatcagaagctttttggcttctggaagct

SEQ ID NO: 22693 - DNA, 122 bp, Homo sapiens
  misc_feature (61)..(62): /note="This region represents a CpG dinucleotide"
  misc_feature (61)..(61): /note="Nucleotide may be methylated to form 5-methylcytosine"
caggccaaatttggtcagcctggctttgttaacaaagttttattggaatgcagccgtccccgttcatttacacatcacctatggctgctttcatgctgtaaaatagaggttagtagttgtag

SEQ ID NO: 22694 - DNA, 122 bp, Homo sapiens
  misc_feature (61)..(62): /note="This region represents a CpG dinucleotide"
  misc_feature (61)..(61): /note="Nucleotide may be methylated to form 5-methylcytosine"
ccccccacccaggggtgtttagcacaccgccggacgtgtccctgggcaagtggggtgacccgatgccccggctttgggctgcttccttcggagagctgcgtgggcactggaagcgatgttag

SEQ ID NO: 22695 - DNA, 122 bp, Homo sapiens
  misc_feature (61)..(62): /note="This region represents a CpG dinucleotide"
  misc_feature (61)..(61): /note="Nucleotide may be methylated to form 5-methylcytosine"
attctatttattatgtaaattacaaacattaggacacatttctcttaatatcttcttccacgtatgcaatccaactgatatggttttaaaaaaaatcttaaacccacattccaaacaaataa

SEQ ID NO: 22696 - DNA, 122 bp, Homo sapiens
  misc_feature (61)..(62): /note="This region represents a CpG dinucleotide"
  misc_feature (61)..(61): /note="Nucleotide may be methylated to form 5-methylcytosine"
agaagaaaattttatggaattatataccacaaaagacaactttaaggacactggtttcttcgaatggaaactatacagttaaagtagattctggattgcttcatgctatcctcacttttaag

SEQ ID NO: 22697 - DNA, 122 bp, Homo sapiens
  misc_feature (61)..(62): /note="This region represents a CpG dinucleotide"
  misc_feature (61)..(61): /note="Nucleotide may be methylated to form 5-methylcytosine"
ttagagtgacagggtgctgggctgtcaccaatcatacacaaagtggacaaggcattgagacgtagtcattttgacagagaagtgacattttgatacagcctaaaaacaaattgttaaatttt

SEQ ID NO: 22698 - DNA, 122 bp, Homo sapiens
  misc_feature (61)..(62): /note="This region represents a CpG dinucleotide"
  misc_feature (61)..(61): /note="Nucleotide may be methylated to form 5-methylcytosine"
cttccctttgtgtggcctgaagaccacattctgatcaacaggaagtaagcagtcgtgttgcgtaacaacccacagcaagctttaccagacagcttgtgtgtgccctttgtcccttctcttct

SEQ ID NO: 22699 - DNA, 122 bp, Homo sapiens
  misc_feature (61)..(62): /note="This region represents a CpG dinucleotide"
  misc_feature (61)..(61): /note="Nucleotide may be methylated to form 5-methylcytosine"
ttttaaaaatagtcaacagtgaaatgccactttttttacattgaaaattggcacaaacaccgttaataaaggtgttctaaagttctcatggggtgtgggaagggaggtcataaacacttaac

SEQ ID NO: 22700 - DNA, 122 bp, Homo sapiens
  misc_feature (61)..(62): /note="This region represents a CpG dinucleotide"
  misc_feature (61)..(61): /note="Nucleotide may be methylated to form 5-methylcytosine"
cgggtgccggcaaggtctgtgaggacagtcagacacctgaagtttcctagcaggcggctgcgtgccagtgaccagccatgcgcaggaggggaggtgcgggggaggaggttcacaggaacaga

SEQ ID NO: 22701 - DNA, 122 bp, Homo sapiens
  misc_feature (61)..(62): /note="This region represents a CpG dinucleotide"
  misc_feature (61)..(61): /note="Nucleotide may be methylated to form 5-methylcytosine"
accttggaggggccaggggctgaggaaggccggacccaggttccaggggcgcaggcagtgcggcttttggctgtgtacatagggtgctttattctccacagagtgatacatgctaaggtggg

SEQ ID NO: 22702 - DNA, 122 bp, Homo sapiens
  misc_feature (61)..(62): /note="This region represents a CpG dinucleotide"
  misc_feature (61)..(61): /note="Nucleotide may be methylated to form 5-methylcytosine"
tgaccttttgcttcctgaaacatggctcaaacacttccttaatttgcaggaacactcacacggccagggaaggtctgggtgctttttcagtagctgtgtacctcatattggcttgtttgcag

SEQ ID NO: 22703 - DNA, 122 bp, Homo sapiens
  misc_feature (61)..(62): /note="This region represents a CpG dinucleotide"
  misc_feature (61)..(61): /note="Nucleotide may be methylated to form 5-methylcytosine"
ctttaaacttagattctgtagccagtgctttaggcctggcattcctgtggctttggtaaccgtccccacattgtctaaaatccttcaaaagaatctctcattgttgcagagcttgagtagtg

SEQ ID NO: 22704 - DNA, 122 bp, Homo sapiens
  misc_feature (61)..(62): /note="This region represents a CpG dinucleotide"
  misc_feature (61)..(61): /note="Nucleotide may be methylated to form 5-methylcytosine"
cccaagcacatttgctgtgctcctcctaaggtaaataacagcatccactgtgctcagccacggcttaaagcccttctagattgcatacaactcaggcagggtcattctgactcactccctca

SEQ ID NO: 22705 - DNA, 122 bp, Homo sapiens
  misc_feature (61)..(62): /note="This region represents a CpG dinucleotide"
  misc_feature (61)..(61): /note="Nucleotide may be methylated to form 5-methylcytosine"
gcacagggggctcagcagagcaggttcaactgaaagttcctagtggttcccaactgtcagcgcattctgctggcctcttccccctgggcaaagagccagccatccttcaaagccgggcacaa

SEQ ID NO: 22706 - DNA, 122 bp, Homo sapiens
  misc_feature (61)..(62): /note="This region represents a CpG dinucleotide"
  misc_feature (61)..(61): /note="Nucleotide may be methylated to form 5-methylcytosine"
ctgtacgaggaggagcctcccaccggggtgagcttaaatttgcggaaatatagaaagtcccgccccacccaactctgaccctggggcctcttgcagcagtatcaagggctgcttagagcctc

SEQ ID NO: 22707 - DNA, 122 bp, Homo sapiens
  misc_feature (61)..(62): /note="This region represents a CpG dinucleotide"
  misc_feature (61)..(61): /note="Nucleotide may be methylated to form 5-methylcytosine"
agggcagggctccagagctaggctgctaagttcagatcttccattctttagctgtgagaccgtgggcaagttaatgaacctctctgggtttcagtagcctcgtctagaaaacaggaatcata

SEQ ID NO: 22708 - DNA, 122 bp, Homo sapiens
  misc_feature (61)..(62): /note="This region represents a CpG dinucleotide"
  misc_feature (61)..(61): /note="Nucleotide may be methylated to form 5-methylcytosine"
gaattttccccactgtgtattgggggaggagtggcaactgtgcacaagaagctaagtcttcgctattattcactaatctgggaggagcaccgacccagaacccaccttctttccttcttcac

SEQ ID NO: 22709 - DNA, 122 bp, Homo sapiens
  misc_feature (61)..(62): /note="This region represents a CpG dinucleotide"
  misc_feature (61)..(61): /note="Nucleotide may be methylated to form 5-methylcytosine"
caaggctcctgggtctttgcttgccttttcaaaagtgtttcaggcagtgaaacaggaacccgcataaaagctgggttcagataacaccgagatgggtcagcagctttgaatcccaacactcg

SEQ ID NO: 22710 - DNA, 122 bp, Homo sapiens
  misc_feature (61)..(62): /note="This region represents a CpG dinucleotide"
  misc_feature (61)..(61): /note="Nucleotide may be methylated to form 5-methylcytosine"
gaggacctgtgtaaagtacttcctacagggtgatgctgctgaacaaccactctgctttggcgtctcctttggctgagctacagagcagagtttccctggctgaggatggtagtcccatctcc

SEQ ID NO: 22711 - DNA, 122 bp, Homo sapiens
  misc_feature (61)..(62): /note="This region represents a CpG dinucleotide"
  misc_feature (61)..(61): /note="Nucleotide may be methylated to form 5-methylcytosine"
aaagggattgcaattactataggttttacaggtatcgcgagatttcgtcaaatctcattacggatcccggctgaaagccattttgtttttcagctcacttcaagggtacctgaagcgaattg

SEQ ID NO: 22712 - DNA, 122 bp, Homo sapiens
  misc_feature (61)..(62): /note="This region represents a CpG dinucleotide"
  misc_feature (61)..(61): /note="Nucleotide may be methylated to form 5-methylcytosine"
atatatatatatatatatatacacacatacatacatacacacacacacacttaatatatacgcataaaaattaaaattaaaaacaaagtgttacagctcttttagaatttgtctagcaggat

SEQ ID NO: 22713 - DNA, 122 bp, Homo sapiens
  misc_feature (61)..(62): /note="This region represents a CpG dinucleotide"
  misc_feature (61)..(61): /note="Nucleotide may be methylated to form 5-methylcytosine"
ctttgaacaactcagctcctgcaaaagcttccgtccctgaggcaaaaggacacgagggcccgactgccagagggaggatggacagacctcttgccctcacactctggtaccaggactgttcg

SEQ ID NO: 22714 - DNA, 122 bp, Homo sapiens
  misc_feature (61)..(62): /note="This region represents a CpG dinucleotide"
  misc_feature (61)..(61): /note="Nucleotide may be methylated to form 5-methylcytosine"
cccaacagggacatgtccgtcacggtggtgtgttacatcatgtcagatggcaattgaatgcgctgttaacataagctgacaggaaggctctagcaatctgcttatctggatgccacccttgc

SEQ ID NO: 22715 - DNA, 122 bp, Homo sapiens
  misc_feature (61)..(62): /note="This region represents a CpG dinucleotide"
  misc_feature (61)..(61): /note="Nucleotide may be methylated to form 5-methylcytosine"
aatcttccctggttgtcacctgcaatgatgttatgtctgagttgaatgtttctcactgcacgctagtttgctcagaggtaatagaggaggaactgttttctcactttctctttctctttagc

SEQ ID NO: 22716 - DNA, 122 bp, Homo sapiens
  misc_feature (61)..(62): /note="This region represents a CpG dinucleotide"
  misc_feature (61)..(61): /note="Nucleotide may be methylated to form 5-methylcytosine"
atcctgtgcaaagagtccaaggagttctcagacagttgctgggattttcgtcctgctcttcggctctttaagtccacatcctcatatggattctccttgggcagatctcctgcagaggagga

SEQ ID NO: 22717 - DNA, 122 bp, Homo sapiens
  misc_feature (61)..(62): /note="This region represents a CpG dinucleotide"
  misc_feature (61)..(61): /note="Nucleotide may be methylated to form 5-methylcytosine"
gaaccaattccagcttcataactcagctgtgaacgaactcccttaggcatttggtagccacgtagccagtagttcaagactagaaaaccctgaggaaagaaaaacagaagcaaagggagtgt

SEQ ID NO: 22718 - DNA, 122 bp, Homo sapiens
  misc_feature (61)..(62): /note="This region represents a CpG dinucleotide"
  misc_feature (61)..(61): /note="Nucleotide may be methylated to form 5-methylcytosine"
gaaacgcacacactgcatccacctgggcctcttcgtattagcctcatgggacttacagggcgaggagaatccacacaagcatgaagctcatgctgcttgctatgctaggggtgagtaataaa

SEQ ID NO: 22719 - DNA, 122 bp, Homo sapiens
  misc_feature (61)..(62): /note="This region represents a CpG dinucleotide"
  misc_feature (61)..(61): /note="Nucleotide may be methylated to form 5-methylcytosine"
acatgatataagagggaagcctgatttcaccctctcagctggtcatctgtaagatgggaacgacgcatcttgggagaacaacccagaagagagtatcagaaagtgctttccaaattttcaag

SEQ ID NO: 22720 - DNA, 122 bp, Homo sapiens
  misc_feature (61)..(62): /note="This region represents a CpG dinucleotide"
  misc_feature (61)..(61): /note="Nucleotide may be methylated to form 5-methylcytosine"
ttcactttcttgtgaggtgtggcagcccctggaccctgattccctgtgggcaactggatgcgctggagcttctggtcctacagagctgggattaacccagctcttttgatatgttgctcagg

SEQ ID NO: 22721 - DNA, 122 bp, Homo sapiens
  misc_feature (61)..(62): /note="This region represents a CpG dinucleotide"
  misc_feature (61)..(61): /note="Nucleotide may be methylated to form 5-methylcytosine"
atgtacattccagtcctatgtcaatatctttagggagaagacattgcaatcatgaaacaacgtcaggacggtttattaaaaagaaatagtcatagagaaaaaagagctcttagaaattaaaa

SEQ ID NO: 22722 - DNA, 122 bp, Homo sapiens
  misc_feature (61)..(62): /note="This region represents a CpG dinucleotide"
  misc_feature (61)..(61): /note="Nucleotide may be methylated to form 5-methylcytosine"
ttgaaacaatttgtctccaaagtagctttgtttttccaaaaattgtttaactgtgatagacgtgatagttaaactttggtgttgcagatcctgtgaagccacctggcagctctttacaagca

SEQ ID NO: 22723 - DNA, 122 bp, Homo sapiens
  misc_feature (61)..(62): /note="This region represents a CpG dinucleotide"
  misc_feature (61)..(61): /note="Nucleotide may be methylated to form 5-methylcytosine"
actgtaggagccttagagtatgccattggctttcatatacattgtcttattgaatctcaacgtcaactctgctcaaatggtgttactatctgaggcccagagagggtaagtgatttgactga

SEQ ID NO: 22724 - DNA, 122 bp, Homo sapiens
  misc_feature (61)..(62): /note="This region represents a CpG dinucleotide"
  misc_feature (61)..(61): /note="Nucleotide may be methylated to form 5-methylcytosine"
aaaattgttttcagtcccaaccacaggtaacagccccctccagaaatccctggcaatgtgcgggacactggcttgcaaaattacccacaaggacaatagactgatggatcgagatttaaata

SEQ ID NO: 22725 - DNA, 122 bp, Homo sapiens
  misc_feature (61)..(62): /note="This region represents a CpG dinucleotide"
  misc_feature (61)..(61): /note="Nucleotide may be methylated to form 5-methylcytosine"
agcacgtgctcgtgttttacagagtgcctctgtgtacgttagctcatggggttggtctcacgctgtgctggcctgctaaccagaaatgtcaccctctgacaggaagagagtaagttggcatt

SEQ ID NO: 22726 - DNA, 122 bp, Homo sapiens
  misc_feature (61)..(62): /note="This region represents a CpG dinucleotide"
  misc_feature (61)..(61): /note="Nucleotide may be methylated to form 5-methylcytosine"
agcctcacaaattctgagacaaggactttatgctctctactctaagagatgggacattcacgatttacaacctgaaacacctctgacagaatagcaggcatcttgacgtaaggtcaaataga

SEQ ID NO: 22727 - DNA, 122 bp, Homo sapiens
  misc_feature (61)..(62): /note="This region represents a CpG dinucleotide"
  misc_feature (61)..(61): /note="Nucleotide may be methylated to form 5-methylcytosine"
tgaactcggttcagaggaatggtggctaattcttatgtgtaaagtggatcttcccaaccacgaaaatcagggtcattggaaccacaggctcagtcatgtccctgagggttgccagattgcag

SEQ ID NO: 22728 - DNA, 122 bp, Homo sapiens
  misc_feature (61)..(62): /note="This region represents a CpG dinucleotide"
  misc_feature (61)..(61): /note="Nucleotide may be methylated to form 5-methylcytosine"
gccagagcaggtcccctgaagtgcaggacttagaccagagctctactcaggcttaagggtcgtgccaaaatcaagagacaaggtcccggtcacagggcttacataacagtgtttcacaactt

SEQ ID NO: 22729 - DNA, 122 bp, Homo sapiens
  misc_feature (61)..(62): /note="This region represents a CpG dinucleotide"
  misc_feature (61)..(61): /note="Nucleotide may be methylated to form 5-methylcytosine"
ctccatgtgccagccactgactatttaccttacatgattaatgtgtcatagcaggccaggcgcagtggctcacacctgtaatcccaccactttgggaggccaaggcaggtggctcacctgag

SEQ ID NO: 22730 - DNA, 122 bp, Homo sapiens
  misc_feature (61)..(62): /note="This region represents a CpG dinucleotide"
  misc_feature (61)..(61): /note="Nucleotide may be methylated to form 5-methylcytosine"
gttttgtttccttatccatattagttgttgctgaaagtgggaactgtatgaaatgagtcacgtgtccctatcctgagagtgaatgtgaaactgacaagggagaaagttctgagtctgatgta

SEQ ID NO: 22731 - DNA, 122 bp, Homo sapiens
  misc_feature (61)..(62): /note="This region represents a CpG dinucleotide"
  misc_feature (61)..(61): /note="Nucleotide may be methylated to form 5-methylcytosine"
attaaccagatagtttatatttcctgtttaaactgtgttattggatcctgaaggtgccttcgcttttctgtctcattgttgtcttaacctttggtggaaatagtgctgaagaaaccctcttc

SEQ ID NO: 22732 - DNA, 122 bp, Homo sapiens
  misc_feature (61)..(62): /note="This region represents a CpG dinucleotide"
  misc_feature (61)..(61): /note="Nucleotide may be methylated to form 5-methylcytosine"
ggctcctgagtatagaaccacttctcctagcacggctcggaattctggctgccggacacacgtgacaaaccagcgagtcacattattccagatccggcgggcaggtgggtctaggacctgga

SEQ ID NO: 22733 - DNA, 122 bp, Homo sapiens
  misc_feature (61)..(62): /note="This region represents a CpG dinucleotide"
  misc_feature (61)..(61): /note="Nucleotide may be methylated to form 5-methylcytosine"
tcctgacctctttcttcttcttggcttcttctaggttgctgagcagtgtcttgcgctcttcgtttgttttttctatgagagtctttatctgtttcaccccgttgacagcattttgaatttcc

SEQ ID NO: 22734 - DNA, 122 bp, Homo sapiens
  misc_feature (61)..(62): /note="This region represents a CpG dinucleotide"
  misc_feature (61)..(61): /note="Nucleotide may be methylated to form 5-methylcytosine"
tgtgagggaatcacacctgcttagagaaaggaggaagtgaaatcactgtaaaaagccttacgcctttcaggcaagcatctgggtcaccatggagctagcacctggaagcactcggtaatgag

SEQ ID NO: 22735 - DNA, 122 bp, Homo sapiens
  misc_feature (61)..(62): /note="This region represents a CpG dinucleotide"
  misc_feature (61)..(61): /note="Nucleotide may be methylated to form 5-methylcytosine"
acttcaggtgatccacccacctcagccttccaaagtgctgggattataggcgtgagccaccgcgcccagctctgcttgatacttaatgatgattttatccagctttgcatctgaggctccct

SEQ ID NO: 22736 - DNA, 122 bp, Homo sapiens
  misc_feature (61)..(62): /note="This region represents a CpG dinucleotide"
  misc_feature (61)..(61): /note="Nucleotide may be methylated to form 5-methylcytosine"
cgctgggtactggcgacaggaagggttggcccaaagtggctggcggagcttaatctggggcggcccagggagcctcctggctggtggagggacagagcaccatcatccgggctggcctccgc

SEQ ID NO: 22737 - DNA, 122 bp, Homo sapiens
  misc_feature (61)..(62): /note="This region represents a CpG dinucleotide"
  misc_feature (61)..(61): /note="Nucleotide may be methylated to form 5-methylcytosine"
tagccacatagagttgcctaaatatttgagcagaaaccccagcccttctgcagggtctcacgtgaacatcctaccagatgtggggatatcaaggtaaaagacagggcaattcatataataat

SEQ ID NO: 22738 - DNA, 122 bp, Homo sapiens
  misc_feature (61)..(62): /note="This region represents a CpG dinucleotide"
  misc_feature (61)..(61): /note="Nucleotide may be methylated to form 5-methylcytosine"
acacccacagaagcggccttgagctgcccagttctttttctttggcggggggagagggggcggataagatcattaacataataatgcgtgagctgagtttttgcatatgatcattagcataa

SEQ ID NO: 22739 - DNA, 122 bp, Homo sapiens
  misc_feature (61)..(62): /note="This region represents a CpG dinucleotide"
  misc_feature (61)..(61): /note="Nucleotide may be methylated to form 5-methylcytosine"
tgcggagaaggggagcaggttattaacttaccaccgggccgtctggcccagccctgggagcgcgggaggccctgcagatcctgcccagcctgcaccccgtaccacccctgcaagctgcacag

SEQ ID NO: 22740 - DNA, 122 bp, Homo sapiens
  misc_feature (61)..(62): /note="This region represents a CpG dinucleotide"
  misc_feature (61)..(61): /note="Nucleotide may be methylated to form 5-methylcytosine"
aaggcacacagcagcagctttccagttctctcatttcagaatttaaagctggaactcatgcgttggtttatgttttgttaaaccagtaaaagacaacaacaacaaaattcgtgcatggctgc

SEQ ID NO: 22741 - DNA, 122 bp, Homo sapiens
  misc_feature (61)..(62): /note="This region represents a CpG dinucleotide"
  misc_feature (61)..(61): /note="Nucleotide may be methylated to form 5-methylcytosine"
tcttatggggccaccatcgtatatgcaatctgtcattgacccaaaggtcattatgcagcacgtgactgtaaagtaaaaggctaggcaggatctttatgaagcaaaatacacttgtgaaagac

SEQ ID NO: 22742 - DNA, 122 bp, Homo sapiens
  misc_feature (61)..(62): /note="This region represents a CpG dinucleotide"
  misc_feature (61)..(61): /note="Nucleotide may be methylated to form 5-methylcytosine"
atggataaataacagtatctgagacctgctgttggtgtatgttaaatgttctttaaaaagcgtcaaccatccccaacacacgactctcctgaaagggaaaggtatgcgggtttgcagaggag

SEQ ID NO: 22743 - DNA, 122 bp, Homo sapiens
  misc_feature (61)..(62): /note="This region represents a CpG dinucleotide"
  misc_feature (61)..(61): /note="Nucleotide may be methylated to form 5-methylcytosine"
ttgctctctctctcatccaccctgttagcagcctctcggctgagcgggagaccacacactcggaccacacagcgccagctgaactccctcgcacgcaacatctacaagctgtcactctgcag

SEQ ID NO: 22744 - DNA, 122 bp, Homo sapiens
  misc_feature (61)..(62): /note="This region represents a CpG dinucleotide"
  misc_feature (61)..(61): /note="Nucleotide may be methylated to form 5-methylcytosine"
tgcaggagaaatcctcagtggctgcagttccacctcattgtcagccctgcgattaaaaagcgcagctctgtcattaaggggaagaaaataactcaagcctgcccgccctgcaggttcccagg

SEQ ID NO: 22745 - DNA, 122 bp, Homo sapiens
  misc_feature (61)..(62): /note="This region represents a CpG dinucleotide"
  misc_feature (61)..(61): /note="Nucleotide may be methylated to form 5-methylcytosine"
aggccccaggagtcagttttagtttccaccctgtcccaaggcaggggacagaaagaaccacgcctttatacacaaacatcctggacagatcaaagtagagtcatagattttatttaattaaa

SEQ ID NO: 22746 - DNA, 122 bp, Homo sapiens
  misc_feature (61)..(62): /note="This region represents a CpG dinucleotide"
  misc_feature (61)..(61): /note="Nucleotide may be methylated to form 5-methylcytosine"
acatgatcacccacggctccttgggctacgcgtatgtgaacttccagtagcccgcggacgcggagcatgctgtgaacactatgaattttgatgttataaagggcaagccagtacgcatcgtg

SEQ ID NO: 22747 - DNA, 122 bp, Homo sapiens
  misc_feature (61)..(62): /note="This region represents a CpG dinucleotide"
  misc_feature (61)..(61): /note="Nucleotide may be methylated to form 5-methylcytosine"
acacttactgctgtcctttaagtcagggatcagctgtggactagtaataaactccctatccgttctgctaatccgcaagtcttcaagtgtcacagtgtctgataaactctggttgagacact

SEQ ID NO: 22748 - DNA, 122 bp, Homo sapiens
  misc_feature (61)..(62): /note="This region represents a CpG dinucleotide"
  misc_feature (61)..(61): /note="Nucleotide may be methylated to form 5-methylcytosine"
cacagagaattccgtctaccaggaacggcaggaatgctatgcgttcaatgggactcagcgcgttgtggacgggctcatctacaaccgggaggaatacgtgcattttgacagcgcagtggggg

SEQ ID NO: 22749 - DNA, 122 bp, Homo sapiens
  misc_feature (61)..(62): /note="This region represents a CpG dinucleotide"
  misc_feature (61)..(61): /note="Nucleotide may be methylated to form 5-methylcytosine"
ctgtgtttctggccagagattggtgctgagtgcagctcaggaggcaggacctctccccggcggaggagatttaccaaagatgagcccagccttatccagagcatagagaggtggcagccttt

SEQ ID NO: 22750 - DNA, 122 bp, Homo sapiens
  misc_feature (61)..(62): /note="This region represents a CpG dinucleotide"
  misc_feature (61)..(61): /note="Nucleotide may be methylated to form 5-methylcytosine"
tcagctcataaaacgaaaagaacattgcctcagcatgtatattgtgaaataaagggattacgtgtcaaaaatgtgccaggaatagaagggttgacatcatctacagcttggtgatgagtttt

SEQ ID NO: 22751 - DNA, 122 bp, Homo sapiens
  misc_feature (61)..(62): /note="This region represents a CpG dinucleotide"
  misc_feature (61)..(61): /note="Nucleotide may be methylated to form 5-methylcytosine"
aattctgtacttattggaactatattataactatttgtctgcatgtttgctctttttattcgtgaggcttggctgagaattcaacacatagtaaacatccagtagagtaaatgattaacctg

SEQ ID NO: 22752 - DNA, 122 bp, Homo sapiens
  misc_feature (61)..(62): /note="This region represents a CpG dinucleotide"
  misc_feature (61)..(61): /note="Nucleotide may be methylated to form 5-methylcytosine"
acagggcatgcaccgtggtggtggcagtgatatgttgaatccctgttcccaggggatgtccgctttctatctgcagctttaatgtttcacttaatatcctctttggctactgagcgcactcc

SEQ ID NO: 22753 - DNA, 122 bp, Homo sapiens
  misc_feature (61)..(62): /note="This region represents a CpG dinucleotide"
  misc_feature (61)..(61): /note="Nucleotide may be methylated to form 5-methylcytosine"
tttgtatgtaaatatgaggactgctccggtgtagactttcggtaatttgataccaatgcgcgttgcctagtcgggtaaccaagacagccttcatgtagggagagagcgaagtgctacattta

SEQ ID NO: 22754 - DNA, 122 bp, Homo sapiens
  misc_feature (61)..(62): /note="This region represents a CpG dinucleotide"
  misc_feature (61)..(61): /note="Nucleotide may be methylated to form 5-methylcytosine"
gtccagactctgacagtgtcagaaaatgcagtcaccacggctgcttcacaggaagttacacgcaaggtccgcacacagtcagtttccctgtagcccagaagcctgatgaaatctgcactcac

SEQ ID NO: 22755 - DNA, 122 bp, Homo sapiens
  misc_feature (61)..(62): /note="This region represents a CpG dinucleotide"
  misc_feature (61)..(61): /note="Nucleotide may be methylated to form 5-methylcytosine"
ccatgaatccagatgaacaaattccactccttttttgaacatatatccctctccttggcacgcctttgtctcatttcacatgcttcctcccgattggtccttaccttttacctgtttaacat

SEQ ID NO: 22756 - DNA, 122 bp, Homo sapiens
  misc_feature (61)..(62): /note="This region represents a CpG dinucleotide"
  misc_feature (61)..(61): /note="Nucleotide may be methylated to form 5-methylcytosine"
gattaggaaatggaggcacggagggattaaatgcttagtcagggtcacactactaatgagcggcagagccaggatgttgactcagatggtcagactccaaaccttgagttcctaatcactat

SEQ ID NO: 22757 - DNA, 122 bp, Homo sapiens
  misc_feature (61)..(62): /note="This region represents a CpG dinucleotide"
  misc_feature (61)..(61): /note="Nucleotide may be methylated to form 5-methylcytosine"
cagggggcgccagtcacccagctaggaagtgaatggcgtcccttgctgtgatgcagtccacgacctgcacaccctcacatggcagcctgggcaggggcagatacactcacttctccatggcc

SEQ ID NO: 22758 - DNA, 122 bp, Homo sapiens
  misc_feature (61)..(62): /note="This region represents a CpG dinucleotide"
  misc_feature (61)..(61): /note="Nucleotide may be methylated to form 5-methylcytosine"
tcagctcctccctttagccttcctggtcatctctgtgatccacaaaatccattgcttcctcgtctatatatgcaatgtccttgctgcagctccagtatcacacttaacacctattcctttcc

SEQ ID NO: 22759 - DNA, 122 bp, Homo sapiens
  misc_feature (61)..(62): /note="This region represents a CpG dinucleotide"
  misc_feature (61)..(61): /note="Nucleotide may be methylated to form 5-methylcytosine"
cataatgatgccattatgacagatcagcccaaggctgcacactgacctaatcaacaggtgcggcagagctgtgattaagagactgagtcagttcccacttgtgaatagacagcatgaaggct

SEQ ID NO: 22760 - DNA, 122 bp, Homo sapiens
  misc_feature (61)..(62): /note="This region represents a CpG dinucleotide"
  misc_feature (61)..(61): /note="Nucleotide may be methylated to form 5-methylcytosine"
ggtccctattctgacacaaggggatcccacagcacccccaccacctcaccaccatgcttgcggtgctgtgacacaccatggtctgcccttggagcaagtcccaaaggccagcctcatccctt

SEQ ID NO: 22761 - DNA, 122 bp, Homo sapiens
  misc_feature (61)..(62): /note="This region represents a CpG dinucleotide"
  misc_feature (61)..(61): /note="Nucleotide may be methylated to form 5-methylcytosine"
ttttgcccttttacccctctggtaggcgccctagggcgggggtgctgccgcgcgcttcggcgcgccttggttctgtcaccagccccactggggcctcacaatcgctcagccgtccagtgcgc

SEQ ID NO: 22762 - DNA, 122 bp, Homo sapiens
  misc_feature (61)..(62): /note="This region represents a CpG dinucleotide"
  misc_feature (61)..(61): /note="Nucleotide may be methylated to form 5-methylcytosine"
acaattgatgactcattattccttaatcacaaactatgtttcacttaacttacttatgcacgttcctttgcaaacattgcaaatattacaaaaatgttattatattctctgtccaataatct

SEQ ID NO: 22763 - DNA, 122 bp, Homo sapiens
  misc_feature (61)..(62): /note="This region represents a CpG dinucleotide"
  misc_feature (61)..(61): /note="Nucleotide may be methylated to form 5-methylcytosine"
ggctggcagcggggatctgtgtctccaaggaaagtttgccccgagcccttcccggcccggcgtagggttctccggaaaccatcactcacatctagcacttggaggcctccagggacagcggt

SEQ ID NO: 22764 - DNA, 122 bp, Homo sapiens
  misc_feature (61)..(62): /note="This region represents a CpG dinucleotide"
  misc_feature (61)..(61): /note="Nucleotide may be methylated to form 5-methylcytosine"
cctttgatgggatgatctgagattgggtcttttacttaactctgtcacatagcagactgtcgtggagaggcattttttaaaatactattgtttttgtttttaaagcgctatcacacacctcc

SEQ ID NO: 22765 - DNA, 122 bp, Homo sapiens
  misc_feature (61)..(62): /note="This region represents a CpG dinucleotide"
  misc_feature (61)..(61): /note="Nucleotide may be methylated to form 5-methylcytosine"
gggccactattgtatccgccttacgtaaccacatggagtgatggaaatgggtgagcagcccggaatgtaggcggtggcctggcccatgcatctccagagaccatgaagactgctcaagccct

SEQ ID NO: 22766 - DNA, 122 bp, Homo sapiens
  misc_feature (61)..(62): /note="This region represents a CpG dinucleotide"
  misc_feature (61)..(61): /note="Nucleotide may be methylated to form 5-methylcytosine"
tggcacgttatgtaaacactatgatccttcacttctgaacacccatgttcacgggtcagacgagacagggcactcttgtcagcaagcgtgtcacacctcaccagcctctggctgcagatcag

SEQ ID NO: 22767 - DNA, 122 bp, Homo sapiens
  misc_feature (61)..(62): /note="This region represents a CpG dinucleotide"
  misc_feature (61)..(61): /note="Nucleotide may be methylated to form 5-methylcytosine"
ggttgctaatgcatcaggtagccatgtattccgatggagctgcttcataaaatgtagcagcgtgtgcatgtgtgagctcacatgtgtgaacatgaccagagcaccggccctgggctgtggac

SEQ ID NO: 22768 - DNA, 122 bp, Homo sapiens
  misc_feature (61)..(62): /note="This region represents a CpG dinucleotide"
  misc_feature (61)..(61): /note="Nucleotide may be methylated to form 5-methylcytosine"
catcatgaaatataccccaaaacaacattgtagataagagcccagaggcggggaggcctccggggccactcttacacataaacaatcatagtgtagccaggatcccaacgagctccaattcc

SEQ ID NO: 22769 - DNA, 122 bp, Homo sapiens
  misc_feature (61)..(62): /note="This region represents a CpG dinucleotide"
  misc_feature (61)..(61): /note="Nucleotide may be methylated to form 5-methylcytosine"
gctacggtgcacctgagacggggtttgtcaccaagaaaaaggtcagacatagagcaacaccgagcacatgggaagagtaataatcgtccagaaatacaccatcgactgtgccattatcagaa

SEQ ID NO: 22770 - DNA, 122 bp, Homo sapiens
  misc_feature (61)..(62): /note="This region represents a CpG dinucleotide"
  misc_feature (61)..(61): /note="Nucleotide may be methylated to form 5-methylcytosine"
gtttgatctgataagcgcaagttcctgagagtctgttgagctgtggagcagccctgtctgcgtcactctacgggggacctgtgcccactccctgctcacatccctgacctctgctcgctgct

SEQ ID NO: 22771 - DNA, 122 bp, Homo sapiens
  misc_feature (61)..(62): /note="This region represents a CpG dinucleotide"
  misc_feature (61)..(61): /note="Nucleotide may be methylated to form 5-methylcytosine"
cgggggcggggggcggggttagcgcagtgcctggacacgcccactgccccgaggaggccccgcccacaatctccgggccagcctgcagggaggacccgcaatcttagagccaggtgccacgc

SEQ ID NO: 22772 - DNA, 122 bp, Homo sapiens
  misc_feature (61)..(62): /note="This region represents a CpG dinucleotide"
  misc_feature (61)..(61): /note="Nucleotide may be methylated to form 5-methylcytosine"
gggtgtggctatttaaatgaccggcttctacccctgccttttcattctaagggtgaggcacgtggttccaaatatctcaagtggaatctgtgcatttcacattccccattcccaggtcagcg

SEQ ID NO: 22773 - DNA, 122 bp, Homo sapiens
  misc_feature (61)..(62): /note="This region represents a CpG dinucleotide"
  misc_feature (61)..(61): /note="Nucleotide may be methylated to form 5-methylcytosine"
aaaaggaaatttgtattagaaactagaaggcttatgacaggtggtagcttgctttcttggcggagctcagataccttgaaataacattgtaaattcagataaggcttttcatgctttcttta

SEQ ID NO: 22774 - DNA, 122 bp, Homo sapiens
  misc_feature (61)..(62): /note="This region represents a CpG dinucleotide"
  misc_feature (61)..(61): /note="Nucleotide may be methylated to form 5-methylcytosine"
agcaaaggcttagctaagaaggggaagtaactcacataaggtcagacagcaagttaataacgaagtcagggcaagagcccaggtctcctgacacctggtctagtatttttctgatgtcctaa

SEQ ID NO: 22775 - DNA, 122 bp, Homo sapiens
  misc_feature (61)..(62): /note="This region represents a CpG dinucleotide"
  misc_feature (61)..(61): /note="Nucleotide may be methylated to form 5-methylcytosine"
gattagggctcagctttaaaaagcaaagagggcttttggagtgggaaaagggatttcttgcggggagaggaatttagactgtttacttaagcttaattggcaaaagtaattatttatgatgt

SEQ ID NO: 22776 - DNA, 122 bp, Homo sapiens
  misc_feature (61)..(62): /note="This region represents a CpG dinucleotide"
  misc_feature (61)..(61): /note="Nucleotide may be methylated to form 5-methylcytosine"
ttaaagagttgagagcagaattaatcaagcctcttgaaagagagagtatagtgtagtaaccgtatggggtgttcgtgtcccagcttggcagcttaacaactctaattccctttttcttcttt

SEQ ID NO: 22777 - DNA, 122 bp, Homo sapiens
  misc_feature (61)..(62): /note="This region represents a CpG dinucleotide"
  misc_feature (61)..(61): /note="Nucleotide may be methylated to form 5-methylcytosine"
gttgtgataattctcatttcacagatgagagaactggtgcttagggacacttacagggtgcgttcaaggtcataaaactgctaagagagatggagcagaaactggaacctggtctgtttgat

SEQ ID NO: 22778 - DNA, 122 bp, Homo sapiens
  misc_feature (61)..(62): /note="This region represents a CpG dinucleotide"
  misc_feature (61)..(61): /note="Nucleotide may be methylated to form 5-methylcytosine"
tttaacaaccaatttatttccagtttaactaatctggggatggggcatctctctctctcacgcaaaccaacaacacctgggttgtaaatagacttacaaaccagtgtgtgctggataatata

SEQ ID NO: 22779 - DNA, 122 bp, Homo sapiens
  misc_feature (61)..(62): /note="This region represents a CpG dinucleotide"
  misc_feature (61)..(61): /note="Nucleotide may be methylated to form 5-methylcytosine"
ttcccagcctggccctccaatgtctaccctactgtcttgggactttatgtatctcctttccggcctaaagaactagctccagagagaatgtatggttagtcatacacagaaatacagataca

SEQ ID NO: 22780 - DNA, 122 bp, Homo sapiens
  misc_feature (61)..(62): /note="This region represents a CpG dinucleotide"
  misc_feature (61)..(61): /note="Nucleotide may be methylated to form 5-methylcytosine"
gaggctatatacttcatacataaagcatttgtatgagagtatgtggtggctgagagggcacgtaatggtagaaaagaaagagttataatggaaaaatggaaagtaaaaccagcacttttata

SEQ ID NO: 22781 - DNA, 122 bp, Homo sapiens
  misc_feature (61)..(62): /note="This region represents a CpG dinucleotide"
  misc_feature (61)..(61): /note="Nucleotide may be methylated to form 5-methylcytosine"
caaagagatgaaatttggggaactgctgggtagagccatgaggctggtcccaaaggtcaccgggatttgaagccatcaggtaggacaggagcagaggtgggaaaggaaatgggccaagggcg

SEQ ID NO: 22782 - DNA, 122 bp, Homo sapiens
  misc_feature (61)..(62): /note="This region represents a CpG dinucleotide"
  misc_feature (61)..(61): /note="Nucleotide may be methylated to form 5-methylcytosine"
ttgcctcagactctggggcaagtgcttcacatattttacctcatttagtcttcactagaacgttaggagggtgggcactgttattcttcctactttgcaagtgaggaaactgaggcataaag

SEQ ID NO: 22783 - DNA, 122 bp, Homo sapiens
  misc_feature (61)..(62): /note="This region represents a CpG dinucleotide"
  misc_feature (61)..(61): /note="Nucleotide may be methylated to form 5-methylcytosine"
caaattccatttccagagcactttacctttcccatctactaaatcagttacaataaagcacgtcttaaatccatatactcctgctggaaatctcaacccaagccatcaatgcctgttcgggt

SEQ ID NO: 22784 - DNA, 122 bp, Homo sapiens
  misc_feature (61)..(62): /note="This region represents a CpG dinucleotide"
  misc_feature (61)..(61): /note="Nucleotide may be methylated to form 5-methylcytosine"
tgctttcttgttctgacaaagcagaagtgtctaccggaattattaattacctagtgtatgcgtcatcacccactgaattttaagagctatgtatacaactttcatgcaaagtgtcaccactt

SEQ ID NO: 22785 - DNA, 122 bp, Homo sapiens
  misc_feature (61)..(62): /note="This region represents a CpG dinucleotide"
  misc_feature (61)..(61): /note="Nucleotide may be methylated to form 5-methylcytosine"
accctcttgcaatggtgagacccataaccagaaggacagactggcaaggcaattaagagacggatagatacacagggaaaaaaagggaagttcaaaacagaaatagggtgaggcacagggaa

SEQ ID NO: 22786 - DNA, 122 bp, Homo sapiens
  misc_feature (61)..(62): /note="This region represents a CpG dinucleotide"
  misc_feature (61)..(61): /note="Nucleotide may be methylated to form 5-methylcytosine"
gagtgggaggtgtggtcactggtccaccaggaagacagctaagggcattcgttgagtccacgtgatgactttctgctctgagtgaggcccctggatggctgggaggaaggaagcagctctgc

SEQ ID NO: 22787 - DNA, 122 bp, Homo sapiens
  misc_feature (61)..(62): /note="This region represents a CpG dinucleotide"
  misc_feature (61)..(61): /note="Nucleotide may be methylated to form 5-methylcytosine"
cagcttgcatgtcaatctagtccactgtaagctggagaaagttacatgaattctcatcgacggcctcagcaatgtgcctcaagtgtcactgtgagatcattccctgcttcctggagacatgc

SEQ ID NO: 22788 - DNA, 122 bp, Homo sapiens
  misc_feature (61)..(62): /note="This region represents a CpG dinucleotide"
  misc_feature (61)..(61): /note="Nucleotide may be methylated to form 5-methylcytosine"
tataaccttatttaaccttaattacttccttaaagtcctcatctctgaatatagccacatcgggggatagggcttcaacataagaattggttgagggggcagcagatacaaacattcagtca

SEQ ID NO: 22789 - DNA, 122 bp, Homo sapiens
  misc_feature (61)..(62): /note="This region represents a CpG dinucleotide"
  misc_feature (61)..(61): /note="Nucleotide may be methylated to form 5-methylcytosine"
gagattttttaggaacacatatgtcgcaatacaacagaactgactgtatttcttgcaaatcggcagctgagtccagaggcttagtcagactcatattctttggtagtgtgttctttcaacag

SEQ ID NO: 22790 - DNA, 122 bp, Homo sapiens
  misc_feature (61)..(62): /note="This region represents a CpG dinucleotide"
  misc_feature (61)..(61): /note="Nucleotide may be methylated to form 5-methylcytosine"
ttgagtagataagttctcttgagtcctgtgagtcaggttctaggaattctctttcagttccgcctttgatggaataactggcagtggtcggatgaagcaggctggggtctgatctgtttcct

SEQ ID NO: 22791 - DNA, 122 bp, Homo sapiens
  misc_feature (61)..(62): /note="This region represents a CpG dinucleotide"
  misc_feature (61)..(61): /note="Nucleotide may be methylated to form 5-methylcytosine"
aaaaaaaaaactccttcctctcatgatattccgaatactttgtcaacattttattaagtccgttgcttctaagccccacattaagtgtgtgtgggtagggagaggaaaaacaagagatgaat

SEQ ID NO: 22792 - DNA, 122 bp, Homo sapiens
  misc_feature (61)..(62): /note="This region represents a CpG dinucleotide"
  misc_feature (61)..(61): /note="Nucleotide may be methylated to form 5-methylcytosine"
tggtaacccatttgagcagctgtatgatctgaatagtctggaggggggtatgattacttacggctacattagtcaccataaataatccagttgccctgcagagtaacactcttggctgagca

SEQ ID NO: 22793 - DNA, 122 bp, Homo sapiens
  misc_feature (61)..(62): /note="This region represents a CpG dinucleotide"
  misc_feature (61)..(61): /note="Nucleotide may be methylated to form 5-methylcytosine"
tgaggatttgttccactgtgattggtaaattagggaacaatttgagtgtcatgtcaatgtcggtttgctcaggcaccattttgttgctcagaagccaggtgaatgtaataggaaggatggat

SEQ ID NO: 22794 - DNA, 122 bp, Homo sapiens
  misc_feature (61)..(62): /note="This region represents a CpG dinucleotide"
  misc_feature (61)..(61): /note="Nucleotide may be methylated to form 5-methylcytosine"
agcttaccttcccaaacagattccccagatggccacacccttctgtagcactcattctgacgcatctgcctgatttatgctggagggcatttgtttcaaacaaatgtgtgttgagctacaaa

SEQ ID NO: 22795 - DNA, 122 bp, Homo sapiens
  misc_feature (61)..(62): /note="This region represents a CpG dinucleotide"
  misc_feature (61)..(61): /note="Nucleotide may be methylated to form 5-methylcytosine"
gcttattccaagatgtttaacctgttttactggaaagatgaagccatcattaactgggagcgagaagacaacagatagattatatttgaagaggtgagatcatggatatgatagctttcaga

SEQ ID NO: 22796 - DNA, 122 bp, Homo sapiens
  misc_feature (61)..(62): /note="This region represents a CpG dinucleotide"
  misc_feature (61)..(61): /note="Nucleotide may be methylated to form 5-methylcytosine"
agggccacctggtgaggcttctgttgcatcatcctgtttctctgctgccctccaggggggcgatgccgctccacgctcctgccatgctcctgccacagccacactggggagtccctctgcca

SEQ ID NO: 22797 - DNA, 122 bp, Homo sapiens
  misc_feature (61)..(62): /note="This region represents a CpG dinucleotide"
  misc_feature (61)..(61): /note="Nucleotide may be methylated to form 5-methylcytosine"
aatttctaaagcaggtgagaaacaaggcctgcccaagaaaagagaaagaatttaaaattacggcatatctatactacagaggaggcggtctgtccatgtcaatgtaaaggatcaccaagaga

SEQ ID NO: 22798 - DNA, 122 bp, Homo sapiens
  misc_feature (61)..(62): /note="This region represents a CpG dinucleotide"
  misc_feature (61)..(61): /note="Nucleotide may be methylated to form 5-methylcytosine"
ggctttaatttactggtacattatcttgacatttctgcagcagaatagattagttggttccggctctgtaaaggaagtcaaggtagctgatttgactagttgattaacattcctaattggct

SEQ ID NO: 22799 - DNA, 122 bp, Homo sapiens
  misc_feature (61)..(62): /note="This region represents a CpG dinucleotide"
  misc_feature (61)..(61): /note="Nucleotide may be methylated to form 5-methylcytosine"
ggtgctgcctcatcccagagaattttggacacattccccagtgccacaggggcaatgctacggctgatggtgattttggagttcatacataactctggacccagtacttagatctgctaatg

SEQ ID NO: 22800 - DNA, 122 bp, Homo sapiens
  misc_feature (61)..(62): /note="This region represents a CpG dinucleotide"
  misc_feature (61)..(61): /note="Nucleotide may be methylated to form 5-methylcytosine"
caaagcacttccagacactgcgttctcccaccaggccccaggtcttatgcctcatgggaacgtctctccgcatccatcttcatgctcttgcctgaagcacccagcgcggagcaagcagaata

SEQ ID NO: 22801 - DNA, 122 bp, Homo sapiens
  misc_feature (61)..(62): /note="This region represents a CpG dinucleotide"
  misc_feature (61)..(61): /note="Nucleotide may be methylated to form 5-methylcytosine"
agaggaattgcatgagccttcccttgtgctcatgagtgcttgtgtgacaacttcgcagtacgagtcaatgccataaagtgccatatgcaatgcagggatattgttgtgtttccgtaagagcc

SEQ ID NO: 22802 - DNA, 122 bp, Homo sapiens
  misc_feature (61)..(62): /note="This region represents a CpG dinucleotide"
  misc_feature (61)..(61): /note="Nucleotide may be methylated to form 5-methylcytosine"
gaatcaagttccaccacttgactactactttcctttgatttgattgttagttctgctaaccgtgacaactgtcacgatgtgagacaaaggagaatgattataattgtgtctgggtcagtgtc

SEQ ID NO: 22803 - DNA, 122 bp, Homo sapiens
  misc_feature (61)..(62): /note="This region represents a CpG dinucleotide"
  misc_feature (61)..(61): /note="Nucleotide may be methylated to form 5-methylcytosine"
gaaggaaggtgcaagggtctccaggaaaggctggctacgtcctcctcagaaagaggctgtcgggcctctgagaacaatctgaacatgaggaactgaaactgaaacagagagtgacccggccg

SEQ ID NO: 22804 - DNA, 122 bp, Homo sapiens
  misc_feature (61)..(62): /note="This region represents a CpG dinucleotide"
  misc_feature (61)..(61): /note="Nucleotide may be methylated to form 5-methylcytosine"
gaactagaaggataaaggaaaagagagaccagggcagtgagaccaggaagaaacaggaaacgagctgtgtagagcatactgtgcattctgttttatagctgccctgtaaattccaaaaaata

SEQ ID NO: 22805 - DNA, 122 bp, Homo sapiens
  misc_feature (61)..(62): /note="This region represents a CpG dinucleotide"
  misc_feature (61)..(61): /note="Nucleotide may be methylated to form 5-methylcytosine"
gagctgaggagggagcaacaggccggggatgaatgggcaaacgtcaggagtcaaaagccacggaccttgatcacttcctgcatgctggacattgatgagagcatggtacaagtatccactca

SEQ ID NO: 22806 - DNA, 122 bp, Homo sapiens
  misc_feature (61)..(62): /note="This region represents a CpG dinucleotide"
  misc_feature (61)..(61): /note="Nucleotide may be methylated to form 5-methylcytosine"
acaggggcgatttcagagccagtggggctgtgcaggggcagaaggtgcaggggcaaaggacggatgtggctggttattagaaaaaaaaagacatggcaggcaggtctgagtgcaatggtgtt

SEQ ID NO: 22807 - DNA, 122 bp, Homo sapiens
  misc_feature (61)..(62): /note="This region represents a CpG dinucleotide"
  misc_feature (61)..(61): /note="Nucleotide may be methylated to form 5-methylcytosine"
atctcagactggccccacacaggttacttagctgtgtgtgaatctgccttccctgccagacggtgggctcctgcaagtagggctggtctgtgtgagtgactcaagcaattctgatgaaaggg

SEQ ID NO: 22808 - DNA, 122 bp, Homo sapiens
  misc_feature (61)..(62): /note="This region represents a CpG dinucleotide"
  misc_feature (61)..(61): /note="Nucleotide may be methylated to form 5-methylcytosine"
tgcctaaagtcacacagccatctgggtagtgacaggattagaaaccaggtttcctgcccccgggccagtggtgcatacattggtgccaccttgataacagatacaaacagatctctttgaca

SEQ ID NO: 22809 - DNA, 122 bp, Homo sapiens
  misc_feature (61)..(62): /note="This region represents a CpG dinucleotide"
  misc_feature (61)..(61): /note="Nucleotide may be methylated to form 5-methylcytosine"
tccctgctgcacgatgccagctggccctttggtagccttgagggggactgaggtcactcacggccagtgtatcagccagcaaccctggctgtgtgtacaaagtcctcagctggggctaaggg

SEQ ID NO: 22810 - DNA, 122 bp, Homo sapiens
  misc_feature (61)..(62): /note="This region represents a CpG dinucleotide"
  misc_feature (61)..(61): /note="Nucleotide may be methylated to form 5-methylcytosine"
aactgcctcccttccttccctccacggttctctcccgtaatcagcttttctaccacacagcgagcaaggccaacttccctaaactaagaatgctgagattcttttcgacttataatgttctg

SEQ ID NO: 22811 - DNA, 122 bp, Homo sapiens
  misc_feature (61)..(62): /note="This region represents a CpG dinucleotide"
  misc_feature (61)..(61): /note="Nucleotide may be methylated to form 5-methylcytosine"
ttgaaattccccgagttgctgttaacttggcctgtctgttgcatatggggccaaactacacgcctacctgtggagcaaatgaatacagtgactcatctgtgagctgaggcttgagcaattcc

SEQ ID NO: 22812 - DNA, 122 bp, Homo sapiens
  misc_feature (61)..(62): /note="This region represents a CpG dinucleotide"
  misc_feature (61)..(61): /note="Nucleotide may be methylated to form 5-methylcytosine"
aggtgtgagccaccacacccggctctgatgtttacaatattataccaacaagggttggatcgtgtgtgacttatctagaggttaagagcaaaagttatgaaatcacagtgccatcatgggag

SEQ ID NO: 22813 - DNA, 122 bp, Homo sapiens
  misc_feature (61)..(62): /note="This region represents a CpG dinucleotide"
  misc_feature (61)..(61): /note="Nucleotide may be methylated to form 5-methylcytosine"
attctcatctcttccggggcttaatgttctgtggctgttttctcttttgtctgccctccccggcaaatctctttggtgcctcatgatatatttcactgctgaattttctcaattaccaagtg

SEQ ID NO: 22814 - DNA, 122 bp, Homo sapiens
  misc_feature (61)..(62): /note="This region represents a CpG dinucleotide"
  misc_feature (61)..(61): /note="Nucleotide may be methylated to form 5-methylcytosine"
tacctctgaatggccacccttagaccctgtgatccatcctctctcctagctgagtaaatccgggtctctaggatgccagaggcagcgcacacaagctgggaaatcctcagggctcctaccag

SEQ ID NO: 22815 - DNA, 122 bp, Homo sapiens
  misc_feature (61)..(62): /note="This region represents a CpG dinucleotide"
  misc_feature (61)..(61): /note="Nucleotide may be methylated to form 5-methylcytosine"
tacagggtttctccacgggaactgccaaaaacatctaagctccttcccgcagttgggaatcgctgccctgcaaatgaaaaaggagactaaacaagagcagggaggcggtgcaggcccccgac

SEQ ID NO: 22816 - DNA, 122 bp, Homo sapiens
  misc_feature (61)..(62): /note="This region represents a CpG dinucleotide"
  misc_feature (61)..(61): /note="Nucleotide may be methylated to form 5-methylcytosine"
agcactctaacctcgggtcagtccctcacttggtcagtgagtacagtctgaaggaccccccggggcagggtggctgagaacctgcacagggcctggtcaggagggagtgagggcagggcctg

SEQ ID NO: 22817 - DNA, 122 bp, Homo sapiens
  misc_feature (61)..(62): /note="This region represents a CpG dinucleotide"
  misc_feature (61)..(61): /note="Nucleotide may be methylated to form 5-methylcytosine"
atcttacgcgtatctaaataaactaaacagaatcctttgaaattgacccacaacaacccacgcctaacttctcaaaccctaccttagatctatgcctaaacatacagcatgaaaacttgtaa

SEQ ID NO: 22818 - DNA, 122 bp, Homo sapiens
  misc_feature (61)..(62): /note="This region represents a CpG dinucleotide"
  misc_feature (61)..(61): /note="Nucleotide may be methylated to form 5-methylcytosine"
cccacctccaccctacacaggggcctcctaagatctgaggaacagtaaactttatcttatcggctgtttgggaaaaaactgtcatttgatctgtttatttggaagccagccctgctgagctc

SEQ ID NO: 22819 - DNA, 122 bp, Homo sapiens
  misc_feature (61)..(62): /note="This region represents a CpG dinucleotide"
  misc_feature (61)..(61): /note="Nucleotide may be methylated to form 5-methylcytosine"
aggggcacactcaaggcggggtaggcagctcacagacagcctttcttactgctgcctgggcgcctggaggctgggaggaaaatctatacgcagccatggaaggatgcaaggaggcgggtgga

SEQ ID NO: 22820 - DNA, 122 bp, Homo sapiens
  misc_feature (61)..(62): /note="This region represents a CpG dinucleotide"
  misc_feature (61)..(61): /note="Nucleotide may be methylated to form 5-methylcytosine"
cacttttaagtaccattgagcaatacttttattccctaaatgtaaagctttgcatgagaacgtgtctaatattagctggtagaccagattactcgggagtctcttctggtctcctaagtaaa

SEQ ID NO: 22821 - DNA, 122 bp, Homo sapiens
  misc_feature (61)..(62): /note="This region represents a CpG dinucleotide"
  misc_feature (61)..(61): /note="Nucleotide may be methylated to form 5-methylcytosine"
aagctcttgccttgccctcccaaagtgctgggattacagacgtgagtcaccacgcctggccggtaatttctcattgtgaattgattgggtccctgtaagtcacagagcctgtcctgagtccc

SEQ ID NO: 22822 - DNA, 122 bp, Homo sapiens
  misc_feature (61)..(62): /note="This region represents a CpG dinucleotide"
  misc_feature (61)..(61): /note="Nucleotide may be methylated to form 5-methylcytosine"
tttgtgtatatgtcttataagcaaactttattaatctaatagtatctttcatggggttaacgctatccattttaccactttcagtacagaaaaattaactgacgtagctcgctatcacattg

SEQ ID NO: 22823 - DNA, 122 bp, Homo sapiens
  misc_feature (61)..(62): /note="This region represents a CpG dinucleotide"
  misc_feature (61)..(61): /note="Nucleotide may be methylated to form 5-methylcytosine"
cagcctcctggctttggagctcagatcctgcctcctcagctaactagcagtgtgaccttacgcaagttaacttaacctctctgtgcctcggtctcctcctgcataaagtgatgatactactg

SEQ ID NO: 22824 - DNA, 122 bp, Homo sapiens
  misc_feature (61)..(62): /note="This region represents a CpG dinucleotide"
  misc_feature (61)..(61): /note="Nucleotide may be methylated to form 5-methylcytosine"
tgctctcagacaccatgctccagcaccctagtcgggcagcggggtaggtgtagagggactcggagaatgagcagctacctgggctgcgaatcctgcctgttcacccaggcaagttccttcat

SEQ ID NO: 22825 - DNA, 122 bp, Homo sapiens
  misc_feature (61)..(62): /note="This region represents a CpG dinucleotide"
  misc_feature (61)..(61): /note="Nucleotide may be methylated to form 5-methylcytosine"
ctttctacatgcgatggagaaaacagttcacctgggcatttttgctatgacaggaggaaacgtcaatatcaaaccattggagaaggtagctgagtcattcatttgtggcagcaaccatcttt

SEQ ID NO: 22826 - DNA, 122 bp, Homo sapiens
  misc_feature (61)..(62): /note="This region represents a CpG dinucleotide"
  misc_feature (61)..(61): /note="Nucleotide may be methylated to form 5-methylcytosine"
taactcaaaaaacaagggctttctgcaatcagctggtgaatctgtggtcccacacagccccgccccaagggttaggatagctcctcctgcccagcccatcagaagtctgcccagaatcttcc

SEQ ID NO: 22827 - DNA, 122 bp, Homo sapiens
  misc_feature (61)..(62): /note="This region represents a CpG dinucleotide"
  misc_feature (61)..(61): /note="Nucleotide may be methylated to form 5-methylcytosine"
gactaggccagaaattgctgaaagaatacagttatagtgtatgcttgtgaagataagcttcgtacttttggagaagtttaagaactcattctttaagaaactaggcaattcatgttagaagc

SEQ ID NO: 22828 - DNA, 122 bp, Homo sapiens
  misc_feature (61)..(62): /note="This region represents a CpG dinucleotide"
  misc_feature (61)..(61): /note="Nucleotide may be methylated to form 5-methylcytosine"
cgtggggcgcggagaaggggaggggaggcgcgcaggcagagaacagcatgtacgaggccccgcatcaggaaggcgcttggcacgttccaggaacagtgagaagccaggaaagcccaagtgta

SEQ ID NO: 22829 - DNA, 122 bp, Homo sapiens
  misc_feature (61)..(62): /note="This region represents a CpG dinucleotide"
  misc_feature (61)..(61): /note="Nucleotide may be methylated to form 5-methylcytosine"
ataagaatcacagctggccatcttctgctggcacctgtagatctaaagcattctttgtgacggttccatggtattccactgtgcagatgtcctgtgactgattcagcccatcccctgttgat

SEQ ID NO: 22830 - DNA, 122 bp, Homo sapiens
  misc_feature (61)..(62): /note="This region represents a CpG dinucleotide"
  misc_feature (61)..(61): /note="Nucleotide may be methylated to form 5-methylcytosine"
gagaggggagggcgtgcagctgtaccgagccatttttggcctaaattaatgagggaggagcggcgatgggcaaacagaaacaaggaagtagagaaaaatgtcaatttaaatgtatatatgta

SEQ ID NO: 22831 - DNA, 122 bp, Homo sapiens
  misc_feature (61)..(62): /note="This region represents a CpG dinucleotide"
  misc_feature (61)..(61): /note="Nucleotide may be methylated to form 5-methylcytosine"
aaaattcttatttcctcttctaggttatggtttaactcagcagaatttgttgaacaactacgacatgctggggatcatggtatgtttagagacacaaaagtgaattcaaaatcttctcttca

SEQ ID NO: 22832 - DNA, 122 bp, Homo sapiens
  misc_feature (61)..(62): /note="This region represents a CpG dinucleotide"
  misc_feature (61)..(61): /note="Nucleotide may be methylated to form 5-methylcytosine"
tacttgtccatgaagcctccctaaagctcatgcctccttgaaaaggtgtcagaactgcctcgaggatgtttcaacccacaacattcttctgtcttctgactttctaagcaattgttgtgtac

SEQ ID NO: 22833 - DNA, 122 bp, Homo sapiens
  misc_feature (61)..(62): /note="This region represents a CpG dinucleotide"
  misc_feature (61)..(61): /note="Nucleotide may be methylated to form 5-methylcytosine"
ctgactattaactgattcacttttcatgacccagcctcggaagtcacataggctcctttccgatgtagtcacaagtctagtcagcttcaagggcagggaacatagattccatctcttggtag

SEQ ID NO: 22834 - DNA, 122 bp, Homo sapiens
  misc_feature (61)..(62): /note="This region represents a CpG dinucleotide"
  misc_feature (61)..(61): /note="Nucleotide may be methylated to form 5-methylcytosine"
tatgaatatcctattcctcaacaacatttcactccatggttttaacattctttcatgaaccgggccgggcacagtggctcacctgtaatcccagcactttgggaggccgaggtgggtggatc

SEQ ID NO: 22835 - DNA, 122 bp, Homo sapiens
  misc_feature (61)..(62): /note="This region represents a CpG dinucleotide"
  misc_feature (61)..(61): /note="Nucleotide may be methylated to form 5-methylcytosine"
cagcatcagagccgctgagtgatggtgaggtgtatgagggtggagacataaatcatatgacggtatctaaagccatgagacaagatgacctggggagtaaacatcactgttcttctgctcac

SEQ ID NO: 22836 - DNA, 122 bp, Homo sapiens
  misc_feature (61)..(62): /note="This region represents a CpG dinucleotide"
  misc_feature (61)..(61): /note="Nucleotide may be methylated to form 5-methylcytosine"
attgtagatcttcccagaagccctagcgggaaggaggttcccccccgcctcccgcctccccgctttatgaatagcaagagagccagctcccatggtgccctccgtctcatgaataactaaca

SEQ ID NO: 22837 - DNA, 122 bp, Homo sapiens
  misc_feature (61)..(62): /note="This region represents a CpG dinucleotide"
  misc_feature (61)..(61): /note="Nucleotide may be methylated to form 5-methylcytosine"
cccccacagagaggaatgaagtcaagtcagaagctaggccagcaaatcattttcgtcttacggcttcccagaaaagctttggcaggggacatgaccagaccatgaactatgataaatagatg

SEQ ID NO: 22838 - DNA, 122 bp, Homo sapiens
  misc_feature (61)..(62): /note="This region represents a CpG dinucleotide"
  misc_feature (61)..(61): /note="Nucleotide may be methylated to form 5-methylcytosine"
ggcatgaggctgcaggagtcaaccagggcaggaagcctggggcctcccctccctggcacccggcatagccatgcccaggcccaagatggccctgactccagggacagacttcaggcaacagg

SEQ ID NO: 22839 - DNA, 122 bp, Homo sapiens
  misc_feature (61)..(62): /note="This region represents a CpG dinucleotide"
  misc_feature (61)..(61): /note="Nucleotide may be methylated to form 5-methylcytosine"
aagcctgggaaagtgggaagggaggggaagaaactgggacagacacctgggtcagcggctcgcccagggccccgaaccctgtgtcccagagctgagaagtcctgccccccttacctcaataa

SEQ ID NO: 22840 - DNA, 122 bp, Homo sapiens
  misc_feature (61)..(62): /note="This region represents a CpG dinucleotide"
  misc_feature (61)..(61): /note="Nucleotide may be methylated to form 5-methylcytosine"
aagtcaaggtggtattttggaaagcagctggagctagcaacggaaggtcggggtgcaaggcgtagctctgccactcacctcaagtcacttctctttggattttattatttataagaggaagc

SEQ ID NO: 22841 - DNA, 122 bp, Homo sapiens
  misc_feature (61)..(62): /note="This region represents a CpG dinucleotide"
  misc_feature (61)..(61): /note="Nucleotide may be methylated to form 5-methylcytosine"
agatttcaccagttttacatgcacttgtgtgtgtgtgcacaagtgggtgtgtgcagatgccgatgtgtatttggctctatgcaattttatcacaagtgtagattggtgtgagcaacaccaca

SEQ ID NO: 22842 - DNA, 122 bp, Homo sapiens
  misc_feature (61)..(62): /note="This region represents a CpG dinucleotide"
  misc_feature (61)..(61): /note="Nucleotide may be methylated to form 5-methylcytosine"
tgattactcccaactatatttgcatatatagtaacttgacctttgcaaagctcttttctacgtggtctcatccagtcttagaaaaatcttataagccagggcaaatcctttttattttactt

SEQ ID NO: 22843 - DNA, 122 bp, Homo sapiens
  misc_feature (61)..(62): /note="This region represents a CpG dinucleotide"
  misc_feature (61)..(61): /note="Nucleotide may be methylated to form 5-methylcytosine"
acaagttttgcaactttttatataatggtctggtgtgattttgaatgatttggaaattctcggttggcagaaagaagataaatgcataccacaagatacctcttcataatctcttttattct

SEQ ID NO: 22844 - DNA, 122 bp, Homo sapiens
  misc_feature (61)..(62): /note="This region represents a CpG dinucleotide"
  misc_feature (61)..(61): /note="Nucleotide may be methylated to form 5-methylcytosine"
gcgcgcgggcggggccgggggcgcggcgaggctcgggttggggcggggcgggggcgggggcggggccggacccggggaagccgcccgcccgcggggacgtccgcaccgcgagggttaaggcc

SEQ ID NO: 22845 - DNA, 122 bp, Homo sapiens
  misc_feature (61)..(62): /note="This region represents a CpG dinucleotide"
  misc_feature (61)..(61): /note="Nucleotide may be methylated to form 5-methylcytosine"
gagctgagcaaaatgaggattcaaattacaggagcgcagagtaaacttttggcatattagcggacatcttggtaagtttctcaggacagtgtttttcagagatgacaggattaaagagaaac

SEQ ID NO: 22846 - DNA, 122 bp, Homo sapiens
  misc_feature (61)..(62): /note="This region represents a CpG dinucleotide"
  misc_feature (61)..(61): /note="Nucleotide may be methylated to form 5-methylcytosine"
agaatcaaatgcttttgtgtgaaaacacttgctagagaaacaaatgtttgttttggtaatcgacatttggactgttggaacattaccacttaagatattggtttgagaaatatacatttaat

SEQ ID NO: 22847 - DNA, 122 bp, Homo sapiens
  misc_feature (61)..(62): /note="This region represents a CpG dinucleotide"
  misc_feature (61)..(61): /note="Nucleotide may be methylated to form 5-methylcytosine"
ccctgacatgttcttcatgaggtgatgacagggacattgacaggatgaatttctatcccccgctcccttcacacttcccattacggcaacttgagaatgagcagtagggaattctgggaccc

SEQ ID NO: 22848 - DNA, 122 bp, Homo sapiens
  misc_feature (61)..(62): /note="This region represents a CpG dinucleotide"
  misc_feature (61)..(61): /note="Nucleotide may be methylated to form 5-methylcytosine"
ccagtaacaggcagaccaaatatactttgaaggtcacggaagggttctctgtggaaatgacgttgagactgaatcctggagaatgggtcagatttagctaggtaaacagtagttgcctaaga

SEQ ID NO: 22849 - DNA, 122 bp, Homo sapiens
  misc_feature (61)..(62): /note="This region represents a CpG dinucleotide"
  misc_feature (61)..(61): /note="Nucleotide may be methylated to form 5-methylcytosine"
tggcttttgtgtcactgggtgctcttcctgaggccagctatgggcagattatgaaactgccgcatctgccctttctctccccagcctcacctcatgcctatacggtccttcctcctgtacct

SEQ ID NO: 22850 - DNA, 122 bp, Homo sapiens
  misc_feature (61)..(62): /note="This region represents a CpG dinucleotide"
  misc_feature (61)..(61): /note="Nucleotide may be methylated to form 5-methylcytosine"
ctttcaatcaatcctccacactgaagccagcatttgtttttaaaccagcaaacttgattacgccactcctctgactcaaaccttccagtggcatctcatgatcttcagtataaaaatcagag

SEQ ID NO: 22851 - DNA, 122 bp, Homo sapiens
  misc_feature (61)..(62): /note="This region represents a CpG dinucleotide"
  misc_feature (61)..(61): /note="Nucleotide may be methylated to form 5-methylcytosine"
cccactgggaattttacaaacatcctaaaaagcaatgaaggaaaaagtcgatttgaagggcgggacttaagtcagttgtgtttttcttacgacgcccacactgcaatgactcagaccactaa

SEQ ID NO: 22852 - DNA, 122 bp, Homo sapiens
  misc_feature (61)..(62): /note="This region represents a CpG dinucleotide"
  misc_feature (61)..(61): /note="Nucleotide may be methylated to form 5-methylcytosine"
tgtttgccgtcatccccttctgccgcgacgtgaaggtgctggcctcagtcatggcgctggcgggcttggccatgggctgcatcgacaccgtggccaacatgcagctggtaaggatgtaccag

SEQ ID NO: 22853 - DNA, 122 bp, Homo sapiens
  misc_feature (61)..(62): /note="This region represents a CpG dinucleotide"
  misc_feature (61)..(61): /note="Nucleotide may be methylated to form 5-methylcytosine"
aaaagatatatacatacacacacacacatagacatatacacacacacaaaattagccgggcgtggtggcagatgcctgtaatcccagctacccagcaggctgaggcaggagaatcgcttgaa

SEQ ID NO: 22854 - DNA, 122 bp, Homo sapiens
  misc_feature (61)..(62): /note="This region represents a CpG dinucleotide"
  misc_feature (61)..(61): /note="Nucleotide may be methylated to form 5-methylcytosine"
gacctgccccgctggaaagaagcagcaggcttggcactccgtctcacagagctggccacccggacacatggctcccagcaccctgtctcagctgaatcatcagtgacttctgtgcaggatcc

SEQ ID NO: 22855 - DNA, 122 bp, Homo sapiens
  misc_feature (61)..(62): /note="This region represents a CpG dinucleotide"
  misc_feature (61)..(61): /note="Nucleotide may be methylated to form 5-methylcytosine"
tgagcagcaggcaagccagcattacccgctgagctccgcttcctgtcagatcagaggcaacgctgattctcataggagcacggatcctactgtgaacagcccatgcgaaggatctaggttgt

SEQ ID NO: 22856 - DNA, 122 bp, Homo sapiens
  misc_feature (61)..(62): /note="This region represents a CpG dinucleotide"
  misc_feature (61)..(61): /note="Nucleotide may be methylated to form 5-methylcytosine"
aacatcttttggtgccaactttcctttctcctttgctcatattgtagatgtactcagtctcggacactgtgggccaagacttatctaaaacaaggtttcattgaggatgctaccttggttaa

SEQ ID NO: 22857 - DNA, 122 bp, Homo sapiens
  misc_feature (61)..(62): /note="This region represents a CpG dinucleotide"
  misc_feature (61)..(61): /note="Nucleotide may be methylated to form 5-methylcytosine"
cgccaccgcccagcccactgctcgctcgcgccgcctcccggagctgcggcccggctgggccggccccagggcctttgcaccaccggtggctgtctcccggagagctcttcggccacaggtcg

SEQ ID NO: 22858 - DNA, 122 bp, Homo sapiens
  misc_feature (61)..(62): /note="This region represents a CpG dinucleotide"
  misc_feature (61)..(61): /note="Nucleotide may be methylated to form 5-methylcytosine"
ggctgacggtgacatggtatttaacttatttgtttcatgaccagctgatcctaacacagacgtcttatttttaggtggcgagtgctctaatcgctcctaagtgcctaaactggagccaccag

SEQ ID NO: 22859 - DNA, 122 bp, Homo sapiens
  misc_feature (61)..(62): /note="This region represents a CpG dinucleotide"
  misc_feature (61)..(61): /note="Nucleotide may be methylated to form 5-methylcytosine"
acccgggaagtggaggtcgcagtatgctgagattctgccattgcaccccagcctgggagacgagtgagactccgtctaaaaaaaaaaaaaaaaaacttcatgaaaacagaaattcaaatttc

SEQ ID NO: 22860 - DNA, 122 bp, Homo sapiens
  misc_feature (61)..(62): /note="This region represents a CpG dinucleotide"
  misc_feature (61)..(61): /note="Nucleotide may be methylated to form 5-methylcytosine"
tattccaggattcttatattcagagaaaatcttattttctaatactctgtataccccaaacgacccaccagagtatcaattatgtgaattacaactgggaagaatgtgagaaggagaagtac

SEQ ID NO: 22861 - DNA, 122 bp, Homo sapiens
  misc_feature (61)..(62): /note="This region represents a CpG dinucleotide"
  misc_feature (61)..(61): /note="Nucleotide may be methylated to form 5-methylcytosine"
attatggtaataactgactcaggcaagggtcatcaattgatattaagctcttggaaacggcgtgtgttgaggaacaggctatttaattactttcgaagtatctccccagaaagcacttatta

SEQ ID NO: 22862 - DNA, 122 bp, Homo sapiens
  misc_feature (61)..(62): /note="This region represents a CpG dinucleotide"
  misc_feature (61)..(61): /note="Nucleotide may be methylated to form 5-methylcytosine"
ggagagaaggaagaggctaagttggttcccaggttcctgtgtgggtgaccgcgataaggacgacagatgcagtaccagatatctccatgagaaaacagagcacgtgctcgtcgtctttggaa

SEQ ID NO: 22863 - DNA, 122 bp, Homo sapiens
  misc_feature (61)..(62): /note="This region represents a CpG dinucleotide"
  misc_feature (61)..(61): /note="Nucleotide may be methylated to form 5-methylcytosine"
aatctccttcatgacaaccctccaaagcaatccaagttcattcccagaaaccggttaagtcgctttatatttacataactagaaatcacaaacaatgctatattttattctatcttaattcc

SEQ ID NO: 22864 - DNA, 122 bp, Homo sapiens
  misc_feature (61)..(62): /note="This region represents a CpG dinucleotide"
  misc_feature (61)..(61): /note="Nucleotide may be methylated to form 5-methylcytosine"
ttcctcatccgaaacatgggagtcaacaaaatgcacctcaccaggctgctgtgaggattacgtgagatgatttcacagtgatcaaacaggacacacgtactgcctgttgccattctttcatg

SEQ ID NO: 22865 - DNA, 122 bp, Homo sapiens
  misc_feature (61)..(62): /note="This region represents a CpG dinucleotide"
  misc_feature (61)..(61): /note="Nucleotide may be methylated to form 5-methylcytosine"
caggtagacttattaacctcccgggacctatatttatgtagcaacttgagctgaccagcacgtgtgctgggtaatgtttaaatcattagagtgcatgtatacgaacttaacattacaggaat

SEQ ID NO: 22866 - DNA, 122 bp, Homo sapiens
  misc_feature (61)..(62): /note="This region represents a CpG dinucleotide"
  misc_feature (61)..(61): /note="Nucleotide may be methylated to form 5-methylcytosine"
ttgtccattctactgttgatggaaaatggactgtttccagctgcttgccatgatggatagcgcacttgtgaacattgtttcatgtgacctgatgtgcccaggagtggaattccagggaacct

SEQ ID NO: 22867 - DNA, 122 bp, Homo sapiens
  misc_feature (61)..(62): /note="This region represents a CpG dinucleotide"
  misc_feature (61)..(61): /note="Nucleotide may be methylated to form 5-methylcytosine"
gctgcctcttgtcatctccaatccagatccgtttcattgacttaactcctggctgaataccgccagttaattacagcaatcacagaccttcctgctccagccacgcggtgagaatgagggtt

SEQ ID NO: 22868 - DNA, 122 bp, Homo sapiens
  misc_feature (61)..(62): /note="This region represents a CpG dinucleotide"
  misc_feature (61)..(61): /note="Nucleotide may be methylated to form 5-methylcytosine"
tgccctgaatcagcaccagccagggtgagacttaggatgataaagagcactggaggcgagcgagacaccaccctgcctgtctgcaaagatgccgaggagtccaaagagatggcattcaggcg

SEQ ID NO: 22869 - DNA, 122 bp, Homo sapiens
  misc_feature (61)..(62): /note="This region represents a CpG dinucleotide"
  misc_feature (61)..(61): /note="Nucleotide may be methylated to form 5-methylcytosine"
ctttaatcctcacaacccctcgaggtgggtatgtttaccttctgcatttaataggtaagccgcagacagacagtgactcacccaaggtcatgcagctcataagagcagatctgcctgactca

SEQ ID NO: 22870 - DNA, 122 bp, Homo sapiens
  misc_feature (61)..(62): /note="This region represents a CpG dinucleotide"
  misc_feature (61)..(61): /note="Nucleotide may be methylated to form 5-methylcytosine"
atgtcctaaatcattgttaactaggtaattctaaatttgcatctccaaagatatgaatcacgtgaaacaaggtagaaaatgtacaactcaaaggcacaggattagatctaaacaaagacaag

SEQ ID NO: 22871 - DNA, 122 bp, Homo sapiens
  misc_feature (61)..(62): /note="This region represents a CpG dinucleotide"
  misc_feature (61)..(61): /note="Nucleotide may be methylated to form 5-methylcytosine"
aaaggagactgaattagagggccagatgatgaaattctgtctcaagttgtgcagccctgacgcactcacagggaatgactggtgctaggtaagagcacaagaaacatcacactagccttgag

SEQ ID NO: 22872 - DNA, 122 bp, Homo sapiens
  misc_feature (61)..(62): /note="This region represents a CpG dinucleotide"
  misc_feature (61)..(61): /note="Nucleotide may be methylated to form 5-methylcytosine"
tgcctcggcctcccaaagtgctgggattacaggcatgagccaccacgcctggtctatggacgtgctttctaaccctgaatgtgtaatggggagttgtggcttcagatttgcattttaccaag

SEQ ID NO: 22873 - DNA, 122 bp, Homo sapiens
  misc_feature (61)..(62): /note="This region represents a CpG dinucleotide"
  misc_feature (61)..(61): /note="Nucleotide may be methylated to form 5-methylcytosine"
gttcagtgcttctggagtttaaagagcccggcgagggtcatgtcagatgacgccggtccacgagaaggagggtggattatatccttagagacgccatagagtgaggatataatggctctgta

SEQ ID NO: 22874 - DNA, 122 bp, Homo sapiens
  misc_feature (61)..(62): /note="This region represents a CpG dinucleotide"
  misc_feature (61)..(61): /note="Nucleotide may be methylated to form 5-methylcytosine"
taaataatactaatagtgtttacttagtgctatgtgtcagccactagctagaatgcttcacgtgtatgtttaatactcacattaggtgcagttatgatcaccattgttcagacaaggaaaca

SEQ ID NO: 22875 - DNA, 122 bp, Homo sapiens
  misc_feature (61)..(62): /note="This region represents a CpG dinucleotide"
  misc_feature (61)..(61): /note="Nucleotide may be methylated to form 5-methylcytosine"
atatgaaataaagttttgactgcaacccatgacatgaggtcaggtgcggaattttccactcgtggcatcctgtcagtgctcaaaagtttcccattttagatttggggattagaaatgctcaa

SEQ ID NO: 22876 - DNA, 122 bp, Homo sapiens
  misc_feature (61)..(62): /note="This region represents a CpG dinucleotide"
  misc_feature (61)..(61): /note="Nucleotide may be methylated to form 5-methylcytosine"
ctctggaatggcagttccacaaagaccagggcctggtctgtcctgctcctcagtttaccccgagtctagagcaatattagtggaagaatccatgatggaggattaaatgaaatagtctaagt

SEQ ID NO: 22877 - DNA, 122 bp, Homo sapiens
  misc_feature (61)..(62): /note="This region represents a CpG dinucleotide"
  misc_feature (61)..(61): /note="Nucleotide may be methylated to form 5-methylcytosine"
gaacgggtgctagctgtggacttgtttgaattccaggttggcccataactggctctgtgacgtcgggcaaattacttgagctctctgagcctcggttttgccaattataaagtaaggataat

SEQ ID NO: 22878 - DNA, 122 bp, Homo sapiens
  misc_feature (61)..(62): /note="This region represents a CpG dinucleotide"
  misc_feature (61)..(61): /note="Nucleotide may be methylated to form 5-methylcytosine"
attttgttcttgaacttcattaagaacaaaacagggtgggtggggcaggaaattcctaggcgatacttctgcactgaatgggatcatactgactacataacacgttatacttagggggagac

SEQ ID NO: 22879 - DNA, 122 bp, Homo sapiens
  misc_feature (61)..(62): /note="This region represents a CpG dinucleotide"
  misc_feature (61)..(61): /note="Nucleotide may be methylated to form 5-methylcytosine"
gctgggcgtccgcctgtgtttgccaaagcacgagttgaaacgtgaagtgttgggccagcccgtgtggcaccaatacctgccgcctacgactgttgtgaacactgaatgggccaacaaaccta

SEQ ID NO: 22880 - DNA, 122 bp, Homo sapiens
  misc_feature (61)..(62): /note="This region represents a CpG dinucleotide"
  misc_feature (61)..(61): /note="Nucleotide may be methylated to form 5-methylcytosine"
gtcttaatcttataagtaatatttcctgtgtatgcatctgctaagtccctccagaactcacgttgaaacttaatctcaaagaggcaggacactgaggaggagattaggtcatgagtgctcct

SEQ ID NO: 22881 - DNA, 122 bp, Homo sapiens
  misc_feature (61)..(62): /note="This region represents a CpG dinucleotide"
  misc_feature (61)..(61): /note="Nucleotide may be methylated to form 5-methylcytosine"
tttttagttgcaaatgggctgtttatgatgatcattatttgaatggtctgcgccgggctccgggctgtctgtctgctgctgatggccagttaatcagatgagtctcctccctgcctgggcct

SEQ ID NO: 22882 - DNA, 122 bp, Homo sapiens
  misc_feature (61)..(62): /note="This region represents a CpG dinucleotide"
  misc_feature (61)..(61): /note="Nucleotide may be methylated to form 5-methylcytosine"
ttattcataatggatcagccaattcattccttattaatttaatggagtacaagtaagcagcgtaacagcttgagtttaggagtgtttcacaaatggggctttttgtctgtaatcacttaatc

SEQ ID NO: 22883 - DNA, 122 bp, Homo sapiens
  misc_feature (61)..(62): /note="This region represents a CpG dinucleotide"
  misc_feature (61)..(61): /note="Nucleotide may be methylated to form 5-methylcytosine"
aaagtgctgggattacaggcatgagtcatggcacccagcctgtgttctgtataatttctacgatattgagtagcaatgaccacacaagttacctgggcaggtggatttcaaggcagctctac

SEQ ID NO: 22884 - DNA, 122 bp, Homo sapiens
  misc_feature (61)..(62): /note="This region represents a CpG dinucleotide"
  misc_feature (61)..(61): /note="Nucleotide may be methylated to form 5-methylcytosine"
cctgcacagggccccttggctccctccctcccgctgctcagagctcactcagggcggaaacgcagagcggacagatgcagcctaatgcagtctcacagtatctacttgtcagccagaaccca

SEQ ID NO: 22885 - DNA, 122 bp, Homo sapiens
  misc_feature (61)..(62): /note="This region represents a CpG dinucleotide"
  misc_feature (61)..(61): /note="Nucleotide may be methylated to form 5-methylcytosine"
cattgttaaattgcctataaatacctggctactcaaatacactctcagtaactaataagtcgaataaagtatttgtcacatgtccatttatatttgcataatattgtctggaaaagcctccc

SEQ ID NO: 22886 - DNA, 122 bp, Homo sapiens
  misc_feature (61)..(62): /note="This region represents a CpG dinucleotide"
  misc_feature (61)..(61): /note="Nucleotide may be methylated to form 5-methylcytosine"
taacaatagtgagtttgttttcaatttctttgaaattaatgaacttcctgagaacagggtcgtgattcatcctagcaaggagtacattgctggcacacagtagacacctagtgaacactgaa

SEQ ID NO: 22887 - DNA, 122 bp, Homo sapiens
  misc_feature (61)..(62): /note="This region represents a CpG dinucleotide"
  misc_feature (61)..(61): /note="Nucleotide may be methylated to form 5-methylcytosine"
catcatgcacccatcacccagcacagtccaggtgtgttgtaccatgggtgttaggtggcacgatggtggtgatgaggatgtaatccactggcttaaaccctgcccagctcacatactccctc

SEQ ID NO: 22888 - DNA, 122 bp, Homo sapiens
  misc_feature (61)..(62): /note="This region represents a CpG dinucleotide"
  misc_feature (61)..(61): /note="Nucleotide may be methylated to form 5-methylcytosine"
atgagtaattattgtgctctgtcttttactgttattgaaggtcactgtttaacactccctcgccattcccctaaccactcccctttgccttaaattcattaagctgtattctttgtatttcc

SEQ ID NO: 22889 - DNA, 122 bp, Homo sapiens
  misc_feature (61)..(62): /note="This region represents a CpG dinucleotide"
  misc_feature (61)..(61): /note="Nucleotide may be methylated to form 5-methylcytosine"
atttaatgtagatacttacgggcaaagccaggatttgaacctcattctgcctggcaccagcgtgtttggacaatctttcttcaggcatggttatactcatgacaaacatgattcatttatta

SEQ ID NO: 22890 - DNA, 122 bp, Homo sapiens
  misc_feature (61)..(62): /note="This region represents a CpG dinucleotide"
  misc_feature (61)..(61): /note="Nucleotide may be methylated to form 5-methylcytosine"
gccaggcccttctaggaatgttggtgctcctagcacccagaggtttccaggggagtggcccgagtacgtccccgcctaattctggagccgtcccttcggctgcgcagtggagcgccgacgtg

SEQ ID NO: 22891 - DNA, 122 bp, Homo sapiens
  misc_feature (61)..(62): /note="This region represents a CpG dinucleotide"
  misc_feature (61)..(61): /note="Nucleotide may be methylated to form 5-methylcytosine"
ttgagcagtcctctctgtggttttggtgatgtttgtggttacacaataaacaaacctcaccgactttctggcctttcataggttctttgagtttccggcactttttttttttttttttgaga

SEQ ID NO: 22892 - DNA, 122 bp, Homo sapiens
  misc_feature (61)..(62): /note="This region represents a CpG dinucleotide"
  misc_feature (61)..(61): /note="Nucleotide may be methylated to form 5-methylcytosine"
tggtataattaagggtgaaaataaggcccctctgtatttctattcccctttgcttttctgcggagcttttacctcagaggaaagttgttttagtaatctgggaaagagaaaccatgtgctga

SEQ ID NO: 22893 - DNA, 122 bp, Homo sapiens
  misc_feature (61)..(62): /note="This region represents a CpG dinucleotide"
  misc_feature (61)..(61): /note="Nucleotide may be methylated to form 5-methylcytosine"
ctgggctcaagtgatcagcccgccttggcctgccaaagtgctgggattgcaggcgtgaaccgtgcacttgcctggaattcttgcccttaagtagcttatgatctaatggggaaggcaaatag

SEQ ID NO: 22894 - DNA, 122 bp, Homo sapiens
  misc_feature (61)..(62): /note="This region represents a CpG dinucleotide"
  misc_feature (61)..(61): /note="Nucleotide may be methylated to form 5-methylcytosine"
cagtgcctggggcaagaggtgaggcagaaattgagacagggagcgcatgagttcagagctcgtactgtattgatagtcacagaggacacctgggctgtctagggaagaagtggcagctctga

SEQ ID NO: 22895 - DNA, 122 bp, Homo sapiens
  misc_feature (61)..(62): /note="This region represents a CpG dinucleotide"
  misc_feature (61)..(61): /note="Nucleotide may be methylated to form 5-methylcytosine"
aggtgatctgctgccttggcctcccaaagtgctgggattacaggcgtgagccactgcgcccggtcatatgtagacatttgataaatacgttgaatgaaaggaaaccaactctccattctccc

SEQ ID NO: 22896 - DNA, 122 bp, Homo sapiens
  misc_feature (61)..(62): /note="This region represents a CpG dinucleotide"
  misc_feature (61)..(61): /note="Nucleotide may be methylated to form 5-methylcytosine"
aaccagtctcctctctcaaaccaaaatggcctatttctaattcagataaaaccgtgacttcgaaagaccattgctgcaggcttcttattgacccctgactgtgattttatgattaaaacaaa

SEQ ID NO: 22897 - DNA, 122 bp, Homo sapiens
  misc_feature (61)..(62): /note="This region represents a CpG dinucleotide"
  misc_feature (61)..(61): /note="Nucleotide may be methylated to form 5-methylcytosine"
cctgtgtggagggtgcaggaagcccagaggcctgtggctgccagcattgctcagagtttccgctgagctcttcctgcagggccctcctcagggctctgctagccagcgccccctgtcttgag

SEQ ID NO: 22898 - DNA, 122 bp, Homo sapiens
  misc_feature (61)..(62): /note="This region represents a CpG dinucleotide"
  misc_feature (61)..(61): /note="Nucleotide may be methylated to form 5-methylcytosine"
tcctggatgtttgggagtctgggggctggctctgggggactgctaatccagagatttgcccgactctaagaggattctggcttcctagaacccttcctgtgtttcccaggctggcctgcatg

SEQ ID NO: 22899 - DNA, 122 bp, Homo sapiens
  misc_feature (61)..(62): /note="This region represents a CpG dinucleotide"
  misc_feature (61)..(61): /note="Nucleotide may be methylated to form 5-methylcytosine"
cactggaggagcagacgtggcctccgggagatgctgagccagggctgaggacatgagatgcgcagggagggcagacactcccaccaggtcagaggagagacagggaggccagccctgccaaa

SEQ ID NO: 22900 - DNA, 122 bp, Homo sapiens
  misc_feature (61)..(62): /note="This region represents a CpG dinucleotide"
  misc_feature (61)..(61): /note="Nucleotide may be methylated to form 5-methylcytosine"
ttctcagtcacacatacaactcaaaggatgactaactcagatacagcaggctgagaattacgttttaactcctccccttccccttccaagtaatccatgatatgtcagtctataactggttt

SEQ ID NO: 22901 - DNA, 122 bp, Homo sapiens
  misc_feature (61)..(62): /note="This region represents a CpG dinucleotide"
  misc_feature (61)..(61): /note="Nucleotide may be methylated to form 5-methylcytosine"
aactcagacaaccttgcaattcctgcctatggatgacacggcaccagaaatgagctgatccgccctctgaggacaccccaggtaacctgacaaggagagtctagagcaacgtgttttgagca

SEQ ID NO: 22902 - DNA, 122 bp, Homo sapiens
  misc_feature (61)..(62): /note="This region represents a CpG dinucleotide"
  misc_feature (61)..(61): /note="Nucleotide may be methylated to form 5-methylcytosine"
ttcatttctcgttctgacttctgagctgcgaggtgagctctgtggtcagctgcactgtggcgtatgctcgctgtcattcagctgacatttcagctgctcccaaagtcaacatttatgagttc

SEQ ID NO: 22903 - DNA, 122 bp, Homo sapiens
  misc_feature (61)..(62): /note="This region represents a CpG dinucleotide"
  misc_feature (61)..(61): /note="Nucleotide may be methylated to form 5-methylcytosine"
tttgatggtcttgcatttgttctcatcagctagctgccaagagctgagccacacggctaacgccaaagtccaaagcctggtgtgtgttcttggtatcagaccctcagggtgcagctgagtgt

SEQ ID NO: 22904 - DNA, 122 bp, Homo sapiens
  misc_feature (61)..(62): /note="This region represents a CpG dinucleotide"
  misc_feature (61)..(61): /note="Nucleotide may be methylated to form 5-methylcytosine"
acaatgaaggacaatcaggaatagcacttaggtctgaggagaaatggagctagaaggagccgtttcatagctcagtgtaacacagagttatttggggtttaactgaaacgccttccttcatc

SEQ ID NO: 22905 - DNA, 122 bp, Homo sapiens
  misc_feature (61)..(62): /note="This region represents a CpG dinucleotide"
  misc_feature (61)..(61): /note="Nucleotide may be methylated to form 5-methylcytosine"
taggatagagctactaccttgggaaacccccacatatcagtacatgtaagtctttatctgcgcctttcatattccccaggatagaattctacaatattcaatgttttgggtgcgatggggaa

SEQ ID NO: 22906 - DNA, 122 bp, Homo sapiens
  misc_feature (61)..(62): /note="This region represents a CpG dinucleotide"
  misc_feature (61)..(61): /note="Nucleotide may be methylated to form 5-methylcytosine"
aactccacatggtggacacttgtcactgggaatgattcaggctttaatggggctgctgggcgggagcacagggcttgagggccagaggaagtggagcaggaactgtggcaagaggtagaggg

SEQ ID NO: 22907 - DNA, 122 bp, Homo sapiens
  misc_feature (61)..(62): /note="This region represents a CpG dinucleotide"
  misc_feature (61)..(61): /note="Nucleotide may be methylated to form 5-methylcytosine"
gggtgagtgtgctacaggcatctaatgggtcagggatgctgctgaatacactttaatgcacgggatagcctccacaacaaagaattttcctactccaaatattaatagtactggagttgaga

SEQ ID NO: 22908 - DNA, 122 bp, Homo sapiens
  misc_feature (61)..(62): /note="This region represents a CpG dinucleotide"
  misc_feature (61)..(61): /note="Nucleotide may be methylated to form 5-methylcytosine"
aaaaagaaagacattgttaagtagaacaattctaaatcctcaagcatgcataactctgagcgctgttagttgtctcattcaatgtcatatcaatttgctgagaaattaataagatagcctca

SEQ ID NO: 22909 - DNA, 122 bp, Homo sapiens
  misc_feature (61)..(62): /note="This region represents a CpG dinucleotide"
  misc_feature (61)..(61): /note="Nucleotide may be methylated to form 5-methylcytosine"
acagcccaaggttggaactggttaatagttgcatggtgtgtgtgtgtgtgcatgcacacacgcatatgtgctctatccttgtagtagtcagagagcagatagtaactaagaaagaaaggcaa

SEQ ID NO: 22910 - DNA, 122 bp, Homo sapiens
  misc_feature (61)..(62): /note="This region represents a CpG dinucleotide"
  misc_feature (61)..(61): /note="Nucleotide may be methylated to form 5-methylcytosine"
atataacacacatcttcaaactacaacctggctgtaccctaaaactttgtctgggtaggccgtgtggcacccagaatatatgtttgccatagaaagagtgttgtaaatgttggagaggttcc

SEQ ID NO: 22911 - DNA, 122 bp, Homo sapiens
  misc_feature (61)..(62): /note="This region represents a CpG dinucleotide"
  misc_feature (61)..(61): /note="Nucleotide may be methylated to form 5-methylcytosine"
acatggtggacatttgcctttgattgtttgcttgcccggaatctgacctgtgctctcctacgttgtgagaatcctcactgtgtgcgtcttactgggaggcagggctctgtcatacacagtga

SEQ ID NO: 22912 - DNA, 122 bp, Homo sapiens
  misc_feature (61)..(62): /note="This region represents a CpG dinucleotide"
  misc_feature (61)..(61): /note="Nucleotide may be methylated to form 5-methylcytosine"
ggtgaaaaggtggcagaataggttcgttatcccaggccgtactgcctgtggcgtggggggcgggttgggggccctatccagggcgtcactgcccgtgttggggggctgcttgagtgtggtac

SEQ ID NO: 22913 - DNA, 122 bp, Homo sapiens
  misc_feature (61)..(62): /note="This region represents a CpG dinucleotide"
  misc_feature (61)..(61): /note="Nucleotide may be methylated to form 5-methylcytosine"
gccgccacacgcgtggatacttccagttcatgcttttcatttctctgttctgtctcactgcggcactccctgactccttggggataaggaagacaaaggcagttctcggaatgtgggccaga

SEQ ID NO: 22914 - DNA, 122 bp, Homo sapiens
  misc_feature (61)..(62): /note="This region represents a CpG dinucleotide"
  misc_feature (61)..(61): /note="Nucleotide may be methylated to form 5-methylcytosine"
ggcagggtcatttaactaatgggattttcaccatatcctgtttcttttagtgacattccccggattcctgagagctcccaccctccactggagtccagtgagtataaggtttctttgttatt

SEQ ID NO: 22915 - DNA, 122 bp, Homo sapiens
  misc_feature (61)..(62): /note="This region represents a CpG dinucleotide"
  misc_feature (61)..(61): /note="Nucleotide may be methylated to form 5-methylcytosine"
taagagttacaggaaattactgtgttctcaggcatctcttgtatctggaagcaggatgtacgtcactttctaataggcttatcttttgggtgaggtggagtaaagggtattaagggagatgc

SEQ ID NO: 22916 - DNA, 122 bp, Homo sapiens
  misc_feature (61)..(62): /note="This region represents a CpG dinucleotide"
  misc_feature (61)..(61): /note="Nucleotide may be methylated to form 5-methylcytosine"
tgaggtcagcttttgttcttttctttctagatcatttactagtgtcacctgatccgttgccgctttagaccaagtcagaggggaaggagaggagggggagcacaggaaggagaaggctggaa

SEQ ID NO: 22917 - DNA, 122 bp, Homo sapiens
  misc_feature (61)..(62): /note="This region represents a CpG dinucleotide"
  misc_feature (61)..(61): /note="Nucleotide may be methylated to form 5-methylcytosine"
ttttttgcttctttatgacacaggtataataaagacagcctgttatagtaaatgatagtgcgttatatactgtttggaaaataatgacctataaaaatgttttgaaagagtttgatttttta

SEQ ID NO: 22918 - DNA, 122 bp, Homo sapiens
  misc_feature (61)..(62): /note="This region represents a CpG dinucleotide"
  misc_feature (61)..(61): /note="Nucleotide may be methylated to form 5-methylcytosine"
gttcagtaaatatttgttgaatgaaaggataaattctcatttatcttagggcatttgtaacggggcaaccagatggcttcaggaggcacctctgaagattctgcattgctcagattatgcat

SEQ ID NO: 22919 - DNA, 122 bp, Homo sapiens
  misc_feature (61)..(62): /note="This region represents a CpG dinucleotide"
  misc_feature (61)..(61): /note="Nucleotide may be methylated to form 5-methylcytosine"
gctgccccacctccagaatcgcctgctctaggaagctgtaacaggtgacaggtgtaccggcgctcctggagggaggtaaagtcatagtgtgcacatcacagtgactgatatttgcataacaa

SEQ ID NO: 22920 - DNA, 122 bp, Homo sapiens
  misc_feature (61)..(62): /note="This region represents a CpG dinucleotide"
  misc_feature (61)..(61): /note="Nucleotide may be methylated to form 5-methylcytosine"
ccgtgatcgacgtgaatgtattttctgtctctctctgactttgtccctgctgcctgtttccgtctgtctctttctctgaatccttgactgtctctctggttctctgtgagtcttgccatcgc

SEQ ID NO: 22921 - DNA, 122 bp, Homo sapiens
  misc_feature (61)..(62): /note="This region represents a CpG dinucleotide"
  misc_feature (61)..(61): /note="Nucleotide may be methylated to form 5-methylcytosine"
gatagcttcttcctgctttggttggtaaaatgaactctttaagtgggcaattcatgatgtcgcaatagaatagtgaatgaactaaaaagaaaatgttcacaatataagcttaaaaagcaagt

SEQ ID NO: 22922 - DNA, 122 bp, Homo sapiens
  misc_feature (61)..(62): /note="This region represents a CpG dinucleotide"
  misc_feature (61)..(61): /note="Nucleotide may be methylated to form 5-methylcytosine"
cctcactcagaggagaggagcccacccctcccaggacacctggctgagccggaacagcagcgcaggggagctgtgacagcagagagcagcaccaggtcacacaagcagccgccccggaagga

SEQ ID NO: 22923 - DNA, 122 bp, Homo sapiens
  misc_feature (61)..(62): /note="This region represents a CpG dinucleotide"
  misc_feature (61)..(61): /note="Nucleotide may be methylated to form 5-methylcytosine"
aggtggcccaggctctgcaacctgaacccacgtggagtcacaccatgacccaggactccacggattatactgactcagctagagtcaagagggctgcagtgcttattgatgacatcttttta

SEQ ID NO: 22924 - DNA, 122 bp, Homo sapiens
  misc_feature (61)..(62): /note="This region represents a CpG dinucleotide"
  misc_feature (61)..(61): /note="Nucleotide may be methylated to form 5-methylcytosine"
gggaaggctccatgcccccagccctccccatcccgggaattttctatcagcagaaagtaacggctcccgacacaagacatacccagaggcgccacagacccagcagtcccacccctaagcac

SEQ ID NO: 22925 - DNA, 122 bp, Homo sapiens
  misc_feature (61)..(62): /note="This region represents a CpG dinucleotide"
  misc_feature (61)..(61): /note="Nucleotide may be methylated to form 5-methylcytosine"
aaccctcaaggttctggggagctaatcacagggtatggcagagtcctcagttcaggctgacgagtggccatgccttttaagtgaagtctacagagcacacagtgagagggaattgggaaata

SEQ ID NO: 22926 - DNA, 122 bp, Homo sapiens
  misc_feature (61)..(62): /note="This region represents a CpG dinucleotide"
  misc_feature (61)..(61): /note="Nucleotide may be methylated to form 5-methylcytosine"
gcaccaggctaatactgttcaataatgggtcgccaaaaaaggaaggaagcaggtaagaagcgcagcagccaagttcataaccctgctgctgacagtgtcaacatccacctcctgctgagtgc

SEQ ID NO: 22927 - DNA, 122 bp, Homo sapiens
  misc_feature (61)..(62): /note="This region represents a CpG dinucleotide"
  misc_feature (61)..(61): /note="Nucleotide may be methylated to form 5-methylcytosine"
ttgtgattacagcatgaatcagcagcagaaacttgctgactggtattctgacctctaggccgagccacctgttagaactagagctagaaatgaagatgccaagtaatttaactgtgaaaaac

SEQ ID NO: 22928 - DNA, 122 bp, Homo sapiens
  misc_feature (61)..(62): /note="This region represents a CpG dinucleotide"
  misc_feature (61)..(61): /note="Nucleotide may be methylated to form 5-methylcytosine"
caagttgccaaatgagcagtataagaatactttagggctacatatgtttaaaagaatgagcgatagttgttagacagaggtgatcagaaacacttattgttgttttagaggaagtgaaacct

SEQ ID NO: 22929 - DNA, 122 bp, Homo sapiens
  misc_feature (61)..(62): /note="This region represents a CpG dinucleotide"
  misc_feature (61)..(61): /note="Nucleotide may be methylated to form 5-methylcytosine"
tgtgagccacacaaggtcagaaagcagatatgattcctgtatcagagttcctgcctgttacgcattgaacgctgtcttagtccatttgggctgctataacagggtggcttataaacaacaga

SEQ ID NO: 22930 - DNA, 122 bp, Homo sapiens
  misc_feature (61)..(62): /note="This region represents a CpG dinucleotide"
  misc_feature (61)..(61): /note="Nucleotide may be methylated to form 5-methylcytosine"
tgaaggctggcaccatgtaccttacccaaaggttgcaagggctggaatgtgcaaaggccacgtcagcagatggttaggtgcaatttcacgcctcaccgcgcagcgacacaaagggaactatt

SEQ ID NO: 22931 - DNA, 122 bp, Homo sapiens
  misc_feature (61)..(62): /note="This region represents a CpG dinucleotide"
  misc_feature (61)..(61): /note="Nucleotide may be methylated to form 5-methylcytosine"
ttagactaaccttataaccctataagaaatcatttgttcctggctgggtgcgctagctcacgcctataatcccagcactttgggaggctgaggcaggtggatcacttgaggtcaagagttca

SEQ ID NO: 22932 - DNA, 122 bp, Homo sapiens
  misc_feature (61)..(62): /note="This region represents a CpG dinucleotide"
  misc_feature (61)..(61): /note="Nucleotide may be methylated to form 5-methylcytosine"
tgggggcatctacacaagtgtttcccacttcctcacctcccacctccctcagtctggctgcggccccctccaggccgctgaggctggcctctgacagctgcctctgacctccttgttgccaa

SEQ ID NO: 22933 - DNA, 122 bp, Homo sapiens
  misc_feature (61)..(62): /note="This region represents a CpG dinucleotide"
  misc_feature (61)..(61): /note="Nucleotide may be methylated to form 5-methylcytosine"
catgtgtgcacactgcacacattagatctgctaacattccactagccaaagcaagtcacacggccaagatcaatatcagtggagcagggaatataccctgtcctccacagtgtcaacaaagc

SEQ ID NO: 22934 - DNA, 122 bp, Homo sapiens
  misc_feature (61)..(62): /note="This region represents a CpG dinucleotide"
  misc_feature (61)..(61): /note="Nucleotide may be methylated to form 5-methylcytosine"
ctcaggggcggaggcccctattcagccaccaatgctactgcaaacccaggatggtatttacgagtcgtgccgatggtgataaacaggactgaaagtctgaacaaatataacaatggaaaaaa

SEQ ID NO: 22935 - DNA, 122 bp, Homo sapiens
  misc_feature (61)..(62): /note="This region represents a CpG dinucleotide"
  misc_feature (61)..(61): /note="Nucleotide may be methylated to form 5-methylcytosine"
gcctgtttgctagtctgtttctcttataccttgcctcatccctttgaggcttaatctgtgcgttgcacactcttctatctcaaagcctagtgcaacagtgatatttgttgaatgaatgatct

SEQ ID NO: 22936 - DNA, 122 bp, Homo sapiens
  misc_feature (61)..(62): /note="This region represents a CpG dinucleotide"
  misc_feature (61)..(61): /note="Nucleotide may be methylated to form 5-methylcytosine"
ttgtaagcaggagatatcctgaaatctggttctccctacataggatgaccagccagaggccgatgggtggaatgttcccacagagtcagagaggatgtgagtcatgccttcttacatcattt

SEQ ID NO: 22937 - DNA, 122 bp, Homo sapiens
  misc_feature (61)..(62): /note="This region represents a CpG dinucleotide"
  misc_feature (61)..(61): /note="Nucleotide may be methylated to form 5-methylcytosine"
catatttcagcagaggtcctcagtagagccacatgcaggagatacatgcatttgtccactcgtcactcacttagtcatttgttcacttatatatccactctctcactcatgccttcagtcat

SEQ ID NO: 22938 - DNA, 122 bp, Homo sapiens
  misc_feature (61)..(62): /note="This region represents a CpG dinucleotide"
  misc_feature (61)..(61): /note="Nucleotide may be methylated to form 5-methylcytosine"
ctctcggctgtctgggtctgaaagccaaggttcccccgacctaatcagagtggtgggctccgctgcactggtctccatattccagagcagaaaaacccgtttgctattggcctaggactgag

SEQ ID NO: 22939 - DNA, 122 bp, Homo sapiens
  misc_feature (61)..(62): /note="This region represents a CpG dinucleotide"
  misc_feature (61)..(61): /note="Nucleotide may be methylated to form 5-methylcytosine"
gaggcttagagaggagatatgacacacccacttcacatataggatatctgatttccaatccgagcatataaatatttgtgagcagatggatgtcagggatattttggagaaaaagggagttg

SEQ ID NO: 22940 - DNA, 122 bp, Homo sapiens
  misc_feature (61)..(62): /note="This region represents a CpG dinucleotide"
  misc_feature (61)..(61): /note="Nucleotide may be methylated to form 5-methylcytosine"
cctaaaacaaacccacggttacagaaacaagagaagcggagctttgtgcttgcctaaagacgtacccacaactacatagataacggagagttatgcagatagctttacagataagatactca

SEQ ID NO: 22941 - DNA, 122 bp, Homo sapiens
  misc_feature (61)..(62): /note="This region represents a CpG dinucleotide"
  misc_feature (61)..(61): /note="Nucleotide may be methylated to form 5-methylcytosine"
tatgcaaatcagctgtctgttcaggtcttgtgtttgttttccccatagacataatccagccgttagttattcaaagcagcagatgggagaaggaatccgtggaaatgtggatttattagctc

SEQ ID NO: 22942 - DNA, 122 bp, Homo sapiens
  misc_feature (61)..(62): /note="This region represents a CpG dinucleotide"
  misc_feature (61)..(61): /note="Nucleotide may be methylated to form 5-methylcytosine"
atgtctcaggataggccgggcgcggtggctcacgcctgtaatcccagcgctttgggaggccgaggaagatggatcacggggtcaggagatcaagatcatccttgctaatgtggtaaaaccct

SEQ ID NO: 22943 - DNA, 122 bp, Homo sapiens
  misc_feature (61)..(62): /note="This region represents a CpG dinucleotide"
  misc_feature (61)..(61): /note="Nucleotide may be methylated to form 5-methylcytosine"
gtgttttcctgtgctttgtttagtattgctcaagaagtaactaaacttcttggaaattgtcgtaactgtggaggacagtgagataataaatgactttgttttctttcagatctttgatgatg

SEQ ID NO: 22944 - DNA, 122 bp, Homo sapiens
  misc_feature (61)..(62): /note="This region represents a CpG dinucleotide"
  misc_feature (61)..(61): /note="Nucleotide may be methylated to form 5-methylcytosine"
gaagtaactgaggatagcaccactctgttggtgactcagttcccctgtctcatggaggaacgaagctgagctttgaatctgggtgtgctcctctctcagggtgactggttataaaagatgct

SEQ ID NO: 22945 - DNA, 122 bp, Homo sapiens
  misc_feature (61)..(62): /note="This region represents a CpG dinucleotide"
  misc_feature (61)..(61): /note="Nucleotide may be methylated to form 5-methylcytosine"
gtgattaacggatgatgtcacaaaagcatgcattggggaaaaggcaatagatttatctcacgcaggatatggccagaaaaaaaagaaaaccataggcccggtgcagtggctcatgcctgtaa

SEQ ID NO: 22946 - DNA, 122 bp, Homo sapiens
  misc_feature (61)..(62): /note="This region represents a CpG dinucleotide"
  misc_feature (61)..(61): /note="Nucleotide may be methylated to form 5-methylcytosine"
ggcgtgagccaccacacctagcctccctaagaatttgtcagtcttattattcatctctgacgcttactggcttgagtcagccctttctgtcgcataccgtgcagcttgcccgaggctgccca

SEQ ID NO: 22947 - DNA, 122 bp, Homo sapiens
  misc_feature (61)..(62): /note="This region represents a CpG dinucleotide"
  misc_feature (61)..(61): /note="Nucleotide may be methylated to form 5-methylcytosine"
ttcccagacttagtttaggaatttactcaggtgtgttttttatggctgggtgatgtccaacggtattccaaggcttagtttttagagtgctagcagggaaacaaaaaggaaaaaaacctctc

SEQ ID NO: 22948 - DNA, 122 bp, Homo sapiens
  misc_feature (61)..(62): /note="This region represents a CpG dinucleotide"
  misc_feature (61)..(61): /note="Nucleotide may be methylated to form 5-methylcytosine"
ctgcaagattgtccttgataatcttttcacagcaataaaagcactgacgaagagtcagggcgttgtcatcaaagagactaaactgctgcagactacaactttcccaggacaaaaatattcaa

SEQ ID NO: 22949 - DNA, 122 bp, Homo sapiens
  misc_feature (61)..(62): /note="This region represents a CpG dinucleotide"
  misc_feature (61)..(61): /note="Nucleotide may be methylated to form 5-methylcytosine"
ccatgaagtacatttagcaacgtcaattaacaagttctcctcatttttaaccaatgcatgcgtcatatttttaagtgggtatttgtcccgtgtgtttgcttgcagggtgactgtccactact

SEQ ID NO: 22950 - DNA, 122 bp, Homo sapiens
  misc_feature (61)..(62): /note="This region represents a CpG dinucleotide"
  misc_feature (61)..(61): /note="Nucleotide may be methylated to form 5-methylcytosine"
ctcatggtgagaaccatgaagtgtcaaagagaaaccataaattcctcctcaggcctgactcggagcagacatcctatcattctgccttattctgttggctaaagcaagtcatgaggcccaac

SEQ ID NO: 22951 - DNA, 122 bp, Homo sapiens
  misc_feature (61)..(62): /note="This region represents a CpG dinucleotide"
  misc_feature (61)..(61): /note="Nucleotide may be methylated to form 5-methylcytosine"
caagcaaaaaacagcaggataaagaaagctggaggcaaaagacaaagccaatgcaatccacgcttgtttttcgagtggcactgactcatgtgagacacccactgctaggacacctgacttca

SEQ ID NO: 22952 - DNA, 122 bp, Homo sapiens
  misc_feature (61)..(62): /note="This region represents a CpG dinucleotide"
  misc_feature (61)..(61): /note="Nucleotide may be methylated to form 5-methylcytosine"
ctcactcaggggcaagtggtaagcgctctttcccctctagtgtttgtgactcaggagtttcgaaacaggaagtagagctggctggctgtgcccttccgtccttcattagacgtttgctcttg

SEQ ID NO: 22953 - DNA, 122 bp, Homo sapiens
  misc_feature (61)..(62): /note="This region represents a CpG dinucleotide"
  misc_feature (61)..(61): /note="Nucleotide may be methylated to form 5-methylcytosine"
catcttagcctcagctacagccctgatcacctcagctccactgggcttcacttcactccacgcttctacagctgctcaccaccttgaatgtgccatggcgaaatcttgcctccctgtgtctc

SEQ ID NO: 22954 - DNA, 122 bp, Homo sapiens
  misc_feature (61)..(62): /note="This region represents a CpG dinucleotide"
  misc_feature (61)..(61): /note="Nucleotide may be methylated to form 5-methylcytosine"
gcttacaagcacttgaaacatttacttttggttaggtaaaatttaatgtgaatgtgatggcggtggattttagtttcaaatgaggtaaaaagctgaattgttaaagagttgcatctattctt

SEQ ID NO: 22955 - DNA, 122 bp, Homo sapiens
  misc_feature (61)..(62): /note="This region represents a CpG dinucleotide"
  misc_feature (61)..(61): /note="Nucleotide may be methylated to form 5-methylcytosine"
tacagtgatggattcattgttctgcaggcatttcttaatgagttgtcactcctgactctgcgtcatgccttgggatcggcaggttcatgtcagactgtttacttctcatgaagcctttgaga

SEQ ID NO: 22956 - DNA, 122 bp, Homo sapiens
  misc_feature (61)..(62): /note="This region represents a CpG dinucleotide"
  misc_feature (61)..(61): /note="Nucleotide may be methylated to form 5-methylcytosine"
taagtataataagggttacttgaacacaagaactgcaatgctgggacagctgatctgatacgagtcagctgctaagtgactaatatgtggatgctgaacaaaaggatgattcacatcctagg

SEQ ID NO: 22957 - DNA, 122 bp, Homo sapiens
  misc_feature (61)..(62): /note="This region represents a CpG dinucleotide"
  misc_feature (61)..(61): /note="Nucleotide may be methylated to form 5-methylcytosine"
acacagtttgttaggaagtgagggagaggggtgagcgctgtcccggcccgcgctgggaggcgggactcagacttcagcacggggtcggggtttcggcctaaaaccagcctcccccaaagccc

SEQ ID NO: 22958 - DNA, 122 bp, Homo sapiens
  misc_feature (61)..(62): /note="This region represents a CpG dinucleotide"
  misc_feature (61)..(61): /note="Nucleotide may be methylated to form 5-methylcytosine"
aaaacctcacagaggtgttataagaattacgtgtggaaagcaaccgtttatgtacatgtgcgtattaataagtacctgacacagaaagcattcaaggaaagacttatttacaggtaactaat

SEQ ID NO: 22959 - DNA, 122 bp, Homo sapiens
  misc_feature (61)..(62): /note="This region represents a CpG dinucleotide"
  misc_feature (61)..(61): /note="Nucleotide may be methylated to form 5-methylcytosine"
tgtggcttgtagcagctgtcataccttagttcctcaggtaaaacttcaattttaacctcccgttgcattaataataaatcaacatgtgcacgtgacctttcagagcccaaaatgtgatcata

SEQ ID NO: 22960 - DNA, 122 bp, Homo sapiens
  misc_feature (61)..(62): /note="This region represents a CpG dinucleotide"
  misc_feature (61)..(61): /note="Nucleotide may be methylated to form 5-methylcytosine"
gtgagtgaggctcaaagagtaccagctaattgttaaatcctgtggcaagtcactctgtgacgtgagtcattactcactgacttttttgaaaccaaatgtttctgtcttagacctgctcaaag

SEQ ID NO: 22961 - DNA, 122 bp, Homo sapiens
  misc_feature (61)..(62): /note="This region represents a CpG dinucleotide"
  misc_feature (61)..(61): /note="Nucleotide may be methylated to form 5-methylcytosine"
gtatataaacaggttacttcaaacatcagctacaaaacagtgagtatataacactggatccgttcacacctgttgactgattgcttgaaaacagctaattgtgaaatgaacttggtatcttc

SEQ ID NO: 22962 - DNA, 122 bp, Homo sapiens
  misc_feature (61)..(62): /note="This region represents a CpG dinucleotide"
  misc_feature (61)..(61): /note="Nucleotide may be methylated to form 5-methylcytosine"
gacagcccatgacccagagacagcacacgtcggaggaaagccacagaatgaaagggcaaccgacccaagaaggagcagagcctgacaaacagatgttgaggaaagcagactcgatggaggag

SEQ ID NO: 22963 - DNA, 122 bp, Homo sapiens
  misc_feature (61)..(62): /note="This region represents a CpG dinucleotide"
  misc_feature (61)..(61): /note="Nucleotide may be methylated to form 5-methylcytosine"
agtgagagaccacaagcagcctctgaagtcatcttcctctctcttctcagaagcatttctcgaatattctgctgacaagaggttagcaggacttcacaagacaccccaacacacacacacac

SEQ ID NO: 22964 - DNA, 122 bp, Homo sapiens
  misc_feature (61)..(62): /note="This region represents a CpG dinucleotide"
  misc_feature (61)..(61): /note="Nucleotide may be methylated to form 5-methylcytosine"
cgctagctaatctcaagaacaaatatgaaaatgaaaaagcaatggtgactgaaaccatgacgaagcttagaaatgaactgaaggctttgaaagaagatgctgcaaccttctcatccctgaga

SEQ ID NO: 22965 - DNA, 122 bp, Homo sapiens
  misc_feature (61)..(62): /note="This region represents a CpG dinucleotide"
  misc_feature (61)..(61): /note="Nucleotide may be methylated to form 5-methylcytosine"
ctcttctgtggtcctgctagatttggagattgtcatttactgtctgacctagttcacacacgtgttccctgtgaaccaacttagatgtctgtcttaatgtaactgatagctcatttacttac

SEQ ID NO: 22966 - DNA, 122 bp, Homo sapiens
  misc_feature (61)..(62): /note="This region represents a CpG dinucleotide"
  misc_feature (61)..(61): /note="Nucleotide may be methylated to form 5-methylcytosine"
ggcccacccctcccttgaagcttgaagaatgcttcctggaagtcacttgtgacacttctgcgtacattccattggccagcacttagccccaagaccacacaaaggagactgtgaaatgtagt

SEQ ID NO: 22967 - DNA, 122 bp, Homo sapiens
  misc_feature (61)..(62): /note="This region represents a CpG dinucleotide"
  misc_feature (61)..(61): /note="Nucleotide may be methylated to form 5-methylcytosine"
ctgggaggacagacagagactgggatcttgctgctttcaaagtgtttggtcacaaatacacgttcaaatatgtgttctgcagtttatttaaagaggataaaggagggaaacaaaaaagacaa

SEQ ID NO: 22968 - DNA, 122 bp, Homo sapiens
  misc_feature (61)..(62): /note="This region represents a CpG dinucleotide"
  misc_feature (61)..(61): /note="Nucleotide may be methylated to form 5-methylcytosine"
ccagagtgaacttctgtcatcatcacagagcctgtaatcttctgtatggctcagaggacccgccatgatttgtccctacttgcttctccagcctcctgtctcacttctctcctatccctggg

SEQ ID NO: 22969 - DNA, 122 bp, Homo sapiens
  misc_feature (61)..(62): /note="This region represents a CpG dinucleotide"
  misc_feature (61)..(61): /note="Nucleotide may be methylated to form 5-methylcytosine"
aaaatgtgatatggagtctctgttctccattgtcaccaaggagtccccagaagccaaaaccgagagaatgttataaagaacaaatgggatactgcagtgaagcaagtaggaaagatactttg

SEQ ID NO: 22970 - DNA, 122 bp, Homo sapiens
  misc_feature (61)..(62): /note="This region represents a CpG dinucleotide"
  misc_feature (61)..(61): /note="Nucleotide may be methylated to form 5-methylcytosine"
ctatgactattttgctgcatttcccttcagtgcctttacttttttctttgtattatgttgcgcaggttatttagaacctttcttgtcagcctttccccacctgccaccaaccttctctttcc

SEQ ID NO: 22971 - DNA, 122 bp, Homo sapiens
  misc_feature (61)..(62): /note="This region represents a CpG dinucleotide"
  misc_feature (61)..(61): /note="Nucleotide may be methylated to form 5-methylcytosine"
aatgtttagcatgtgtgtaaaggtcgtaggtctggtgttcagaaattacatacaggcttacgaaagaatctgcactgggttggccaaattaaacaacaggcagttgtagagaaataaacaca

SEQ ID NO: 22972 - DNA, 122 bp, Homo sapiens
  misc_feature (61)..(62): /note="This region represents a CpG dinucleotide"
  misc_feature (61)..(61): /note="Nucleotide may be methylated to form 5-methylcytosine"
aagtaaatgcaggtgggtaagcgggacccggggtaacctacgtgacgctcaccatgataccgtgcgctcctctccaggacccaggcaaacacaaaaaaggaggctcagacaaccaagcaccc

SEQ ID NO: 22973 - DNA, 122 bp, Homo sapiens
  misc_feature (61)..(62): /note="This region represents a CpG dinucleotide"
  misc_feature (61)..(61): /note="Nucleotide may be methylated to form 5-methylcytosine"
acttcttactcactcagagctttgtcatttcctgtttaaaatctttcagttggccgggtgcggtggctcacgcctgtaatcccagcactttgggaggctgaggcgggcggatcacgaggtca

SEQ ID NO: 22974 - DNA, 122 bp, Homo sapiens
  misc_feature (61)..(62): /note="This region represents a CpG dinucleotide"
  misc_feature (61)..(61): /note="Nucleotide may be methylated to form 5-methylcytosine"
ctataccttctaggcctgatcaggaaggaagctgggttttggtgtgccagtcaggtgagacgcagagaagacagcacaatcaacacaggaagtaacagaagcagctagttactcacaggtcc

SEQ ID NO: 22975 - DNA, 122 bp, Homo sapiens
  misc_feature (61)..(62): /note="This region represents a CpG dinucleotide"
  misc_feature (61)..(61): /note="Nucleotide may be methylated to form 5-methylcytosine"
catctgtaatccattgttgatatagcctgcctggcaaagcatttcagggtgcatacacttcggtttaacttttacgatattgattattactcttgagtattatattgtgataatatagatgt

SEQ ID NO: 22976 - DNA, 122 bp, Homo sapiens
  misc_feature (61)..(62): /note="This region represents a CpG dinucleotide"
  misc_feature (61)..(61): /note="Nucleotide may be methylated to form 5-methylcytosine"
acatgctaatgagtccccgtggctgtgcccatcttgtggcctggacctgggctggtggctcggtcatggggatgatggtgacaatgatggtttttcacctcactttctgtgggtctaatgtg

SEQ ID NO: 22977 - DNA, 122 bp, Homo sapiens
  misc_feature (61)..(62): /note="This region represents a CpG dinucleotide"
  misc_feature (61)..(61): /note="Nucleotide may be methylated to form 5-methylcytosine"
agagtacttcccaagtacttcctgaagaggaaattctaaaaaagtggagatcttaaggtccgaagaagacaacagaatgacttagaaaatacaactggcatgaattaaagagacacaggtcc

SEQ ID NO: 22978 - DNA, 122 bp, Homo sapiens
  misc_feature (61)..(62): /note="This region represents a CpG dinucleotide"
  misc_feature (61)..(61): /note="Nucleotide may be methylated to form 5-methylcytosine"
gtcctggaggcacatggagaaggttgacaaagcctcattcctctgaaacatttcatgcaacggatttggttgaaaccccagattgtgatctggagtctttagcaactgtgctcatttcctac

SEQ ID NO: 22979 - DNA, 122 bp, Homo sapiens
  misc_feature (61)..(62): /note="This region represents a CpG dinucleotide"
  misc_feature (61)..(61): /note="Nucleotide may be methylated to form 5-methylcytosine"
aagtagagatcaaaaggcaatgcagatagactgacagatttcgcctgaagaggggaagcccgaccaggtaataaaggagtaagaggaaggatgttaaggacaattttaggaaacagataatg

SEQ ID NO: 22980 - DNA, 122 bp, Homo sapiens
  misc_feature (61)..(62): /note="This region represents a CpG dinucleotide"
  misc_feature (61)..(61): /note="Nucleotide may be methylated to form 5-methylcytosine"
cttagtgttgtagatacactgtgtcactttcatcctccctcctccccacaaaagatgccacgagaactcgtgaactgtgataagcaatgaacagaataactgttgaagaagcacctcatgaa

SEQ ID NO: 22981 - DNA, 122 bp, Homo sapiens
  misc_feature (61)..(62): /note="This region represents a CpG dinucleotide"
  misc_feature (61)..(61): /note="Nucleotide may be methylated to form 5-methylcytosine"
cctcctagagccactcttcctggtgctggactaagaggtgcaggcttggagggtgcagggcggtccgcctctcagacgtagaggcccggcctcggatgaaggcggaagggagggcaccgcct

SEQ ID NO: 22982 - DNA, 122 bp, Homo sapiens
  misc_feature (61)..(62): /note="This region represents a CpG dinucleotide"
  misc_feature (61)..(61): /note="Nucleotide may be methylated to form 5-methylcytosine"
ttaatttataaacacatttataaaataatagacatatttaggcagacaaaaccaagaagccgatcacatgagaccaccactaaatgatgtttgaaaggatgtacttcagaacaaaggaaaat

SEQ ID NO: 22983 - DNA, 122 bp, Homo sapiens
  misc_feature (61)..(62): /note="This region represents a CpG dinucleotide"
  misc_feature (61)..(61): /note="Nucleotide may be methylated to form 5-methylcytosine"
tctgttctgaggaagaagctatggaaagaattcctttggcaactctcagagaataggatacgtgtcactaggaagattttctagccaagatcttggtgcctgtgatgactcatgtttagatc

SEQ ID NO: 22984 - DNA, 122 bp, Homo sapiens
  misc_feature (61)..(62): /note="This region represents a CpG dinucleotide"
  misc_feature (61)..(61): /note="Nucleotide may be methylated to form 5-methylcytosine"
aggattttgaaatcaagaaacacacaaggcattgagtaagaaacaggctaattataacttcgagacacaagaaaaacaataagtatatgcaaatgtgtcaggttggtagaatctttggaatg

SEQ ID NO: 22985 - DNA, 122 bp, Homo sapiens
  misc_feature (61)..(62): /note="This region represents a CpG dinucleotide"
  misc_feature (61)..(61): /note="Nucleotide may be methylated to form 5-methylcytosine"
ttccccccagcctcttggttcttctgggctctgatccagcctcagcgtcactgtcttccacgcccctctttgattctcgtttatgtcaaaagccttgtgaggatgaggctgtgattatcccc

SEQ ID NO: 22986 - DNA, 122 bp, Homo sapiens
  misc_feature (61)..(62): /note="This region represents a CpG dinucleotide"
  misc_feature (61)..(61): /note="Nucleotide may be methylated to form 5-methylcytosine"
caatgcattaggcacccaaaaagcctaacattcaaccgtaatatactggaggtcagaatacgtattatttagagttttaacttttgttaatctagatgcagggttgcctaaatcaaactctg

SEQ ID NO: 22987 - DNA, 122 bp, Homo sapiens
  misc_feature (61)..(62): /note="This region represents a CpG dinucleotide"
  misc_feature (61)..(61): /note="Nucleotide may be methylated to form 5-methylcytosine"
ctacctacactcatgggaagggttaccaaaatccgtctattgcaaaacatcactctttctcgcttacatcatggctgcatgacatcaggacatgagtagctgccaagatgaactataaatgt

SEQ ID NO: 22988 - DNA, 122 bp, Homo sapiens
  misc_feature (61)..(62): /note="This region represents a CpG dinucleotide"
  misc_feature (61)..(61): /note="Nucleotide may be methylated to form 5-methylcytosine"
cgacagcccgccagcccgcccgcccgcccccctgtcctcctgcccccccgcctgtcctcccgcctgtctggctgccctgcctctggatcagcctggcacagagccctgggctttcggccagc

SEQ ID NO: 22989 - DNA, 122 bp, Homo sapiens
  misc_feature (61)..(62): /note="This region represents a CpG dinucleotide"
  misc_feature (61)..(61): /note="Nucleotide may be methylated to form 5-methylcytosine"
gcttcagtggtattaccagttttccaaagtgtttataccgatttacagaccttttggcaacgtatgagagttccatttcttcctgtacttaccaatacttgcttgcttgctctcttcctccc

SEQ ID NO: 22990 - DNA, 122 bp, Homo sapiens
  misc_feature (61)..(62): /note="This region represents a CpG dinucleotide"
  misc_feature (61)..(61): /note="Nucleotide may be methylated to form 5-methylcytosine"
aaatgtaattgttgacagagcatgaactatgattgacatgaggtcagaaagtccaaaggtcgcagggttagtgattcatatcagcttgtcagagcctttcctgtaatacactccatacttgg

SEQ ID NO: 22991 - DNA, 122 bp, Homo sapiens
  misc_feature (61)..(62): /note="This region represents a CpG dinucleotide"
  misc_feature (61)..(61): /note="Nucleotide may be methylated to form 5-methylcytosine"
taatacttctctggctttccttcctgattaagatcatgctaagtttgaaaacactttgtgcgtgctcatatgctgtatacatgttgttattgtttttatactgttaattatttctcttcatc

SEQ ID NO: 22992 - DNA, 122 bp, Homo sapiens
  misc_feature (61)..(62): /note="This region represents a CpG dinucleotide"
  misc_feature (61)..(61): /note="Nucleotide may be methylated to form 5-methylcytosine"
tacattctcaggactcttaacccaagatgagtgacatgcttcgaggctatccagctctgacgggtacagatggatgactcagtacatctcgatctttcagtcaagggcatctatttgtttcc

SEQ ID NO: 22993 - DNA, 122 bp, Homo sapiens
  misc_feature (61)..(62): /note="This region represents a CpG dinucleotide"
  misc_feature (61)..(61): /note="Nucleotide may be methylated to form 5-methylcytosine"
aggttcggtagagaaaaatagtaagctggtttagaaactgacgagggcaaacagccaggacgcattggagaggaatttgccaaagatctaccctgagataacgcctgtccagtgtcttcacc

SEQ ID NO: 22994 - DNA, 122 bp, Homo sapiens
  misc_feature (61)..(62): /note="This region represents a CpG dinucleotide"
  misc_feature (61)..(61): /note="Nucleotide may be methylated to form 5-methylcytosine"
ggtggtgagtcagtattcaaagatgaatgggccaaaataagagtttaaaaacatgtgagacgtgtggatggatattacaataggtcaattgcatcacattaaacttattctggacatggctg

SEQ ID NO: 22995 - DNA, 122 bp, Homo sapiens
  misc_feature (61)..(62): /note="This region represents a CpG dinucleotide"
  misc_feature (61)..(61): /note="Nucleotide may be methylated to form 5-methylcytosine"
ggccccctcttccctctgccttttaggtgcctactctggggaacaggtcagcatcaggcacggggctgggaccagaagaagagagcacacatggcccagagtctgggttctgtggtgagggc

SEQ ID NO: 22996 - DNA, 122 bp, Homo sapiens
  misc_feature (61)..(62): /note="This region represents a CpG dinucleotide"
  misc_feature (61)..(61): /note="Nucleotide may be methylated to form 5-methylcytosine"
gtagatcttttgaattttatatgcatgctcatgttgacttcagatctgcaacaaatgtggcgctgcagcaacatgggaacagggaaaatattcaatacatgttgctgttaaattgagtattg

SEQ ID NO: 22997 - DNA, 122 bp, Homo sapiens
  misc_feature (61)..(62): /note="This region represents a CpG dinucleotide"
  misc_feature (61)..(61): /note="Nucleotide may be methylated to form 5-methylcytosine"
ttgagatcagcaccaggcaacataaagagactctgtctctacaaaaaaccctcaaaacgacgaacgcccacaaaaaccacaaaacaaatagatgtgaaggagatgaggaagtgagccctgtg

SEQ ID NO: 22998 - DNA, 122 bp, Homo sapiens
  misc_feature (61)..(62): /note="This region represents a CpG dinucleotide"
  misc_feature (61)..(61): /note="Nucleotide may be methylated to form 5-methylcytosine"
cccttgcacttccccacgcctgttacacaagcccaggctgggagcagagggcgagctccacgacagcctgcagaggccatgccagaaatatggggtctgcagccccacatgagcccaggaaa

SEQ ID NO: 22999 - DNA, 122 bp, Homo sapiens
  misc_feature (61)..(62): /note="This region represents a CpG dinucleotide"
  misc_feature (61)..(61): /note="Nucleotide may be methylated to form 5-methylcytosine"
ctggattggctgcaactctccaggagcagcgctgctagtgagctggccaaggacagtgggcgtgggggagctccggcagtggtgcttcatatggggtgggtgggagctgaggccacagcctg

SEQ ID NO: 23000 - DNA, 122 bp, Homo sapiens
  misc_feature (61)..(62): /note="This region represents a CpG dinucleotide"
  misc_feature (61)..(61): /note="Nucleotide may be methylated to form 5-methylcytosine"
ccttctgaccatactgggtatagtctcttttgctccaggcaggaaacttaggcaggccttcggtttgggagttaagtttaaatcagggggacttttgtggagcctgattaaagccattcatc

SEQ ID NO: 23001 - DNA, 122 bp, Homo sapiens
  misc_feature (61)..(62): /note="This region represents a CpG dinucleotide"
  misc_feature (61)..(61): /note="Nucleotide may be methylated to form 5-methylcytosine"
ctggatcttcctgctaaatttctggctggtctacaggcctgctgctggctccagccagatcgtaaccacagtctagctgtgatgttggtcttccccatttgtttggcactaggccccagtcc

SEQ ID NO: 23002 - DNA, 122 bp, Homo sapiens
  misc_feature (61)..(62): /note="This region represents a CpG dinucleotide"
  misc_feature (61)..(61): /note="Nucleotide may be methylated to form 5-methylcytosine"
ttaagagctgtaacactcaccgcaaaggtctgcagcttcactcctgagccagcgagaccacgaacacaccaaaaggaagaaactcgcgacacatccaaacatcagaaggaacaaactccaga

SEQ ID NO: 23003 - DNA, 122 bp, Homo sapiens
  misc_feature (61)..(62): /note="This region represents a CpG dinucleotide"
  misc_feature (61)..(61): /note="Nucleotide may be methylated to form 5-methylcytosine"
gtaggactcttcttctacctggctattttggggggtcagtggtgctggtcagccctttcccgttgatagcactatctttctcttgttcagaattctgtgatttacatatggatgctcattat

SEQ ID NO: 23004 - DNA, 122 bp, Homo sapiens
  misc_feature (61)..(62): /note="This region represents a CpG dinucleotide"
  misc_feature (61)..(61): /note="Nucleotide may be methylated to form 5-methylcytosine"
ctgatgccatcgtctaacagttattagactccatcaggttatttgccttgaaccccaaatcgttgggaactaagtgatgtttagtgctcagctgggagggaggtctggcatttaagggctct

SEQ ID NO: 23005 - DNA, 122 bp, Homo sapiens
  misc_feature (61)..(62): /note="This region represents a CpG dinucleotide"
  misc_feature (61)..(61): /note="Nucleotide may be methylated to form 5-methylcytosine"
tgtattggcccaggacagccatttaccaccttgtttttggttatttcagctgctgctaggcgttctccttcaaacacacctggattgctgtgaggacactgccccacaggcggaacacaatg

SEQ ID NO: 23006 - DNA, 122 bp, Homo sapiens
  misc_feature (61)..(62): /note="This region represents a CpG dinucleotide"
  misc_feature (61)..(61): /note="Nucleotide may be methylated to form 5-methylcytosine"
accaggcacctgcttcagagctggagctggagaagcacggagccggggtggggctggacacgcacggagccggggtggggctggacacgcagccctggggcccgcctcattgctctggctca

SEQ ID NO: 23007 - DNA, 122 bp, Homo sapiens
  misc_feature (61)..(62): /note="This region represents a CpG dinucleotide"
  misc_feature (61)..(61): /note="Nucleotide may be methylated to form 5-methylcytosine"
agacagccataggtgaaccgagctgcccagagtctcacactggtgaaagcagagctgggacgtaaacccagcctgtctgacctggagctcaggctcttacactctgcaagcattgtgcaagg

SEQ ID NO: 23008 - DNA, 122 bp, Homo sapiens
  misc_feature (61)..(62): /note="This region represents a CpG dinucleotide"
  misc_feature (61)..(61): /note="Nucleotide may be methylated to form 5-methylcytosine"
ggtccggttgttaatctctctgctaaaaccacagcagctctcacacaaaacaagcttacacgacacaatcatgcggtattaaagttagggttgagtcatgccaatttccctttgattttttg

SEQ ID NO: 23009 - DNA, 122 bp, Homo sapiens
  misc_feature (61)..(62): /note="This region represents a CpG dinucleotide"
  misc_feature (61)..(61): /note="Nucleotide may be methylated to form 5-methylcytosine"
tccccagtgcttgcggaagatatcccgctaagagagagacatgtcaaaggtagggtagatcgacatttccaggcaccaaagatggagatgttccaggaaagactgcagggcccctgggcacc

SEQ ID NO: 23010 - DNA, 122 bp, Homo sapiens
  misc_feature (61)..(62): /note="This region represents a CpG dinucleotide"
  misc_feature (61)..(61): /note="Nucleotide may be methylated to form 5-methylcytosine"
cgggaggccaaagcaggcagatcacttgggctgagttcaagaccagcaccggcaacatggcgaaacacaatacaaaaaatgcaataatcagccgggcgtggtggggcacacctgtagttcca

SEQ ID NO: 23011 - DNA, 122 bp, Homo sapiens
  misc_feature (61)..(62): /note="This region represents a CpG dinucleotide"
  misc_feature (61)..(61): /note="Nucleotide may be methylated to form 5-methylcytosine"
tagattaccagggagctgtttataaataatagattttcattctaggctctctatatcttacgcagcataagcagttgaaattctagttagctaagggattcttaaagggaaagctctgaagt

SEQ ID NO: 23012 - DNA, 122 bp, Homo sapiens
  misc_feature (61)..(62): /note="This region represents a CpG dinucleotide"
  misc_feature (61)..(61): /note="Nucleotide may be methylated to form 5-methylcytosine"
ctaacagtgatgctgcaggctttctggacgggacgggacctcagacacaataatccattccgccgtcgccacgcagtgcctttcgaccattcagtttcagcgctgggaggaaggagaggcgt

SEQ ID NO: 23013 - DNA, 122 bp, Homo sapiens
  misc_feature (61)..(62): /note="This region represents a CpG dinucleotide"
  misc_feature (61)..(61): /note="Nucleotide may be methylated to form 5-methylcytosine"
cttccctggatggaggggtgtcataaattgaactgtctctcccccaaattaatatgtgaacgtcccaactcgcaataactcagaatgtgaacttatttggaaattgtgtggtttgcagatat

SEQ ID NO: 23014 - DNA, 122 bp, Homo sapiens
  misc_feature (61)..(62): /note="This region represents a CpG dinucleotide"
  misc_feature (61)..(61): /note="Nucleotide may be methylated to form 5-methylcytosine"
attctgtaaatttgcattgtggtcaacaaacatgatttaccatctgtctagcccattctacgtgggtggaagccaccaaggccattgggcatctgtcactgtggagggactggaccctttga

SEQ ID NO: 23015 - DNA, 122 bp, Homo sapiens
  misc_feature (61)..(62): /note="This region represents a CpG dinucleotide"
  misc_feature (61)..(61): /note="Nucleotide may be methylated to form 5-methylcytosine"
acgggggctgcagtgctgaatacctctgggacgcttgggaactgtgcccctgtttacagacggcaagcccttagtggtagggccctgagattctgagaaacataaggtctgctttatttaat

SEQ ID NO: 23016 - DNA, 122 bp, Homo sapiens
  misc_feature (61)..(62): /note="This region represents a CpG dinucleotide"
  misc_feature (61)..(61): /note="Nucleotide may be methylated to form 5-methylcytosine"
gaaaataacaacttttatctgcccagtaaggacaactaacacctagtatcataatcatttcgtaagagacaggtaatttcatcaccgagtgcatatgttttctaatgctcttatatcaaatt

SEQ ID NO: 23017 - DNA, 122 bp, Homo sapiens
  misc_feature (61)..(62): /note="This region represents a CpG dinucleotide"
  misc_feature (61)..(61): /note="Nucleotide may be methylated to form 5-methylcytosine"
tgcccatgacaccctaagccttattgagcaggttaacctcaactttacaatgatcttagccgccaaatcttctccagtggtgattgttcagtaaacgttaaatggattatgtacaaagatga

SEQ ID NO: 23018 - DNA, 122 bp, Homo sapiens
  misc_feature (61)..(62): /note="This region represents a CpG dinucleotide"
  misc_feature (61)..(61): /note="Nucleotide may be methylated to form 5-methylcytosine"
ctacaaaaacatagaaaggaaggaaataggatgtggcagccatgcttgtgaaaactacgtcggtgcttcaggccacagcagaggtttaaccggatgaacccagtggaatatacaagcctggg

SEQ ID NO: 23019 - DNA, 122 bp, Homo sapiens
  misc_feature (61)..(62): /note="This region represents a CpG dinucleotide"
  misc_feature (61)..(61): /note="Nucleotide may be methylated to form 5-methylcytosine"
ggaaaagtggtttttctgattaaacatcaggaactagagtcaacaatcgctgtcctctcccgtgcctgtcacgctccactccccacccagctgcaatgtggccttgattttctcatcagtaa

SEQ ID NO: 23020 - DNA, 122 bp, Homo sapiens
  misc_feature (61)..(62): /note="This region represents a CpG dinucleotide"
  misc_feature (61)..(61): /note="Nucleotide may be methylated to form 5-methylcytosine"
ggagggtgagaccaggcagggcagggcaggctgcaggaatgacccaggacaggtgggcagcggaggaggagaacgcggaggaactgcaaattcctgcctctcccagcaactgtgaagggacc

SEQ ID NO: 23021 - DNA, 122 bp, Homo sapiens
  misc_feature (61)..(62): /note="This region represents a CpG dinucleotide"
  misc_feature (61)..(61): /note="Nucleotide may be methylated to form 5-methylcytosine"
aaggcccaaggtcaccatcaggaggggcttcctgtcttaagctgcctccacccacctcaccgcagggtgtctaggtcacttcagggctctccacctaccgcagaaaatgccacgttcgctga

SEQ ID NO: 23022 - DNA, 122 bp, Homo sapiens
  misc_feature (61)..(62): /note="This region represents a CpG dinucleotide"
  misc_feature (61)..(61): /note="Nucleotide may be methylated to form 5-methylcytosine"
tcctttcagttacccaagtaactgccattcataaatgcctgagttgtggttgcatttacccgtgtgcagagaaactgaccacaagactttcaggactcagaggactgaattgaggggtggct

SEQ ID NO: 23023 - DNA, 122 bp, Homo sapiens
  misc_feature (61)..(62): /note="This region represents a CpG dinucleotide"
  misc_feature (61)..(61): /note="Nucleotide may be methylated to form 5-methylcytosine"
tgctgacaccatctccaccttctcctggagctttctctgatcagaggctagagctcaacacgttcctaggctttctgatgcgggaactggagctgaagctaattgtaagcagacttttggaa

SEQ ID NO: 23024 - DNA, 122 bp, Homo sapiens
  misc_feature (61)..(62): /note="This region represents a CpG dinucleotide"
  misc_feature (61)..(61): /note="Nucleotide may be methylated to form 5-methylcytosine"
ttccatttagcgccacaaacgcagcctcttaagagaatgggaagtttgggagtcacagaacggaagctaccattggccttaatggatgtcaaccattaaggtaagcttgggagtcggagaac

SEQ ID NO: 23025 - DNA, 122 bp, Homo sapiens
  misc_feature (61)..(62): /note="This region represents a CpG dinucleotide"
  misc_feature (61)..(61): /note="Nucleotide may be methylated to form 5-methylcytosine"
ctatgacaccttcaaaggagatgactacaatgaggagaatcctactgaacccggcagcgacggcaccatgtcagacaaggaaattactcatgatgtcaaaggtaaccccatgtagagccatg

SEQ ID NO: 23026 - DNA, 122 bp, Homo sapiens
  misc_feature (61)..(62): /note="This region represents a CpG dinucleotide"
  misc_feature (61)..(61): /note="Nucleotide may be methylated to form 5-methylcytosine"
tcagtgggaaaaattacaagtgttacataacttttaaacattttgtcaaaacattaagaacgttcattcttggttataaatgttgaggcagtgcattttggctgtataacagatcccttgct

SEQ ID NO: 23027 - DNA, 122 bp, Homo sapiens
  misc_feature (61)..(62): /note="This region represents a CpG dinucleotide"
  misc_feature (61)..(61): /note="Nucleotide may be methylated to form 5-methylcytosine"
gtcttggctcctccccccttttcttttgttcttaatggtaaataaaataatgatgtatctcgtaatcaattgatgacatcttagaattgataaaatatgctaaacttccttcctccttcttc

SEQ ID NO: 23028 - DNA, 122 bp, Homo sapiens
  misc_feature (61)..(62): /note="This region represents a CpG dinucleotide"
  misc_feature (61)..(61): /note="Nucleotide may be methylated to form 5-methylcytosine"
acccagtggactcattgtgagcagactctgaacagactcatggacatgactcatggcctccgtatgctttcatttcgaaaggagagtcatgatgtttcttcagatctttaggtatcagtgtt

SEQ ID NO: 23029 - DNA, 122 bp, Homo sapiens
  misc_feature (61)..(62): /note="This region represents a CpG dinucleotide"
  misc_feature (61)..(61): /note="Nucleotide may be methylated to form 5-methylcytosine"
aaaccactggccaggaatggagggggtagaacctaattccgaagggcagcattttggagacgcagagaagagaacgaaaccgacgagtcaggtgaactgtaatacaacgttctacccgaatg

SEQ ID NO: 23030 - DNA, 122 bp, Homo sapiens
  misc_feature (61)..(62): /note="This region represents a CpG dinucleotide"
  misc_feature (61)..(61): /note="Nucleotide may be methylated to form 5-methylcytosine"
ttgctttctttatatgttatatcctgccttttatcttttcctatcgaccctgggtttatccgtatgccaacctcacatattaaaagcactctaatgtctccacaaagaagtacttgtgtgca

SEQ ID NO: 23031 - DNA, 122 bp, Homo sapiens
  misc_feature (61)..(62): /note="This region represents a CpG dinucleotide"
  misc_feature (61)..(61): /note="Nucleotide may be methylated to form 5-methylcytosine"
ggcattctccctactttacagacagagaaacagacacagtgagttgagtagactgcccaacgtaactcaggttacgttaagtggctgcaccagggtttaagtttcaacctaggtctcgattt

SEQ ID NO: 23032 - DNA, 122 bp, Homo sapiens
  misc_feature (61)..(62): /note="This region represents a CpG dinucleotide"
  misc_feature (61)..(61): /note="Nucleotide may be methylated to form 5-methylcytosine"
catgaggaagccaactttaaccaggcccacatgatgcaacagcaggtgtccctttcactacgccacctgcctttctgaaaaggtagggcacagaacatgatacagctgcaggggccagccct

SEQ ID NO: 23033 - DNA, 122 bp, Homo sapiens
  misc_feature (61)..(62): /note="This region represents a CpG dinucleotide"
  misc_feature (61)..(61): /note="Nucleotide may be methylated to form 5-methylcytosine"
tttaggcagagctggctaattgcattgagaaggcagcccaacatttatgtctggaccccacgctcctggccagtattcagaagaaactcagaaagcagtcagcttcagggagtcactagatt

SEQ ID NO: 23034 - DNA, 122 bp, Homo sapiens
  misc_feature (61)..(62): /note="This region represents a CpG dinucleotide"
  misc_feature (61)..(61): /note="Nucleotide may be methylated to form 5-methylcytosine"
tttaccctaaatattcttagtctgaaaagtaattatctttgagcttataaaatggatccccgctaaattcatgaagtcagtagaaaaagggaagaatattgcaatatatattttagatacac

SEQ ID NO: 23035 - DNA, 122 bp, Homo sapiens
  misc_feature (61)..(62): /note="This region represents a CpG dinucleotide"
  misc_feature (61)..(61): /note="Nucleotide may be methylated to form 5-methylcytosine"
tgaaagcagacttctctattgagggctgtcccataatgactcataagaacttagtcctgccgagcgcagtggctcatgcctataaccccagcactttgggaggccgaggcaggcggatcacc

SEQ ID NO: 23036 - DNA, 122 bp, Homo sapiens
  misc_feature (61)..(62): /note="This region represents a CpG dinucleotide"
  misc_feature (61)..(61): /note="Nucleotide may be methylated to form 5-methylcytosine"
tataatccattgtgtgaatctactgctacatacacagagccactaaagaattactcataacgcactagtgagcattcttgtacctgtctccaggtaggcttgccagacttttaaatcttttg

SEQ ID NO: 23037 - DNA, 122 bp, Homo sapiens
  misc_feature (61)..(62): /note="This region represents a CpG dinucleotide"
  misc_feature (61)..(61): /note="Nucleotide may be methylated to form 5-methylcytosine"
agctgggaccacaggcatgtgccaccacacccagctaatttttgtatttttttgtagagacggtgtttcgccatattgcccaagctggggttatgtcactttcaagactttgttacgaaaga

SEQ ID NO: 23038 - DNA, 122 bp, Homo sapiens
  misc_feature (61)..(62): /note="This region represents a CpG dinucleotide"
  misc_feature (61)..(61): /note="Nucleotide may be methylated to form 5-methylcytosine"
aaagattaactccatacctttctgaaacttttcacaaatgaaaagagtcatttccttagtcgtgtgaggacatattgtcatgttgaaacccagggaaagcatatgctaccttaggaagagga

SEQ ID NO: 23039 - DNA, 122 bp, Homo sapiens
  misc_feature (61)..(62): /note="This region represents a CpG dinucleotide"
  misc_feature (61)..(61): /note="Nucleotide may be methylated to form 5-methylcytosine"
gagaccccagcttattcctcaaagttcacccaaccctgaatataggtgaacctggagtgccgtcagtgggtagaaggggaagaggagtaacctaggagagatgggggaaccacctcatttgc

SEQ ID NO: 23040 - DNA, 122 bp, Homo sapiens
  misc_feature (61)..(62): /note="This region represents a CpG dinucleotide"
  misc_feature (61)..(61): /note="Nucleotide may be methylated to form 5-methylcytosine"
acgtgttcccctgcatgtccatgtgttgtcttatttaacatacgtctttctctgcatccccgtgtgatgccttatttaacatatgtgtgtctctgcatccctgtgtgatgtcttaacataca

SEQ ID NO: 23041 - DNA, 122 bp, Homo sapiens
  misc_feature (61)..(62): /note="This region represents a CpG dinucleotide"
  misc_feature (61)..(61): /note="Nucleotide may be methylated to form 5-methylcytosine"
ggatactttgttagggcccctcctgggccctggaggtggagcctcatgttagggtggatgcgcctctgccctgaatctgcaatgggccaagtgcaaagctgtgttgtcagtgccagatggcc

SEQ ID NO: 23042 - DNA, 122 bp, Homo sapiens
  misc_feature (61)..(62): /note="This region represents a CpG dinucleotide"
  misc_feature (61)..(61): /note="Nucleotide may be methylated to form 5-methylcytosine"
cacgtaaaattagaagaaagcagcccagcagggcctacaaggaatgtgtgaacggatgcacgtaaagtgcttagcaaagcgtggtaaacaagagcccttgttgtcattcttgctttaagcct

SEQ ID NO: 23043 - DNA, 122 bp, Homo sapiens
  misc_feature (61)..(62): /note="This region represents a CpG dinucleotide"
  misc_feature (61)..(61): /note="Nucleotide may be methylated to form 5-methylcytosine"
gccctgggcgagcactgagggaagcttggcctcagacatagccagctgccctctggacctcgcagccctgctgtgcccagctcagctgctgtgtcagtgcaaagccagggtgacatcagctg

SEQ ID NO: 23044 - DNA, 122 bp, Homo sapiens
  misc_feature (61)..(62): /note="This region represents a CpG dinucleotide"
  misc_feature (61)..(61): /note="Nucleotide may be methylated to form 5-methylcytosine"
agatctacattcaaatgctgtctcatcccctttgctaattgtatgatctttgggtgattacgtaacctctctgatcctgtttcctgagctgttaaaaggggaacaaaatgacattccttgaa

SEQ ID NO: 23045 - DNA, 122 bp, Homo sapiens
  misc_feature (61)..(62): /note="This region represents a CpG dinucleotide"
  misc_feature (61)..(61): /note="Nucleotide may be methylated to form 5-methylcytosine"
atgggacagtcacacaacagtgttgcctgtatattgggccatagactttgcaaactatcccgtaaaatttattagaagctctgaaaaactttcacacttagaagaggccacttgatactaat

SEQ ID NO: 23046 - DNA, 122 bp, Homo sapiens
  misc_feature (61)..(62): /note="This region represents a CpG dinucleotide"
  misc_feature (61)..(61): /note="Nucleotide may be methylated to form 5-methylcytosine"
tcagggtcctttcagaaaataggaaccattctaaatacttcaaacagggataatttaatacgggatattaaatgatataggtgatgaaagctctagaagccaaaccaggaatggtgactcat

SEQ ID NO: 23047 - DNA, 122 bp, Homo sapiens
  misc_feature (61)..(62): /note="This region represents a CpG dinucleotide"
  misc_feature (61)..(61): /note="Nucleotide may be methylated to form 5-methylcytosine"
ttcactttattcctgaaacccaggctggctgctctaagttgatctggtgccttggtcactcgtggcttctttcttctatgccagctctgtcttctctacacttcctctggaggagtaggcct

SEQ ID NO: 23048 - DNA, 122 bp, Homo sapiens
  misc_feature (61)..(62): /note="This region represents a CpG dinucleotide"
  misc_feature (61)..(61): /note="Nucleotide may be methylated to form 5-methylcytosine"
tcatctcttcaaaagagcagcatgtgattcagtgctactgtttgtgtctgcaccaaaccacgctgcttatctgaaagagatccacagacacacccaggtgtatgaggccttccctctcttgc

SEQ ID NO: 23049 - DNA, 122 bp, Homo sapiens
  misc_feature (61)..(62): /note="This region represents a CpG dinucleotide"
  misc_feature (61)..(61): /note="Nucleotide may be methylated to form 5-methylcytosine"
ttggcagtagtgggcgtgcttgcgggtccaggagggcccctctcccgcgaccgccgaccacgatgagagcgtgaagaccctctcgaaaggaagggctctgctctacacactggtgtctcctg

SEQ ID NO: 23050 - DNA, 122 bp, Homo sapiens
  misc_feature (61)..(62): /note="This region represents a CpG dinucleotide"
  misc_feature (61)..(61): /note="Nucleotide may be methylated to form 5-methylcytosine"
tttcagttactgctggcatgggaaaatgagtcaccaaaattcacagattcctcctcattgcgtaataactaaaacgaatgtttgggtttccggtggcaccagctcttatttctcagttcagc

SEQ ID NO: 23051 - DNA, 122 bp, Homo sapiens
  misc_feature (61)..(62): /note="This region represents a CpG dinucleotide"
  misc_feature (61)..(61): /note="Nucleotide may be methylated to form 5-methylcytosine"
cagtcgagcttcccaaatccaaaactccaaaatgctccaatgagcatttcgtttatgtgtcgtgtcagcactcaaaaagttacagattttggagcatttcggattttggattttcaaatttg

SEQ ID NO: 23052 - DNA, 122 bp, Homo sapiens
  misc_feature (61)..(62): /note="This region represents a CpG dinucleotide"
  misc_feature (61)..(61): /note="Nucleotide may be methylated to form 5-methylcytosine"
tacaagtgtaataaatgtggcaagtttttcagacatcattcataacttgcagttcattggcgatcttatacaggagagaaatcttacaaatgtgatgattgtggcaaggtcttcagtcaagc

SEQ ID NO: 23053 - DNA, 122 bp, Homo sapiens
  misc_feature (61)..(62): /note="This region represents a CpG dinucleotide"
  misc_feature (61)..(61): /note="Nucleotide may be methylated to form 5-methylcytosine"
ctcactcattgactcatccagggcaacttccgttcctgtaagcctcgtccatggtaagtgcgccattcaggtgtaccatttttatctttttgtaattgtaattttaattaaaataaattttt

SEQ ID NO: 23054 - DNA, 122 bp, Homo sapiens
  misc_feature (61)..(62): /note="This region represents a CpG dinucleotide"
  misc_feature (61)..(61): /note="Nucleotide may be methylated to form 5-methylcytosine"
actatactaattatatagttgcatgacgactgatttccctaatgatggctaggagttacacgatcattaaatatagcctccatgtttatatgtgttttgaagtacagtattacccccttatc

SEQ ID NO: 23055 - DNA, 122 bp, Homo sapiens
  misc_feature (61)..(62): /note="This region represents a CpG dinucleotide"
  misc_feature (61)..(61): /note="Nucleotide may be methylated to form 5-methylcytosine"
agccacggagtgccggggtcagccgtggaggaccctctgagaatgtcttgtggaaaggggcgccttgcctgcccggtagacaggatgagggcgccccagagccccaggggcttctgagagct

SEQ ID NO: 23056 - DNA, 122 bp, Homo sapiens
  misc_feature (61)..(62): /note="This region represents a CpG dinucleotide"
  misc_feature (61)..(61): /note="Nucleotide may be methylated to form 5-methylcytosine"
gcctgccaaaggctttgccacagtgactcaatgagatcagatggccttccctctgctgcacgctgagagcaaccagagcaggcctttgccaggacttgggggaaggtgggacctggcctgga

SEQ ID NO: 23057 - DNA, 122 bp, Homo sapiens
  misc_feature (61)..(62): /note="This region represents a CpG dinucleotide"
  misc_feature (61)..(61): /note="Nucleotide may be methylated to form 5-methylcytosine"
actcggcaaacctcatgatcggcaggattgtcccaaaggtcacttgacagcgcacatgatcgatccaggatggcaaaatagcccaagggaaaaaacagaaagcatgagaaattagaaattaa

SEQ ID NO: 23058 - DNA, 122 bp, Homo sapiens
  misc_feature (61)..(62): /note="This region represents a CpG dinucleotide"
  misc_feature (61)..(61): /note="Nucleotide may be methylated to form 5-methylcytosine"
cacccttctctctccctgcttggtgtgacttggccaaataacatgaccccactgtcactacggccaccttcttcatactccaccctaaaatccagcctcagagatgctgctgtcagttgcgc

SEQ ID NO: 23059 - DNA, 122 bp, Homo sapiens
  misc_feature (61)..(62): /note="This region represents a CpG dinucleotide"
  misc_feature (61)..(61): /note="Nucleotide may be methylated to form 5-methylcytosine"
aaaagctttgcagccagattgcctggggaagttattaaatctctcactgccttggctctccgtctgcagagtgggaataatcatggtgctttccttgtagaggtgataggaagattaaatgt

SEQ ID NO: 23060 - DNA, 122 bp, Homo sapiens
  misc_feature (61)..(62): /note="This region represents a CpG dinucleotide"
  misc_feature (61)..(61): /note="Nucleotide may be methylated to form 5-methylcytosine"
gcacaggcacacaactctgcacattatgtaaccatgtgaggcacattaggcgatcatacacgtgagctcatgattggcttggagccactattgtctgtaagaggtataattaccctgctaac

SEQ ID NO: 23061 - DNA, 122 bp, Homo sapiens
  misc_feature (61)..(62): /note="This region represents a CpG dinucleotide"
  misc_feature (61)..(61): /note="Nucleotide may be methylated to form 5-methylcytosine"
catcctggctcacagggtgaaaccctgtctccactaaaacatacaaaaatattagccgggcgtggtggcgggcgcctgtagtcccagctactcgggaggctgaggcaggagaatggcttgaa

SEQ ID NO: 23062 - DNA, 122 bp, Homo sapiens
  misc_feature (61)..(62): /note="This region represents a CpG dinucleotide"
  misc_feature (61)..(61): /note="Nucleotide may be methylated to form 5-methylcytosine"
gacttctgccagagctgcacatgtagttgaagaagaccagaataaggaagacagagccagcgccccagaccaggatgctgagtgcagcccacagcaacatagcagaaacttcctgggcctgc

SEQ ID NO: 23063 - DNA, 122 bp, Homo sapiens
  misc_feature (61)..(62): /note="This region represents a CpG dinucleotide"
  misc_feature (61)..(61): /note="Nucleotide may be methylated to form 5-methylcytosine"
ttttgatatgtaatggctacatttccctctatagaaattgtggaagcttgttctctgagccgggggtgtggttaacacctgaaatcccagcactttgggaggtcgaggcaggcggatcactt

SEQ ID NO: 23064 - DNA, 122 bp, Homo sapiens
  misc_feature (61)..(62): /note="This region represents a CpG dinucleotide"
  misc_feature (61)..(61): /note="Nucleotide may be methylated to form 5-methylcytosine"
aacagaagtgacagctaagagatgcctatctatgatacacaggtagctcctttacattgacgggaaaataccaatactccagtggaaaaatgagcagagaatatgaataggcaattcacaaa

SEQ ID NO: 23065 - DNA, 122 bp, Homo sapiens
  misc_feature (61)..(62): /note="This region represents a CpG dinucleotide"
  misc_feature (61)..(61): /note="Nucleotide may be methylated to form 5-methylcytosine"
ccagactctatactcaaaggcttattatagtgagacagaacatacagacaagtgagtccacggttgcacaatagtttggcaagtgcaatgaagaatacattcagatgctccttgagagccct

SEQ ID NO: 23066 - DNA, 122 bp, Homo sapiens
  misc_feature (61)..(62): /note="This region represents a CpG dinucleotide"
  misc_feature (61)..(61): /note="Nucleotide may be methylated to form 5-methylcytosine"
tcattaaaaatttctcaaacataatgactaatataaatcctgggaggattcagtacctcccgctagcactcccctcatacaacataaagttatttcaaaatttatttattcacaaaggaaat

SEQ ID NO: 23067 - DNA, 122 bp, Homo sapiens
  misc_feature (61)..(62): /note="This region represents a CpG dinucleotide"
  misc_feature (61)..(61): /note="Nucleotide may be methylated to form 5-methylcytosine"
ccagagaggtgaagggctgttcggtcattgcccatggagccaggggagctgtgggccttccgccgccaacctctgggctagccctgcagagatgctaggaggatgcagggaggtgaggtggg

SEQ ID NO: 23068 - DNA, 122 bp, Homo sapiens
  misc_feature (61)..(62): /note="This region represents a CpG dinucleotide"
  misc_feature (61)..(61): /note="Nucleotide may be methylated to form 5-methylcytosine"
aggctattattgcaggaattgagaaaaaatgtttttcttttaaaaattaatttcgatatacgaaatctaaaagcttaatctaagagcctagaataatgctttgtgctcaatgagcattttat

SEQ ID NO: 23069 - DNA, 122 bp, Homo sapiens
  misc_feature (61)..(62): /note="This region represents a CpG dinucleotide"
  misc_feature (61)..(61): /note="Nucleotide may be methylated to form 5-methylcytosine"
aaaaggggagtctgggggaggggcaaggccctgtctgcagtgtctccctgctgaatgccacgcacccaggatggctgccagcaccatgggggctcacatgcaggtgctttaggcaagaatgc

SEQ ID NO: 23070 - DNA, 122 bp, Homo sapiens
  misc_feature (61)..(62): /note="This region represents a CpG dinucleotide"
  misc_feature (61)..(61): /note="Nucleotide may be methylated to form 5-methylcytosine"
gcttcttctgccttgaggcactcatattcactctcacttgttctgcaggaagccaggttccgtgttgtgagctgctgtatggagaggcacatgtggcataactgaatcttgccaacaattgt

SEQ ID NO: 23071 - DNA, 122 bp, Homo sapiens
  misc_feature (61)..(62): /note="This region represents a CpG dinucleotide"
  misc_feature (61)..(61): /note="Nucleotide may be methylated to form 5-methylcytosine"
agaccgtgagactgctgttgacaattactgttgggaatggagcagctgacatacctgttccggttagacgaggaagcatatgaaggcctgaacatgccgggaggaagaatgagaggcccaag

SEQ ID NO: 23072 - DNA, 122 bp, Homo sapiens
  misc_feature (61)..(62): /note="This region represents a CpG dinucleotide"
  misc_feature (61)..(61): /note="Nucleotide may be methylated to form 5-methylcytosine"
agaccgaagtctacttcgccagctaatcttagtatataattctgaacaaccgaaatttcacgacggcaatttgacttcagaagtctatagagtatacaagatttagaaagttttgaattgtc

SEQ ID NO: 23073 - DNA, 122 bp, Homo sapiens
  misc_feature (61)..(62): /note="This region represents a CpG dinucleotide"
  misc_feature (61)..(61): /note="Nucleotide may be methylated to form 5-methylcytosine"
ctctctgaaccatctgatcagtaactcctcctgttcacattacttcctgttgtgacctcacgcttcttcagactaatttaagactgtggttctccagaggcttcagctattctccacagaga

SEQ ID NO: 23074 - DNA, 122 bp, Homo sapiens
  misc_feature (61)..(62): /note="This region represents a CpG dinucleotide"
  misc_feature (61)..(61): /note="Nucleotide may be methylated to form 5-methylcytosine"
gcctcgggttcctcttctgcagaaagcagatgatgacgcctgcatcacggactgcatggtcgggatggcggagtgaccacaggctcgggaagtgacttgggacggtcactgtggctgagtta

SEQ ID NO: 23075 - DNA, 122 bp, Homo sapiens
  misc_feature (61)..(62): /note="This region represents a CpG dinucleotide"
  misc_feature (61)..(61): /note="Nucleotide may be methylated to form 5-methylcytosine"
gctgggtccaccagaaaccttgaaccagggctgccttcgctagcatggcaggcctccaggcgggaaggaggaagccaagtgtctaaattcttcataatgctttacagtagctgggtttgagg

SEQ ID NO: 23076 - DNA, 122 bp, Homo sapiens
  misc_feature (61)..(62): /note="This region represents a CpG dinucleotide"
  misc_feature (61)..(61): /note="Nucleotide may be methylated to form 5-methylcytosine"
ttaattctgtggactggttcttccttcatcttttgatatcctaactaatttttcctgttccgtggttttgaatagtcagataagcttagatttgaaaaagaccttaccaaccaattcagttt

SEQ ID NO: 23077 - DNA, 122 bp, Homo sapiens
  misc_feature (61)..(62): /note="This region represents a CpG dinucleotide"
  misc_feature (61)..(61): /note="Nucleotide may be methylated to form 5-methylcytosine"
aggtgtgttcagggtggtatggccttagacaagtgttctgtcttaagagtgtctcctggccgggtgtggtggctcatgcctgtaatcccagcactttgggaggccaaggcaggcagattgcc

SEQ ID NO: 23078 - DNA, 122 bp, Homo sapiens
  misc_feature (61)..(62): /note="This region represents a CpG dinucleotide"
  misc_feature (61)..(61): /note="Nucleotide may be methylated to form 5-methylcytosine"
atctgtgtcccccactctactgccaacacagtggtaggaagggaaggcggcaggcttaggcgaggtcctgcaggctggacaggatctgtcaccattacttagcccaggcccatctctttact

SEQ ID NO: 23079 - DNA, 122 bp, Homo sapiens
  misc_feature (61)..(62): /note="This region represents a CpG dinucleotide"
  misc_feature (61)..(61): /note="Nucleotide may be methylated to form 5-methylcytosine"
ctgccagcgcagctgcagctcctgcgggcaggcacgggcggctgtcaggggtcgtcggggcgtccaggcccaagccccctgccctccgggccccccactcacgttggccctcaccccatcct

SEQ ID NO: 23080 - DNA, 122 bp, Homo sapiens
  misc_feature (61)..(62): /note="This region represents a CpG dinucleotide"
  misc_feature (61)..(61): /note="Nucleotide may be methylated to form 5-methylcytosine"
tatttactccagagaaacccatcatatatattagaatactcaatccatctttctggtagccggcaactaagtgtttattactagaaaatggataaaggacacactggaagaatgcattagaa

SEQ ID NO: 23081 - DNA, 122 bp, Homo sapiens
  misc_feature (61)..(62): /note="This region represents a CpG dinucleotide"
  misc_feature (61)..(61): /note="Nucleotide may be methylated to form 5-methylcytosine"
agatctcctttctgtttcagtttcttctattcatcatttccttcacaaggcatttgtacacgctgttctttggcctggaatgttcttccctcttccctttatctagttaatgcctgcttttc

SEQ ID NO: 23082 - DNA, 122 bp, Homo sapiens
  misc_feature (61)..(62): /note="This region represents a CpG dinucleotide"
  misc_feature (61)..(61): /note="Nucleotide may be methylated to form 5-methylcytosine"
tctcctgtttttttcaggctcctaaagtaacatcagccatttttagattggttctgttttcgtaccttcccactggcctcaagtgagccaagaaacactgcctgccctctgtctgtcttctc

SEQ ID NO: 23083 - DNA, 122 bp, Homo sapiens
  misc_feature (61)..(62): /note="This region represents a CpG dinucleotide"
  misc_feature (61)..(61): /note="Nucleotide may be methylated to form 5-methylcytosine"
cacaagccaggtgaccagagacaaatgtcttacccactcagaaccacatggtcagaaccacgtgatcaggggaaccactgtccctgggttttagtgataatttattgaaacatgcccagtga

SEQ ID NO: 23084 - DNA, 122 bp, Homo sapiens
  misc_feature (61)..(62): /note="This region represents a CpG dinucleotide"
  misc_feature (61)..(61): /note="Nucleotide may be methylated to form 5-methylcytosine"
tatttctccatgcatcggcccagggatgaaccggtggattgaagcaaggggttgtacattcgttttttgcatgggcaaaaattgcatttggttaaccagatggaaaaataatcaccggtgct

SEQ ID NO: 23085 - DNA, 122 bp, Homo sapiens
  misc_feature (61)..(62): /note="This region represents a CpG dinucleotide"
  misc_feature (61)..(61): /note="Nucleotide may be methylated to form 5-methylcytosine"
gtcttaaccagaacagcaaaactgaatctatcggtttgaaaaaatgagagtgcaaacatgcggaggaggaagaggcaaaacaggtggataaaatgttgcactaagctacacacaatattagt

SEQ ID NO: 23086 - DNA, 122 bp, Homo sapiens
  misc_feature (61)..(62): /note="This region represents a CpG dinucleotide"
  misc_feature (61)..(61): /note="Nucleotide may be methylated to form 5-methylcytosine"
ctagcatgattggagaattcttttgctagactgaaattgcactctgcctgtgctctggtccgtttcctaggtaacaaatgcactgcatagattccataatgaggactgtggttggctagtta

SEQ ID NO: 23087 - DNA, 122 bp, Homo sapiens
  misc_feature (61)..(62): /note="This region represents a CpG dinucleotide"
  misc_feature (61)..(61): /note="Nucleotide may be methylated to form 5-methylcytosine"
gtctcatctgatcttgcacagtgaaagctactcatggaagaactcccttagcagggaagccgttagagtgaaatctttcctaacattgactctggtttgtggaagtatatgacatttttctc

SEQ ID NO: 23088 - DNA, 122 bp, Homo sapiens
  misc_feature (61)..(62): /note="This region represents a CpG dinucleotide"
  misc_feature (61)..(61): /note="Nucleotide may be methylated to form 5-methylcytosine"
aatattaataacaactcaataacttaacaatagcattaataaacaagtgacttggccgggcgcagtggctcatgcctgtaatcccagcactttgggaggccgaggcgggaggatcgcgaggt

SEQ ID NO: 23089 - DNA, 122 bp, Homo sapiens
  misc_feature (61)..(62): /note="This region represents a CpG dinucleotide"
  misc_feature (61)..(61): /note="Nucleotide may be methylated to form 5-methylcytosine"
gcacaaagcctgggaaagtgggaagggaggggaagaaactgggacagacacctgggtcagcggctcgcccagggccccgaaccctgtgtcccagagctgagaagtcctgccccccttacctc

SEQ ID NO: 23090 - DNA, 122 bp, Homo sapiens
  misc_feature (61)..(62): /note="This region represents a CpG dinucleotide"
  misc_feature (61)..(61): /note="Nucleotide may be methylated to form 5-methylcytosine"
gaatcattactttttcaacagaaatgccattttcatgattggcatttctaaatccttcagcgtcagagaagattctagaacttctcatttgtggctagtttcagggtagaacagctcttctt

SEQ ID NO: 23091 - DNA, 122 bp, Homo sapiens
  misc_feature (61)..(62): /note="This region represents a CpG dinucleotide"
  misc_feature (61)..(61): /note="Nucleotide may be methylated to form 5-methylcytosine"
gacagcctcattgactcaggcatcattcatcagttgttcctggaatctggctgggacaagcgcacagcatgtacctttgcctcagggcacacccaggcctgcagggtctcctactgtgtggg

SEQ ID NO: 23092 - DNA, 122 bp, Homo sapiens
  misc_feature (61)..(62): /note="This region represents a CpG dinucleotide"
  misc_feature (61)..(61): /note="Nucleotide may be methylated to form 5-methylcytosine"
gatgatacctcccagagtcatcagaagatcaaatacaaccatgaacgtgtttgtgctctacgagctgtaattcctaaaagataggtaggttaagatgaagaaaaggcattgttgagtttctc

SEQ ID NO: 23093 - DNA, 122 bp, Homo sapiens
  misc_feature (61)..(62): /note="This region represents a CpG dinucleotide"
  misc_feature (61)..(61): /note="Nucleotide may be methylated to form 5-methylcytosine"
gattaatatttgttcggtaagaacagctccaggttcaggccggggggctccaggttcaagcgcctcttgtttactcacccatggcctgtgtggttccagggaggtcccatgggtgctgatcg

SEQ ID NO: 23094 - DNA, 122 bp, Homo sapiens
  misc_feature (61)..(62): /note="This region represents a CpG dinucleotide"
  misc_feature (61)..(61): /note="Nucleotide may be methylated to form 5-methylcytosine"
tgccggcgggaaggccggcctccccgcgcctgctctgggcctccctccctgcctccctcccgctggcgccaccgccacgttagttattccgggtttggggccaagtccctcttggccgcagc

SEQ ID NO: 23095 - DNA, 122 bp, Homo sapiens
  misc_feature (61)..(62): /note="This region represents a CpG dinucleotide"
  misc_feature (61)..(61): /note="Nucleotide may be methylated to form 5-methylcytosine"
ctcaggtaatctgcctgccttggcctcccaaagtgctgggattataggcttgagccaccacgcccagcccacactggtaaattctataatcattagttgtatggaaaagtacctagcgcatt

SEQ ID NO: 23096 - DNA, 122 bp, Homo sapiens
  misc_feature (61)..(62): /note="This region represents a CpG dinucleotide"
  misc_feature (61)..(61): /note="Nucleotide may be methylated to form 5-methylcytosine"
ccgaactggaggggtagagaaggctctgccagcccctcgcctgcagcaggaaggtgggtacggaccagcagaagggaaagcggtgctgatctgtctctaaatacctctgccctcccgccccc

SEQ ID NO: 23097 - DNA, 122 bp, Homo sapiens
  misc_feature (61)..(62): /note="This region represents a CpG dinucleotide"
  misc_feature (61)..(61): /note="Nucleotide may be methylated to form 5-methylcytosine"
tgtggcttttcatagagtctgtgggaacaaagctgcttctcgtccctttgtgctgcttcccgtaagatgaaatgtgtgtccatgactcagagctataatagacccacggagttactatcagt

SEQ ID NO: 23098 - DNA, 122 bp, Homo sapiens
  misc_feature (61)..(62): /note="This region represents a CpG dinucleotide"
  misc_feature (61)..(61): /note="Nucleotide may be methylated to form 5-methylcytosine"
caaattaatactccgtatgccatcttaccatacatttcttgtctctgcaatgaggctgagcgagactgtcccaaatgtgtttttatcctgagtctgaggcaggctgaactttaatctgcatg

SEQ ID NO: 23099 - DNA, 122 bp, Homo sapiens
  misc_feature (61)..(62): /note="This region represents a CpG dinucleotide"
  misc_feature (61)..(61): /note="Nucleotide may be methylated to form 5-methylcytosine"
ggtggaagcaggaaggggaggtcagaggaaaactggggccctcagtgggcatccgtgatgcggaaacactaataatgccaacagcaatagcagaggcaggcagggcttacgtggccagggct

SEQ ID NO: 23100 - DNA, 122 bp, Homo sapiens
  misc_feature (61)..(62): /note="This region represents a CpG dinucleotide"
  misc_feature (61)..(61): /note="Nucleotide may be methylated to form 5-methylcytosine"
gccagtgtgcagtggcattctgactaaatgttaacgtttgagaggcatgcacaaggcctacggctgacaatgtcttccttgctgttttgcaactcccgacatttatcaccactttgagttaa

SEQ ID NO: 23101 - DNA, 122 bp, Homo sapiens
  misc_feature (61)..(62): /note="This region represents a CpG dinucleotide"
  misc_feature (61)..(61): /note="Nucleotide may be methylated to form 5-methylcytosine"
ttcaacccacctaaattccctggaacatgttaaccagtcagtacttaaactttccaatatcgttaacatacttagggttaatgtgggaagaggtatggatcttggctgcagggctcatgata

SEQ ID NO: 23102 - DNA, 122 bp, Homo sapiens
  misc_feature (61)..(62): /note="This region represents a CpG dinucleotide"
  misc_feature (61)..(61): /note="Nucleotide may be methylated to form 5-methylcytosine"
accagaccacagttactcatgagttggctgagcaaggagcccgggaaagcaagtgaaactcgggggtttgacctgttctcagactgcaacaatggttaaccttaacagagcacttattaagt

SEQ ID NO: 23103 - DNA, 122 bp, Homo sapiens
  misc_feature (61)..(62): /note="This region represents a CpG dinucleotide"
  misc_feature (61)..(61): /note="Nucleotide may be methylated to form 5-methylcytosine"
tttgaaaaaaatccaacatcctgttgtcataaaacacactcagaaaactaataggccaggcgtagtggctcatgcctgtaatcccagcactttgggaggccaaggtgggtagatcacttgag

SEQ ID NO: 23104 - DNA, 122 bp, Homo sapiens
  misc_feature (61)..(62): /note="This region represents a CpG dinucleotide"
  misc_feature (61)..(61): /note="Nucleotide may be methylated to form 5-methylcytosine"
gtgtgtgtgttttgttgttgttgttttgagacagagtctctcactgtactcccaggctggcgtacagtgacacgatcatggctccctgcagcctccaccttccaggatccaagcgatcctcc

SEQ ID NO: 23105 - DNA, 122 bp, Homo sapiens
  misc_feature (61)..(62): /note="This region represents a CpG dinucleotide"
  misc_feature (61)..(61): /note="Nucleotide may be methylated to form 5-methylcytosine"
tcactcattgtgagaaaagactaagactatctcaaagcacttagcacagtggtaggcacacgctacctttgaaataagtgcctgtcagtaagctgacttggaaaagggctctaacacaattc

SEQ ID NO: 23106 - DNA, 122 bp, Homo sapiens
  misc_feature (61)..(62): /note="This region represents a CpG dinucleotide"
  misc_feature (61)..(61): /note="Nucleotide may be methylated to form 5-methylcytosine"
gtgggaaagcactctgcaaactgtcaagttctcctgcaacctgcaggtaagatgccctctcgtgggaggaggaaccgagacccagccttaggggaagggtgccctgggtcagccctacttgc

SEQ ID NO: 23107 - DNA, 122 bp, Homo sapiens
  misc_feature (61)..(62): /note="This region represents a CpG dinucleotide"
  misc_feature (61)..(61): /note="Nucleotide may be methylated to form 5-methylcytosine"
acgaaaccactgaaagcttccttgtttcatctgttcatgaggatagtattttttacctcacggcagtatgaggatccattaagatgtatatcaagagtttttagaccagtgcccggcacatg

SEQ ID NO: 23108 - DNA, 122 bp, Homo sapiens
  misc_feature (61)..(62): /note="This region represents a CpG dinucleotide"
  misc_feature (61)..(61): /note="Nucleotide may be methylated to form 5-methylcytosine"
tctctttacaggtcacttacatgcccttaatgtacagtcagattgttcacctgtaagacacgtatttaagagcagcacctagacaaagcccacaggcaggaagactgtacttccagggatca

SEQ ID NO: 23109 - DNA, 122 bp, Homo sapiens
  misc_feature (61)..(62): /note="This region represents a CpG dinucleotide"
  misc_feature (61)..(61): /note="Nucleotide may be methylated to form 5-methylcytosine"
ctcctgcatcccctcactataataaatcacagctgtgaatagcgctgggcggagtcctggcgcattcctcctgattcactgccctgggggtggtcacaggaacactctggcacagcagggag

SEQ ID NO: 23110 - DNA, 122 bp, Homo sapiens
  misc_feature (61)..(62): /note="This region represents a CpG dinucleotide"
  misc_feature (61)..(61): /note="Nucleotide may be methylated to form 5-methylcytosine"
ttccaactatttcaaaaggtaaaattcattcttagctcccaggttgtccaaaaacagacgcgcaggatggccaagcaccagagtttatcgtttgcccataataatcgggttgattcggccaa

SEQ ID NO: 23111 - DNA, 122 bp, Homo sapiens
  misc_feature (61)..(62): /note="This region represents a CpG dinucleotide"
  misc_feature (61)..(61): /note="Nucleotide may be methylated to form 5-methylcytosine"
gccgcacctgtgcctaggactttacatgtgtatctcatttcatctcttaaatccccgatacgaggtaggttcagttatgatgatcccagttttacaagagaaggaaccatgtgcacagaggc

SEQ ID NO: 23112 - DNA, 122 bp, Homo sapiens
  misc_feature (61)..(62): /note="This region represents a CpG dinucleotide"
  misc_feature (61)..(61): /note="Nucleotide may be methylated to form 5-methylcytosine"
aaggggaagcccaggtgaaactgaaggacaacccttctgagatggacagaaaaagaaaaacgtgaaatcttatggtaagggtaaaaggccaaagagacttaggaactgtaaggtagggagga

SEQ ID NO: 23113 - DNA, 122 bp, Homo sapiens
  misc_feature (61)..(62): /note="This region represents a CpG dinucleotide"
  misc_feature (61)..(61): /note="Nucleotide may be methylated to form 5-methylcytosine"
tatataatatttctctcctaaataagaactttcaattagctaattcattttaaagcctcccgtactcccacttacttaagaacagtcagtaaagaaaacagttctaacatggaggaggaatt

SEQ ID NO: 23114 - DNA, 122 bp, Homo sapiens
  misc_feature (61)..(62): /note="This region represents a CpG dinucleotide"
  misc_feature (61)..(61): /note="Nucleotide may be methylated to form 5-methylcytosine"
ctgtggatgctataattacataacagttctcctttgaccagtgctcatccacgtacgtcacgtacacaccaatggatccttgtactgcagatcagacagcttcgtctgcaaatactaagatg

SEQ ID NO: 23115 - DNA, 122 bp, Homo sapiens
  misc_feature (61)..(62): /note="This region represents a CpG dinucleotide"
  misc_feature (61)..(61): /note="Nucleotide may be methylated to form 5-methylcytosine"
caatgaggcagaatcagttcaaaggtcagtctgacccaaaggattcaaatcccatctgtgcgtcacacaaacaaatcattagcaaactgcatccttctgctctgcagctatccagtcttggc

SEQ ID NO: 23116 - DNA, 122 bp, Homo sapiens
  misc_feature (61)..(62): /note="This region represents a CpG dinucleotide"
  misc_feature (61)..(61): /note="Nucleotide may be methylated to form 5-methylcytosine"
cacaaattctgcattcaaatagttccccactacaaagttaattccaacatcttagactagcgttctatgtcatctatctgactcactttaccagtccaactcaattcccttacctcctactt

SEQ ID NO: 23117 - DNA, 122 bp, Homo sapiens
  misc_feature (61)..(62): /note="This region represents a CpG dinucleotide"
  misc_feature (61)..(61): /note="Nucleotide may be methylated to form 5-methylcytosine"
cagtcctctccccaccggacttcctataaacctgggttggcaaagcatcaacatgtaagtcgccaccacttccttcctcttgggcagccaccacgaactcacctgacaggctgtgtctgaac

SEQ ID NO: 23118 - DNA, 122 bp, Homo sapiens
  misc_feature (61)..(62): /note="This region represents a CpG dinucleotide"
  misc_feature (61)..(61): /note="Nucleotide may be methylated to form 5-methylcytosine"
gcattattcacaatagccaagatattgaagaaactataagaatgcagcattattcacaatcgccaaggtatgtccatcaatggtaaaacagataaagaaaataagctacgtgtgtatacaca

SEQ ID NO: 23119 - DNA, 122 bp, Homo sapiens
  misc_feature (61)..(62): /note="This region represents a CpG dinucleotide"
  misc_feature (61)..(61): /note="Nucleotide may be methylated to form 5-methylcytosine"
cacaccctcgtgtagtcctctcctctagaatatgcgctgagcctgtgtcgcttgctttaacggacagaatgagtcagaagtgacacagggccagttccagtcctaagccttgagaaggcctg

SEQ ID NO: 23120 - DNA, 122 bp, Homo sapiens
  misc_feature (61)..(62): /note="This region represents a CpG dinucleotide"
  misc_feature (61)..(61): /note="Nucleotide may be methylated to form 5-methylcytosine"
gccctgtccacaggttaaagtattgcacaatcagctggtccttttccacaatgccattgccgcttactttgctgggaatcagaagcagcttgaacagacacttaaacagttccatatcaaat

SEQ ID NO: 23121 - DNA, 122 bp, Homo sapiens
  misc_feature (61)..(62): /note="This region represents a CpG dinucleotide"
  misc_feature (61)..(61): /note="Nucleotide may be methylated to form 5-methylcytosine"
atttattcacccctttgctttataagatgacaaacatgtagtcttagaaaaagggaagcgcgggaaacttatcaagtttctaggaggaagggagaaatcgtgaaatccgaagtcaaggggct

SEQ ID NO: 23122 - DNA, 122 bp, Homo sapiens
  misc_feature (61)..(62): /note="This region represents a CpG dinucleotide"
  misc_feature (61)..(61): /note="Nucleotide may be methylated to form 5-methylcytosine"
aaggtatctctatcagtgaaacttctgggaccaatgccctctaccacaaacctgctatctcgagatattccctaccatctgtagatactgggaacacaaggcaggggcagtgtgtaacataa

SEQ ID NO: 23123 - DNA, 122 bp, Homo sapiens
  misc_feature (61)..(62): /note="This region represents a CpG dinucleotide"
  misc_feature (61)..(61): /note="Nucleotide may be methylated to form 5-methylcytosine"
tttttcacgccattatatatacacttcatgagaaagtttcaaacactttctcaatgatcacgagttaccaagaaaataaaagattaaatttgtacagatattgatctatatatcaaatacat

SEQ ID NO: 23124 - DNA, 122 bp, Homo sapiens
  misc_feature (61)..(62): /note="This region represents a CpG dinucleotide"
  misc_feature (61)..(61): /note="Nucleotide may be methylated to form 5-methylcytosine"
cctgtttttcttcttaccattctggctaatttctacttgtctttcaaggctcagcaaggacgagttgggtagaaagccttgcagggtcgtccacttactttcacactgcattgagtcgcctg

SEQ ID NO: 23125 - DNA, 122 bp, Homo sapiens
  misc_feature (61)..(62): /note="This region represents a CpG dinucleotide"
  misc_feature (61)..(61): /note="Nucleotide may be methylated to form 5-methylcytosine"
cggtagtgttaaaagtcatagagtggtcaagcgtccaggacatttggcaacaaggagcagcgtttgttattttagagagagctggcttagcagagggtggaggcaaagccagatgatgaagg

SEQ ID NO: 23126 - DNA, 122 bp, Homo sapiens
  misc_feature (61)..(62): /note="This region represents a CpG dinucleotide"
  misc_feature (61)..(61): /note="Nucleotide may be methylated to form 5-methylcytosine"
attagaggatatttcagatgagatgcacttgtgttgcctcagactactacggagtgactccgcagctgctgaagtgttgcctaattgaggatctactttagaaacgatgtgagtgtgatggg

SEQ ID NO: 23127 - DNA, 122 bp, Homo sapiens
  misc_feature (61)..(62): /note="This region represents a CpG dinucleotide"
  misc_feature (61)..(61): /note="Nucleotide may be methylated to form 5-methylcytosine"
taattaaggaagtgtgcttgggcaacttccttgtcaaattataaagccaacatgagccatcgtatctttctgatcattcagattatcctcaggacaagcacatgtctctgtttgtatgaatg

SEQ ID NO: 23128 - DNA, 122 bp, Homo sapiens
  misc_feature (61)..(62): /note="This region represents a CpG dinucleotide"
  misc_feature (61)..(61): /note="Nucleotide may be methylated to form 5-methylcytosine"
aggagagcaacaacacccggggatcaagggccatcctcaaacaaaagtgtgattataacgcgttctgcacgggctataaaccgtccccagctccggagagcagggtgaccctcaccagcgtc

SEQ ID NO: 23129 - DNA, 122 bp, Homo sapiens
  misc_feature (61)..(62): /note="This region represents a CpG dinucleotide"
  misc_feature (61)..(61): /note="Nucleotide may be methylated to form 5-methylcytosine"
tgtgtccaacttcaccatcatcctatcaaatccacatgacaacctgcaagtacgatttgacgtctctgttttgtggatgaagaaacagaagctaagagacattccagtgaactctggatctg

SEQ ID NO: 23130 - DNA, 122 bp, Homo sapiens
  misc_feature (61)..(62): /note="This region represents a CpG dinucleotide"
  misc_feature (61)..(61): /note="Nucleotide may be methylated to form 5-methylcytosine"
gtttctcctgaaactctcacagcctgcttctgacgtcagatgtgtgtgggttgcacactgcgttaatccattctcacactgctataaagaaatacctgagactgggtaatttataaagaaaa

SEQ ID NO: 23131 - DNA, 122 bp, Homo sapiens
  misc_feature (61)..(62): /note="This region represents a CpG dinucleotide"
  misc_feature (61)..(61): /note="Nucleotide may be methylated to form 5-methylcytosine"
gcttcattatagagttcttattaccagcataacattgcctgccactgactcagagtcacacgtctctgctccacaaagaaagaagctgtccttgccgtgggtgacagccattgagaactaca

SEQ ID NO: 23132 - DNA, 122 bp, Homo sapiens
  misc_feature (61)..(62): /note="This region represents a CpG dinucleotide"
  misc_feature (61)..(61): /note="Nucleotide may be methylated to form 5-methylcytosine"
cagctcccagggcagccccttccaaggacgatcactccctcccctcacaccttcagctctcggagccactgagctggcaagccatatggaatagattattctagacccacaataatctgatt

SEQ ID NO: 23133 - DNA, 122 bp, Homo sapiens
  misc_feature (61)..(62): /note="This region represents a CpG dinucleotide"
  misc_feature (61)..(61): /note="Nucleotide may be methylated to form 5-methylcytosine"
ttgagtggaaataggaactttcccaatgaaggcagctgaacagacggcattaagcaaaaacgtttcaaatctaatggcccattagtcacactcaaccgatgatccattgaaatgactgacca

SEQ ID NO: 23134 - DNA, 122 bp, Homo sapiens
  misc_feature (61)..(62): /note="This region represents a CpG dinucleotide"
  misc_feature (61)..(61): /note="Nucleotide may be methylated to form 5-methylcytosine"
gtagggtcggacatcttggtagcagaggctgaaagtgattggagcctccagagccttcctcggggtggggcgtttaacatcccttcagaaccccaccctcggaggccttactgtcgtttcct

SEQ ID NO: 23135 - DNA, 122 bp, Homo sapiens
  misc_feature (61)..(62): /note="This region represents a CpG dinucleotide"
  misc_feature (61)..(61): /note="Nucleotide may be methylated to form 5-methylcytosine"
cagtgtgtcctcatttctatctgtacctttgccatcctgggccatgcaacctgtagctctcggcctcttctgtctcctttcaggctgagtctctgaatctgtctccatttgtgactctggtt

SEQ ID NO: 23136 - DNA, 122 bp, Homo sapiens
  misc_feature (61)..(62): /note="This region represents a CpG dinucleotide"
  misc_feature (61)..(61): /note="Nucleotide may be methylated to form 5-methylcytosine"
gctggcggccttgcagcgtgcgtggcaacagcagctgggcccgcaagactcagcacgggacgtcctcgtccaagtctgggccaagagcagcggcccagggggcggggccggccagagggagc

SEQ ID NO: 23137 - DNA, 122 bp, Homo sapiens
  misc_feature (61)..(62): /note="This region represents a CpG dinucleotide"
  misc_feature (61)..(61): /note="Nucleotide may be methylated to form 5-methylcytosine"
caacggcttctcggctgtgccccgtatctcttcccagaacactgatgacaaagctggagacgttactcacatgctgagccagtcagcccctcacccagggctggtgctgagaagtctgacta

SEQ ID NO: 23138 - DNA, 122 bp, Homo sapiens
  misc_feature (61)..(62): /note="This region represents a CpG dinucleotide"
  misc_feature (61)..(61): /note="Nucleotide may be methylated to form 5-methylcytosine"
ggccccgtccccagtccgtgagtgacagaagatgtgaccaaacactggactcaatgaggacggagtgacaacctaggctgcagcctttcctggcaggcctttatccctgctctgagcagggc

SEQ ID NO: 23139 - DNA, 122 bp, Homo sapiens
  misc_feature (61)..(62): /note="This region represents a CpG dinucleotide"
  misc_feature (61)..(61): /note="Nucleotide may be methylated to form 5-methylcytosine"
ttttctgagtaagggcttgcctctaatcaagtcaaacagaagcctgtgtcactgtcctgacgctataagtagttaaagtcaggctgataaaaatatatggacaaggctatgaatgaaatagg

SEQ ID NO: 23140 - DNA, 122 bp, Homo sapiens
  misc_feature (61)..(62): /note="This region represents a CpG dinucleotide"
  misc_feature (61)..(61): /note="Nucleotide may be methylated to form 5-methylcytosine"
ttcctattttggatttcagctcagcaaaggctttcctgaattaatcactgaagaagcacacggcaccatatttccttcatctggtcactgcagaaagcaaaaatgtttataccagatggtgc

SEQ ID NO: 23141 - DNA, 122 bp, Homo sapiens
  misc_feature (61)..(62): /note="This region represents a CpG dinucleotide"
  misc_feature (61)..(61): /note="Nucleotide may be methylated to form 5-methylcytosine"
ggaggctgcaggtacctggtggagggtgcgagttgaatagttcaggttctcaccaccccccgccccccctcaggagtccctgaggattcactgagacaatgagtagaaaatgtccaaggaag

SEQ ID NO: 23142 - DNA, 122 bp, Homo sapiens
  misc_feature (61)..(62): /note="This region represents a CpG dinucleotide"
  misc_feature (61)..(61): /note="Nucleotide may be methylated to form 5-methylcytosine"
ccagccccactcccaaccccccaaccctgttgtaatgtgtgatctgttttcttccagtctcgtttcctctcagtccatccacccttcatggggccagagccctctctccagaatctgagcag

SEQ ID NO: 23143 - DNA, 122 bp, Homo sapiens
  misc_feature (61)..(62): /note="This region represents a CpG dinucleotide"
  misc_feature (61)..(61): /note="Nucleotide may be methylated to form 5-methylcytosine"
acacagagaacgccataaatacctatctcaaaagctccatcctcccacacagtcaaattgcgcaagcttgctcagctgagttaacagggagactcttttgcctgcaaacaggtcaatcacca

SEQ ID NO: 23144 - DNA, 122 bp, Homo sapiens
  misc_feature (61)..(62): /note="This region represents a CpG dinucleotide"
  misc_feature (61)..(61): /note="Nucleotide may be methylated to form 5-methylcytosine"
tcagtaagaaaagaggaagaaaacctgtgagtgggcaagtcagtctttacatgctacagccgtcaagtgccagctatttggtcaggaaaggcaaaataatggctgtaggaactcctgaataa

SEQ ID NO: 23145 - DNA, 122 bp, Homo sapiens
  misc_feature (61)..(62): /note="This region represents a CpG dinucleotide"
  misc_feature (61)..(61): /note="Nucleotide may be methylated to form 5-methylcytosine"
gaagagcccaatcaagcagtcaaacgtgtttacaggtcagctctgctcctggccaagtggcgttggctggggcacgtggtgagtgggtggtggcggaccaggctcctgtgtcagctgcaggt

SEQ ID NO: 23146 - DNA, 122 bp, Homo sapiens
  misc_feature (61)..(62): /note="This region represents a CpG dinucleotide"
  misc_feature (61)..(61): /note="Nucleotide may be methylated to form 5-methylcytosine"
gggggtggacttttcaatctgatagacctgaggcgaaatcagaaaccagtctctcttagccgtggaatgctggataagttacgtcacttttctgggccttcatttttgcagctgagaaagga

SEQ ID NO: 23147 - DNA, 122 bp, Homo sapiens
  misc_feature (61)..(62): /note="This region represents a CpG dinucleotide"
  misc_feature (61)..(61): /note="Nucleotide may be methylated to form 5-methylcytosine"
ctgggaaaagttgtctatgcccagaagccagcatcaggcaaagttgcccaagacctgctccgccagccccttgcagctgggctgggcttccaggagcagacgcccggtgtcgcactgcagga

SEQ ID NO: 23148 - DNA, 122 bp, Homo sapiens
  misc_feature (61)..(62): /note="This region represents a CpG dinucleotide"
  misc_feature (61)..(61): /note="Nucleotide may be methylated to form 5-methylcytosine"
accctgtgtgtgtgtgcatgctcaagcttgcatcactgtgtgcctgcacacatatgaacacgcatcgtgtctgcctgtctccatactttccagatagagtcccttccaggacctgggtcctt

SEQ ID NO: 23149 - DNA, 122 bp, Homo sapiens
  misc_feature (61)..(62): /note="This region represents a CpG dinucleotide"
  misc_feature (61)..(61): /note="Nucleotide may be methylated to form 5-methylcytosine"
accatcctggctaatgctgtgaaaccttgtctctattaaaaataacaaaaataagccaggcgtggtggtgggcacctgtagtcccagctactcagaaggctgaggcaggagaattgcttgag

SEQ ID NO: 23150 - DNA, 122 bp, Homo sapiens
  misc_feature (61)..(62): /note="This region represents a CpG dinucleotide"
  misc_feature (61)..(61): /note="Nucleotide may be methylated to form 5-methylcytosine"
atcagatttattatagatgctttaaaatgacctccaaagccttttctcaacacatttgatcgacaattttgagcactattatgtgtaattttatttacactagagtcagtggctttttcatg

SEQ ID NO: 23151 - DNA, 122 bp, Homo sapiens
  misc_feature (61)..(62): /note="This region represents a CpG dinucleotide"
  misc_feature (61)..(61): /note="Nucleotide may be methylated to form 5-methylcytosine"
aaaggaaatgttcagttacaataagtgtcactgcttccattcacttgtgcagcttcctctcgtaaggctgaaattttgatgagttaattcatacaggaagagatttcttggatctcaattac

SEQ ID NO: 23152 - DNA, 122 bp, Homo sapiens
  misc_feature (61)..(62): /note="This region represents a CpG dinucleotide"
  misc_feature (61)..(61): /note="Nucleotide may be methylated to form 5-methylcytosine"
tatattattataggtctttaaggagtacatttgtaacttcctgttttcatttcctttcaccgcagagaaatcacagaacagaaactctgcttttctctggccaactaatcactacttgagtt

SEQ ID NO: 23153 - DNA, 122 bp, Homo sapiens
  misc_feature (61)..(62): /note="This region represents a CpG dinucleotide"
  misc_feature (61)..(61): /note="Nucleotide may be methylated to form 5-methylcytosine"
gggagctaaactaggtcacagtagctctcacctgtcatctctattgctcaatggtctattcgttcttcaacgacaatctccagctacgaccaactcatatatctcccatgacaaaacttcct

SEQ ID NO: 23154 - DNA, 122 bp, Homo sapiens
  misc_feature (61)..(62): /note="This region represents a CpG dinucleotide"
  misc_feature (61)..(61): /note="Nucleotide may be methylated to form 5-methylcytosine"
gcattaaaaccccctaccctcaatcacttccatccccacccaagcacacaaaattttacccgaagatgtttgtagcagctgtgaaactgtccaactattagaagaaagagtggagaaatggg

SEQ ID NO: 23155 - DNA, 122 bp, Homo sapiens
  misc_feature (61)..(62): /note="This region represents a CpG dinucleotide"
  misc_feature (61)..(61): /note="Nucleotide may be methylated to form 5-methylcytosine"
tgtatactaagtgccagttgttctaagtccttttacgtgtattaactcatttaatccttacgagagccctgtaggtcttatccacattttgcaatgaagaaacagggacagaaagattacat

SEQ ID NO: 23156 - DNA, 122 bp, Homo sapiens
  misc_feature (61)..(62): /note="This region represents a CpG dinucleotide"
  misc_feature (61)..(61): /note="Nucleotide may be methylated to form 5-methylcytosine"
ggctgtgtgggccgggctgctaactggggctgtggagcaatctgccagccgagccccttccggagctgtgggttcctctgggtgtggggaagctgccctccacaacctcctcggcctatctt

SEQ ID NO: 23157 - DNA, 122 bp, Homo sapiens
  misc_feature (61)..(62): /note="This region represents a CpG dinucleotide"
  misc_feature (61)..(61): /note="Nucleotide may be methylated to form 5-methylcytosine"
aatcaatccccaaaaccagtgagcctgagtgcaccagggaatccctcccaccatctccagcgatgcttccactcagggactttctgtagggtgaagaacaggggattcaattccacaagtgt

SEQ ID NO: 23158 - DNA, 122 bp, Homo sapiens
  misc_feature (61)..(62): /note="This region represents a CpG dinucleotide"
  misc_feature (61)..(61): /note="Nucleotide may be methylated to form 5-methylcytosine"
ggagttggcttgtttttatgtaatggccactgaatcatataaacaagaagacttcctttacgtgtaagctgctggtttaaagccaaattttaattggctcgaggcaagagctatatatatgt

SEQ ID NO: 23159 - DNA, 122 bp, Homo sapiens
  misc_feature (61)..(62): /note="This region represents a CpG dinucleotide"
  misc_feature (61)..(61): /note="Nucleotide may be methylated to form 5-methylcytosine"
gttttaccctatctgcctaaaataatttcttaatagctcctgtaataaaagtgctaaaaacgtaaggggtcttgtcaaaaggacaaaagagccaacttaaaggggctcctcataaccaaagc

SEQ ID NO: 23160 - DNA, 122 bp, Homo sapiens
  misc_feature (61)..(62): /note="This region represents a CpG dinucleotide"
  misc_feature (61)..(61): /note="Nucleotide may be methylated to form 5-methylcytosine"
agcaagggtgtggctttgtccccgcactcagctcttcctaccctccctactcttggttagcggaatctgcccttgtggcctaatttgcaatttctcgtgtgtccaggttctccccgccacat

SEQ ID NO: 23161 - DNA, 122 bp, Homo sapiens
  misc_feature (61)..(62): /note="This region represents a CpG dinucleotide"
  misc_feature (61)..(61): /note="Nucleotide may be methylated to form 5-methylcytosine"
ctggtggaaggaggaattcttcctcctctttctcgtctttctgggcaggtattgtgaggacggtatctgccctgtcagtatctacccaaacaatccagagctgtcaacagaaaaaccctctg

SEQ ID NO: 23162 - DNA, 122 bp, Homo sapiens
  misc_feature (61)..(62): /note="This region represents a CpG dinucleotide"
  misc_feature (61)..(61): /note="Nucleotide may be methylated to form 5-methylcytosine"
gaagcccatcccgcgtcatacactcaatgtaaacaaaagcaaagaaaacattgaagagctcggggtagtcttaccggaaaactgagaagaaaaacaacaaattgatagacaggtgcctgcct

SEQ ID NO: 23163 - DNA, 122 bp, Homo sapiens
  misc_feature (61)..(62): /note="This region represents a CpG dinucleotide"
  misc_feature (61)..(61): /note="Nucleotide may be methylated to form 5-methylcytosine"
ccaggagagaacgcttccctagagtggatatttcagaagtagttgctacacacgtgaacacgatacaacaattttgacttggctgtatcttcaagatctttggggagaagaggacagctgcc

SEQ ID NO: 23164 - DNA, 122 bp, Homo sapiens
  misc_feature (61)..(62): /note="This region represents a CpG dinucleotide"
  misc_feature (61)..(61): /note="Nucleotide may be methylated to form 5-methylcytosine"
cgcatccccacctggcagtgggagaggacagggaggagcaggtgtcaggagtcaccctcacgcccagcagcacccgcccagcaagggtgtcatcctgaaccctgccccagggccgggaggag

SEQ ID NO: 23165 - DNA, 122 bp, Homo sapiens
  misc_feature (61)..(62): /note="This region represents a CpG dinucleotide"
  misc_feature (61)..(61): /note="Nucleotide may be methylated to form 5-methylcytosine"
aacaatcatctgataatactcatagatcctgtgagtcattcagacagtgcatggcaaggacggctaacttctgctccacatgtctggggctttttagctgtaaagattcaacagcttggtgc

SEQ ID NO: 23166 - DNA, 122 bp, Homo sapiens
  misc_feature (61)..(62): /note="This region represents a CpG dinucleotide"
  misc_feature (61)..(61): /note="Nucleotide may be methylated to form 5-methylcytosine"
acattcaccgagggtgtttctaagctaggtacaccagtgctctacactccatgttttatgcgtggcttgctgtatctctgaattcgacaaaagccacacttggaggaattttcatgtacaca

SEQ ID NO: 23167 - DNA, 122 bp, Homo sapiens
  misc_feature (61)..(62): /note="This region represents a CpG dinucleotide"
  misc_feature (61)..(61): /note="Nucleotide may be methylated to form 5-methylcytosine"
ccctttctttctttctttctttcttccttcctttctttcttttctttctcttaggaataacgctcaaaatcctaagggaaattgaacactcgaacaaaggattattagcaaagcaattttac

SEQ ID NO: 23168 - DNA, 122 bp, Homo sapiens
  misc_feature (61)..(62): /note="This region represents a CpG dinucleotide"
  misc_feature (61)..(61): /note="Nucleotide may be methylated to form 5-methylcytosine"
cacaggctgccctggagcaattttccttctccattttctacgcctgggagcaggtgtgtccgctgtgacgtcctttaaccaggatgctggcagcttcagcttagacgcttcacccaaagcca

SEQ ID NO: 23169 - DNA, 122 bp, Homo sapiens
  misc_feature (61)..(62): /note="This region represents a CpG dinucleotide"
  misc_feature (61)..(61): /note="Nucleotide may be methylated to form 5-methylcytosine"
atgttgcacaactagggagggaaatgttgcacaactagggcatttagattctgcaatatacgttatcttgagtgccatccttgctaatggcaggttaagatactttagttttttgagacagg

SEQ ID NO: 23170 - DNA, 122 bp, Homo sapiens
  misc_feature (61)..(62): /note="This region represents a CpG dinucleotide"
  misc_feature (61)..(61): /note="Nucleotide may be methylated to form 5-methylcytosine"
gtaacaaaagtgtcagaatttaagataagaaaagtgttgcaaattgggttctcagggaagcggactgagatggggtgtagcatataggatgcttattaaggagagcccttgggcacaacacc

SEQ ID NO: 23171 - DNA, 122 bp, Homo sapiens
  misc_feature (61)..(62): /note="This region represents a CpG dinucleotide"
  misc_feature (61)..(61): /note="Nucleotide may be methylated to form 5-methylcytosine"
gcagctgaatgactacgtggacatcatctgtccgcactatgaagatcactctgtggcagacgctgccatggagcagtacatactgtacctggtggagcatgaggagtaccagctgtgccagc

SEQ ID NO: 23172 - DNA, 122 bp, Homo sapiens
  misc_feature (61)..(62): /note="This region represents a CpG dinucleotide"
  misc_feature (61)..(61): /note="Nucleotide may be methylated to form 5-methylcytosine"
gaaatatcaaccgccagctttcatctgtgcctgggggcggtccttcctgtgctcgtggcacgtgtttatactatgattgacaacccttaaggagaaaggctaaggtcatgaaacaaagctct

SEQ ID NO: 23173 - DNA, 122 bp, Homo sapiens
  misc_feature (61)..(62): /note="This region represents a CpG dinucleotide"
  misc_feature (61)..(61): /note="Nucleotide may be methylated to form 5-methylcytosine"
gatatcagaagcagcatttgtgcgtgggtccagcagtggcatttgtccccgcaccatcttcggggctggcccggagcccaggtcctcctactgcccgggagcagtggccgcaactccaggct

SEQ ID NO: 23174 - DNA, 122 bp, Homo sapiens
  misc_feature (61)..(62): /note="This region represents a CpG dinucleotide"
  misc_feature (61)..(61): /note="Nucleotide may be methylated to form 5-methylcytosine"
tttttgtcagggaagagagttcataaagaggaagcaggcagtgttcttaacccaacaaaacgtacactgccacaagaatataagtcaggagaagaaaaaattgaagttgaaatccttaagga

SEQ ID NO: 23175 - DNA, 122 bp, Homo sapiens
  misc_feature (61)..(62): /note="This region represents a CpG dinucleotide"
  misc_feature (61)..(61): /note="Nucleotide may be methylated to form 5-methylcytosine"
gattaacaagtctgttatttaatcttcatttatctttactcattttgtagtcagggcacacggtcatgatttttgtcaaggaagtgttctctgattagaaatgcagagccaatagacccgag

SEQ ID NO: 23176 - DNA, 122 bp, Homo sapiens
  misc_feature (61)..(62): /note="This region represents a CpG dinucleotide"
  misc_feature (61)..(61): /note="Nucleotide may be methylated to form 5-methylcytosine"
tctcagttgtattcttccgttgaaatctttttttactgaaatttattttcgcatatagcacgaggagggggccaagataattcagtatttcgttaatcaggcatatagatctagagcgggga

SEQ ID NO: 23177 - DNA, 122 bp, Homo sapiens
  misc_feature (61)..(62): /note="This region represents a CpG dinucleotide"
  misc_feature (61)..(61): /note="Nucleotide may be methylated to form 5-methylcytosine"
caagtccctgggagaaggagtgggaggttgtttaaactgagaaagacagttgcaaaacttcgtacaacagcatgagctccaagcttcaaacgcattctcatgctcagacgagcactttattt

SEQ ID NO: 23178 - DNA, 122 bp, Homo sapiens
  misc_feature (61)..(62): /note="This region represents a CpG dinucleotide"
  misc_feature (61)..(61): /note="Nucleotide may be methylated to form 5-methylcytosine"
gtatctggcttatttcatttaacataatatcctaaacctaaagattcatctgttgtagcacgcatcagaatttccttcctttgtaaggctgactcatattccattgtatagataggccacat

SEQ ID NO: 23179 - DNA, 122 bp, Homo sapiens
  misc_feature (61)..(62): /note="This region represents a CpG dinucleotide"
  misc_feature (61)..(61): /note="Nucleotide may be methylated to form 5-methylcytosine"
tctctcttaagcccaggaatcagtctcactgggcggggagctcaacagcgctgttagtgtcgttcgctgataattactttcacactagaataccatcttcattcctcatttatacgggaaac

SEQ ID NO: 23180 - DNA, 122 bp, Homo sapiens
  misc_feature (61)..(62): /note="This region represents a CpG dinucleotide"
  misc_feature (61)..(61): /note="Nucleotide may be methylated to form 5-methylcytosine"
tcagcctgacatcacgggacatttgggggattaggtcggacggtggcggcagcggcagcacgtgagaatgtgtgttatcgacggggaacacttttcccgtgctctcatgtggtcatctgtct

SEQ ID NO: 23181 - DNA, 122 bp, Homo sapiens
  misc_feature (61)..(62): /note="This region represents a CpG dinucleotide"
  misc_feature (61)..(61): /note="Nucleotide may be methylated to form 5-methylcytosine"
gtttattaagcaggcacggggtgctcggatgtatgtgacagcactgtgctgggcacctcacgtcatgtgagttaatcctcaccacaccctgggtgatggaaccaagtgtcctgcaactctca

SEQ ID NO: 23182 - DNA, 122 bp, Homo sapiens
  misc_feature (61)..(62): /note="This region represents a CpG dinucleotide"
  misc_feature (61)..(61): /note="Nucleotide may be methylated to form 5-methylcytosine"
tgtggttcaaccaggcaagatcatccggtgaaagaaccagtccctgggccccaaggatgccggggaaacaggaccttctcctttcctggagctggtttagctggatatgggagggggtttgg

SEQ ID NO: 23183 - DNA, 122 bp, Homo sapiens
  misc_feature (61)..(62): /note="This region represents a CpG dinucleotide"
  misc_feature (61)..(61): /note="Nucleotide may be methylated to form 5-methylcytosine"
ctggatgtacagccgcaggccctcctgcaccggctgccccgtcaggtgcacgttgtccaccgtcagctgtgcctcgtcaaacagccactgcaccacgaacacagggcctgcgggcggcgggg

SEQ ID NO: 23184 - DNA, 122 bp, Homo sapiens
  misc_feature (61)..(62): /note="This region represents a CpG dinucleotide"
  misc_feature (61)..(61): /note="Nucleotide may be methylated to form 5-methylcytosine"
aagtatgactgaagaggtggaatgatggagagagcagagttcatcctaaacaggaacacacgaatgctgggcctcttacggggctttccttgggctttactgagaggcccttaactcccaga

SEQ ID NO: 23185 - DNA, 122 bp, Homo sapiens
  misc_feature (61)..(62): /note="This region represents a CpG dinucleotide"
  misc_feature (61)..(61): /note="Nucleotide may be methylated to form 5-methylcytosine"
aagcacattgagtcatgaaggtcaccctgcataaatctgtctacattcatgagttgctaccgctaactgccaccacatcaagttcagtgtacaccccatgctgctgaaatggcgggacacat

SEQ ID NO: 23186 - DNA, 122 bp, Homo sapiens
  misc_feature (61)..(62): /note="This region represents a CpG dinucleotide"
  misc_feature (61)..(61): /note="Nucleotide may be methylated to form 5-methylcytosine"
gtttcacctcctctccccacagttccagcagacatctgagcatgctctcttttcttgctccgtggttgatgtctttgctcagctgaatcagagctttgaaattattaagaaactggaatgcc

SEQ ID NO: 23187 - DNA, 122 bp, Homo sapiens
  misc_feature (61)..(62): /note="This region represents a CpG dinucleotide"
  misc_feature (61)..(61): /note="Nucleotide may be methylated to form 5-methylcytosine"
aaaactcactcagccaggccaggagcctaggactacatttgcagcctcagacctcagacacgtactaggagtcacatgcatgtgtgtgtgttcacacatgcacacacaaactcttcttgctc

SEQ ID NO: 23188 - DNA, 122 bp, Homo sapiens
  misc_feature (61)..(62): /note="This region represents a CpG dinucleotide"
  misc_feature (61)..(61): /note="Nucleotide may be methylated to form 5-methylcytosine"
tggttctgtctcccttccttttcctgtcttactaataaacctttgatcattagagttctgcgtatctgaaaaaatcatgataccgagcgaaaagagttacacagagtaagagatgatttcat

SEQ ID NO: 23189 - DNA, 122 bp, Homo sapiens
  misc_feature (61)..(62): /note="This region represents a CpG dinucleotide"
  misc_feature (61)..(61): /note="Nucleotide may be methylated to form 5-methylcytosine"
atcatctggcagcacagtaccctgtagcgtattggttgtttaccctgatctgtggctgatcgtgtggctgactaggatggtgtggctgactgggagctgcggcttgctgccgctgcgcagca

SEQ ID NO: 23190 - DNA, 122 bp, Homo sapiens
  misc_feature (61)..(62): /note="This region represents a CpG dinucleotide"
  misc_feature (61)..(61): /note="Nucleotide may be methylated to form 5-methylcytosine"
cccccgtgcggcggggcaggacatctcccagacagctggggacaccctttccagcgggagcgggaggcgctgttgttcaggaaaggaagttgtgtgtttgtgaatgagcgcactttgtggtt

SEQ ID NO: 23191 - DNA, 122 bp, Homo sapiens
  misc_feature (61)..(62): /note="This region represents a CpG dinucleotide"
  misc_feature (61)..(61): /note="Nucleotide may be methylated to form 5-methylcytosine"
gatgactcggacatagacatccaggaggacgatgaatccgacagtgagttggaagaaaggcggctgcccaagccacagacagccatggagatgctcatgcaaggtaccccggcgtctttcgc

SEQ ID NO: 23192 - DNA, 122 bp, Homo sapiens
  misc_feature (61)..(62): /note="This region represents a CpG dinucleotide"
  misc_feature (61)..(61): /note="Nucleotide may be methylated to form 5-methylcytosine"
ttcctttcttcccctctacactccaagggcgtcacctgttccttcctgttttttatagttcggctgagcgcagcgtgggtattttgagctgagtcaaactgatttccgctgacaccagcttg

SEQ ID NO: 23193 - DNA, 122 bp, Homo sapiens
  misc_feature (61)..(62): /note="This region represents a CpG dinucleotide"
  misc_feature (61)..(61): /note="Nucleotide may be methylated to form 5-methylcytosine"
ttcatagcatggaagtcactggtgacctcagcaagggttattagagaggaatcatgaaggcggatctcggagtgagttggataagtaggtgaaaggaaatattggcaagtacagacgattat

SEQ ID NO: 23194 - DNA, 122 bp, Homo sapiens
  misc_feature (61)..(62): /note="This region represents a CpG dinucleotide"
  misc_feature (61)..(61): /note="Nucleotide may be methylated to form 5-methylcytosine"
ggcaagataaaattcagttcccatttggcttcttcagtgaactgggtgatttccttctgacgtatgtaaaccccccagggacaggagccatcactggcttaatcacctctgtctccagggcc

SEQ ID NO: 23195 - DNA, 122 bp, Homo sapiens
  misc_feature (61)..(62): /note="This region represents a CpG dinucleotide"
  misc_feature (61)..(61): /note="Nucleotide may be methylated to form 5-methylcytosine"
aaggaaagtgctgagttgcctacaggatatccgggtgaaaacatccagcagttatttatccgcctgggacagtactgacctttaagacttactgtatctcctgaatagcctatttggacttc

SEQ ID NO: 23196 - DNA, 122 bp, Homo sapiens
  misc_feature (61)..(62): /note="This region represents a CpG dinucleotide"
  misc_feature (61)..(61): /note="Nucleotide may be methylated to form 5-methylcytosine"
tgagacagagagaaaaacaaagggctgaattcttcatagttctggacctcagctcctttgcgtgacagctgctatacttacagctgtgcattgcatgtggtgcctttcagaattcatcagat

SEQ ID NO: 23197 - DNA, 122 bp, Homo sapiens
  misc_feature (61)..(62): /note="This region represents a CpG dinucleotide"
  misc_feature (61)..(61): /note="Nucleotide may be methylated to form 5-methylcytosine"
tatatcaagcaagatcccaggaactggcaataaaaaaagagctggtagggcagacacacacgaaaacaagtagatataatcaagtacaataaagtgtcaaagagtaaaactgataactactg

SEQ ID NO: 23198 - DNA, 122 bp, Homo sapiens
  misc_feature (61)..(62): /note="This region represents a CpG dinucleotide"
  misc_feature (61)..(61): /note="Nucleotide may be methylated to form 5-methylcytosine"
tagtgaggagctgtggaacttctgattcagaccatgagtcagaggaaccaaattctcacccgggagaccagccctttcctcagtcgagccatcagtgcttcatctgggtcctctcacttaga

SEQ ID NO: 23199 - DNA, 122 bp, Homo sapiens
  misc_feature (61)..(62): /note="This region represents a CpG dinucleotide"
  misc_feature (61)..(61): /note="Nucleotide may be methylated to form 5-methylcytosine"
aggaatacatcatatagagaaaccttagtaatctttcacctatgaacggtcttattcctacgctcatttgtaagacagttgttaagagctcagaaccacattttctataggaacattttaaa

SEQ ID NO: 23200 - DNA, 122 bp, Homo sapiens
  misc_feature (61)..(62): /note="This region represents a CpG dinucleotide"
  misc_feature (61)..(61): /note="Nucleotide may be methylated to form 5-methylcytosine"
aattcccttagtgaaatcactattctctgccaagaatcaaaggtcatcccagtggagtgccgtcttcgtgttcagcagctacggagtgtctggaacagagtgagaacaaaagtatcctcatt

SEQ ID NO: 23201 - DNA, 122 bp, Homo sapiens
  misc_feature (61)..(62): /note="This region represents a CpG dinucleotide"
  misc_feature (61)..(61): /note="Nucleotide may be methylated to form 5-methylcytosine"
actcacagcaaatcaagtccacagcaagcaatgctgtgtcattctgacagccctgcatcacgcagccacccagcagggcctggagccttcccaggcctcaggctctgaccttgaccttctgc

SEQ ID NO: 23202 - DNA, 122 bp, Homo sapiens
  misc_feature (61)..(62): /note="This region represents a CpG dinucleotide"
  misc_feature (61)..(61): /note="Nucleotide may be methylated to form 5-methylcytosine"
tgtagatagtggctagaggcagggttgggtggggtggactggaacctagttcagaaactacgaaaggacctgacttctatggggaacagacacagagagtttcagatggcatcaaacaggtt

SEQ ID NO: 23203 - DNA, 122 bp, Homo sapiens
  misc_feature (61)..(62): /note="This region represents a CpG dinucleotide"
  misc_feature (61)..(61): /note="Nucleotide may be methylated to form 5-methylcytosine"
cccgggggaggttatgactcagctaccacaaacatcacatcaaattggcttgtacgactgcgtagatcttaaataacaatgggtccttcctgaggctgatttccgctcactctcgcttcttg

SEQ ID NO: 23204 - DNA, 122 bp, Homo sapiens
  misc_feature (61)..(62): /note="This region represents a CpG dinucleotide"
  misc_feature (61)..(61): /note="Nucleotide may be methylated to form 5-methylcytosine"
aatggtcatccctcactgccctgtggagtttacactgtaaagggcaaggcggactataaacgggattacaataagatctgtgaggtgaattaaagggcatgtgtaaataaagacagagtctc

SEQ ID NO: 23205 - DNA, 122 bp, Homo sapiens
  misc_feature (61)..(62): /note="This region represents a CpG dinucleotide"
  misc_feature (61)..(61): /note="Nucleotide may be methylated to form 5-methylcytosine"
cagcaccggccaatctagggacctgaggaaaaacccccaagatgcccacgagctgtgtggcgggggcacaggctgaacctctgctggggacttagcatcctagacttccccgagtgttcccc

SEQ ID NO: 23206 - DNA, 122 bp, Homo sapiens
  misc_feature (61)..(62): /note="This region represents a CpG dinucleotide"
  misc_feature (61)..(61): /note="Nucleotide may be methylated to form 5-methylcytosine"
tgagtaattctctcagccagtatttcaaggccaacagtttcaatttgctttgtctaagctcgtgtgaatttttttttttaaccatctaatgattatttttactctatttggccatcacaagt

SEQ ID NO: 23207 - DNA, 122 bp, Homo sapiens
  misc_feature (61)..(62): /note="This region represents a CpG dinucleotide"
  misc_feature (61)..(61): /note="Nucleotide may be methylated to form 5-methylcytosine"
ttatccattaaactgagagctcatgtgcttctgtcctttagctctgagaactgttgtcctcgttttctttggtaattatctttcttctctttgttctactagctgttagatattccaccttt

SEQ ID NO: 23208 - DNA, 122 bp, Homo sapiens
  misc_feature (61)..(62): /note="This region represents a CpG dinucleotide"
  misc_feature (61)..(61): /note="Nucleotide may be methylated to form 5-methylcytosine"
gaaagcactaagtacttccaaagcgcttgaaatgataaatgcaactcaatagatagccttcgtcctggtatcttacaaaaagtaaataggatttagcaaggttttctccctttagttaatta

SEQ ID NO: 23209 - DNA, 122 bp, Homo sapiens
  misc_feature (61)..(62): /note="This region represents a CpG dinucleotide"
  misc_feature (61)..(61): /note="Nucleotide may be methylated to form 5-methylcytosine"
cacttcaagaggaatgagtgcatacgtccaccaaaggcatgtgcaagaatgtccatagcacgtttattcgtagtagtaaaaaactggtaacctaaatgtccatcagcagttgagtggctaaa

SEQ ID NO: 23210 - DNA, 122 bp, Homo sapiens
  misc_feature (61)..(62): /note="This region represents a CpG dinucleotide"
  misc_feature (61)..(61): /note="Nucleotide may be methylated to form 5-methylcytosine"
ccaactcccgacctcaggtaatccgcccgcctcggcctcccaaagtgctgggattacaggcgttaagtcacctcgcccagcctttgagaaagggattcttcacatgaattgatgtgagcaca

SEQ ID NO: 23211 - DNA, 122 bp, Homo sapiens
  misc_feature (61)..(62): /note="This region represents a CpG dinucleotide"
  misc_feature (61)..(61): /note="Nucleotide may be methylated to form 5-methylcytosine"
gataggctttctaaaaagaattatttttatttgggaataaagcattgcaatgggaatatgcgtgccaaggtaaactatgtgcttattcaggtaggtaaagtaagacaaagtttaaaaaaata

SEQ ID NO: 23212 - DNA, 122 bp, Homo sapiens
  misc_feature (61)..(62): /note="This region represents a CpG dinucleotide"
  misc_feature (61)..(61): /note="Nucleotide may be methylated to form 5-methylcytosine"
gtgagtcatgagaaaaccctcaggtgtagggttaccaacatttgcaggagttgccactggcgcatactggaatgctgagtgccaaagccatacagtgtctgttcaaggaaggttgttacgag

SEQ ID NO: 23213 - DNA, 122 bp, Homo sapiens
  misc_feature (61)..(62): /note="This region represents a CpG dinucleotide"
  misc_feature (61)..(61): /note="Nucleotide may be methylated to form 5-methylcytosine"
attgcatggtgctacattcctttccattacatactttctttgtcgacctgagttttcagccgttgctgaaataaaagcaagtattgcacaagaatcagtttggtgttccatccaattccaaa

SEQ ID NO: 23214 - DNA, 122 bp, Homo sapiens
  misc_feature (61)..(62): /note="This region represents a CpG dinucleotide"
  misc_feature (61)..(61): /note="Nucleotide may be methylated to form 5-methylcytosine"
gctgagagaaaaaattcttatttagatcatctgttactatatcattatagtatctatcaccgaaagagtagacatgttttaaggaacctgaaagtgaccctttcacacccactagactggct

SEQ ID NO: 23215 - DNA, 122 bp, Homo sapiens
  misc_feature (61)..(62): /note="This region represents a CpG dinucleotide"
  misc_feature (61)..(61): /note="Nucleotide may be methylated to form 5-methylcytosine"
ctgaagtcttcagggcagccagtttatggttcactatgttaatttcacctgcctccctctcgtctccgtttcccctttcctataatcctggtactcaccgctttgctgtccatagtattttc

SEQ ID NO: 23216 - DNA, 122 bp, Homo sapiens
  misc_feature (61)..(62): /note="This region represents a CpG dinucleotide"
  misc_feature (61)..(61): /note="Nucleotide may be methylated to form 5-methylcytosine"
tttaggtcagaaaaagtaggccatcaataactataattagtgcagcatctgtaggatgctcgattctactttaactacatagaataatttaatctcactgaaattataattaaatgagatca

SEQ ID NO: 23217 - DNA, 122 bp, Homo sapiens
  misc_feature (61)..(62): /note="This region represents a CpG dinucleotide"
  misc_feature (61)..(61): /note="Nucleotide may be methylated to form 5-methylcytosine"
gcatttatggaggacttggggaggtgatgttgaggttaaaacccaagttgattttagccccgtcatggaatcttagaaacttttaggagcctaataaataagaggtcaatctattcaaagtt

SEQ ID NO: 23218 - DNA, 122 bp, Homo sapiens
  misc_feature (61)..(62): /note="This region represents a CpG dinucleotide"
  misc_feature (61)..(61): /note="Nucleotide may be methylated to form 5-methylcytosine"
aggttcatctgtcttgtatcctgtatccaattcgtatccctttaaggctgaataacattccgttgtgtctatgtgtgtgtgtgtgtgtgtgtgtgtgtgtacatatgtacacacatactgta

SEQ ID NO: 23219 - DNA, 122 bp, Homo sapiens
  misc_feature (61)..(62): /note="This region represents a CpG dinucleotide"
  misc_feature (61)..(61): /note="Nucleotide may be methylated to form 5-methylcytosine"
gtggcagctggagatgtagcataatgatccaaaattgggcccttgtaaaaaaccaaagcacgtacttctaaaatagaatcaattacttatttacttatgtctgctcattataccccagatat

SEQ ID NO: 23220 - DNA, 122 bp, Homo sapiens
  misc_feature (61)..(62): /note="This region represents a CpG dinucleotide"
  misc_feature (61)..(61): /note="Nucleotide may be methylated to form 5-methylcytosine"
agctacagtcacgagtggtttacagaatattttctgatagtctttgcttcatttcagtatcgtgccatgattggctgttgctagctacaaataaggaagtcttcaagttgggggatttctca

SEQ ID NO: 23221 - DNA, 122 bp, Homo sapiens
  misc_feature (61)..(62): /note="This region represents a CpG dinucleotide"
  misc_feature (61)..(61): /note="Nucleotide may be methylated to form 5-methylcytosine"
cctgctggaagggctgctggaagccatcttcgcacggttcttcccttggctttagagccccgaagcgctctttgacttgagctgctttgcattctctctgtcctgccatcgagaaagttctg

SEQ ID NO: 23222 - DNA, 122 bp, Homo sapiens
  misc_feature (61)..(62): /note="This region represents a CpG dinucleotide"
  misc_feature (61)..(61): /note="Nucleotide may be methylated to form 5-methylcytosine"
cccaactccagttactccatgggctgtagctaactaattatttcccatgaattaaagtaccgtgactgttttgtgcatctattaaatctccctcccagttcaaatttcacatacccttaaac

SEQ ID NO: 23223 - DNA, 122 bp, Homo sapiens
  misc_feature (61)..(62): /note="This region represents a CpG dinucleotide"
  misc_feature (61)..(61): /note="Nucleotide may be methylated to form 5-methylcytosine"
acatccttaacttgtcaaataatttgtaaaaccggggtcactgtgagccattttgggtaccgaagaaaaaaagtatttaggcaccctggcaaaggcaaccagctaaacagacttgttcctgg

SEQ ID NO: 23224 - DNA, 122 bp, Homo sapiens
  misc_feature (61)..(62): /note="This region represents a CpG dinucleotide"
  misc_feature (61)..(61): /note="Nucleotide may be methylated to form 5-methylcytosine"
tgattcagtaggcctggggcgaggcctaagattctgcacttctaagagaggctgatgatgcgtgtccacaggccactcacagaagcaaggctgtaggtgaaagcagataggaaactctaggt

SEQ ID NO: 23225 - DNA, 122 bp, Homo sapiens
  misc_feature (61)..(62): /note="This region represents a CpG dinucleotide"
  misc_feature (61)..(61): /note="Nucleotide may be methylated to form 5-methylcytosine"
catttgggatattaccagttcttgccattgtgttctcatgctgctgtagattcctattgccgtcctataccattctggtgattcagctactctctgtagctgctattcctgctactgagcaa

SEQ ID NO: 23226 - DNA, 122 bp, Homo sapiens
  misc_feature (61)..(62): /note="This region represents a CpG dinucleotide"
  misc_feature (61)..(61): /note="Nucleotide may be methylated to form 5-methylcytosine"
tccacagaggagatggtggcagcttctccttggttcaggtatttggaaccagctggggtacgtagccctttgggccacaatcacaaagccacgtttacacagcagaagtgaaaccaacttgc

SEQ ID NO: 23227 - DNA, 122 bp, Homo sapiens
  misc_feature (61)..(62): /note="This region represents a CpG dinucleotide"
  misc_feature (61)..(61): /note="Nucleotide may be methylated to form 5-methylcytosine"
caggaaggtcttgtcttacaaaactcaaatgcatgtgagatgaatagcactgtttatatacgtgtcatggcttccactggttttgcaagacctcatttgatgatctaagtacatgtgatcat

SEQ ID NO: 23228 - DNA, 122 bp, Homo sapiens
  misc_feature (61)..(62): /note="This region represents a CpG dinucleotide"
  misc_feature (61)..(61): /note="Nucleotide may be methylated to form 5-methylcytosine"
gagtcctcacacccacagagacaggaagcagagggtggttgctggggccggggagggtaacgggcttaatgtttcgtggagacagtttcagttctggaagatgaaactttctgtagacggat

SEQ ID NO: 23229 - DNA, 122 bp, Homo sapiens
  misc_feature (61)..(62): /note="This region represents a CpG dinucleotide"
  misc_feature (61)..(61): /note="Nucleotide may be methylated to form 5-methylcytosine"
tactggtagatgttacaacacggatgaaccttacaaatgtggaagctaaagatgtcagtccgtagagacagattagtggttactaagagttgggtgagtgattgctaatgtatacaaagttc

SEQ ID NO: 23230 - DNA, 122 bp, Homo sapiens
  misc_feature (61)..(62): /note="This region represents a CpG dinucleotide"
  misc_feature (61)..(61): /note="Nucleotide may be methylated to form 5-methylcytosine"
cttgcaggaggccaggcttcctgtcacattgaagctctgctgatagcccaaggccacgtgcggcgatggcacctgctgggtggggatgggtggcctggtgtcagtcctgcactgtcattgtc

SEQ ID NO: 23231 - DNA, 122 bp, Homo sapiens
  misc_feature (61)..(62): /note="This region represents a CpG dinucleotide"
  misc_feature (61)..(61): /note="Nucleotide may be methylated to form 5-methylcytosine"
gctttgcaccattcaatcagaaatgaagccttgacccagtttggggagaggatgtcaagacgggaaatggaaaattagtccaaggaacccagggacacttaagtgcctctacctctttttaa

SEQ ID NO: 23232 - DNA, 122 bp, Homo sapiens
  misc_feature (61)..(62): /note="This region represents a CpG dinucleotide"
  misc_feature (61)..(61): /note="Nucleotide may be methylated to form 5-methylcytosine"
atctcatttagcacttcagagaaatgtgttacctgatgcatttattttatatgaaacagacgtaatatgttacaaaagggctgttggtaaatcactaagcttaggagcctggttccgttgtt

SEQ ID NO: 23233 - DNA, 122 bp, Homo sapiens
  misc_feature (61)..(62): /note="This region represents a CpG dinucleotide"
  misc_feature (61)..(61): /note="Nucleotide may be methylated to form 5-methylcytosine"
agccagcagaggcaacagctgacatgagctggtgtctccaaaatgtccactggggccagacgcagtggctcatgcctgtaatcccagcactttgggaagcagaggcgggggggatcacgagg

SEQ ID NO: 23234 - DNA, 122 bp, Homo sapiens
  misc_feature (61)..(62): /note="This region represents a CpG dinucleotide"
  misc_feature (61)..(61): /note="Nucleotide may be methylated to form 5-methylcytosine"
tcacctgggtgacaggcacagtgcaggagtgtgagctatcgaaacaacctggtgaagtctcgcaaggcccagcaaacttgtttacattcctcagcactagaaaagaaaaggtaggttggtcc

SEQ ID NO: 23235 - DNA, 122 bp, Homo sapiens
  misc_feature (61)..(62): /note="This region represents a CpG dinucleotide"
  misc_feature (61)..(61): /note="Nucleotide may be methylated to form 5-methylcytosine"
ggtggctgtctaggcctggcagtcgagcgagagcggcacgggcgggactcaggtgagctccggaggctcctcaactctttggagtgcaaacaggatgagtatgccaagagcatgatcctgca

SEQ ID NO: 23236 - DNA, 122 bp, Homo sapiens
  misc_feature (61)..(62): /note="This region represents a CpG dinucleotide"
  misc_feature (61)..(61): /note="Nucleotide may be methylated to form 5-methylcytosine"
cttcacagaacccgtcataaggcactagaggacagagctcagcagggcttcacagctcggcgtgtctgtgccctgcttgcctagcaagttgaaagcatgtgataagctgaaaggatgcagac

SEQ ID NO: 23237 - DNA, 122 bp, Homo sapiens
  misc_feature (61)..(62): /note="This region represents a CpG dinucleotide"
  misc_feature (61)..(61): /note="Nucleotide may be methylated to form 5-methylcytosine"
agacagggagagtcttgtaagtcacagccaagaacctgctttatcctgcaaggagtagagcgctattaagaggcttaaccagccgggcacggtggctcacgcctggaatcccagcactttgg

SEQ ID NO: 23238 - DNA, 122 bp, Homo sapiens
  misc_feature (61)..(62): /note="This region represents a CpG dinucleotide"
  misc_feature (61)..(61): /note="Nucleotide may be methylated to form 5-methylcytosine"
ttggcactgttgacgagtcacttcttgaaatgtccaatttccttgaatttgtttacatgacgctgcaagttctccttgattcccccaaagcagtccttctgtctctcttttgtggcttcctt

SEQ ID NO: 23239 - DNA, 122 bp, Homo sapiens
  misc_feature (61)..(62): /note="This region represents a CpG dinucleotide"
  misc_feature (61)..(61): /note="Nucleotide may be methylated to form 5-methylcytosine"
aaaatcccagttgtgccacacctaactgtgttaccctggacaagtcacttctctctattccgcatctataacacaggagttagttaatgtgcatatggctcttagaacagtgcccagcacat

SEQ ID NO: 23240 - DNA, 122 bp, Homo sapiens
  misc_feature (61)..(62): /note="This region represents a CpG dinucleotide"
  misc_feature (61)..(61): /note="Nucleotide may be methylated to form 5-methylcytosine"
gtaagtggtaggactgcaggattctacatgggaaccgcagacagaggacacaggctttggcgttgggcagatatgggttccagctctgtcactgaggatgcatgtggcttgcctaagtcccc

SEQ ID NO: 23241 - DNA, 122 bp, Homo sapiens
  misc_feature (61)..(62): /note="This region represents a CpG dinucleotide"
  misc_feature (61)..(61): /note="Nucleotide may be methylated to form 5-methylcytosine"
ctacacactgttcagagattgtggtttagatagaatgagctagggtctaaaagtctgtaacgtgcacccgcagggctgctgcccttatgccataggcttttgtcctatgaactagaaaaacg

SEQ ID NO: 23242 - DNA, 122 bp, Homo sapiens
  misc_feature (61)..(62): /note="This region represents a CpG dinucleotide"
  misc_feature (61)..(61): /note="Nucleotide may be methylated to form 5-methylcytosine"
tttttggacatttcctgcttttcataatctgacagacaaacccttctctttcaatctttacgacatgatgtaaaatctatctgaatccggaaataccactcttaaaaatcagaaatgaccct

SEQ ID NO: 23243 - DNA, 122 bp, Homo sapiens
  misc_feature (61)..(62): /note="This region represents a CpG dinucleotide"
  misc_feature (61)..(61): /note="Nucleotide may be methylated to form 5-methylcytosine"
ccttgccttccataatggggaatcaacagtctaaaactgaaaattccagaagttgcaacacgtgtgttattacttggaagtaaataccaactgggttggtccattccggctgctctaacaaa

SEQ ID NO: 23244 - DNA, 122 bp, Homo sapiens
  misc_feature (61)..(62): /note="This region represents a CpG dinucleotide"
  misc_feature (61)..(61): /note="Nucleotide may be methylated to form 5-methylcytosine"
ttttcatttttcactggggcctgcaaagtaggtcgctgatcttgaagccatttatgcactcgttgtgatgatggagtctttcttgaatcgtatcagaaacctctgtgaatcagaaggcctgg

SEQ ID NO: 23245 - DNA, 122 bp, Homo sapiens
  misc_feature (61)..(62): /note="This region represents a CpG dinucleotide"
  misc_feature (61)..(61): /note="Nucleotide may be methylated to form 5-methylcytosine"
attttagttccttttctcattaaggaaatatttttaatagctgcatgtggcatgaatccacgaacagtacagctctgtctaggtccaggaatgtctttattaagggttcgttactaagcacc

SEQ ID NO: 23246 - DNA, 122 bp, Homo sapiens
  misc_feature (61)..(62): /note="This region represents a CpG dinucleotide"
  misc_feature (61)..(61): /note="Nucleotide may be methylated to form 5-methylcytosine"
cttacagtcacgggtcaataggatactgcagctaggatagcagtccacacagggccagggcggggcactaaggagatgacagtcatttctcctagagagtcatagatgaagtcatatgtcag

SEQ ID NO: 23247 - DNA, 122 bp, Homo sapiens
  misc_feature (61)..(62): /note="This region represents a CpG dinucleotide"
  misc_feature (61)..(61): /note="Nucleotide may be methylated to form 5-methylcytosine"
gaagggctagtcctgagctttggaaatgagcatgctcactcactgactcgcattctctcacgtgcacacactctctctctctctctcaggctggattggccagaccaattggaggaacttgc

SEQ ID NO: 23248 - DNA, 122 bp, Homo sapiens
  misc_feature (61)..(62): /note="This region represents a CpG dinucleotide"
  misc_feature (61)..(61): /note="Nucleotide may be methylated to form 5-methylcytosine"
cctaaacactaaaagtaaacatgctgtgaagtaaaggaagctagattcatgctgtccttgcggttggatgccaagattcaggagtaactgtttgttacctgtatacttacatgtacaacctt

SEQ ID NO: 23249 - DNA, 122 bp, Homo sapiens
  misc_feature (61)..(62): /note="This region represents a CpG dinucleotide"
  misc_feature (61)..(61): /note="Nucleotide may be methylated to form 5-methylcytosine"
caagcatgagtcaccgtgcctggctaaatgagctaattcttacgaaatgtactcaacaagcgcttggcacataataagcactcagtggctgtccactttccttatgtgactcccacggtagt

SEQ ID NO: 23250 - DNA, 122 bp, Homo sapiens
  misc_feature (61)..(62): /note="This region represents a CpG dinucleotide"
  misc_feature (61)..(61): /note="Nucleotide may be methylated to form 5-methylcytosine"
taaccactgcattccagcttgggcaacagagcaagaccccgtcttaaataacaacagcaacgaccacaacaacgacaacacccctgaaaaactggataagcagtatgtagcctatcattagt

SEQ ID NO: 23251 - DNA, 122 bp, Homo sapiens
  misc_feature (61)..(62): /note="This region represents a CpG dinucleotide"
  misc_feature (61)..(61): /note="Nucleotide may be methylated to form 5-methylcytosine"
cagtctgattgttgaaagtatgctaaataccaagtaaatgctacagtcataaagtgttgtcgcaggtggagaggagtcagaaagtgttaatgactatgctaaagcttttcttgctaaagtca

SEQ ID NO: 23252 - DNA, 122 bp, Homo sapiens
  misc_feature (61)..(62): /note="This region represents a CpG dinucleotide"
  misc_feature (61)..(61): /note="Nucleotide may be methylated to form 5-methylcytosine"
atgctaattcccatgcatgtttggcaaacaggacaaggttagctgccctgcaggaagtcacgatctaataactgccaaaacagttcagggctatgtggtggctcccagtggtcccacctcct

SEQ ID NO: 23253 - DNA, 122 bp, Homo sapiens
  misc_feature (61)..(62): /note="This region represents a CpG dinucleotide"
  misc_feature (61)..(61): /note="Nucleotide may be methylated to form 5-methylcytosine"
agctttcctctgtggcaggccaactggtctgacccaaggttgtctgtggccatgttaggacgtatattcttactcgccgagcgacgcagcccagagggttcaggaaaaggaggtggtgagtg

SEQ ID NO: 23254 - DNA, 122 bp, Homo sapiens
  misc_feature (61)..(62): /note="This region represents a CpG dinucleotide"
  misc_feature (61)..(61): /note="Nucleotide may be methylated to form 5-methylcytosine"
gaggcgcctgggaactatttgtctgttgtttgtatctttttttgtacagttttagtgagacggcaaggttggaatccttgctacaccatttactggctgtttgaccttcagtaaatcaatca

SEQ ID NO: 23255 - DNA, 122 bp, Homo sapiens
  misc_feature (61)..(62): /note="This region represents a CpG dinucleotide"
  misc_feature (61)..(61): /note="Nucleotide may be methylated to form 5-methylcytosine"
cagatgctggatgctgacgttgcactgcctctgagctgggctggctgacccgcacttgcacgccccggagagtgagcactccctgcaattctgcactccgtgtgcctcatttgccccaccct

SEQ ID NO: 23256 - DNA, 122 bp, Homo sapiens
  misc_feature (61)..(62): /note="This region represents a CpG dinucleotide"
  misc_feature (61)..(61): /note="Nucleotide may be methylated to form 5-methylcytosine"
caagtgtccttgcacaagccaggcaaagggagattagacgcacagcaagagaggaggcaacgtggccaccaaggcagaaattagaataatacggccacatgtcaaggagagccagcagccac

SEQ ID NO: 23257 - DNA, 122 bp, Homo sapiens
  misc_feature (61)..(62): /note="This region represents a CpG dinucleotide"
  misc_feature (61)..(61): /note="Nucleotide may be methylated to form 5-methylcytosine"
aaaaagaaagtaaaatctccatgtcctgatatggaacaatcttctgtacatacagttaagcgacaaaagcaaggtatagaacagtgcatatggtgtgctatcttttgtgtaaaagggtatgc

SEQ ID NO: 23258 - DNA, 122 bp, Homo sapiens
  misc_feature (61)..(62): /note="This region represents a CpG dinucleotide"
  misc_feature (61)..(61): /note="Nucleotide may be methylated to form 5-methylcytosine"
ggctttctgccagtgggaggtggtaagttcagggctgtgcctatccctgggaaggaagagcgcctggtctcaatgagctcattgctgggcaatccagagcctccggggctggagtctctgga

SEQ ID NO: 23259 - DNA, 122 bp, Homo sapiens
  misc_feature (61)..(62): /note="This region represents a CpG dinucleotide"
  misc_feature (61)..(61): /note="Nucleotide may be methylated to form 5-methylcytosine"
ggaagatcaaatcccaagaagttctcactcacatggcaggcagttgttgctgtttgttgacgaggaacacagctgtgtctgttgaccagcagagctaagaatgataggaactgaaagataga

SEQ ID NO: 23260 - DNA, 122 bp, Homo sapiens
  misc_feature (61)..(62): /note="This region represents a CpG dinucleotide"
  misc_feature (61)..(61): /note="Nucleotide may be methylated to form 5-methylcytosine"
caatcagagctcttgtctttttcttagtactgcttcctgtttatgatcacctgtttcacccgcttccccttccctgacccacctgagctctcctcctccttccccctcccaaccttcctctt

SEQ ID NO: 23261 - DNA, 122 bp, Homo sapiens
  misc_feature (61)..(62): /note="This region represents a CpG dinucleotide"
  misc_feature (61)..(61): /note="Nucleotide may be methylated to form 5-methylcytosine"
aggaggtgtctctaagccccaaagtttcctccagcttacgtggatggtggtaaaatgcaacggatgaacctgagctcctacctgtcatttatatgttaggatttattttttatgatttattc

SEQ ID NO: 23262 - DNA, 122 bp, Homo sapiens
  misc_feature (61)..(62): /note="This region represents a CpG dinucleotide"
  misc_feature (61)..(61): /note="Nucleotide may be methylated to form 5-methylcytosine"
aataaagatacaagatacttacaagtgaagtgtatgagatttaagacaaaaccagagtgacgctgcaggcaggactgcccattccatctggaatgcatgactgtctgtcatctatttggcta

SEQ ID NO: 23263 - DNA, 122 bp, Homo sapiens
  misc_feature (61)..(62): /note="This region represents a CpG dinucleotide"
  misc_feature (61)..(61): /note="Nucleotide may be methylated to form 5-methylcytosine"
aatgcgttggagaatcaccttaattttttccaggtaattgggtaaaggcctcagagaggtcgtggcatttgaggatgaataaaatgctgctagctggggaaaggttgttaggaacaggaaag

SEQ ID NO: 23264 - DNA, 122 bp, Homo sapiens
  misc_feature (61)..(62): /note="This region represents a CpG dinucleotide"
  misc_feature (61)..(61): /note="Nucleotide may be methylated to form 5-methylcytosine"
tacagatgaaagtccagatatgccatcctgtattgtagccatggtcggtataaccatgctcgtttccaaactgtcacagcacattgcatattttctctgatttgtgaaagataatatgtaaa

SEQ ID NO: 23265 - DNA, 122 bp, Homo sapiens
  misc_feature (61)..(62): /note="This region represents a CpG dinucleotide"
  misc_feature (61)..(61): /note="Nucleotide may be methylated to form 5-methylcytosine"
atctgatttaagccacagtatttatgtttctattacaacatttaaaacagaatcacaggccgggcacagtggctcacggctataatcccagcactttgggaggccaaggcaggtggatcacc

SEQ ID NO: 23266 - DNA, 122 bp, Homo sapiens
  misc_feature (61)..(62): /note="This region represents a CpG dinucleotide"
  misc_feature (61)..(61): /note="Nucleotide may be methylated to form 5-methylcytosine"
gcatcagaatttggggccaggtgtgggttacacacagggtctaaggtcgatagcccagaccgtctgaggctatgatgccctgccctctccaccgcaatcctgttcctttgctgtggagaatc

SEQ ID NO: 23267 - DNA, 122 bp, Homo sapiens
  misc_feature (61)..(62): /note="This region represents a CpG dinucleotide"
  misc_feature (61)..(61): /note="Nucleotide may be methylated to form 5-methylcytosine"
tgctgggactgtccttgagtctagcagatgcgtcagcctctttacttcctcccagaaagtcgacctcctgtgctcgctctgtggagatcaggcaccggccactgtgcgctgatcccagctca

SEQ ID NO: 23268 - DNA, 122 bp, Homo sapiens
  misc_feature (61)..(62): /note="This region represents a CpG dinucleotide"
  misc_feature (61)..(61): /note="Nucleotide may be methylated to form 5-methylcytosine"
tccccagcctcttatgctgacagatatgcagcccactaatctggagccttatagcactttcggtttcttccaggagatgttcctcagatgttgtgttgctcagaatgtgttctttgaaatgt

SEQ ID NO: 23269 - DNA, 122 bp, Homo sapiens
  misc_feature (61)..(62): /note="This region represents a CpG dinucleotide"
  misc_feature (61)..(61): /note="Nucleotide may be methylated to form 5-methylcytosine"
tgggaagtttgctgtgcttagtacagagagaatcccgttctgaacaaactgggaatcccacgtgtgtaaaaagcacaactgttgtggtggaagcaggaggttggggcgaggccaggagcggg

SEQ ID NO: 23270 - DNA, 122 bp, Homo sapiens
  misc_feature (61)..(62): /note="This region represents a CpG dinucleotide"
  misc_feature (61)..(61): /note="Nucleotide may be methylated to form 5-methylcytosine"
ttgcagaagcatcttaaagacaagagggacagggcttagagaattttttttttaaggcaccgttcttgcaaaagagtgatgtaagaggtaaggaagctaagagacaaaactgaacaaatgag

SEQ ID NO: 23271 - DNA, 122 bp, Homo sapiens
  misc_feature (61)..(62): /note="This region represents a CpG dinucleotide"
  misc_feature (61)..(61): /note="Nucleotide may be methylated to form 5-methylcytosine"
gagattggagacaggggtatactttggcctccatagagagcccacactgtcccccacacacgcagcactgactgcccctgggcctctctcagcgaagtgcatctggcctatatacaagatat

SEQ ID NO: 23272 - DNA, 122 bp, Homo sapiens
  misc_feature (61)..(62): /note="This region represents a CpG dinucleotide"
  misc_feature (61)..(61): /note="Nucleotide may be methylated to form 5-methylcytosine"
aaaattcagtatgagacatccattgtacccaaagctaggtggccttaagaaggtcagtgtcgctcagcgacagggctcggccccccctcgtgcaaacccaccccgaggtgtgaggccaggag

SEQ ID NO: 23273 - DNA, 122 bp, Homo sapiens
  misc_feature (61)..(62): /note="This region represents a CpG dinucleotide"
  misc_feature (61)..(61): /note="Nucleotide may be methylated to form 5-methylcytosine"
agaaatgcttccacatcaagatgtttcaaaaggtactttataaacgaatctggattctaccgaaagctgttacacatctgctttgctttaccaatgaagaacacaaacatgttgatggtttc

SEQ ID NO: 23274 - DNA, 122 bp, Homo sapiens
  misc_feature (61)..(62): /note="This region represents a CpG dinucleotide"
  misc_feature (61)..(61): /note="Nucleotide may be methylated to form 5-methylcytosine"
aaggtggttgccaaggaacaggagaggaagaagaggaagttggtgtttaatatgtgtggccgttctgcaagatgaaaaagttctgtcgtacaagagtgtgaatatacttgacactgctgaac

SEQ ID NO: 23275 - DNA, 122 bp, Homo sapiens
  misc_feature (61)..(62): /note="This region represents a CpG dinucleotide"
  misc_feature (61)..(61): /note="Nucleotide may be methylated to form 5-methylcytosine"
gatattcattatgggtacttaagaggcacagctgcctctgctgaaaaccatgtcaaatgccgtccgctggatgccagcgtggaggccagcccagagccagagatggtggctatggcaacacg

SEQ ID NO: 23276 - DNA, 122 bp, Homo sapiens
  misc_feature (61)..(62): /note="This region represents a CpG dinucleotide"
  misc_feature (61)..(61): /note="Nucleotide may be methylated to form 5-methylcytosine"
tcatctgtttcagaaggtaacacagactgttaactttctactgtatctttatgcaggaggcgctgcagccctcaacctttcagtgaagagatcatttctccttcaacgtgtattttacaact

SEQ ID NO: 23277 - DNA, 122 bp, Homo sapiens
  misc_feature (61)..(62): /note="This region represents a CpG dinucleotide"
  misc_feature (61)..(61): /note="Nucleotide may be methylated to form 5-methylcytosine"
ctatatcagttatctactgctatgtaagtactccaatacttactggcttaatacagcaaccgtacatttactcatgatcctattgtttgtcagtttgagctgaacctagctgagtggctcgg

SEQ ID NO: 23278 - DNA, 122 bp, Homo sapiens
  misc_feature (61)..(62): /note="This region represents a CpG dinucleotide"
  misc_feature (61)..(61): /note="Nucleotide may be methylated to form 5-methylcytosine"
tcctacatagctagcattttcagttggttaaattcctatttatttcatggattagtcatacgtaccaacagtgagggtgcttcttagcacaacggaaagtcgttgctggaggaaacattgtg

SEQ ID NO: 23279 - DNA, 122 bp, Homo sapiens
  misc_feature (61)..(62): /note="This region represents a CpG dinucleotide"
  misc_feature (61)..(61): /note="Nucleotide may be methylated to form 5-methylcytosine"
ttctatgttcagatacacaaatacttactattgtgtttcaactgcccacagtattcagcacggtaacatgctatacagattagcagcctaggagcaagagactataccatctagcctaagta

SEQ ID NO: 23280 - DNA, 122 bp, Homo sapiens
  misc_feature (61)..(62): /note="This region represents a CpG dinucleotide"
  misc_feature (61)..(61): /note="Nucleotide may be methylated to form 5-methylcytosine"
aatatacctcaagattatttacttagccaactagggcatttcctgaatattatctaagtacggaaatgagctagcaaagaaattccaattacttccaaagagggaaggataaaagcaaatag

SEQ ID NO: 23281 - DNA, 122 bp, Homo sapiens
  misc_feature (61)..(62): /note="This region represents a CpG dinucleotide"
  misc_feature (61)..(61): /note="Nucleotide may be methylated to form 5-methylcytosine"
tgttacagatggagaagatgactcagagtgggtccagaattcacccattgtcatactgtccgtaaaaggcagaagagatcagtgctcctattaaaagaccagatcacaggattcaaatttgc

SEQ ID NO: 23282 - DNA, 122 bp, Homo sapiens
  misc_feature (61)..(62): /note="This region represents a CpG dinucleotide"
  misc_feature (61)..(61): /note="Nucleotide may be methylated to form 5-methylcytosine"
gtgcctgcctccctggggaggcccagccaccttgttcgctgagagtaatcatgagtcacacgtatatagctcttcgtatgtgctgggagcagctctaagcactgaatatgcattcactcatt

SEQ ID NO: 23283 - DNA, 122 bp, Homo sapiens
  misc_feature (61)..(62): /note="This region represents a CpG dinucleotide"
  misc_feature (61)..(61): /note="Nucleotide may be methylated to form 5-methylcytosine"
aagcagatctgttaggtctccatgaggcaggcttgtcagatatccatgataccaggccagcgggtactgtggcaaaatcacactgtgggccaacaagggagataactaaccaattgccttct

SEQ ID NO: 23284 - DNA, 122 bp, Homo sapiens
  misc_feature (61)..(62): /note="This region represents a CpG dinucleotide"
  misc_feature (61)..(61): /note="Nucleotide may be methylated to form 5-methylcytosine"
tagtaaatagtattgcataaacacacacaaacacacaatgcagtaatttctcacattttgcgtaatcaaactgggataatgactttatgattcccttatataactataaagaaatatttcat

SEQ ID NO: 23285 - DNA, 122 bp, Homo sapiens
  misc_feature (61)..(62): /note="This region represents a CpG dinucleotide"
  misc_feature (61)..(61): /note="Nucleotide may be methylated to form 5-methylcytosine"
agtggtatattctttctgtcatcacttcatagaaggcacgatgactcaggacaggatagacgcaatttgatggacgagagattctggtgaagtctagtgcatacaatgccctgaagatggca

SEQ ID NO: 23286 - DNA, 122 bp, Homo sapiens
  misc_feature (61)..(62): /note="This region represents a CpG dinucleotide"
  misc_feature (61)..(61): /note="Nucleotide may be methylated to form 5-methylcytosine"
aacagcagaatgactcattgagccattgagccattcagcacattctctatatggcagattcggtgctgtctctggaaatacataaacatagagcgattcctttttctgttgaggcaaaatat

SEQ ID NO: 23287 - DNA, 122 bp, Homo sapiens
  misc_feature (61)..(62): /note="This region represents a CpG dinucleotide"
  misc_feature (61)..(61): /note="Nucleotide may be methylated to form 5-methylcytosine"
gagaatatgttagtggctgccaggaaaacttgtcatcattttagtcattcggtcaaggcccgtcagatactgcaagagttccaaaatgatcaccaacttccatggaagaatttgaagcagga

SEQ ID NO: 23288 - DNA, 122 bp, Homo sapiens
  misc_feature (61)..(62): /note="This region represents a CpG dinucleotide"
  misc_feature (61)..(61): /note="Nucleotide may be methylated to form 5-methylcytosine"
cttaaatttcatcatcacaggattgccatggcattcaaatggcataacgtgtgttaaaatcgttcccactattctttgacactagtggtaccaaactgtactctttaaatctttgcctgtgc

SEQ ID NO: 23289 - DNA, 122 bp, Homo sapiens
  misc_feature (61)..(62): /note="This region represents a CpG dinucleotide"
  misc_feature (61)..(61): /note="Nucleotide may be methylated to form 5-methylcytosine"
actctcctgggcttgaccctcagcctcccaagtagctgggactacagacatgtgccaccacgtccagctgattttttaatttttttgaggagacagggtctcactgtgttgttcaggctggc

SEQ ID NO: 23290 - DNA, 122 bp, Homo sapiens
  misc_feature (61)..(62): /note="This region represents a CpG dinucleotide"
  misc_feature (61)..(61): /note="Nucleotide may be methylated to form 5-methylcytosine"
tcggaatgaaatcagctaacatgtgatatccttaatggttttgtagcagaaagacatctacgtgggaagggacgctgctgagtgtttagagaacagacacattcatcattttattgtatttt

SEQ ID NO: 23291 - DNA, 122 bp, Homo sapiens
  misc_feature (61)..(62): /note="This region represents a CpG dinucleotide"
  misc_feature (61)..(61): /note="Nucleotide may be methylated to form 5-methylcytosine"
caatttatttaatatattccccaattcaacttcctcttagccagctccccaaaacacttacgtccccagtaataccacctgactgcaatgtaatagatgggaagtcaaagtggaaagagaca

SEQ ID NO: 23292 - DNA, 122 bp, Homo sapiens
  misc_feature (61)..(62): /note="This region represents a CpG dinucleotide"
  misc_feature (61)..(61): /note="Nucleotide may be methylated to form 5-methylcytosine"
aagcattttaatccaaaatattctgtaaacactgactccatttgagtacccaggaactaccgtccagccgccatcaactgcatttttatttcagttttaagcagtaattgaaatagccaaaa

SEQ ID NO: 23293 - DNA, 122 bp, Homo sapiens
  misc_feature (61)..(62): /note="This region represents a CpG dinucleotide"
  misc_feature (61)..(61): /note="Nucleotide may be methylated to form 5-methylcytosine"
ctaacatatgctacagcatggatgaaacttgaagacattagctaagtgaaataagtcattcgcaaaaggacaaagagctgtttgattccattcatatgaagtacttaacagtagtcaaattc

SEQ ID NO: 23294 - DNA, 122 bp, Homo sapiens
  misc_feature (61)..(62): /note="This region represents a CpG dinucleotide"
  misc_feature (61)..(61): /note="Nucleotide may be methylated to form 5-methylcytosine"
catgccctatctttagagggcctccatttctttgtgcggtgtctgcagctgtggttagtgcgtgagataaaagtgcaggatcctataaatagataaattcagagtgttccagagtaagagac

SEQ ID NO: 23295 - DNA, 122 bp, Homo sapiens
  misc_feature (61)..(62): /note="This region represents a CpG dinucleotide"
  misc_feature (61)..(61): /note="Nucleotide may be methylated to form 5-methylcytosine"
agaagggacgctttctccgggaggaggccttgggagagccggcctttgtagtgaaatgggcgtcttggagaggaatgggcggttctgggatgaagcaggtggtctgagaggaggggcatttt

SEQ ID NO: 23296 - DNA, 122 bp, Homo sapiens
  misc_feature (61)..(62): /note="This region represents a CpG dinucleotide"
  misc_feature (61)..(61): /note="Nucleotide may be methylated to form 5-methylcytosine"
aatttttaaaaattcaatataatgtttatagaatggtattacattgttatcagtcttagacgtagggttataatggagctgaaaaaattcctgttgcctaatgacttaacattgtagtgtaa

SEQ ID NO: 23297 - DNA, 122 bp, Homo sapiens
  misc_feature (61)..(62): /note="This region represents a CpG dinucleotide"
  misc_feature (61)..(61): /note="Nucleotide may be methylated to form 5-methylcytosine"
gcagggcctggtgactccatatgttccaaagcctcagtctcctgggcaccctgcccccttcgccttggccacgttttgtgaacaagcagaactagatcttgctgcctgggcaaatgtttcat

SEQ ID NO: 23298 - DNA, 122 bp, Homo sapiens
  misc_feature (61)..(62): /note="This region represents a CpG dinucleotide"
  misc_feature (61)..(61): /note="Nucleotide may be methylated to form 5-methylcytosine"
aatggttcccagccccagttctcttagcaaggctttctaattcattatctcatttaatctcgccatgagtcaggcagggcagtaacacatgggaaaggagggtgggggtggggatagtgtga

SEQ ID NO: 23299 - DNA, 122 bp, Homo sapiens
  misc_feature (61)..(62): /note="This region represents a CpG dinucleotide"
  misc_feature (61)..(61): /note="Nucleotide may be methylated to form 5-methylcytosine"
gtgagtcactgcagctcttgcgtgctcagtgtcctcatttgcatcacagggatggcattccgtgcctgcgattcactatgggtcttaacaaatctattccttctcttcccctcccacttcag

SEQ ID NO: 23300 - DNA, 122 bp, Homo sapiens
  misc_feature (61)..(62): /note="This region represents a CpG dinucleotide"
  misc_feature (61)..(61): /note="Nucleotide may be methylated to form 5-methylcytosine"
tgctctacacacacactcccagcagaacacacacctgccaaaaatggaagtggtcgagtacgcctgttggtgttgaaaggcatttcagtataaatcagtgaataaatcaggttacaaaacac

SEQ ID NO: 23301 - DNA, 122 bp, Homo sapiens
  misc_feature (61)..(62): /note="This region represents a CpG dinucleotide"
  misc_feature (61)..(61): /note="Nucleotide may be methylated to form 5-methylcytosine"
ttcctagatttattccagttaagcatttataggcatttatctgtgtgtctgatgccctgacgtttttgctgtaggtaagaagtgatggagtgagctgagctgccaggcttcctggagtgatt

SEQ ID NO: 23302 - DNA, 122 bp, Homo sapiens
  misc_feature (61)..(62): /note="This region represents a CpG dinucleotide"
  misc_feature (61)..(61): /note="Nucleotide may be methylated to form 5-methylcytosine"
gcgctggttggtgaaacagagatgtcaggtgagtcctgcctgcctgggagcctccagcagcgtgggcgggagggagatgccagcagttcccacaggagccctcggtcctggccgttggcaaa

SEQ ID NO: 23303 - DNA, 122 bp, Homo sapiens
  misc_feature (61)..(62): /note="This region represents a CpG dinucleotide"
  misc_feature (61)..(61): /note="Nucleotide may be methylated to form 5-methylcytosine"
ggagataaggaagtaaccaccacaggctgctccacagtagatacaacacattcctgaggacggctcaaaagacgtcactgcagaatgaatcaaccacgtctcagcaagccagggttgctccc

SEQ ID NO: 23304 - DNA, 122 bp, Homo sapiens
  misc_feature (61)..(62): /note="This region represents a CpG dinucleotide"
  misc_feature (61)..(61): /note="Nucleotide may be methylated to form 5-methylcytosine"
cacccaacaatgatgaaagcagtcagccttaggatgaagtcaacaatgaattcagtaggacggagatggaaaaaacccgagtcatggaaacatcactgaatcaacaagcctgaggcttacct

SEQ ID NO: 23305 - DNA, 122 bp, Homo sapiens
  misc_feature (61)..(62): /note="This region represents a CpG dinucleotide"
  misc_feature (61)..(61): /note="Nucleotide may be methylated to form 5-methylcytosine"
actcaaaactagcagccttagggctattcggtaagtgagtcagagcaccatgtcaacatgcgagatcagttgtctcctatacccaaaacaaggctgaatttctttccaggggttataattta

SEQ ID NO: 23306 - DNA, 122 bp, Homo sapiens
  misc_feature (61)..(62): /note="This region represents a CpG dinucleotide"
  misc_feature (61)..(61): /note="Nucleotide may be methylated to form 5-methylcytosine"
atggtattaggaatgtgatctatcataacaaatgggaccaaggcacgagctgccatttcacgggagtggtagacaggtgagtgaccacacctggggagaaataaaaacacaagaccattcaa

SEQ ID NO: 23307 - DNA, 122 bp, Homo sapiens
  misc_feature (61)..(62): /note="This region represents a CpG dinucleotide"
  misc_feature (61)..(61): /note="Nucleotide may be methylated to form 5-methylcytosine"
caggcgagaatgaagcgtgttttggcaatggtgcagaaggcacccagctactgtacttgccgtatctgctggagcttctgcctaacgatgagtgatgtcacaggccctgtgttcttgtgcca

SEQ ID NO: 23308 - DNA, 122 bp, Homo sapiens
  misc_feature (61)..(62): /note="This region represents a CpG dinucleotide"
  misc_feature (61)..(61): /note="Nucleotide may be methylated to form 5-methylcytosine"
caccgtgcgctggaacggctcgcgcatcgcgctcccctgccgcgcgccacacttccacatcgacctggatggctacctcttgaaagtgaccaccaaagcaggtggggcgtctgtggcctccc

SEQ ID NO: 23309 - DNA, 122 bp, Homo sapiens
  misc_feature (61)..(62): /note="This region represents a CpG dinucleotide"
  misc_feature (61)..(61): /note="Nucleotide may be methylated to form 5-methylcytosine"
cacttcccagcccacgtgctggcagaattcagttccttgtggctgtaggactcatagcagcgtgcttcttcacagctgacaataggatgagtgtgctggcaagactgagtcttacaaatgta

SEQ ID NO: 23310 - DNA, 122 bp, Homo sapiens
  misc_feature (61)..(62): /note="This region represents a CpG dinucleotide"
  misc_feature (61)..(61): /note="Nucleotide may be methylated to form 5-methylcytosine"
tcgggacctggagggctgggggctgcccgggcgttaggggtaaagctccctacccaactgcgcagaaggcctcagaggcctgggggctgggcttcccctttcacatcgccctttagaggccc

SEQ ID NO: 23311 - DNA, 122 bp, Homo sapiens
  misc_feature (61)..(62): /note="This region represents a CpG dinucleotide"
  misc_feature (61)..(61): /note="Nucleotide may be methylated to form 5-methylcytosine"
tgtaaatctaaaatcccatttaaatataatttttatttgttaatactccaggatgcattccgtactacagtattctgatgttattgagacagttttatcaagattttatctctatttaagtc

SEQ ID NO: 23312 - DNA, 122 bp, Homo sapiens
  misc_feature (61)..(62): /note="This region represents a CpG dinucleotide"
  misc_feature (61)..(61): /note="Nucleotide may be methylated to form 5-methylcytosine"
ctgtaagttgtactttgagtgtcattagccttttgaaatatcagataaccagggaaagggcgaacatgaatttctgtggctgattatgacaccctggttatgagttaagggacttcgctcct

SEQ ID NO: 23313 - DNA, 122 bp, Homo sapiens
  misc_feature (61)..(62): /note="This region represents a CpG dinucleotide"
  misc_feature (61)..(61): /note="Nucleotide may be methylated to form 5-methylcytosine"
gggagagtgaagtgtttgctgaggacattgctcctctgactcccatctcactttgtccatcgcagccttttgttgggagatgacactgtcagtcagcccatgatgtctgttcacacgagatg

SEQ ID NO: 23314 - DNA, 122 bp, Homo sapiens
  misc_feature (61)..(62): /note="This region represents a CpG dinucleotide"
  misc_feature (61)..(61): /note="Nucleotide may be methylated to form 5-methylcytosine"
atgaggtcacagaatgttgaagatgaaatgaaagtggctcctgagtcacaaagtcacaggcgggtggggatcctttcaacagggctcccagcaatagagcagtcccactctcccagatgagc

SEQ ID NO: 23315 - DNA, 122 bp, Homo sapiens
  misc_feature (61)..(62): /note="This region represents a CpG dinucleotide"
  misc_feature (61)..(61): /note="Nucleotide may be methylated to form 5-methylcytosine"
tctataggccatatccatgaatcagacagagtagactctttagcctgtttcttcaaaaaacgatgtccattgcatagggttgaaagatcataattccagcaggaatttgcaacttcgctgac

SEQ ID NO: 23316 - DNA, 122 bp, Homo sapiens
  misc_feature (61)..(62): /note="This region represents a CpG dinucleotide"
  misc_feature (61)..(61): /note="Nucleotide may be methylated to form 5-methylcytosine"
tgctctggtggacggggcaggtcaatgaaagcagcaacttgagctccttccagcaggtgccgccttgcatcacctatgatcccatgtgtcattcacgtgtatgattgtatatgatcctctga

SEQ ID NO: 23317 - DNA, 122 bp, Homo sapiens
  misc_feature (61)..(62): /note="This region represents a CpG dinucleotide"
  misc_feature (61)..(61): /note="Nucleotide may be methylated to form 5-methylcytosine"
gtattcaaaagcattctcttttgctttctatcttgtagaaagcatattttaaaatagctgcgtaataactaatagaaggtactagtgttcaacttggtaaagacagaatcagctgaaactcc

SEQ ID NO: 23318 - DNA, 122 bp, Homo sapiens
  misc_feature (61)..(62): /note="This region represents a CpG dinucleotide"
  misc_feature (61)..(61): /note="Nucleotide may be methylated to form 5-methylcytosine"
aaatgaagctcctgtagtagagttggagccatcttttgggggcaggaagggagtgtatggcgatttgtgccttatagtggtttggatttgttaacagcactagtcaaggaacacagtgcgct

SEQ ID NO: 23319 - DNA, 122 bp, Homo sapiens
  misc_feature (61)..(62): /note="This region represents a CpG dinucleotide"
  misc_feature (61)..(61): /note="Nucleotide may be methylated to form 5-methylcytosine"
gtggagaagttattgggtcatatagtgatggtgtgcagataggacctggtggtgagttgacgaggagccattgccattcagccatcaagaatcatgatgtgtgttgtgtaggaatggagagg

SEQ ID NO: 23320 - DNA, 122 bp, Homo sapiens
  misc_feature (61)..(62): /note="This region represents a CpG dinucleotide"
  misc_feature (61)..(61): /note="Nucleotide may be methylated to form 5-methylcytosine"
gatcacaccttaagaaaagtgattggttggcttgtttctttcattttaatctgttgtctccgtcacagtcaaattagcattatgtagtatattactacacttaaaaaattatttaacccatt

SEQ ID NO: 23321 - DNA, 122 bp, Homo sapiens
  misc_feature (61)..(62): /note="This region represents a CpG dinucleotide"
  misc_feature (61)..(61): /note="Nucleotide may be methylated to form 5-methylcytosine"
ggtgcaggatgtgcctgccaggcagcccctgagatgggtgtatgtggaacccagtgaggacgggaaactacacaaattcacggaatgagagggatgctcactttgctcagtttaaattcctc

SEQ ID NO: 23322 - DNA, 122 bp, Homo sapiens
  misc_feature (61)..(62): /note="This region represents a CpG dinucleotide"
  misc_feature (61)..(61): /note="Nucleotide may be methylated to form 5-methylcytosine"
tggtggaccaggagtagctgtggccgtgggtagctggtggtgcccaacagctcacaccagcgtatgagggagtggcacatacacatatgtgtgggagtctggtgtgctgggtgtgcctcagt

SEQ ID NO: 23323 - DNA, 122 bp, Homo sapiens
  misc_feature (61)..(62): /note="This region represents a CpG dinucleotide"
  misc_feature (61)..(61): /note="Nucleotide may be methylated to form 5-methylcytosine"
atattctctgagtgtcaaaatggatatgactcagctgtgatccaccaaaagatgaggcagcgtgttaattcaaccctcactctctctatcagcatatggcaaggtttatggctgccaaaaaa

SEQ ID NO: 23324 - DNA, 122 bp, Homo sapiens
  misc_feature (61)..(62): /note="This region represents a CpG dinucleotide"
  misc_feature (61)..(61): /note="Nucleotide may be methylated to form 5-methylcytosine"
ctcttataagctgggtttagaacttgtacttctacctcttcctattggtcagagtatgtccgtaggtctgccaagactcaaagcacagagaaatagatgtttcctcttgttgagtggcatat

SEQ ID NO: 23325 - DNA, 122 bp, Homo sapiens
  misc_feature (61)..(62): /note="This region represents a CpG dinucleotide"
  misc_feature (61)..(61): /note="Nucleotide may be methylated to form 5-methylcytosine"
tctcaacacacccattcatatcttttgcctattgttccatggggcaatggctttattttgcgtatttatttctaggagctatttatattttagggaggttagcttattatctataatatgaa

SEQ ID NO: 23326 - DNA, 122 bp, Homo sapiens
  misc_feature (61)..(62): /note="This region represents a CpG dinucleotide"
  misc_feature (61)..(61): /note="Nucleotide may be methylated to form 5-methylcytosine"
tactcaggggaaggagacctgggagggtgaaatgactcattattctattagacaatgggacgcttgggttttgactaaggctgctcagactgccagagtcccgacctccatggcaatccaga

SEQ ID NO: 23327 - DNA, 122 bp, Homo sapiens
  misc_feature (61)..(62): /note="This region represents a CpG dinucleotide"
  misc_feature (61)..(61): /note="Nucleotide may be methylated to form 5-methylcytosine"
acaggaaggctggggatggtgttagcgcctcatgactgggataatctactgtggagttcacgggagggccaggccttcaaagatgcttttattgaaaacgtccctataggacctttttcact

SEQ ID NO: 23328 - DNA, 122 bp, Homo sapiens
  misc_feature (61)..(62): /note="This region represents a CpG dinucleotide"
  misc_feature (61)..(61): /note="Nucleotide may be methylated to form 5-methylcytosine"
attgggaaaacagtgcttgtcgcattgaaagcactgagtgttatctgttgttactatctacgagaaagaatttgcttagtatgtggggccatttcccaagtgagcctgtggtggtggtaggg

SEQ ID NO: 23329 - DNA, 122 bp, Homo sapiens
  misc_feature (61)..(62): /note="This region represents a CpG dinucleotide"
  misc_feature (61)..(61): /note="Nucleotide may be methylated to form 5-methylcytosine"
tagtccctccctttgtggccatttacaattacacagcaaccacagggtttcatgactacacgtgtttatttgtacaagcgcagcgtcccctgtgtgtgcccagtgctgtgcctgtgcgcagt

SEQ ID NO: 23330 - DNA, 122 bp, Homo sapiens
  misc_feature (61)..(62): /note="This region represents a CpG dinucleotide"
  misc_feature (61)..(61): /note="Nucleotide may be methylated to form 5-methylcytosine"
tttggtgaccttttatgaccatcaagttcacaatgctggtgggctgccttttaatccctccgcagacaaaggccctaaataaacacagatcccttcctgggaaaaagtccactctggttaaa

SEQ ID NO: 23331 - DNA, 122 bp, Homo sapiens
  misc_feature (61)..(62): /note="This region represents a CpG dinucleotide"
  misc_feature (61)..(61): /note="Nucleotide may be methylated to form 5-methylcytosine"
tttctgtaattcagctgttcctaagtttcctatgttaacagcagtgatggttcctcatctcgcttgattaggaggaagtcctgtttgttaccttcttcctctttttgagactctccagtaat

SEQ ID NO: 23332 - DNA, 122 bp, Homo sapiens
  misc_feature (61)..(62): /note="This region represents a CpG dinucleotide"
  misc_feature (61)..(61): /note="Nucleotide may be methylated to form 5-methylcytosine"
ttttttgttttttgtttttgtaatataacccactgttcctcatcctactgaccaaaaactcggcacaccctaaagctgctgagcagtgcgaaaatttaagagtcaatacaagaacgtaaata

SEQ ID NO: 23333 - DNA, 122 bp, Homo sapiens
  misc_feature (61)..(62): /note="This region represents a CpG dinucleotide"
  misc_feature (61)..(61): /note="Nucleotide may be methylated to form 5-methylcytosine"
ggagtttggattcgtgtcttcctggaggatgttacagttgagctggctcttgcagggtgacgtgtgtttgattggagaaagatacagaaggcaggaacagtatctaaaacaggacgaatcac

SEQ ID NO: 23334 - DNA, 122 bp, Homo sapiens
  misc_feature (61)..(62): /note="This region represents a CpG dinucleotide"
  misc_feature (61)..(61): /note="Nucleotide may be methylated to form 5-methylcytosine"
gttctagaatacccattgattgaaagagctgtggccaaacaggaaggacagagtaagagccgctgacaaaggattctgccaagacagaatcccagggtcacaggagagaggcttggggcagt

SEQ ID NO: 23335 - DNA, 122 bp, Homo sapiens
  misc_feature (61)..(62): /note="This region represents a CpG dinucleotide"
  misc_feature (61)..(61): /note="Nucleotide may be methylated to form 5-methylcytosine"
atgagctaatcagggctgagccaaatgacacatgtaaacagatgagccgtccggggatgccgccttgtcctgcttttatcttacacaaacacctccacactggacttagaaggcttttggca

SEQ ID NO: 23336 - DNA, 122 bp, Homo sapiens
  misc_feature (61)..(62): /note="This region represents a CpG dinucleotide"
  misc_feature (61)..(61): /note="Nucleotide may be methylated to form 5-methylcytosine"
aacaatgcatttcttagaccgtatccctgtccttaactgacacatgactaagtttttgcccgtatacaatttttgtactgatttaattcatgtctgctttaatgtccaccacttggtttcca

SEQ ID NO: 23337 - DNA, 122 bp, Homo sapiens
  misc_feature (61)..(62): /note="This region represents a CpG dinucleotide"
  misc_feature (61)..(61): /note="Nucleotide may be methylated to form 5-methylcytosine"
taaggtgagcaacaccgattcaggtagtttaagttccgagaggaaccagggcagcctcagcgggtagcttagatacttttcttagatactctctgggcagtggcctgaatgctgagtgggag

SEQ ID NO: 23338 - DNA, 122 bp, Homo sapiens
  misc_feature (61)..(62): /note="This region represents a CpG dinucleotide"
  misc_feature (61)..(61): /note="Nucleotide may be methylated to form 5-methylcytosine"
aatgatgagacaaaacaaatgaaagagcctagaatgttcttggctaggagaactttaatacgtgttagttgagcctgtgaagtccagaagccctacagctagtcttgtttctaagaattagt

SEQ ID NO: 23339 - DNA, 122 bp, Homo sapiens
  misc_feature (61)..(62): /note="This region represents a CpG dinucleotide"
  misc_feature (61)..(61): /note="Nucleotide may be methylated to form 5-methylcytosine"
ttctgcatataaaggaagttcctggctatagagtacaacacgctccatgcctttagcgaacgtgcttcagggaagagaaagcatttctagtgagaagctacatatcacgtatgctgcactgg

SEQ ID NO: 23340 - DNA, 122 bp, Homo sapiens
  misc_feature (61)..(62): /note="This region represents a CpG dinucleotide"
  misc_feature (61)..(61): /note="Nucleotide may be methylated to form 5-methylcytosine"
tggcttgcgaacttccaacgcaggaattggaggattaccggggaaggaatgcgaggtacccgatagcctcacacctgaacacggtcgcttcaatccactgggattcatttaaaaaaaaaaaa

SEQ ID NO: 23341 - DNA, 122 bp, Homo sapiens
  misc_feature (61)..(62): /note="This region represents a CpG dinucleotide"
  misc_feature (61)..(61): /note="Nucleotide may be methylated to form 5-methylcytosine"
ggagcaggtatctaagagcaacgaaactaccagaaacaaaatacgacgtcgcttttcatacgaccagcctgatgggccaaagtggtggacaggccaatccataatccattaataaccattaa

SEQ ID NO: 23342 - DNA, 122 bp, Homo sapiens
  misc_feature (61)..(62): /note="This region represents a CpG dinucleotide"
  misc_feature (61)..(61): /note="Nucleotide may be methylated to form 5-methylcytosine"
ttgtgagcacacctacttggccgagcaggaagtccatcaaagctgagacacagtgcaccacgctgcagttgacctgggtcaagtgcatgccccactggtgcagaaattctttgcccaccaac

SEQ ID NO: 23343 - DNA, 122 bp, Homo sapiens
  misc_feature (61)..(62): /note="This region represents a CpG dinucleotide"
  misc_feature (61)..(61): /note="Nucleotide may be methylated to form 5-methylcytosine"
ggtggctaccatataggactgtgcagacctaggagttcaagtgaaagcaaacagaaaatacgggcagcatcaacatttgctgtagcaaagcataaggggattatgtttaagaagggatcaaa

SEQ ID NO: 23344 - DNA, 122 bp, Homo sapiens
  misc_feature (61)..(62): /note="This region represents a CpG dinucleotide"
  misc_feature (61)..(61): /note="Nucleotide may be methylated to form 5-methylcytosine"
tcgtaggcaggtagttgaatctcaccttagggtattattttgatgttagcatatgatacacgccctgctatagttctgctgtgccttggttgctatgtgacattctgaggtttttgctgtcc

SEQ ID NO: 23345 - DNA, 122 bp, Homo sapiens
  misc_feature (61)..(62): /note="This region represents a CpG dinucleotide"
  misc_feature (61)..(61): /note="Nucleotide may be methylated to form 5-methylcytosine"
tgaattgaattctctttttcttgcaagctagcatagattggttcttccctcatagctagccgtatgactccttctcattgagatcacccagccatatctcctcaattctttatttcccacat

SEQ ID NO: 23346 - DNA, 122 bp, Homo sapiens
  misc_feature (61)..(62): /note="This region represents a CpG dinucleotide"
  misc_feature (61)..(61): /note="Nucleotide may be methylated to form 5-methylcytosine"
cttcctttggcttattagcatcatgatattaatggatttcttcatgttgagtcatccttgcgttcctggaaacaaactctacttggtcatggtgtgttattactttaatttaatacactgct

SEQ ID NO: 23347 - DNA, 122 bp, Homo sapiens
  misc_feature (61)..(62): /note="This region represents a CpG dinucleotide"
  misc_feature (61)..(61): /note="Nucleotide may be methylated to form 5-methylcytosine"
acagaattttgtgttgacttatttgcaagagtctgagacctggcatggtgggaaatgagacgggagagagagagaacaagggctagatcttggagggcctcattgactttgaaggaaattgg

SEQ ID NO: 23348 - DNA, 122 bp, Homo sapiens
  misc_feature (61)..(62): /note="This region represents a CpG dinucleotide"
  misc_feature (61)..(61): /note="Nucleotide may be methylated to form 5-methylcytosine"
tcctttgggtcctggtgctaccactaaatgcaaaacagcccgatgtggccctatggaactcgttcgcacagtccaactcaacccaacttcctgtaggactcacatagtgacacaactcaatg

SEQ ID NO: 23349 - DNA, 122 bp, Homo sapiens
  misc_feature (61)..(62): /note="This region represents a CpG dinucleotide"
  misc_feature (61)..(61): /note="Nucleotide may be methylated to form 5-methylcytosine"
atgctctgggcctgttttctattagaatgaccatcttttcatgctcaggatttaaccctccgggaacttctgaatgtgtgttgcaacttaaaagacatattatttcacaacatttaaggagg

SEQ ID NO: 23350 - DNA, 122 bp, Homo sapiens
  misc_feature (61)..(62): /note="This region represents a CpG dinucleotide"
  misc_feature (61)..(61): /note="Nucleotide may be methylated to form 5-methylcytosine"
ttagagatgacaccagtaacgataggtttctactcttagctatgcctggggcagcttgaccgccactttgttgatcacattaatttacctcttcctgcctttatttccctttctgtaaaatg

SEQ ID NO: 23351 - DNA, 122 bp, Homo sapiens
  misc_feature (61)..(62): /note="This region represents a CpG dinucleotide"
  misc_feature (61)..(61): /note="Nucleotide may be methylated to form 5-methylcytosine"
aaacttattaatttcccttccacaaagactgagagtttgacggtaatcacagtatcaagtcgtaataataataaaaaaaatccctccgttgaaaatcacagttgggactctggagagttcaa

SEQ ID NO: 23352 - DNA, 122 bp, Homo sapiens
  misc_feature (61)..(62): /note="This region represents a CpG dinucleotide"
  misc_feature (61)..(61): /note="Nucleotide may be methylated to form 5-methylcytosine"
ttgtcctttttttccccttgcacgacccgttccagcaactgcaggtcaaagtcctgctcacgcttccactggcaacagaacaagaggttaaacgtagtcgcttcctgattgctgaaagagcc

SEQ ID NO: 23353 - DNA, 122 bp, Homo sapiens
  misc_feature (61)..(62): /note="This region represents a CpG dinucleotide"
  misc_feature (61)..(61): /note="Nucleotide may be methylated to form 5-methylcytosine"
catttgtcagagaaagtttctcaagcagtccctgtgatcttcagaacccagcttgttcttcgcccagaatgctttagttgtaggcaaatttgggggctgaattaacttcccagccgctagga

SEQ ID NO: 23354 - DNA, 122 bp, Homo sapiens
  misc_feature (61)..(62): /note="This region represents a CpG dinucleotide"
  misc_feature (61)..(61): /note="Nucleotide may be methylated to form 5-methylcytosine"
taaaatgaggctgaaacctactgggctgcattcccagatggttaaggcatttggatgagacgggaggtcaacacaaaatacaggtcataaagacattgctgataaaaggttgcagtaatgga

SEQ ID NO: 23355 - DNA, 122 bp, Homo sapiens
  misc_feature (61)..(62): /note="This region represents a CpG dinucleotide"
  misc_feature (61)..(61): /note="Nucleotide may be methylated to form 5-methylcytosine"
aaaaaatagtatctttgatccttttatagttcataagcatgatgattgggtttttgcacacgtgtaatatgtgcctccctcaaaccatgttatgacctcagcatattacctgtctgatataa

SEQ ID NO: 23356 - DNA, 122 bp, Homo sapiens
  misc_feature (61)..(62): /note="This region represents a CpG dinucleotide"
  misc_feature (61)..(61): /note="Nucleotide may be methylated to form 5-methylcytosine"
attttctaatgggcctggacaggaggacccagctctgtttcttatgggtcttgtggatggcgctgggaaatcaggcttgcctaactggatatacagagcttagcattaacagctggacagag

SEQ ID NO: 23357 - DNA, 122 bp, Homo sapiens
  misc_feature (61)..(62): /note="This region represents a CpG dinucleotide"
  misc_feature (61)..(61): /note="Nucleotide may be methylated to form 5-methylcytosine"
agaaatgaaactgaaataaaaatttcttctgccatagacaaaattatggcaataaccacacgaagtgggaacagggtaacgtggctcatttttgcatcatgtatctcaggataactctgttt

SEQ ID NO: 23358 - DNA, 122 bp, Homo sapiens
  misc_feature (61)..(62): /note="This region represents a CpG dinucleotide"
  misc_feature (61)..(61): /note="Nucleotide may be methylated to form 5-methylcytosine"
gtgactcatctgacataatcttctaaacaatttagcatacgggtacgtacttacctaggccgtaatacctgtattttcttctctttcgttctttctttcttttctttgttttgagacaggct

SEQ ID NO: 23359 - DNA, 122 bp, Homo sapiens
  misc_feature (61)..(62): /note="This region represents a CpG dinucleotide"
  misc_feature (61)..(61): /note="Nucleotide may be methylated to form 5-methylcytosine"
gtgctggggatgaaatgacaacaatagctactattgactgagcactcactatgcactggccgctcccctaagcactggccattcctgagctcattcactcctcacaaacagccctgccaggc

SEQ ID NO: 23360 - DNA, 122 bp, Homo sapiens
  misc_feature (61)..(62): /note="This region represents a CpG dinucleotide"
  misc_feature (61)..(61): /note="Nucleotide may be methylated to form 5-methylcytosine"
gaagaagccattcacatacacatttattcacctggggaacaggtatccgagcatttattacgtgccaggagataacaacagtacacgaaaggaaaatctagctgggcctcctctcctgaggg

SEQ ID NO: 23361 - DNA, 122 bp, Homo sapiens
  misc_feature (61)..(62): /note="This region represents a CpG dinucleotide"
  misc_feature (61)..(61): /note="Nucleotide may be methylated to form 5-methylcytosine"
tatcttaggtcagctgactcatgaaattgctatcagaaaagcaaactgcttcccctctttcgccatcagactcatggttctgcttttcgtttatttgctgtaccttttctgcctagctattg

SEQ ID NO: 23362 - DNA, 122 bp, Homo sapiens
  misc_feature (61)..(62): /note="This region represents a CpG dinucleotide"
  misc_feature (61)..(61): /note="Nucleotide may be methylated to form 5-methylcytosine"
tagtgctctcctatcatcaaatcgattacaaatgttcatctgttaaatgttcctgggccacgcaaaacattccagctggccatatttactttcgcattccttgctctaagtactaacattac

SEQ ID NO: 23363 - DNA, 122 bp, Homo sapiens
  misc_feature (61)..(62): /note="This region represents a CpG dinucleotide"
  misc_feature (61)..(61): /note="Nucleotide may be methylated to form 5-methylcytosine"
tctcctctaggactgtattttgagcctgaaccaatttcttccacgcccaattatttgcaacggggagaattttccagttgtgtttcatgtgaagaaaactcaagctgcctcgaccagatctt

SEQ ID NO: 23364 - DNA, 122 bp, Homo sapiens
  misc_feature (61)..(62): /note="This region represents a CpG dinucleotide"
  misc_feature (61)..(61): /note="Nucleotide may be methylated to form 5-methylcytosine"
tgtatattttcttctttcagaggagtttcatttatgcgtgagtcacctatgagttcactacgagtcattggcaatctaggatcactttaatctaatttcagggtttgagagattatctgcat

SEQ ID NO: 23365 - DNA, 122 bp, Homo sapiens
  misc_feature (61)..(62): /note="This region represents a CpG dinucleotide"
  misc_feature (61)..(61): /note="Nucleotide may be methylated to form 5-methylcytosine"
ctaatacctccttagtcacataacagctgttccctgggtctctcctatagtgctgtgacacgtttgtacccagcaaggaaatcatatccctcagtcatcattactttagttctaatcatttg

SEQ ID NO: 23366 - DNA, 122 bp, Homo sapiens
  misc_feature (61)..(62): /note="This region represents a CpG dinucleotide"
  misc_feature (61)..(61): /note="Nucleotide may be methylated to form 5-methylcytosine"
atcaaaagcagagactctctttaaccagtacagcctcttttccagagaatgccaaggagacgctaacccagtttggtcctgagctggtttccatctccatgattcatgccataaatgtcatc

SEQ ID NO: 23367 - DNA, 122 bp, Homo sapiens
  misc_feature (61)..(62): /note="This region represents a CpG dinucleotide"
  misc_feature (61)..(61): /note="Nucleotide may be methylated to form 5-methylcytosine"
atattgattaaacaaaccgagtaatgaatcatgtgtgctgcaagtgtgggtgcttggtaacgtggaaacatacaagtgagctggattctccaatctgcagggcagaaactggatgaaagaca

SEQ ID NO: 23368 - DNA, 122 bp, Homo sapiens
  misc_feature (61)..(62): /note="This region represents a CpG dinucleotide"
  misc_feature (61)..(61): /note="Nucleotide may be methylated to form 5-methylcytosine"
tccacccatacagccccatgagtcagcatagtgtggcagctcctggcagcaaccccaggacgctcttagaagttagctcattggcgggctaatctgattggacacctcatactctcccagtt

SEQ ID NO: 23369 - DNA, 122 bp, Homo sapiens
  misc_feature (61)..(62): /note="This region represents a CpG dinucleotide"
  misc_feature (61)..(61): /note="Nucleotide may be methylated to form 5-methylcytosine"
tgcccccattggctggagtcagaccacacaatctaagctaactcgatggctattttaaatcgagactggcaggaaggttgtttacagagcaggtaactaggagtgaggaggacttcttccaa

SEQ ID NO: 23370 - DNA, 122 bp, Homo sapiens
  misc_feature (61)..(62): /note="This region represents a CpG dinucleotide"
  misc_feature (61)..(61): /note="Nucleotide may be methylated to form 5-methylcytosine"
tgaccgaaccaactgtggggctggctgggccctgggtggagggaagagagaggagctgatcgggtttcccagctttgaagtaaagaatgagccagaatgaagaagctcctgatcaaaggctg

SEQ ID NO: 23371 - DNA, 122 bp, Homo sapiens
  misc_feature (61)..(62): /note="This region represents a CpG dinucleotide"
  misc_feature (61)..(61): /note="Nucleotide may be methylated to form 5-methylcytosine"
gaaagtcgctgccagtggcagctaatgctcaggatgtatcaggtctctttcctggcaacacgtttatgtccttcggactgttaccatgaatggaatctttatcgaaagacttatatcaaggc

SEQ ID NO: 23372 - DNA, 122 bp, Homo sapiens
  misc_feature (61)..(62): /note="This region represents a CpG dinucleotide"
  misc_feature (61)..(61): /note="Nucleotide may be methylated to form 5-methylcytosine"
gcgtgattgggaggaatcagccccttagagcgtgattgggcaggaatcagccgcttagagcgtgattgggcaggaatcagctccccagagcgtgattgggaggagtcagccccgtagagcgt

SEQ ID NO: 23373 - DNA, 122 bp, Homo sapiens
  misc_feature (61)..(62): /note="This region represents a CpG dinucleotide"
  misc_feature (61)..(61): /note="Nucleotide may be methylated to form 5-methylcytosine"
actgtctaaataaagaggcaatagtcactgatgctctgataattgcaaatgctatgccttcgcttaaacttctcacgtttaatggcttaaaattctttccaaagattaggggagaaaaagcc

SEQ ID NO: 23374 - DNA, 122 bp, Homo sapiens
  misc_feature (61)..(62): /note="This region represents a CpG dinucleotide"
  misc_feature (61)..(61): /note="Nucleotide may be methylated to form 5-methylcytosine"
ttaaacaaacaaacaaaagatctgggtgaagaatataccaggcagaggaaacagctagtacgaagaacatagcctggaaatggatttaatgtggtcaaataatagaaagccagtgtgtctat

SEQ ID NO: 23375 - DNA, 122 bp, Homo sapiens
  misc_feature (61)..(62): /note="This region represents a CpG dinucleotide"
  misc_feature (61)..(61): /note="Nucleotide may be methylated to form 5-methylcytosine"
tattacaataagccctttcttaggtgcagagagaaagccttgctctcacattcagaggctcgtgtttgcatccagccaaagaatgagattgacctcaaggtctgatgatccaggtgggctcc

SEQ ID NO: 23376 - DNA, 122 bp, Homo sapiens
  misc_feature (61)..(62): /note="This region represents a CpG dinucleotide"
  misc_feature (61)..(61): /note="Nucleotide may be methylated to form 5-methylcytosine"
gataaaccctaaaggacaagggtttttgtctcagggccagcaatcagttcaacttctattcgtggcctgttcccttctctgaagacctctggactctgatgaaaaaataaaccctacctttt

SEQ ID NO: 23377 - DNA, 122 bp, Homo sapiens
  misc_feature (61)..(62): /note="This region represents a CpG dinucleotide"
  misc_feature (61)..(61): /note="Nucleotide may be methylated to form 5-methylcytosine"
actggcatagtaggcactaaatgtagttgctgaatgcttaataagaggaatggaagtcttcgtagcttggggtagatactaatgggcagatagaaagttcccatccctgttctctgagaaag

SEQ ID NO: 23378 - DNA, 122 bp, Homo sapiens
  misc_feature (61)..(62): /note="This region represents a CpG dinucleotide"
  misc_feature (61)..(61): /note="Nucleotide may be methylated to form 5-methylcytosine"
gtgactcacccaaagtcacacaccaatatttggtgaccctggatttcctgactccacatccgctgctctctcaacaccactaggtaaggcattaactaaccattaagaattcctctctaaga

SEQ ID NO: 23379 - DNA, 122 bp, Homo sapiens
  misc_feature (61)..(62): /note="This region represents a CpG dinucleotide"
  misc_feature (61)..(61): /note="Nucleotide may be methylated to form 5-methylcytosine"
tctctttctgtcagccgccctccttacataacccaaatgggttgtttgcaaagctagtgtcgctgaggtgttctgtgtacaacagaaaagaatctagggaggattcctatgtgtcactaaag

SEQ ID NO: 23380 - DNA, 122 bp, Homo sapiens
  misc_feature (61)..(62): /note="This region represents a CpG dinucleotide"
  misc_feature (61)..(61): /note="Nucleotide may be methylated to form 5-methylcytosine"
cccagctatatgtggtgaaaaggaattgcttaactatgtaaactggcgtgggagagttggcgctatgctctgtttgtacagctgctcctggggctccggctccgctatctttcacggcccag

SEQ ID NO: 23381 - DNA, 122 bp, Homo sapiens
  misc_feature (61)..(62): /note="This region represents a CpG dinucleotide"
  misc_feature (61)..(61): /note="Nucleotide may be methylated to form 5-methylcytosine"
gagaggctgggtgtggaatattctggctgtgctggctgtggacttagtcctgtgtcttcccgcatccagtgtagtctctggagaaagaatgcctgagctttaccagcaccacccaggaagcc

SEQ ID NO: 23382 - DNA, 122 bp, Homo sapiens
  misc_feature (61)..(62): /note="This region represents a CpG dinucleotide"
  misc_feature (61)..(61): /note="Nucleotide may be methylated to form 5-methylcytosine"
gggtggggtcataggagccatccttcagctttgcctggggtctctggtggagggcagttccgtcaacaaaagccagggtgggatcaggccaacttggtgtgggttggaggactcaggccttg

SEQ ID NO: 23383 - DNA, 122 bp, Homo sapiens
  misc_feature (61)..(62): /note="This region represents a CpG dinucleotide"
  misc_feature (61)..(61): /note="Nucleotide may be methylated to form 5-methylcytosine"
gtaaaaaattacctgtggtttcgcatttgttttctgtctttttctttcttgcttgatcttcgataatactgggaaatgtaaccaatgtgattgggcttgttaatttggtgccttgcttgttt

SEQ ID NO: 23384 - DNA, 122 bp, Homo sapiens
  misc_feature (61)..(62): /note="This region represents a CpG dinucleotide"
  misc_feature (61)..(61): /note="Nucleotide may be methylated to form 5-methylcytosine"
tggttgctgtgatcccatttctgtctctaaaatggttaattctctggcccaggctggccccgcccacaagctgggatggccccacccacaagctgggatggccctgcccacaggaggccgtc

SEQ ID NO: 23385 - DNA, 122 bp, Homo sapiens
  misc_feature (61)..(62): /note="This region represents a CpG dinucleotide"
  misc_feature (61)..(61): /note="Nucleotide may be methylated to form 5-methylcytosine"
gctacgatgacttggcacctgaggcacattctgttttctagaaaccttcaaagtctggcacgtctcaatgtcagatgtcatcctgtgcccatgagcctactctgggggtctggggggcagca

SEQ ID NO: 23386 - DNA, 122 bp, Homo sapiens
  misc_feature (61)..(62): /note="This region represents a CpG dinucleotide"
  misc_feature (61)..(61): /note="Nucleotide may be methylated to form 5-methylcytosine"
gccttggtgtccttagccaggaagattttccttttatcatgcagctctgtccacacccttcgttcagtttctccctgcaactcagctcagctgtcatgctgatgtgaaacaggagctcataa

SEQ ID NO: 23387 - DNA, 122 bp, Homo sapiens
  misc_feature (61)..(62): /note="This region represents a CpG dinucleotide"
  misc_feature (61)..(61): /note="Nucleotide may be methylated to form 5-methylcytosine"
ccacgtgttctgtgccagtgcggccgcacctgtgattaaggcctacagcccggagctgatcgtccacccagttctgtgagtcgctctgcgccggcttctcgtaggttctctttccctcctgc

SEQ ID NO: 23388 - DNA, 122 bp, Homo sapiens
  misc_feature (61)..(62): /note="This region represents a CpG dinucleotide"
  misc_feature (61)..(61): /note="Nucleotide may be methylated to form 5-methylcytosine"
cttgattgtgtttcgccactgcaagtccagggtttgtctgttgtggcagctggcattaaacgccctggcacactcagacctcaaagcccaagcctagaagacagtgaagcaacctggtagat

SEQ ID NO: 23389 - DNA, 122 bp, Homo sapiens
  misc_feature (61)..(62): /note="This region represents a CpG dinucleotide"
  misc_feature (61)..(61): /note="Nucleotide may be methylated to form 5-methylcytosine"
agccctgctgctagtccaggaagtaacttcgtgtgtctagaaacctacaccttcctgaagcgcgttagtcccatctgccaggaaatcagccttccaaaatgtacaaaccttttttacaaaat

SEQ ID NO: 23390 - DNA, 122 bp, Homo sapiens
  misc_feature (61)..(62): /note="This region represents a CpG dinucleotide"
  misc_feature (61)..(61): /note="Nucleotide may be methylated to form 5-methylcytosine"
tacattctcgaggggggactgggatgcatttatgtttgcattcttgagagagaactgggacgcatgcatgtttacattctcgagggaggaactgggacatgtgcatgtttgcatttttgagg

SEQ ID NO: 23391 - DNA, 122 bp, Homo sapiens
  misc_feature (61)..(62): /note="This region represents a CpG dinucleotide"
  misc_feature (61)..(61): /note="Nucleotide may be methylated to form 5-methylcytosine"
gcagcatagtttccactggtagtaattccattcagctactcagacaacacgctcctcggccgaatgggacgacccttcttaagatggaaaatgttacaaaagaaaaaggatgaaggtctgtg

SEQ ID NO: 23392 - DNA, 122 bp, Homo sapiens
  misc_feature (61)..(62): /note="This region represents a CpG dinucleotide"
  misc_feature (61)..(61): /note="Nucleotide may be methylated to form 5-methylcytosine"
ataccatacatggaatcagaaaaaaccccaaacaacttattttgaagtgttcttaagaaacgatagaagaaaatgggagtgttctagctgtcaaagagagaagatatgaggagaatcatagc

SEQ ID NO: 23393 - DNA, 122 bp, Homo sapiens
  misc_feature (61)..(62): /note="This region represents a CpG dinucleotide"
  misc_feature (61)..(61): /note="Nucleotide may be methylated to form 5-methylcytosine"
tttcttcacttggcttaaaggccacagcattctggtttgcctcctctgacacctcactgacgccgctcacactccttcactagcttctggttacttatctggcttcttaatgccagtgtgtc

SEQ ID NO: 23394 - DNA, 122 bp, Homo sapiens
  misc_feature (61)..(62): /note="This region represents a CpG dinucleotide"
  misc_feature (61)..(61): /note="Nucleotide may be methylated to form 5-methylcytosine"
ctgcctttcctgcttctacagagagaggccagtcaccacctttctatttcagtcacactacgtacggttctatgggaactgtcattttcctttactgcggtttccaaggccctaaaataacc

SEQ ID NO: 23395 - DNA, 122 bp, Homo sapiens
  misc_feature (61)..(62): /note="This region represents a CpG dinucleotide"
  misc_feature (61)..(61): /note="Nucleotide may be methylated to form 5-methylcytosine"
gcggggtgacatccagcctctttccctctccgcccccgacaggatgtcccaggctggacgcggcagaggaggtcccccacaagtgaaggtccagccctgctcctccagggttggcccatgtg

SEQ ID NO: 23396 - DNA, 122 bp, Homo sapiens
  misc_feature (61)..(62): /note="This region represents a CpG dinucleotide"
  misc_feature (61)..(61): /note="Nucleotide may be methylated to form 5-methylcytosine"
aggaacagaaaatccccacccccttccattctggagatttcgtatctaaagcctgagaggcgaggatgaagtataaaaatactatttacaaagggaaggaggtatctgttgcttaaccgtag

SEQ ID NO: 23397 - DNA, 122 bp, Homo sapiens
  misc_feature (61)..(62): /note="This region represents a CpG dinucleotide"
  misc_feature (61)..(61): /note="Nucleotide may be methylated to form 5-methylcytosine"
gtatgaatcgaagccgtgtgagcaaaatgccagctccaccacaaaatagttatataatctcgtgcaagatatttaactcctaagggctttggtctctctttacgatgggagtagtataggta

SEQ ID NO: 23398 - DNA, 122 bp, Homo sapiens
  misc_feature (61)..(62): /note="This region represents a CpG dinucleotide"
  misc_feature (61)..(61): /note="Nucleotide may be methylated to form 5-methylcytosine"
ctttcctgttcattttatatgagtatttcaaaattgttagttaccacgaatgactaagtgcggggatagggtatttttgctggaattgttgcactgcacagcctgtaacaacacagggggtc

SEQ ID NO: 23399 - DNA, 122 bp, Homo sapiens
  misc_feature (61)..(62): /note="This region represents a CpG dinucleotide"
  misc_feature (61)..(61): /note="Nucleotide may be methylated to form 5-methylcytosine"
cctcttacccccacaagcccatgtgcagattcctcctgacagcttctggattctgatacacgaaagaacttatgaagatgacttgaaggctggagctggcgcaacatgaaactaatcaacca

SEQ ID NO: 23400 - DNA, 122 bp, Homo sapiens
  misc_feature (61)..(62): /note="This region represents a CpG dinucleotide"
  misc_feature (61)..(61): /note="Nucleotide may be methylated to form 5-methylcytosine"
ggcactagcaatcactaggcattgttccaagcacacggataaactgagaatcctcgtggtcgccccgggggtgggactgccattgtccagagagacctgcttttgcctgtggtgccacacgg

SEQ ID NO: 23401 - DNA, 122 bp, Homo sapiens
  misc_feature (61)..(62): /note="This region represents a CpG dinucleotide"
  misc_feature (61)..(61): /note="Nucleotide may be methylated to form 5-methylcytosine"
atctgtaaaatagggattactttatgatggaatccccacaacaacccccggaggtaggtacgatataagtgccttgttccaggtcatacagctaggtagtgtcagaacacagattgaaattc

SEQ ID NO: 23402 - DNA, 122 bp, Homo sapiens
  misc_feature (61)..(62): /note="This region represents a CpG dinucleotide"
  misc_feature (61)..(61): /note="Nucleotide may be methylated to form 5-methylcytosine"
ccctctggcccctgaggatctggggccagaaagacactggcttagcatgggaggagtccccggcctgtaccagcctgacaaggggctgcagtggcccccgggtctcaaattaaagccagggt

SEQ ID NO: 23403 - DNA, 122 bp, Homo sapiens
  misc_feature (61)..(62): /note="This region represents a CpG dinucleotide"
  misc_feature (61)..(61): /note="Nucleotide may be methylated to form 5-methylcytosine"
gggattttgtctttaattttatttccccaacaggggttagtttttccaaagtctcttcaccgtgtcccaccgcactgtcactccccccgtgtaacccatgccactgtgccctaaggatcagt

SEQ ID NO: 23404 - DNA, 122 bp, Homo sapiens
  misc_feature (61)..(62): /note="This region represents a CpG dinucleotide"
  misc_feature (61)..(61): /note="Nucleotide may be methylated to form 5-methylcytosine"
catcccctgtccccagctccatgataggatctcaggcaggagtgcagtgggagcctcatccgcttcctcagttgggctttgccgccgcaggttagcattcaatgacagcatttcttggatct

SEQ ID NO: 23405 - DNA, 122 bp, Homo sapiens
  misc_feature (61)..(62): /note="This region represents a CpG dinucleotide"
  misc_feature (61)..(61): /note="Nucleotide may be methylated to form 5-methylcytosine"
tgttccagcagtgaaatgggatgctctgggctcaggtacaaacaagggtgtttagaaacgcggatctccagggctcatgtgcccatttcagagtgcagacacgcagctcacccacagggaag

SEQ ID NO: 23406 - DNA, 122 bp, Homo sapiens
  misc_feature (61)..(62): /note="This region represents a CpG dinucleotide"
  misc_feature (61)..(61): /note="Nucleotide may be methylated to form 5-methylcytosine"
ttacctctcctcagcggcagcagggcagagtgctgaacccaggaccccacagatcctccccgctcctgtctcccggtgacaagggtcctggaacggggcgtctctgactccctgctccagga

SEQ ID NO: 23407 - DNA, 122 bp, Homo sapiens
  misc_feature (61)..(62): /note="This region represents a CpG dinucleotide"
  misc_feature (61)..(61): /note="Nucleotide may be methylated to form 5-methylcytosine"
tttttcttctgttgcacaaacatagtgtttcccagcttctcttgcagttttgcatgaccacgtaactgagttctggacaatgcacatgtaagaggaaatgacatggcacttcagggccatgg

SEQ ID NO: 23408 - DNA, 122 bp, Homo sapiens
  misc_feature (61)..(62): /note="This region represents a CpG dinucleotide"
  misc_feature (61)..(61): /note="Nucleotide may be methylated to form 5-methylcytosine"
gctcctgttgcaagtttctagaactcacaggtggagaatgaaatttcagtttccaaaccacgttcgtgctcctccaggcatgactgtgagcagtattctgatttgccatgaggcctggggat

SEQ ID NO: 23409 - DNA, 122 bp, Homo sapiens
  misc_feature (61)..(62): /note="This region represents a CpG dinucleotide"
  misc_feature (61)..(61): /note="Nucleotide may be methylated to form 5-methylcytosine"
caccttgggaaaccaagcccaaggtctaggccccccagcttccagcgaggggtgggagagcgaaaatccccactttacagatgaatgaaatgagactcagagctgaagggacctgtctgggg

SEQ ID NO: 23410 - DNA, 122 bp, Homo sapiens
  misc_feature (61)..(62): /note="This region represents a CpG dinucleotide"
  misc_feature (61)..(61): /note="Nucleotide may be methylated to form 5-methylcytosine"
agtggacgtgagatttcccactggtgacgatgcagctgctgtcacgagggttgaagccaacggccaggactgagtcatttgtactctgaagggaagacactagattcagccaccccaagccc

SEQ ID NO: 23411 - DNA, 122 bp, Homo sapiens
  misc_feature (61)..(62): /note="This region represents a CpG dinucleotide"
  misc_feature (61)..(61): /note="Nucleotide may be methylated to form 5-methylcytosine"
gctaggctagacgattgggtttcctgtcacattttagtgtctgccgtgctgtgaagactgcgatggcagagatacacattgcggaaggaagtcaagcttgttttcagcatcagttgatttat

SEQ ID NO: 23412 - DNA, 122 bp, Homo sapiens
  misc_feature (61)..(62): /note="This region represents a CpG dinucleotide"
  misc_feature (61)..(61): /note="Nucleotide may be methylated to form 5-methylcytosine"
atgtgaaccaccacgcccagacttaaaatgcttttacttcaaaatatgacctgattttcccgttgtttttttttctctaattctttctagcttttatctctgttaatctctgaatgtttcac

SEQ ID NO: 23413 - DNA, 122 bp, Homo sapiens
  misc_feature (61)..(62): /note="This region represents a CpG dinucleotide"
  misc_feature (61)..(61): /note="Nucleotide may be methylated to form 5-methylcytosine"
tcagttggcatttgtcacgtatcttcatgccagtgtctttgtatctgaattctaaaactgcgtgaacacaaaggttatgtcttttgtcttattcatctgggttgtcactggaacagagtcag

SEQ ID NO: 23414 - DNA, 122 bp, Homo sapiens
  misc_feature (61)..(62): /note="This region represents a CpG dinucleotide"
  misc_feature (61)..(61): /note="Nucleotide may be methylated to form 5-methylcytosine"
tgtttgaggaagtttgcattctaagatatttcttcccaggctggtaccctagaatgtcatcgttccataggctgcctttgtcatcatttatgaaatttgtcaactcttggtccagaggtctg

SEQ ID NO: 23415 - DNA, 122 bp, Homo sapiens
  misc_feature (61)..(62): /note="This region represents a CpG dinucleotide"
  misc_feature (61)..(61): /note="Nucleotide may be methylated to form 5-methylcytosine"
cagtcccaccattgctgagtcagcagtacctaaggcctgtgactgttaatacctccagtgcgtgggtgacatctctacagtcaattaatgagccagtcttcataagatattacattagccag

SEQ ID NO: 23416 - DNA, 122 bp, Homo sapiens
  misc_feature (61)..(62): /note="This region represents a CpG dinucleotide"
  misc_feature (61)..(61): /note="Nucleotide may be methylated to form 5-methylcytosine"
agaaggtcagggagagactctttttctgaggcctaaagcttcccatcgttagaacaagaccgtaacaagggctgtgggagtcatgagccaggagccgtggacagagcccaatgtatacgtat

SEQ ID NO: 23417 - DNA, 122 bp, Homo sapiens
  misc_feature (61)..(62): /note="This region represents a CpG dinucleotide"
  misc_feature (61)..(61): /note="Nucleotide may be methylated to form 5-methylcytosine"
gctccccttcctttctctctctcccttcccggctcctagactgggtctaggcaggagcttcgccatgatgtcaggagggaaggagatgcctctgggcctcgtaccacagcctcagctctctc

SEQ ID NO: 23418 - DNA, 122 bp, Homo sapiens
  misc_feature (61)..(62): /note="This region represents a CpG dinucleotide"
  misc_feature (61)..(61): /note="Nucleotide may be methylated to form 5-methylcytosine"
catctgacattcagtggggacttaccatacctgtaaagcactaactgctcttggagttaccgtgtctttgatgcaacaagggctgaatcaggacttgattaacttcaccaacttgctgcctg

SEQ ID NO: 23419 - DNA, 122 bp, Homo sapiens
  misc_feature (61)..(62): /note="This region represents a CpG dinucleotide"
  misc_feature (61)..(61): /note="Nucleotide may be methylated to form 5-methylcytosine"
agacgccagaacattctcattgcgttttcactgctttggttaacatcttggtctcctgtccgcactctaaagaaccatttgaggactcaggggagtcatgtcctgggagtgactatgggtcc

SEQ ID NO: 23420 - DNA, 122 bp, Homo sapiens
  misc_feature (61)..(62): /note="This region represents a CpG dinucleotide"
  misc_feature (61)..(61): /note="Nucleotide may be methylated to form 5-methylcytosine"
gattgttactgaaatactaacatgctctttatgggttagtaactcccttcacctccccaacggctcctacccgctgggaccttcacctccccatgatccaacagtgaaagatttaataccca

SEQ ID NO: 23421 - DNA, 122 bp, Homo sapiens
  misc_feature (61)..(62): /note="This region represents a CpG dinucleotide"
  misc_feature (61)..(61): /note="Nucleotide may be methylated to form 5-methylcytosine"
agagtcagagatatgtatgcaccctagccctggctctgctacagtgtgtgatcttgggcacgttttttcttttcttttaaagacaactttattaagacataatttctatacaatatattcac

SEQ ID NO: 23422 - DNA, 122 bp, Homo sapiens
  misc_feature (61)..(62): /note="This region represents a CpG dinucleotide"
  misc_feature (61)..(61): /note="Nucleotide may be methylated to form 5-methylcytosine"
tcacgccactgcactccagcctggaagacagagctagacctgggcgacagagggagactccgtttcaaaaaaaaaggcaatcagctttatcaggaaatcctaggggccagaagcggtggctc

SEQ ID NO: 23423 - DNA, 122 bp, Homo sapiens
  misc_feature (61)..(62): /note="This region represents a CpG dinucleotide"
  misc_feature (61)..(61): /note="Nucleotide may be methylated to form 5-methylcytosine"
atccttaccacaaccctttgggatagatactattattattccttaagatagtaatatcctcgagagattaacttctctaaggtcacttaaataatgagaagtgcctggattcaaagccagca

SEQ ID NO: 23424 - DNA, 122 bp, Homo sapiens
  misc_feature (61)..(62): /note="This region represents a CpG dinucleotide"
  misc_feature (61)..(61): /note="Nucleotide may be methylated to form 5-methylcytosine"
tttttttgggtggagcaacaactgccatgtccacagtaatgatgaatgcttctcgagccacgtcgctgccaaggtcttcacaggcatttctaaaaatgaagaatccttgactgcagacacgc

SEQ ID NO: 23425 - DNA, 122 bp, Homo sapiens
  misc_feature (61)..(62): /note="This region represents a CpG dinucleotide"
  misc_feature (61)..(61): /note="Nucleotide may be methylated to form 5-methylcytosine"
aaattgctcaagtccctcactgaatcagagctccacatgtgtgaacacatggtagaatggcgctgtggttaagaaatccgtactaacttaacaaaggacatcatactaccttctcataggtg

SEQ ID NO: 23426 - DNA, 122 bp, Homo sapiens
  misc_feature (61)..(62): /note="This region represents a CpG dinucleotide"
  misc_feature (61)..(61): /note="Nucleotide may be methylated to form 5-methylcytosine"
tttagtttcatgttcagaaaatggaagattaaagggcttactcagggtgttttgtcaaagcgacattttggaagaacccaacggaaggatgagcatgtagcaactgcccagtcaagacaagt

SEQ ID NO: 23427 - DNA, 122 bp, Homo sapiens
  misc_feature (61)..(62): /note="This region represents a CpG dinucleotide"
  misc_feature (61)..(61): /note="Nucleotide may be methylated to form 5-methylcytosine"
tgttaagcactccccactccacccgtccaccccagccacgctccctgggacctagaaacacggatctgtgtgtaacagcctgacatagactttccgtggggcctatgtgggcctggacatag

SEQ ID NO: 23428 - DNA, 122 bp, Homo sapiens
  misc_feature (61)..(62): /note="This region represents a CpG dinucleotide"
  misc_feature (61)..(61): /note="Nucleotide may be methylated to form 5-methylcytosine"
caagaatctttcagctgtttaactgcgtttacctgccttcctcctttgtgctattgttgtcgtatattttactgctacatgtgttataaactccacaagtcaatatatgtatatgttcattt

SEQ ID NO: 23429 - DNA, 122 bp, Homo sapiens
  misc_feature (61)..(62): /note="This region represents a CpG dinucleotide"
  misc_feature (61)..(61): /note="Nucleotide may be methylated to form 5-methylcytosine"
ggctgtactcccaggtcagatgctgcgctgaagatatctgctccagagttgacatgcgtccgtgtccgctgggccacgggcctctcaggtggtcacggtattctgactggttggagggctgc

SEQ ID NO: 23430 - DNA, 122 bp, Homo sapiens
  misc_feature (61)..(62): /note="This region represents a CpG dinucleotide"
  misc_feature (61)..(61): /note="Nucleotide may be methylated to form 5-methylcytosine"
ggttctgtagcacagcgcgcttgagtgactaaaaacctgggttgggtgcaggtccgattacgcagcagaggttgatgtcatgggcagatttggaagacttgaggggttctttgtaagccccg

SEQ ID NO: 23431 - DNA, 122 bp, Homo sapiens
  misc_feature (61)..(62): /note="This region represents a CpG dinucleotide"
  misc_feature (61)..(61): /note="Nucleotide may be methylated to form 5-methylcytosine"
cagagataaatccctcaagtgcaggcagggagtggcaacctagaagtacttgcttttaaacgtatagttcaaagccttctttcttcagatactcagcatagccctagccataggtcatttct

SEQ ID NO: 23432 - DNA, 122 bp, Homo sapiens
  misc_feature (61)..(62): /note="This region represents a CpG dinucleotide"
  misc_feature (61)..(61): /note="Nucleotide may be methylated to form 5-methylcytosine"
cgccaaggcctcggggcagggctgctcctttcacctccaggtcagagcagggctgagagccggagggtggagggggtggcacttcgagtcttatctccttgtctgtaaaatgggcatactca

SEQ ID NO: 23433 - DNA, 122 bp, Homo sapiens
  misc_feature (61)..(62): /note="This region represents a CpG dinucleotide"
  misc_feature (61)..(61): /note="Nucleotide may be methylated to form 5-methylcytosine"
gcccctcccgcatcttcctcaaggcattgttttgcacacaaacatgtaagaatcaccgggcgtggtggctcgcacctgtaatcccagcactttgggagtccgaggagagaggatcacgaggt

SEQ ID NO: 23434 - DNA, 122 bp, Homo sapiens
  misc_feature (61)..(62): /note="This region represents a CpG dinucleotide"
  misc_feature (61)..(61): /note="Nucleotide may be methylated to form 5-methylcytosine"
ttgcatctcacatgggtgtctctgagaaggcgcagcctgcctgacttcagtccctagttgcgcagccgtgtctgcctgccgggcttgctgagcgcctgcgagttgaagttgagtgtgccttc

SEQ ID NO: 23435 - DNA, 122 bp, Homo sapiens
  misc_feature (61)..(62): /note="This region represents a CpG dinucleotide"
  misc_feature (61)..(61): /note="Nucleotide may be methylated to form 5-methylcytosine"
cgacccataataaccagaatgttattccacggttgcggtttgtttatttcatcagagttgcgtcttcacctatttccctccctactcttaattgtttatccaagttagtgttttccattctt

SEQ ID NO: 23436 - DNA, 122 bp, Homo sapiens
  misc_feature (61)..(62): /note="This region represents a CpG dinucleotide"
  misc_feature (61)..(61): /note="Nucleotide may be methylated to form 5-methylcytosine"
acaaaatacttggtcacatgtgaaactgtgtacaggttgtgggtaagaaaaagggagcaacggtgggttggagaaagcgtttacagaacgcttctgtagagtttcagtttcagcctttactt

SEQ ID NO: 23437 - DNA, 122 bp, Homo sapiens
  misc_feature (61)..(62): /note="This region represents a CpG dinucleotide"
  misc_feature (61)..(61): /note="Nucleotide may be methylated to form 5-methylcytosine"
ataaaccacagtttttcctttgaacagtcaagcggcaggcagctgttatcattcatctcgcgtgaactgaatccaatctcatctaaccatgctgaaccacaaaccacagtatggccttgtct

SEQ ID NO: 23438 - DNA, 122 bp, Homo sapiens
  misc_feature (61)..(62): /note="This region represents a CpG dinucleotide"
  misc_feature (61)..(61): /note="Nucleotide may be methylated to form 5-methylcytosine"
cctcggcctcccaaagtgctgggattacaggcgtgagccactgtgcctggcctgtaataccggttaacattggataagtatttaagaaaaaatctaccttgtggcaatttatgtataaataa

SEQ ID NO: 23439 - DNA, 122 bp, Homo sapiens
  misc_feature (61)..(62): /note="This region represents a CpG dinucleotide"
  misc_feature (61)..(61): /note="Nucleotide may be methylated to form 5-methylcytosine"
aaatcaaaataacccaatccgagtctaaactcaagtcctttcttgcaaagctcagtagtgcgcgggggctgcggctctacgcctggctgtggtgcgaaacaagatgaaattttttcaaaaag

SEQ ID NO: 23440 - DNA, 122 bp, Homo sapiens
  misc_feature (61)..(62): /note="This region represents a CpG dinucleotide"
  misc_feature (61)..(61): /note="Nucleotide may be methylated to form 5-methylcytosine"
caaattggaccagaagacaacttcattcatgctttttaggaagtgagacaatttctagaacgtggaaagcaaagcaaattgagtcatttaatcccaggatccagaagtttcacaggtgaagg

SEQ ID NO: 23441 - DNA, 122 bp, Homo sapiens
  misc_feature (61)..(62): /note="This region represents a CpG dinucleotide"
  misc_feature (61)..(61): /note="Nucleotide may be methylated to form 5-methylcytosine"
agaggccagcagagctttctaaatctcgggtacagtgactgaagcactgggctgggagtccgagtgcctgagctgtggtctggttctgctgcctactaagctgaatgacccaaaagcctctc

SEQ ID NO: 23442 - DNA, 122 bp, Homo sapiens
  misc_feature (61)..(62): /note="This region represents a CpG dinucleotide"
  misc_feature (61)..(61): /note="Nucleotide may be methylated to form 5-methylcytosine"
ctgtgcacctcttcccagggccgcgttcggtgtgtcatgctggtagcttgcgatcagccacggaaggaatatttacactaaggaaattggccaatgcaacaatcagggctttactattttat

SEQ ID NO: 23443 - DNA, 122 bp, Homo sapiens
  misc_feature (61)..(62): /note="This region represents a CpG dinucleotide"
  misc_feature (61)..(61): /note="Nucleotide may be methylated to form 5-methylcytosine"
acaacaaaggaactttcttttatcctagactgatgagtatttgtggctgattatctcagccggttagaggttaaagttcagtgttaatgaggtcaaagtcataaatgtgaactttaagtgga

SEQ ID NO: 23444 - DNA, 122 bp, Homo sapiens
  misc_feature (61)..(62): /note="This region represents a CpG dinucleotide"
  misc_feature (61)..(61): /note="Nucleotide may be methylated to form 5-methylcytosine"
tctgtgatgtgagagtcagaaatgagtaatttcagaagtatcttgccagctctagcccttcggtattcaatactgcctctcaattcacactttactgagcagggagttaaagaagacccagg

SEQ ID NO: 23445 - DNA, 122 bp, Homo sapiens
  misc_feature (61)..(62): /note="This region represents a CpG dinucleotide"
  misc_feature (61)..(61): /note="Nucleotide may be methylated to form 5-methylcytosine"
tttaattcaatggcacatagtaggtgttcaataaacattaatttcacacagatacctcaacgccctggggagtagagtagaaagaaaactaaatctagaagcaaaaacaatttcaaatccca

SEQ ID NO: 23446 - DNA, 122 bp, Homo sapiens
  misc_feature (61)..(62): /note="This region represents a CpG dinucleotide"
  misc_feature (61)..(61): /note="Nucleotide may be methylated to form 5-methylcytosine"
gccattatagctcaaaagcaggcctagacgagacataaataaataggcagagctgtgttgcgcaaactttatttaccaaaacaagttgggtccagatttggcctgtgggctatagtttgtgg

SEQ ID NO: 23447 - DNA, 122 bp, Homo sapiens
  misc_feature (61)..(62): /note="This region represents a CpG dinucleotide"
  misc_feature (61)..(61): /note="Nucleotide may be methylated to form 5-methylcytosine"
aaaagacagtgagcaaagtcaaaccatgactcaccatctgttgaaacctgctgggaacaacgggtcctcatatgcctccgtggagctcctggccttgaagactgagcccagttgacctcatc

SEQ ID NO: 23448 - DNA, 122 bp, Homo sapiens
  misc_feature (61)..(62): /note="This region represents a CpG dinucleotide"
  misc_feature (61)..(61): /note="Nucleotide may be methylated to form 5-methylcytosine"
ctaagaaagcttagtgtagtatttctaagatttaaaatcttaatgttactcttagaattacgtgtaaaaatgtataccaaagtagcttaaactgatcaaggagacaaggctgaaaacagagc

SEQ ID NO: 23449 - DNA, 122 bp, Homo sapiens
  misc_feature (61)..(62): /note="This region represents a CpG dinucleotide"
  misc_feature (61)..(61): /note="Nucleotide may be methylated to form 5-methylcytosine"
acctcctgtcatcgtctctttcatgggcagcccagtaagccacacctcctgagactcatgcgcttgtacagtcttctcctcttgaagctgggctggccctgtgactgttttgagcaatgcat

SEQ ID NO: 23450 - DNA, 122 bp, Homo sapiens
  misc_feature (61)..(62): /note="This region represents a CpG dinucleotide"
  misc_feature (61)..(61): /note="Nucleotide may be methylated to form 5-methylcytosine"
cgagggccggcccgaggccttccaacttgaccgccctggaggctctacgaccggtctccacggccccccgaggcctcaccgatgcgtccaggcaagcccctagctcctacttcttggccttg

SEQ ID NO: 23451 - DNA, 122 bp, Homo sapiens
  misc_feature (61)..(62): /note="This region represents a CpG dinucleotide"
  misc_feature (61)..(61): /note="Nucleotide may be methylated to form 5-methylcytosine"
gggtttagctgtcttgagggctggtgcctgttctgttcattcagcttccctctgatgatgcgtggcagagtgtgggaggacacgtgcctagcatttttacaatatgccttttcttttagccc

SEQ ID NO: 23452 - DNA, 122 bp, Homo sapiens
  misc_feature (61)..(62): /note="This region represents a CpG dinucleotide"
  misc_feature (61)..(61): /note="Nucleotide may be methylated to form 5-methylcytosine"
gtggctgtttcccttaatgttttgtttgctggtgagtttctgctgtcagtttcctcattccgtctatcacctgattgagacttggagcatgtatactgatagctgtaagaatttttttccag

SEQ ID NO: 23453 - DNA, 122 bp, Homo sapiens
  misc_feature (61)..(62): /note="This region represents a CpG dinucleotide"
  misc_feature (61)..(61): /note="Nucleotide may be methylated to form 5-methylcytosine"
gtggcgcctgcctggaggacgaggccagcgccctgcgcctggatgaggacagcgagcacccgcccatgattcttcggactgactgaacttgacctgtgacctctgacccggggagcagagaa

SEQ ID NO: 23454 - DNA, 122 bp, Homo sapiens
  misc_feature (61)..(62): /note="This region represents a CpG dinucleotide"
  misc_feature (61)..(61): /note="Nucleotide may be methylated to form 5-methylcytosine"
aaaatgtgatgtagcatagtgatgcttcctcccctggccaatattcagggaaccacccagcgcacaggaggaaagcctgggtgaaaatcacagctccgcctcctgcagccctgtgacctcag

SEQ ID NO: 23455 - DNA, 122 bp, Homo sapiens
  misc_feature (61)..(62): /note="This region represents a CpG dinucleotide"
  misc_feature (61)..(61): /note="Nucleotide may be methylated to form 5-methylcytosine"
tttacatgtactcatgcaaaagaagggtgagataatggacttgccccagtgtggaactggcggaacagtgtgtgtgattcttattgtgaaacattcttaaatttgaggctcaaataataaat

SEQ ID NO: 23456 - DNA, 122 bp, Homo sapiens
  misc_feature (61)..(62): /note="This region represents a CpG dinucleotide"
  misc_feature (61)..(61): /note="Nucleotide may be methylated to form 5-methylcytosine"
ccgtgctaataatctaacctatctcagattcttggctttgacagtagtccgtaggctaaccgcagacaacggtgcttctacacaaaacacgaattgggaggaaataaactcctccaaaacat

SEQ ID NO: 23457 - DNA, 122 bp, Homo sapiens
  misc_feature (61)..(62): /note="This region represents a CpG dinucleotide"
  misc_feature (61)..(61): /note="Nucleotide may be methylated to form 5-methylcytosine"
agaggctccagttaccttttgttaagataatggcgtctttactggcagaggcgtgggttccggggccctgggtgtgggattgtgagcgctgttcaaggggtggacggggacttagaatgaga

SEQ ID NO: 23458 - DNA, 122 bp, Homo sapiens
  misc_feature (61)..(62): /note="This region represents a CpG dinucleotide"
  misc_feature (61)..(61): /note="Nucleotide may be methylated to form 5-methylcytosine"
cattccatctatctagagcagtagctctcaggcctgtccataagttaaaatcacctggaccgctgattaagcaatgactctctctaggccctacccccagagagattctgatgcagtcggtg

SEQ ID NO: 23459 - DNA, 122 bp, Homo sapiens
  misc_feature (61)..(62): /note="This region represents a CpG dinucleotide"
  misc_feature (61)..(61): /note="Nucleotide may be methylated to form 5-methylcytosine"
ggaggactgtgggaaacagctgtttggttcataagaaatgaaccaagtgaattcaaagtacgcaggcattcaactgccgggttcccagagtcagacctgtccactaagcccaggattgataa

SEQ ID NO: 23460 - DNA, 122 bp, Homo sapiens
  misc_feature (61)..(62): /note="This region represents a CpG dinucleotide"
  misc_feature (61)..(61): /note="Nucleotide may be methylated to form 5-methylcytosine"
atgcttcatttcatgcggtgattgctgccaatacccttggctctcacctagtgaagaatgcgctttactaaactatgggctggcccctaatgggagagtcactgatataaattgcccttttt

SEQ ID NO: 23461 - DNA, 122 bp, Homo sapiens
  misc_feature (61)..(62): /note="This region represents a CpG dinucleotide"
  misc_feature (61)..(61): /note="Nucleotide may be methylated to form 5-methylcytosine"
gcaggcatctgttctccccagatggtcactggtatgttttatttacctaaagccttcacacgtaaaataccttagtgactgttgtcgtgtatctaagacctactgtaatgcttagctcatcc

SEQ ID NO: 23462 - DNA, 122 bp, Homo sapiens
  misc_feature (61)..(62): /note="This region represents a CpG dinucleotide"
  misc_feature (61)..(61): /note="Nucleotide may be methylated to form 5-methylcytosine"
catggctactgccaaggaaagggaggctggaaatgccatgtaattgtgagttcagcagaacgaaaagcaggtttggtgactaactcgccaggctctgccacaaggtcttcctctgggattag

SEQ ID NO: 23463 - DNA, 122 bp, Homo sapiens
  misc_feature (61)..(62): /note="This region represents a CpG dinucleotide"
  misc_feature (61)..(61): /note="Nucleotide may be methylated to form 5-methylcytosine"
gttcaactttcttttcttggcagctgatttaccagtgacctctcccaaagtgaagtgacacgtaaacaagacacaaaaagttgactcccgtttaagaaatatttcaaggctagtgatgggta

SEQ ID NO: 23464 - DNA, 122 bp, Homo sapiens
  misc_feature (61)..(62): /note="This region represents a CpG dinucleotide"
  misc_feature (61)..(61): /note="Nucleotide may be methylated to form 5-methylcytosine"
gtagaagttgtcgagtcttagacaggcttggagcgtacttgggcaggtgtgtggggtggccggtgtacctcaagccattggttcccaaatcttagcatacagcagaattgcctggagcattt

SEQ ID NO: 23465 - DNA, 122 bp, Homo sapiens
  misc_feature (61)..(62): /note="This region represents a CpG dinucleotide"
  misc_feature (61)..(61): /note="Nucleotide may be methylated to form 5-methylcytosine"
agtttagtcttttgtccttatgttctttcaaaatggcattttcttgactctcagtggtttcgtcccatggcctgtttacctttagttccttgattctatctgtctcaccttccttgtatttt

SEQ ID NO: 23466 - DNA, 122 bp, Homo sapiens
  misc_feature (61)..(62): /note="This region represents a CpG dinucleotide"
  misc_feature (61)..(61): /note="Nucleotide may be methylated to form 5-methylcytosine"
tcatcaagtcatagctatagaatgtacattattaccatgaaattgcgtcatttcctatgccgtaatgataaagtagaagtccacagttacgtaaggcaataatctgccagggcagttaaact

SEQ ID NO: 23467 - DNA, 122 bp, Homo sapiens
  misc_feature (61)..(62): /note="This region represents a CpG dinucleotide"
  misc_feature (61)..(61): /note="Nucleotide may be methylated to form 5-methylcytosine"
aatagaatcatacaatatgtggctttcttatctaacttctataactcaatataatgctttcgaggttcacccatgttgtagcatgtatcagtacttcattccttctaaggctgaataatagt

SEQ ID NO: 23468 - DNA, 122 bp, Homo sapiens
  misc_feature (61)..(62): /note="This region represents a CpG dinucleotide"
  misc_feature (61)..(61): /note="Nucleotide may be methylated to form 5-methylcytosine"
tggtggcctgtggcaaaatctgtctgggtgtgcagctgacgtcccttgaagctcttctcccgtgatcctggctcattcttccctggatgagacttccagggagggggtcaagacaattgagt

SEQ ID NO: 23469 - DNA, 122 bp, Homo sapiens
  misc_feature (61)..(62): /note="This region represents a CpG dinucleotide"
  misc_feature (61)..(61): /note="Nucleotide may be methylated to form 5-methylcytosine"
gtgtctctttgttctctcacccattgattcactcatatatttataactctgattcactctcgctttcactccaaaacacatttatttattcagtcgtttgctcactttgccaatcatttgct

SEQ ID NO: 23470 - DNA, 122 bp, Homo sapiens
  misc_feature (61)..(62): /note="This region represents a CpG dinucleotide"
  misc_feature (61)..(61): /note="Nucleotide may be methylated to form 5-methylcytosine"
tttgcatggttgcaataaatactgaatatattcacatacagcactgagcacagtccctggcgcctgagcctttccatgtgccaagtgcttggcatcatactggaaacacagagatcaacaag

SEQ ID NO: 23471 - DNA, 122 bp, Homo sapiens
  misc_feature (61)..(62): /note="This region represents a CpG dinucleotide"
  misc_feature (61)..(61): /note="Nucleotide may be methylated to form 5-methylcytosine"
atggataatgttcaacaactctactcaacaggttaactcatttagttatctgggggagcacgatggggcttaattagcttactagatctgttacaatgcatttctgttgaaaatgaaaggtt

SEQ ID NO: 23472 - DNA, 122 bp, Homo sapiens
  misc_feature (61)..(62): /note="This region represents a CpG dinucleotide"
  misc_feature (61)..(61): /note="Nucleotide may be methylated to form 5-methylcytosine"
agggctgattgacaaccactggacgatccatcccactcatctggttgttcagtccttctgcgagtggtcagcactgtcattagcataaagatgctcaccctttgtgcctactcccgaaaggg

SEQ ID NO: 23473 - DNA, 122 bp, Homo sapiens
  misc_feature (61)..(62): /note="This region represents a CpG dinucleotide"
  misc_feature (61)..(61): /note="Nucleotide may be methylated to form 5-methylcytosine"
taattacacatttatgcttttgtaggaaaacattcatgggttctaattagcctttctgaacgttttcccttctttagtgagggtgaaaggttctatgtcttcttgccacccccagccccagt

SEQ ID NO: 23474 - DNA, 122 bp, Homo sapiens
  misc_feature (61)..(62): /note="This region represents a CpG dinucleotide"
  misc_feature (61)..(61): /note="Nucleotide may be methylated to form 5-methylcytosine"
gagcttatgcttggcactcccaagagtccctgctgttttagccaattcaaagaaacttgccgcaactcccctccctttcccttcatcccattattcaaataattcaattcctatttccgtcc

SEQ ID NO: 23475 - DNA, 122 bp, Homo sapiens
  misc_feature (61)..(62): /note="This region represents a CpG dinucleotide"
  misc_feature (61)..(61): /note="Nucleotide may be methylated to form 5-methylcytosine"
gccggcactgggcccgcgcccgtccccgacagatggccatccagccctgctggagcgcagcgtcggttcgagtaggccaatcccatttttggcgaaaacagattgttagaaagctcttcctt

SEQ ID NO: 23476 - DNA, 122 bp, Homo sapiens
  misc_feature (61)..(62): /note="This region represents a CpG dinucleotide"
  misc_feature (61)..(61): /note="Nucleotide may be methylated to form 5-methylcytosine"
gtaagaaacaaaacaaaaaaactccaaatgaacactcacccttttctgaactggcactaccgccacttgttgctgcagcatcaaaggatgttccacggacagaaaacactttcactttctca

SEQ ID NO: 23477 - DNA, 122 bp, Homo sapiens
  misc_feature (61)..(62): /note="This region represents a CpG dinucleotide"
  misc_feature (61)..(61): /note="Nucleotide may be methylated to form 5-methylcytosine"
ttagcattgttagaaatgtcctgtttcttactgtcatctctcagaggactctggaaaccacgcctgccccagtctgctttcttcttagtgaatctctcacactctgccctctacgcttttct

SEQ ID NO: 23478 - DNA, 122 bp, Homo sapiens
  misc_feature (61)..(62): /note="This region represents a CpG dinucleotide"
  misc_feature (61)..(61): /note="Nucleotide may be methylated to form 5-methylcytosine"
tatacaaatcttctggctgacatacatactaaactaccttaaaaagtgatttccaccaggcgcagtggctcacacctgtaatcccagcactttgggaagctgagacggatcacgaggtcagg

SEQ ID NO: 23479 - DNA, 122 bp, Homo sapiens
  misc_feature (61)..(62): /note="This region represents a CpG dinucleotide"
  misc_feature (61)..(61): /note="Nucleotide may be methylated to form 5-methylcytosine"
tgcaagaactggagcctgggatctaccaggacgatattctgttcagtcacagaagcaagtcggagagtggccaagacttgggctttctgctcctgcaaatctgattccatacggattggggt

SEQ ID NO: 23480 - DNA, 122 bp, Homo sapiens
  misc_feature (61)..(62): /note="This region represents a CpG dinucleotide"
  misc_feature (61)..(61): /note="Nucleotide may be methylated to form 5-methylcytosine"
tggagttgatgagtgaatcagtaccatttccatttctttcctgttcatggcagttgcaggcgttttacatgtcagggaaaagtttgtcccagaagcagcaagataggaacattcagcccttt

SEQ ID NO: 23481 - DNA, 122 bp, Homo sapiens
  misc_feature (61)..(62): /note="This region represents a CpG dinucleotide"
  misc_feature (61)..(61): /note="Nucleotide may be methylated to form 5-methylcytosine"
tatgcctctgcttggtggtttgctgtgtgccaatcttctgctaagcaatcacatctttcccgtaatgttgacagcaactctcaggggttgagctgaaccaaccttttgtacatatgggagct

SEQ ID NO: 23482 - DNA, 122 bp, Homo sapiens
  misc_feature (61)..(62): /note="This region represents a CpG dinucleotide"
  misc_feature (61)..(61): /note="Nucleotide may be methylated to form 5-methylcytosine"
tatgaaaagtggaaagtccattgaattacacatatatttcaggatttagatgtttggcaacgtacagtagaaccttcatgtaatggttagcatttcctacatttttctgagtgctttatgtc

SEQ ID NO: 23483 - DNA, 122 bp, Homo sapiens
  misc_feature (61)..(62): /note="This region represents a CpG dinucleotide"
  misc_feature (61)..(61): /note="Nucleotide may be methylated to form 5-methylcytosine"
ttagcgactaatttagaacttgtagatttgagctgcctgaattggccagacagctgtaatcgcactcctctattcttaatctctttatctgggcagcagctgccatatggccacagtcagct

SEQ ID NO: 23484 - DNA, 122 bp, Homo sapiens
  misc_feature (61)..(62): /note="This region represents a CpG dinucleotide"
  misc_feature (61)..(61): /note="Nucleotide may be methylated to form 5-methylcytosine"
tatctgaggaagaagcgagtccaggccctggctcctttgtctcagggagctgctgtcctgcgactgccacgaagaggttaaggcctgtgctactgccctgcaaagtgcctgaagctgaaagg

SEQ ID NO: 23485 - DNA, 122 bp, Homo sapiens
  misc_feature (61)..(62): /note="This region represents a CpG dinucleotide"
  misc_feature (61)..(61): /note="Nucleotide may be methylated to form 5-methylcytosine"
atcaggtaaatcagccctggataaaatagcaggaacctgttccgccgaaaccaaatgagtcgtcaggtaaatcagcccttgataaaataacagcacttgttgaccagaagccatgggaccag

SEQ ID NO: 23486 - DNA, 122 bp, Homo sapiens
  misc_feature (61)..(62): /note="This region represents a CpG dinucleotide"
  misc_feature (61)..(61): /note="Nucleotide may be methylated to form 5-methylcytosine"
ttcctttctctttcccagttccaactctggtggaggtgctaatgagaagagaaaaggtcccgaggtaagaagtgaaagagagaaaagaaagggtcagaagaaaaacagtaatccacatatgt

SEQ ID NO: 23487 - DNA, 122 bp, Homo sapiens
  misc_feature (61)..(62): /note="This region represents a CpG dinucleotide"
  misc_feature (61)..(61): /note="Nucleotide may be methylated to form 5-methylcytosine"
cttgtgtggctctgtccttcttttcaagtttgagggggttgtggaccatgtgaggctggacggctcacatgtcagccgccaggctcttagttacagacatggcaaacttccatcatttaagc

SEQ ID NO: 23488 - DNA, 122 bp, Homo sapiens
  misc_feature (61)..(62): /note="This region represents a CpG dinucleotide"
  misc_feature (61)..(61): /note="Nucleotide may be methylated to form 5-methylcytosine"
ttcaacactttatacatgaactacttttcctgtcttttcatttgcctgcttttaataaaccgagtgacagatatatcaatgctagtgttatctgtgcatacatatatagaagggtgtgcatt

SEQ ID NO: 23489 - DNA, 122 bp, Homo sapiens
  misc_feature (61)..(62): /note="This region represents a CpG dinucleotide"
  misc_feature (61)..(61): /note="Nucleotide may be methylated to form 5-methylcytosine"
aaggtcagagtctggttccaggcttgactaatgttaggtaagtcatttcccttctctggccgtcagcttccacatctttaaaataatggggctaaactagacaagcagagtggtgctgtagg

SEQ ID NO: 23490 - DNA, 122 bp, Homo sapiens
  misc_feature (61)..(62): /note="This region represents a CpG dinucleotide"
  misc_feature (61)..(61): /note="Nucleotide may be methylated to form 5-methylcytosine"
gggcagaaatatccaagcacttctgggaaactttaaaaaaatgcatgtgacgtctggcagcgtctggtctccccaactgtattcagccttgagggtgttgtggatagacacgccctgctcca

SEQ ID NO: 23491 - DNA, 122 bp, Homo sapiens
  misc_feature (61)..(62): /note="This region represents a CpG dinucleotide"
  misc_feature (61)..(61): /note="Nucleotide may be methylated to form 5-methylcytosine"
caaatgggcagatcacttgaggtcaggagtttgagaccagcctggccaaaatgatgaaaccgcatctctactgaaaacaaaaattagcagggtgtggtgacagctgcctgtaatcccagcta

SEQ ID NO: 23492 - DNA, 122 bp, Homo sapiens
  misc_feature (61)..(62): /note="This region represents a CpG dinucleotide"
  misc_feature (61)..(61): /note="Nucleotide may be methylated to form 5-methylcytosine"
acttaagaattatgggaaatttcttgaggagtatacctctcaactgagaagaattgaggacgctctggatgactcaattggagatgtttgggatttcaatcttgatcctatagcattaaagg

SEQ ID NO: 23493 - DNA, 122 bp, Homo sapiens
  misc_feature (61)..(62): /note="This region represents a CpG dinucleotide"
  misc_feature (61)..(61): /note="Nucleotide may be methylated to form 5-methylcytosine"
ctgggttctggcctttttggtaatgttattcagctgtttctctcaggaacttcctaataacgtactttagcactattaacaaaaggaccacatggtgaatttcagtgttccagaggtgattc

SEQ ID NO: 23494 - DNA, 122 bp, Homo sapiens
  misc_feature (61)..(62): /note="This region represents a CpG dinucleotide"
  misc_feature (61)..(61): /note="Nucleotide may be methylated to form 5-methylcytosine"
gccaaattcaaggtctgtttttgtacaatctacacattaagaatggtttttacaatgatacgtgttagaaaaatgtttagaaagtcatattttatgatgtgaaaattgataaaatgttgttg

SEQ ID NO: 23495 - DNA, 122 bp, Homo sapiens
  misc_feature (61)..(62): /note="This region represents a CpG dinucleotide"
  misc_feature (61)..(61): /note="Nucleotide may be methylated to form 5-methylcytosine"
gttaatgtttacccatgttcttctccggtgccaagagcctttcctgtgggtgcacaactgcgggttccaccatagagattatgcggaacaaatttcagcctgggaatatgattcctgctagg

SEQ ID NO: 23496 - DNA, 122 bp, Homo sapiens
  misc_feature (61)..(62): /note="This region represents a CpG dinucleotide"
  misc_feature (61)..(61): /note="Nucleotide may be methylated to form 5-methylcytosine"
ctccaagagtgtgggaagcaaaagatgaatcacaggcgaaagtctgtgggctgacctcagcgtgcacatcctctgagacagggcaagaaatgaaggcaggaagcacttgactgaattggttt

SEQ ID NO: 23497 - DNA, 122 bp, Homo sapiens
  misc_feature (61)..(62): /note="This region represents a CpG dinucleotide"
  misc_feature (61)..(61): /note="Nucleotide may be methylated to form 5-methylcytosine"
ttccctcccttgttggtaatgcttgaaattagctcttacttctcttcttcctcctttactcgccatcccaggtcattcatcaggtcctgctaggtctttgattttcttgaaagggccttctt

SEQ ID NO: 23498 - DNA, 122 bp, Homo sapiens
  misc_feature (61)..(62): /note="This region represents a CpG dinucleotide"
  misc_feature (61)..(61): /note="Nucleotide may be methylated to form 5-methylcytosine"
ttatgcatctcatttctaaatgaactcatggtaacagagactgtaacacttttgcatcaccggaatcttctaggtgtgtaaaatgatggacgagtgaatgaataaatgggggagtggttcag

SEQ ID NO: 23499 - DNA, 122 bp, Homo sapiens
  misc_feature (61)..(62): /note="This region represents a CpG dinucleotide"
  misc_feature (61)..(61): /note="Nucleotide may be methylated to form 5-methylcytosine"
atgcattctctcctaaaatgtgacatgtctgatttcaatccactttaacccagtgtgctgcgtctttgttgtcaaagggtgttgcatctgcttaaactcacacatctcgaaggttgctgtga

SEQ ID NO: 23500 - DNA, 122 bp, Homo sapiens
  misc_feature (61)..(62): /note="This region represents a CpG dinucleotide"
  misc_feature (61)..(61): /note="Nucleotide may be methylated to form 5-methylcytosine"
ttagagtggccctgcttttgacagcatgaccttgagctagtcccttcatctgctccttaacgaggcaggatgacataatttctcagggcctctgtctctcaatagcccatgcacctgactca

SEQ ID NO: 23501 - DNA, 122 bp, Homo sapiens
  misc_feature (61)..(62): /note="This region represents a CpG dinucleotide"
  misc_feature (61)..(61): /note="Nucleotide may be methylated to form 5-methylcytosine"
tatcatgctgctacgcactttagtaccaggctctctggtggccagttctttgcaggataacgtggaataatgcttatgtaaaatatgacttccaagactaattctcaacttcagactcccca

SEQ ID NO: 23502 - DNA, 122 bp, Homo sapiens
  misc_feature (61)..(62): /note="This region represents a CpG dinucleotide"
  misc_feature (61)..(61): /note="Nucleotide may be methylated to form 5-methylcytosine"
ggacagctcagtctacagcatgtcattcatctctggaaaatatgatgactcactggctcacgtaagtacccaccacatatgtgcctaaacatacctcagtctctttcttatcaacaggttcc

SEQ ID NO: 23503 - DNA, 122 bp, Homo sapiens
  misc_feature (61)..(62): /note="This region represents a CpG dinucleotide"
  misc_feature (61)..(61): /note="Nucleotide may be methylated to form 5-methylcytosine"
cgctgagggcacaggaaggagttttgggggcggcaggcagggaagcaagcaggatgggaacgccaggctctcaggggaaggaaccagataaatcatcagcaaggaaaacctataggtttccc

SEQ ID NO: 23504 - DNA, 122 bp, Homo sapiens
  misc_feature (61)..(62): /note="This region represents a CpG dinucleotide"
  misc_feature (61)..(61): /note="Nucleotide may be methylated to form 5-methylcytosine"
aagtcactcagcccttggggacctcagctgcttcttacaggaaatgagtagggttgattacgtaacctctgaagtcctgtgactaggttttcagaatatttcttcctactgagaatcttaat

SEQ ID NO: 23505 - DNA, 122 bp, Homo sapiens
  misc_feature (61)..(62): /note="This region represents a CpG dinucleotide"
  misc_feature (61)..(61): /note="Nucleotide may be methylated to form 5-methylcytosine"
agcttcaggtgacccgacacactttggtatcaaaagagaatctgaaatgtacaagaactgcggatttcaaatggaaaaggtgcataattgtgctatttgttcctgggtgagtgtgggacgga

SEQ ID NO: 23506 - DNA, 122 bp, Homo sapiens
  misc_feature (61)..(62): /note="This region represents a CpG dinucleotide"
  misc_feature (61)..(61): /note="Nucleotide may be methylated to form 5-methylcytosine"
cttgcttgcccagacacttctgtcctgggtagtgtggaaaataaaacaccttttgtacttcggttgagggtaggtggattggagggagagtcctgtatagtgtcatgctgcctctgtaatag

SEQ ID NO: 23507 - DNA, 122 bp, Homo sapiens
  misc_feature (61)..(62): /note="This region represents a CpG dinucleotide"
  misc_feature (61)..(61): /note="Nucleotide may be methylated to form 5-methylcytosine"
ctgacctagcagtcaacatgaaggctctcattgttctggggcttgtcctcctttctgttacggtccagggcaaggtctttgaaaggtgtgagttggccagaactctgaaaagattgggaatg

SEQ ID NO: 23508 - DNA, 122 bp, Homo sapiens
  misc_feature (61)..(62): /note="This region represents a CpG dinucleotide"
  misc_feature (61)..(61): /note="Nucleotide may be methylated to form 5-methylcytosine"
gctgaaatcctccaaaaacagacttttctttcattccctgttgccagatactggcacaaacgcatccctgccaccaccaccaccacacacacacacacacacacacacacacacacattctc

SEQ ID NO: 23509 - DNA, 122 bp, Homo sapiens
  misc_feature (61)..(62): /note="This region represents a CpG dinucleotide"
  misc_feature (61)..(61): /note="Nucleotide may be methylated to form 5-methylcytosine"
aactggggcccagcgagattactatttaacagctttgaaatgactgcaggagggagaacacgaggaaacatccaagtttactgatgaagagccaggtccctggagatagattacagggggat

SEQ ID NO: 23510 - DNA, 122 bp, Homo sapiens
  misc_feature (61)..(62): /note="This region represents a CpG dinucleotide"
  misc_feature (61)..(61): /note="Nucleotide may be methylated to form 5-methylcytosine"
ttctttggtagtggcatatccaaattgtcagccttatcactcttacactttgaggccattcgcaagtaaaacaagggctacttgaaacaagcactgtgataacagtgagggagatgactact

SEQ ID NO: 23511 - DNA, 122 bp, Homo sapiens
  misc_feature (61)..(62): /note="This region represents a CpG dinucleotide"
  misc_feature (61)..(61): /note="Nucleotide may be methylated to form 5-methylcytosine"
cttaaaaataacagtaaaaacaagaaacacactgcactatattggtaaacctcaaactcacgtaagtcagttacctgccccgatgggagtttagaagttggtgctactactcttagtactgc

SEQ ID NO: 23512 - DNA, 122 bp, Homo sapiens
  misc_feature (61)..(62): /note="This region represents a CpG dinucleotide"
  misc_feature (61)..(61): /note="Nucleotide may be methylated to form 5-methylcytosine"
agccataggacttaagaacccaaaacaaaaccagcaagtctgagaaccagggctggagaccgacactgagaagcgctgagccctcccccaggagcacgctttcccccaaatcagaaaaacac

SEQ ID NO: 23513 - DNA, 122 bp, Homo sapiens
  misc_feature (61)..(62): /note="This region represents a CpG dinucleotide"
  misc_feature (61)..(61): /note="Nucleotide may be methylated to form 5-methylcytosine"
tgggacggaccctcatggcacttcccgaaattgggttctcatctttatcagacttagtgacgctgattagcccagtgttttccttttttgcattttggacatattccaggctcagcagttgt

SEQ ID NO: 23514 - DNA, 122 bp, Homo sapiens
  misc_feature (61)..(62): /note="This region represents a CpG dinucleotide"
  misc_feature (61)..(61): /note="Nucleotide may be methylated to form 5-methylcytosine"
ttggaggaaactcaggaaaaaaaaaaggccaaaagtaacacctgtgaagtaaggtgaaagcgcctggagctatttagccagaaatgagttgtggtataataactgtcatagatatgtatcag

SEQ ID NO: 23515 - DNA, 122 bp, Homo sapiens
  misc_feature (61)..(62): /note="This region represents a CpG dinucleotide"
  misc_feature (61)..(61): /note="Nucleotide may be methylated to form 5-methylcytosine"
attcatcaacatagcaaatatactctgaacgtgcaactcccctggacagctggaatctggcggcgccatttctcttcttgcactgccttaatgctgatattttataaccactgcagttgaat

SEQ ID NO: 23516 - DNA, 122 bp, Homo sapiens
  misc_feature (61)..(62): /note="This region represents a CpG dinucleotide"
  misc_feature (61)..(61): /note="Nucleotide may be methylated to form 5-methylcytosine"
cagaaaatactttccttcagattgcctggtgattaaggtagtggacatctaccaagctcacgcttagggaggacgaacaacaggtttatcaacactatacttcacggagtgtcagtcatgag

SEQ ID NO: 23517 - DNA, 122 bp, Homo sapiens
  misc_feature (61)..(62): /note="This region represents a CpG dinucleotide"
  misc_feature (61)..(61): /note="Nucleotide may be methylated to form 5-methylcytosine"
ctttcttgaggagaaaaaaattatcatgaagacagaatctgaccactgaaattactcatacgaagactcacaaatgaggaagctgtcttgtgaaagataagcagatactcaatgcaaaggat

SEQ ID NO: 23518 - DNA, 122 bp, Homo sapiens
  misc_feature (61)..(62): /note="This region represents a CpG dinucleotide"
  misc_feature (61)..(61): /note="Nucleotide may be methylated to form 5-methylcytosine"
aactgtcagacagaccgtcctgtcgtggcatgacttgaacataaccgtcccacgtggggacgcattccgcaccggttgctggaactgacgggggctgcagtgctgaatacctctgggacgct

SEQ ID NO: 23519 - DNA, 122 bp, Homo sapiens
  misc_feature (61)..(62): /note="This region represents a CpG dinucleotide"
  misc_feature (61)..(61): /note="Nucleotide may be methylated to form 5-methylcytosine"
aagatattacctgagattgggtgatttatacacaaaggagatttaattgactcacagttccgcatggctgggaaagcctcatgaaacttataccatgaaggaagagaaagcaggcaccctct

SEQ ID NO: 23520 - DNA, 122 bp, Homo sapiens
  misc_feature (61)..(62): /note="This region represents a CpG dinucleotide"
  misc_feature (61)..(61): /note="Nucleotide may be methylated to form 5-methylcytosine"
caaagggcagtcatgttctgctgtttcttagctgttttgtcagttggaacaaaacaacagcgctgctcattttttgcagggttagaggaaaaaggaaggactggccgaagaatggggtgggg

SEQ ID NO: 23521 - DNA, 122 bp, Homo sapiens
  misc_feature (61)..(62): /note="This region represents a CpG dinucleotide"
  misc_feature (61)..(61): /note="Nucleotide may be methylated to form 5-methylcytosine"
aagaccaaacttaactggagcctgtgactaatgtgccaggagcaatgcaaatcctcctcacgtcatcttggttgttctccccagtttaccacagccaccacccttctgagtcccattcccaa

SEQ ID NO: 23522 - DNA, 122 bp, Homo sapiens
  misc_feature (61)..(62): /note="This region represents a CpG dinucleotide"
  misc_feature (61)..(61): /note="Nucleotide may be methylated to form 5-methylcytosine"
cacaaactttgttgaactgactctttaagtctgataagaaacatttgcaatctcctctgtcgcctgctacctggaagcctcatctgcatgataaaatcttggtttccacaaacccttatcat

SEQ ID NO: 23523 - DNA, 122 bp, Homo sapiens
  misc_feature (61)..(62): /note="This region represents a CpG dinucleotide"
  misc_feature (61)..(61): /note="Nucleotide may be methylated to form 5-methylcytosine"
tcacggggtggaagggggaacgaaacaggaaggcccacgaggtcccatatgccagcgtcccggttcccaactcttcacaggccatgtggccaccctcagggcctgggcccccaggaaacacg

SEQ ID NO: 23524 - DNA, 122 bp, Homo sapiens
  misc_feature (61)..(62): /note="This region represents a CpG dinucleotide"
  misc_feature (61)..(61): /note="Nucleotide may be methylated to form 5-methylcytosine"
gcttcaggtttcctagtagccactcatctagataatgatcaaaacatcttaaccacaaggcgtctcaagtggttactgtacaaatatagacagaatctcttctctataattggtttatagaa

SEQ ID NO: 23525 - DNA, 122 bp, Homo sapiens
  misc_feature (61)..(62): /note="This region represents a CpG dinucleotide"
  misc_feature (61)..(61): /note="Nucleotide may be methylated to form 5-methylcytosine"
caatctcaagtcggtcttgagtttgcccaataatcctaccatgtatccctcgtttatttacgtccttctaccccaccctgtgactgtttcacactttttcctccttcctcaactccacaaca

SEQ ID NO: 23526 - DNA, 122 bp, Homo sapiens
  misc_feature (61)..(62): /note="This region represents a CpG dinucleotide"
  misc_feature (61)..(61): /note="Nucleotide may be methylated to form 5-methylcytosine"
ctcacaccaaatcagcttgccccattattatccaggcacttgatttcttcatcctctcgacgtcattagacttcgcctttgccgggaatactgaggcaccctttcttcctcctttatctggc

SEQ ID NO: 23527 - DNA, 122 bp, Homo sapiens
  misc_feature (61)..(62): /note="This region represents a CpG dinucleotide"
  misc_feature (61)..(61): /note="Nucleotide may be methylated to form 5-methylcytosine"
aggaaaattcaaatgaatagctcagttataaggcaaatattcatttttcaaacaaactgtcgaaaggattcatttaaaaatctacttacaagcttggattacaacagtccattaaaaagtca

SEQ ID NO: 23528 - DNA, 122 bp, Homo sapiens
  misc_feature (61)..(62): /note="This region represents a CpG dinucleotide"
  misc_feature (61)..(61): /note="Nucleotide may be methylated to form 5-methylcytosine"
tctgacctgaggacagtaagcctatggctctctcacaccagggtgtggagactaaatgcacgcaggggctcctggcctcaccggctctaggaacctctctccagcgacagtagtaggaatga

SEQ ID NO: 23529 - DNA, 122 bp, Homo sapiens
  misc_feature (61)..(62): /note="This region represents a CpG dinucleotide"
  misc_feature (61)..(61): /note="Nucleotide may be methylated to form 5-methylcytosine"
ctcactttcagcatttctgagacacaaacaagatgcataaacataatattaaacaaacaacggtagagaccttgttttcatcaaagacagacagcaagactactaatgtacaaaaattcttt

SEQ ID NO: 23530 - DNA, 122 bp, Homo sapiens
  misc_feature (61)..(62): /note="This region represents a CpG dinucleotide"
  misc_feature (61)..(61): /note="Nucleotide may be methylated to form 5-methylcytosine"
gtgataaaagcatatcttgccacttagaccttatatactgtcctaccttaaggaatttatcgtcacagagaataattgctacctgtagcgaatattaggcaggttattagtctacatatgat

SEQ ID NO: 23531 - DNA, 122 bp, Homo sapiens
  misc_feature (61)..(62): /note="This region represents a CpG dinucleotide"
  misc_feature (61)..(61): /note="Nucleotide may be methylated to form 5-methylcytosine"
agaggccctccatcgaggaagtgcattcacaacactttaatctgcaaaaccactcccccacgctgggggcaggtgctgctagcaccctgcaagttcaacaaaccaatcaaggtgagaggttc

SEQ ID NO: 23532 - DNA, 122 bp, Homo sapiens
  misc_feature (61)..(62): /note="This region represents a CpG dinucleotide"
  misc_feature (61)..(61): /note="Nucleotide may be methylated to form 5-methylcytosine"
agggtttgtcctcagctctctcctcttcccattctgtgtgttctcactggaaaactttatcgtaaatcacctcgatgctgctgactcagttttttccttctagctctgacctctgtttcctt

SEQ ID NO: 23533 - DNA, 122 bp, Homo sapiens
  misc_feature (61)..(62): /note="This region represents a CpG dinucleotide"
  misc_feature (61)..(61): /note="Nucleotide may be methylated to form 5-methylcytosine"
ttcctgattccgctcctctctccagcctcaccattgtcatacctaacccccaccacgctccgttcactccaggcaggcagaatcccttgctggactccacatgcgctgttcccgtcacagca

SEQ ID NO: 23534 - DNA, 122 bp, Homo sapiens
  misc_feature (61)..(62): /note="This region represents a CpG dinucleotide"
  misc_feature (61)..(61): /note="Nucleotide may be methylated to form 5-methylcytosine"
atggaaagaggtgggggaggagaagaggggagaattgtcagtgcttgtatacaaaatgcacggtggctctgttagctagaagtgggcaactgctgagtaaaccactttattatgtaaactgc

SEQ ID NO: 23535 - DNA, 122 bp, Homo sapiens
  misc_feature (61)..(62): /note="This region represents a CpG dinucleotide"
  misc_feature (61)..(61): /note="Nucleotide may be methylated to form 5-methylcytosine"
atcactaatttagcctgtttggcaaacactgcagctgatttcagtattactttttctccccgctccttgggaaaaaagcaacaccagaatagaacttgcaagcttcctttggactcataccc

SEQ ID NO: 23536 - DNA, 122 bp, Homo sapiens
  misc_feature (61)..(62): /note="This region represents a CpG dinucleotide"
  misc_feature (61)..(61): /note="Nucleotide may be methylated to form 5-methylcytosine"
caggctccaggagcttcggcaggaaacagctgcccctgccccttggatcatccatacctgcgtggctgaagctgtaactctggtcatgtggcctctggcaaagatgctatgagccatggtgt

SEQ ID NO: 23537 - DNA, 122 bp, Homo sapiens
  misc_feature (61)..(62): /note="This region represents a CpG dinucleotide"
  misc_feature (61)..(61): /note="Nucleotide may be methylated to form 5-methylcytosine"
agagaattatctggtcaaaaatgtaaatagtgctgagggtgagaaaccctgctataaaaacgaaagaaatttggtctacagagttgtttggatttagacaagacgttgccccaatagtggtg

SEQ ID NO: 23538 - DNA, 122 bp, Homo sapiens
  misc_feature (61)..(62): /note="This region represents a CpG dinucleotide"
  misc_feature (61)..(61): /note="Nucleotide may be methylated to form 5-methylcytosine"
ttccctttcccatccataaggtgcagtaggagcaagagagggcaagtgttcccaaattgacgccaccataataatcatcaccacaccgtgagcagatctgaaaggcacactttgattttttt

SEQ ID NO: 23539 - DNA, 122 bp, Homo sapiens
  misc_feature (61)..(62): /note="This region represents a CpG dinucleotide"
  misc_feature (61)..(61): /note="Nucleotide may be methylated to form 5-methylcytosine"
atcctgcttttcatttcttaataggctatgcttcacttgggtttatctgttctttccttacgattagattaagattgtgcaatcttggctggaatataacataagtgatgtgtgtttttcag

SEQ ID NO: 23540 - DNA, 122 bp, Homo sapiens
  misc_feature (61)..(62): /note="This region represents a CpG dinucleotide"
  misc_feature (61)..(61): /note="Nucleotide may be methylated to form 5-methylcytosine"
ttcctgcagcctctgtggcactcaacaagggcccgttgcgtgacgaatcaggaggtcaggcgagtctcagtgctggtcagcaagtcaccgggtgtagattcccaagctctgctggcgtctgg

SEQ ID NO: 23541 - DNA, 122 bp, Homo sapiens
  misc_feature (61)..(62): /note="This region represents a CpG dinucleotide"
  misc_feature (61)..(61): /note="Nucleotide may be methylated to form 5-methylcytosine"
gctattcacacaatgactgaataaacacattggctaatgatgatggcaaagattctgatacgatactaaggaaaatacaaatactaggacaagaaaactttgaaaagcattaagaatttaat

SEQ ID NO: 23542 - DNA, 122 bp, Homo sapiens
  misc_feature (61)..(62): /note="This region represents a CpG dinucleotide"
  misc_feature (61)..(61): /note="Nucleotide may be methylated to form 5-methylcytosine"
tcctggcctgggtcatgcctgcagggccctcgctagcctatgaaaccccacgggcctgcacgtttcctccacaagctgtgagaggcatcagtatgtcctctccggagtgacaaatgacactc

SEQ ID NO: 23543 - DNA, 122 bp, Homo sapiens
  misc_feature (61)..(62): /note="This region represents a CpG dinucleotide"
  misc_feature (61)..(61): /note="Nucleotide may be methylated to form 5-methylcytosine"
attttggaggaaatggattaaagcaactaggaaagaggttagaggactcaagagatccaacggctctggcctgtgagcagacgggccattcataactttgtagtttctcattcagagcagcc

SEQ ID NO: 23544 - DNA, 122 bp, Homo sapiens
  misc_feature (61)..(62): /note="This region represents a CpG dinucleotide"
  misc_feature (61)..(61): /note="Nucleotide may be methylated to form 5-methylcytosine"
cagtccccagtgattaaaccttcctgttgggactgcactctcacagagatataagacatacgtgatcagcacaagtatgtacctacccagccctggctttactgtgcctagtcagccaggcc

SEQ ID NO: 23545 - DNA, 122 bp, Homo sapiens
  misc_feature (61)..(62): /note="This region represents a CpG dinucleotide"
  misc_feature (61)..(61): /note="Nucleotide may be methylated to form 5-methylcytosine"
cagcccaggtgaacacagtcaactgggacaaaatgtggcatctgccagggcaggtaggggcgtccaaggagagaatatagtcatgggttgtttgttagtttctggttgggccagtaaagccc

SEQ ID NO: 23546 - DNA, 122 bp, Homo sapiens
  misc_feature (61)..(62): /note="This region represents a CpG dinucleotide"
  misc_feature (61)..(61): /note="Nucleotide may be methylated to form 5-methylcytosine"
actcaccatctgttatgagtgctctactggtcagaaccttccccagcatgaacttcaacacggccaggatgctgcaaagaatcccacttaaaatggagacactgaacaggaaatcgtcctgc

SEQ ID NO: 23547 - DNA, 122 bp, Homo sapiens
  misc_feature (61)..(62): /note="This region represents a CpG dinucleotide"
  misc_feature (61)..(61): /note="Nucleotide may be methylated to form 5-methylcytosine"
ataagtgggtgagtaaacggataggtcaggcatcagataggtggggaggcagagaaggggcggaccagaacacagaggtacttggcatgaccatatgagctctcttgagcattatctggcag

SEQ ID NO: 23548 - DNA, 122 bp, Homo sapiens
  misc_feature (61)..(62): /note="This region represents a CpG dinucleotide"
  misc_feature (61)..(61): /note="Nucleotide may be methylated to form 5-methylcytosine"
cccagctctccctcctctgagtgccatgtctagggcactagactgaagcaaaaccccaggcgacccactttctgtacctaccagctgtgtagtacagacagggctcaccgatcctctctgag

SEQ ID NO: 23549 - DNA, 122 bp, Homo sapiens
  misc_feature (61)..(62): /note="This region represents a CpG dinucleotide"
  misc_feature (61)..(61): /note="Nucleotide may be methylated to form 5-methylcytosine"
attttaaaaatgtgtatgttactggatagctttagagtaaggttgggtcagtttggcccccgctgagtgggggtacctcttctcccccatgcttaccatcaccagctgttgttagacctttt

SEQ ID NO: 23550 - DNA, 122 bp, Homo sapiens
  misc_feature (61)..(62): /note="This region represents a CpG dinucleotide"
  misc_feature (61)..(61): /note="Nucleotide may be methylated to form 5-methylcytosine"
aatatcaactacaattgaatatttagaaagtaaagaaatgctgtaatcgcaagggtattgcgattgttaggttgggctaatttctgtaataaacaacccccaaaatctcagtggttatggaa

SEQ ID NO: 23551 - DNA, 122 bp, Homo sapiens
  misc_feature (61)..(62): /note="This region represents a CpG dinucleotide"
  misc_feature (61)..(61): /note="Nucleotide may be methylated to form 5-methylcytosine"
agccttttgtgacctattggacttgggcccaaacagagctcagaacttaaaaactccagccgctcccctgggactgaaaaacagcaatgttggggaaccagggagtgctggggaaaccacag

SEQ ID NO: 23552 - DNA, 122 bp, Homo sapiens
  misc_feature (61)..(62): /note="This region represents a CpG dinucleotide"
  misc_feature (61)..(61): /note="Nucleotide may be methylated to form 5-methylcytosine"
cataggctttctcatctaggttggtgtggcacaccctgatgttctcacaataggaaattgcgtaaggatgcatttctcacaacgtacccccttcactaaccaatgcatgactgtatggattc

SEQ ID NO: 23553 - DNA, 122 bp, Homo sapiens
  misc_feature (61)..(62): /note="This region represents a CpG dinucleotide"
  misc_feature (61)..(61): /note="Nucleotide may be methylated to form 5-methylcytosine"
accaccatatgcctaatcctttcatagttatctagtgtcacagtccaatgcacacttcaacggaatcactagtttctatgaatgtcattagtacgagctggtctgcacatgggttcccttca

SEQ ID NO: 23554 - DNA, 122 bp, Homo sapiens
  misc_feature (61)..(62): /note="This region represents a CpG dinucleotide"
  misc_feature (61)..(61): /note="Nucleotide may be methylated to form 5-methylcytosine"
cccccctcccggcagaaacctggaagtggaaatctcgggcattcaccgtttgggtgaagacggaggcgggttctggacagacgtaggctgtcagggagtgtttacttcgcctccacttctgt

SEQ ID NO: 23555 - DNA, 122 bp, Homo sapiens
  misc_feature (61)..(62): /note="This region represents a CpG dinucleotide"
  misc_feature (61)..(61): /note="Nucleotide may be methylated to form 5-methylcytosine"
aattaaatgaatttgtgcgttcaatgtgctgagaacaacactggcacatggtaagtgatgcgttagctatgactgattgccctggccccactccaagtgcttctggtgaggctgcttatcca

SEQ ID NO: 23556 - DNA, 122 bp, Homo sapiens
  misc_feature (61)..(62): /note="This region represents a CpG dinucleotide"
  misc_feature (61)..(61): /note="Nucleotide may be methylated to form 5-methylcytosine"
accacccctggcaccaggcccgaagcagctccatgggcagagccgtctttccctggaggccgtctctatttgggcagtgagaatctcctccatccagcatccctcacacggcctggggcttg

SEQ ID NO: 23557 - DNA, 122 bp, Homo sapiens
  misc_feature (61)..(62): /note="This region represents a CpG dinucleotide"
  misc_feature (61)..(61): /note="Nucleotide may be methylated to form 5-methylcytosine"
gggaacggctccaccatggcaccctggtggccctgaacatatccacacaggctacagaggcgaaagctcaaactgaggctcatctgagtcatgacaggacactttgtgatcctccagagagt

SEQ ID NO: 23558 - DNA, 122 bp, Homo sapiens
  misc_feature (61)..(62): /note="This region represents a CpG dinucleotide"
  misc_feature (61)..(61): /note="Nucleotide may be methylated to form 5-methylcytosine"
tccttcgattccacctgtaacctgcatctaatcttgagcatgttatttacctatctataacgtcttccttttacaataagactacctgtgtcacctacctacataacaacaagccaaataaa

SEQ ID NO: 23559 - DNA, 122 bp, Homo sapiens
  misc_feature (61)..(62): /note="This region represents a CpG dinucleotide"
  misc_feature (61)..(61): /note="Nucleotide may be methylated to form 5-methylcytosine"
gggttgtcgttttctgatacatccacgttgcacccgggtgtagctgggctggggctgcaacgtttctcagcattctgtgtctggaatgctcaccaggccccacagtctggccttagcaggaa

SEQ ID NO: 23560 - DNA, 122 bp, Homo sapiens
  misc_feature (61)..(62): /note="This region represents a CpG dinucleotide"
  misc_feature (61)..(61): /note="Nucleotide may be methylated to form 5-methylcytosine"
gactgggcagcaggactgtcctgccagcttgtcaggtctcactgaggctttgagggtgggcgcaggggctgtgctgggccctaccctcagagggaccccaccctccccatggcctacctggc

SEQ ID NO: 23561 - DNA, 122 bp, Homo sapiens
  misc_feature (61)..(62): /note="This region represents a CpG dinucleotide"
  misc_feature (61)..(61): /note="Nucleotide may be methylated to form 5-methylcytosine"
gaccagcctgggcaacacagggaaacccctctctccaaacaatacaaaaaattagccaagcgtggtagcgcatgcctgtagtcccagctactcaggaggctgagatgggggtatcgcttgag

SEQ ID NO: 23562 - DNA, 122 bp, Homo sapiens
  misc_feature (61)..(62): /note="This region represents a CpG dinucleotide"
  misc_feature (61)..(61): /note="Nucleotide may be methylated to form 5-methylcytosine"
tgggctttatttacatcatcatctaatcaatccatataaaaagtcaaatcaccagctgggcgcagtggctcactcttgtaatcccagcactttgggaggccaaggcaggtggatcacctgag

SEQ ID NO: 23563 - DNA, 122 bp, Homo sapiens
  misc_feature (61)..(62): /note="This region represents a CpG dinucleotide"
  misc_feature (61)..(61): /note="Nucleotide may be methylated to form 5-methylcytosine"
caacatgcacatgaatcctcattaaatttgcatttcaattagctcctgagagctgcagaacgtgtttcaaatattccttcatcacatcactctcaatccagcctacctacctctttgactcc

SEQ ID NO: 23564 - DNA, 122 bp, Homo sapiens
  misc_feature (61)..(62): /note="This region represents a CpG dinucleotide"
  misc_feature (61)..(61): /note="Nucleotide may be methylated to form 5-methylcytosine"
tctttcttacttttttttcttagtatttttccaactccaaccacattacttgtttcacaacgacaggttaaacggttgcaacttgtctgagagtcatgaggaaatcaggcaagaggaaacag

SEQ ID NO: 23565 - DNA, 122 bp, Homo sapiens
  misc_feature (61)..(62): /note="This region represents a CpG dinucleotide"
  misc_feature (61)..(61): /note="Nucleotide may be methylated to form 5-methylcytosine"
ttcaagtttagaatgcgggaggcaactattagtaagatttctctctgaaacaggaaagtccgtttttgactgaaaaaaacaataagaaaaacaagaacaaaattaggagagtgggcaaatct

SEQ ID NO: 23566 - DNA, 122 bp, Homo sapiens
  misc_feature (61)..(62): /note="This region represents a CpG dinucleotide"
  misc_feature (61)..(61): /note="Nucleotide may be methylated to form 5-methylcytosine"
aatgaagatggcagagaagagaggaggaagcagagactgggaaaacttgggagaggaagacgggaggagagcagtgagataacaatgagtatcaacgcattcattcacaacattagcctttc

SEQ ID NO: 23567 - DNA, 122 bp, Homo sapiens
  misc_feature (61)..(62): /note="This region represents a CpG dinucleotide"
  misc_feature (61)..(61): /note="Nucleotide may be methylated to form 5-methylcytosine"
taccgttatatgctttgtctgccatatcgcatttaaacctcatgtcagttcggtgaagtccgtatagttctctttatgtttttaccattacactactacattcccctggggtggggcgaggg

SEQ ID NO: 23568 - DNA, 122 bp, Homo sapiens
  misc_feature (61)..(62): /note="This region represents a CpG dinucleotide"
  misc_feature (61)..(61): /note="Nucleotide may be methylated to form 5-methylcytosine"
gccctgagctattaaaccttggcgttcttgtgaaatgtgccattctgttcactaacaccacgacatgtggtaggccagggttttcaaagcatgtcacttctccctgtgacatgtgtagactt

SEQ ID NO: 23569 - DNA, 122 bp, Homo sapiens
  misc_feature (61)..(62): /note="This region represents a CpG dinucleotide"
  misc_feature (61)..(61): /note="Nucleotide may be methylated to form 5-methylcytosine"
ccagcacagtagcagttcaggaaatgaggatgataatgagactccatgactgctgagaatcggaagaggaggtatgaattctcattcaaccctaacaattgtccattgtccatgaggccttg

SEQ ID NO: 23570 - DNA, 122 bp, Homo sapiens
  misc_feature (61)..(62): /note="This region represents a CpG dinucleotide"
  misc_feature (61)..(61): /note="Nucleotide may be methylated to form 5-methylcytosine"
atggccactcatgcccatgccttcctaggggccccatctcggtcccttttctggcacattcgatctcgccaattaaacaaagttgcccgaatctgcctccgaagaaccccgccgatagcatg

SEQ ID NO: 23571 - DNA, 122 bp, Homo sapiens
  misc_feature (61)..(62): /note="This region represents a CpG dinucleotide"
  misc_feature (61)..(61): /note="Nucleotide may be methylated to form 5-methylcytosine"
acagagccatttgttactggggttacaccccctgcaggaatctttcaatgctctttaaatcgtgggcatgcacaatgcacctgaccttgttcaaagccaggggttgcactgccccaggcaaa

SEQ ID NO: 23572 - DNA, 122 bp, Homo sapiens
  misc_feature (61)..(62): /note="This region represents a CpG dinucleotide"
  misc_feature (61)..(61): /note="Nucleotide may be methylated to form 5-methylcytosine"
aatctgataggattggtgtcttcataagaacagacttgctctctctctgtggtcacatgacgacacagtgagcagacagccttctgcaagccaggaagagcaccctcactaacaacctaatt

SEQ ID NO: 23573 - DNA, 122 bp, Homo sapiens
  misc_feature (61)..(62): /note="This region represents a CpG dinucleotide"
  misc_feature (61)..(61): /note="Nucleotide may be methylated to form 5-methylcytosine"
tgatcatactgattataaaattaagtacagtcattcactgcataacagtgtttgagccaacgatggatcatgtattcagcagtggttccataagattataatagagctaaaaaaattccagt

SEQ ID NO: 23574 - DNA, 122 bp, Homo sapiens
  misc_feature (61)..(62): /note="This region represents a CpG dinucleotide"
  misc_feature (61)..(61): /note="Nucleotide may be methylated to form 5-methylcytosine"
tttcatagtttggcttgtcactgaagagagccatccctcatttgcttttttaaaagagtacgacaaaaatcccttcaaatcttgctctcaaaaaggccagaagaaatattactgagatttct

SEQ ID NO: 23575 - DNA, 122 bp, Homo sapiens
  misc_feature (61)..(62): /note="This region represents a CpG dinucleotide"
  misc_feature (61)..(61): /note="Nucleotide may be methylated to form 5-methylcytosine"
gcagccccccaagcttctacagcccttcgtacttattgggtagaaagcagggggaggaaacgattggccagctgcttgattgttcacacgttcacgttattgctaacaggtttcagatttgc

SEQ ID NO: 23576 - DNA, 122 bp, Homo sapiens
  misc_feature (61)..(62): /note="This region represents a CpG dinucleotide"
  misc_feature (61)..(61): /note="Nucleotide may be methylated to form 5-methylcytosine"
tcagcatttctgtctctgtcaaacaattagtttatagatagtcataatctttctttcttccggatggtttatccttgtatgctgaacaaaagaaaaaatgtgaagactgaaaggtgtgattt

SEQ ID NO: 23577 - DNA, 122 bp, Homo sapiens
  misc_feature (61)..(62): /note="This region represents a CpG dinucleotide"
  misc_feature (61)..(61): /note="Nucleotide may be methylated to form 5-methylcytosine"
ttgtctccttagctccaatgcctttgtcctgattcagtgactcatttcttatatgtccatcgttttctaataggtttccttgctcctgattttttaatcatttattctatcctccatctctt

SEQ ID NO: 23578 - DNA, 122 bp, Homo sapiens
  misc_feature (61)..(62): /note="This region represents a CpG dinucleotide"
  misc_feature (61)..(61): /note="Nucleotide may be methylated to form 5-methylcytosine"
gtagaagttgaagcggcttcagtgcaaaactaacattctctggatctttctcacgctgttcggaaagtagatcacccactgttatttccttttcctggcttttttttttttcctaacagaca

SEQ ID NO: 23579 - DNA, 122 bp, Homo sapiens
  misc_feature (61)..(62): /note="This region represents a CpG dinucleotide"
  misc_feature (61)..(61): /note="Nucleotide may be methylated to form 5-methylcytosine"
agtgaaggaagggtgacatgtatgccattgccacatgctatgtatttgctattcctccttcgtaggtgtcctctgagacagaaagaaagttctagggccatgcatggtgaagagaataggag

SEQ ID NO: 23580 - DNA, 122 bp, Homo sapiens
  misc_feature (61)..(62): /note="This region represents a CpG dinucleotide"
  misc_feature (61)..(61): /note="Nucleotide may be methylated to form 5-methylcytosine"
tgactttagacattgctgggagagggtgagagtccccgctctgccatgaataggatgagacgtggctgggctaggcagcatgccggactaggctctgactcaggttccacagaagggaactg

SEQ ID NO: 23581 - DNA, 122 bp, Homo sapiens
  misc_feature (61)..(62): /note="This region represents a CpG dinucleotide"
  misc_feature (61)..(61): /note="Nucleotide may be methylated to form 5-methylcytosine"
aaggaaatgagaaaacataacgcaatacaattttcacaccaagaaagcaattatagcttacgataccataatattacctaaatattccactcatatttgaaattccccaattatcctaaaaa

SEQ ID NO: 23582 - DNA, 122 bp, Homo sapiens
  misc_feature (61)..(62): /note="This region represents a CpG dinucleotide"
  misc_feature (61)..(61): /note="Nucleotide may be methylated to form 5-methylcytosine"
cacttatcttctcttcgctgcagtttctccaatggcaaatggagaaaagaacaccagcatcgcccgctggtgatggaaattcaactagataatacattcaaaaacctttgcctcaactgtaa

SEQ ID NO: 23583 - DNA, 122 bp, Homo sapiens
  misc_feature (61)..(62): /note="This region represents a CpG dinucleotide"
  misc_feature (61)..(61): /note="Nucleotide may be methylated to form 5-methylcytosine"
cttccagtctctagtaccctctgttctactttttacttccgtgagatcaacttttttattcgtatatggagacacgcacacataccacattttccttatccattcgtctgttgttgcacact

SEQ ID NO: 23584 - DNA, 122 bp, Homo sapiens
  misc_feature (61)..(62): /note="This region represents a CpG dinucleotide"
  misc_feature (61)..(61): /note="Nucleotide may be methylated to form 5-methylcytosine"
ttaaataattcaaacttaaagctgttagaattttaaagtattccagccttaagaggaatacggctatgtggcttgagtcacttgatgtacaactgcaacttctgcctttttttttttccctg

SEQ ID NO: 23585 - DNA, 122 bp, Homo sapiens
  misc_feature (61)..(62): /note="This region represents a CpG dinucleotide"
  misc_feature (61)..(61): /note="Nucleotide may be methylated to form 5-methylcytosine"
gctttcccatgctcctctgactcgttgtcaggccgggatgctcggggcccagggaggagacgctgcctgtggtggaacaagaataaaacatgagtcgttcatgttaacacatcacggtgctt

SEQ ID NO: 23586 - DNA, 122 bp, Homo sapiens
  misc_feature (61)..(62): /note="This region represents a CpG dinucleotide"
  misc_feature (61)..(61): /note="Nucleotide may be methylated to form 5-methylcytosine"
ccagtgctgctgacacctgccatgcacgtcagcatcttcatctgatgtcctcaggggagccggctgcacctcacaccatccactctgcaaagcaaagcagccctgggaacagccctggaaaa

SEQ ID NO: 23587 - DNA, 122 bp, Homo sapiens
  misc_feature (61)..(62): /note="This region represents a CpG dinucleotide"
  misc_feature (61)..(61): /note="Nucleotide may be methylated to form 5-methylcytosine"
ggcactcccttaaattttgtgcctaaggtgagtgcctcactctcctggtcatagtcctggcgcagtgatgtctacaaagactaataagatttacctgttaccaagctcctactctaataaac

SEQ ID NO: 23588 - DNA, 122 bp, Homo sapiens
  misc_feature (61)..(62): /note="This region represents a CpG dinucleotide"
  misc_feature (61)..(61): /note="Nucleotide may be methylated to form 5-methylcytosine"
tcacttttctaccttatgtaatcctttaatgtttgaattttgcataatgaacagtataaccgttttttaaaagctcgaattttaactctctgtgatggacttagatgcaggagtagatggaa

SEQ ID NO: 23589 - DNA, 122 bp, Homo sapiens
  misc_feature (61)..(62): /note="This region represents a CpG dinucleotide"
  misc_feature (61)..(61): /note="Nucleotide may be methylated to form 5-methylcytosine"
atccacccgcctcggcctcccaaagtgctgggattacaggcatgagccactgcgcccggccgtagtcaacagtttagagtcaacagccccagctgtcactcacaagtgtcattctgggtgtg

SEQ ID NO: 23590 - DNA, 122 bp, Homo sapiens
  misc_feature (61)..(62): /note="This region represents a CpG dinucleotide"
  misc_feature (61)..(61): /note="Nucleotide may be methylated to form 5-methylcytosine"
cctggcccacactggaccctttgaatccatggatgcctctttgcgtctccaagtgccctgcgagattggacatagaccggtttatgtagaacatcctggagaaattactgagatactgagaa

SEQ ID NO: 23591 - DNA, 122 bp, Homo sapiens
  misc_feature (61)..(62): /note="This region represents a CpG dinucleotide"
  misc_feature (61)..(61): /note="Nucleotide may be methylated to form 5-methylcytosine"
tcaaatccaatgcacaaaatccatgcacctagaaggtaaaatgtgccttccagaggaaaacgctgggatgctgtttgattccaccccagagatatcacattgctaataaaaagactaacctc

SEQ ID NO: 23592 - DNA, 122 bp, Homo sapiens
  misc_feature (61)..(62): /note="This region represents a CpG dinucleotide"
  misc_feature (61)..(61): /note="Nucleotide may be methylated to form 5-methylcytosine"
ttgaagtggtgatgttgatgcttctgaggagatagtattttctcccagccccgacaactgcgcttgcagagatcaagcctgacccagagatagtgtctcacagctttttggctgtattcatt

SEQ ID NO: 23593 - DNA, 122 bp, Homo sapiens
  misc_feature (61)..(62): /note="This region represents a CpG dinucleotide"
  misc_feature (61)..(61): /note="Nucleotide may be methylated to form 5-methylcytosine"
tgttgctggggagctcagactactcaaggccatggtgctgggagactccatatctgggtacggatatttagtctaagcaggcctcaggtcatgggaccctctagttgactctgctaacaaag

SEQ ID NO: 23594 - DNA, 122 bp, Homo sapiens
  misc_feature (61)..(62): /note="This region represents a CpG dinucleotide"
  misc_feature (61)..(61): /note="Nucleotide may be methylated to form 5-methylcytosine"
gtgtgagggaggtaacgtattacctggttgtctgtccagacacaacctgcagcagtgaatcgtaaagcattgaagaatgacggagagttaactcactcagtcacaaacttcaacttactagt

SEQ ID NO: 23595 - DNA, 122 bp, Homo sapiens
  misc_feature (61)..(62): /note="This region represents a CpG dinucleotide"
  misc_feature (61)..(61): /note="Nucleotide may be methylated to form 5-methylcytosine"
tggcagactttagcttggtagaagccagccgaatgcaaaattggctgacttatgtggtgtcggtttctttgtcaggagattttcaagtgaaggctgagtaataccaggaaagggatgttaca

SEQ ID NO: 23596 - DNA, 122 bp, Homo sapiens
  misc_feature (61)..(62): /note="This region represents a CpG dinucleotide"
  misc_feature (61)..(61): /note="Nucleotide may be methylated to form 5-methylcytosine"
gcctattgccaattgcatcagagcctgattcactcggtgtaactggggcacgatgtgtatcgcgaggcccttctcagaaccctgctctcctgaggcccggagagaatcagcagttgaatttc

SEQ ID NO: 23597 - DNA, 122 bp, Homo sapiens
  misc_feature (61)..(62): /note="This region represents a CpG dinucleotide"
  misc_feature (61)..(61): /note="Nucleotide may be methylated to form 5-methylcytosine"
gtgcctgggtctctgggctgtaactgactcaccgggactctgataatattaatactcagacgccagactgcagcctgttctccagaggcccccaggggaatgaatcaatgactgtctgatat

SEQ ID NO: 23598 - DNA, 122 bp, Homo sapiens
  misc_feature (61)..(62): /note="This region represents a CpG dinucleotide"
  misc_feature (61)..(61): /note="Nucleotide may be methylated to form 5-methylcytosine"
cggcagcagtctgcagggctaagagcaccgcgggaggagccttgcaggtgggtcgcgtgacgcacatgtcacgtgatgcgcctgaggccgttcgcgccatctttgttgagggcgagtgccag

SEQ ID NO: 23599 - DNA, 122 bp, Homo sapiens
  misc_feature (61)..(62): /note="This region represents a CpG dinucleotide"
  misc_feature (61)..(61): /note="Nucleotide may be methylated to form 5-methylcytosine"
ttcaaaaagttaccaaaccaccacctcaaacctcaacactttgtctacttggaaagaggacgtgggactgggatttactcggccaccaaaacactcacagggtattatcctatcgcccttca

SEQ ID NO: 23600 - DNA, 122 bp, Homo sapiens
  misc_feature (61)..(62): /note="This region represents a CpG dinucleotide"
  misc_feature (61)..(61): /note="Nucleotide may be methylated to form 5-methylcytosine"
atttgtaatggggcttaatagtgtttgccctgcctcctgttgagggatccagagaaaggacgtcaaagtactttgtaatctgtaaggtttatctgacatgagaggaaatatacatatgctcc

SEQ ID NO: 23601 - DNA, 122 bp, Homo sapiens
  misc_feature (61)..(62): /note="This region represents a CpG dinucleotide"
  misc_feature (61)..(61): /note="Nucleotide may be methylated to form 5-methylcytosine"
tctcctatccccactgaagacacacgcacacgcaggcacacacgctcacacatacacacacgctcccgagacctaagagcagttaaatgtggcagccatgttacaaaattcttctacttcat

SEQ ID NO: 23602 - DNA, 122 bp, Homo sapiens
  misc_feature (61)..(62): /note="This region represents a CpG dinucleotide"
  misc_feature (61)..(61): /note="Nucleotide may be methylated to form 5-methylcytosine"
gcaggaagcccagggtggtggcagtatcagcagcagcagctctgccctaccttgcccatgcgtttccaggggagccaagaattattttgccgcaacactgaggtgtggctgattggaaaatt

SEQ ID NO: 23603 - DNA, 122 bp, Homo sapiens
  misc_feature (61)..(62): /note="This region represents a CpG dinucleotide"
  misc_feature (61)..(61): /note="Nucleotide may be methylated to form 5-methylcytosine"
aggatactggctaggcactgcctgccatgaagtccatggtgtacaccttgaggaacttggcgtcctgggacatgtggctcagtatcttgctctcctcttggtagtgacatctgcagccagat

SEQ ID NO: 23604 - DNA, 122 bp, Homo sapiens
  misc_feature (61)..(62): /note="This region represents a CpG dinucleotide"
  misc_feature (61)..(61): /note="Nucleotide may be methylated to form 5-methylcytosine"
atgcagataatgggtgaggcagtgagtcaggaacaaaatgcctttaaaccatggcccccacggccgggtgcggtagctcatgcctgtaatcccagcactttgggaggccgaggtgagtggat

SEQ ID NO: 23605 - DNA, 122 bp, Homo sapiens
  misc_feature (61)..(62): /note="This region represents a CpG dinucleotide"
  misc_feature (61)..(61): /note="Nucleotide may be methylated to form 5-methylcytosine"
ccagcgcttcatgttcatttgtatttgttccttgtatcctctaaatcccacagaggggagcgatggtgatgactcaggtgggccaagaggattccaactcacctagtgtattgcattacaac

SEQ ID NO: 23606 - DNA, 122 bp, Homo sapiens
  misc_feature (61)..(62): /note="This region represents a CpG dinucleotide"
  misc_feature (61)..(61): /note="Nucleotide may be methylated to form 5-methylcytosine"
gatagttttctgtctcattaggtttcataagtttacacaaagcacagggcaagtgttacacgtaactaaaaagttcagattttaatcagattagcagtgaccctggtttctggaagtaggga

SEQ ID NO: 23607 - DNA, 122 bp, Homo sapiens
  misc_feature (61)..(62): /note="This region represents a CpG dinucleotide"
  misc_feature (61)..(61): /note="Nucleotide may be methylated to form 5-methylcytosine"
gtgtgtgtgtgcatgctcaagcttgcatcactgtgtgcctgcacacatatgaacacgcatcgtgtctgcctgtctccatactttccagatagagtcccttccaggacctgggtcctttcaca

SEQ ID NO: 23608 - DNA, 122 bp, Homo sapiens
  misc_feature (61)..(62): /note="This region represents a CpG dinucleotide"
  misc_feature (61)..(61): /note="Nucleotide may be methylated to form 5-methylcytosine"
tttttttgctttcttacctttgcttgttcccgtctctttctctgtttccttggtcccatccgtttgtttttttttgttttttaaactgggtcaacaacctttgttgtaaaacaaaggtgccc

SEQ ID NO: 23609 - DNA, 122 bp, Homo sapiens
  misc_feature (61)..(62): /note="This region represents a CpG dinucleotide"
  misc_feature (61)..(61): /note="Nucleotide may be methylated to form 5-methylcytosine"
gaggttgagtagtttgttcaaagtctcacagccagactgggattcaaatctagatctctccgactccacagccctgcttttagttaagtataatacaatgctgtaatgctgcccaaggtgag

SEQ ID NO: 23610 - DNA, 122 bp, Homo sapiens
  misc_feature (61)..(62): /note="This region represents a CpG dinucleotide"
  misc_feature (61)..(61): /note="Nucleotide may be methylated to form 5-methylcytosine"
atttcttgtgatttcacaatcaatacactcttactgcctatccatgagaatccaaacactcgatttccagacagtgtcactggtgagtctgatgaaataattatgaaatacatagtgccaat

SEQ ID NO: 23611 - DNA, 122 bp, Homo sapiens
  misc_feature (61)..(62): /note="This region represents a CpG dinucleotide"
  misc_feature (61)..(61): /note="Nucleotide may be methylated to form 5-methylcytosine"
ggtgggaggctggcggagtcagtgactatggcccccacgttcaggaggaaggtgtgatgccgtcatacagttacaggaaaaataagaacttcctcagaaagaacaggtccgaattcttcctg

SEQ ID NO: 23612 - DNA, 122 bp, Homo sapiens
  misc_feature (61)..(62): /note="This region represents a CpG dinucleotide"
  misc_feature (61)..(61): /note="Nucleotide may be methylated to form 5-methylcytosine"
ttcccagccctcctgatctcaggtcttcagtagccagtcacaagcagatgtggtgctcctcgtccccacgctgtgtcatcaggaatagggcgttaatcttgagggatttggggccagcagac

SEQ ID NO: 23613 - DNA, 122 bp, Homo sapiens
  misc_feature (61)..(62): /note="This region represents a CpG dinucleotide"
  misc_feature (61)..(61): /note="Nucleotide may be methylated to form 5-methylcytosine"
ggaaatacagctgaggccaaaactcattctgaacagcaaatgaaaacagatacttttggccgggcatggtggctcatgcgtgtaatctcagcactttgggaggctgaggcaggcagattacc

SEQ ID NO: 23614 - DNA, 122 bp, Homo sapiens
  misc_feature (61)..(62): /note="This region represents a CpG dinucleotide"
  misc_feature (61)..(61): /note="Nucleotide may be methylated to form 5-methylcytosine"
tggaggaaatgtcatcattggtaaaggaggacttggagaagaaactgtttaagccactctcgcagaatctgtacgagtttattgaaatagagttctccgtccaggacaggtattacctctgt

SEQ ID NO: 23615 - DNA, 122 bp, Homo sapiens
  misc_feature (61)..(62): /note="This region represents a CpG dinucleotide"
  misc_feature (61)..(61): /note="Nucleotide may be methylated to form 5-methylcytosine"
atgtgtcatgatctgttctaggtgtctaacaaacataatctcatttaatcccaataacagcgttagaaatagaccttggagttgtaaggaaaatgagcacttagataaaggatttttcagca

SEQ ID NO: 23616 - DNA, 122 bp, Homo sapiens
  misc_feature (61)..(62): /note="This region represents a CpG dinucleotide"
  misc_feature (61)..(61): /note="Nucleotide may be methylated to form 5-methylcytosine"
cttatgcattgaaacttttatttttatggtatagaaaactaagagtggggttactgaatacgaggctatgtggattattaattttaacacatagcaccagaatgtttttctaaaaggctata

SEQ ID NO: 23617 - DNA, 122 bp, Homo sapiens
  misc_feature (61)..(62): /note="This region represents a CpG dinucleotide"
  misc_feature (61)..(61): /note="Nucleotide may be methylated to form 5-methylcytosine"
tgttttttgttttaaaagccacaacagaaaaccttttcttctgttacggctgtcaggagccgtttgggcttaatcaataatgaggtgtttcacttcctggggctgggctatctgtggagagc

SEQ ID NO: 23618 - DNA, 122 bp, Homo sapiens
  misc_feature (61)..(62): /note="This region represents a CpG dinucleotide"
  misc_feature (61)..(61): /note="Nucleotide may be methylated to form 5-methylcytosine"
aagtacctagtgtataaaatagtaccctttactctccctgtgagctgccttgcctgatctcggccacatctgaagaatcaacatacatataacctttaggttggcttacatttgccgtcatt

SEQ ID NO: 23619 - DNA, 122 bp, Homo sapiens
  misc_feature (61)..(62): /note="This region represents a CpG dinucleotide"
  misc_feature (61)..(61): /note="Nucleotide may be methylated to form 5-methylcytosine"
tacagcagatccagatccaacagcctcagcaacagatcattcaggctattccaccacagtcgtttcaactccagtcagggcagacgattcagaccatccagcagcagcctttacagaatgtt

SEQ ID NO: 23620 - DNA, 122 bp, Homo sapiens
  misc_feature (61)..(62): /note="This region represents a CpG dinucleotide"
  misc_feature (61)..(61): /note="Nucleotide may be methylated to form 5-methylcytosine"
ttattttctgacgggctggctggcctgcactggtgagttctctctcaggtcacagcagaccgaaccactaggcttaccagtgactaatctcacagcaggcatacccagctcatgctcttcct

SEQ ID NO: 23621 - DNA, 122 bp, Homo sapiens
  misc_feature (61)..(62): /note="This region represents a CpG dinucleotide"
  misc_feature (61)..(61): /note="Nucleotide may be methylated to form 5-methylcytosine"
ttgttattcctgtcacaacttagaagttcgagtgctcacatggtaagctttgatttccatcgagaggaaaggctttatgttttataaaaaatatatactaaagtaatctacacgaagcttag

SEQ ID NO: 23622 - DNA, 122 bp, Homo sapiens
  misc_feature (61)..(62): /note="This region represents a CpG dinucleotide"
  misc_feature (61)..(61): /note="Nucleotide may be methylated to form 5-methylcytosine"
gccggccggctaaccccgggctggcggccttgcagcgtgcgtggcaacagcagctgggcccgcaagactcagcacgggacgtcctcgtccaagtctgggccaagagcagcggcccagggggc

SEQ ID NO: 23623 - DNA, 122 bp, Homo sapiens
  misc_feature (61)..(62): /note="This region represents a CpG dinucleotide"
  misc_feature (61)..(61): /note="Nucleotide may be methylated to form 5-methylcytosine"
gagaataaataacttagttcatacttcctccctcaaagttaaaagatattccctttgcagcgaaaaatggagctttgaggctccttcgagaaacgctccttggggttgtagaaaggaggaag

SEQ ID NO: 23624 - DNA, 122 bp, Homo sapiens
  misc_feature (61)..(62): /note="This region represents a CpG dinucleotide"
  misc_feature (61)..(61): /note="Nucleotide may be methylated to form 5-methylcytosine"
cgcagatgcgtagaaaggcaaagacacaaaaggtccggctccgtggcggggcgcgacctccgtacttggaattggacttggagcagctgagcccagccagcctggcccgcgcggagacacag

SEQ ID NO: 23625 - DNA, 122 bp, Homo sapiens
  misc_feature (61)..(62): /note="This region represents a CpG dinucleotide"
  misc_feature (61)..(61): /note="Nucleotide may be methylated to form 5-methylcytosine"
cagacgaacccgctgtgcaagaacattttccacacagcggcgcatacccccgcccgggggcgctcggcagccgcacgcggccctcagagcgcagcccccacacgcctttacttctggaaggc

SEQ ID NO: 23626 - DNA, 122 bp, Homo sapiens
  misc_feature (61)..(62): /note="This region represents a CpG dinucleotide"
  misc_feature (61)..(61): /note="Nucleotide may be methylated to form 5-methylcytosine"
ggaaacaggttccgagaggtaaagtcacttgctgcccaagctccaactgctactaagtggcggaaccaagattcgaccccaggtctctgtgactccagggcatgaggcacacccatcctcag

SEQ ID NO: 23627 - DNA, 122 bp, Homo sapiens
  misc_feature (61)..(62): /note="This region represents a CpG dinucleotide"
  misc_feature (61)..(61): /note="Nucleotide may be methylated to form 5-methylcytosine"
ctgctctggtttgctgggggcttagtctgagctccttgccaacagtgtgaatgcttcctgcgctctcaggaggaagccgtacaaagttcacacccttaccacttgctgctctccactgggac

SEQ ID NO: 23628 - DNA, 122 bp, Homo sapiens
  misc_feature (61)..(62): /note="This region represents a CpG dinucleotide"
  misc_feature (61)..(61): /note="Nucleotide may be methylated to form 5-methylcytosine"
tttacctctctggggtgattcagagtttcttgaaaatgctgttccactcttacccaattccgtgtgttgttcttagaaagcctgaggtcagcctacattttttatcagaataaaatttgacc

SEQ ID NO: 23629 - DNA, 122 bp, Homo sapiens
  misc_feature (61)..(62): /note="This region represents a CpG dinucleotide"
  misc_feature (61)..(61): /note="Nucleotide may be methylated to form 5-methylcytosine"
tgggtgagccacagttcagtgcatggcatgcgggaggccttcagtaagtggtagctaccccgtcatcatcactgtcacctgggatgtctccagcccgccctgtgtcagaaggcggccctcct

SEQ ID NO: 23630 - DNA, 122 bp, Homo sapiens
  misc_feature (61)..(62): /note="This region represents a CpG dinucleotide"
  misc_feature (61)..(61): /note="Nucleotide may be methylated to form 5-methylcytosine"
atcagcctgaacagtgaggaggacaaagagcaagaaagtgatatttttggaactaaaaagcgtgatagatatacaagactcttcagtctgaactgagtgataagaatacatgctctgaattt

SEQ ID NO: 23631 - DNA, 122 bp, Homo sapiens
  misc_feature (61)..(62): /note="This region represents a CpG dinucleotide"
  misc_feature (61)..(61): /note="Nucleotide may be methylated to form 5-methylcytosine"
aaccaaaaaaaaaaaaaaataagaaggaaggagtgatcaactacatcaactgcccctgagcggttgggtaatatgacgaatgcttgaccatgtgattaatcaatgtgttagtcattagtgac

SEQ ID NO: 23632 - DNA, 122 bp, Homo sapiens
  misc_feature (61)..(62): /note="This region represents a CpG dinucleotide"
  misc_feature (61)..(61): /note="Nucleotide may be methylated to form 5-methylcytosine"
ttagaggatggggcgaggggctggttcactctgacctcatcacattcttggacgggggagcggaagcctggtgagccatccccaggtccagcctcctgaagcctgctgctgtgatttgtggg

SEQ ID NO: 23633 - DNA, 122 bp, Homo sapiens
  misc_feature (61)..(62): /note="This region represents a CpG dinucleotide"
  misc_feature (61)..(61): /note="Nucleotide may be methylated to form 5-methylcytosine"
aaaccataaacttatttatctgaatgactttctgtttagggatactaagaaaagaagttacgtgaggtaatcatgctggtgctgaggttaagtttgtgcagtttcacttcttccttaatagt

SEQ ID NO: 23634 - DNA, 122 bp, Homo sapiens
  misc_feature (61)..(62): /note="This region represents a CpG dinucleotide"
  misc_feature (61)..(61): /note="Nucleotide may be methylated to form 5-methylcytosine"
gattgcagtgagcctgagatcatgccattgcactccaccctgggtgacagagcgaaactccgtctcaaagaaaacagcagggagtgacagaatccagttagttttagatggcatgttgcaat

SEQ ID NO: 23635 - DNA, 122 bp, Homo sapiens
  misc_feature (61)..(62): /note="This region represents a CpG dinucleotide"
  misc_feature (61)..(61): /note="Nucleotide may be methylated to form 5-methylcytosine"
cactagacttgttccttgtttccattttaatttcgtacatatttagatttaccaggaattcggagagggtttatgtttagctaatgcatcattatgtttgcggggcttgcacacacgtagaa

SEQ ID NO: 23636 - DNA, 122 bp, Homo sapiens
  misc_feature (61)..(62): /note="This region represents a CpG dinucleotide"
  misc_feature (61)..(61): /note="Nucleotide may be methylated to form 5-methylcytosine"
ccacaactatctatcacatgcttgtgagaaacccccaggagcttcctgtttcgtgtgggtcgtgagaagattgcacagcacagtacagctttcattgtctttgagctaatcttaagctagga

SEQ ID NO: 23637 - DNA, 122 bp, Homo sapiens
  misc_feature (61)..(62): /note="This region represents a CpG dinucleotide"
  misc_feature (61)..(61): /note="Nucleotide may be methylated to form 5-methylcytosine"
ctgagcgcaggccggctgtgttggaaggagctgacttctaattgacctgcccgccccgcacgcagagccagatcctggagctgggaggagggagggggtgagcagagcaggaacagcgttaa

SEQ ID NO: 23638 - DNA, 122 bp, Homo sapiens
  misc_feature (61)..(62): /note="This region represents a CpG dinucleotide"
  misc_feature (61)..(61): /note="Nucleotide may be methylated to form 5-methylcytosine"
aatggaaggtgcaagagctttagaacagccagacctgagtttcagatcttggactagctacgaataatttgtgactttgggtaaattacaattcttcttggaacctcaggttcttgagttaa

SEQ ID NO: 23639 - DNA, 122 bp, Homo sapiens
  misc_feature (61)..(62): /note="This region represents a CpG dinucleotide"
  misc_feature (61)..(61): /note="Nucleotide may be methylated to form 5-methylcytosine"
gagaaaatgaggtctatttccctatcccttgactgtgggctggccctgtgacaagcagaacgtagcatgagtgatattgtgtgactgacaagcattggacacaaaaggtcttccagtttata

SEQ ID NO: 23640 - DNA, 122 bp, Homo sapiens
  misc_feature (61)..(62): /note="This region represents a CpG dinucleotide"
  misc_feature (61)..(61): /note="Nucleotide may be methylated to form 5-methylcytosine"
tgtagcctaaacattggcttttaatattcatcctcatgtcttactctctccttgcttcctcgtactggatggtgactgtgtgaatggacagaagggtttggcagagctttgctggtaccact

SEQ ID NO: 23641 - DNA, 122 bp, Homo sapiens
  misc_feature (61)..(62): /note="This region represents a CpG dinucleotide"
  misc_feature (61)..(61): /note="Nucleotide may be methylated to form 5-methylcytosine"
caccacgccagcccaactgtctcttaaagttctctctttctctcaaacccagacaccacacgggaggatcacagagactgattaagagtcaatgaaaaaaaattgtttagtcactttctttg

SEQ ID NO: 23642 - DNA, 122 bp, Homo sapiens
  misc_feature (61)..(62): /note="This region represents a CpG dinucleotide"
  misc_feature (61)..(61): /note="Nucleotide may be methylated to form 5-methylcytosine"
tgctttttaacattccttttgtcctacagatcatataaatgggctgggtacagaggctcacgcctgtaatcccagcactttgggaggccaaggcaggtggattacttgaggtcaggagttca

SEQ ID NO: 23643 - DNA, 122 bp, Homo sapiens
  misc_feature (61)..(62): /note="This region represents a CpG dinucleotide"
  misc_feature (61)..(61): /note="Nucleotide may be methylated to form 5-methylcytosine"
cacacaatggagtatcattcaatcacaggcaggaacaaagtactgatgcatgccactacacgaatggcccgaaaaccattatgtgaaggaaagaagccaggcaccaaagaccccatattgta

SEQ ID NO: 23644 - DNA, 122 bp, Homo sapiens
  misc_feature (61)..(62): /note="This region represents a CpG dinucleotide"
  misc_feature (61)..(61): /note="Nucleotide may be methylated to form 5-methylcytosine"
cagtaaagttcagtctagggttaataaaagattctagggttcactaagacaaagagtagtcgcagtagcagagccttgggtgaagctaaggtccccaggagatctgggatgtctgtgaggaa

SEQ ID NO: 23645 - DNA, 122 bp, Homo sapiens
  misc_feature (61)..(62): /note="This region represents a CpG dinucleotide"
  misc_feature (61)..(61): /note="Nucleotide may be methylated to form 5-methylcytosine"
ccattgcgcccagccggtcttttcatttgagaatgctttgcagtttacaacgaacttccccgtgtctggccctcaagtcgatcctgtttctattttagggatgaggagcgggctcaagggtg

SEQ ID NO: 23646 - DNA, 122 bp, Homo sapiens
  misc_feature (61)..(62): /note="This region represents a CpG dinucleotide"
  misc_feature (61)..(61): /note="Nucleotide may be methylated to form 5-methylcytosine"
ttcattagcaagactaaacataatcatgcctatgaaagtgtggtagcctctaaaacattacgcaaatagccaagtattatcattatttctgttagtaatgaaacaatatatgcgtgtcagat

SEQ ID NO: 23647 - DNA, 122 bp, Homo sapiens
  misc_feature (61)..(62): /note="This region represents a CpG dinucleotide"
  misc_feature (61)..(61): /note="Nucleotide may be methylated to form 5-methylcytosine"
cgtcacaccatgtcatgtagctttttcttcgcatatctgttgattgcttgcacttctgcccgtcctcatactagggcttagttcagcacttctccctggactggatttagactctgatgccc

SEQ ID NO: 23648 - DNA, 122 bp, Homo sapiens
  misc_feature (61)..(62): /note="This region represents a CpG dinucleotide"
  misc_feature (61)..(61): /note="Nucleotide may be methylated to form 5-methylcytosine"
agaacacaatagtcaacatcagcatgtttctcacaaaggttgaattattcagtctttacacgtgggtcaaggtaaagccgtgtcaaagccagtcctgtccctttgcataattatttctccag

SEQ ID NO: 23649 - DNA, 122 bp, Homo sapiens
  misc_feature (61)..(62): /note="This region represents a CpG dinucleotide"
  misc_feature (61)..(61): /note="Nucleotide may be methylated to form 5-methylcytosine"
aagtaatccacctgcttcggcctcctaaagtgctgggattacagtgggcgtgagccatcacgcccagcccagttgactgtttagtgatgtaccaaggcttagggaaaagcctgaaatttctg

SEQ ID NO: 23650 - DNA, 122 bp, Homo sapiens
  misc_feature (61)..(62): /note="This region represents a CpG dinucleotide"
  misc_feature (61)..(61): /note="Nucleotide may be methylated to form 5-methylcytosine"
agcaaccctcctgcctgggcctcccgaagtgctgggattacaggtgtgagccaccgtgcccggcctaagcctctcataaggccgtgctccctgccagaggccacccttgaagaagattccct

SEQ ID NO: 23651 - DNA, 122 bp, Homo sapiens
  misc_feature (61)..(62): /note="This region represents a CpG dinucleotide"
  misc_feature (61)..(61): /note="Nucleotide may be methylated to form 5-methylcytosine"
ggaatgagaaagcacagtgaatcactcagggactagcaacagtgggaagctgttagtacccgtagtcctgaaggcgtgaggggagggaacagtgttaccagagcctgataggagctgagcca

SEQ ID NO: 23652 - DNA, 122 bp, Homo sapiens
  misc_feature (61)..(62): /note="This region represents a CpG dinucleotide"
  misc_feature (61)..(61): /note="Nucleotide may be methylated to form 5-methylcytosine"
ctttctccttcccaggattcggtcattgtctgcagcagctgtgcctgtgggacctgagcccgctgttacgaaggaaagcatggggatgactcagggagggtacatcagagcagtgtgggtgg

SEQ ID NO: 23653 - DNA, 122 bp, Homo sapiens
  misc_feature (61)..(62): /note="This region represents a CpG dinucleotide"
  misc_feature (61)..(61): /note="Nucleotide may be methylated to form 5-methylcytosine"
gaaatgcggcagtacccactaaaaaacttaaaaatgcttaccattcatgactcagcaattcgactctagaattttttaggaaaaagtttcaatgatgtatattaagattcatgcatacagtt

SEQ ID NO: 23654 - DNA, 122 bp, Homo sapiens
  misc_feature (61)..(62): /note="This region represents a CpG dinucleotide"
  misc_feature (61)..(61): /note="Nucleotide may be methylated to form 5-methylcytosine"
tgcaatgggccctgcaaattatgtagacaatcctgcctctggccctgtgggcagggcctgcgtctccttcccaggatagctgagtgaaggattagatactaagccttcatgatgggttttgg

SEQ ID NO: 23655 - DNA, 122 bp, Homo sapiens
  misc_feature (61)..(62): /note="This region represents a CpG dinucleotide"
  misc_feature (61)..(61): /note="Nucleotide may be methylated to form 5-methylcytosine"
tgttcaagaaatcatttactaagggacagcttagtatttgtccatcagttggcttattgacgtaacctgtgtgctaaattcactggaatgtggcgtaatcaaatctggctccttccacttct

SEQ ID NO: 23656 - DNA, 122 bp, Homo sapiens
  misc_feature (61)..(62): /note="This region represents a CpG dinucleotide"
  misc_feature (61)..(61): /note="Nucleotide may be methylated to form 5-methylcytosine"
gttcacactttaactctactgtgtaccaggtctttgtgaccctggcaaattttgtaacctcgcctgacgctagtctcctcaactcaaaagcagggtcatgatattcacctcatagagttggc

SEQ ID NO: 23657 - DNA, 122 bp, Homo sapiens
  misc_feature (61)..(62): /note="This region represents a CpG dinucleotide"
  misc_feature (61)..(61): /note="Nucleotide may be methylated to form 5-methylcytosine"
tcaggtattcctgctgccctccaaaagatatactaataaaataaaaacgaaagtctcaatcgcaaaagaagctgtggtttaggtggcaaagcatattaattgttttgtacctttcttctctt

SEQ ID NO: 23658 - DNA, 122 bp, Homo sapiens
  misc_feature (61)..(62): /note="This region represents a CpG dinucleotide"
  misc_feature (61)..(61): /note="Nucleotide may be methylated to form 5-methylcytosine"
ctataaagtttgaattctagaggacctcagggttcaactaggcaactagttttttaactccgtgtattgaattgccaaacatactctatagaaatatttatcaccatctgcctattttttgt

SEQ ID NO: 23659 - DNA, 122 bp, Homo sapiens
  misc_feature (61)..(62): /note="This region represents a CpG dinucleotide"
  misc_feature (61)..(61): /note="Nucleotide may be methylated to form 5-methylcytosine"
ggctccagaggccgcacttgacactcctcgaacattgcctcaattactcagtctctggtgcgagccagaattgcaggacctgctaccttgcgctctgctgtgcatacaaagctattaagtcg

SEQ ID NO: 23660 - DNA, 122 bp, Homo sapiens
  misc_feature (61)..(62): /note="This region represents a CpG dinucleotide"
  misc_feature (61)..(61): /note="Nucleotide may be methylated to form 5-methylcytosine"
ttactttgctcttatggctacccagtctgattccacatgccctcttttggccaaaccatccgcaatttgtgctctccctgtcttctatctttgccttccttcttctttcttagatatttaat

SEQ ID NO: 23661 - DNA, 122 bp, Homo sapiens
  misc_feature (61)..(62): /note="This region represents a CpG dinucleotide"
  misc_feature (61)..(61): /note="Nucleotide may be methylated to form 5-methylcytosine"
tctcgtttcagaggtgaggacacgcctatggtgctgtgtctgtgtccagcaggttctgctcggccccgacagtgctgcccgccaggtgcccttcccgcacgcttgctgcagtcagccctgca

SEQ ID NO: 23662 - DNA, 122 bp, Homo sapiens
  misc_feature (61)..(62): /note="This region represents a CpG dinucleotide"
  misc_feature (61)..(61): /note="Nucleotide may be methylated to form 5-methylcytosine"
caccttagaccacaggaaatgtctggttaacacacgaagagatggaaacgctcgcagccacgccgcaaacggttagtcacgccccacagcctgcactcctcccagcgcgttttccacttaag

SEQ ID NO: 23663 - DNA, 122 bp, Homo sapiens
  misc_feature (61)..(62): /note="This region represents a CpG dinucleotide"
  misc_feature (61)..(61): /note="Nucleotide may be methylated to form 5-methylcytosine"
tttaaaactccctaataaaaggcttcattttgtttcagccactgtcctcatcctaaccttcgctttaattacttcttaggaacatcctgcccatagataaaatctcattactttcccgtttg

SEQ ID NO: 23664 - DNA, 122 bp, Homo sapiens
  misc_feature (61)..(62): /note="This region represents a CpG dinucleotide"
  misc_feature (61)..(61): /note="Nucleotide may be methylated to form 5-methylcytosine"
tgattcatcccagaacaaaggacgtcttaaaaacctctcattacaggaactctcctcctacgacagagataagtggtaggcctggcagtgaacttaaagagtatcaaacaatcccttgacta

SEQ ID NO: 23665 - DNA, 122 bp, Homo sapiens
  misc_feature (61)..(62): /note="This region represents a CpG dinucleotide"
  misc_feature (61)..(61): /note="Nucleotide may be methylated to form 5-methylcytosine"
gggattacagacaggagctactgtgcccaaccctattatacttataataattagttcatccgtttacatatatttatactcttacactaagtttatcagtctcatatatattttattcactt

SEQ ID NO: 23666 - DNA, 122 bp, Homo sapiens
  misc_feature (61)..(62): /note="This region represents a CpG dinucleotide"
  misc_feature (61)..(61): /note="Nucleotide may be methylated to form 5-methylcytosine"
gtcgccatcagcagtttcaggaacccagtgtggatacctttccttctggaaagaatctcccgtctcttagcccgtctgagcctgtctcttcctgtctctgtctctctctctttctctgtcct

SEQ ID NO: 23667 - DNA, 122 bp, Homo sapiens
  misc_feature (61)..(62): /note="This region represents a CpG dinucleotide"
  misc_feature (61)..(61): /note="Nucleotide may be methylated to form 5-methylcytosine"
tgggtaacctttatttcccttctttttctctttagctcggcttattccaggggtgtgtttcgtcgagatgcacgtaagaaatccatttttctattgttcaacttttattctattttcccagt

SEQ ID NO: 23668 - DNA, 122 bp, Homo sapiens
  misc_feature (61)..(62): /note="This region represents a CpG dinucleotide"
  misc_feature (61)..(61): /note="Nucleotide may be methylated to form 5-methylcytosine"
attcctgcgtcaaaaatccagcttgtgggctgaaacctctcaatcctgacaaataagtctcgcaactacatctgagataattacatttagtggcaattcctgctaggcaattaattgcttga

SEQ ID NO: 23669 - DNA, 122 bp, Homo sapiens
  misc_feature (61)..(62): /note="This region represents a CpG dinucleotide"
  misc_feature (61)..(61): /note="Nucleotide may be methylated to form 5-methylcytosine"
aagctatctttactgcacacacaaatagatgaactcgatggacaacttgagttttatccacggtgactgcatctgttgcattggccttcatgctgtcagtctcaggcaacaagaacatgagc

SEQ ID NO: 23670 - DNA, 122 bp, Homo sapiens
  misc_feature (61)..(62): /note="This region represents a CpG dinucleotide"
  misc_feature (61)..(61): /note="Nucleotide may be methylated to form 5-methylcytosine"
agaaggaattctagaaaaggagcggagtctgagaggtcgctggagtggtaagggcagtggcgcatgctcggctgaggaatcagcaggactgcagttagggcctaggcttcagcttccttcct

SEQ ID NO: 23671 - DNA, 122 bp, Homo sapiens
  misc_feature (61)..(62): /note="This region represents a CpG dinucleotide"
  misc_feature (61)..(61): /note="Nucleotide may be methylated to form 5-methylcytosine"
cagtgctaaaggcccggctgtcactgctctgcagaatggtgaccttcagggagcccccggcgccccatacctgcatggggagtaggaactgaacttccatcaactgtgtacttatagtgggc

SEQ ID NO: 23672 - DNA, 122 bp, Homo sapiens
  misc_feature (61)..(62): /note="This region represents a CpG dinucleotide"
  misc_feature (61)..(61): /note="Nucleotide may be methylated to form 5-methylcytosine"
tgagtttaaatgttacttctgtgaaggcactctaccaaaaactaagaacatagaagttggcgacaaatgcttaaccaaagtaaatgaaacaacttttgggagactggcttgcccaaggatca

SEQ ID NO: 23673 - DNA, 122 bp, Homo sapiens
  misc_feature (61)..(62): /note="This region represents a CpG dinucleotide"
  misc_feature (61)..(61): /note="Nucleotide may be methylated to form 5-methylcytosine"
cactgatcttaacttgatcacagtagatccattgctaagccacataagtcatgggtagaccgtaacataactgacaaaatgttttggcactagggaaggtttaaagacttttctgcaggtgc

SEQ ID NO: 23674 - DNA, 122 bp, Homo sapiens
  misc_feature (61)..(62): /note="This region represents a CpG dinucleotide"
  misc_feature (61)..(61): /note="Nucleotide may be methylated to form 5-methylcytosine"
agggaagaatgacacactgaaggtcatcaggtggaggctggctggcatccgtggctgtttcgtgtagtaattacacgttgctcattgaagttgagttacaagcacaggctctccatgtatca

SEQ ID NO: 23675 - DNA, 122 bp, Homo sapiens
  misc_feature (61)..(62): /note="This region represents a CpG dinucleotide"
  misc_feature (61)..(61): /note="Nucleotide may be methylated to form 5-methylcytosine"
ccgcccattctacatgaaggccagctgagctgctgaaggtaaagagagtggctgcgcacacgagccacaggcagaatcacatacacacttggacatgcgtggccatgaacaggatcaaacac

SEQ ID NO: 23676 - DNA, 122 bp, Homo sapiens
  misc_feature (61)..(62): /note="This region represents a CpG dinucleotide"
  misc_feature (61)..(61): /note="Nucleotide may be methylated to form 5-methylcytosine"
tccctcttgtcaggtcatccatgactttagagaacagacacaagtgtatccagctgtccacgggtggagctacccgttgggcttatgagtgacctggagtgacagctgagtcaccctgggta

SEQ ID NO: 23677 - DNA, 122 bp, Homo sapiens
  misc_feature (61)..(62): /note="This region represents a CpG dinucleotide"
  misc_feature (61)..(61): /note="Nucleotide may be methylated to form 5-methylcytosine"
tgtttcagatgaagaactggaagacaaccccaaccagagtgacctgattgagcaggcagccgagatgctttatggattgatccacgcccgctacatccttaccaaccgtggcatcgcccaga

SEQ ID NO: 23678 - DNA, 122 bp, Homo sapiens
  misc_feature (61)..(62): /note="This region represents a CpG dinucleotide"
  misc_feature (61)..(61): /note="Nucleotide may be methylated to form 5-methylcytosine"
tagaggccaagaatgctagcccaagggtgaaggaagcccaggaagatttcaaggaagagacgaacacctcagagctgggctttaggaagggccaggggaaaagtggtagattagagggagga

SEQ ID NO: 23679 - DNA, 122 bp, Homo sapiens
  misc_feature (61)..(62): /note="This region represents a CpG dinucleotide"
  misc_feature (61)..(61): /note="Nucleotide may be methylated to form 5-methylcytosine"
cacatgaaacatctgccttgttgtttacttacaatgtgcacacactgtgataaagccttccgtggctctcactgatccctgacatccccgtgctgttggctctactgcatcacaggctccca

SEQ ID NO: 23680 - DNA, 122 bp, Homo sapiens
  misc_feature (61)..(62): /note="This region represents a CpG dinucleotide"
  misc_feature (61)..(61): /note="Nucleotide may be methylated to form 5-methylcytosine"
tgcccctccttctcctccccaccaggtggccatcaggcgcaggtgcaggcccagcccctacgtggtaaactttctggtgcccagtggcattctgattgccatcgatgccctcagtttctacc

SEQ ID NO: 23681 - DNA, 122 bp, Homo sapiens
  misc_feature (61)..(62): /note="This region represents a CpG dinucleotide"
  misc_feature (61)..(61): /note="Nucleotide may be methylated to form 5-methylcytosine"
agtgggtgttaatcctcctgcactccctgaatgtacatatgcagacatacccagcatcaacgggaaagctgcgggacaggatgtcagaggtgtgcatgaagtgaggtgctattggcatgcac

SEQ ID NO: 23682 - DNA, 122 bp, Homo sapiens
  misc_feature (61)..(62): /note="This region represents a CpG dinucleotide"
  misc_feature (61)..(61): /note="Nucleotide may be methylated to form 5-methylcytosine"
gaaggtaaaaatggctgccacataggtgcccccttctgcttgggatccccgtctttacctcgtaatcactgacaatgccgcaagtcccagtacttcagagaattactgagtgcgagcggtag

SEQ ID NO: 23683 - DNA, 122 bp, Homo sapiens
  misc_feature (61)..(62): /note="This region represents a CpG dinucleotide"
  misc_feature (61)..(61): /note="Nucleotide may be methylated to form 5-methylcytosine"
ccagggctttctcagagcaagaccattggttctgggcatgtggtggtgcccagctacttgcgtgacaagcaacgccacccctgttcttcttggtgctcactccaaaagcctggtaaggagcc

SEQ ID NO: 23684 - DNA, 122 bp, Homo sapiens
  misc_feature (61)..(62): /note="This region represents a CpG dinucleotide"
  misc_feature (61)..(61): /note="Nucleotide may be methylated to form 5-methylcytosine"
cagggtctcccgggctcaagagatcctcccgcctccaccttccaaattgctgggattacacgagtgagccaccgccctgccctggctctagatgtttaaattcatgtactccgcacatcaac

SEQ ID NO: 23685 - DNA, 122 bp, Homo sapiens
  misc_feature (61)..(62): /note="This region represents a CpG dinucleotide"
  misc_feature (61)..(61): /note="Nucleotide may be methylated to form 5-methylcytosine"
aagctgctggcagcccctggatcagacattcagtggaaggcccatgtcacagacccaacccgaaggttaattttccctcattagcatctccatagtctgctccttgcaagggatctcaggtc

SEQ ID NO: 23686 - DNA, 122 bp, Homo sapiens
  misc_feature (61)..(62): /note="This region represents a CpG dinucleotide"
  misc_feature (61)..(61): /note="Nucleotide may be methylated to form 5-methylcytosine"
gagcacactgtgtggttctagatacacaccacatagtgaaacagacttggtccctgccctcgtggaccttacaaccccatgatgaaggccacataacaagaaacttctctggacacacattt

SEQ ID NO: 23687 - DNA, 122 bp, Homo sapiens
  misc_feature (61)..(62): /note="This region represents a CpG dinucleotide"
  misc_feature (61)..(61): /note="Nucleotide may be methylated to form 5-methylcytosine"
agtgcatgaataagttccctgacttcttcagtatgcagcatactgaatatatgactattacgcttggtaggggaactcagtaaatatttgccgattactttggcacactattaccttgaaaa

SEQ ID NO: 23688 - DNA, 122 bp, Homo sapiens
  misc_feature (61)..(62): /note="This region represents a CpG dinucleotide"
  misc_feature (61)..(61): /note="Nucleotide may be methylated to form 5-methylcytosine"
aacccctagcccccacctagagaaattccacagatccaacacctagtctctgccacgaagcgcgaacactccagcccactgttttccttccttcctctggactgctataacgatgcttacta

SEQ ID NO: 23689 - DNA, 122 bp, Homo sapiens
  misc_feature (61)..(62): /note="This region represents a CpG dinucleotide"
  misc_feature (61)..(61): /note="Nucleotide may be methylated to form 5-methylcytosine"
aattatattggtcttaaatactaagacccattgcgccccatttagtgataagaaacatgacggtatctcctcagatactttgtttttaaagagcaggctaaagagattattgtattctgttt

SEQ ID NO: 23690 - DNA, 122 bp, Homo sapiens
  misc_feature (61)..(62): /note="This region represents a CpG dinucleotide"
  misc_feature (61)..(61): /note="Nucleotide may be methylated to form 5-methylcytosine"
gggcaggcactcaggcaagggtggggcagaggagctagacccgctctgagggagtacggccgccgtgccggcagcctgacctaaggctgcttcagccccgcccacctcagcaggtacctgcg

SEQ ID NO: 23691 - DNA, 122 bp, Homo sapiens
  misc_feature (61)..(62): /note="This region represents a CpG dinucleotide"
  misc_feature (61)..(61): /note="Nucleotide may be methylated to form 5-methylcytosine"
gctttgttatatttgctatcttttgagagttctgttttgtttgcttgtttgtttttatagcgagctgaaaatgtcaggaagtatgagtgctcttgataaaattagttgataggagaaactaa

SEQ ID NO: 23692 - DNA, 122 bp, Homo sapiens
  misc_feature (61)..(62): /note="This region represents a CpG dinucleotide"
  misc_feature (61)..(61): /note="Nucleotide may be methylated to form 5-methylcytosine"
atgtgtgagctcagctgaagtaaacaccttccacgtactgagaacagggctggctcctggcgatctaacatcttacagtctacaggggcccctgatcagtaagggctgaggattgcagatag

SEQ ID NO: 23693 - DNA, 122 bp, Homo sapiens
  misc_feature (61)..(62): /note="This region represents a CpG dinucleotide"
  misc_feature (61)..(61): /note="Nucleotide may be methylated to form 5-methylcytosine"
accactactgctaaccgcaccaaaacacacaagagtcatacagtgtactaagaacctctccgctaacagtcttaagcgccacctgctggattgcagcccaaaatacaacgccaaaatatttt

SEQ ID NO: 23694 - DNA, 122 bp, Homo sapiens
  misc_feature (61)..(62): /note="This region represents a CpG dinucleotide"
  misc_feature (61)..(61): /note="Nucleotide may be methylated to form 5-methylcytosine"
catatattcttgataacctctccaactttatgtctcaccacccccactcacttcgtaattcgtgccttatcagaatggacctgttatactggcagttcaccatatataccattacattttgt

SEQ ID NO: 23695 - DNA, 122 bp, Homo sapiens
  misc_feature (61)..(62): /note="This region represents a CpG dinucleotide"
  misc_feature (61)..(61): /note="Nucleotide may be methylated to form 5-methylcytosine"
gatgtggtgagccagtatgtgccagctgtgcgttattctaacagtgtcagttatggtagacgtaaacatgtacatttgcatttgaagctattctggccttgcagatgtgctagaaagctcag

SEQ ID NO: 23696 - DNA, 122 bp, Homo sapiens
  misc_feature (61)..(62): /note="This region represents a CpG dinucleotide"
  misc_feature (61)..(61): /note="Nucleotide may be methylated to form 5-methylcytosine"
ttttaatttacaggcttctgtaatgtatcccaatcctgatcccttagaaacacaaacaggcgttcttgacttttatggacaaagatcatggcgacaaggaatactaagtaaataatttttcc

SEQ ID NO: 23697 - DNA, 122 bp, Homo sapiens
  misc_feature (61)..(62): /note="This region represents a CpG dinucleotide"
  misc_feature (61)..(61): /note="Nucleotide may be methylated to form 5-methylcytosine"
gagatcctggtgtgttgcctgggggcagtggctgggtaaccctgcatccttcactgcattcggtattttgggggtggcagggccagctccttctgctcatccttagcctaagcccagtcttc

SEQ ID NO: 23698 - DNA, 122 bp, Homo sapiens
  misc_feature (61)..(62): /note="This region represents a CpG dinucleotide"
  misc_feature (61)..(61): /note="Nucleotide may be methylated to form 5-methylcytosine"
agatctccctcacattgcctttgatctcctgatacccatcacactgtcagcttagcgtagcgtaactaaggcaggaagagacccattctaacatcttgcttgtagcagacacttagggttcc

SEQ ID NO: 23699 - DNA, 122 bp, Homo sapiens
  misc_feature (61)..(62): /note="This region represents a CpG dinucleotide"
  misc_feature (61)..(61): /note="Nucleotide may be methylated to form 5-methylcytosine"
ggaagcacggactggtcctcctcagctctcccacctatgtgcttttaacaagtcaccgcacggctctgccatctacttacaccaggtggccacaaggccctaactgccacccaagcagacac

SEQ ID NO: 23700 - DNA, 122 bp, Homo sapiens
  misc_feature (61)..(62): /note="This region represents a CpG dinucleotide"
  misc_feature (61)..(61): /note="Nucleotide may be methylated to form 5-methylcytosine"
ttaagccacccagttatagtttgggtactttgttacaggaaatacaacacccagttataacgcccacttttgtttgtttaaaaaaggcaggaaattgtggtagttgagagcacaagctttag

SEQ ID NO: 23701 - DNA, 122 bp, Homo sapiens
  misc_feature (61)..(62): /note="This region represents a CpG dinucleotide"
  misc_feature (61)..(61): /note="Nucleotide may be methylated to form 5-methylcytosine"
gctaagaatatagttgtaagattactcaaggacaaatgtactgtccttgaaaggcaaatacgaaataagcatacacacaaatggaagttagcagtctgagtcatggcagaggccatgaagga

SEQ ID NO: 23702 - DNA, 122 bp, Homo sapiens
  misc_feature (61)..(62): /note="This region represents a CpG dinucleotide"
  misc_feature (61)..(61): /note="Nucleotide may be methylated to form 5-methylcytosine"
atctgccgcgaggtccttcctggaggtgctgactggactagctgatgttggctagatgaccgccaaccagatgaccttggctaactgatcttatcccttgggccgctgtggcacaggatgag

SEQ ID NO: 23703 - DNA, 122 bp, Homo sapiens
  misc_feature (61)..(62): /note="This region represents a CpG dinucleotide"
  misc_feature (61)..(61): /note="Nucleotide may be methylated to form 5-methylcytosine"
acttcgacactacaaaagcataccatgagtggcgatttctggcaagtatttcttctaccacggcacacagaaattctcagggaagaatacatgttcaagagaatacgcaacatcaaaatacc

SEQ ID NO: 23704 - DNA, 122 bp, Homo sapiens
  misc_feature (61)..(62): /note="This region represents a CpG dinucleotide"
  misc_feature (61)..(61): /note="Nucleotide may be methylated to form 5-methylcytosine"
cagtgtgcttgttgagctggattgcacctgggatcacacctggagcaggttacgtaaccacgtaggagttttcctacctgggaaatgaagctcataagctctgcctacctcacaggttcctg

SEQ ID NO: 23705 - DNA, 122 bp, Homo sapiens
  misc_feature (61)..(62): /note="This region represents a CpG dinucleotide"
  misc_feature (61)..(61): /note="Nucleotide may be methylated to form 5-methylcytosine"
attacaggtgtgagccactgcaactggcctgcctacatttataccaaagaaaatcttggccggcgcagtggctcatgcttataatcccagcaatttgggaggcagaggcaggtagatcaact

SEQ ID NO: 23706 - DNA, 122 bp, Homo sapiens
  misc_feature (61)..(62): /note="This region represents a CpG dinucleotide"
  misc_feature (61)..(61): /note="Nucleotide may be methylated to form 5-methylcytosine"
tgtttccagcttttggctgttaggattgtgcatacatcctggcccacatgtgtacacttccgtccagggtgtgtggatagtcagaagtggaagtgctggatcacaggaggtgcatttcttca

SEQ ID NO: 23707 - DNA, 122 bp, Homo sapiens
  misc_feature (61)..(62): /note="This region represents a CpG dinucleotide"
  misc_feature (61)..(61): /note="Nucleotide may be methylated to form 5-methylcytosine"
acaaataagtaatacataggattaaatgtttgcaaaatgtgccagagtggagtgcagccacgggagacagccaaagtacattaagtggagacagaggagggaaggtgaggatgatgtttctt

SEQ ID NO: 23708 - DNA, 122 bp, Homo sapiens
  misc_feature (61)..(62): /note="This region represents a CpG dinucleotide"
  misc_feature (61)..(61): /note="Nucleotide may be methylated to form 5-methylcytosine"
ttgctcagtggagcaggcagatgttcttgttccaaaaggttcactagccatgcagctccccgtctcttcaaagctgcggagagagtgactctccgatgagtcacagctgcttctttgctgat

SEQ ID NO: 23709 - DNA, 122 bp, Homo sapiens
  misc_feature (61)..(62): /note="This region represents a CpG dinucleotide"
  misc_feature (61)..(61): /note="Nucleotide may be methylated to form 5-methylcytosine"
ctgaggccaggaagaaaaaagacaggactaatccaccccaattgtagacagtgggaacagcgctggcttgcttagaggtacagaggaaagcagcatgcaaccctgccccgtggtgaaggaag

SEQ ID NO: 23710 - DNA, 122 bp, Homo sapiens
  misc_feature (61)..(62): /note="This region represents a CpG dinucleotide"
  misc_feature (61)..(61): /note="Nucleotide may be methylated to form 5-methylcytosine"
tttccttcagctgatgggacggttgacagtggtcagggatcctctgtcttcacagaatctcgagtgagcagccaacagacagtttcatatggttcccaacatgaacaggcacattctacagg

SEQ ID NO: 23711 - DNA, 122 bp, Homo sapiens
  misc_feature (61)..(62): /note="This region represents a CpG dinucleotide"
  misc_feature (61)..(61): /note="Nucleotide may be methylated to form 5-methylcytosine"
tgccagttgattctgttcacagagcacctagtgtttgagacctttgatttgaagtgggcacggatttgttggatgcttttgggagcaggctgaagagttgggttgagactggtgataggaca

SEQ ID NO: 23712 - DNA, 122 bp, Homo sapiens
  misc_feature (61)..(62): /note="This region represents a CpG dinucleotide"
  misc_feature (61)..(61): /note="Nucleotide may be methylated to form 5-methylcytosine"
ccacagattcccacagttatcctcatgtgtctaagaatcactgccttactgttgtttagacgtgaaaattcccaactgggaagcccccagaaaacctcacttctcttttctactgttaaaaa

SEQ ID NO: 23713 - DNA, 122 bp, Homo sapiens
  misc_feature (61)..(62): /note="This region represents a CpG dinucleotide"
  misc_feature (61)..(61): /note="Nucleotide may be methylated to form 5-methylcytosine"
ggtctttaaaagagcaaaccacagctattctcacttcccagaaccctttgctgattacagcgtgagatcaaatccccatggacagggcggactggtatttcaaacatgaaacactggaatgc

SEQ ID NO: 23714 - DNA, 122 bp, Homo sapiens
  misc_feature (61)..(62): /note="This region represents a CpG dinucleotide"
  misc_feature (61)..(61): /note="Nucleotide may be methylated to form 5-methylcytosine"
cggtccctggccttgcctgtctgtgcccccctccccgcccgcgtatcctctctccccgagcggctcaccagcttaggctgtggtggccccctctgggaccaaacccggctccgccttgtgtg

SEQ ID NO: 23715 - DNA, 122 bp, Homo sapiens
  misc_feature (61)..(62): /note="This region represents a CpG dinucleotide"
  misc_feature (61)..(61): /note="Nucleotide may be methylated to form 5-methylcytosine"
tccaatccgctcctccctggcctccgattggccagttcagtacccgccacccacactctccgcaacctgggctcctagggccgcctccaccccgccccgccccccgttgtcctggccccgac

SEQ ID NO: 23716 - DNA, 122 bp, Homo sapiens
  misc_feature (61)..(62): /note="This region represents a CpG dinucleotide"
  misc_feature (61)..(61): /note="Nucleotide may be methylated to form 5-methylcytosine"
ctacagaactcacacacctaactgctatgccacctctcagccatgctgatgtcaggtagacgttaggtagcatgacaactatcatcaaaacactcccaggggatcttgatttctggaattcc

SEQ ID NO: 23717 - DNA, 122 bp, Homo sapiens
  misc_feature (61)..(62): /note="This region represents a CpG dinucleotide"
  misc_feature (61)..(61): /note="Nucleotide may be methylated to form 5-methylcytosine"
atgcagcagacacggccagaggatgacgctgcacacgtgagcagggtcaggaggtacacacgtaccacaagcatgaagcacctcctacgtgcctgactgggcgaggtcccagctgccctcag

SEQ ID NO: 23718 - DNA, 122 bp, Homo sapiens
  misc_feature (61)..(62): /note="This region represents a CpG dinucleotide"
  misc_feature (61)..(61): /note="Nucleotide may be methylated to form 5-methylcytosine"
gagcccactcacatccgctccctggcctcactcactctggaaacgtgtaattacaagtgacgagggctgcagcatgtctttgcattcagagccagtgaagcacagataaccccggagtgaca

SEQ ID NO: 23719 - DNA, 122 bp, Homo sapiens
  misc_feature (61)..(62): /note="This region represents a CpG dinucleotide"
  misc_feature (61)..(61): /note="Nucleotide may be methylated to form 5-methylcytosine"
atctagaccccctaatggcgcttcggccttaaaaaaggtttagaaattcttggcagtggacgcaaagttgctagactagatcagagaccactgttttgcgaacctcagtttccttgtttgta

SEQ ID NO: 23720 - DNA, 122 bp, Homo sapiens
  misc_feature (61)..(62): /note="This region represents a CpG dinucleotide"
  misc_feature (61)..(61): /note="Nucleotide may be methylated to form 5-methylcytosine"
ggaagctgtgtgttcaccgtttaaaatagaactttcatttgtatgccttcgtacagcctacgtagcactataccatattctttttttacctttgttcagcaccttctcactagtgggtgctg

SEQ ID NO: 23721 - DNA, 122 bp, Homo sapiens
  misc_feature (61)..(62): /note="This region represents a CpG dinucleotide"
  misc_feature (61)..(61): /note="Nucleotide may be methylated to form 5-methylcytosine"
gtggactctttggtggctttgcattttaaaaatgaaattttccaatgtctgccacacaaacgtatgtaaatgtatatacccacacacatacacacatatgtcatatattactagcatatgag

SEQ ID NO: 23722 - DNA, 122 bp, Homo sapiens
  misc_feature (61)..(62): /note="This region represents a CpG dinucleotide"
  misc_feature (61)..(61): /note="Nucleotide may be methylated to form 5-methylcytosine"
ccttggagggggggaaatggttctcatatgcagaaagtttacctttatcctgcttttgtgcgcagctcacccctgccctgcaaccccccactcccagcccaggggactcagtaaacaagcag

SEQ ID NO: 23723 - DNA, 122 bp, Homo sapiens
  misc_feature (61)..(62): /note="This region represents a CpG dinucleotide"
  misc_feature (61)..(61): /note="Nucleotide may be methylated to form 5-methylcytosine"
ggtgatccacccgccttggcctcccaaagtgctgggattacaggcttgagccaccatgcccggcaagaactgttgttttctagatgccagatgaatgagtttagaatgacctatttgaggag

SEQ ID NO: 23724 - DNA, 122 bp, Homo sapiens
  misc_feature (61)..(62): /note="This region represents a CpG dinucleotide"
  misc_feature (61)..(61): /note="Nucleotide may be methylated to form 5-methylcytosine"
cttgagaggtcgtagctccacacatgactccagctgtcagctttttactgatgagcatcacgtttttccttatctggacctctctcctaagcttcagggaaggctatctcattgcctactga

SEQ ID NO: 23725 - DNA, 122 bp, Homo sapiens
  misc_feature (61)..(62): /note="This region represents a CpG dinucleotide"
  misc_feature (61)..(61): /note="Nucleotide may be methylated to form 5-methylcytosine"
cctacaggatgcatctaaactagtttggtcagcttatccattccctgaaagcaaggaagccgccacatcagtaactccgttgctaaggcaactgcttactttccatatcaactgcaaactcg

SEQ ID NO: 23726 - DNA, 122 bp, Homo sapiens
  misc_feature (61)..(62): /note="This region represents a CpG dinucleotide"
  misc_feature (61)..(61): /note="Nucleotide may be methylated to form 5-methylcytosine"
caccaggaaggaccttgtaggcagtttgattgctatggttctataaacaagtgaaaattccgtaacatctttgggctttttatttcatttttaaattaagaggttgggcaaagtgatttcta

SEQ ID NO: 23727 - DNA, 122 bp, Homo sapiens
  misc_feature (61)..(62): /note="This region represents a CpG dinucleotide"
  misc_feature (61)..(61): /note="Nucleotide may be methylated to form 5-methylcytosine"
catgcatccagcaggggtgctaggcaaagaaaaggtgggttgaggacagggcgtgttctccgggactctgtgagccacgaggaggctgcaacaccagccccagagcctccgggaaatgggga

SEQ ID NO: 23728 - DNA, 122 bp, Homo sapiens
  misc_feature (61)..(62): /note="This region represents a CpG dinucleotide"
  misc_feature (61)..(61): /note="Nucleotide may be methylated to form 5-methylcytosine"
tcaatgatgaaagcaacttttttcagatcctagttgtcaaatactgaaataatgtttcctcgatttttggtgctacttaccatatagaggctattgtcataatatacctttagtttaattta

SEQ ID NO: 23729 - DNA, 122 bp, Homo sapiens
  misc_feature (61)..(62): /note="This region represents a CpG dinucleotide"
  misc_feature (61)..(61): /note="Nucleotide may be methylated to form 5-methylcytosine"
taaaggcttagacagtttggatgtaccagcctggcagaggaagtccacttttcctccccacgtatcccctgagattcacagaggcaaggcagagaacaagacctgtgcttctttactccaaa

SEQ ID NO: 23730 - DNA, 122 bp, Homo sapiens
  misc_feature (61)..(62): /note="This region represents a CpG dinucleotide"
  misc_feature (61)..(61): /note="Nucleotide may be methylated to form 5-methylcytosine"
cccatagtacgacctcatactcaatcacaaagcaaacctttggcccggcacagtggctcacgcttgtaatcccagcatattgggaggccaaggctggtggatcacctgaggttaggtgttca

SEQ ID NO: 23731 - DNA, 122 bp, Homo sapiens
  misc_feature (61)..(62): /note="This region represents a CpG dinucleotide"
  misc_feature (61)..(61): /note="Nucleotide may be methylated to form 5-methylcytosine"
aagtcctgtatatgtatgtagtagtttgggtgtgtatatatagtagcatttcaaaatggacgtactggtttaacctcctatccttggagagcagctggctctccaccttgttacacattatg

SEQ ID NO: 23732 - DNA, 122 bp, Homo sapiens
  misc_feature (61)..(62): /note="This region represents a CpG dinucleotide"
  misc_feature (61)..(61): /note="Nucleotide may be methylated to form 5-methylcytosine"
taacctgtgtgtttctacattcaggcttgacagcctagccattttatggacggggcggagcgggggcggtcagcctgatatataaagatatcacagaaataaaccttgagtcataaaaacct

SEQ ID NO: 23733 - DNA, 122 bp, Homo sapiens
  misc_feature (61)..(62): /note="This region represents a CpG dinucleotide"
  misc_feature (61)..(61): /note="Nucleotide may be methylated to form 5-methylcytosine"
ccttccacatcataacgccttctagggctaagtgtctgactcattttgtctccagtgatgcgtgtgttagtccattctcacgctgctataaagaactacctgagactggataatttatgaag

SEQ ID NO: 23734 - DNA, 122 bp, Homo sapiens
  misc_feature (61)..(62): /note="This region represents a CpG dinucleotide"
  misc_feature (61)..(61): /note="Nucleotide may be methylated to form 5-methylcytosine"
gctgagataaaagtgagattccccagagagaatttccattttcttctttcaaatgctctccgttcaaaaatgctctgaattaaatcagcagcttgagttttgtttgttgttttttgaaaaag

SEQ ID NO: 23735 - DNA, 122 bp, Homo sapiens
  misc_feature (61)..(62): /note="This region represents a CpG dinucleotide"
  misc_feature (61)..(61): /note="Nucleotide may be methylated to form 5-methylcytosine"
ctagcatacacattaggcacttgacctaatttaaaataatgattgcaaagaggactatgacgtagtggaaaggacatagcattagcagttaagaagcctgaattctaggcttagtctgccac

SEQ ID NO: 23736 - DNA, 122 bp, Homo sapiens
  misc_feature (61)..(62): /note="This region represents a CpG dinucleotide"
  misc_feature (61)..(61): /note="Nucleotide may be methylated to form 5-methylcytosine"
attggtgtggatcaagtagccaggagaccatttacattgctgtttattttcattgcatagcgaagagccccaagcattcacactggaggagaaaagggccaagcttgataagcagtgtggga

SEQ ID NO: 23737 - DNA, 122 bp, Homo sapiens
  misc_feature (61)..(62): /note="This region represents a CpG dinucleotide"
  misc_feature (61)..(61): /note="Nucleotide may be methylated to form 5-methylcytosine"
gagccccgttggcagagggtggtgcccagaggaccttctgccacttcagagtgcacagggcgctggggccagcctatatagcctggggcaggggtggaggcagcaaagcaagcagctgctgg

SEQ ID NO: 23738 - DNA, 122 bp, Homo sapiens
  misc_feature (61)..(62): /note="This region represents a CpG dinucleotide"
  misc_feature (61)..(61): /note="Nucleotide may be methylated to form 5-methylcytosine"
aagactaggatgaaagttgaataggctgcatgtctgctgttcaaacaccagcacttctcacgtgtaatccctgaaccagcagcattagcatcacctgagagaatctcagcgaaaggaggctg

SEQ ID NO: 23739 - DNA, 122 bp, Homo sapiens
  misc_feature (61)..(62): /note="This region represents a CpG dinucleotide"
  misc_feature (61)..(61): /note="Nucleotide may be methylated to form 5-methylcytosine"
gaacaaagactctcaggcagcagcttccaggttcacaagaaccacctggtgcttttgtttcggttttgttttccaataatcctaatcttgtgcttgtttaagtgcaggttcctgggttctcc

SEQ ID NO: 23740 - DNA, 122 bp, Homo sapiens
  misc_feature (61)..(62): /note="This region represents a CpG dinucleotide"
  misc_feature (61)..(61): /note="Nucleotide may be methylated to form 5-methylcytosine"
tgcacactcccacacacacgggtgcacgctcccacacacttgggcgcacactcccacacacgcccctgcacacaccgagctgagtggtgtgggcagggaggcacccccgcagcaggtcagag

SEQ ID NO: 23741 - DNA, 122 bp, Homo sapiens
  misc_feature (61)..(62): /note="This region represents a CpG dinucleotide"
  misc_feature (61)..(61): /note="Nucleotide may be methylated to form 5-methylcytosine"
caagattttgcttccccagacctttatgtttgcaatggccatagaagtagttcaggttcacgtactgatatatacagacaggcccaagccatacttcaataaacgtaccatagatgtgaaat

SEQ ID NO: 23742 - DNA, 122 bp, Homo sapiens
  misc_feature (61)..(62): /note="This region represents a CpG dinucleotide"
  misc_feature (61)..(61): /note="Nucleotide may be methylated to form 5-methylcytosine"
gtatcagccttggtgacatacccctcaggttattacagcactatttgggagtggctctcccgccttcagaagaacaaaaagcaaggcctccaaaattatttctaggctctcagctaataact

SEQ ID NO: 23743 - DNA, 122 bp, Homo sapiens
  misc_feature (61)..(62): /note="This region represents a CpG dinucleotide"
  misc_feature (61)..(61): /note="Nucleotide may be methylated to form 5-methylcytosine"
gctcacaagtccctgttgtatcagcgacttgctttctcagcagttgagtcatgccaagtccgcctgacctgcctggttggcttctccaacagctgaaggccccatgctgaggctgccctgct

SEQ ID NO: 23744 - DNA, 122 bp, Homo sapiens
  misc_feature (61)..(62): /note="This region represents a CpG dinucleotide"
  misc_feature (61)..(61): /note="Nucleotide may be methylated to form 5-methylcytosine"
aacctaataatttgacccttggtcatgtttatttatttatcccgagacagagtctcaccccgtcacccaggccggagtgcaatggtgcaatcttatctcactgcaacctcagcctcccaagt

SEQ ID NO: 23745 - DNA, 122 bp, Homo sapiens
  misc_feature (61)..(62): /note="This region represents a CpG dinucleotide"
  misc_feature (61)..(61): /note="Nucleotide may be methylated to form 5-methylcytosine"
taggttatttatgttgcctgcactgataaccaaagactgtgcaattctctatatcttttacgtcttggagacctattcttgttgtttgcataagatgtaaaaaatataattctgtgtcctag

SEQ ID NO: 23746 - DNA, 122 bp, Homo sapiens
  misc_feature (61)..(62): /note="This region represents a CpG dinucleotide"
  misc_feature (61)..(61): /note="Nucleotide may be methylated to form 5-methylcytosine"
ccagtcagcttccagcagcagaaccacgcctaacagatgtctggctttggctcgaggaatcggagaacacagtcagaaggaggacaggatagttaccctcatttgtcgataaatccagtccg

SEQ ID NO: 23747 - DNA, 122 bp, Homo sapiens
  misc_feature (61)..(62): /note="This region represents a CpG dinucleotide"
  misc_feature (61)..(61): /note="Nucleotide may be methylated to form 5-methylcytosine"
ccaactcctgacctcaggtaatccacctgccttggcctcccaaagtgctaggattacaggcgtgagccactgtgcccgccctcagcaggttctttaaaacagttatttttatgaaatttgga

SEQ ID NO: 23748 - DNA, 122 bp, Homo sapiens
  misc_feature (61)..(62): /note="This region represents a CpG dinucleotide"
  misc_feature (61)..(61): /note="Nucleotide may be methylated to form 5-methylcytosine"
cagaaaacttaccacaggcttactctcctgcagccctacaggaaattattgcaaagaatacgcattagcagccaacacacggaattggactagagaactggctggtgtgcaagcggaatgga

SEQ ID NO: 23749 - DNA, 122 bp, Homo sapiens
  misc_feature (61)..(62): /note="This region represents a CpG dinucleotide"
  misc_feature (61)..(61): /note="Nucleotide may be methylated to form 5-methylcytosine"
gtacacctgctgcccaatagcggtggctgtggttggtcggtggctgtggttggtcggtcacgctggggaaatactcttacgggccgctagggggccgagcatctgtgccgctctagggcctg

SEQ ID NO: 23750 - DNA, 122 bp, Homo sapiens
  misc_feature (61)..(62): /note="This region represents a CpG dinucleotide"
  misc_feature (61)..(61): /note="Nucleotide may be methylated to form 5-methylcytosine"
atggaattaaactgaaagacccaaactttctgaccctttatagaaagctcacttcatttacgctaactagaatgattcattgtgcctgtgactcagtgtgtcagcaagtgcttagatgtgag

SEQ ID NO: 23751 - DNA, 122 bp, Homo sapiens
  misc_feature (61)..(62): /note="This region represents a CpG dinucleotide"
  misc_feature (61)..(61): /note="Nucleotide may be methylated to form 5-methylcytosine"
caagagcgaaactctgtctcaaaaaaaaaaaaaaaaaagtaagaaaactaccccctgctgcgaacaactaagagagaagttaaccattacaaagtaacaattgtgcaggaaattatgtcact

SEQ ID NO: 23752 - DNA, 122 bp, Homo sapiens
  misc_feature (61)..(62): /note="This region represents a CpG dinucleotide"
  misc_feature (61)..(61): /note="Nucleotide may be methylated to form 5-methylcytosine"
gccccaggccaagcactttgtaagtcacttcagtttacttcctatagcaccactatgagacggctattactaaccccatcttacaaataaagaatctgtcttagaggtaatgttacttgtcc

SEQ ID NO: 23753 - DNA, 122 bp, Homo sapiens
  misc_feature (61)..(62): /note="This region represents a CpG dinucleotide"
  misc_feature (61)..(61): /note="Nucleotide may be methylated to form 5-methylcytosine"
aatctccatctcatagtaacctcaacagaaaccacagtgctctatcaatctaatagaagacgcaatcatagaaaagagacctagacaggcagcatagggaattactcacttccttactctta

SEQ ID NO: 23754 - DNA, 122 bp, Homo sapiens
  misc_feature (61)..(62): /note="This region represents a CpG dinucleotide"
  misc_feature (61)..(61): /note="Nucleotide may be methylated to form 5-methylcytosine"
cagtaacctgaggccactcatcttaggtctgattgatgagtaggtcagaaatcatcccagcgtggaaccctccttgactcacgctgtctgggtgaacacacagacccattccactgtttcct

SEQ ID NO: 23755 - DNA, 122 bp, Homo sapiens
  misc_feature (61)..(62): /note="This region represents a CpG dinucleotide"
  misc_feature (61)..(61): /note="Nucleotide may be methylated to form 5-methylcytosine"
gcaaacatctatggttgtgacagagtttctttctgacacctgagtctttctcctgctgcacggaaagcttgctgggaggggcttggaatctggcatgaagccaaagggcatctctgagttgc

SEQ ID NO: 23756 - DNA, 122 bp, Homo sapiens
  misc_feature (61)..(62): /note="This region represents a CpG dinucleotide"
  misc_feature (61)..(61): /note="Nucleotide may be methylated to form 5-methylcytosine"
gatgactcactcatgttacataattagaattcaccttcagactttgctgtcttaccatttcgtctcatagaaacaaggcttcctagcttggcttgttttcttgttactcaggggctgttgct

SEQ ID NO: 23757 - DNA, 122 bp, Homo sapiens
  misc_feature (61)..(62): /note="This region represents a CpG dinucleotide"
  misc_feature (61)..(61): /note="Nucleotide may be methylated to form 5-methylcytosine"
aggcaaatcagactcccttcccacccccaagcccaggaatgtgctccagtcaccctcacccggcgggtcctggtgaaaggagatggacaaaacagggtcacagccaccataggggcctgagc

SEQ ID NO: 23758 - DNA, 122 bp, Homo sapiens
  misc_feature (61)..(62): /note="This region represents a CpG dinucleotide"
  misc_feature (61)..(61): /note="Nucleotide may be methylated to form 5-methylcytosine"
ggggatcccccccaactgaaggttcctccactgtttagaccatatagggtaacttctggacgttgccatggcatttgtaaactgcctggcgctgctaggagtgtctttagcatactaatgca

SEQ ID NO: 23759 - DNA, 122 bp, Homo sapiens
  misc_feature (61)..(62): /note="This region represents a CpG dinucleotide"
  misc_feature (61)..(61): /note="Nucleotide may be methylated to form 5-methylcytosine"
ctggttaagggcttttgaggtcttctgaagcctcaagcataaacacagaagagtccagcacgaggaacaagcacctcactttcacatctggaggttcctggaacaacagtctagtattttct

SEQ ID NO: 23760 - DNA, 122 bp, Homo sapiens
  misc_feature (61)..(62): /note="This region represents a CpG dinucleotide"
  misc_feature (61)..(61): /note="Nucleotide may be methylated to form 5-methylcytosine"
aatgccttacccagagaggaacaaggaaatgtattatgttagaattctttctggaaatcacgtgagcagaaagaggagtggggtaaaatatttacactattgaaagaaaagacacccacttg

SEQ ID NO: 23761 - DNA, 122 bp, Homo sapiens
  misc_feature (61)..(62): /note="This region represents a CpG dinucleotide"
  misc_feature (61)..(61): /note="Nucleotide may be methylated to form 5-methylcytosine"
ccatgcctgagttagcagggcagggacacttcacggtgctgagtaatactacctagtacacgcacagcattttgaaggttccccttggtgatttcattacaatcttcatcgctcttggcctg

SEQ ID NO: 23762 - DNA, 122 bp, Homo sapiens
  misc_feature (61)..(62): /note="This region represents a CpG dinucleotide"
  misc_feature (61)..(61): /note="Nucleotide may be methylated to form 5-methylcytosine"
gccacgttttccaaccctaagagttctatccttggaggcccatgctctgggaccaagtaccgtggtgatgagtatatgcccagtgggagagtgtttctacagagtgtgaaatgagacagagt

SEQ ID NO: 23763 - DNA, 122 bp, Homo sapiens
  misc_feature (61)..(62): /note="This region represents a CpG dinucleotide"
  misc_feature (61)..(61): /note="Nucleotide may be methylated to form 5-methylcytosine"
ttgttttcccatctgtaacctcattaggatgtccacaccagcgggctccacacgcacatgcgctccggcaggttcccctcggggacacacacgcacactggcattgccccctggccacacgc

SEQ ID NO: 23764 - DNA, 122 bp, Homo sapiens
  misc_feature (61)..(62): /note="This region represents a CpG dinucleotide"
  misc_feature (61)..(61): /note="Nucleotide may be methylated to form 5-methylcytosine"
ctgaattatgcttcccttgtatgcagagagacctagattgactttggatgtttagtcattcgatttaatcaaatgtaattaaatgagcaaataatctccaatagccaatattcctatgttgt

SEQ ID NO: 23765 - DNA, 122 bp, Homo sapiens
  misc_feature (61)..(62): /note="This region represents a CpG dinucleotide"
  misc_feature (61)..(61): /note="Nucleotide may be methylated to form 5-methylcytosine"
ttacagatatatatcaaggaaccagatgaatctacaattgcaaccaatttgtttttcagacgaggttttattttttttcagacttgatggatggctgttttttaagaataatatttgtctag

SEQ ID NO: 23766 - DNA, 122 bp, Homo sapiens
  misc_feature (61)..(62): /note="This region represents a CpG dinucleotide"
  misc_feature (61)..(61): /note="Nucleotide may be methylated to form 5-methylcytosine"
gtcaatcctcaaaacattacaagatttggtattagcagttctactttaccaaagagaaaacgagactcagagaaattagataatttcatgaaccaaaaaaagtaaatgaaaacagcagattt

SEQ ID NO: 23767 - DNA, 122 bp, Homo sapiens
  misc_feature (61)..(62): /note="This region represents a CpG dinucleotide"
  misc_feature (61)..(61): /note="Nucleotide may be methylated to form 5-methylcytosine"
aacgtgactggccctgctataccgaaacggcttaatttctttctggcaaatccacatttacggcagtaagatactaaacactttctttcactttaaaaatatttcgtttgtcactgctgcag

SEQ ID NO: 23768 - DNA, 122 bp, Homo sapiens
  misc_feature (61)..(62): /note="This region represents a CpG dinucleotide"
  misc_feature (61)..(61): /note="Nucleotide may be methylated to form 5-methylcytosine"
aagtgtcataggctttataaactgttcatttaatccttccattctccttaagtggtgggtcgtaacagctgttcgcagtcatcctcttcaactccaaatgagaaacaaaagctcagtcagtg

SEQ ID NO: 23769 - DNA, 122 bp, Homo sapiens
  misc_feature (61)..(62): /note="This region represents a CpG dinucleotide"
  misc_feature (61)..(61): /note="Nucleotide may be methylated to form 5-methylcytosine"
ggctacagttgaaaaaatgccttattgtttcataaactacacaccaattctttatttgatcgcatccatctttttaaacagctgggtccattttgaatgttctcgttttaaacttagcattt

SEQ ID NO: 23770 - DNA, 122 bp, Homo sapiens
  misc_feature (61)..(62): /note="This region represents a CpG dinucleotide"
  misc_feature (61)..(61): /note="Nucleotide may be methylated to form 5-methylcytosine"
attctccgtgtgaagcccttccaggtgtttcaagctcttggtttataggactgtgaatgtcgtcatcttaatacagcccttcccatcactttgatccctgatggaaaaattagctctcatct

SEQ ID NO: 23771 - DNA, 122 bp, Homo sapiens
  misc_feature (61)..(62): /note="This region represents a CpG dinucleotide"
  misc_feature (61)..(61): /note="Nucleotide may be methylated to form 5-methylcytosine"
tggagaaacttctgcggcaaggaaataatatcttcagtcaacagtcagcaaggatcctaacgtctgccagcaccatgtgattgagctggaaagtcgattttctgaggactgccaacagccac

SEQ ID NO: 23772 - DNA, 122 bp, Homo sapiens
  misc_feature (61)..(62): /note="This region represents a CpG dinucleotide"
  misc_feature (61)..(61): /note="Nucleotide may be methylated to form 5-methylcytosine"
aaaaacatgtttaacacttgcagtgagtcaggaccaagatatctacagtaactaaaggggcgagcttagagaagcagggagcaggtagcaacggaaaggagaggctgatcctgtcccagccc

SEQ ID NO: 23773 - DNA, 122 bp, Homo sapiens
  misc_feature (61)..(62): /note="This region represents a CpG dinucleotide"
  misc_feature (61)..(61): /note="Nucleotide may be methylated to form 5-methylcytosine"
tccttcaatgttgctcattgagacaggcactgagcaagagtctataatctcaggactgcccgcatcttctgcttcccccaatgattttggcccagcccctacagccgatgcctgttgctcct

SEQ ID NO: 23774 - DNA, 122 bp, Homo sapiens
  misc_feature (61)..(62): /note="This region represents a CpG dinucleotide"
  misc_feature (61)..(61): /note="Nucleotide may be methylated to form 5-methylcytosine"
tggtcgagctttgtgaactttgtcttcatgccccgacaccctacttcccaaagcctggaccggtaaagttcttttcaccagaaaggacaagggcaagtgagtgcaagagagaaagtggcaca

SEQ ID NO: 23775 - DNA, 122 bp, Homo sapiens
  misc_feature (61)..(62): /note="This region represents a CpG dinucleotide"
  misc_feature (61)..(61): /note="Nucleotide may be methylated to form 5-methylcytosine"
ttttttatattactgaggagtcatagagcactctcacagagatcaaccctgaattaatgacgttgggatgatgaatgagcaattcatctaaagcttcctttggataggcaaacagtcttaga

SEQ ID NO: 23776 - DNA, 122 bp, Homo sapiens
  misc_feature (61)..(62): /note="This region represents a CpG dinucleotide"
  misc_feature (61)..(61): /note="Nucleotide may be methylated to form 5-methylcytosine"
tggtggattggagaggatgtcctgagggccagacaccagccagggcggggttgggtgacccgtggggtttattctgtgatgtcacaacggcagtcaggggtctccctgttgctccctcagcc

SEQ ID NO: 23777 - DNA, 122 bp, Homo sapiens
  misc_feature (61)..(62): /note="This region represents a CpG dinucleotide"
  misc_feature (61)..(61): /note="Nucleotide may be methylated to form 5-methylcytosine"
ataacctgctttactttctccttatgaacattttttcaaagccttttcatatatctggaacgctttttttttttcatataaataagactcgaatggctcatgactacaatttcaggaatgtg

SEQ ID NO: 23778 - DNA, 122 bp, Homo sapiens
  misc_feature (61)..(62): /note="This region represents a CpG dinucleotide"
  misc_feature (61)..(61): /note="Nucleotide may be methylated to form 5-methylcytosine"
tctcagaaggtctgagaatcttataggcttactgcctggtaaataaaacattcctttccacggtatttatttttctgtctgttacctgctgtttgcttttagctgatttcctggtgggaaac

SEQ ID NO: 23779 - DNA, 122 bp, Homo sapiens
  misc_feature (61)..(62): /note="This region represents a CpG dinucleotide"
  misc_feature (61)..(61): /note="Nucleotide may be methylated to form 5-methylcytosine"
atatagctcacaggattctgtgagaaattgtatcggtgaaaacaaatgacctagtttcttcgaccaaaaaaactacaagggagaaacaaggaaggaaaaggggaaggctgtggattaaaaga

SEQ ID NO: 23780 - DNA, 122 bp, Homo sapiens
  misc_feature (61)..(62): /note="This region represents a CpG dinucleotide"
  misc_feature (61)..(61): /note="Nucleotide may be methylated to form 5-methylcytosine"
tctctaatgcttactcagtatactcatatgaaaaatgagggcaatccctaagctacttcacgggactatcaggagacttaaataagacaatgtgagggactgggcgcggtggctcatggctg

SEQ ID NO: 23781 - DNA, 122 bp, Homo sapiens
  misc_feature (61)..(62): /note="This region represents a CpG dinucleotide"
  misc_feature (61)..(61): /note="Nucleotide may be methylated to form 5-methylcytosine"
gtgtggtggggggggtggttgtcaggctagtaaggaagaaagggaagaaatgtctggcagcgacatcaagaacctctgaaacagtgtaggggagtgtctgtgaatttactgggccccactgg

SEQ ID NO: 23782 - DNA, 122 bp, Homo sapiens
  misc_feature (61)..(62): /note="This region represents a CpG dinucleotide"
  misc_feature (61)..(61): /note="Nucleotide may be methylated to form 5-methylcytosine"
tctagtatggggcctgagattctgcagctcaaagaagctcccagctgatgccaatgcaaccggtccaaggagcttagagagcatctagttccacccgctccccacacagagaagacagtgga

SEQ ID NO: 23783 - DNA, 122 bp, Homo sapiens
  misc_feature (61)..(62): /note="This region represents a CpG dinucleotide"
  misc_feature (61)..(61): /note="Nucleotide may be methylated to form 5-methylcytosine"
gggaaagtcacggagagtggtggatctgggatagacagcttccttaacacttcctccttccgtgtagccctctgtgactccaagttcccggtataattatgctaaatatatgtggtcttggt

SEQ ID NO: 23784 - DNA, 122 bp, Homo sapiens
  misc_feature (61)..(62): /note="This region represents a CpG dinucleotide"
  misc_feature (61)..(61): /note="Nucleotide may be methylated to form 5-methylcytosine"
aataaaaaataatgtccctagctcacgagagtctttgcaagctttacagagtggtcagctcgtccatggaacataaatatctattcaaagggaatggaagaaagcattatgcatagactttt

SEQ ID NO: 23785 - DNA, 122 bp, Homo sapiens
  misc_feature (61)..(62): /note="This region represents a CpG dinucleotide"
  misc_feature (61)..(61): /note="Nucleotide may be methylated to form 5-methylcytosine"
taaatgcataaatatatccatagcaaatataggaaaaaagaaccatcaaaggcccacagacggcatataagtgaaatgaagccttagcagggttgtctaaagtgaaaaaaacctcacctagt

SEQ ID NO: 23786 - DNA, 122 bp, Homo sapiens
  misc_feature (61)..(62): /note="This region represents a CpG dinucleotide"
  misc_feature (61)..(61): /note="Nucleotide may be methylated to form 5-methylcytosine"
ttaagtgccaaatgataaactatgatgaccacaaaggcaggtttaggtttctaacaaaaacgtatgaagttaagcctttccaaataatctatgcatactgttggtagccacagcagaaaatg

SEQ ID NO: 23787 - DNA, 122 bp, Homo sapiens
  misc_feature (61)..(62): /note="This region represents a CpG dinucleotide"
  misc_feature (61)..(61): /note="Nucleotide may be methylated to form 5-methylcytosine"
gtctgtttgcatgggaggtttgttttgatgatgcaagactgtgcactgacctcaagcctgcgtcttcataatgtggatgattcacaatgggccgaagtgcagagagcttaacacttgccatc

SEQ ID NO: 23788 - DNA, 122 bp, Homo sapiens
  misc_feature (61)..(62): /note="This region represents a CpG dinucleotide"
  misc_feature (61)..(61): /note="Nucleotide may be methylated to form 5-methylcytosine"
ggggaggctggactgtggattgcatggtcaagactggtctttgagaagctgggcttttctcgtaatactgattctgcctactgcacaccccaaacatgatctgtctctaactctcattccta

SEQ ID NO: 23789 - DNA, 122 bp, Homo sapiens
  misc_feature (61)..(62): /note="This region represents a CpG dinucleotide"
  misc_feature (61)..(61): /note="Nucleotide may be methylated to form 5-methylcytosine"
cctttatcttatcaaactagtatttcctagtatggtagactgctaggtgtcaccccaagtcgtctttcctgtttctactcttaagttttttcttgagcatgtgatcacacagttatggatga

SEQ ID NO: 23790 - DNA, 122 bp, Homo sapiens
  misc_feature (61)..(62): /note="This region represents a CpG dinucleotide"
  misc_feature (61)..(61): /note="Nucleotide may be methylated to form 5-methylcytosine"
gccgcttctgttcttttcagcaccggtggcagcagcagctcaggagtctcttaggttgggcggggcttgaatcaatgatgaggctctattctgaaacaccttttggtgtgaagcgggcttct

SEQ ID NO: 23791 - DNA, 122 bp, Homo sapiens
  misc_feature (61)..(62): /note="This region represents a CpG dinucleotide"
  misc_feature (61)..(61): /note="Nucleotide may be methylated to form 5-methylcytosine"
gcagtgccggacaggatgtgcagacacaactacgagctgggcgggcccatgaccctgcagcgccgaggtgagtgagggctttgggccggcggtcccagggcagccccgcgggcccgtgccca

SEQ ID NO: 23792 - DNA, 122 bp, Homo sapiens
  misc_feature (61)..(62): /note="This region represents a CpG dinucleotide"
  misc_feature (61)..(61): /note="Nucleotide may be methylated to form 5-methylcytosine"
acaagactacaaaggcttcatcatcctgacaagcagcagctcccactccagagcacaggccggctagcactgcagagcctctgtccagggccaggtagggctagggcccctggggaagggac

SEQ ID NO: 23793 - DNA, 122 bp, Homo sapiens
  misc_feature (61)..(62): /note="This region represents a CpG dinucleotide"
  misc_feature (61)..(61): /note="Nucleotide may be methylated to form 5-methylcytosine"
ttatacagatgggtcgactggggtccagcgaggagaggaaggggtttgctaatggcagagcggggcaggaactcacatagtgctctgtcctgagtgtattcttgtcatgactcacggggact

SEQ ID NO: 23794 - DNA, 122 bp, Homo sapiens
  misc_feature (61)..(62): /note="This region represents a CpG dinucleotide"
  misc_feature (61)..(61): /note="Nucleotide may be methylated to form 5-methylcytosine"
caaaagaatcgcgcacagaagtatcccggtatcacacacactacacacccagacgcaccacggcacctttctaggacacttggaagcgctcaaaccaaagaacacacactttcaaggacacg

SEQ ID NO: 23795 - DNA, 122 bp, Homo sapiens
  misc_feature (61)..(62): /note="This region represents a CpG dinucleotide"
  misc_feature (61)..(61): /note="Nucleotide may be methylated to form 5-methylcytosine"
tcctccaactctagccttcctgcttcacattgggccgggaaaaaacaaaacaaaacaaaacgaaaaaccatgccactgaagaaacaattgtgaaagtcacagccctgagtcacagatccact

SEQ ID NO: 23796 - DNA, 122 bp, Homo sapiens
  misc_feature (61)..(62): /note="This region represents a CpG dinucleotide"
  misc_feature (61)..(61): /note="Nucleotide may be methylated to form 5-methylcytosine"
ggactctggtgggtggggaggcttcctggtcactaaccgctcaacatcaacctggacctgcggcagtgtctgtgctgactggcgtccccagcttagctagaggcccctgcttccctgtttcc

SEQ ID NO: 23797 - DNA, 122 bp, Homo sapiens
  misc_feature (61)..(62): /note="This region represents a CpG dinucleotide"
  misc_feature (61)..(61): /note="Nucleotide may be methylated to form 5-methylcytosine"
tcagccccaagtgtggactcccaagccttagcagctgtagagagcaactggctacttagccgcagccctggagccacccctggtcctaaatttcgggcaccactgccctccaggcatcctgg

SEQ ID NO: 23798 - DNA, 122 bp, Homo sapiens
  misc_feature (61)..(62): /note="This region represents a CpG dinucleotide"
  misc_feature (61)..(61): /note="Nucleotide may be methylated to form 5-methylcytosine"
tggcagaggagccaggttcctggggttaataagcaggctgtttatagccagcagcagtcacgggacagccagctggaaggtcatgccccttctgaatgttgaggtttctcataaacatttcc

SEQ ID NO: 23799 - DNA, 122 bp, Homo sapiens
  misc_feature (61)..(62): /note="This region represents a CpG dinucleotide"
  misc_feature (61)..(61): /note="Nucleotide may be methylated to form 5-methylcytosine"
cactagagggtaaagattaaaggccaggttcccaggcctaaagcaaacaccaaacttctgcgtaggaggccgtaaagtacctaagataggacaaaagttagtcttaagcccatgtaagtaaa

SEQ ID NO: 23800 - DNA, 122 bp, Homo sapiens
  misc_feature (61)..(62): /note="This region represents a CpG dinucleotide"
  misc_feature (61)..(61): /note="Nucleotide may be methylated to form 5-methylcytosine"
tttcaacttatcactgatcatagatcaccatagcagatttatgggaagaaaaatgataaacgcaatcatattggtagtgttctagtcctaggttcgttcatgcatgttcatgttattgataa

SEQ ID NO: 23801 - DNA, 122 bp, Homo sapiens
  misc_feature (61)..(62): /note="This region represents a CpG dinucleotide"
  misc_feature (61)..(61): /note="Nucleotide may be methylated to form 5-methylcytosine"
aaaattcttattttgaagcaaactcaaagctaggtcctgatgtctcaaggcacaggtactcgtacttaaaggtgagtctgaaatctgtggatttggggaactttggaaaaacaaagatgagt

SEQ ID NO: 23802 - DNA, 122 bp, Homo sapiens
  misc_feature (61)..(62): /note="This region represents a CpG dinucleotide"
  misc_feature (61)..(61): /note="Nucleotide may be methylated to form 5-methylcytosine"
aggcatccatgagcacgagctattactgttctcattgctgctgattacaacaccaagcaccgcagcaaacagtgactcacagttctgttgggcccatcactgacccattctacagccgagga

SEQ ID NO: 23803 - DNA, 122 bp, Homo sapiens
  misc_feature (61)..(62): /note="This region represents a CpG dinucleotide"
  misc_feature (61)..(61): /note="Nucleotide may be methylated to form 5-methylcytosine"
ttaattttccaaggagacagtcacttaccttttaaaaaacattattagagaagcaccgggcgggagcatatctagcattaaaaatgtgggatgaataccatctctgcttggtaaaggtggtt

SEQ ID NO: 23804 - DNA, 122 bp, Homo sapiens
  misc_feature (61)..(62): /note="This region represents a CpG dinucleotide"
  misc_feature (61)..(61): /note="Nucleotide may be methylated to form 5-methylcytosine"
ctgtgagaaatgtttgagctggctggacacatttcctgaaatcatttctctagtcttttacgaaatgtctgcatttatgctggaatcatagagctgaactatcattgagataaaaattccag

SEQ ID NO: 23805 - DNA, 122 bp, Homo sapiens
  misc_feature (61)..(62): /note="This region represents a CpG dinucleotide"
  misc_feature (61)..(61): /note="Nucleotide may be methylated to form 5-methylcytosine"
gtgtttagctcttgagtctgtgggttgatgtagtggttcttctggtctagaacagcttcacgtgtgcacctgtgttcagctattggtcatctgtaggttggctgtgctttctcacatatcta

SEQ ID NO: 23806 - DNA, 122 bp, Homo sapiens
  misc_feature (61)..(62): /note="This region represents a CpG dinucleotide"
  misc_feature (61)..(61): /note="Nucleotide may be methylated to form 5-methylcytosine"
gaccacacagaatgggtttcactgaaagtaatagagtgaaattgtctgcataattattttcgttggattgagaatcagcagccctctttgggttcaggaaataaacctctgttaaaaccata

SEQ ID NO: 23807 - DNA, 122 bp, Homo sapiens
  misc_feature (61)..(62): /note="This region represents a CpG dinucleotide"
  misc_feature (61)..(61): /note="Nucleotide may be methylated to form 5-methylcytosine"
aggcatctgtctcctgctcctccctgggaatggaatgtctcggtgtaaaacccaatcgtacgttccagttactgagatagagaaaaccgccttatggctggaggttagaaatgctggcggca

SEQ ID NO: 23808 - DNA, 122 bp, Homo sapiens
  misc_feature (61)..(62): /note="This region represents a CpG dinucleotide"
  misc_feature (61)..(61): /note="Nucleotide may be methylated to form 5-methylcytosine"
gaataattacgtcagctcaactcatctcatccattgttgcaaggagtaaattagatggcacgtgtgaaaatgctttgtaaactactgagaactgtgtaatgcattgtaaggcattgtcatga

SEQ ID NO: 23809 - DNA, 122 bp, Homo sapiens
  misc_feature (61)..(62): /note="This region represents a CpG dinucleotide"
  misc_feature (61)..(61): /note="Nucleotide may be methylated to form 5-methylcytosine"
tttcactggctggacccacagctgattcctactctaatttttcacactgaacacctggggcgtgatatacctgtatcaaaacaaaaggcagtctgcagtcccgcaggcaagggtctgcccac

SEQ ID NO: 23810 - DNA, 122 bp, Homo sapiens
  misc_feature (61)..(62): /note="This region represents a CpG dinucleotide"
  misc_feature (61)..(61): /note="Nucleotide may be methylated to form 5-methylcytosine"
ccgttgccagggccgaggctgaggagcctacagcgtgtgttcaggactgagggccagggacgggccacaggctccctgcctggggtccaagcctagatcgctcgctccccacccgcaccaaa

SEQ ID NO: 23811 - DNA, 122 bp, Homo sapiens
  misc_feature (61)..(62): /note="This region represents a CpG dinucleotide"
  misc_feature (61)..(61): /note="Nucleotide may be methylated to form 5-methylcytosine"
cctcattttaacccctctaagtaattgtctcttattctgaatctagagattcagaaacagcgccaatgtttacacacgacttttgaaattttcccaggagtctttcgttggagcaatacatc

SEQ ID NO: 23812 - DNA, 122 bp, Homo sapiens
  misc_feature (61)..(62): /note="This region represents a CpG dinucleotide"
  misc_feature (61)..(61): /note="Nucleotide may be methylated to form 5-methylcytosine"
cgtgaaacacaagtgcttgccagctctctaatctgcggcgtcctttgaaattccatccagcgtgtgctgaagctgagccaattaacgtggagagaattgggtggatcgcagagaagctggca

SEQ ID NO: 23813 - DNA, 122 bp, Homo sapiens
  misc_feature (61)..(62): /note="This region represents a CpG dinucleotide"
  misc_feature (61)..(61): /note="Nucleotide may be methylated to form 5-methylcytosine"
ccagcccctccatccctccctgctcccagggaggtgtagcacctgggtgtgtgcaccgtgcgtgtctgtgtgtacacacatgaacctgcagtctggatgccactggccctgggttccgcaga

SEQ ID NO: 23814 - DNA, 122 bp, Homo sapiens
  misc_feature (61)..(62): /note="This region represents a CpG dinucleotide"
  misc_feature (61)..(61): /note="Nucleotide may be methylated to form 5-methylcytosine"
gcattcatggcagcagtgcccgagagaggggtggctgttctggatgccagggggaagcggcgggacttttaaagagggcaggttactgagtaacctggaagcctctgtcagtctcatctgct

SEQ ID NO: 23815 - DNA, 122 bp, Homo sapiens
  misc_feature (61)..(62): /note="This region represents a CpG dinucleotide"
  misc_feature (61)..(61): /note="Nucleotide may be methylated to form 5-methylcytosine"
ttcccagtaacattgtgaggcaatatgcacaaagtactgccaaccagggaagctcacccacggcttggtgcccagagtttttattgggactcagtcacacagacctggttgatcacccatgt

SEQ ID NO: 23816 - DNA, 122 bp, Homo sapiens
  misc_feature (61)..(62): /note="This region represents a CpG dinucleotide"
  misc_feature (61)..(61): /note="Nucleotide may be methylated to form 5-methylcytosine"
taaagagacaattgacagcacacacgagcacatttttggattatgtagtttgattaagcacgaaagtgtgaccagagatgatcagttctacacatgggtgaaacagaaagtgaaataggtca

SEQ ID NO: 23817 - DNA, 122 bp, Homo sapiens
  misc_feature (61)..(62): /note="This region represents a CpG dinucleotide"
  misc_feature (61)..(61): /note="Nucleotide may be methylated to form 5-methylcytosine"
agcttctcattcttcaaggcccagtttagtccaggacactttacctttccctgctctccccgaagtctcccagctgggtgagtcacacctcctctgggctcctgctctatcccgtactttct

SEQ ID NO: 23818 - DNA, 122 bp, Homo sapiens
  misc_feature (61)..(62): /note="This region represents a CpG dinucleotide"
  misc_feature (61)..(61): /note="Nucleotide may be methylated to form 5-methylcytosine"
ttggaaataactgacatcttcaatattgaatcttctaaccgaaaatcaaagtatacatctcgatttttccttatgttattatctttgcaattttttgtagttttaactgtgcaagtcattta

SEQ ID NO: 23819 - DNA, 122 bp, Homo sapiens
  misc_feature (61)..(62): /note="This region represents a CpG dinucleotide"
  misc_feature (61)..(61): /note="Nucleotide may be methylated to form 5-methylcytosine"
gatatgtacgctttgtgccgaacacttatgattcattcacttttgtgcatgcatgttatacgtcaataacaatattaattttttaaaaaagggccaggtgcagtggctctcacctgtaatcc

SEQ ID NO: 23820 - DNA, 122 bp, Homo sapiens
  misc_feature (61)..(62): /note="This region represents a CpG dinucleotide"
  misc_feature (61)..(61): /note="Nucleotide may be methylated to form 5-methylcytosine"
atataaatcctgtggaacaggatatactctagaagaacaggttgtcacagggctgagatacggttctcaaattagagggctagttaagaatcctatttactctaatacagagatagacaaca

SEQ ID NO: 23821 - DNA, 122 bp, Homo sapiens
  misc_feature (61)..(62): /note="This region represents a CpG dinucleotide"
  misc_feature (61)..(61): /note="Nucleotide may be methylated to form 5-methylcytosine"
gactgtacttccgacattgcatcactgttatgtctgttgtggtctgtgatcggcggtctccgatcttactgctgtcattgattctgggacgccacacactatgctcctcagacggcaaaagc

SEQ ID NO: 23822 - DNA, 122 bp, Homo sapiens
  misc_feature (61)..(62): /note="This region represents a CpG dinucleotide"
  misc_feature (61)..(61): /note="Nucleotide may be methylated to form 5-methylcytosine"
ttctccagttttcccaattgcagtgtattattaacttctgggacctgactgatatctacccgcttagaaaagctatggaaagcaggccgggcgcggtggctcacgcctgtaatcccagcact

SEQ ID NO: 23823 - DNA, 122 bp, Homo sapiens
  misc_feature (61)..(62): /note="This region represents a CpG dinucleotide"
  misc_feature (61)..(61): /note="Nucleotide may be methylated to form 5-methylcytosine"
gatgacattgccagcatgccagagaacagatagcatcagggctacaccccagtgcagaggcgtggaattcagtgaacagtaatgtcaactggaggagagagatgtcatttgaacagggcttt

SEQ ID NO: 23824 - DNA, 122 bp, Homo sapiens
  misc_feature (61)..(62): /note="This region represents a CpG dinucleotide"
  misc_feature (61)..(61): /note="Nucleotide may be methylated to form 5-methylcytosine"
attcaaaacctctctctcctgtttactggtatatgtctaatctttctctctgccatcaggcgtgacatcctgaccccacgccataccttcattccctgataagcgctgccctggtaagttcc

SEQ ID NO: 23825 - DNA, 122 bp, Homo sapiens
  misc_feature (61)..(62): /note="This region represents a CpG dinucleotide"
  misc_feature (61)..(61): /note="Nucleotide may be methylated to form 5-methylcytosine"
gagctcctcccgggtgttctcaccttcgagagctcagtgtgtcatggtcagcagatgaggcgctgaggtgtagagatgagcaagtcataaccctgcctttggctgtagacttgctgtgtagc

SEQ ID NO: 23826 - DNA, 122 bp, Homo sapiens
  misc_feature (61)..(62): /note="This region represents a CpG dinucleotide"
  misc_feature (61)..(61): /note="Nucleotide may be methylated to form 5-methylcytosine"
agatcccatcagctcagctttccagaaaacatcatgctgtccacgatactgatgacattacggtaactagatcatgagcaggaagtagcaaatgcttcggatgccttctatgcaaagaaggg

SEQ ID NO: 23827 - DNA, 122 bp, Homo sapiens
  misc_feature (61)..(62): /note="This region represents a CpG dinucleotide"
  misc_feature (61)..(61): /note="Nucleotide may be methylated to form 5-methylcytosine"
tgggagagcaagtctactgatgaatcatttcctgctcttccctctgcctgggactttgcccgcagattcttcactttactcggtcctctaattcaaatctcagttcttgtatcaactccttg

SEQ ID NO: 23828 - DNA, 122 bp, Homo sapiens
  misc_feature (61)..(62): /note="This region represents a CpG dinucleotide"
  misc_feature (61)..(61): /note="Nucleotide may be methylated to form 5-methylcytosine"
attaaagcctccaacttgtgtttggacagtggccactgctctacctaaacaggtgactcacgcatccattgtgcagggacagaggaagagaaggagagtgagggcgctgggatgcggactga

SEQ ID NO: 23829 - DNA, 122 bp, Homo sapiens
  misc_feature (61)..(62): /note="This region represents a CpG dinucleotide"
  misc_feature (61)..(61): /note="Nucleotide may be methylated to form 5-methylcytosine"
aattccccagaaatgcacagcaataccttctctaacaagtaattattgcttcctcctctgcgggcagcactattccaggttctaggggtgcaaacagtagtaagactgctacctggtatttg

SEQ ID NO: 23830 - DNA, 122 bp, Homo sapiens
  misc_feature (61)..(62): /note="This region represents a CpG dinucleotide"
  misc_feature (61)..(61): /note="Nucleotide may be methylated to form 5-methylcytosine"
ggagaagctgaagaatagaactattggaccatgaaactcccaagagtccttccccctcagcgtttctcagaatttgcgaccacgattttctctgtgaggctcgcaattgctatttgccaaac

SEQ ID NO: 23831 - DNA, 122 bp, Homo sapiens
  misc_feature (61)..(62): /note="This region represents a CpG dinucleotide"
  misc_feature (61)..(61): /note="Nucleotide may be methylated to form 5-methylcytosine"
atgttgacttctgagtaatcccagttctgggaggcctctaacatttccagtttggccgggcgcggtggctcacccctgtaatcccagcactttggtgattctccccggggcctgaaagcttg

SEQ ID NO: 23832 - DNA, 122 bp, Homo sapiens
  misc_feature (61)..(62): /note="This region represents a CpG dinucleotide"
  misc_feature (61)..(61): /note="Nucleotide may be methylated to form 5-methylcytosine"
ctggttgcattccttactactgtgtgactaacactgttaggcaaaattacctcacctctccgtgctccaactttcacatctgtgaaatggcactagccattatagtattataatacctgccg

SEQ ID NO: 23833 - DNA, 122 bp, Homo sapiens
  misc_feature (61)..(62): /note="This region represents a CpG dinucleotide"
  misc_feature (61)..(61): /note="Nucleotide may be methylated to form 5-methylcytosine"
caagatgaggaccaaggtgtggctgcctgactaggaacgctgtgggctggcccaggctctcgccacacatcctgggagaactgccataggccctagaaggagggatgaaaggcgtatgggag

SEQ ID NO: 23834 - DNA, 122 bp, Homo sapiens
  misc_feature (61)..(62): /note="This region represents a CpG dinucleotide"
  misc_feature (61)..(61): /note="Nucleotide may be methylated to form 5-methylcytosine"
gtttttccacgtttcagtgaacttccttgaaactttgctgtggttgtcaccttcggccatcgtttcacaacagtgccctcagacagtgacagtcgcgaccttcctgattctcctgggggccc

SEQ ID NO: 23835 - DNA, 122 bp, Homo sapiens
  misc_feature (61)..(62): /note="This region represents a CpG dinucleotide"
  misc_feature (61)..(61): /note="Nucleotide may be methylated to form 5-methylcytosine"
taataagtgacagaagccagtcacaaaggaccacaaggtattgtatgattccattcatatcgaaagtccagaacaggcaaatccagaaagtcagaaaatagactggtggttgcctagggctg

SEQ ID NO: 23836 - DNA, 122 bp, Homo sapiens
  misc_feature (61)..(62): /note="This region represents a CpG dinucleotide"
  misc_feature (61)..(61): /note="Nucleotide may be methylated to form 5-methylcytosine"
aagctgttgttcttttggatgctagacttgtatgtggttacctagttgaacctacttattcgtccaaacaatatctcgactatcttgtatttcctaagcagacaatcacagctttggcaaat

SEQ ID NO: 23837 - DNA, 122 bp, Homo sapiens
  misc_feature (61)..(62): /note="This region represents a CpG dinucleotide"
  misc_feature (61)..(61): /note="Nucleotide may be methylated to form 5-methylcytosine"
gcagctgaacagtgctgggtttggtgactcagaaattctcttggcctttcctcatgattgcgagatggctgctatagctccaagcatcatgtctgtgttctagggagaaagaagatgaggaa

SEQ ID NO: 23838 - DNA, 122 bp, Homo sapiens
  misc_feature (61)..(62): /note="This region represents a CpG dinucleotide"
  misc_feature (61)..(61): /note="Nucleotide may be methylated to form 5-methylcytosine"
ttgtggtttgaatgtttgtctccacaaattcatatggtgaaaccctaccctccaggtgatcgtactagaaggtggggcctttgggaggtgattaggtcacgagggtggagccgcatgaaaag

SEQ ID NO: 23839 - DNA, 122 bp, Homo sapiens
  misc_feature (61)..(62): /note="This region represents a CpG dinucleotide"
  misc_feature (61)..(61): /note="Nucleotide may be methylated to form 5-methylcytosine"
gccatgctcctttcctcaggtttgcaataagccatttcagaagatttctgagcagtgacacggcagcaaagaatgaagtgataaaatagtaattacataatttgaactaggttaatgttaac

SEQ ID NO: 23840 - DNA, 122 bp, Homo sapiens
  misc_feature (61)..(62): /note="This region represents a CpG dinucleotide"
  misc_feature (61)..(61): /note="Nucleotide may be methylated to form 5-methylcytosine"
ctgcttcccagcattcacctgcagtcaagctgctcccaaggagctcgttcaaagagggggcgacttaggcagacactctggtcatgatctaaccatgttaattaagcatggtttaattaact

SEQ ID NO: 23841 - DNA, 122 bp, Homo sapiens
  misc_feature (61)..(62): /note="This region represents a CpG dinucleotide"
  misc_feature (61)..(61): /note="Nucleotide may be methylated to form 5-methylcytosine"
caccctgaaatccactgatgatggattcttctttcttggcactgctagtggcactatattcggtctctactctctgaaaagagtgtatgtctgatcatgatggctgtggtgttagagtaggt

SEQ ID NO: 23842 - DNA, 122 bp, Homo sapiens
  misc_feature (61)..(62): /note="This region represents a CpG dinucleotide"
  misc_feature (61)..(61): /note="Nucleotide may be methylated to form 5-methylcytosine"
caattgttaaaagtgaggggagacagagaagggtcgggaggttggagtccgaaaggtagacgtgcctctgacccacagggaggtcctggctagagccaaggacactcaacaaggtctcccta

SEQ ID NO: 23843 - DNA, 122 bp, Homo sapiens
  misc_feature (61)..(62): /note="This region represents a CpG dinucleotide"
  misc_feature (61)..(61): /note="Nucleotide may be methylated to form 5-methylcytosine"
tgtatgtccgtatgtaaacacacacactggagtgttttcaccccaacaagtggaaatgaacggaatgcaccactctgcctgcagtacggcgcttgcataaggtgcctgccctcatcagagtt

SEQ ID NO: 23844 - DNA, 122 bp, Homo sapiens
  misc_feature (61)..(62): /note="This region represents a CpG dinucleotide"
  misc_feature (61)..(61): /note="Nucleotide may be methylated to form 5-methylcytosine"
ccagtgcaacaatgagtaaatactcattgcctgagtcagaggaaggaaaggaaggtaagacgcagtgatgcgcatcacctccctagggagcagaggctgagctgcaccttgggaccagccac

SEQ ID NO: 23845 - DNA, 122 bp, Homo sapiens
  misc_feature (61)..(62): /note="This region represents a CpG dinucleotide"
  misc_feature (61)..(61): /note="Nucleotide may be methylated to form 5-methylcytosine"
aagagacttcaagctgtgtgtgaccctggcgtccggttcctctcacaggctggagcttttcggaagtggcatgcaaagagtccaggtttggccttggggggagttggggttaggatccctaa

SEQ ID NO: 23846 - DNA, 122 bp, Homo sapiens
  misc_feature (61)..(62): /note="This region represents a CpG dinucleotide"
  misc_feature (61)..(61): /note="Nucleotide may be methylated to form 5-methylcytosine"
gctcctcccacggcgggccattaatccctagatttccggatccctccccgaattcccaaacgcctacttccgctcgccagtggaaaacatcgtcaccaactctttgtcctgtgtggtgcatt

SEQ ID NO: 23847 - DNA, 122 bp, Homo sapiens
  misc_feature (61)..(62): /note="This region represents a CpG dinucleotide"
  misc_feature (61)..(61): /note="Nucleotide may be methylated to form 5-methylcytosine"
aattatatcccttgattatcctgggtgattttctctccacactacatcttttctcattcacgatgattttggtctcttctggaactcattgcaagaaactggcatgtggctggtttgctttt

SEQ ID NO: 23848 - DNA, 122 bp, Homo sapiens
  misc_feature (61)..(62): /note="This region represents a CpG dinucleotide"
  misc_feature (61)..(61): /note="Nucleotide may be methylated to form 5-methylcytosine"
tgagcagacatttctccaaagatatacaaatagccaatacacacatgaaaaggtcctcaacgttattggccattatgtgaatgcaaatcaaaactaaaatgagataccacttcacacccctc

SEQ ID NO: 23849 - DNA, 122 bp, Homo sapiens
  misc_feature (61)..(62): /note="This region represents a CpG dinucleotide"
  misc_feature (61)..(61): /note="Nucleotide may be methylated to form 5-methylcytosine"
tcctgcagcagggcctctgcacttgcagtccctctgccggggcctcttgccccaggctggcggcatcctgtcatttgggactctgctcaaaggacatgtcctccaaggggctttccctggtc

SEQ ID NO: 23850 - DNA, 122 bp, Homo sapiens
  misc_feature (61)..(62): /note="This region represents a CpG dinucleotide"
  misc_feature (61)..(61): /note="Nucleotide may be methylated to form 5-methylcytosine"
attctgacacctgactcttcctggtgccgcccttagttggttgtctcttactgaaatggtcgtgtccctgggtcttcatatgatgagtgattcttaactgtatcttctctcaagggttttca

SEQ ID NO: 23851 - DNA, 122 bp, Homo sapiens
  misc_feature (61)..(62): /note="This region represents a CpG dinucleotide"
  misc_feature (61)..(61): /note="Nucleotide may be methylated to form 5-methylcytosine"
tcatttatataaatgtggatatccccagagaatcactagtgtagatgatcttatatgtttcgttcaactctgagaaactatgaatccataaggtgtggttgattgcagaaggacaatgatct

SEQ ID NO: 23852 - DNA, 122 bp, Homo sapiens
  misc_feature (61)..(62): /note="This region represents a CpG dinucleotide"
  misc_feature (61)..(61): /note="Nucleotide may be methylated to form 5-methylcytosine"
ttctcaataacagacaaatagataaaaaacaatctttttcttactttatctcatacttgacgaatgaagaggaaataaatagaagaaatcttctcaaggaagaggaagctacaaacacaagc

SEQ ID NO: 23853 - DNA, 122 bp, Homo sapiens
  misc_feature (61)..(62): /note="This region represents a CpG dinucleotide"
  misc_feature (61)..(61): /note="Nucleotide may be methylated to form 5-methylcytosine"
gctaatgcaagtcccagggggactgtgttgtaagaaaaagggaaggccaggcaggtacagcgtatacatagtgcaattagatttgctgacctaaaagttagaacacgaggtctaacaaacta

SEQ ID NO: 23854 - DNA, 122 bp, Homo sapiens
  misc_feature (61)..(62): /note="This region represents a CpG dinucleotide"
  misc_feature (61)..(61): /note="Nucleotide may be methylated to form 5-methylcytosine"
gcagcagtgttggcagaagcactttattctctttcctccatttcctatgtgtactggagacgcaaagtaaaccaggttgtctgccaaacttgaaggaagccagagagtccagaaaactgtag

SEQ ID NO: 23855 - DNA, 122 bp, Homo sapiens
  misc_feature (61)..(62): /note="This region represents a CpG dinucleotide"
  misc_feature (61)..(61): /note="Nucleotide may be methylated to form 5-methylcytosine"
aagtaaaattcggctctgagaacaaaagctttgggaaccaaaggacagttggcacctcatcgcatgcaataattgtatacttttcaacactgtgtgctgatgcaatctttgcttatttaaag

SEQ ID NO: 23856 - DNA, 122 bp, Homo sapiens
  misc_feature (61)..(62): /note="This region represents a CpG dinucleotide"
  misc_feature (61)..(61): /note="Nucleotide may be methylated to form 5-methylcytosine"
tattcagtcaaacaaatgtttattgagcaactgttatatgccaggcactgtgttagacatcggggatgcagaaatgaacaagactacagagccagccctcagggaaccaacagcattttctt

SEQ ID NO: 23857 - DNA, 122 bp, Homo sapiens
  misc_feature (61)..(62): /note="This region represents a CpG dinucleotide"
  misc_feature (61)..(61): /note="Nucleotide may be methylated to form 5-methylcytosine"
acccttataacagatcaatgtagatgctatttctagtttcccatttacagatcactgaggcgacttggcacagaaacagatctggctctgtcccacactcagctatttgtgccttacagccc

SEQ ID NO: 23858 - DNA, 122 bp, Homo sapiens
  misc_feature (61)..(62): /note="This region represents a CpG dinucleotide"
  misc_feature (61)..(61): /note="Nucleotide may be methylated to form 5-methylcytosine"
cagaaggaagtcatttttctttgcattgttcatcccagtcactggcatggccggatcagccgtggtcatgacctgatcatcctatgaggctccttgactgcacttcacccacctgctgctgg

SEQ ID NO: 23859 - DNA, 122 bp, Homo sapiens
  misc_feature (61)..(62): /note="This region represents a CpG dinucleotide"
  misc_feature (61)..(61): /note="Nucleotide may be methylated to form 5-methylcytosine"
ttgacctctacttacttaacattagggaaatatcacagacccatgacagtggaggttttgcgacccttcagtgtatccttgtagtttcagagatgacttccaggtttccttgaaatgaaatg

SEQ ID NO: 23860 - DNA, 122 bp, Homo sapiens
  misc_feature (61)..(62): /note="This region represents a CpG dinucleotide"
  misc_feature (61)..(61): /note="Nucleotide may be methylated to form 5-methylcytosine"
aaagaggcccctcctctgcctgcctcgatgggcccttgagctggcacacctgttgctgggcgtggacttcagcgctgggctcctggctcttctgctctgtgttcgccttaacacgtgtccac

SEQ ID NO: 23861 - DNA, 122 bp, Homo sapiens
  misc_feature (61)..(62): /note="This region represents a CpG dinucleotide"
  misc_feature (61)..(61): /note="Nucleotide may be methylated to form 5-methylcytosine"
cagggggacctcgcccttggtgggggccgggggaggtccatggtccagctcctctgtcaccgtgctccagcacagcacctcaagcagtccagaaagttctacatggagccgccttccaggtg

SEQ ID NO: 23862 - DNA, 122 bp, Homo sapiens
  misc_feature (61)..(62): /note="This region represents a CpG dinucleotide"
  misc_feature (61)..(61): /note="Nucleotide may be methylated to form 5-methylcytosine"
gtggtatccattcaaggaaataagttctcatcagttcattgaaaaaaattaaataaaatacgttcataggagaagcatgtagatttatctagataaaacattgcaatcagggcagagtgcat

SEQ ID NO: 23863 - DNA, 122 bp, Homo sapiens
  misc_feature (61)..(62): /note="This region represents a CpG dinucleotide"
  misc_feature (61)..(61): /note="Nucleotide may be methylated to form 5-methylcytosine"
agtgggacctacagcttggtgggactctgccatgcaggtgtgccaggctgcgtgtgtaggcgaggacaagccaggttccagccagcaggtgcacactcaggtgtgtgcagaggtggtccctt

SEQ ID NO: 23864 - DNA, 122 bp, Homo sapiens
  misc_feature (61)..(62): /note="This region represents a CpG dinucleotide"
  misc_feature (61)..(61): /note="Nucleotide may be methylated to form 5-methylcytosine"
attgttaaagcttaccagcacaccattgctctgtagacctgccaccttctcccaagcaaacgtttctgtgctgaggccttgtaagaacaatgtcctctgccatagagggcagaacccagaag

SEQ ID NO: 23865 - DNA, 122 bp, Homo sapiens
  misc_feature (61)..(62): /note="This region represents a CpG dinucleotide"
  misc_feature (61)..(61): /note="Nucleotide may be methylated to form 5-methylcytosine"
tgcactggggtttgcatgtgacagggaagaggaagagacccagggccgttttggctgttccgtctcgtgtcactgtctcctgcaaggctttgaagcaagaatgctgtagctgtgtccctgtg

SEQ ID NO: 23866 - DNA, 122 bp, Homo sapiens
  misc_feature (61)..(62): /note="This region represents a CpG dinucleotide"
  misc_feature (61)..(61): /note="Nucleotide may be methylated to form 5-methylcytosine"
ctgtggtgagtcatggacagatggtggctaagcgccactgtaagggtggagagtgggtgacggcaccttggtccccaggagccctctggccacatggcacagcagtgccttcaggtccaagg

SEQ ID NO: 23867 - DNA, 122 bp, Homo sapiens
  misc_feature (61)..(62): /note="This region represents a CpG dinucleotide"
  misc_feature (61)..(61): /note="Nucleotide may be methylated to form 5-methylcytosine"
gctgagcagaatggcccctctcctgtaagtccaggcaagctgcctggcctggggcaaatacggaaaggaatgtttctagtcactaccagatgatgaataggtggacctgaaaggccaagcat

SEQ ID NO: 23868 - DNA, 122 bp, Homo sapiens
  misc_feature (61)..(62): /note="This region represents a CpG dinucleotide"
  misc_feature (61)..(61): /note="Nucleotide may be methylated to form 5-methylcytosine"
tcagttgctataaacacagcttcctcccaagactctgtttatatgtctgcttgtcaaccccgcgccagacactggcgctccctttttttaccgtcactgcaccctcatcctgtttataggac

SEQ ID NO: 23869 - DNA, 122 bp, Homo sapiens
  misc_feature (61)..(62): /note="This region represents a CpG dinucleotide"
  misc_feature (61)..(61): /note="Nucleotide may be methylated to form 5-methylcytosine"
ctggaaccgaagggagtcagtggagcatctcttaccatttccatgcccagtgttaattgtcgtcgggaaattacagactcagatgaagttccatgccacagcaaatgggatcgggcttttcc

SEQ ID NO: 23870 - DNA, 122 bp, Homo sapiens
  misc_feature (61)..(62): /note="This region represents a CpG dinucleotide"
  misc_feature (61)..(61): /note="Nucleotide may be methylated to form 5-methylcytosine"
gtatccgccttacgtaaccacatggagtgatggaaatgggtgagcagcccggaatgtaggcggtggcctggcccatgcatctccagagaccatgaagactgctcaagccctacataggatgt

SEQ ID NO: 23871 - DNA, 122 bp, Homo sapiens
  misc_feature (61)..(62): /note="This region represents a CpG dinucleotide"
  misc_feature (61)..(61): /note="Nucleotide may be methylated to form 5-methylcytosine"
tgaaaaatgaggaggccaggcaataaaagagtcaggatttcttccaaaaaaaatacacagcggtggagcttggcataaagttcaaatgctcctacaccctgccctgcagtatctctaaccag

SEQ ID NO: 23872 - DNA, 122 bp, Homo sapiens
  misc_feature (61)..(62): /note="This region represents a CpG dinucleotide"
  misc_feature (61)..(61): /note="Nucleotide may be methylated to form 5-methylcytosine"
tgtaagcgcggcggctccggtccgctcgcttcccctccccccgcaacccccttcctacggcgcaagcacagaggcctttcctagattgcagtgcctgtcagggcgagccgggatctctcgcc

SEQ ID NO: 23873 - DNA, 122 bp, Homo sapiens
  misc_feature (61)..(62): /note="This region represents a CpG dinucleotide"
  misc_feature (61)..(61): /note="Nucleotide may be methylated to form 5-methylcytosine"
ctcccattgacttcacagccacttggagcctgactcacagccacctcccttttccttcctcgcaactgtggagtttaattcttgttgttaattagattaatcagagtgatcgctgcagcgat

SEQ ID NO: 23874 - DNA, 122 bp, Homo sapiens
  misc_feature (61)..(62): /note="This region represents a CpG dinucleotide"
  misc_feature (61)..(61): /note="Nucleotide may be methylated to form 5-methylcytosine"
ctctcctaatcgttttcctaggatatttccacagtggatgacaccctgcctcagtccttgcgcagctggattacatgcttcctggggataatcagcacccttgtcatgatctgcatggccac

SEQ ID NO: 23875 - DNA, 122 bp, Homo sapiens
  misc_feature (61)..(62): /note="This region represents a CpG dinucleotide"
  misc_feature (61)..(61): /note="Nucleotide may be methylated to form 5-methylcytosine"
agactccctccacacccacagtgccccctgaggaagcctggccccacagatggtgactggcgggagccatcagaccccctgtctgattgattgcacttgagtgctagagaggaggccatgag

SEQ ID NO: 23876 - DNA, 122 bp, Homo sapiens
  misc_feature (61)..(62): /note="This region represents a CpG dinucleotide"
  misc_feature (61)..(61): /note="Nucleotide may be methylated to form 5-methylcytosine"
aattctgcacctttaataaagttttatgggacaggaaggtgactggcattgacattgtaacgaggaatgggtggtgccacctttgctgtgtcttaccagaaatacctgtggcaggtaaattt

SEQ ID NO: 23877 - DNA, 122 bp, Homo sapiens
  misc_feature (61)..(62): /note="This region represents a CpG dinucleotide"
  misc_feature (61)..(61): /note="Nucleotide may be methylated to form 5-methylcytosine"
cttcatttccttggtcacgctgtgactgagagatggtcactgcagcttatctgggcagtccgtgcagggtatgggagtcagtagggtgagtcaagtaggttgtatccagctgtcccataggg

SEQ ID NO: 23878 - DNA, 122 bp, Homo sapiens
  misc_feature (61)..(62): /note="This region represents a CpG dinucleotide"
  misc_feature (61)..(61): /note="Nucleotide may be methylated to form 5-methylcytosine"
gggcagctcactctggagccatccctgacaaggctgtgggaggggtgcgcagtgccctgccgctctcattggcaggacatgggggttagcacagacatctctaggactggattgaagagctg

SEQ ID NO: 23879 - DNA, 122 bp, Homo sapiens
  misc_feature (61)..(62): /note="This region represents a CpG dinucleotide"
  misc_feature (61)..(61): /note="Nucleotide may be methylated to form 5-methylcytosine"
tttctttacctaccaatcttctattttctagtctagtaccattagaatctagaaatacttcgttctgaattttcttttttcaaatttaaggatcaacttgggtatttttccaggacacccaa

SEQ ID NO: 23880 - DNA, 122 bp, Homo sapiens
  misc_feature (61)..(62): /note="This region represents a CpG dinucleotide"
  misc_feature (61)..(61): /note="Nucleotide may be methylated to form 5-methylcytosine"
agactacctcatggcagcatgtcacgactaacagatcactccaggcatagtagttctcatcggctcaatgaacagtcacgacatagcagcatcagagatctcagtaataatcccatgactca

SEQ ID NO: 23881 - DNA, 122 bp, Homo sapiens
  misc_feature (61)..(62): /note="This region represents a CpG dinucleotide"
  misc_feature (61)..(61): /note="Nucleotide may be methylated to form 5-methylcytosine"
agtggcagagccaggtctagactcctagtgcctgactcaccgctgttctctctaccctagcgactccaagtgcatcagcataggcattgccaggagctcatgaggaatgcagactgtcaggt

SEQ ID NO: 23882 - DNA, 122 bp, Homo sapiens
  misc_feature (61)..(62): /note="This region represents a CpG dinucleotide"
  misc_feature (61)..(61): /note="Nucleotide may be methylated to form 5-methylcytosine"
cttctctttgcatttcctaacattggacatttctgaaggcctagttctttatttgctattcgtctttaagttttgctattagaattatacattctggagttgataagccagttggttaataa

SEQ ID NO: 23883 - DNA, 122 bp, Homo sapiens
  misc_feature (61)..(62): /note="This region represents a CpG dinucleotide"
  misc_feature (61)..(61): /note="Nucleotide may be methylated to form 5-methylcytosine"
gagtagaaacagctgcgggagtgattcttgtctccatatatgtttataaggcactgagggcgggattagcagctcctgggaagtctggctctagttaccgtgtcagcctgtcctgggggcag

SEQ ID NO: 23884 - DNA, 122 bp, Homo sapiens
  misc_feature (61)..(62): /note="This region represents a CpG dinucleotide"
  misc_feature (61)..(61): /note="Nucleotide may be methylated to form 5-methylcytosine"
tcgaattcatctgtgtgcttgtacaattaattcacctatttctctattcatttcccctctcgtccacatactcttcttccttctttcaaatattcaagtgcctgctaatgtgcttggtccaa

SEQ ID NO: 23885 - DNA, 122 bp, Homo sapiens
  misc_feature (61)..(62): /note="This region represents a CpG dinucleotide"
  misc_feature (61)..(61): /note="Nucleotide may be methylated to form 5-methylcytosine"
ctcctgggcgcgcattcttaacttggcaaatacacctcctaaaatgattgagacttgtctcgtcatgtttcttgattgacagaagctaacacagagaacatttttagatgagaaacccaata

SEQ ID NO: 23886 - DNA, 122 bp, Homo sapiens
  misc_feature (61)..(62): /note="This region represents a CpG dinucleotide"
  misc_feature (61)..(61): /note="Nucleotide may be methylated to form 5-methylcytosine"
gatttcatactttcccaggctctgatatcttatgtatttgaatatgaataggtgattgagcgtgtgtgtctgtgtgtttctccaaggtatctgaaaccggtcccctctttagttcatttggt

SEQ ID NO: 23887 - DNA, 122 bp, Homo sapiens
  misc_feature (61)..(62): /note="This region represents a CpG dinucleotide"
  misc_feature (61)..(61): /note="Nucleotide may be methylated to form 5-methylcytosine"
actacaagtacaaaaataaaagtagagaaaaggaggatgaggtgcataacatggggagagcgtggctctgttatgtgtcaaatgtgattattggagcaggtatatttttttccagagaacag

SEQ ID NO: 23888 - DNA, 122 bp, Homo sapiens
  misc_feature (61)..(62): /note="This region represents a CpG dinucleotide"
  misc_feature (61)..(61): /note="Nucleotide may be methylated to form 5-methylcytosine"
ttctgccatccctatggaactgtcaggcagcacgctgaaactgaattcaggaaacaaagtcgtcatcttcttaaagtcatagtagtaatttaaggccaaaagaccagagtcatctgataata

SEQ ID NO: 23889 - DNA, 122 bp, Homo sapiens
  misc_feature (61)..(62): /note="This region represents a CpG dinucleotide"
  misc_feature (61)..(61): /note="Nucleotide may be methylated to form 5-methylcytosine"
tgcggaggtttagcggaggcccggtaggcttgggccgggggggttcgggctgggagaggccgcccccgccatcagtcaccgaggtgggagggggggaagagaggttcgctgtggcttcaagg

SEQ ID NO: 23890 - DNA, 122 bp, Homo sapiens
  misc_feature (61)..(62): /note="This region represents a CpG dinucleotide"
  misc_feature (61)..(61): /note="Nucleotide may be methylated to form 5-methylcytosine"
tttgctcacaaaggtggtctctggggtaggctcagagaggcccccagcctctgaatttcacgattgagataaagactcattatgtggagtctgatctggttccattagcaaaatgatttctg

SEQ ID NO: 23891 - DNA, 122 bp, Homo sapiens
  misc_feature (61)..(62): /note="This region represents a CpG dinucleotide"
  misc_feature (61)..(61): /note="Nucleotide may be methylated to form 5-methylcytosine"
attattcctatgcaggtcctggggcggctgtggcaaccaggcagttagaaaaaaaaaaatcgtgaagcattcccatgagcaaacacttaagtgctaaatggcaccatgtgcttatttcattc

SEQ ID NO: 23892 - DNA, 122 bp, Homo sapiens
  misc_feature (61)..(62): /note="This region represents a CpG dinucleotide"
  misc_feature (61)..(61): /note="Nucleotide may be methylated to form 5-methylcytosine"
aaggcagagggagcatgtgcaggagcacgagagcacttgtcacgttgagagaacgttacacggtttagaactggtagagtgtaggccgggcgcggtggctcacacctgtaatcccagcactt

SEQ ID NO: 23893 - DNA, 122 bp, Homo sapiens
  misc_feature (61)..(62): /note="This region represents a CpG dinucleotide"
  misc_feature (61)..(61): /note="Nucleotide may be methylated to form 5-methylcytosine"
tctagagattcaagtcacagccttaggccccagtcacaagtgtgtccccaggctttgccacgttactcacaggcctctggagctgagaacaagtgcgtggcactgaaaaacctgggggaagg

SEQ ID NO: 23894 - DNA, 122 bp, Homo sapiens
  misc_feature (61)..(62): /note="This region represents a CpG dinucleotide"
  misc_feature (61)..(61): /note="Nucleotide may be methylated to form 5-methylcytosine"
gtttgtaaagtctcagaagtttcaggctccattttttttttctttgcaagaaacccatgtcgactataatgagtgcattttagagatgctgtgctgaaagctggcaatggataaagcaagaa

SEQ ID NO: 23895 - DNA, 122 bp, Homo sapiens
  misc_feature (61)..(62): /note="This region represents a CpG dinucleotide"
  misc_feature (61)..(61): /note="Nucleotide may be methylated to form 5-methylcytosine"
gctcttctgtcattgccacctaattgtaggcctctgcttgctagttgtatccactgtttacgttatagagaaatcttttcacatatgtaaggactttatatctgtgtgtgtgcccattcatt

SEQ ID NO: 23896 - DNA, 122 bp, Homo sapiens
  misc_feature (61)..(62): /note="This region represents a CpG dinucleotide"
  misc_feature (61)..(61): /note="Nucleotide may be methylated to form 5-methylcytosine"
gctaactcagcctcctggagagacacacacggattcacacagaaacacatgaccatgtggcgtcccagatggagagacaaacagacaaagagaggcaagtaaagacagaccaacaaatgacc

SEQ ID NO: 23897 - DNA, 122 bp, Homo sapiens
  misc_feature (61)..(62): /note="This region represents a CpG dinucleotide"
  misc_feature (61)..(61): /note="Nucleotide may be methylated to form 5-methylcytosine"
cttgtcagcgcttcctctgagacttgtctctttattggatatgctatttcccttccccttcgtacacttccataacactagtaccacaagagaatggggaagctctttacagcattgattta

SEQ ID NO: 23898 - DNA, 122 bp, Homo sapiens
  misc_feature (61)..(62): /note="This region represents a CpG dinucleotide"
  misc_feature (61)..(61): /note="Nucleotide may be methylated to form 5-methylcytosine"
gggcacctgcacagcagacctgcaggtggggcagggaagggaaaggaagctggggtgcttcgtgattcttgtgtgccataccatgtctcccagtggcaggaaggctcctggggaactgggga

SEQ ID NO: 23899 - DNA, 122 bp, Homo sapiens
  misc_feature (61)..(62): /note="This region represents a CpG dinucleotide"
  misc_feature (61)..(61): /note="Nucleotide may be methylated to form 5-methylcytosine"
ctctgagctgccgtactagaatccgctcctgctcaacagcctgacaaaaaatccagactccgagtgtaaaacaggaggggtggtgcaaacacaagatgacacacctcggatgcaccaaacct

SEQ ID NO: 23900 - DNA, 122 bp, Homo sapiens
  misc_feature (61)..(62): /note="This region represents a CpG dinucleotide"
  misc_feature (61)..(61): /note="Nucleotide may be methylated to form 5-methylcytosine"
atagaaggcaatgtggacaagacaatggaacaggataatgaggaagaggacaacagatcacgagaatgagagaaaagccacagagatcacagaggccagagatagaatagctaggacaaaaa

SEQ ID NO: 23901 - DNA, 122 bp, Homo sapiens
  misc_feature (61)..(62): /note="This region represents a CpG dinucleotide"
  misc_feature (61)..(61): /note="Nucleotide may be methylated to form 5-methylcytosine"
caagatttacctaagctgtgtctagcagatgttggctgaggtttcatgaggtatgcaaagcgggtaggctcaaaatggctaaaaatctgcttctttgggttattgttaaaataaatggaatg

SEQ ID NO: 23902 - DNA, 122 bp, Homo sapiens
  misc_feature (61)..(62): /note="This region represents a CpG dinucleotide"
  misc_feature (61)..(61): /note="Nucleotide may be methylated to form 5-methylcytosine"
tcattatttctgagctctgagtcctgtggtcccatcagtcctgcttcctcccttctgccccgcagtgctggcctctcccagctggccagttgtttatgaagaaccccagcggagtctccctg

SEQ ID NO: 23903 - DNA, 122 bp, Homo sapiens
  misc_feature (61)..(62): /note="This region represents a CpG dinucleotide"
  misc_feature (61)..(61): /note="Nucleotide may be methylated to form 5-methylcytosine"
aagacccaacggagccccagccccacgtgatactaccctgggggcaaagaagcactgtcgcgcccctctttgtgtgacaagaacttcctggaaactgtgacactgaagggccctggggaggg

SEQ ID NO: 23904 - DNA, 122 bp, Homo sapiens
  misc_feature (61)..(62): /note="This region represents a CpG dinucleotide"
  misc_feature (61)..(61): /note="Nucleotide may be methylated to form 5-methylcytosine"
gtgagctgagatcgtgccactgcctgggcgacagagccaagatcacgcttccaacctgggcgacagagcaagacaagctctgtctggatttaaacaatccagtttcaaaatgggcaaagaac

SEQ ID NO: 23905 - DNA, 122 bp, Homo sapiens
  misc_feature (61)..(62): /note="This region represents a CpG dinucleotide"
  misc_feature (61)..(61): /note="Nucleotide may be methylated to form 5-methylcytosine"
acggggtgtggggaggtgggggaggaacgtgtacttcccccagtttcccagggattctgacgccccagataaaacttgagagccacaggtgtaggagatatagaaaaatattgttttttgat

SEQ ID NO: 23906 - DNA, 122 bp, Homo sapiens
  misc_feature (61)..(62): /note="This region represents a CpG dinucleotide"
  misc_feature (61)..(61): /note="Nucleotide may be methylated to form 5-methylcytosine"
cccctgggcaaaggcagagataacattggcacaatctgcctttcagctttcattgtcatgcgggagtcaccatgctttgtaagacatttaatctataagacttgattagttttgctaccttt

SEQ ID NO: 23907 - DNA, 122 bp, Homo sapiens
  misc_feature (61)..(62): /note="This region represents a CpG dinucleotide"
  misc_feature (61)..(61): /note="Nucleotide may be methylated to form 5-methylcytosine"
ccagggcctaatcttgtttgtgtagtgtctctaattccttcattttgaccacagctcttacgcaccctgtatatagtaattatccatgagagggagagtttgggaaatgatacccttgtcaa

SEQ ID NO: 23908 - DNA, 122 bp, Homo sapiens
  misc_feature (61)..(62): /note="This region represents a CpG dinucleotide"
  misc_feature (61)..(61): /note="Nucleotide may be methylated to form 5-methylcytosine"
acctaaaactacaaaaaccctggaagataacctaggaaatactattccggatataggatccggcaaagatttcatgatgaagacgccaaagcaattgcaacaaaaacaaaaattgacaaatg

SEQ ID NO: 23909 - DNA, 122 bp, Homo sapiens
  misc_feature (61)..(62): /note="This region represents a CpG dinucleotide"
  misc_feature (61)..(61): /note="Nucleotide may be methylated to form 5-methylcytosine"
aaataggattgctagcatttggcatctcatttgcctctatgacaacaaaactctagaagacgtagtttataatacattatggtttcagctgaatgacatttggttctaaggtctttgaaagt

SEQ ID NO: 23910 - DNA, 122 bp, Homo sapiens
  misc_feature (61)..(62): /note="This region represents a CpG dinucleotide"
  misc_feature (61)..(61): /note="Nucleotide may be methylated to form 5-methylcytosine"
atccagaatgatttcactgataggaagccatgcaactgcattccatgggtccctttcagccgccgcttagtaacagaacaactccataaccagttacagccatagccgggaggggaaagtct

SEQ ID NO: 23911 - DNA, 122 bp, Homo sapiens
  misc_feature (61)..(62): /note="This region represents a CpG dinucleotide"
  misc_feature (61)..(61): /note="Nucleotide may be methylated to form 5-methylcytosine"
cttttttaagacttcagctttgactgtccttacaagtggaaaacaacagctaattgagaacgctgttttcggtaagggggacactaaatggatctacaggagtagtggcacaactaaattta

SEQ ID NO: 23912 - DNA, 122 bp, Homo sapiens
  misc_feature (61)..(62): /note="This region represents a CpG dinucleotide"
  misc_feature (61)..(61): /note="Nucleotide may be methylated to form 5-methylcytosine"
agaatgctcctccaggaatgctcttggagtctcactctgtagcccaagcttgagtgcagtcgtgtgatcctggctcactgcaacctccgccccctgggctcaagggattctcatgcttcagc

SEQ ID NO: 23913 - DNA, 122 bp, Homo sapiens
  misc_feature (61)..(62): /note="This region represents a CpG dinucleotide"
  misc_feature (61)..(61): /note="Nucleotide may be methylated to form 5-methylcytosine"
ctgaggctcaggatgaggatttgatccagggctgctaattcttctgacagagcacagccacgtggcttatgcctgcagcaggcccttcccaaaggctgttcaggccagggcaaggtgctgag

SEQ ID NO: 23914 - DNA, 122 bp, Homo sapiens
  misc_feature (61)..(62): /note="This region represents a CpG dinucleotide"
  misc_feature (61)..(61): /note="Nucleotide may be methylated to form 5-methylcytosine"
ggtgatccgccctcctcggcctcccaaagtgctgggattacaggtgtgagccacggtgcacggcccctggagaggttttaatggcccagcctcacacccaggtctggcctcccaggccacca

SEQ ID NO: 23915 - DNA, 122 bp, Homo sapiens
  misc_feature (61)..(62): /note="This region represents a CpG dinucleotide"
  misc_feature (61)..(61): /note="Nucleotide may be methylated to form 5-methylcytosine"
ggccagggagtgactgactgggcaggtgtcctccctcttccctgtctctgccctctttggcgcctcctctcgttctttctactctgagtgttcagtgctctcaagttttctcagcctcctcc

SEQ ID NO: 23916 - DNA, 122 bp, Homo sapiens
  misc_feature (61)..(62): /note="This region represents a CpG dinucleotide"
  misc_feature (61)..(61): /note="Nucleotide may be methylated to form 5-methylcytosine"
agcctgaggggccacatcacggaacacaagacactgggggaagtgacaggccagaggccacgttacttcaacaggttggatggtatctacaacattcctaaggggataggtcctaagagcac

SEQ ID NO: 23917 - DNA, 122 bp, Homo sapiens
  misc_feature (61)..(62): /note="This region represents a CpG dinucleotide"
  misc_feature (61)..(61): /note="Nucleotide may be methylated to form 5-methylcytosine"
caaagtgcccgcagaccccctcaattctcacttgtattcaggtttgtggacacatgcctccgggctcactgcagccacccgtgtggaggaagaggaggaagagggctcgccacgccccagag

SEQ ID NO: 23918 - DNA, 122 bp, Homo sapiens
  misc_feature (61)..(62): /note="This region represents a CpG dinucleotide"
  misc_feature (61)..(61): /note="Nucleotide may be methylated to form 5-methylcytosine"
gtcagggcctaagggtccaggaatcactgtctaccttaggagtttgttaataaatcgccacggtgagttgggtaatgtttgagagcaaaatgaaataaaatgtcctatatgtgtttaagcta

SEQ ID NO: 23919 - DNA, 122 bp, Homo sapiens
  misc_feature (61)..(62): /note="This region represents a CpG dinucleotide"
  misc_feature (61)..(61): /note="Nucleotide may be methylated to form 5-methylcytosine"
tcagtgaatgtttataaaagtgcaggaatgttggtcaccacccatcccttggtgtttccacggagaatgatgaaaatggtcagcagctgagaccacgcacaatgtgccctgctgtctccaag

SEQ ID NO: 23920 - DNA, 122 bp, Homo sapiens
  misc_feature (61)..(62): /note="This region represents a CpG dinucleotide"
  misc_feature (61)..(61): /note="Nucleotide may be methylated to form 5-methylcytosine"
ctataacacagtgttacacagatctctagaacttgtttatcttgcataactgaatctttacgtccattgagcaacaactctctgaaattccacctcccatgagcccctgggaactaccattc

SEQ ID NO: 23921 - DNA, 122 bp, Homo sapiens
  misc_feature (61)..(62): /note="This region represents a CpG dinucleotide"
  misc_feature (61)..(61): /note="Nucleotide may be methylated to form 5-methylcytosine"
ttggaaaactcacaaacttccaagcttgcctttcctattgttgcatggattgaaagcttgcgttgtgtgaagaatggcgcttcctgctgtgcttagttttatctcatataatctttgcacca

SEQ ID NO: 23922 - DNA, 122 bp, Homo sapiens
  misc_feature (61)..(62): /note="This region represents a CpG dinucleotide"
  misc_feature (61)..(61): /note="Nucleotide may be methylated to form 5-methylcytosine"
tggagtgggagggtgcaggaggaggccaacatcatcagcaaggatcccctgcaaacatgccgcccaggaggcaaggcctgtttggcatgtagaccagtcctagtccacaggtaaacattcca

SEQ ID NO: 23923 - DNA, 122 bp, Homo sapiens
  misc_feature (61)..(62): /note="This region represents a CpG dinucleotide"
  misc_feature (61)..(61): /note="Nucleotide may be methylated to form 5-methylcytosine"
ttggacactctcaggatgcagaggagaaaaagataaaagtgggtaaatacgaaaggtagacgtggaggacagataatggatccttcacccaagaggagttcctgaacaggaaactgaagtca

SEQ ID NO: 23924 - DNA, 122 bp, Homo sapiens
  misc_feature (61)..(62): /note="This region represents a CpG dinucleotide"
  misc_feature (61)..(61): /note="Nucleotide may be methylated to form 5-methylcytosine"
agttatttgatgtaaaatatgagaagaggcgaggtggcaagaggctgctggggactgacacgtgggagcagtgcagaagagaaccctgacaaaccttaaaagaacacaaagtacatagtagt

SEQ ID NO: 23925 - DNA, 122 bp, Homo sapiens
  misc_feature (61)..(62): /note="This region represents a CpG dinucleotide"
  misc_feature (61)..(61): /note="Nucleotide may be methylated to form 5-methylcytosine"
agaagccccaggagggtgaagtcagaggatgatgtgttcgtcattgatatggcccacgagcgtcccagggcaacgggaagacacaaggaccaggaaggaggcaagagaacacggtcaagatg

SEQ ID NO: 23926 - DNA, 122 bp, Homo sapiens
  misc_feature (61)..(62): /note="This region represents a CpG dinucleotide"
  misc_feature (61)..(61): /note="Nucleotide may be methylated to form 5-methylcytosine"
gaattactgcagatggtgacattgaacaggaaataggtagttaagacacaggaaattgcacgtcagtaaaaagacacaccaataaagataaggaacagaaagtcccatgagagaatgtgaag

SEQ ID NO: 23927 - DNA, 122 bp, Homo sapiens
  misc_feature (61)..(62): /note="This region represents a CpG dinucleotide"
  misc_feature (61)..(61): /note="Nucleotide may be methylated to form 5-methylcytosine"
tatgaattttagtaactcggtgtgacagccagcctccaagacggctcctagtgattcacacgcttatgtagtcccattccacagtggatggggtgacctgtgtaacccaacaggatagtgca

SEQ ID NO: 23928 - DNA, 122 bp, Homo sapiens
  misc_feature (61)..(62): /note="This region represents a CpG dinucleotide"
  misc_feature (61)..(61): /note="Nucleotide may be methylated to form 5-methylcytosine"
acctcatgatctgcttgccttggcctcccaaagtgttgggattacaggcgtgagccaccgcgcccagccggtaggagggttttaatggtgattaaaccatctctgatccctagagagacaga

SEQ ID NO: 23929 - DNA, 122 bp, Homo sapiens
  misc_feature (61)..(62): /note="This region represents a CpG dinucleotide"
  misc_feature (61)..(61): /note="Nucleotide may be methylated to form 5-methylcytosine"
cttcatctccttcccactggagctctacatcggacgccaggacttaggctcccaggatgacgtagtcatagtagtcctaatgcattggtgtggcagtcagcaacactttaaatggcctacca

SEQ ID NO: 23930 - DNA, 122 bp, Homo sapiens
  misc_feature (61)..(62): /note="This region represents a CpG dinucleotide"
  misc_feature (61)..(61): /note="Nucleotide may be methylated to form 5-methylcytosine"
actgatgaacatttagtttgatttcaatctcttgctattacagatgttacagtaaataatcgtgtacacacacacacacacacacacacacagtttactttgcatgtgtacactgagaatat

SEQ ID NO: 23931 - DNA, 122 bp, Homo sapiens
  misc_feature (61)..(62): /note="This region represents a CpG dinucleotide"
  misc_feature (61)..(61): /note="Nucleotide may be methylated to form 5-methylcytosine"
agagaggaactgaacagtgtgtgttaagaatggagcctgtgaatcactccttgtgaatcacggcactttatcactgccctttccttagacctactgaagacagcctggacaacctggcatgg

SEQ ID NO: 23932 - DNA, 122 bp, Homo sapiens
  misc_feature (61)..(62): /note="This region represents a CpG dinucleotide"
  misc_feature (61)..(61): /note="Nucleotide may be methylated to form 5-methylcytosine"
cttctatttaattttgtcccagtgcaagaagcagacaccttaagagcacgttaatttcatcgtgactgaaactttgggagaccttgtataccacagaggcagactgctgtttaaaactttct

SEQ ID NO: 23933 - DNA, 122 bp, Homo sapiens
  misc_feature (61)..(62): /note="This region represents a CpG dinucleotide"
  misc_feature (61)..(61): /note="Nucleotide may be methylated to form 5-methylcytosine"
tagcagaatatgatggctcctgaagttccatttctgacctacataaggattttagcaatacgctatttcaaaaagacaacctctaagctgccgtggatctggaatcaaattaaaatgaggcc

SEQ ID NO: 23934 - DNA, 122 bp, Homo sapiens
  misc_feature (61)..(62): /note="This region represents a CpG dinucleotide"
  misc_feature (61)..(61): /note="Nucleotide may be methylated to form 5-methylcytosine"
ttgtccttcactgtctccctgagagcatgagaggggaggagtggacagctgcaggtgcaacgggaatagctgcaaatcctaagcagctccatagcaacatgtgcagctcgtgatgatgatat

SEQ ID NO: 23935 - DNA, 122 bp, Homo sapiens
  misc_feature (61)..(62): /note="This region represents a CpG dinucleotide"
  misc_feature (61)..(61): /note="Nucleotide may be methylated to form 5-methylcytosine"
tgcgctttttctctgggtttgccggttctggacctctcgtgggaacagagttgctccatgcgctatccttccatctggctccttccacttcacgtcatggctttgagactcctccacgtggt

SEQ ID NO: 23936 - DNA, 122 bp, Homo sapiens
  misc_feature (61)..(62): /note="This region represents a CpG dinucleotide"
  misc_feature (61)..(61): /note="Nucleotide may be methylated to form 5-methylcytosine"
cccatgcttcagattcaaaggaggtctgtgaagggctgggctttgcttaacctttcacatcgcaaaacttcctgcctctctggcctcagacaaacacatcctccaggccagggttcagaagg

SEQ ID NO: 23937 - DNA, 122 bp, Homo sapiens
  misc_feature (61)..(62): /note="This region represents a CpG dinucleotide"
  misc_feature (61)..(61): /note="Nucleotide may be methylated to form 5-methylcytosine"
gaggtagaggaaatgaaggagtcaaagcttccaggtgataaaggacttgtgttgatgtctcgggccaagcatcatgccatctctgctaaactgaacaagcccttcctgtttgacaccaagcc

SEQ ID NO: 23938 - DNA, 122 bp, Homo sapiens
  misc_feature (61)..(62): /note="This region represents a CpG dinucleotide"
  misc_feature (61)..(61): /note="Nucleotide may be methylated to form 5-methylcytosine"
attacacctcaactcacaatcggctcatgccttacaaccatctgtggctaagaggcaagtcggacttcctggtaaaccctcttctcttaggtgaagcatggagctgtgaccttattaacctg

SEQ ID NO: 23939 - DNA, 122 bp, Homo sapiens
  misc_feature (61)..(62): /note="This region represents a CpG dinucleotide"
  misc_feature (61)..(61): /note="Nucleotide may be methylated to form 5-methylcytosine"
attcaatgtatgtggtttatttacatacgcataactttcctataactacctgcacagttacggaaaacagcaacacccactgaaggacgatatctagcagacatctagctcaccaaaaatga

SEQ ID NO: 23940 - DNA, 122 bp, Homo sapiens
  misc_feature (61)..(62): /note="This region represents a CpG dinucleotide"
  misc_feature (61)..(61): /note="Nucleotide may be methylated to form 5-methylcytosine"
gtgaggcctacttcatctagtggttgaaacacaggtctagatttggtttcctggagtccacgtcacacccaagctgagcgagataatcacagaaacttgtcagtgttctttctcttctagca

SEQ ID NO: 23941 - DNA, 122 bp, Homo sapiens
  misc_feature (61)..(62): /note="This region represents a CpG dinucleotide"
  misc_feature (61)..(61): /note="Nucleotide may be methylated to form 5-methylcytosine"
tctgacagtgccatgccatgcactcgctgttgcagtgactcactgaccaggctggccacacgaatgttctcttccaggatctgcaggcagaaatgagcagccatcggcaaagcctccctcct

SEQ ID NO: 23942 - DNA, 122 bp, Homo sapiens
  misc_feature (61)..(62): /note="This region represents a CpG dinucleotide"
  misc_feature (61)..(61): /note="Nucleotide may be methylated to form 5-methylcytosine"
ccagacacaaagaggaaacagcaagcttctctactccatcgtgattgtttcctgggcaagcgtgtttcccagctgcaatcatagatgccccaaaatgatgccagtgtcagaccctgccgtgc

SEQ ID NO: 23943 - DNA, 122 bp, Homo sapiens
  misc_feature (61)..(62): /note="This region represents a CpG dinucleotide"
  misc_feature (61)..(61): /note="Nucleotide may be methylated to form 5-methylcytosine"
ttatcttggctcttgccaggacttatttttctccttctggcaaatgggcaagatgctggccggttttggggaaatcttggtcttcctgttgtaggggaatgttaagactgtcattatcagtg

SEQ ID NO: 23944 - DNA, 122 bp, Homo sapiens
  misc_feature (61)..(62): /note="This region represents a CpG dinucleotide"
  misc_feature (61)..(61): /note="Nucleotide may be methylated to form 5-methylcytosine"
ctcaaacagaatgtgcatttgagggcagaatgtgtaaatattgcactactgtgttataaccgtcaggagccatgctgatgatgaaacgtcccagatgccggtgctggaaaggtccctggctt

SEQ ID NO: 23945 - DNA, 122 bp, Homo sapiens
  misc_feature (61)..(62): /note="This region represents a CpG dinucleotide"
  misc_feature (61)..(61): /note="Nucleotide may be methylated to form 5-methylcytosine"
aaaccactgtataattcgacaattcaatcaagtgctaatcattctattgtgaagagggaccggaaaccaagttgcaaatgcacattttaagacagtatcagtaaaaataaactggaagcctg

SEQ ID NO: 23946 - DNA, 122 bp, Homo sapiens
  misc_feature (61)..(62): /note="This region represents a CpG dinucleotide"
  misc_feature (61)..(61): /note="Nucleotide may be methylated to form 5-methylcytosine"
catataatcacttccttattctgtgacatttttggtggctttgcttccctgactgaacaccgactgataaaatggcagaggaggaaaaacaatttccctctacctttctaagttcagcagct

SEQ ID NO: 23947 - DNA, 122 bp, Homo sapiens
  misc_feature (61)..(62): /note="This region represents a CpG dinucleotide"
  misc_feature (61)..(61): /note="Nucleotide may be methylated to form 5-methylcytosine"
tgaactcctgacgtcaggcgatccacctgcttcagcctcccaaagtgttgggattacaggcgtgagccaccaagcctggccccgaaaaggttttcactggccagtgagataggtgcctgcag

SEQ ID NO: 23948 - DNA, 122 bp, Homo sapiens
  misc_feature (61)..(62): /note="This region represents a CpG dinucleotide"
  misc_feature (61)..(61): /note="Nucleotide may be methylated to form 5-methylcytosine"
acttggaactccaggctcaggtcagtttgtaaatactcaaaacccaaacccatatattctcgttccttctcctgctcccttttcctcctcctcctcaccccacactagccacatagactctg

SEQ ID NO: 23949 - DNA, 122 bp, Homo sapiens
  misc_feature (61)..(62): /note="This region represents a CpG dinucleotide"
  misc_feature (61)..(61): /note="Nucleotide may be methylated to form 5-methylcytosine"
aggccagtgtcatttctccaaggtgacagcctttaaagcagatttgaatggctgacagggcgtgttccccatgggatatgtattttattgttgttttatggctttttttttttttcttgaga

SEQ ID NO: 23950 - DNA, 122 bp, Homo sapiens
  misc_feature (61)..(62): /note="This region represents a CpG dinucleotide"
  misc_feature (61)..(61): /note="Nucleotide may be methylated to form 5-methylcytosine"
caagcctctgactctgcctttcctccaccctggccactcccgccgccctggactcacacacgcccaggcttcaatgccagctctgtttctgactagctgagtgacttcaggcaggtgacagc

SEQ ID NO: 23951 - DNA, 122 bp, Homo sapiens
  misc_feature (61)..(62): /note="This region represents a CpG dinucleotide"
  misc_feature (61)..(61): /note="Nucleotide may be methylated to form 5-methylcytosine"
cctgcatctgaagatgttctaaaccttcatttaagtaagaagcaagatcaagatccattccgtcagttacctggagtctgtcatctttcggaataggggacggaatcacctcaaatttaact

SEQ ID NO: 23952 - DNA, 122 bp, Homo sapiens
  misc_feature (61)..(62): /note="This region represents a CpG dinucleotide"
  misc_feature (61)..(61): /note="Nucleotide may be methylated to form 5-methylcytosine"
ctgtttctccatatccttgccaaacttatttttcattttcttggtttaagatatcctagtcggcgtgaaaaggtatctctcattgtggtttcgatttgcatttctttagtgaccaaggatat

SEQ ID NO: 23953 - DNA, 122 bp, Homo sapiens
  misc_feature (61)..(62): /note="This region represents a CpG dinucleotide"
  misc_feature (61)..(61): /note="Nucleotide may be methylated to form 5-methylcytosine"
ctcttggcaatcactttctcttgctcttttaaaatcaagaaatcaaagtgccctttagcacggccctgtggccaagaaagccctgcagccaagataacaggttgaagttcaaacaattcatc

SEQ ID NO: 23954 - DNA, 122 bp, Homo sapiens
  misc_feature (61)..(62): /note="This region represents a CpG dinucleotide"
  misc_feature (61)..(61): /note="Nucleotide may be methylated to form 5-methylcytosine"
ctgaatgtcctggatgtatccacaccctctaggaacaactgaacaaatctttcctggaaacggtgtttaattactcagagcagtgtcacattaatatagaagctgtgcatgtcttccgtata

SEQ ID NO: 23955 - DNA, 122 bp, Homo sapiens
  misc_feature (61)..(62): /note="This region represents a CpG dinucleotide"
  misc_feature (61)..(61): /note="Nucleotide may be methylated to form 5-methylcytosine"
agatagattggcttagcctttgcctatattaaggcaacactattttctaaaatgattacccggataggtgatatcaaaagtccagacgcacttaggtggaaaaaaacaaaacccaggataga

SEQ ID NO: 23956 - DNA, 122 bp, Homo sapiens
  misc_feature (61)..(62): /note="This region represents a CpG dinucleotide"
  misc_feature (61)..(61): /note="Nucleotide may be methylated to form 5-methylcytosine"
gagggcttaggagagtgtgagaggctggaggcgagagggaggagaagcaggacgaggaatcggactccagtagcagcttatatatggagagcatgggctgggcccagtcctggaaggtgagc

SEQ ID NO: 23957 - DNA, 122 bp, Homo sapiens
  misc_feature (61)..(62): /note="This region represents a CpG dinucleotide"
  misc_feature (61)..(61): /note="Nucleotide may be methylated to form 5-methylcytosine"
aggtttgctgactcgtgaaaggcccctgccttgtgtttctctgtttgcaagactacctgccgcccattgtgggctgaccaggaagccttcgctttgtcttggccaattgacacagctgcaca

SEQ ID NO: 23958 - DNA, 122 bp, Homo sapiens
  misc_feature (61)..(62): /note="This region represents a CpG dinucleotide"
  misc_feature (61)..(61): /note="Nucleotide may be methylated to form 5-methylcytosine"
aggagggccttgaaatcacaggctggcctgtgatgtctccatgaccccatggcctgcaaccggtcacttgtccactcagctctggccctggcctccctgcagtttcttcatctggccagaca

SEQ ID NO: 23959 - DNA, 122 bp, Homo sapiens
  misc_feature (61)..(62): /note="This region represents a CpG dinucleotide"
  misc_feature (61)..(61): /note="Nucleotide may be methylated to form 5-methylcytosine"
gttgctcaggtacctgaatattggctttgtgtctaaagtttctggaactttcctccttaccgtgaaataacttggcttaaatcacactgcatatagtacacaggtgcttagctcaagcctga

SEQ ID NO: 23960 - DNA, 122 bp, Homo sapiens
  misc_feature (61)..(62): /note="This region represents a CpG dinucleotide"
  misc_feature (61)..(61): /note="Nucleotide may be methylated to form 5-methylcytosine"
aggaagcccacctgtaaccacttagctgacatgtccaactatgggtgaacaggaaataagcgacattcacctaggctgtttattggaatctgactagcattatttgatttggcatactttac

SEQ ID NO: 23961 - DNA, 122 bp, Homo sapiens
  misc_feature (61)..(62): /note="This region represents a CpG dinucleotide"
  misc_feature (61)..(61): /note="Nucleotide may be methylated to form 5-methylcytosine"
taaattgagccattgcaaaatgtgtttctctacctttcatttgatagattcctacttaagcgtcaaaatgcagtgcatacagcatcgcctttggaaatccatctttgacctcccttctgtaa

SEQ ID NO: 23962 - DNA, 122 bp, Homo sapiens
  misc_feature (61)..(62): /note="This region represents a CpG dinucleotide"
  misc_feature (61)..(61): /note="Nucleotide may be methylated to form 5-methylcytosine"
tgtgagccaccccacccaggttgctgctaattttctgtatgcacacagtagaggctcactcgggactacaggaagtgccaccccgagcccacttcctcaccacaggcctttatcccttacct

SEQ ID NO: 23963 - DNA, 122 bp, Homo sapiens
  misc_feature (61)..(62): /note="This region represents a CpG dinucleotide"
  misc_feature (61)..(61): /note="Nucleotide may be methylated to form 5-methylcytosine"
aagctagggggtccccttttgtctgtgcccctttggtccctcacccaacagagctgcctgcgtatggtccacacatttctgtggtctggctgtggcctcagtaggctcatctcttcctcttc

SEQ ID NO: 23964 - DNA, 122 bp, Homo sapiens
  misc_feature (61)..(62): /note="This region represents a CpG dinucleotide"
  misc_feature (61)..(61): /note="Nucleotide may be methylated to form 5-methylcytosine"
cagttcattatgattattcctgtgtacacacagcttttcccagctgggctggggagtccacgtgtcctccggttacgtaaggagctgggttatctggagccccagatgggctgcttagtaat

SEQ ID NO: 23965 - DNA, 122 bp, Homo sapiens
  misc_feature (61)..(62): /note="This region represents a CpG dinucleotide"
  misc_feature (61)..(61): /note="Nucleotide may be methylated to form 5-methylcytosine"
ccaactcctgacctcagatgatccacctgcctctgcctcccaaagtgctgggattacaggcgtgagcccagcctgagtatgttttctggtgtgattacagtaaggcctacatgtaatccacg

SEQ ID NO: 23966 - DNA, 122 bp, Homo sapiens
  misc_feature (61)..(62): /note="This region represents a CpG dinucleotide"
  misc_feature (61)..(61): /note="Nucleotide may be methylated to form 5-methylcytosine"
acgggggcgcaggaccctgggacacagagcccaggacagcagtggtggcgtccgtctgaacgggggcgcaggaccctgggacacagagcccaggacagcagcggtcgtgttcgtctgaacag

SEQ ID NO: 23967 - DNA, 122 bp, Homo sapiens
  misc_feature (61)..(62): /note="This region represents a CpG dinucleotide"
  misc_feature (61)..(61): /note="Nucleotide may be methylated to form 5-methylcytosine"
gagtgtgtgatatgcttttgtgagtcatctgtccagcatacaattaatgagtgactatttcgtactgagtgcagtgaacattgcaacagtaatgattgctgtcacttgctgagattttatta

SEQ ID NO: 23968 - DNA, 122 bp, Homo sapiens
  misc_feature (61)..(62): /note="This region represents a CpG dinucleotide"
  misc_feature (61)..(61): /note="Nucleotide may be methylated to form 5-methylcytosine"
cagtggggagccacggagagggttacacctgggtggaaaaggacagatcaccccctcatacgtttcagaccagctgctccagagtcaacatggaggactgcctggcagcaggttccacgggg

SEQ ID NO: 23969 - DNA, 122 bp, Homo sapiens
  misc_feature (61)..(62): /note="This region represents a CpG dinucleotide"
  misc_feature (61)..(61): /note="Nucleotide may be methylated to form 5-methylcytosine"
tcacagtgacacttcaagggagatgcaggcagtaaaaccatgcctcctccagggcataaacgacccagcagataccctctgactttgggcttacaaagagtccaggtgacccgctctatgac

SEQ ID NO: 23970 - DNA, 122 bp, Homo sapiens
  misc_feature (61)..(62): /note="This region represents a CpG dinucleotide"
  misc_feature (61)..(61): /note="Nucleotide may be methylated to form 5-methylcytosine"
aagaattagagaatggaattcagagtgaccacagaacctggaaagtgtggaaggaaactgcgaaaaaagagagccagaaagggagaggcctgaattctgtttatgaactctacccaagtccc

SEQ ID NO: 23971 - DNA, 122 bp, Homo sapiens
  misc_feature (61)..(62): /note="This region represents a CpG dinucleotide"
  misc_feature (61)..(61): /note="Nucleotide may be methylated to form 5-methylcytosine"
atcctgaaaacctcccctttggcattttgaaggaattcatccccagtttttgctggtagccgggagggaaccgtgctctccccctgaggaaggccctttggagtaactgcagcaatgagtgc

SEQ ID NO: 23972 - DNA, 122 bp, Homo sapiens
  misc_feature (61)..(62): /note="This region represents a CpG dinucleotide"
  misc_feature (61)..(61): /note="Nucleotide may be methylated to form 5-methylcytosine"
cacatgcccttttgtcctcccgagctctaagcctagcagctgcctgtcatagaatgttcacggacattgaaatggttcacttgcatggggtgcagagtcacactcacctaccttatgggcag

SEQ ID NO: 23973 - DNA, 122 bp, Homo sapiens
  misc_feature (61)..(62): /note="This region represents a CpG dinucleotide"
  misc_feature (61)..(61): /note="Nucleotide may be methylated to form 5-methylcytosine"
ttcaagttttataatgagattacagcacttagtcacatcttcaggctccacttctaaatccggctctcttgctactcccatcacatctgcagttacttcctccactgaaaccttgaaactct

SEQ ID NO: 23974 - DNA, 122 bp, Homo sapiens
  misc_feature (61)..(62): /note="This region represents a CpG dinucleotide"
  misc_feature (61)..(61): /note="Nucleotide may be methylated to form 5-methylcytosine"
atgtcagggtgtctccctttcaattttgatctctttatatccctagggaagcttagagttcgctactgcctttcttatctaggccagagcttggttacatcatagtaagatttctcaatatt

SEQ ID NO: 23975 - DNA, 122 bp, Homo sapiens
  misc_feature (61)..(62): /note="This region represents a CpG dinucleotide"
  misc_feature (61)..(61): /note="Nucleotide may be methylated to form 5-methylcytosine"
ttctgctcccagatgttcctgcagcagccagctgtatccctgagcttcagcagcacccagcgacctgaggctcagcagcagctacagcaaaggtcagctgcagtgactcagccccagctcgg

SEQ ID NO: 23976 - DNA, 122 bp, Homo sapiens
  misc_feature (61)..(62): /note="This region represents a CpG dinucleotide"
  misc_feature (61)..(61): /note="Nucleotide may be methylated to form 5-methylcytosine"
tattgtttatcttatttattctcttcctattgcatctggaacacagtctgttttcaataccgtttgttgaactccagggtagattacagggctgtgtattataatctacagtactttaactg

SEQ ID NO: 23977 - DNA, 122 bp, Homo sapiens
  misc_feature (61)..(62): /note="This region represents a CpG dinucleotide"
  misc_feature (61)..(61): /note="Nucleotide may be methylated to form 5-methylcytosine"
agcccgaggcacagcagcgggccggggtggtgcagccggaaatccaggcggctcaggatgcgacgctcggcgcgcagcagctccgcccgtgagaaggagtccgcgctcaggaggcagaggaa

SEQ ID NO: 23978 - DNA, 122 bp, Homo sapiens
  misc_feature (61)..(62): /note="This region represents a CpG dinucleotide"
  misc_feature (61)..(61): /note="Nucleotide may be methylated to form 5-methylcytosine"
tgttaacaggaaaatgcccatggtccttgccaatgcaggccgacaagatgaacaactgtgcgtgtgtgcacagaagggtcctgcttttgatccgtgtgagaggagaaggaagccaggaagcg

SEQ ID NO: 23979 - DNA, 122 bp, Homo sapiens
  misc_feature (61)..(62): /note="This region represents a CpG dinucleotide"
  misc_feature (61)..(61): /note="Nucleotide may be methylated to form 5-methylcytosine"
ctggagggatgagagtagaaaagggatgatcctattttgatggctttgagggtgggggctcgatttggaaaggaccctgcagaagtggggaagggcactgcaaatcagatagggcaccctag

SEQ ID NO: 23980 - DNA, 122 bp, Homo sapiens
  misc_feature (61)..(62): /note="This region represents a CpG dinucleotide"
  misc_feature (61)..(61): /note="Nucleotide may be methylated to form 5-methylcytosine"
atagagctaatactcaagatgggagggaacaaaggcagcaactcccagcctcttaaacttcgggtttacataccttcaaaaacaagttgtactctttgtctgcgattgttgcttctaacata

SEQ ID NO: 23981 - DNA, 122 bp, Homo sapiens
  misc_feature (61)..(62): /note="This region represents a CpG dinucleotide"
  misc_feature (61)..(61): /note="Nucleotide may be methylated to form 5-methylcytosine"
caagtttgtcatttctgcaacccccaggtctgaccagtttggaacctgggctttctgagccggtctagtgggttggttgagagatgggggtttttctggtaactgcatttggtgctagccag

SEQ ID NO: 23982 - DNA, 122 bp, Homo sapiens
  misc_feature (61)..(62): /note="This region represents a CpG dinucleotide"
  misc_feature (61)..(61): /note="Nucleotide may be methylated to form 5-methylcytosine"
accacttatcaagggttgtttctcccacgagaccttgtcacccctgagcctgaaatcgcgcgctgagaactaattgcagtagctgcatacacacagtgaacaaagttcactgctcccttcat

SEQ ID NO: 23983 - DNA, 122 bp, Homo sapiens
  misc_feature (61)..(62): /note="This region represents a CpG dinucleotide"
  misc_feature (61)..(61): /note="Nucleotide may be methylated to form 5-methylcytosine"
gcaggcagcagcaggccaagggggccagagggagggtgttcctgaatgcctctttcttcccgctccttcaggctgtcttctgaagtagccaggctatcagggttttgcaacaatgcaacaaa

SEQ ID NO: 23984 - DNA, 122 bp, Homo sapiens
  misc_feature (61)..(62): /note="This region represents a CpG dinucleotide"
  misc_feature (61)..(61): /note="Nucleotide may be methylated to form 5-methylcytosine"
aaaatttgtcaagattccaagtatccctagatttttcttttctctgtctgtcatggccagcgtgatctttttctcatggaatcttagcttttatctgtagggctacttcattattctcttgc

SEQ ID NO: 23985 - DNA, 122 bp, Homo sapiens
  misc_feature (61)..(62): /note="This region represents a CpG dinucleotide"
  misc_feature (61)..(61): /note="Nucleotide may be methylated to form 5-methylcytosine"
agtgggaagtacgcataaggtatttctactacattccaaattaggatgtttgaggccaggcgcagtggctcccacctgcaattaattctagcactgtgggaggcctaggcaggtggatcatt

SEQ ID NO: 23986 - DNA, 122 bp, Homo sapiens
  misc_feature (61)..(62): /note="This region represents a CpG dinucleotide"
  misc_feature (61)..(61): /note="Nucleotide may be methylated to form 5-methylcytosine"
atattcttgactttacctttctaccgtgctcactgtggccttgtgacttggtcggcatttcgtagtctgctgaaggtgggtgctgggttccgctttggtggggagacctgttgcctacagca

SEQ ID NO: 23987 - DNA, 122 bp, Homo sapiens
  misc_feature (61)..(62): /note="This region represents a CpG dinucleotide"
  misc_feature (61)..(61): /note="Nucleotide may be methylated to form 5-methylcytosine"
gtttctggctcagcctcactgcctcacaatctcaaatgcaacaaaaacattttacttcttcgtccttcaaagtcattaacttgcgcatgatctcagagtgtgcaaagattttctaaacagaa

SEQ ID NO: 23988 - DNA, 122 bp, Homo sapiens
  misc_feature (61)..(62): /note="This region represents a CpG dinucleotide"
  misc_feature (61)..(61): /note="Nucleotide may be methylated to form 5-methylcytosine"
cgagctcacccgtgcagaaatggagggtcctgcaggaacctcccaggggcctatgtctgccggtgccctgcaggcttcgttggagtccactgtgagacaggtaggggctccctccagtgggc

SEQ ID NO: 23989 - DNA, 122 bp, Homo sapiens
  misc_feature (61)..(62): /note="This region represents a CpG dinucleotide"
  misc_feature (61)..(61): /note="Nucleotide may be methylated to form 5-methylcytosine"
tcccagtccatgtgcccaggaatacctctccctcctgaccttacctgcaccttcatgagccgccccaggtaagagcggtagtaagacaggtaaatcttgctcagcgtctccacatattcatc

SEQ ID NO: 23990 - DNA, 122 bp, Homo sapiens
  misc_feature (61)..(62): /note="This region represents a CpG dinucleotide"
  misc_feature (61)..(61): /note="Nucleotide may be methylated to form 5-methylcytosine"
acagaaatctctacagaggccactacaaagattaccaagcccagtgtatgtcctcactgtcggaacaatactcattacagtttgcaaatttggacattaaagaaactgtatcatccttgagt

SEQ ID NO: 23991 - DNA, 122 bp, Homo sapiens
  misc_feature (61)..(62): /note="This region represents a CpG dinucleotide"
  misc_feature (61)..(61): /note="Nucleotide may be methylated to form 5-methylcytosine"
tgttagtcaccttagagtaggtgactgacccgtccacctgtttagatcataaaccctacacgggcaagggcctactctgacatggtatcatgttcttagcacccagcagggagccctgcccc

SEQ ID NO: 23992 - DNA, 122 bp, Homo sapiens
  misc_feature (61)..(62): /note="This region represents a CpG dinucleotide"
  misc_feature (61)..(61): /note="Nucleotide may be methylated to form 5-methylcytosine"
tcattcacatcggtgtgtaaaacagaccacttctgttcaaagcccaggaagtgctgatcacgctcctggcctcaatagaagatacagatcattaaagctcaacccagtgtctgtagctaggt

SEQ ID NO: 23993 - DNA, 122 bp, Homo sapiens
  misc_feature (61)..(62): /note="This region represents a CpG dinucleotide"
  misc_feature (61)..(61): /note="Nucleotide may be methylated to form 5-methylcytosine"
acaaggtcacaaggtctggcctcatgtccagagcccgaggacagcagaaacacccagcaacgcactgggcatcttaggcacaaatgtccagagcccgaggacagcagaaactcccagcaacg

SEQ ID NO: 23994 - DNA, 122 bp, Homo sapiens
  misc_feature (61)..(62): /note="This region represents a CpG dinucleotide"
  misc_feature (61)..(61): /note="Nucleotide may be methylated to form 5-methylcytosine"
ccttgtttttctaaacatctgtcccatctgtcccaggcctcagctcaccctttcgtggctcgagccagttaaacgtgaatttgacaaggaagcacttctgaaggctggtttgtgagtggaaa

SEQ ID NO: 23995 - DNA, 122 bp, Homo sapiens
  misc_feature (61)..(62): /note="This region represents a CpG dinucleotide"
  misc_feature (61)..(61): /note="Nucleotide may be methylated to form 5-methylcytosine"
attgtttcttgttaattagctcttagaatagcaactgctcttccatcaggaattgtatcccgttgactttcctaaggcaagaatctactcatttcttttttgtaagcattttctcccttcct

SEQ ID NO: 23996 - DNA, 122 bp, Homo sapiens
  misc_feature (61)..(62): /note="This region represents a CpG dinucleotide"
  misc_feature (61)..(61): /note="Nucleotide may be methylated to form 5-methylcytosine"
cattcaacgaactgtccttgtagaatgctccagatgtttagtccagccaacactgagagacgtcaggattagttctcagcttttatcttgtggacaatctgaccttcagaggaagaggccta

SEQ ID NO: 23997 - DNA, 122 bp, Homo sapiens
  misc_feature (61)..(62): /note="This region represents a CpG dinucleotide"
  misc_feature (61)..(61): /note="Nucleotide may be methylated to form 5-methylcytosine"
atttatttccctatctatgttaataagggaggagacagggtgagggcaagaagagggaaacgaaaatgaaagagctcagatatgagcatttggtaactggtttgaacgcaattagttggttg

SEQ ID NO: 23998 - DNA, 122 bp, Homo sapiens
  misc_feature (61)..(62): /note="This region represents a CpG dinucleotide"
  misc_feature (61)..(61): /note="Nucleotide may be methylated to form 5-methylcytosine"
aggctggggttgaggactaggggacggccaacgtggctgggtggagggcaggcgggtgggcgtggagaggttggcagagtgtcagggcctgggcgggtttagcctcacccagaagtcaagag

SEQ ID NO: 23999 - DNA, 122 bp, Homo sapiens
  misc_feature (61)..(62): /note="This region represents a CpG dinucleotide"
  misc_feature (61)..(61): /note="Nucleotide may be methylated to form 5-methylcytosine"
tgattatgattttgcaatatgctttcactctcctctggtggcaattcagtcagctaatctcggtgagatattaaaagtgaaactgtagtaggggcccagcctgcctgcaggaggacactatc

SEQ ID NO: 24000 - DNA, 122 bp, Homo sapiens
  misc_feature (61)..(62): /note="This region represents a CpG dinucleotide"
  misc_feature (61)..(61): /note="Nucleotide may be methylated to form 5-methylcytosine"
tactgttaatgtttcttttttatgtgacctttcaaactttagttttattaatcatggtaacgtattttgggagaaagctgtgaccctagacaacaggtgtcaaaaccaagccccatagcagt

SEQ ID NO: 24001 - DNA, 122 bp, Homo sapiens
  misc_feature (61)..(62): /note="This region represents a CpG dinucleotide"
  misc_feature (61)..(61): /note="Nucleotide may be methylated to form 5-methylcytosine"
atggtggctgtgaagaggtggctgctctgcttccgcagcttctgggcttgtgcgtagaggcggcgggtactgcggcaggaggcaggcgccagccaacttagctccttctaaattgtcctcat

SEQ ID NO: 24002 - DNA, 122 bp, Homo sapiens
  misc_feature (61)..(62): /note="This region represents a CpG dinucleotide"
  misc_feature (61)..(61): /note="Nucleotide may be methylated to form 5-methylcytosine"
cgattgtcttgcctcagcctctttagtagctggaacaacaggcacgtgccagcatgatttcgccatgttgcccaggctggtctcgtgacctcaagtgatctctctgccttgagctcccaaag

SEQ ID NO: 24003 - DNA, 122 bp, Homo sapiens
  misc_feature (61)..(62): /note="This region represents a CpG dinucleotide"
  misc_feature (61)..(61): /note="Nucleotide may be methylated to form 5-methylcytosine"
cttgtttaaaattagtgcttccaggcatgtctacttgctgtctgggacaacacagggaagcgtcccgggcacctcatgttgcaatcatgttcaaagcctgggctttggtatcaaattgcctg

SEQ ID NO: 24004 - DNA, 122 bp, Homo sapiens
  misc_feature (61)..(62): /note="This region represents a CpG dinucleotide"
  misc_feature (61)..(61): /note="Nucleotide may be methylated to form 5-methylcytosine"
gtcattcattgtatttttagatctccagtctggctcagctgccagtggtgggagtggtgccggaggaggaggaggaggaggaggaggaggcggcagtggcagcggtggaggcggcagcacag

SEQ ID NO: 24005 - DNA, 122 bp, Homo sapiens
  misc_feature (61)..(62): /note="This region represents a CpG dinucleotide"
  misc_feature (61)..(61): /note="Nucleotide may be methylated to form 5-methylcytosine"
acacaagcccgggcagaaaaatgaaaatgctctatagatgctcccgaaatgtggtccctacgtgttgccatgaccagagaactttctggaaacagcacccaaggcattgggtagcttttctt

SEQ ID NO: 24006 - DNA, 122 bp, Homo sapiens
  misc_feature (61)..(62): /note="This region represents a CpG dinucleotide"
  misc_feature (61)..(61): /note="Nucleotide may be methylated to form 5-methylcytosine"
tccttgtaggaaatggtgcctcagggcttctccagtttcaccagtttccagcaactctaacgcctacttccacagtgcaagaagtacaggacagtctggctagctctgtcattaattgttgg

SEQ ID NO: 24007 - DNA, 122 bp, Homo sapiens
  misc_feature (61)..(62): /note="This region represents a CpG dinucleotide"
  misc_feature (61)..(61): /note="Nucleotide may be methylated to form 5-methylcytosine"
gcagtgagacaaatctcattcataaatgttctctcacttgcagcaactttagctttactacgtttttattactggatcattccagaacctgatgagtctttggcatgatctagaaggatgtg

SEQ ID NO: 24008 - DNA, 122 bp, Homo sapiens
  misc_feature (61)..(62): /note="This region represents a CpG dinucleotide"
  misc_feature (61)..(61): /note="Nucleotide may be methylated to form 5-methylcytosine"
taaaagtaatcctaagaatttaaacctggctgttaaggtaccaccttcaaagaaggcttccgtaagagttaatgaattacatgttacttagtaaaagtggaaagaagtaagaaggaactgta

SEQ ID NO: 24009 - DNA, 122 bp, Homo sapiens
  misc_feature (61)..(62): /note="This region represents a CpG dinucleotide"
  misc_feature (61)..(61): /note="Nucleotide may be methylated to form 5-methylcytosine"
tgccttagccacccaaaacgctaggattataggtgtgagctgtctgataaccccatgagacgtagaaattaaaacatcactacagtgggagatgatgcatagaaacaggaaacaggaaaact

SEQ ID NO: 24010 - DNA, 122 bp, Homo sapiens
  misc_feature (61)..(62): /note="This region represents a CpG dinucleotide"
  misc_feature (61)..(61): /note="Nucleotide may be methylated to form 5-methylcytosine"
tttcacacggagagaacagagagctttctaggcaacaggagtgcatggacaaaggcaaaacgctttgttgattaataaaactcagactaccagctcacaggggtggggaatgataggatgag

SEQ ID NO: 24011 - DNA, 122 bp, Homo sapiens
  misc_feature (61)..(62): /note="This region represents a CpG dinucleotide"
  misc_feature (61)..(61): /note="Nucleotide may be methylated to form 5-methylcytosine"
aagtggcagatttggggacctgaggcagcagtggggttggtaggcttgtccaggtcgtggcgtattcccctccgtccctgttaggagctgaacccttagaatgttgctggggagatctggaa

SEQ ID NO: 24012 - DNA, 122 bp, Homo sapiens
  misc_feature (61)..(62): /note="This region represents a CpG dinucleotide"
  misc_feature (61)..(61): /note="Nucleotide may be methylated to form 5-methylcytosine"
cggaatgcctctgatcttttgagtctgaagtctgtgaatcataagaagaggcagatggcacggtggactgcagagaccaaggtcttggaattacacagatctagacttgagtctccttagtc

SEQ ID NO: 24013 - DNA, 122 bp, Homo sapiens
  misc_feature (61)..(62): /note="This region represents a CpG dinucleotide"
  misc_feature (61)..(61): /note="Nucleotide may be methylated to form 5-methylcytosine"
agcacaggtggtctcacatctgggaacgaagcctgagtccccagggaaggactctcgccacggttaacggcatctttacggatgtcaaagaatagcttgggagggtcaggaggaggagcagg

SEQ ID NO: 24014 - DNA, 122 bp, Homo sapiens
  misc_feature (61)..(62): /note="This region represents a CpG dinucleotide"
  misc_feature (61)..(61): /note="Nucleotide may be methylated to form 5-methylcytosine"
ctgagaaaaaaatatacttactcaaaatgtgttaagcattccaattttgatgcttcaacacggagctgtcccctgtagccttggagaccataacttcacagtgcttgtttttaaagtaaggt

SEQ ID NO: 24015 - DNA, 122 bp, Homo sapiens
  misc_feature (61)..(62): /note="This region represents a CpG dinucleotide"
  misc_feature (61)..(61): /note="Nucleotide may be methylated to form 5-methylcytosine"
aaaacacacacacacacacacacacacgcacgcacaaaaaattagtataaaattatgtatcgaagtctcagaagtttatgcattatagaagtcatgagtatcaaaattgtggctcaagttgg

SEQ ID NO: 24016 - DNA, 122 bp, Homo sapiens
  misc_feature (61)..(62): /note="This region represents a CpG dinucleotide"
  misc_feature (61)..(61): /note="Nucleotide may be methylated to form 5-methylcytosine"
gtgtgtgtgtgtgtgtgtgtctgttaaacagaccttgcaggataaactgctgctcacacccgcaaacaaagcaatatctgtttaataacgattgctgccatgggtacagtaaacaaggggcc

SEQ ID NO: 24017 - DNA, 122 bp, Homo sapiens
  misc_feature (61)..(62): /note="This region represents a CpG dinucleotide"
  misc_feature (61)..(61): /note="Nucleotide may be methylated to form 5-methylcytosine"
agaagcattcctgcgtaaatactgctgtaatactgtcatgcaaagtgtatcctttcttgtcgtatcctttttggggcagtgtttttttgtttttttcctagaaatgtttgtccttcccccac

SEQ ID NO: 24018 - DNA, 122 bp, Homo sapiens
  misc_feature (61)..(62): /note="This region represents a CpG dinucleotide"
  misc_feature (61)..(61): /note="Nucleotide may be methylated to form 5-methylcytosine"
acctgtgcaacacctgtgctcttctagggccatcccttcctactttgtgagttcttgttccgtcagttatgcctcatttgttcacattctcagcctctcctttcctcttcctcattatcatt

SEQ ID NO: 24019 - DNA, 122 bp, Homo sapiens
  misc_feature (61)..(62): /note="This region represents a CpG dinucleotide"
  misc_feature (61)..(61): /note="Nucleotide may be methylated to form 5-methylcytosine"
tttctgcaggaactagagactgggcagagggtgagtgctggctggctctcggggtgtgcacgcaccctcagctgatacattttggaaagtgagttcacctgctctgacacaccctttctacc

SEQ ID NO: 24020 - DNA, 122 bp, Homo sapiens
  misc_feature (61)..(62): /note="This region represents a CpG dinucleotide"
  misc_feature (61)..(61): /note="Nucleotide may be methylated to form 5-methylcytosine"
tcaacccttctaacttaaaatactgtgaaatagcaggaaatatgttcaatataattttaccgaatgctcagtatggagcgttccaggaatacagggatatttaggaaaattaaagaagcaga

SEQ ID NO: 24021 - DNA, 122 bp, Homo sapiens
  misc_feature (61)..(62): /note="This region represents a CpG dinucleotide"
  misc_feature (61)..(61): /note="Nucleotide may be methylated to form 5-methylcytosine"
cctagctggccacattcctggtggacacatgatcatcccaggtaaacctgaaataaagctcgttctttttttttttttttgagatggagtcttgctctggggcccaggctggagtgtgcagt

SEQ ID NO: 24022 - DNA, 122 bp, Homo sapiens
  misc_feature (61)..(62): /note="This region represents a CpG dinucleotide"
  misc_feature (61)..(61): /note="Nucleotide may be methylated to form 5-methylcytosine"
gatcgaggaaagaccagccttgcataagacaaagccagtgatcattagccagcatggagccgtgagcagtgcatgcgtagttatactaattggttgattgatgcaggttctgttggaaaata

SEQ ID NO: 24023 - DNA, 122 bp, Homo sapiens
  misc_feature (61)..(62): /note="This region represents a CpG dinucleotide"
  misc_feature (61)..(61): /note="Nucleotide may be methylated to form 5-methylcytosine"
atcatatttgtcttctcagcatctgactctgtgtttgctaagtgaatgaatgatgcacttcggaccaaatgacgtctgtttaacttgcaactggaaaccaccacaaactgcctgttgactac

SEQ ID NO: 24024 - DNA, 122 bp, Homo sapiens
  misc_feature (61)..(62): /note="This region represents a CpG dinucleotide"
  misc_feature (61)..(61): /note="Nucleotide may be methylated to form 5-methylcytosine"
atcagctgaaggagctttttggattgagactatgggggtttcctaaacataaaaccatgtcgactgcaaacatgaatagtttcacttcctctcctcctacttggatgccctttatttctttc

SEQ ID NO: 24025 - DNA, 122 bp, Homo sapiens
  misc_feature (61)..(62): /note="This region represents a CpG dinucleotide"
  misc_feature (61)..(61): /note="Nucleotide may be methylated to form 5-methylcytosine"
ctaaataaggaacataggaaacaattgtcctgaaatatgaacaccatgttttttttcctccgcttgatcaaagaaagactccagcaaaaggggaaaaaataattaaaaagtaaaagtcttac

SEQ ID NO: 24026 - DNA, 122 bp, Homo sapiens
  misc_feature (61)..(62): /note="This region represents a CpG dinucleotide"
  misc_feature (61)..(61): /note="Nucleotide may be methylated to form 5-methylcytosine"
agggctctgtgcacactcaggagctcggagcaccagggtgtacacctgggcattttcctgcgcagctgtgaggcagtgtacactgggtgggcgggagcaggcgcaagggggttattgttaga

SEQ ID NO: 24027 - DNA, 122 bp, Homo sapiens
  misc_feature (61)..(62): /note="This region represents a CpG dinucleotide"
  misc_feature (61)..(61): /note="Nucleotide may be methylated to form 5-methylcytosine"
ccatggcacagcaaggccacacatgcacccgccagccagggtgccctgggcgggaggggccgttacaaccaatcagtgcaacccaaagcccggggacggggcctgcactccataaactcccc

SEQ ID NO: 24028 - DNA, 122 bp, Homo sapiens
  misc_feature (61)..(62): /note="This region represents a CpG dinucleotide"
  misc_feature (61)..(61): /note="Nucleotide may be methylated to form 5-methylcytosine"
aacctcatcgatagagacagagcctggagtcagcagcctgcattcaaagcaaggcttcgccgcttcctgacgtagagcctggctgacaggctttatctcacagggctgttgagataatgaaa

SEQ ID NO: 24029 - DNA, 122 bp, Homo sapiens
  misc_feature (61)..(62): /note="This region represents a CpG dinucleotide"
  misc_feature (61)..(61): /note="Nucleotide may be methylated to form 5-methylcytosine"
acattctcagtgaaaatttccccatctcccactagggagagttagataaacacctctaaacgctgatttacagcatctatcacattgtgcagtagaaaaggctaagctgagagtcaataacc

SEQ ID NO: 24030 - DNA, 122 bp, Homo sapiens
  misc_feature (61)..(62): /note="This region represents a CpG dinucleotide"
  misc_feature (61)..(61): /note="Nucleotide may be methylated to form 5-methylcytosine"
cccagcatcctgctcatcttgctggtaggcaaccactcattcatttctacattcagaaatcgtgggccttctctctctgagagccggtttactgaggtcaggaggcacccacatctgcttca

SEQ ID NO: 24031 - DNA, 122 bp, Homo sapiens
  misc_feature (61)..(62): /note="This region represents a CpG dinucleotide"
  misc_feature (61)..(61): /note="Nucleotide may be methylated to form 5-methylcytosine"
agcaataataccagaatgccaatatcacacaacgcatacctcctgtgcaggctgggctttcgctgtgtttactgacgagccatctttcaaatgaatatttgcttctgtagtagaattgactc

SEQ ID NO: 24032 - DNA, 122 bp, Homo sapiens
  misc_feature (61)..(62): /note="This region represents a CpG dinucleotide"
  misc_feature (61)..(61): /note="Nucleotide may be methylated to form 5-methylcytosine"
aagatgctcttgtctcacaggccgtgaggaacagctttggcatgtgctgaagaagaggaccgcaaaggaactggatgagacagcataaggcagcctctataaacctttttggttcctgtatt

SEQ ID NO: 24033 - DNA, 122 bp, Homo sapiens
  misc_feature (61)..(62): /note="This region represents a CpG dinucleotide"
  misc_feature (61)..(61): /note="Nucleotide may be methylated to form 5-methylcytosine"
atcctgaaacaactccctctaatgtttttatgactggaaagatctttgtccttttttgggcgtgttgttttgttttatttttgagataggatctcactctatcacccaggctagagtatagt

SEQ ID NO: 24034 - DNA, 122 bp, Homo sapiens
  misc_feature (61)..(62): /note="This region represents a CpG dinucleotide"
  misc_feature (61)..(61): /note="Nucleotide may be methylated to form 5-methylcytosine"
agtgtgtcctgaccaacaggggtgcatgcaaagaaggaaatgacgtgggtactgtggttgcgaataatagaaggaagctttatgtggtggaacctatttcagaggatgcttaataaaggctt

SEQ ID NO: 24035 - DNA, 122 bp, Homo sapiens
  misc_feature (61)..(62): /note="This region represents a CpG dinucleotide"
  misc_feature (61)..(61): /note="Nucleotide may be methylated to form 5-methylcytosine"
ccccacaaacaatgttgttttggagaaccacaaaccacaatatttccatctttcatttcacggaaccatgttcttgcatgcagtaaaaatatgttcacatccttgtactaagtcttagtaaa

SEQ ID NO: 24036 - DNA, 122 bp, Homo sapiens
  misc_feature (61)..(62): /note="This region represents a CpG dinucleotide"
  misc_feature (61)..(61): /note="Nucleotide may be methylated to form 5-methylcytosine"
ggagaaggttctggctgtgtcttggctatctcctgcctctccctctgtggggaatgtgttcgaggatcacagctacagcttttcggataccctttcctttgtgaagcatgtgagaaccaaca

SEQ ID NO: 24037 - DNA, 122 bp, Homo sapiens
  misc_feature (61)..(62): /note="This region represents a CpG dinucleotide"
  misc_feature (61)..(61): /note="Nucleotide may be methylated to form 5-methylcytosine"
gcgggtgaggcggggccttcaatagacaggctcagggccacggggaggctgagcaggtttcgggcctgcgtgcgagagcctgctcttcaagtcatggggaaatcctttctgaaggaagaacc

SEQ ID NO: 24038 - DNA, 122 bp, Homo sapiens
  misc_feature (61)..(62): /note="This region represents a CpG dinucleotide"
  misc_feature (61)..(61): /note="Nucleotide may be methylated to form 5-methylcytosine"
gggttgtgtatggtctgacatttcccatttggtttcattgatttatgacttgttttctgtcggaagtaggtattttctttgtattttctttttttctcccttcactcttgccttagaggagt

SEQ ID NO: 24039 - DNA, 122 bp, Homo sapiens
  misc_feature (61)..(62): /note="This region represents a CpG dinucleotide"
  misc_feature (61)..(61): /note="Nucleotide may be methylated to form 5-methylcytosine"
acagtggactggtggaaaacaacagccataaatcacactgtcaggcggcggggagaggagcgaagcacaggcacatgaaggccattcacaggaaacacagtacagccgcttcctaggcagga

SEQ ID NO: 24040 - DNA, 122 bp, Homo sapiens
  misc_feature (61)..(62): /note="This region represents a CpG dinucleotide"
  misc_feature (61)..(61): /note="Nucleotide may be methylated to form 5-methylcytosine"
tacctgtaattatcctgtaactcataagtccttttgctggtttcaatggacaggcttcctcgttgggacagaaaaataggtagcagttgggttgtctagctgtttttcgagtgtcgaagatc

SEQ ID NO: 24041 - DNA, 122 bp, Homo sapiens
  misc_feature (61)..(62): /note="This region represents a CpG dinucleotide"
  misc_feature (61)..(61): /note="Nucleotide may be methylated to form 5-methylcytosine"
tcacacccttctaaaggtactgattctttgtcctcagtttcccttaagcctgtcactagccggtaactggaaaaaataataactttacagcagttgatgtacgaatgatctaaaggtatcag

SEQ ID NO: 24042 - DNA, 122 bp, Homo sapiens
  misc_feature (61)..(62): /note="This region represents a CpG dinucleotide"
  misc_feature (61)..(61): /note="Nucleotide may be methylated to form 5-methylcytosine"
tgttgtgcttctaaggtagagaagacaattctgtgaccaatggatcagagatcagaagagcgattcaacaactcactctagggataacttagggcagtcccttatgcaccagcagcttctgt

SEQ ID NO: 24043 - DNA, 122 bp, Homo sapiens
  misc_feature (61)..(62): /note="This region represents a CpG dinucleotide"
  misc_feature (61)..(61): /note="Nucleotide may be methylated to form 5-methylcytosine"
tctggggagatctagaataatctaagggggtaagctggactagccaatgggaaatcaaaacgaagatactggagagatgttcccagaaaaggagcattcctaatgggcttggccctagtcac

SEQ ID NO: 24044 - DNA, 122 bp, Homo sapiens
  misc_feature (61)..(62): /note="This region represents a CpG dinucleotide"
  misc_feature (61)..(61): /note="Nucleotide may be methylated to form 5-methylcytosine"
gagtgtgccccttttaaagatgagggaaccgaggctcagagaaggaaaggacttgcctggcgtcacacagctagcctaagatggtgaggtcaggagctccctggcaacacccaggctgccgt

SEQ ID NO: 24045 - DNA, 122 bp, Homo sapiens
  misc_feature (61)..(62): /note="This region represents a CpG dinucleotide"
  misc_feature (61)..(61): /note="Nucleotide may be methylated to form 5-methylcytosine"
cccgcatgcgccaggctcacagctcccgttcgccctcctctttcatgcctggcccaggcccggcacatagcaagtattcaattgatagttgttgaaagaaatgaaaaggggccactgaaaat

SEQ ID NO: 24046 - DNA, 122 bp, Homo sapiens
  misc_feature (61)..(62): /note="This region represents a CpG dinucleotide"
  misc_feature (61)..(61): /note="Nucleotide may be methylated to form 5-methylcytosine"
acctacatttgtatctccacttggatgtgtaatacctcaacatgactaaaactgagctaccgacctaacccctaaaacctgcatctcctgtagtcttctcagctcaagaaatggggcaacat

SEQ ID NO: 24047 - DNA, 122 bp, Homo sapiens
  misc_feature (61)..(62): /note="This region represents a CpG dinucleotide"
  misc_feature (61)..(61): /note="Nucleotide may be methylated to form 5-methylcytosine"
ggtggtttatttgcttacccttatcacctctgagcagtggtgttgtttgcatagagttctcggtttctggcatgttaaatttagaggtaccccaggcttctcggagggatcagagtgttgag

SEQ ID NO: 24048 - DNA, 122 bp, Homo sapiens
  misc_feature (61)..(62): /note="This region represents a CpG dinucleotide"
  misc_feature (61)..(61): /note="Nucleotide may be methylated to form 5-methylcytosine"
ccaattccacaatttcaatgtcccacagccacagacttgcatataaaagctaaaaccaaacgatggctttaatcctacagaagagcgctacagcatcagttattcaatcccaattcacagca

SEQ ID NO: 24049 - DNA, 122 bp, Homo sapiens
  misc_feature (61)..(62): /note="This region represents a CpG dinucleotide"
  misc_feature (61)..(61): /note="Nucleotide may be methylated to form 5-methylcytosine"
agaaaaacacctatactcatacccagagtccctctcatctgctgacagcttcccaggaagcgtacaaatagctacccttccttgagccttattgaaacttgctcttcagatacccacaccat

SEQ ID NO: 24050 - DNA, 122 bp, Homo sapiens
  misc_feature (61)..(62): /note="This region represents a CpG dinucleotide"
  misc_feature (61)..(61): /note="Nucleotide may be methylated to form 5-methylcytosine"
tgcaagatccatgaaggcagggattcttttctgctttgtcatcatgtgactcaaattcctcgaacagtgcctggcacatactagcagttctttttcttttttttttgtttttgagacagagt

SEQ ID NO: 24051 - DNA, 122 bp, Homo sapiens
  misc_feature (61)..(62): /note="This region represents a CpG dinucleotide"
  misc_feature (61)..(61): /note="Nucleotide may be methylated to form 5-methylcytosine"
gaatgcaccgttgagctggcaaattggtgctggtattgctttggacctcacctcatgccacggaggctactcctcacagagcaagtgaggcaagaaaagaaaacataagccacgatgtctta

SEQ ID NO: 24052 - DNA, 122 bp, Homo sapiens
  misc_feature (61)..(62): /note="This region represents a CpG dinucleotide"
  misc_feature (61)..(61): /note="Nucleotide may be methylated to form 5-methylcytosine"
gtagtggaaagctcataacctttggattcaaatgatcctagtttctgtaccatttattagcgttgtgacctaggacaagtacctcacttctctgagcctgtttcctcctctgtaaaataatg

SEQ ID NO: 24053 - DNA, 122 bp, Homo sapiens
  misc_feature (61)..(62): /note="This region represents a CpG dinucleotide"
  misc_feature (61)..(61): /note="Nucleotide may be methylated to form 5-methylcytosine"
aaccctaatataaatggagtgggcgttcccactagctatgggtcacccccttcgaaagcacgcctccagccatcagtgctgacttcctgtgtcatcgtgagatgactcaggatcctagagca

SEQ ID NO: 24054 - DNA, 122 bp, Homo sapiens
  misc_feature (61)..(62): /note="This region represents a CpG dinucleotide"
  misc_feature (61)..(61): /note="Nucleotide may be methylated to form 5-methylcytosine"
gatcaagagagagtgaacaaaaacaatcaatatggaatctgtgagaagatctcacagcaccggcaggaagaaaattgtcccgaaggttcagatgaagagtttattatctcagaaatgatttt

SEQ ID NO: 24055 - DNA, 122 bp, Homo sapiens
  misc_feature (61)..(62): /note="This region represents a CpG dinucleotide"
  misc_feature (61)..(61): /note="Nucleotide may be methylated to form 5-methylcytosine"
ggcgcggaagccccacagcccgccgagaaccaggaatacgagagccaggcggcgcggcggcgggacctgtactgagcaagaaagaagatttcaaagtaatttattgttatgagatccgtgct

SEQ ID NO: 24056 - DNA, 122 bp, Homo sapiens
  misc_feature (61)..(62): /note="This region represents a CpG dinucleotide"
  misc_feature (61)..(61): /note="Nucleotide may be methylated to form 5-methylcytosine"
catctatgtaagataatgaccagtagagttggacatgtcccccgaacagggatgacgtgacgctgaaaaggagagttgagacctgccatcacatgaaggaagcaaagggaacaattcctatt

SEQ ID NO: 24057 - DNA, 122 bp, Homo sapiens
  misc_feature (61)..(62): /note="This region represents a CpG dinucleotide"
  misc_feature (61)..(61): /note="Nucleotide may be methylated to form 5-methylcytosine"
cctgaaacctcccaggcagggaatcacctcttcacacacagtttgcatctctgcagttgacggcaggagcaaaaaatgtggccagccaggttggaagggtgacaactgatggaggcatggaa

SEQ ID NO: 24058 - DNA, 122 bp, Homo sapiens
  misc_feature (61)..(62): /note="This region represents a CpG dinucleotide"
  misc_feature (61)..(61): /note="Nucleotide may be methylated to form 5-methylcytosine"
gctccccacggggaaataccaaggatatagactgtgccagctgggcctccagcaagccagcgctgttacctgtccaatatctggagggtgaccccaaaatttgcctggggcaatggccacag

SEQ ID NO: 24059 - DNA, 122 bp, Homo sapiens
  misc_feature (61)..(62): /note="This region represents a CpG dinucleotide"
  misc_feature (61)..(61): /note="Nucleotide may be methylated to form 5-methylcytosine"
ccacgttggccgtgaggccgtttgatgggctttgtgtgaggaatcctgagatgagctggccggggagtgaggaccggcacccgcctacagcagcgatctggagtagtgagtgagcagcccca

SEQ ID NO: 24060 - DNA, 122 bp, Homo sapiens
  misc_feature (61)..(62): /note="This region represents a CpG dinucleotide"
  misc_feature (61)..(61): /note="Nucleotide may be methylated to form 5-methylcytosine"
gggagaaactggctgatggagggaagagcagctcagtgaaggatcaacgagaaggaagagcgcccatcacaaggcagctgaaagctgattcatcattaggacgaggttcaagggagaagtca

SEQ ID NO: 24061 - DNA, 122 bp, Homo sapiens
  misc_feature (61)..(62): /note="This region represents a CpG dinucleotide"
  misc_feature (61)..(61): /note="Nucleotide may be methylated to form 5-methylcytosine"
acaaggggatttttctgtttagctcactgctgtagctccagtgcctatgacagtgcttggcgcatagtaggtactcaataaacacttttgaataaataacccccgaattcatttctatggta

SEQ ID NO: 24062 - DNA, 122 bp, Homo sapiens
  misc_feature (61)..(62): /note="This region represents a CpG dinucleotide"
  misc_feature (61)..(61): /note="Nucleotide may be methylated to form 5-methylcytosine"
tttgctgtgcgctggtgaccaaactgagttaggaaagacagaacacacacatacgcaacacgtcatagaaagcaggtttattactcacagacaggcaatgagggacaacagaagcctaggat

SEQ ID NO: 24063 - DNA, 122 bp, Homo sapiens
  misc_feature (61)..(62): /note="This region represents a CpG dinucleotide"
  misc_feature (61)..(61): /note="Nucleotide may be methylated to form 5-methylcytosine"
gggacaggaaaagccacttcgtttgggagcctttaaagtcattaatgttagctacttctacgtcagcacagaggaattacacaccaaggtggtctaagatgttaagaattcatttaaacatg

SEQ ID NO: 24064 - DNA, 122 bp, Homo sapiens
  misc_feature (61)..(62): /note="This region represents a CpG dinucleotide"
  misc_feature (61)..(61): /note="Nucleotide may be methylated to form 5-methylcytosine"
tccaccctgagcctgacctttctgagtgacatgggtgtgccaggctagactaggaggttccggtgtctggaaaagcactttacagatgagattccctctcctcccccaccttcaagcaccct

SEQ ID NO: 24065 - DNA, 122 bp, Homo sapiens
  misc_feature (61)..(62): /note="This region represents a CpG dinucleotide"
  misc_feature (61)..(61): /note="Nucleotide may be methylated to form 5-methylcytosine"
ggacagttcattggcttcctgaacatctatgagcctgactatgccaaagctgtgtacagccgtgggggtgaggagagaggatggggatctcaggagagggtggggcttcctgagaacaaagg

SEQ ID NO: 24066 - DNA, 122 bp, Homo sapiens
  misc_feature (61)..(62): /note="This region represents a CpG dinucleotide"
  misc_feature (61)..(61): /note="Nucleotide may be methylated to form 5-methylcytosine"
gaaaaaaagagtatggaaggtttgagtaacttatccaaagtcagaacaattaaatgttgacgctgattctgccaacatatgttgacttcagagagaaggcttataatactatactcctgttt

SEQ ID NO: 24067 - DNA, 122 bp, Homo sapiens
  misc_feature (61)..(62): /note="This region represents a CpG dinucleotide"
  misc_feature (61)..(61): /note="Nucleotide may be methylated to form 5-methylcytosine"
gaactgtaatctccataatccctacgtgccaggtagggacctggtaggaggtgattggcccgtggtggcagtttccctcatgctgttctcgtgatagcacgtgagttctcgtgagatctgat

SEQ ID NO: 24068 - DNA, 122 bp, Homo sapiens
  misc_feature (61)..(62): /note="This region represents a CpG dinucleotide"
  misc_feature (61)..(61): /note="Nucleotide may be methylated to form 5-methylcytosine"
gagaatcactaaagtgtttctaagatttttattgcttgtcaagtacatcctttagggctccgcgtctaaatatttaagattccagctttgctcttatcagagctcaaatgtggccacagttc

SEQ ID NO: 24069 - DNA, 122 bp, Homo sapiens
  misc_feature (61)..(62): /note="This region represents a CpG dinucleotide"
  misc_feature (61)..(61): /note="Nucleotide may be methylated to form 5-methylcytosine"
aaccacacaagttaattggtaggtttttcttttgcacttttcattaagatacattgggaacgagcaggtagacaaagccagagcctggaggcttgcaagagattggaaatgtgtgacatcaa

SEQ ID NO: 24070 - DNA, 122 bp, Homo sapiens
  misc_feature (61)..(62): /note="This region represents a CpG dinucleotide"
  misc_feature (61)..(61): /note="Nucleotide may be methylated to form 5-methylcytosine"
accctccttggggctgtaggaaggggggaaaatctttctacctttctaggttctccactgcggcccttatcacaaagctcggattggcaaaagaaaaatttagtaacatgtacatcttatat

SEQ ID NO: 24071 - DNA, 122 bp, Homo sapiens
  misc_feature (61)..(62): /note="This region represents a CpG dinucleotide"
  misc_feature (61)..(61): /note="Nucleotide may be methylated to form 5-methylcytosine"
acatctggcatattgtccagcagttgtattgtgcagacacacgaggcagtcagccatgcacgtgatcacagatacaagcatgactcctaagttgacacccatggggtgttaactcctgacag

SEQ ID NO: 24072 - DNA, 122 bp, Homo sapiens
  misc_feature (61)..(62): /note="This region represents a CpG dinucleotide"
  misc_feature (61)..(61): /note="Nucleotide may be methylated to form 5-methylcytosine"
attggctgtggaatatgctaagtaaataggaagagaaagcactgaagtcagttggtcaaccgcaaacagggttcaataccaattcaaagaattaccagtttatcagtaagatctggttacgt

SEQ ID NO: 24073 - DNA, 122 bp, Homo sapiens
  misc_feature (61)..(62): /note="This region represents a CpG dinucleotide"
  misc_feature (61)..(61): /note="Nucleotide may be methylated to form 5-methylcytosine"
tgtgctggaagggaaaggcgacagatcccagcttctgatgagtgtcctgtttcctgctcacgtagtacttccattctcttaaatccgaaggctaaacaaatcatggactaatatagactcgg

SEQ ID NO: 24074 - DNA, 122 bp, Homo sapiens
  misc_feature (61)..(62): /note="This region represents a CpG dinucleotide"
  misc_feature (61)..(61): /note="Nucleotide may be methylated to form 5-methylcytosine"
ggcagcttaagaagcctcactggccaactgggaaacatccgctgtccaaatattataggacggactattcaaccgcatccctgagctctggtgaaataggcatgcagtataatggaattaac

SEQ ID NO: 24075 - DNA, 122 bp, Homo sapiens
  misc_feature (61)..(62): /note="This region represents a CpG dinucleotide"
  misc_feature (61)..(61): /note="Nucleotide may be methylated to form 5-methylcytosine"
ttagtcataaaaatgtgttattcatatctcttactgtggcagacagcttagtattttgatcgccaaagctgtagtccttttgggttcatcagtgaatctcatgagctgcttatggtcaatat

SEQ ID NO: 24076 - DNA, 122 bp, Homo sapiens
  misc_feature (61)..(62): /note="This region represents a CpG dinucleotide"
  misc_feature (61)..(61): /note="Nucleotide may be methylated to form 5-methylcytosine"
atgcacctggcactgggcctgctgtgtgctggtcaggatgccatcagcaggaacaacaggcggaggaggctgcaggtgaatgatggtgttgggggaagttctttcccttttatttattaaga

SEQ ID NO: 24077 - DNA, 122 bp, Homo sapiens
  misc_feature (61)..(62): /note="This region represents a CpG dinucleotide"
  misc_feature (61)..(61): /note="Nucleotide may be methylated to form 5-methylcytosine"
cagtttgcacataattgttttatatcatagcagtaaatatttgcaagaaatcccactcatcgaccccgggtaaaatgttatggtaagcatgcacagtttgcagtctacagtttttttatgta

SEQ ID NO: 24078 - DNA, 122 bp, Homo sapiens
  misc_feature (61)..(62): /note="This region represents a CpG dinucleotide"
  misc_feature (61)..(61): /note="Nucleotide may be methylated to form 5-methylcytosine"
aaagctaaatgagtatgcaataaagctttgagaaatggaaaagaaaatctatgaggaaaacgtcagcttgcttatccagggaatgagcaggacttaattctcatgccggcatggggctgccg

SEQ ID NO: 24079 - DNA, 122 bp, Homo sapiens
  misc_feature (61)..(62): /note="This region represents a CpG dinucleotide"
  misc_feature (61)..(61): /note="Nucleotide may be methylated to form 5-methylcytosine"
ctgatgagctcagccccataaagaatgtcgaggaggctttgcgcctctgcaggtgactctcgggcccaagcaaccttctggaaaacgggttaataaataaatcaataaagaaccttcaagtt

SEQ ID NO: 24080 - DNA, 122 bp, Homo sapiens
  misc_feature (61)..(62): /note="This region represents a CpG dinucleotide"
  misc_feature (61)..(61): /note="Nucleotide may be methylated to form 5-methylcytosine"
cttgtagttctctctttctgacatatttttccttgttacttttgtctgtctgtctcctttcgttatccagatctcaagcttaaatattacatctttagaaaggtcttccctaaccacccaat

SEQ ID NO: 24081 - DNA, 122 bp, Homo sapiens
  misc_feature (61)..(62): /note="This region represents a CpG dinucleotide"
  misc_feature (61)..(61): /note="Nucleotide may be methylated to form 5-methylcytosine"
atgattttgaatagcctctctctgtgttaccataataagctaatcctggccccaatggttcgggtagggactcttccaatgaggctgctggccctggattatggagcggacattgtttactg

SEQ ID NO: 24082 - DNA, 122 bp, Homo sapiens
  misc_feature (61)..(62): /note="This region represents a CpG dinucleotide"
  misc_feature (61)..(61): /note="Nucleotide may be methylated to form 5-methylcytosine"
cccagtgttggacaaggaagggatatctggttggagaatcagaaaaggcaagggagattacgtttcagatgggccttaaagaataggcccagtagagtggctcacacctgtaatcctagcac

SEQ ID NO: 24083 - DNA, 122 bp, Homo sapiens
  misc_feature (61)..(62): /note="This region represents a CpG dinucleotide"
  misc_feature (61)..(61): /note="Nucleotide may be methylated to form 5-methylcytosine"
atacctatcttctagatcagaggtcaggaaactacatctctgtgtcacaaacacgactgccgtgtgtttttgtaaataaagtttaggataaccacagtcattcattgcatattgtccactgt

SEQ ID NO: 24084 - DNA, 122 bp, Homo sapiens
  misc_feature (61)..(62): /note="This region represents a CpG dinucleotide"
  misc_feature (61)..(61): /note="Nucleotide may be methylated to form 5-methylcytosine"
agtgcacctccctgggcagacttctgctgccccagtgcccaggaataggcaggggtttgccgcaaaatgaatgacacctggcagacaataagctgaagctttcattagcagcttaagctgag

SEQ ID NO: 24085 - DNA, 122 bp, Homo sapiens
  misc_feature (61)..(62): /note="This region represents a CpG dinucleotide"
  misc_feature (61)..(61): /note="Nucleotide may be methylated to form 5-methylcytosine"
ctttagagagccgggcccaccttctgcttgaagtggaggcccaggcaggcagttgtagtgcgtggccccaagatgccagcctcgtgcagggccggcgatgattcgcttctcactcactccac

SEQ ID NO: 24086 - DNA, 122 bp, Homo sapiens
  misc_feature (61)..(62): /note="This region represents a CpG dinucleotide"
  misc_feature (61)..(61): /note="Nucleotide may be methylated to form 5-methylcytosine"
gtgtactgaggcagctccaacctcaccgtgtagtttgttcccttctcaaagcacaccggccgaggaaggacgacatatctgcccccaaacaaaaaagaaagacaacaacgaaagtcaacctt

SEQ ID NO: 24087 - DNA, 122 bp, Homo sapiens
  misc_feature (61)..(62): /note="This region represents a CpG dinucleotide"
  misc_feature (61)..(61): /note="Nucleotide may be methylated to form 5-methylcytosine"
tgccgcctgcccacctccccgccgcagccaggtaacctccacccgccccggggtagaggacgttcgtcggattctacactccacctcgttatcgcagcctgaagtgcgtgatggagaagaaa

SEQ ID NO: 24088 - DNA, 122 bp, Homo sapiens
  misc_feature (61)..(62): /note="This region represents a CpG dinucleotide"
  misc_feature (61)..(61): /note="Nucleotide may be methylated to form 5-methylcytosine"
tgccacttgtcaggttccctgtgctagacatgcataatctgtattccatcactgggtacccggacccaccaggtaaggccccggccaggctggggctggggcctaggtgtggtcaggaccca

SEQ ID NO: 24089 - DNA, 122 bp, Homo sapiens
  misc_feature (61)..(62): /note="This region represents a CpG dinucleotide"
  misc_feature (61)..(61): /note="Nucleotide may be methylated to form 5-methylcytosine"
ggggagccagaagcatggagaccactgggtagataaggtttcaccggcagacagctgtggcgctttcctctcctcaggatcagggatggggaggggaggagagcaagtctttcctgaaaccc

SEQ ID NO: 24090 - DNA, 122 bp, Homo sapiens
  misc_feature (61)..(62): /note="This region represents a CpG dinucleotide"
  misc_feature (61)..(61): /note="Nucleotide may be methylated to form 5-methylcytosine"
gtgaatgagtgtcccagtcacctggaggcagaaatcaggagagtaagttaaaaagcacaacgaaacctattctggtacacatctgtttggagcagttgggtgtattgtaaatgtctcgcatg

SEQ ID NO: 24091 - DNA, 122 bp, Homo sapiens
  misc_feature (61)..(62): /note="This region represents a CpG dinucleotide"
  misc_feature (61)..(61): /note="Nucleotide may be methylated to form 5-methylcytosine"
ttgctgagcaagcctctcagcagacacactttgaaacctgagcgaacacacaagaatcatcgatgctggcatcccctggtcctcaaaacactggtttctcctgccctatcttgtcatccatt

SEQ ID NO: 24092 - DNA, 122 bp, Homo sapiens
  misc_feature (61)..(62): /note="This region represents a CpG dinucleotide"
  misc_feature (61)..(61): /note="Nucleotide may be methylated to form 5-methylcytosine"
ctcaagtgatccacctgccttggcctcccaagttgctgggattacaggcttgagccaccacgccagccaaacaggatatttaaattaaagccaaaatggccggcgcggtggctcacgcctgt

SEQ ID NO: 24093 - DNA, 122 bp, Homo sapiens
  misc_feature (61)..(62): /note="This region represents a CpG dinucleotide"
  misc_feature (61)..(61): /note="Nucleotide may be methylated to form 5-methylcytosine"
accaggaatgctcagctacaggtccagttctgcaggaggaacctcgacctggcctatgggcggggaatgcctgggtctgaccccaaggggaaatgaaagtccaggccagccattcaactacc

SEQ ID NO: 24094 - DNA, 122 bp, Homo sapiens
  misc_feature (61)..(62): /note="This region represents a CpG dinucleotide"
  misc_feature (61)..(61): /note="Nucleotide may be methylated to form 5-methylcytosine"
gacatagtcctgactcaccggagaagttaagcatgcatcgcaggataactccaattactccgccgaagtactgttagaaggtctcagagcacgtggagctgtctgaagaagcgaagtctggc

SEQ ID NO: 24095 - DNA, 122 bp, Homo sapiens
  misc_feature (61)..(62): /note="This region represents a CpG dinucleotide"
  misc_feature (61)..(61): /note="Nucleotide may be methylated to form 5-methylcytosine"
tggccattccttgagctttcactccatacaaggctaaggctgagtctactgcttgcttaacgtggattactaaatgagaactatgctatactcttctcagaactttaataacaactagcaac

SEQ ID NO: 24096 - DNA, 122 bp, Homo sapiens
  misc_feature (61)..(62): /note="This region represents a CpG dinucleotide"
  misc_feature (61)..(61): /note="Nucleotide may be methylated to form 5-methylcytosine"
cacagtgtggccgcagggctgaaacgaatttcacgggaaacaagcgcacgtgaggaagcccggagcaggcccatcaggattctatttatactaaagaccttcagctaagtgagaagaggacc

SEQ ID NO: 24097 - DNA, 122 bp, Homo sapiens
  misc_feature (61)..(62): /note="This region represents a CpG dinucleotide"
  misc_feature (61)..(61): /note="Nucleotide may be methylated to form 5-methylcytosine"
acaccctggtcactggaggggtggttttctgagctaacttgtcacctttggctgcgagaacgtgagaaagactcagcgaactgacatttcttgctcatcatatggccacattcagttataag

SEQ ID NO: 24098 - DNA, 122 bp, Homo sapiens
  misc_feature (61)..(62): /note="This region represents a CpG dinucleotide"
  misc_feature (61)..(61): /note="Nucleotide may be methylated to form 5-methylcytosine"
cacaagtgcttttatatttttcatgtaatgccacttttgattggcagctccattgttgtacggcttatatttctgaaaaaagaggcaaaatatggagtcaagtgagttcatgtgagggttat

SEQ ID NO: 24099 - DNA, 122 bp, Homo sapiens
  misc_feature (61)..(62): /note="This region represents a CpG dinucleotide"
  misc_feature (61)..(61): /note="Nucleotide may be methylated to form 5-methylcytosine"
gagctctctacacttcagacccctcatcttcaaaaatgagaatcactgcccatgacaacccgtggaattcttatgtaacctagggaaatgatgaatgtggagtaggttactagggttggaat

SEQ ID NO: 24100 - DNA, 122 bp, Homo sapiens
  misc_feature (61)..(62): /note="This region represents a CpG dinucleotide"
  misc_feature (61)..(61): /note="Nucleotide may be methylated to form 5-methylcytosine"
atgaggtccttgaaagcatgactccctctgcagataaccataggtttccatcccgaagcacgagctctgtaccctagtgtggtttgaaataatgagcagagcagctgttttcttggtttagc

SEQ ID NO: 24101 - DNA, 122 bp, Homo sapiens
  misc_feature (61)..(62): /note="This region represents a CpG dinucleotide"
  misc_feature (61)..(61): /note="Nucleotide may be methylated to form 5-methylcytosine"
gtgagacaggagagcagcagagctctcaaagagccagtggacacaagatagcagtgagcacgttactcagaaaaggcactaaggaccgaaccgtgtcgcccaattaatatgtgtcagccctg

SEQ ID NO: 24102 - DNA, 122 bp, Homo sapiens
  misc_feature (61)..(62): /note="This region represents a CpG dinucleotide"
  misc_feature (61)..(61): /note="Nucleotide may be methylated to form 5-methylcytosine"
ttttaggcctttctctttcaacgtcagcctaccctctgctctcctctgtcaacttttccacgcccttgctatattgctgtttatgatctgctatggaggggagaccacacgcatactaccaa

SEQ ID NO: 24103 - DNA, 122 bp, Homo sapiens
  misc_feature (61)..(62): /note="This region represents a CpG dinucleotide"
  misc_feature (61)..(61): /note="Nucleotide may be methylated to form 5-methylcytosine"
tctctaaaaataaacagtttcactgccgggctacacagaacttcctgcccgcctaggatgcgtccgggcccaggggcgcagtagggatagagggccgggtggaggcccaggaagtcctgggg

SEQ ID NO: 24104 - DNA, 122 bp, Homo sapiens
  misc_feature (61)..(62): /note="This region represents a CpG dinucleotide"
  misc_feature (61)..(61): /note="Nucleotide may be methylated to form 5-methylcytosine"
tttatataaactgtaactgtgcatagattacacagtgcttacccttggggacaattggaacgtatctaattgacagacctggggcatactgcctgctgctaaggtttccactacaggggaga

SEQ ID NO: 24105 - DNA, 122 bp, Homo sapiens
  misc_feature (61)..(62): /note="This region represents a CpG dinucleotide"
  misc_feature (61)..(61): /note="Nucleotide may be methylated to form 5-methylcytosine"
ccagcgttttctaaccgcgctgaggcagtcgcctctccgggtcgctccactcccggactccggcagcctgttggccttcctgtcaccacctcgcatggagcaccctgccctaagccctggaa

SEQ ID NO: 24106 - DNA, 122 bp, Homo sapiens
  misc_feature (61)..(62): /note="This region represents a CpG dinucleotide"
  misc_feature (61)..(61): /note="Nucleotide may be methylated to form 5-methylcytosine"
ccagtttgtgatctaggttcttgtattttagtttcttcttgacctattctactcacttgccgcttattatcatcactccaccagagggcatacaaaagaaaggtgataacgtgaaaacactc

SEQ ID NO: 24107 - DNA, 122 bp, Homo sapiens
  misc_feature (61)..(62): /note="This region represents a CpG dinucleotide"
  misc_feature (61)..(61): /note="Nucleotide may be methylated to form 5-methylcytosine"
tcactcatttacagctgcaggtcctaaactaccaacatctctaaccatctgattagtttccgtgagcaacgtcttagatagtccatgaatcatgacctttaggtcaatgtagcaacagggat

SEQ ID NO: 24108 - DNA, 122 bp, Homo sapiens
  misc_feature (61)..(62): /note="This region represents a CpG dinucleotide"
  misc_feature (61)..(61): /note="Nucleotide may be methylated to form 5-methylcytosine"
agaccactaaaaccttctctatattagcaataaggctgtttcactttcttatcatttggacgttcagcagagtagcacttttagtttctttcaagaacctttcctttgcattcagagctcgc

SEQ ID NO: 24109 - DNA, 122 bp, Homo sapiens
  misc_feature (61)..(62): /note="This region represents a CpG dinucleotide"
  misc_feature (61)..(61): /note="Nucleotide may be methylated to form 5-methylcytosine"
agtcatgacccctcagagtacagcacactagggtgcggaggcatagacacccttggccagcgctctctgagtgcctcagcagctcaagtgtgcggtggccttgggaagagctggtgggaaag

SEQ ID NO: 24110 - DNA, 122 bp, Homo sapiens
  misc_feature (61)..(62): /note="This region represents a CpG dinucleotide"
  misc_feature (61)..(61): /note="Nucleotide may be methylated to form 5-methylcytosine"
tttaaaaagtttcaatagtacctagaacaggaacctggactggagtaaatactatataagcgtctaaagaacaagttgactgggcatggtggctcacacctgtaatcccggcactctgggag

SEQ ID NO: 24111 - DNA, 122 bp, Homo sapiens
  misc_feature (61)..(62): /note="This region represents a CpG dinucleotide"
  misc_feature (61)..(61): /note="Nucleotide may be methylated to form 5-methylcytosine"
atctgagcccacgcaagggaaagttgtggcacaaaaatcctcagtggagatcttttgtgtcgggagaagtatgtgttgggcaaaaatgtcttagtacagtgtcatgcttagtcattgagtgg

SEQ ID NO: 24112 - DNA, 122 bp, Homo sapiens
  misc_feature (61)..(62): /note="This region represents a CpG dinucleotide"
  misc_feature (61)..(61): /note="Nucleotide may be methylated to form 5-methylcytosine"
cccaggctgtcaggaagcctgcagggagggccccaggccactcacctcctcttgcagggccgagagctcaggccacatccagcttggcctttgcacaagctggtctgccagtctggcagctg

SEQ ID NO: 24113 - DNA, 122 bp, Homo sapiens
  misc_feature (61)..(62): /note="This region represents a CpG dinucleotide"
  misc_feature (61)..(61): /note="Nucleotide may be methylated to form 5-methylcytosine"
gaggtttcctccaactggacgttaagttactgagaacaggaatcagggatgcgattggtgcgtgtcttctgtggctacctggtcagcattcataaacggtgataatggattgaatgctgcag

SEQ ID NO: 24114 - DNA, 122 bp, Homo sapiens
  misc_feature (61)..(62): /note="This region represents a CpG dinucleotide"
  misc_feature (61)..(61): /note="Nucleotide may be methylated to form 5-methylcytosine"
aggaataggtttcaggatctattgtacagcagggtgactaccgtccacaacaatgcattacgtatttcgaaatcagaagagaaccaactttaaatgtctcatcataaacaatgaaaggtaag

SEQ ID NO: 24115 - DNA, 122 bp, Homo sapiens
  misc_feature (61)..(62): /note="This region represents a CpG dinucleotide"
  misc_feature (61)..(61): /note="Nucleotide may be methylated to form 5-methylcytosine"
aaataaataaagcaaagaaataaaatacgtggctgctgttgtcagcactgccagactgggcgcgaagtgttttatctctgatctaagaggaaggacgtgctctgctgaagtgagaagggagg

SEQ ID NO: 24116 - DNA, 122 bp, Homo sapiens
  misc_feature (61)..(62): /note="This region represents a CpG dinucleotide"
  misc_feature (61)..(61): /note="Nucleotide may be methylated to form 5-methylcytosine"
ctggggaagggcagggctgcaggctctttgggagacccagagaacaagctcccaatggggcggggggaggaagaactgtcccctcttagggcccctcagcctcagcctgggcagaaaatgag

SEQ ID NO: 24117 - DNA, 122 bp, Homo sapiens
  misc_feature (61)..(62): /note="This region represents a CpG dinucleotide"
  misc_feature (61)..(61): /note="Nucleotide may be methylated to form 5-methylcytosine"
agggatgtaaacaatataacgtgataaatatgctggcctagaagtggcaactcattcatacgtggagattctagaaaggcttcccagaagtgatggctaatgggaaacctgaaggacttgtc

SEQ ID NO: 24118 - DNA, 122 bp, Homo sapiens
  misc_feature (61)..(62): /note="This region represents a CpG dinucleotide"
  misc_feature (61)..(61): /note="Nucleotide may be methylated to form 5-methylcytosine"
gtccctagttgtctttttctttgatctctctctagttaagacttgctcctggaggcaaagcgtggtggtgtctggctcagcatagcacctgccataattacaaatggcaattatggaatgaa

SEQ ID NO: 24119 - DNA, 122 bp, Homo sapiens
  misc_feature (61)..(62): /note="This region represents a CpG dinucleotide"
  misc_feature (61)..(61): /note="Nucleotide may be methylated to form 5-methylcytosine"
gcactccttgtcacccattgtcatttatgagccctgtgtcacttgttgcttcagagggagcgctccttgtcacccgttgtcaggtgtactcactttgcttctcccttcctgcttttggggac

SEQ ID NO: 24120 - DNA, 122 bp, Homo sapiens
  misc_feature (61)..(62): /note="This region represents a CpG dinucleotide"
  misc_feature (61)..(61): /note="Nucleotide may be methylated to form 5-methylcytosine"
aaacaatagaaatgtaaatacataatgaggcttttctttgttcctcaggaagactatgaccgtctgaggcctttatcttacccaatgaccgatgtcttccttatatgcttctcggtggtaaa

SEQ ID NO: 24121 - DNA, 122 bp, Homo sapiens
  misc_feature (61)..(62): /note="This region represents a CpG dinucleotide"
  misc_feature (61)..(61): /note="Nucleotide may be methylated to form 5-methylcytosine"
atatattattgtgctcatttgggcacttaagagatagtagctgctgctataaatcctgaccgttactcaatacttagatgtgccacttacttaatcctattactgaagagagaactgaagac

SEQ ID NO: 24122 - DNA, 122 bp, Homo sapiens
  misc_feature (61)..(62): /note="This region represents a CpG dinucleotide"
  misc_feature (61)..(61): /note="Nucleotide may be methylated to form 5-methylcytosine"
tcttggtactccagccacatcaccctttcagttctactaatattgaatgcagaattagcacgtgccatccctcacccttcttgatcctttgactcttagctaatgaggattttctcagggaa

SEQ ID NO: 24123 - DNA, 122 bp, Homo sapiens
  misc_feature (61)..(62): /note="This region represents a CpG dinucleotide"
  misc_feature (61)..(61): /note="Nucleotide may be methylated to form 5-methylcytosine"
tttacaaagagcttccctgtgcctagcaaaagatgagtttgtgtacaactgactccttttcggccttcttgaatatgcaaactacaaaatatgcccagatgcctcagggaccaggcaagtaa

SEQ ID NO: 24124 - DNA, 122 bp, Homo sapiens
  misc_feature (61)..(62): /note="This region represents a CpG dinucleotide"
  misc_feature (61)..(61): /note="Nucleotide may be methylated to form 5-methylcytosine"
ccttctgtttcttcaaacgaaaacagttcctcgggcttccctcaatttttatgaccttaacgcttctgaagatgataggcctattattttgaaatatgtccctcagattggatgtgcctgat

SEQ ID NO: 24125 - DNA, 122 bp, Homo sapiens
  misc_feature (61)..(62): /note="This region represents a CpG dinucleotide"
  misc_feature (61)..(61): /note="Nucleotide may be methylated to form 5-methylcytosine"
ctgttgaaaatggccatgtgaactagttacctcatacaagtctctttggatgtaacatttcgtacagctggcttaggctcattgtgatttgaattcacccatggttggggctcttcatttcc

SEQ ID NO: 24126 - DNA, 122 bp, Homo sapiens
  misc_feature (61)..(62): /note="This region represents a CpG dinucleotide"
  misc_feature (61)..(61): /note="Nucleotide may be methylated to form 5-methylcytosine"
aggggcatagttgggccagatgggcctgctctcaggcccctcagtggttcatgtgagcaccgactatggtagacaggggcctggatatgtgcagtatgtgcaggttggtgcagcagtagttt

SEQ ID NO: 24127 - DNA, 122 bp, Homo sapiens
  misc_feature (61)..(62): /note="This region represents a CpG dinucleotide"
  misc_feature (61)..(61): /note="Nucleotide may be methylated to form 5-methylcytosine"
attagatgccaggcctcgttcatgtgctcagggtacactggtaaacagacagggcatttgcgctcataggacttaacgtcctcgggtggaaggacagacggccagcatgacagatgatcagg

SEQ ID NO: 24128 - DNA, 122 bp, Homo sapiens
  misc_feature (61)..(62): /note="This region represents a CpG dinucleotide"
  misc_feature (61)..(61): /note="Nucleotide may be methylated to form 5-methylcytosine"
tcattgcagacaacactattggacagcactaagtgtggcttccttgtttataagccctctcgccattccacattattctctagctacagcctcatttctctgattctcttccaagccagttt

SEQ ID NO: 24129 - DNA, 122 bp, Homo sapiens
  misc_feature (61)..(62): /note="This region represents a CpG dinucleotide"
  misc_feature (61)..(61): /note="Nucleotide may be methylated to form 5-methylcytosine"
ctattcattatcaagctagacatagataacctgactggtgccttgcctgaaacagatgcccgtgagctggtctggaaatgctgaggaactgagaaacactattctagaaattctgactaggt

SEQ ID NO: 24130 - DNA, 122 bp, Homo sapiens
  misc_feature (61)..(62): /note="This region represents a CpG dinucleotide"
  misc_feature (61)..(61): /note="Nucleotide may be methylated to form 5-methylcytosine"
acatgactcaaactggagaaagcaggaatcacttgtatcagccaagcactcaagagatgccggtaaacaggaaaagactgaagggtgctcagtaggtgactcttcactgatgtcctcctctt

SEQ ID NO: 24131 - DNA, 122 bp, Homo sapiens
  misc_feature (61)..(62): /note="This region represents a CpG dinucleotide"
  misc_feature (61)..(61): /note="Nucleotide may be methylated to form 5-methylcytosine"
gtatgaatttacaaacaggacctgaccattaagagcctgccaccaccaatgacccagatgcggtaaagcttgcaaaaccttgacgccctttgatgctcacagcaactgaggtggcaggcaga

SEQ ID NO: 24132 - DNA, 122 bp, Homo sapiens
  misc_feature (61)..(62): /note="This region represents a CpG dinucleotide"
  misc_feature (61)..(61): /note="Nucleotide may be methylated to form 5-methylcytosine"
taaggcaatgggagggccagagagggtgcctctcactcccatagtctctgagcgtgataacggtagcgccagaccagcacacaggcttcatgattttcagcagcatgttcttcccatccatg

SEQ ID NO: 24133 - DNA, 122 bp, Homo sapiens
  misc_feature (61)..(62): /note="This region represents a CpG dinucleotide"
  misc_feature (61)..(61): /note="Nucleotide may be methylated to form 5-methylcytosine"
gtatatgagaacaaatttgcttacctcagtggaggggaatgcagctggccttcttagccacgaagccccaaggccatgtgtagggctgatgccaaggtcctgtccacctcttcctcttttcc

SEQ ID NO: 24134 - DNA, 122 bp, Homo sapiens
  misc_feature (61)..(62): /note="This region represents a CpG dinucleotide"
  misc_feature (61)..(61): /note="Nucleotide may be methylated to form 5-methylcytosine"
agagacactcaggatgtgggggacaccccagcaatgccatccctcctttgacctccagagcgcgcagaattacaaagttgagtaatactttatttgaaaaaatgaaaagtgcacacacacac

SEQ ID NO: 24135 - DNA, 122 bp, Homo sapiens
  misc_feature (61)..(62): /note="This region represents a CpG dinucleotide"
  misc_feature (61)..(61): /note="Nucleotide may be methylated to form 5-methylcytosine"
ctgagtgacatcatcttggcgatggttttgatttgcatttccctgacagcttgtgtgttccgtcttttctcacctggatgttgaccaacacgtgtgtaaatgttcaagacccacatatttta

SEQ ID NO: 24136 - DNA, 122 bp, Homo sapiens
  misc_feature (61)..(62): /note="This region represents a CpG dinucleotide"
  misc_feature (61)..(61): /note="Nucleotide may be methylated to form 5-methylcytosine"
atgtgggctccacaagggtggagattgggtctctctggttcctcactgtatgcggtgccccgcccaaggcctgcacccactaagggctgaataaatacttgttctaagaccaggcccagtag

SEQ ID NO: 24137 - DNA, 122 bp, Homo sapiens
  misc_feature (61)..(62): /note="This region represents a CpG dinucleotide"
  misc_feature (61)..(61): /note="Nucleotide may be methylated to form 5-methylcytosine"
gggcaataaaattcaatctgtgacctattaaacctcacctgatgtaaattactaagagaacgtgcttaataggcaagattcagggcagtcttaaatacttattgctttactttccaggctaa

SEQ ID NO: 24138 - DNA, 122 bp, Homo sapiens
  misc_feature (61)..(62): /note="This region represents a CpG dinucleotide"
  misc_feature (61)..(61): /note="Nucleotide may be methylated to form 5-methylcytosine"
gagtaccagtgctgagattaaatgtgccagtgttcccagcctctcagcaaacaaaccaagcgcagtgtttaccaggaagctgaaatggagaacctgtcccaaatcagacttaatttcattta

SEQ ID NO: 24139 - DNA, 122 bp, Homo sapiens
  misc_feature (61)..(62): /note="This region represents a CpG dinucleotide"
  misc_feature (61)..(61): /note="Nucleotide may be methylated to form 5-methylcytosine"
gtgaacctattaaatgtgtagacaattaatggctttttgcttcccctgctgcagacttagcggatcccatgagattttgactaccgtctgtgctcagaacagtttgagccgtatggaggaag

SEQ ID NO: 24140 - DNA, 122 bp, Homo sapiens
  misc_feature (61)..(62): /note="This region represents a CpG dinucleotide"
  misc_feature (61)..(61): /note="Nucleotide may be methylated to form 5-methylcytosine"
ttcctgatgcgtttgaatcaggaagccttttgggcagaacttccattagcatcagcccaccgcggcccacactacacacggtcgtgacacatgtattaaaggctgagttgcaattgtgttcc

SEQ ID NO: 24141 - DNA, 122 bp, Homo sapiens
  misc_feature (61)..(62): /note="This region represents a CpG dinucleotide"
  misc_feature (61)..(61): /note="Nucleotide may be methylated to form 5-methylcytosine"
tccctccatgggaaatggagaacatcagctatttcccattgccttcaaacctaaagatgtcgccaggcctcttggcttgttactgaagcagcgaaataagtcagaaatcaaagacttagaag

SEQ ID NO: 24142 - DNA, 122 bp, Homo sapiens
  misc_feature (61)..(62): /note="This region represents a CpG dinucleotide"
  misc_feature (61)..(61): /note="Nucleotide may be methylated to form 5-methylcytosine"
aatgattcagtgagcaaattttgcaacctctgaactggaaggcggggataccaagcaagccgtgggtagggacacctgggcagtgactgcatgccctggaggccacttggatcccaagtaag

SEQ ID NO: 24143 - DNA, 122 bp, Homo sapiens
  misc_feature (61)..(62): /note="This region represents a CpG dinucleotide"
  misc_feature (61)..(61): /note="Nucleotide may be methylated to form 5-methylcytosine"
ccagagctctcaggatcctacagaaggggcggacaactcttcccttccaaactggaaagtcggcctaggtttccgaggataatgaaaggcacagcgttttttgacctcgacttcaggcctga

SEQ ID NO: 24144 - DNA, 122 bp, Homo sapiens
  misc_feature (61)..(62): /note="This region represents a CpG dinucleotide"
  misc_feature (61)..(61): /note="Nucleotide may be methylated to form 5-methylcytosine"
ggagaaaggagacttgcaccccaggcaggaaggcaaaggcccgggtcagctgggccagagcgccaaaaagacccagcttccccatcaaggtggcagctcttggcttcctagtctccatcaat

SEQ ID NO: 24145 - DNA, 122 bp, Homo sapiens
  misc_feature (61)..(62): /note="This region represents a CpG dinucleotide"
  misc_feature (61)..(61): /note="Nucleotide may be methylated to form 5-methylcytosine"
ccagggtgggcgggagggctgggagcggatggcggagatgttcagacacagctggggtcgcgggcgtctgactgcgagctgtcctctctcccgcaggcctgctgctcttggtgagcctggag

SEQ ID NO: 24146 - DNA, 122 bp, Homo sapiens
  misc_feature (61)..(62): /note="This region represents a CpG dinucleotide"
  misc_feature (61)..(61): /note="Nucleotide may be methylated to form 5-methylcytosine"
gacttgcagatgaattatatatgagtgagaaaacaggtctgcatggaatttccactctagcgaggaaggtggatgatacacaaataattgcatgtgtgctagcattgtccatgggcaatgag

SEQ ID NO: 24147 - DNA, 122 bp, Homo sapiens
  misc_feature (61)..(62): /note="This region represents a CpG dinucleotide"
  misc_feature (61)..(61): /note="Nucleotide may be methylated to form 5-methylcytosine"
gcaacttgatgagctgtttacagtcatcagctgcaaagacaaaaggttaagccaattgagcgcccagggatggacctacgtgttacaattgtgtgcactgcaggtgaacctgaagggtaggt

SEQ ID NO: 24148 - DNA, 122 bp, Homo sapiens
  misc_feature (61)..(62): /note="This region represents a CpG dinucleotide"
  misc_feature (61)..(61): /note="Nucleotide may be methylated to form 5-methylcytosine"
caactttgttaaatgggaacaaataggttcctcaaaagatgagcattttctggcctgccgcggaggctcacgcctgtaatcccagcactttgggaggctgaggcagacggatcacttgaggt

SEQ ID NO: 24149 - DNA, 122 bp, Homo sapiens
  misc_feature (61)..(62): /note="This region represents a CpG dinucleotide"
  misc_feature (61)..(61): /note="Nucleotide may be methylated to form 5-methylcytosine"
tcgggttgccagtcaccctgacccagccacagaaacctcctgcttggtttattccattcacgggctctgctgaggcagctctcatctgggcttctaagatgtgcagatcctatctagttacc

SEQ ID NO: 24150 - DNA, 122 bp, Homo sapiens
  misc_feature (61)..(62): /note="This region represents a CpG dinucleotide"
  misc_feature (61)..(61): /note="Nucleotide may be methylated to form 5-methylcytosine"
gccacacataaaacacactaacgctaacaatagctgatgagctttaaaacaatctcataacgttttaagaagtttaagagtttgtgttgggccgcactcaaagctgtcctgggccatatgca

SEQ ID NO: 24151 - DNA, 122 bp, Homo sapiens
  misc_feature (61)..(62): /note="This region represents a CpG dinucleotide"
  misc_feature (61)..(61): /note="Nucleotide may be methylated to form 5-methylcytosine"
aagaaagtgctgactgataggccttggtgtgatctgcagtcagcccgtgggcctcaacttcgtgacttcttccaggtatgattacgaggaggtggaagctgagggcgcaaacaaaatgatga

SEQ ID NO: 24152 - DNA, 122 bp, Homo sapiens
  misc_feature (61)..(62): /note="This region represents a CpG dinucleotide"
  misc_feature (61)..(61): /note="Nucleotide may be methylated to form 5-methylcytosine"
gaagaaagattacatttccagtccagtttctaatcccaagtatccatgcacccaggatggcgggaaaagggaaaaggcggtaccttaaatgagggaaggacatctcagtcttggccagttct

SEQ ID NO: 24153 - DNA, 122 bp, Homo sapiens
  misc_feature (61)..(62): /note="This region represents a CpG dinucleotide"
  misc_feature (61)..(61): /note="Nucleotide may be methylated to form 5-methylcytosine"
cttcctggtctgtgctaggtctaggctgggcactggggatgcagaagtgtgagtcagccacggtgactcaaggaatcaccgagacacctgcagaaatattccttgggcagcgggttggtacc

SEQ ID NO: 24154 - DNA, 122 bp, Homo sapiens
  misc_feature (61)..(62): /note="This region represents a CpG dinucleotide"
  misc_feature (61)..(61): /note="Nucleotide may be methylated to form 5-methylcytosine"
gctgattattgtgagctcagttcccactgaggcctctcatgggggcaagtgtgtgcagggcgcgttgtcctgcctggggctgcctgggtggctaagcaggcttccctctccttgcttggtgg

SEQ ID NO: 24155 - DNA, 122 bp, Homo sapiens
  misc_feature (61)..(62): /note="This region represents a CpG dinucleotide"
  misc_feature (61)..(61): /note="Nucleotide may be methylated to form 5-methylcytosine"
ctccctccttgcaattcaagtctttaggccttgacttggtcctgaagtgagagcaaccaacgatgtcattcacagaacacagatggagaggcaaagaagaaaacccaaaggcacctagaggt

SEQ ID NO: 24156 - DNA, 122 bp, Homo sapiens
  misc_feature (61)..(62): /note="This region represents a CpG dinucleotide"
  misc_feature (61)..(61): /note="Nucleotide may be methylated to form 5-methylcytosine"
ctttttgaaaacagacttctaagtaaggacaactaccttagaaagacctggaattctgaacggagaggctgcttgttctctgacaaactttagaagtcaagttttaagtctcagtatgtttc

SEQ ID NO: 24157 - DNA, 122 bp, Homo sapiens
  misc_feature (61)..(62): /note="This region represents a CpG dinucleotide"
  misc_feature (61)..(61): /note="Nucleotide may be methylated to form 5-methylcytosine"
ctggactacccaaaggagatcagagacgagtggcccagtcctatccgtcattcactgggacgctccatcatggctagtcagctgaatggatggatgaagtcctgttcagcaccagtgcctgg

SEQ ID NO: 24158 - DNA, 122 bp, Homo sapiens
  misc_feature (61)..(62): /note="This region represents a CpG dinucleotide"
  misc_feature (61)..(61): /note="Nucleotide may be methylated to form 5-methylcytosine"
gaatcccaggactctgtgttttctggttacgctcggcctctctggcttcttcacagctgccgctccctcattctcatcttaactgtggccacacccaaaggaaggatttgtaattctcttct

SEQ ID NO: 24159 - DNA, 122 bp, Homo sapiens
  misc_feature (61)..(62): /note="This region represents a CpG dinucleotide"
  misc_feature (61)..(61): /note="Nucleotide may be methylated to form 5-methylcytosine"
aatatttactattaaccacaactaaattaatgttaaaatatacatacttttttttaatgtcgattgtctatcaaaacaaataggttgttttggagaggaagggagttcttgctcaacactgt

SEQ ID NO: 24160 - DNA, 122 bp, Homo sapiens
  misc_feature (61)..(62): /note="This region represents a CpG dinucleotide"
  misc_feature (61)..(61): /note="Nucleotide may be methylated to form 5-methylcytosine"
cagtctgttccctaatgctggaggagtagagcttggagagatttgctgctgaactcgctgcgctaaccagacacgtaatcacagtggcttcagagggactcgcacaacaatttccattagct

SEQ ID NO: 24161 - DNA, 122 bp, Homo sapiens
  misc_feature (61)..(62): /note="This region represents a CpG dinucleotide"
  misc_feature (61)..(61): /note="Nucleotide may be methylated to form 5-methylcytosine"
atgcagcaatgcagacgtgccccacttatacaaggatactcgtgtatatgcatgtatgcacgtatgtatgtactggattcagcaatgacatccgcaaagcctctgtgaggagtacaaatcta

SEQ ID NO: 24162 - DNA, 122 bp, Homo sapiens
  misc_feature (61)..(62): /note="This region represents a CpG dinucleotide"
  misc_feature (61)..(61): /note="Nucleotide may be methylated to form 5-methylcytosine"
tttaaattagaaaaatcaatagataattattatagattggtcacaaccaaaaacttggaccgggaaacactctctttgtataacatcacactgaaagccacagatggtggaactcctccctt

SEQ ID NO: 24163 - DNA, 122 bp, Homo sapiens
  misc_feature (61)..(62): /note="This region represents a CpG dinucleotide"
  misc_feature (61)..(61): /note="Nucleotide may be methylated to form 5-methylcytosine"
gccgtaacagacagtcccagggttcatggtgggtcttcctgattgagtgactcaggatcccggattctcttcaagctgtggtctctgcttccttgggacttccagagtgccctgatgtccca

SEQ ID NO: 24164 - DNA, 122 bp, Homo sapiens
  misc_feature (61)..(62): /note="This region represents a CpG dinucleotide"
  misc_feature (61)..(61): /note="Nucleotide may be methylated to form 5-methylcytosine"
aaggaattcaccatcatcattctttccaaagtacttccagatcttctcggctcgcttttccggcgtgttttcatcgtctggaaggagcttcacgtcctcgggagtgatcattttgaaaatag

SEQ ID NO: 24165 - DNA, 122 bp, Homo sapiens
  misc_feature (61)..(62): /note="This region represents a CpG dinucleotide"
  misc_feature (61)..(61): /note="Nucleotide may be methylated to form 5-methylcytosine"
gagtcaatgagaacaaggtgtgctgtttcctctgtgctgtttcttccctgccccactccccgcccctttgtcctatggtgcccaggctgcctgcactgcccagataccacaggccttgccag

SEQ ID NO: 24166 - DNA, 122 bp, Homo sapiens
  misc_feature (61)..(62): /note="This region represents a CpG dinucleotide"
  misc_feature (61)..(61): /note="Nucleotide may be methylated to form 5-methylcytosine"
attttctctccaagcccagtgggcaaggcctaggagccgtagccttcctatcagtttatccgaaaaccctgatagaagtcagcacatttttaaaaacacttaagtccattgtttcctttttg

SEQ ID NO: 24167 - DNA, 122 bp, Homo sapiens
  misc_feature (61)..(62): /note="This region represents a CpG dinucleotide"
  misc_feature (61)..(61): /note="Nucleotide may be methylated to form 5-methylcytosine"
ttagcactctgagtgtgataagacaaaagcaggtcttttgagcggtgccccaaaagcctgcggatgttagatgcccactgattccctttccctgatgggagaaatcacaggttgagggaatc

SEQ ID NO: 24168 - DNA, 122 bp, Homo sapiens
  misc_feature (61)..(62): /note="This region represents a CpG dinucleotide"
  misc_feature (61)..(61): /note="Nucleotide may be methylated to form 5-methylcytosine"
ctatttctgtctcctttttatagctaagggaactgaaccacagacaggttaagtggcttgcgcaagattgcacagccagtaagtagtagagccagcttcgaaatccaggcactcttgcagca

SEQ ID NO: 24169 - DNA, 122 bp, Homo sapiens
  misc_feature (61)..(62): /note="This region represents a CpG dinucleotide"
  misc_feature (61)..(61): /note="Nucleotide may be methylated to form 5-methylcytosine"
ctggctgtgtctgcagctgggggacagggcaggctgagggcatggccacctgtccgcacccgcagatcatcctcatgctgactaagaagtgccaggagcagcagcaggacaccaaggaggcc

SEQ ID NO: 24170 - DNA, 122 bp, Homo sapiens
  misc_feature (61)..(62): /note="This region represents a CpG dinucleotide"
  misc_feature (61)..(61): /note="Nucleotide may be methylated to form 5-methylcytosine"
attcacattataaaatgtatcgatttaactattaaaacgaatgtctggcttcagatggggcgggccaactcagcctgtggaaacacagcataacactaggtggatacatggcgccacctagc

SEQ ID NO: 24171 - DNA, 122 bp, Homo sapiens
  misc_feature (61)..(62): /note="This region represents a CpG dinucleotide"
  misc_feature (61)..(61): /note="Nucleotide may be methylated to form 5-methylcytosine"
ttattaaatttaaacttctcagcacatttaacattcatagaatgtggcatccattgctgtcgcagataattaatgtccagttttatgattatgaaataatttacagctaaatagaaatacct

SEQ ID NO: 24172 - DNA, 122 bp, Homo sapiens
  misc_feature (61)..(62): /note="This region represents a CpG dinucleotide"
  misc_feature (61)..(61): /note="Nucleotide may be methylated to form 5-methylcytosine"
acgcctgggagccatttacaacagcagaatcaccaacagaaagcacacaaataggaaaaacgtgacactaagtagacagaaaggatatgtgctcacagtatgaggactagaacaagaaggca

SEQ ID NO: 24173 - DNA, 122 bp, Homo sapiens
  misc_feature (61)..(62): /note="This region represents a CpG dinucleotide"
  misc_feature (61)..(61): /note="Nucleotide may be methylated to form 5-methylcytosine"
tgggctctcagctttctctcttcaatttagggagtcagcagggctccaactgagatgccccgtcctgctctgcaccatggaaattctggacagtagctgagaccgttgtttcttggggatta

SEQ ID NO: 24174 - DNA, 122 bp, Homo sapiens
  misc_feature (61)..(62): /note="This region represents a CpG dinucleotide"
  misc_feature (61)..(61): /note="Nucleotide may be methylated to form 5-methylcytosine"
ccctgggcagtgggaattcataaatatttaatggcctttcacatcaggaagcagtgaggacgcagctacctcagcagtgaggaaaacaggcaggggttggtgtggggagtagagggtaggga

SEQ ID NO: 24175 - DNA, 122 bp, Homo sapiens
  misc_feature (61)..(62): /note="This region represents a CpG dinucleotide"
  misc_feature (61)..(61): /note="Nucleotide may be methylated to form 5-methylcytosine"
tccctgatggagtctgaagctgggaacgaccctgtccacccccaagttccttaagtcagacgcttatctcactgggtcagacccagcaccactcagcacctggggctcccattgttacagct

SEQ ID NO: 24176 - DNA, 122 bp, Homo sapiens
  misc_feature (61)..(62): /note="This region represents a CpG dinucleotide"
  misc_feature (61)..(61): /note="Nucleotide may be methylated to form 5-methylcytosine"
aggtaattctccacaccactgcctttttttttttttttttttttttttccaatgcagttgcgtggtgtgaaggcgataactgcagacactcaggtgtaaacaacccagggaatcaatgggtt

SEQ ID NO: 24177 - DNA, 122 bp, Homo sapiens
  misc_feature (61)..(62): /note="This region represents a CpG dinucleotide"
  misc_feature (61)..(61): /note="Nucleotide may be methylated to form 5-methylcytosine"
aagggaagcaggaaggtcagcagtcccaggaaggccaaggagacgggatttctcagaagccgcgacgcgctcatctgccacccacacgaagacaaaacacaatggttatgcttcctcctcaa

SEQ ID NO: 24178 - DNA, 122 bp, Homo sapiens
  misc_feature (61)..(62): /note="This region represents a CpG dinucleotide"
  misc_feature (61)..(61): /note="Nucleotide may be methylated to form 5-methylcytosine"
gtgaagaggagctgaaagcatgtggtatgtttaaatatgctagagcaatatgctgaccagcgaggtttgtttattaaaattcttatgcggggtgaagctcaaatgagcttatgtcagctagt

SEQ ID NO: 24179 - DNA, 122 bp, Homo sapiens
  misc_feature (61)..(62): /note="This region represents a CpG dinucleotide"
  misc_feature (61)..(61): /note="Nucleotide may be methylated to form 5-methylcytosine"
attgttggctggattagttgcctgccttgaccaccttacaaggatttagtgaaactgctccgtctttagcccatgtcttccattcccagagataatggttcacacatccttgtctccgcccc

SEQ ID NO: 24180 - DNA, 122 bp, Homo sapiens
  misc_feature (61)..(62): /note="This region represents a CpG dinucleotide"
  misc_feature (61)..(61): /note="Nucleotide may be methylated to form 5-methylcytosine"
ctcttgttattattgtggctgctgttgcttttgattcaacttttaaccatgtatcttcaacgtaccaattgcaaaatgttttttggtacactatcttgtaaataaccaacacaagtagaaac

SEQ ID NO: 24181 - DNA, 122 bp, Homo sapiens
  misc_feature (61)..(62): /note="This region represents a CpG dinucleotide"
  misc_feature (61)..(61): /note="Nucleotide may be methylated to form 5-methylcytosine"
ttagtagagatggggttttaccatgctggccaggctggtgtcaaactccttcaagtgatccgcccgccttggcctcccagtgtgctgggattacaggtgtgagccactgtgctcagcctgtt

SEQ ID NO: 24182 - DNA, 122 bp, Homo sapiens
  misc_feature (61)..(62): /note="This region represents a CpG dinucleotide"
  misc_feature (61)..(61): /note="Nucleotide may be methylated to form 5-methylcytosine"
ctctctgtgggccatgtggacgagtttctgacctttgtgcctacctctgaccaaaaggtgcgtcccctccttccctgcctgagccacctctgcccttgtctgacctgatgggatgagtcagg

SEQ ID NO: 24183 - DNA, 122 bp, Homo sapiens
  misc_feature (61)..(62): /note="This region represents a CpG dinucleotide"
  misc_feature (61)..(61): /note="Nucleotide may be methylated to form 5-methylcytosine"
ggaggtcgaggctgcagcgagctgtgatcgtgccactgccgtccaccctgggtaacagagcgagaccctgggaaaggaaggtaggaaggcaggaagggagggaagaaggaaaaagaaagaaa

SEQ ID NO: 24184 - DNA, 122 bp, Homo sapiens
  misc_feature (61)..(62): /note="This region represents a CpG dinucleotide"
  misc_feature (61)..(61): /note="Nucleotide may be methylated to form 5-methylcytosine"
agtgatccacccacctcgacctcccaaagtgttgggattacaggtgtgagccactgtgcccggccacacaccagatttttttcaagaacctgactttcagccgggcgcggtggctcacgcct

SEQ ID NO: 24185 - DNA, 122 bp, Homo sapiens
  misc_feature (61)..(62): /note="This region represents a CpG dinucleotide"
  misc_feature (61)..(61): /note="Nucleotide may be methylated to form 5-methylcytosine"
aacctttcctagatgtcaaccccaggctaccctgatggctgtccccaccttgagtcactgcgtggcacttgcgtgtgccatcccaggaggcccttgctcactgctgtcacactttcttgact

SEQ ID NO: 24186 - DNA, 122 bp, Homo sapiens
  misc_feature (61)..(62): /note="This region represents a CpG dinucleotide"
  misc_feature (61)..(61): /note="Nucleotide may be methylated to form 5-methylcytosine"
gagattgcaggacaatggaatgataaaggtccaacacttaaccatcagtggcaagactaacgcaatcttcacaacagcagaaaaacctgaatggcaggcccatcagagggccatggagatgg

SEQ ID NO: 24187 - DNA, 122 bp, Homo sapiens
  misc_feature (61)..(62): /note="This region represents a CpG dinucleotide"
  misc_feature (61)..(61): /note="Nucleotide may be methylated to form 5-methylcytosine"
atgtgttcaatcaaacgatttgttcagaactatatgaccacgcttagtttcacttcccaccgcaggtctctgataacctctgaaaactctgtttttgtggttatactgtcattcattattca

SEQ ID NO: 24188 - DNA, 122 bp, Homo sapiens
  misc_feature (61)..(62): /note="This region represents a CpG dinucleotide"
  misc_feature (61)..(61): /note="Nucleotide may be methylated to form 5-methylcytosine"
ggtctgtcttcccctaccctgagaagtcattcaaatgacattataattaaacacctcagccggaatcccaggggcaaatttcaggagagatttgcatgtcacatttccattgggttgagagg

SEQ ID NO: 24189 - DNA, 122 bp, Homo sapiens
  misc_feature (61)..(62): /note="This region represents a CpG dinucleotide"
  misc_feature (61)..(61): /note="Nucleotide may be methylated to form 5-methylcytosine"
aggtttacgacttcgcctacttgctgcaggtcagtgactggctttgaggttggtacattccgcattatacccatgttgagacagtctaaaatcccacgtgcttagggtgtgtctcagtccat

SEQ ID NO: 24190 - DNA, 122 bp, Homo sapiens
  misc_feature (61)..(62): /note="This region represents a CpG dinucleotide"
  misc_feature (61)..(61): /note="Nucleotide may be methylated to form 5-methylcytosine"
aagcgctggacatgtcatttgtgactcattcttttaattcaccgtgctaatcaactgaaccgccacagcctcccaaggtaattgtgtctttataggagttgaaagcagcaggcaaaagggcc

SEQ ID NO: 24191 - DNA, 122 bp, Homo sapiens
  misc_feature (61)..(62): /note="This region represents a CpG dinucleotide"
  misc_feature (61)..(61): /note="Nucleotide may be methylated to form 5-methylcytosine"
gctctgaactgctctgtagaaaaacaaacaccacacaatgcaattgatgaatggcaggttcgcgataaatcccaatggttagtattaaaaatgcaaacactgtaacccttgataaaacagag

SEQ ID NO: 24192 - DNA, 122 bp, Homo sapiens
  misc_feature (61)..(62): /note="This region represents a CpG dinucleotide"
  misc_feature (61)..(61): /note="Nucleotide may be methylated to form 5-methylcytosine"
cattcaacaaggcagtggaagaagaagcagacaatgatgacatctgcttcccagtagagccgggagaataaaacggctcaagtccaataaagcgctgaacacagcacctgacatggcagcca

SEQ ID NO: 24193 - DNA, 122 bp, Homo sapiens
  misc_feature (61)..(62): /note="This region represents a CpG dinucleotide"
  misc_feature (61)..(61): /note="Nucleotide may be methylated to form 5-methylcytosine"
cttacatgatgtatgttgcaatttcatatttttctctactctctttcagtccttgttcctcgtcttcttggcagtaaacttcaaaccaataccatagagggcatttctatgttctaaagctc

SEQ ID NO: 24194 - DNA, 122 bp, Homo sapiens
  misc_feature (61)..(62): /note="This region represents a CpG dinucleotide"
  misc_feature (61)..(61): /note="Nucleotide may be methylated to form 5-methylcytosine"
aggaatgtgagtatgacttagtcacctagtgatggtattctagattacgacccacagcaccggaggtgcatctgtgaggaggagctggcagctagcactgcagaacattatatagcccaaca

SEQ ID NO: 24195 - DNA, 122 bp, Homo sapiens
  misc_feature (61)..(62): /note="This region represents a CpG dinucleotide"
  misc_feature (61)..(61): /note="Nucleotide may be methylated to form 5-methylcytosine"
ttaccatgataacccatgaatccattaaccaattaatccatgaatgaattaatccactcacgaaggcagactccttatgacctaatctcctcttcaaggccccaccccttaatactgttaca

SEQ ID NO: 24196 - DNA, 122 bp, Homo sapiens
  misc_feature (61)..(62): /note="This region represents a CpG dinucleotide"
  misc_feature (61)..(61): /note="Nucleotide may be methylated to form 5-methylcytosine"
aataaggcctccaaactacagtcatgcttacaaacaggtggtaatagttgtcttttaaatcgggatagagggaacagccaacaggatgcaaggaaaaagaaaatcaaacttaaaggctaatg

SEQ ID NO: 24197 - DNA, 122 bp, Homo sapiens
  misc_feature (61)..(62): /note="This region represents a CpG dinucleotide"
  misc_feature (61)..(61): /note="Nucleotide may be methylated to form 5-methylcytosine"
caactgaaggctgatgtcgtggtcacctcccagccagttgaagggctgctggggcactgacggtagacaagacatctgaagccagttagtaagactccagggcttacgaatactgcccagtt

SEQ ID NO: 24198 - DNA, 122 bp, Homo sapiens
  misc_feature (61)..(62): /note="This region represents a CpG dinucleotide"
  misc_feature (61)..(61): /note="Nucleotide may be methylated to form 5-methylcytosine"
tccttagagttgggcagcttttgcaagctgtgagaagcccagctcctgcttttcctgatacggtttatgactcacagctgccaccaagatgtcagttagctctgtgacagtgaaatgacttc

SEQ ID NO: 24199 - DNA, 122 bp, Homo sapiens
  misc_feature (61)..(62): /note="This region represents a CpG dinucleotide"
  misc_feature (61)..(61): /note="Nucleotide may be methylated to form 5-methylcytosine"
gggtcacttgtgagtcacagcaagaagcagccaggtctgggacgtcttgtcagtaaaagccgctgcctgaagtcgcctccccttcttgctatctcagcgtcattcctgcctgcccttcccct

SEQ ID NO: 24200 - DNA, 122 bp, Homo sapiens
  misc_feature (61)..(62): /note="This region represents a CpG dinucleotide"
  misc_feature (61)..(61): /note="Nucleotide may be methylated to form 5-methylcytosine"
cccaaccctgacttttctctttaactgtagtgtgacaactccgtacaatgcagactttgacggggatgagatgaacttgcacctgccacagtctctggagacgcgagcagagatccaggagc

SEQ ID NO: 24201 - DNA, 122 bp, Homo sapiens
  misc_feature (61)..(62): /note="This region represents a CpG dinucleotide"
  misc_feature (61)..(61): /note="Nucleotide may be methylated to form 5-methylcytosine"
tgatagactatggggaacagaccaagatttattttttagccagcattttccccttgcaaccgtaagtcattcttcctcagaaggcaaggtggggcaagtgattctaatgtgcttcgctccaa

SEQ ID NO: 24202 - DNA, 122 bp, Homo sapiens
  misc_feature (61)..(62): /note="This region represents a CpG dinucleotide"
  misc_feature (61)..(61): /note="Nucleotide may be methylated to form 5-methylcytosine"
catacaagcaacaacaaagaaacttaagaatttgctcaaatgttgggaattacctaaaatcggagtgaactctcttaattgaggtgtaagcaaagggatcatttctaaaattgcctaattgt

SEQ ID NO: 24203 - DNA, 122 bp, Homo sapiens
  misc_feature (61)..(62): /note="This region represents a CpG dinucleotide"
  misc_feature (61)..(61): /note="Nucleotide may be methylated to form 5-methylcytosine"
aagacttgacatagagccaggcatgtgattctgggcagatgacttgcccccttaggccttcgtttctcatttctcatctgcagtacgtgggggtgagcagttccatcagatcaggagacggg

SEQ ID NO: 24204 - DNA, 122 bp, Homo sapiens
  misc_feature (61)..(62): /note="This region represents a CpG dinucleotide"
  misc_feature (61)..(61): /note="Nucleotide may be methylated to form 5-methylcytosine"
ctggatctccagcttgctgactcaccctgtagatcttgaggcttgctgcttttataattgcgtgagccagttccttaaataagtcagtctctatctctgcatctacttggttctctttcgcc

SEQ ID NO: 24205 - DNA, 122 bp, Homo sapiens
  misc_feature (61)..(62): /note="This region represents a CpG dinucleotide"
  misc_feature (61)..(61): /note="Nucleotide may be methylated to form 5-methylcytosine"
gcagcttgtataggatttagtatcatctgaagtttcaggcacccactgagtgccttggaacgtatacctgtggatatggggaaactgctgtactctataaaatacttgactatatagaccag

SEQ ID NO: 24206 - DNA, 122 bp, Homo sapiens
  misc_feature (61)..(62): /note="This region represents a CpG dinucleotide"
  misc_feature (61)..(61): /note="Nucleotide may be methylated to form 5-methylcytosine"
gaataaatctataataggtattacttagtgtttacttgtgtcttaaggaaataatgtgtacgtactagttgattttccttatgtttttacagaaaaacaaatgggtgtttaacttaaaaatc

SEQ ID NO: 24207 - DNA, 122 bp, Homo sapiens
  misc_feature (61)..(62): /note="This region represents a CpG dinucleotide"
  misc_feature (61)..(61): /note="Nucleotide may be methylated to form 5-methylcytosine"
aaactgcatcccagtttgcagtgggtgtatgtctcatacacccacaatacctgatgtgggcgtgactcaccttggggacctgtgagtcaataagggtgtatgagtaaggggcagagcatttc

SEQ ID NO: 24208 - DNA, 122 bp, Homo sapiens
  misc_feature (61)..(62): /note="This region represents a CpG dinucleotide"
  misc_feature (61)..(61): /note="Nucleotide may be methylated to form 5-methylcytosine"
ccacccggtttgtggaactttgttacagcagcctaggaaactaacacaggtagttccccccgtcagtcctgccctgctgtaatgattcatgactggcccaacaggaagacctcaaaacattt

SEQ ID NO: 24209 - DNA, 122 bp, Homo sapiens
  misc_feature (61)..(62): /note="This region represents a CpG dinucleotide"
  misc_feature (61)..(61): /note="Nucleotide may be methylated to form 5-methylcytosine"
atcacccaggtgctgctggatgaggaaagacaggccatggcgaaatcccgccggctggagcgcagcaccaacagcttcagttactcatcataccacaccctggaggaggtaggtctggccgg

SEQ ID NO: 24210 - DNA, 122 bp, Homo sapiens
  misc_feature (61)..(62): /note="This region represents a CpG dinucleotide"
  misc_feature (61)..(61): /note="Nucleotide may be methylated to form 5-methylcytosine"
aacaaactcacaaactgcagggttcatgttcagtccaaagctggagtcccaggaggtgagcgtgtgggccaaggatgtggggatctgagcaaagaatcctttcccttcccctcctcccctgg

SEQ ID NO: 24211 - DNA, 122 bp, Homo sapiens
  misc_feature (61)..(62): /note="This region represents a CpG dinucleotide"
  misc_feature (61)..(61): /note="Nucleotide may be methylated to form 5-methylcytosine"
ccctgttggtcctgatgctgtttctgcctccccagctcatttactgtgtttcacatttttcgtcacgtggcccctttttctgcctctgtcgcggcccgatttaatcctctgcgcaggcagtg

SEQ ID NO: 24212 - DNA, 122 bp, Homo sapiens
  misc_feature (61)..(62): /note="This region represents a CpG dinucleotide"
  misc_feature (61)..(61): /note="Nucleotide may be methylated to form 5-methylcytosine"
tttaagagattctcatgcctcagccttctgagtcgctgggactacaggcaagcactaccacgcctagctaatttttttgtatttttagtagagacagggtttcaccatactggccaggctgg

SEQ ID NO: 24213 - DNA, 122 bp, Homo sapiens
  misc_feature (61)..(62): /note="This region represents a CpG dinucleotide"
  misc_feature (61)..(61): /note="Nucleotide may be methylated to form 5-methylcytosine"
acgcaggcacagagcgatctgggtggggtcaggtggcggaggatgaccagcaggggccgtcgccacacatgctgggtgcacagcccaggcagacgggcaatcagcatttccagactctcatt

SEQ ID NO: 24214 - DNA, 122 bp, Homo sapiens
  misc_feature (61)..(62): /note="This region represents a CpG dinucleotide"
  misc_feature (61)..(61): /note="Nucleotide may be methylated to form 5-methylcytosine"
cagaaggaaattacgtatgaaatataaaatatcacagcagtcctcccttacctacagttccgcttgctgtggtttcagttacccacagtcaacctcagtctgaaaatagtaacatggaaatg

SEQ ID NO: 24215 - DNA, 122 bp, Homo sapiens
  misc_feature (61)..(62): /note="This region represents a CpG dinucleotide"
  misc_feature (61)..(61): /note="Nucleotide may be methylated to form 5-methylcytosine"
aaggcaaactaaagtacattgggataggtactgtacttcagtgattcagaggaggaagcacgttcctattcagcttcagaaatgcttcaggaatgagctggactggtttgatagaaagagaa

SEQ ID NO: 24216 - DNA, 122 bp, Homo sapiens
  misc_feature (61)..(62): /note="This region represents a CpG dinucleotide"
  misc_feature (61)..(61): /note="Nucleotide may be methylated to form 5-methylcytosine"
atccccagcaactggcacagtgcctggcatgaagtgggcacccagtaaacatttcttggccgaatgaacatgcagcacacctgtagcaatacatgtgccccgtgcatcagtggaaagagtgt

SEQ ID NO: 24217 - DNA, 122 bp, Homo sapiens
  misc_feature (61)..(62): /note="This region represents a CpG dinucleotide"
  misc_feature (61)..(61): /note="Nucleotide may be methylated to form 5-methylcytosine"
tcagaaatgtactatttcgataatacattttgacttttgactagaccaccacaagaacaccgcctctatgagaaagatcctagatgctagacttaaggtaacctttagaatattacctacaa

SEQ ID NO: 24218 - DNA, 122 bp, Homo sapiens
  misc_feature (61)..(62): /note="This region represents a CpG dinucleotide"
  misc_feature (61)..(61): /note="Nucleotide may be methylated to form 5-methylcytosine"
cttgggcctgttcccagtcttttcctgtaagagatcatgcagcaggggataatatcctttcgtatagtggaggtgtgtcttcaggacagactcctaaaagtgagacggccgggtcaaaagtt

SEQ ID NO: 24219 - DNA, 122 bp, Homo sapiens
  misc_feature (61)..(62): /note="This region represents a CpG dinucleotide"
  misc_feature (61)..(61): /note="Nucleotide may be methylated to form 5-methylcytosine"
gtttaaggttaagtaagcctttcatccttgcttaatcctaaaaccctacatttaagtacacggcaaagaaaacgtacaatgcaaaggcaagggcatgcttgaagaatgcaaagcagcaaagg

SEQ ID NO: 24220 - DNA, 122 bp, Homo sapiens
  misc_feature (61)..(62): /note="This region represents a CpG dinucleotide"
  misc_feature (61)..(61): /note="Nucleotide may be methylated to form 5-methylcytosine"
ctcatcctaagaaatgggttatagtataatccctagttggcagatcaggaaactgaggcacggaaaggtgtcataatttgcctaagtattggtgaagctgggattcaaaaccagaggctgtg

SEQ ID NO: 24221 - DNA, 122 bp, Homo sapiens
  misc_feature (61)..(62): /note="This region represents a CpG dinucleotide"
  misc_feature (61)..(61): /note="Nucleotide may be methylated to form 5-methylcytosine"
ggattaaatattaattatgttaaactttgtttataaatctggtttggaatgctgttttcccgtcaaaacttaagggcaatttcaagtttatctggcccagtgatctgactgacatttcagct

SEQ ID NO: 24222 - DNA, 122 bp, Homo sapiens
  misc_feature (61)..(62): /note="This region represents a CpG dinucleotide"
  misc_feature (61)..(61): /note="Nucleotide may be methylated to form 5-methylcytosine"
gtgataacacctacctcagcctcccaaagtgctgggattacaggtatgagccaccatgcccggacaagattatcctggcccttggtgtaaagagtgatctttgacttgcaacctggacattc

SEQ ID NO: 24223 - DNA, 122 bp, Homo sapiens
  misc_feature (61)..(62): /note="This region represents a CpG dinucleotide"
  misc_feature (61)..(61): /note="Nucleotide may be methylated to form 5-methylcytosine"
ctaaattgcaggatttttaaatggcggggagtgggtaaggatattgacctgcttattacacgacaaaatttaaatccttaacttggtcagttcatagctgtggtctctgaacaaatatttga

SEQ ID NO: 24224 - DNA, 122 bp, Homo sapiens
  misc_feature (61)..(62): /note="This region represents a CpG dinucleotide"
  misc_feature (61)..(61): /note="Nucleotide may be methylated to form 5-methylcytosine"
actgattgtacaagttaacaagttagcctgttactatttcatgggtgccagcagaagacacgagactcctgagtcagagaaaaaggactttattactcatagcataacaggaagctggagct

SEQ ID NO: 24225 - DNA, 122 bp, Homo sapiens
  misc_feature (61)..(62): /note="This region represents a CpG dinucleotide"
  misc_feature (61)..(61): /note="Nucleotide may be methylated to form 5-methylcytosine"
gtggcccgggcgaggtctgtgtggtgctgaacgcctcctctgctctgttcccttccagcccgaccctgcccgccctggactggcagctgccgtcccactcaggcccgtatgagcttcggatt

SEQ ID NO: 24226 - DNA, 122 bp, Homo sapiens
  misc_feature (61)..(62): /note="This region represents a CpG dinucleotide"
  misc_feature (61)..(61): /note="Nucleotide may be methylated to form 5-methylcytosine"
attagctgtacatatgaaaacacagcttgacagtacttaaacatctgtgcaatgggcctacgtagaaggtatgatggagctttataaacatcgagctaattatgcccttactgaattgcagc

SEQ ID NO: 24227 - DNA, 122 bp, Homo sapiens
  misc_feature (61)..(62): /note="This region represents a CpG dinucleotide"
  misc_feature (61)..(61): /note="Nucleotide may be methylated to form 5-methylcytosine"
atttcccaaggtaacacagcaagaacaaagctgagatttggatccacgtctttctgactgcgaagtctgtgtgtgatcattgtttccattgtcctcaattatggtacattgtatcacagtaa

SEQ ID NO: 24228 - DNA, 122 bp, Homo sapiens
  misc_feature (61)..(62): /note="This region represents a CpG dinucleotide"
  misc_feature (61)..(61): /note="Nucleotide may be methylated to form 5-methylcytosine"
agctagcctttgattgttcattccagagttgaataatcctttcatctgccactagagccccgaacccagcagccctacacctcctaaatcataaaatcatttcacctggcacctttaaaggt

SEQ ID NO: 24229 - DNA, 122 bp, Homo sapiens
  misc_feature (61)..(62): /note="This region represents a CpG dinucleotide"
  misc_feature (61)..(61): /note="Nucleotide may be methylated to form 5-methylcytosine"
gggggcgtgcgcatgtgtgcgggtgtgcctgtgtgtctgcagctcacaccgcgggggtgccgggaggaggggggctgcccgatccttgggagtctgcggctttcagacgctcctgggggctc

SEQ ID NO: 24230 - DNA, 122 bp, Homo sapiens
  misc_feature (61)..(62): /note="This region represents a CpG dinucleotide"
  misc_feature (61)..(61): /note="Nucleotide may be methylated to form 5-methylcytosine"
cacaaaacacagaaatgggggttctcacactacagattaaggagtgtcccaggccgggcacggtggctcacacctgtaatcccagcactttgggaggctgaggcaggtggatcacctgaggt

SEQ ID NO: 24231 - DNA, 122 bp, Homo sapiens
  misc_feature (61)..(62): /note="This region represents a CpG dinucleotide"
  misc_feature (61)..(61): /note="Nucleotide may be methylated to form 5-methylcytosine"
gaagattctgtgtgctctttcagaccaggaggaggatgaggaggaggaaagtttatatgacgtaaattcatttgaccgtaagatatgtatttaaacatcgtggaggatcttgggggtctgat

SEQ ID NO: 24232 - DNA, 122 bp, Homo sapiens
  misc_feature (61)..(62): /note="This region represents a CpG dinucleotide"
  misc_feature (61)..(61): /note="Nucleotide may be methylated to form 5-methylcytosine"
catcacaactggtctcacaaaaaacatggggtgtctggcgacagctaaatcacagactggcgtctcctaagcagtctgtctaccattagggtctgggaaatggtatttactatacaattaga

SEQ ID NO: 24233 - DNA, 122 bp, Homo sapiens
  misc_feature (61)..(62): /note="This region represents a CpG dinucleotide"
  misc_feature (61)..(61): /note="Nucleotide may be methylated to form 5-methylcytosine"
tcctgtaataggaccctgtctggtgcatccaagagtgaaagtgagagtgaaagtgtgccacgagggaggcaataggaggaaaagtattgaagccaactccattagaacatatgttgaagaac

SEQ ID NO: 24234 - DNA, 122 bp, Homo sapiens
  misc_feature (61)..(62): /note="This region represents a CpG dinucleotide"
  misc_feature (61)..(61): /note="Nucleotide may be methylated to form 5-methylcytosine"
cggaggtggctgccacctcccacgccaggcaaagggctgcctcggtggttctcccagccacggttccaccactgagccccagggaaggagacttctgacccagccacctcctgccccgctgc

SEQ ID NO: 24235 - DNA, 122 bp, Homo sapiens
  misc_feature (61)..(62): /note="This region represents a CpG dinucleotide"
  misc_feature (61)..(61): /note="Nucleotide may be methylated to form 5-methylcytosine"
cacctgtgaagctgtggccacaatcacaatggtgaacttgtccgtctctcgaagagtcctcgggccctccctccccatctccaggcaaccactgatccgctttctgtcactgtaatttagca

SEQ ID NO: 24236 - DNA, 122 bp, Homo sapiens
  misc_feature (61)..(62): /note="This region represents a CpG dinucleotide"
  misc_feature (61)..(61): /note="Nucleotide may be methylated to form 5-methylcytosine"
gctaatattcactttcacaagtttttgcctttcctagatgacactgaatttcttcttatccgtcaaggattagcttatgcttgacatctgtagcttcggaaatagacattcactgcttcttt

SEQ ID NO: 24237 - DNA, 122 bp, Homo sapiens
  misc_feature (61)..(62): /note="This region represents a CpG dinucleotide"
  misc_feature (61)..(61): /note="Nucleotide may be methylated to form 5-methylcytosine"
tatttatgcagtgcatgtaaacattgaaagcaaattcacatcaccaaggaaaatgatccccgtaacatgtctaaaaatcatctgtgactcagtgatatgattagtcctgtgaaagcgttcag

SEQ ID NO: 24238 - DNA, 122 bp, Homo sapiens
  misc_feature (61)..(62): /note="This region represents a CpG dinucleotide"
  misc_feature (61)..(61): /note="Nucleotide may be methylated to form 5-methylcytosine"
aggtcaaataaaagtatagacaaattggtgtggatgctataagggaggagagattacatccgcttggggcaatccaaagaaatttattcaaagagtagaggcgtttatgtccatggtagaat

SEQ ID NO: 24239 - DNA, 122 bp, Homo sapiens
  misc_feature (61)..(62): /note="This region represents a CpG dinucleotide"
  misc_feature (61)..(61): /note="Nucleotide may be methylated to form 5-methylcytosine"
gggaccagggtccgggctgtggacgtggccaccgctgtcccctgcagcagtggataagggcggcagctacctggtggcccctaagtcgctcttaagccaactcttcaagcttcctcttgttc

SEQ ID NO: 24240 - DNA, 122 bp, Homo sapiens
  misc_feature (61)..(62): /note="This region represents a CpG dinucleotide"
  misc_feature (61)..(61): /note="Nucleotide may be methylated to form 5-methylcytosine"
gtggccaacttgacaaaggacctgggactgagggtgggggagctggcttcgcggggcgctcgggttgttttcaaagggaacagacaacatttgcagtttgatccacagacccatgatttact

SEQ ID NO: 24241 - DNA, 122 bp, Homo sapiens
  misc_feature (61)..(62): /note="This region represents a CpG dinucleotide"
  misc_feature (61)..(61): /note="Nucleotide may be methylated to form 5-methylcytosine"
aatgaagtcagatgaccgagacactgattcttatcctcagaaaccacagctgtcacagagcgctttaatttattcattgattggctgtgaaaaccacagctaaatgtctgaggtgcaacttc

SEQ ID NO: 24242 - DNA, 122 bp, Homo sapiens
  misc_feature (61)..(62): /note="This region represents a CpG dinucleotide"
  misc_feature (61)..(61): /note="Nucleotide may be methylated to form 5-methylcytosine"
ttgtcactgctcagctttagcttccacatctgttaaatgggcttaatcctactaagatttcgaggctgaagaaagccatatatagtgtgtggtatgggggctcattaagtcctagttctttt

SEQ ID NO: 24243 - DNA, 122 bp, Homo sapiens
  misc_feature (61)..(62): /note="This region represents a CpG dinucleotide"
  misc_feature (61)..(61): /note="Nucleotide may be methylated to form 5-methylcytosine"
gaaagcccaaagattgggcaagttccaggtaaggtttcatctgctattctacaatgtcatcgaggatccaggttcctgccatttctccatcctgctctccgcagcatcaccttcatcctaag

SEQ ID NO: 24244 - DNA, 122 bp, Homo sapiens
  misc_feature (61)..(62): /note="This region represents a CpG dinucleotide"
  misc_feature (61)..(61): /note="Nucleotide may be methylated to form 5-methylcytosine"
atactccattaaattcctacagtccacagtgcagggaagtccctaggcccaggatacaatcgctcctgattttgagggcatgtatccaaacacatggcctactgaaaacaaatgcattttaa

SEQ ID NO: 24245 - DNA, 122 bp, Homo sapiens
  misc_feature (61)..(62): /note="This region represents a CpG dinucleotide"
  misc_feature (61)..(61): /note="Nucleotide may be methylated to form 5-methylcytosine"
ctccccaggtccataataccctctctctcggctgtctgggtctgaaagccaaggttcccccgacctaatcagagtggtgggctccgctgcactggtctccatattccagagcagaaaaaccc

SEQ ID NO: 24246 - DNA, 122 bp, Homo sapiens
  misc_feature (61)..(62): /note="This region represents a CpG dinucleotide"
  misc_feature (61)..(61): /note="Nucleotide may be methylated to form 5-methylcytosine"
ggacaggtgggaaagggccgggtgtctggtcctgctgccaggggacagtgcaggtgtgaccgtccgggcagagatgagtcaccctccacactgtcttgctgcccgtctccacgcctagtttt

SEQ ID NO: 24247 - DNA, 122 bp, Homo sapiens
  misc_feature (61)..(62): /note="This region represents a CpG dinucleotide"
  misc_feature (61)..(61): /note="Nucleotide may be methylated to form 5-methylcytosine"
aaccgagctccctgaataagtaattcctgtcccttacaaggctctcaactctaaaggggccgcgtgaagggcggggggcgggaggttgtgattgattgagcaaatgagggttacatgactgg

SEQ ID NO: 24248 - DNA, 122 bp, Homo sapiens
  misc_feature (61)..(62): /note="This region represents a CpG dinucleotide"
  misc_feature (61)..(61): /note="Nucleotide may be methylated to form 5-methylcytosine"
cggtatctcttctacccagtctctctacctgactcttccattctctgttgctgcctttgacggttcatgtgactatgtgggggcacacccagataatccaggatcatcctcattttaaagcc

SEQ ID NO: 24249 - DNA, 122 bp, Homo sapiens
  misc_feature (61)..(62): /note="This region represents a CpG dinucleotide"
  misc_feature (61)..(61): /note="Nucleotide may be methylated to form 5-methylcytosine"
tcataaagcaacattcagatgcaagtgagatggatggcttctccaggctcaagtatcccacgaattcccatgtctctgtgtagtttatccttagtgttgaaaatacatgtgtgtcatactgt

SEQ ID NO: 24250 - DNA, 122 bp, Homo sapiens
  misc_feature (61)..(62): /note="This region represents a CpG dinucleotide"
  misc_feature (61)..(61): /note="Nucleotide may be methylated to form 5-methylcytosine"
tggggagacactgagaggaagaaagggctgagggcatcctggccaggcgcatggcaccagcgctgcctacctacccataccacacccagcacaaggctgggcccaagtgagtgctgctgtcc

SEQ ID NO: 24251 - DNA, 122 bp, Homo sapiens
  misc_feature (61)..(62): /note="This region represents a CpG dinucleotide"
  misc_feature (61)..(61): /note="Nucleotide may be methylated to form 5-methylcytosine"
ggcaacgatctcatccagcccctgctgggatggggtgtcatggggaccttgagctgcagtcgtaagcaggactggggcagcctgagtcagacagtggccttggggaggagtggatttggtcc

SEQ ID NO: 24252 - DNA, 122 bp, Homo sapiens
  misc_feature (61)..(62): /note="This region represents a CpG dinucleotide"
  misc_feature (61)..(61): /note="Nucleotide may be methylated to form 5-methylcytosine"
ccggccgagggacccacccaaggccacacagggaggcggcctcaggatcatgggcagctccgtctggttccttcccaggctccgggccatatcatcagcaccctcccctcatcctgccccgc

SEQ ID NO: 24253 - DNA, 122 bp, Homo sapiens
  misc_feature (61)..(62): /note="This region represents a CpG dinucleotide"
  misc_feature (61)..(61): /note="Nucleotide may be methylated to form 5-methylcytosine"
ctgggccaaaaccatggagttcccattttgcaaacacaccttggggtctgtaaccaggtgcggctccctgcaggtgccaaccacctgtggtaaaggcatgatgagtccacttcctgtaaggc

SEQ ID NO: 24254 - DNA, 122 bp, Homo sapiens
  misc_feature (61)..(62): /note="This region represents a CpG dinucleotide"
  misc_feature (61)..(61): /note="Nucleotide may be methylated to form 5-methylcytosine"
cttgagtaggcagttttactatcacagagtaaacaaagctgcagggaagttctaactgggcggagcccacagcagttcagcaaggccactagggccagactgcctatctagattttctcctc

SEQ ID NO: 24255 - DNA, 122 bp, Homo sapiens
  misc_feature (61)..(62): /note="This region represents a CpG dinucleotide"
  misc_feature (61)..(61): /note="Nucleotide may be methylated to form 5-methylcytosine"
gggatagaggtaactaaacttgtgcttcatagctccaaggtaatttaattccctttctggcgagagtgcttgcaacactaactcaggcttctagtggtctgatgagcttaaaaatcaattaa

SEQ ID NO: 24256 - DNA, 122 bp, Homo sapiens
  misc_feature (61)..(62): /note="This region represents a CpG dinucleotide"
  misc_feature (61)..(61): /note="Nucleotide may be methylated to form 5-methylcytosine"
aaaagaattagttctaaataaggtggtttttattcttggcaagaacaagaatcagcaccccgttcactaagctcacactgatgaaatattaatactgaaaatctgctgtgatcctcttattt

SEQ ID NO: 24257 - DNA, 122 bp, Homo sapiens
  misc_feature (61)..(62): /note="This region represents a CpG dinucleotide"
  misc_feature (61)..(61): /note="Nucleotide may be methylated to form 5-methylcytosine"
ataagcagagattgacatgataaattagttgggatcttaagaagtcagggaaaacttccccgttataatgatgactgagtgatgtagtcatcagctaatcaagggagcacagatgagagcta

SEQ ID NO: 24258 - DNA, 122 bp, Homo sapiens
  misc_feature (61)..(62): /note="This region represents a CpG dinucleotide"
  misc_feature (61)..(61): /note="Nucleotide may be methylated to form 5-methylcytosine"
tgccaaagcacgagttgaaacgtgaagtgttgggccagcccgtgtggcaccaatacctgccgcctacgactgttgtgaacactgaatgggccaacaaacctaaacgttaaatgaactgataa

SEQ ID NO: 24259 - DNA, 122 bp, Homo sapiens
  misc_feature (61)..(62): /note="This region represents a CpG dinucleotide"
  misc_feature (61)..(61): /note="Nucleotide may be methylated to form 5-methylcytosine"
acggagacagtgactccaggtgagagctatgctgttcattagtccagccatgcaggaacacggctggcagaagggcaattccgggggcaacgggaagagtccttcttccttatgaaggcaga

SEQ ID NO: 24260 - DNA, 122 bp, Homo sapiens
  misc_feature (61)..(62): /note="This region represents a CpG dinucleotide"
  misc_feature (61)..(61): /note="Nucleotide may be methylated to form 5-methylcytosine"
gagccgtgatccattattgtgtccttggctctgcagctccatagcttctctccccactaccgcccctcccccagccccaggtagatctggagttgattaatagttttagtaaactgactcac

SEQ ID NO: 24261 - DNA, 122 bp, Homo sapiens
  misc_feature (61)..(62): /note="This region represents a CpG dinucleotide"
  misc_feature (61)..(61): /note="Nucleotide may be methylated to form 5-methylcytosine"
acattgaccttgatcacctggctgaggtagtgtttctcaggtttctcttctgtaaagatacgttttaccccactttccatacttactcttgggaaggaagtcactatgcatggtccacacat

SEQ ID NO: 24262 - DNA, 122 bp, Homo sapiens
  misc_feature (61)..(62): /note="This region represents a CpG dinucleotide"
  misc_feature (61)..(61): /note="Nucleotide may be methylated to form 5-methylcytosine"
cagtagagatcccaggtagagcaatttacctgcacattgttgccagggaacaagggaaggcgagtcaaactatttggggatttagctgagctttgaaataactgaaaagctatgcttcaatt

SEQ ID NO: 24263 - DNA, 122 bp, Homo sapiens
  misc_feature (61)..(62): /note="This region represents a CpG dinucleotide"
  misc_feature (61)..(61): /note="Nucleotide may be methylated to form 5-methylcytosine"
tgtatcccaagagttaaggaaagctgaccttttgagggctatttcagccaaatcagggtgcggtctactgaatcatctccaccttacagcagggcacgtctatgtgaaaacaaatttcacac

SEQ ID NO: 24264 - DNA, 122 bp, Homo sapiens
  misc_feature (61)..(62): /note="This region represents a CpG dinucleotide"
  misc_feature (61)..(61): /note="Nucleotide may be methylated to form 5-methylcytosine"
cggctcacaatgagaaggcgggtgctggggatctgcccccgtcgtgcatgtgtcaccacacggtgtcgaagcggacacctgcctccgggatgagcgcattgggcaacactgcatgctttgca

SEQ ID NO: 24265 - DNA, 122 bp, Homo sapiens
  misc_feature (61)..(62): /note="This region represents a CpG dinucleotide"
  misc_feature (61)..(61): /note="Nucleotide may be methylated to form 5-methylcytosine"
taaaagctatatggcctttcctgatctggctttggaaggcatccagcctcacttccactacgttctattagtaacaggcaaatcataagaccagctcaagcttcaaggaaaggggaattaat

SEQ ID NO: 24266 - DNA, 122 bp, Homo sapiens
  misc_feature (61)..(62): /note="This region represents a CpG dinucleotide"
  misc_feature (61)..(61): /note="Nucleotide may be methylated to form 5-methylcytosine"
ctttcctattgctatgatacccagtacggattcctacacagaactggttctaagaattgccgtcatctggctaagcttcttcccggtattgctatggtgacatttacttagtaaacatttcc

SEQ ID NO: 24267 - DNA, 122 bp, Homo sapiens
  misc_feature (61)..(62): /note="This region represents a CpG dinucleotide"
  misc_feature (61)..(61): /note="Nucleotide may be methylated to form 5-methylcytosine"
caggaacacatttggatattgacacaacttcatctgcagttggcttgtcatcctgagctccgttcccaggcagcgtagatattgcacaggattttgctgaccagggagttgggttataagtg

SEQ ID NO: 24268 - DNA, 122 bp, Homo sapiens
  misc_feature (61)..(62): /note="This region represents a CpG dinucleotide"
  misc_feature (61)..(61): /note="Nucleotide may be methylated to form 5-methylcytosine"
ccactacagtttcatcagtaaaatggggcggtaacattacctccctcccagagccacagacgggattaaatgagctaaggatgaaaagggcctggcactctgacaatcccataccactagga

SEQ ID NO: 24269 - DNA, 122 bp, Homo sapiens
  misc_feature (61)..(62): /note="This region represents a CpG dinucleotide"
  misc_feature (61)..(61): /note="Nucleotide may be methylated to form 5-methylcytosine"
aagtgaaaacgtggtacagtgtagccgcaaagtatatccatagtatactttgtagccacacgtcaggaggaagttacctttatgcaccccttaccactgcatgcaaatttgatattttctct

SEQ ID NO: 24270 - DNA, 122 bp, Homo sapiens
  misc_feature (61)..(62): /note="This region represents a CpG dinucleotide"
  misc_feature (61)..(61): /note="Nucleotide may be methylated to form 5-methylcytosine"
taaatatctgtcacctgctctcaaaagtaaggttatgtcctttctaaaaaccatcagggccgtatggctcccatttctatgggtattaaataagcttttctgttgagtctcagtgattgtgt

SEQ ID NO: 24271 - DNA, 122 bp, Homo sapiens
  misc_feature (61)..(62): /note="This region represents a CpG dinucleotide"
  misc_feature (61)..(61): /note="Nucleotide may be methylated to form 5-methylcytosine"
ggggtaaacgggctggggcgcggggttaaggggcggggtggggcggaggctgtctcccgccgcgcctgcctcggatgagggcagcacctgctgggccgctgaacgccctcccctctctctac

SEQ ID NO: 24272 - DNA, 122 bp, Homo sapiens
  misc_feature (61)..(62): /note="This region represents a CpG dinucleotide"
  misc_feature (61)..(61): /note="Nucleotide may be methylated to form 5-methylcytosine"
ctctttacaacactcctaaaatctaaaataaaagggaagtctcaggggtctaaagtagaacgctggacctccaggggaaataattttcttgtaactgtaggtgtgtgtacctgttcattatc

SEQ ID NO: 24273 - DNA, 122 bp, Homo sapiens
  misc_feature (61)..(62): /note="This region represents a CpG dinucleotide"
  misc_feature (61)..(61): /note="Nucleotide may be methylated to form 5-methylcytosine"
tgttgatgtcaatgttctatgggattctcctggtgttagatgattacagtatcacggaaacgtgaggctgcatctgctaagtaacgtttcactcctgtgtatcacagaggttcttctctaag

SEQ ID NO: 24274 - DNA, 122 bp, Homo sapiens
  misc_feature (61)..(62): /note="This region represents a CpG dinucleotide"
  misc_feature (61)..(61): /note="Nucleotide may be methylated to form 5-methylcytosine"
cgacctcgcccagccctcctgatcttttaaagtgcattttacttcctggaaagttgggttcgctggttttcaggcggcaagtttgtgccataaggatgaaggcatgctttagagatggcata

SEQ ID NO: 24275 - DNA, 122 bp, Homo sapiens
  misc_feature (61)..(62): /note="This region represents a CpG dinucleotide"
  misc_feature (61)..(61): /note="Nucleotide may be methylated to form 5-methylcytosine"
gatcagacagcatggaccccgccccctggccgctcgtccctctggtgtgtccaatgaaagcgaaagagagcatgcaaagcaggaacacatgagggcacgtgttaacaagaagacgggtgcag

SEQ ID NO: 24276 - DNA, 122 bp, Homo sapiens
  misc_feature (61)..(62): /note="This region represents a CpG dinucleotide"
  misc_feature (61)..(61): /note="Nucleotide may be methylated to form 5-methylcytosine"
ctgtagccaacatcccctgagctgttgatgccctgtgaaatctctgtgaaatctctttctcgctgatcctacacatttggaaagtgctgtcatgacaattattactcacaaagttctcttgc

SEQ ID NO: 24277 - DNA, 122 bp, Homo sapiens
  misc_feature (61)..(62): /note="This region represents a CpG dinucleotide"
  misc_feature (61)..(61): /note="Nucleotide may be methylated to form 5-methylcytosine"
cgaggtatgttcctttgttgtagttgtacaccttatcacaacactcactggggcttactacgtgccaggcactaagtgctttacatctgtcaactcatttaatctgacagcatcccttgagg

SEQ ID NO: 24278 - DNA, 122 bp, Homo sapiens
  misc_feature (61)..(62): /note="This region represents a CpG dinucleotide"
  misc_feature (61)..(61): /note="Nucleotide may be methylated to form 5-methylcytosine"
acaaatgtaaaagaaggtgccttacaggttataactttgcaaggatcatagaaggaaacacgcttgcaaactatgagaaatttgggctttgagccaagtttatctgatcactaaggacagga

SEQ ID NO: 24279 - DNA, 122 bp, Homo sapiens
  misc_feature (61)..(62): /note="This region represents a CpG dinucleotide"
  misc_feature (61)..(61): /note="Nucleotide may be methylated to form 5-methylcytosine"
caaaacccacaactgccacagccacacttcctctgctgcagtaatgaaggcggggaccagcgtcaccagacaatgctcaagtctagcagggctggcagggtcccactcacactgtgggctgc

SEQ ID NO: 24280 - DNA, 122 bp, Homo sapiens
  misc_feature (61)..(62): /note="This region represents a CpG dinucleotide"
  misc_feature (61)..(61): /note="Nucleotide may be methylated to form 5-methylcytosine"
cgcagattgccaggaaaccaccagaggttaagaagggggcaaggaagaatctctcagaaacgtaagagagactgtggccctggtgatgccttgatttcagacttctagcctccagaactgtg

SEQ ID NO: 24281 - DNA, 122 bp, Homo sapiens
  misc_feature (61)..(62): /note="This region represents a CpG dinucleotide"
  misc_feature (61)..(61): /note="Nucleotide may be methylated to form 5-methylcytosine"
gggtggaatgatgccaagagggcatactgagtgggttatttccagtctaatgacattttacgcaagaccagttgtaaagttgcatgcaggtttccaagaagaaaatgctttcccaaagaccg

SEQ ID NO: 24282 - DNA, 122 bp, Homo sapiens
  misc_feature (61)..(62): /note="This region represents a CpG dinucleotide"
  misc_feature (61)..(61): /note="Nucleotide may be methylated to form 5-methylcytosine"
aagttgagaaggaacaaagaccgtagtgtgtggttgctttgcatcctcccacctgaactacgtgctcatcacagtggaatttcattgcaacttctctcagtctggtgagcattgtgtctggt

SEQ ID NO: 24283 - DNA, 122 bp, Homo sapiens
  misc_feature (61)..(62): /note="This region represents a CpG dinucleotide"
  misc_feature (61)..(61): /note="Nucleotide may be methylated to form 5-methylcytosine"
agcatcggtgactctgccaggctacatatgtgtgtgcgtgtctgcatatatatacacacacgtgtatacgcacacacagagccacacatcactcaacgacagggacacgttctgagaaatac

SEQ ID NO: 24284 - DNA, 122 bp, Homo sapiens
  misc_feature (61)..(62): /note="This region represents a CpG dinucleotide"
  misc_feature (61)..(61): /note="Nucleotide may be methylated to form 5-methylcytosine"
tgcaaaaccatggaaattaaataatttacacctacaattcttggcccttaaaaagcaactcgattctttggaaatgctttgttctttttctattaataaaatacaaattgtaatggccttgg

SEQ ID NO: 24285 - DNA, 122 bp, Homo sapiens
  misc_feature (61)..(62): /note="This region represents a CpG dinucleotide"
  misc_feature (61)..(61): /note="Nucleotide may be methylated to form 5-methylcytosine"
aaactggagcaaaagcctctgtccacgtatcgtagctctccttttcttttcttacaggaacgctgcatcccgaggtgaattaacagtcatggatatagctgggtcctaagtccccacacagt

SEQ ID NO: 24286 - DNA, 122 bp, Homo sapiens
  misc_feature (61)..(62): /note="This region represents a CpG dinucleotide"
  misc_feature (61)..(61): /note="Nucleotide may be methylated to form 5-methylcytosine"
tgacatgaattggggccccagaagaaggcagaagccaggtacccagggtcttttaaaccacggcagtgagtttgaatgttatttcaagtgtgctggtgcactgttggcacgggggagagatg

SEQ ID NO: 24287 - DNA, 122 bp, Homo sapiens
  misc_feature (61)..(62): /note="This region represents a CpG dinucleotide"
  misc_feature (61)..(61): /note="Nucleotide may be methylated to form 5-methylcytosine"
cggctcttaaagggccctggcagaaggagtcagtgtgatctcgccagtccctgagtccaacgtgggaattctgggtcttgggatattggcctttgaggtggtgacaccagttaggagccaca

SEQ ID NO: 24288 - DNA, 122 bp, Homo sapiens
  misc_feature (61)..(62): /note="This region represents a CpG dinucleotide"
  misc_feature (61)..(61): /note="Nucleotide may be methylated to form 5-methylcytosine"
ggtctgggatgctgtccacagtcaccattcatctgacacaggcatgctatagtgtcacagcgctcacctccagagaggcccaggccgtggaaagaaggaaaactctgcacattcacttcctt

SEQ ID NO: 24289 - DNA, 122 bp, Homo sapiens
  misc_feature (61)..(62): /note="This region represents a CpG dinucleotide"
  misc_feature (61)..(61): /note="Nucleotide may be methylated to form 5-methylcytosine"
cagctgtgtgggagatcagtctccccgagcacgggggagcagagttttaaaagataacttcgtgggtggggggaagccagtgagccagaagtgctgattggtcagggatgaaactgtaggga

SEQ ID NO: 24290 - DNA, 122 bp, Homo sapiens
  misc_feature (61)..(62): /note="This region represents a CpG dinucleotide"
  misc_feature (61)..(61): /note="Nucleotide may be methylated to form 5-methylcytosine"
agagtggcatgaaccctgagtgtgatgtgattcatcggaagattacaaggggaggcatgacgtgctgatgtggcttttgacaagattcctcaggctgccacactgagagacatggcaaatgc

SEQ ID NO: 24291 - DNA, 122 bp, Homo sapiens
  misc_feature (61)..(62): /note="This region represents a CpG dinucleotide"
  misc_feature (61)..(61): /note="Nucleotide may be methylated to form 5-methylcytosine"
ggagagtcttctgctgtactcatacatggctagctacctactgtaacaccttgacataagcgtctgatctccactcagatatgagcatcaataaagataattcaagtcaatttattgagcat

SEQ ID NO: 24292 - DNA, 122 bp, Homo sapiens
  misc_feature (61)..(62): /note="This region represents a CpG dinucleotide"
  misc_feature (61)..(61): /note="Nucleotide may be methylated to form 5-methylcytosine"
aaatgccaacagaggaggctgagaaggagtgcttgcgaaatacgggaaaaaccagaggagcgaagtatcagggcctggaggagaaagttttttgagatcagcaattgacctgctgtgccaaa

SEQ ID NO: 24293 - DNA, 122 bp, Homo sapiens
  misc_feature (61)..(62): /note="This region represents a CpG dinucleotide"
  misc_feature (61)..(61): /note="Nucleotide may be methylated to form 5-methylcytosine"
tcatctctagcctgtttgctccccttggagtgacactgacatgctttcttgccagctaatcgggaggtgtttctgatggtgccccaggtgccctatgtctgacctgcagaagctgcagaacc

SEQ ID NO: 24294 - DNA, 122 bp, Homo sapiens
  misc_feature (61)..(62): /note="This region represents a CpG dinucleotide"
  misc_feature (61)..(61): /note="Nucleotide may be methylated to form 5-methylcytosine"
caagctgaatgcaggcctcacctccccactgtgttgcttccgtgggctactcagagtcaccgggaagttcccacaggagtcataatcactgaatcactctctggctttctagttaatgtttt

SEQ ID NO: 24295 - DNA, 122 bp, Homo sapiens
  misc_feature (61)..(62): /note="This region represents a CpG dinucleotide"
  misc_feature (61)..(61): /note="Nucleotide may be methylated to form 5-methylcytosine"
tccctgggagcccttcagccaagggcgtgtgtgggctgaggcgtggcatgcacgggtcggcgagacagcagccatctgaacctgtcctcctcctccatctctacctcacctccaccatctcc

SEQ ID NO: 24296 - DNA, 122 bp, Homo sapiens
  misc_feature (61)..(62): /note="This region represents a CpG dinucleotide"
  misc_feature (61)..(61): /note="Nucleotide may be methylated to form 5-methylcytosine"
cctaggtctgaagcctcagcgaccttgcagcaagtaatagacactgggtggggccacaagcgtgacatctttattggaataaaaacaaaaccacagcctctctctcgtgttgggaggagtgg

SEQ ID NO: 24297 - DNA, 122 bp, Homo sapiens
  misc_feature (61)..(62): /note="This region represents a CpG dinucleotide"
  misc_feature (61)..(61): /note="Nucleotide may be methylated to form 5-methylcytosine"
gtcaccagcatctagttgctaagtaatagtcacacggcaaaagtccccccgccaatcagacgctgctactttgggataaaagtatccactctgcacttttaagataaccaaagagtgtatta

SEQ ID NO: 24298 - DNA, 122 bp, Homo sapiens
  misc_feature (61)..(62): /note="This region represents a CpG dinucleotide"
  misc_feature (61)..(61): /note="Nucleotide may be methylated to form 5-methylcytosine"
gggaacacccagtaacgattccttcagtgatcccggttctccaaactcttgcctcaaaggcggcctgccccggtgctgtcagccgtgaatggggactcacttcttgggaaaagaggcttttg

SEQ ID NO: 24299 - DNA, 122 bp, Homo sapiens
  misc_feature (61)..(62): /note="This region represents a CpG dinucleotide"
  misc_feature (61)..(61): /note="Nucleotide may be methylated to form 5-methylcytosine"
ctgaggatttatgccagtacattttgttcaggcttatacagccttcatgctgcctctaaacgccccatagtgcttccacactgtcacagctacactatggaatcaatcaaatgactgctttc

SEQ ID NO: 24300 - DNA, 122 bp, Homo sapiens
  misc_feature (61)..(62): /note="This region represents a CpG dinucleotide"
  misc_feature (61)..(61): /note="Nucleotide may be methylated to form 5-methylcytosine"
tcaccccagcacatgtgtgacagatggtgaaagctcaatatatgaatgaatgttgaatgacggaatctactacctgatgggccagtctattccacctttgaacattgccaattttaagaaca

SEQ ID NO: 24301 - DNA, 122 bp, Homo sapiens
  misc_feature (61)..(62): /note="This region represents a CpG dinucleotide"
  misc_feature (61)..(61): /note="Nucleotide may be methylated to form 5-methylcytosine"
tactggggagaataaatcacatgacctcactcagatgcaaaggacactgggaaatgtagtcgctgtctgaacagttgtgttcattccagtaataatctcccaatgaccaaggaagaagaacc

SEQ ID NO: 24302 - DNA, 122 bp, Homo sapiens
  misc_feature (61)..(62): /note="This region represents a CpG dinucleotide"
  misc_feature (61)..(61): /note="Nucleotide may be methylated to form 5-methylcytosine"
gaaaaatttataccggactagacagtggtagtggttgcacaatattgttaaagtactacacgtcactgctataaacacttttaaatgggtgaaatggtaaattttatgttatgcatatttta

SEQ ID NO: 24303 - DNA, 122 bp, Homo sapiens
  misc_feature (61)..(62): /note="This region represents a CpG dinucleotide"
  misc_feature (61)..(61): /note="Nucleotide may be methylated to form 5-methylcytosine"
aaaggctggaaccttacctcttcctgtctggcatcacatgcactgtctcattctattgtgcggagacgtgagccaggtctgaattcaaatctatgaccctgccacttcctgtggggtgcata

SEQ ID NO: 24304 - DNA, 122 bp, Homo sapiens
  misc_feature (61)..(62): /note="This region represents a CpG dinucleotide"
  misc_feature (61)..(61): /note="Nucleotide may be methylated to form 5-methylcytosine"
tatgagcatgtcataggccttatcatcataggagacacaaacaggttgggagaggtatgccgtgttttatttactaactacagaatgctggagttagcctgttccttagtattcaaggccta

SEQ ID NO: 24305 - DNA, 122 bp, Homo sapiens
  misc_feature (61)..(62): /note="This region represents a CpG dinucleotide"
  misc_feature (61)..(61): /note="Nucleotide may be methylated to form 5-methylcytosine"
agggctgtcctttaatgttaggcattttctgtgaccttgctattgttactgctgatgaagcgatgaaggaattaaacagaagatgcttggaggcatttaggaagacagctatattaactcct

SEQ ID NO: 24306 - DNA, 122 bp, Homo sapiens
  misc_feature (61)..(62): /note="This region represents a CpG dinucleotide"
  misc_feature (61)..(61): /note="Nucleotide may be methylated to form 5-methylcytosine"
ctctctaagctgcatgaagggtgcccccattccatccctcttcacttctccccagcatagcgcctccataaatgtttgtgaactggatgaatgactgttgagcgcttggtatgatgagctgc

SEQ ID NO: 24307 - DNA, 122 bp, Homo sapiens
  misc_feature (61)..(62): /note="This region represents a CpG dinucleotide"
  misc_feature (61)..(61): /note="Nucleotide may be methylated to form 5-methylcytosine"
ggccttgcgcaaacactgcacttgtatcgggctttgctaaggtggagcgcagaccctgcacgttctgtttagcaatgaaagatgtaaacagtgccttaacagtggggccatctccctgccct

SEQ ID NO: 24308 - DNA, 122 bp, Homo sapiens
  misc_feature (61)..(62): /note="This region represents a CpG dinucleotide"
  misc_feature (61)..(61): /note="Nucleotide may be methylated to form 5-methylcytosine"
agagaagaagaagatttacatggaaattgatcctgtgaccagaactgaaatattcagaagcggaaatggcactgatgaaacattggaagtgcacgactttaaaaacgtaagttggatgtttt

SEQ ID NO: 24309 - DNA, 122 bp, Homo sapiens
  misc_feature (61)..(62): /note="This region represents a CpG dinucleotide"
  misc_feature (61)..(61): /note="Nucleotide may be methylated to form 5-methylcytosine"
gccctgacaccctgacactggacatttctgggtgggtcataagaagtcacagcctgaggccgggcacggtggctcaggcctgtaatcccagcacttcgggaaggtgaggcaggagggtcact

SEQ ID NO: 24310 - DNA, 122 bp, Homo sapiens
  misc_feature (61)..(62): /note="This region represents a CpG dinucleotide"
  misc_feature (61)..(61): /note="Nucleotide may be methylated to form 5-methylcytosine"
caggcacagtggctcatgcctgtaatcccagcactttgggaggccaaggcggatgaatcacgaggtcaggaatttgatacaagcctgaccaaacatggtgaaaccccatctctactaaaaat

SEQ ID NO: 24311 - DNA, 122 bp, Homo sapiens
  misc_feature (61)..(62): /note="This region represents a CpG dinucleotide"
  misc_feature (61)..(61): /note="Nucleotide may be methylated to form 5-methylcytosine"
gtgttatctcctcactctgtctttagggcctgcctttaactaagcaggagctcaagacagcgtaagtttcaaagacattatgatgcttttacagaagtccctttcaaaaacaacttctgtat

SEQ ID NO: 24312 - DNA, 122 bp, Homo sapiens
  misc_feature (61)..(62): /note="This region represents a CpG dinucleotide"
  misc_feature (61)..(61): /note="Nucleotide may be methylated to form 5-methylcytosine"
gaatgaggctttggcttcctgctccatccttgtcccctcttccttctagttgtctgggtacgaggcagctgtgccaatcacggagaagtcaaacccactgacccaggatctagacaaagcag

SEQ ID NO: 24313 - DNA, 122 bp, Homo sapiens
  misc_feature (61)..(62): /note="This region represents a CpG dinucleotide"
  misc_feature (61)..(61): /note="Nucleotide may be methylated to form 5-methylcytosine"
tgcagactgatctttcatcatcaatgccttaaagctaatcattactgctcttgcctaactcgtcatcagcttccctgatgacgacttcagctcaagggtaatctcttccacctcatcctggt

SEQ ID NO: 24314 - DNA, 122 bp, Homo sapiens
  misc_feature (61)..(62): /note="This region represents a CpG dinucleotide"
  misc_feature (61)..(61): /note="Nucleotide may be methylated to form 5-methylcytosine"
tggacgaggactgactgcggcaaattcactccagggctgggcgtccacgtccagccagaacgcagaacttgccgggttgcgctgctcacacaggccccgccgtccccgccgtccccgccgtc

SEQ ID NO: 24315 - DNA, 122 bp, Homo sapiens
  misc_feature (61)..(62): /note="This region represents a CpG dinucleotide"
  misc_feature (61)..(61): /note="Nucleotide may be methylated to form 5-methylcytosine"
gaagtttcccttctctgtggcgttaatgcatcttgtcagctgaagagaaggcctgcttggcgggttaccatgaacatttctctttggtgttcctgctgattctgcaggagggaatcaggcaa

SEQ ID NO: 24316 - DNA, 122 bp, Homo sapiens
  misc_feature (61)..(62): /note="This region represents a CpG dinucleotide"
  misc_feature (61)..(61): /note="Nucleotide may be methylated to form 5-methylcytosine"
ctaagagccaagaggcgctggggacctgtaagtacttgctaatgagggcttgttagtgtacgttcttcctgaatactgatggaagccccaagaataatggggctgtcctggaaggaccctac

SEQ ID NO: 24317 - DNA, 122 bp, Homo sapiens
  misc_feature (61)..(62): /note="This region represents a CpG dinucleotide"
  misc_feature (61)..(61): /note="Nucleotide may be methylated to form 5-methylcytosine"
gttcaggcatctcgtccaaatgtggctccccaagcccccaggctcagttactccatcagacgcacccaacctgagtcccattttccaaaggcatcggaaaatccacagaggctcccagatcc

SEQ ID NO: 24318 - DNA, 122 bp, Homo sapiens
  misc_feature (61)..(62): /note="This region represents a CpG dinucleotide"
  misc_feature (61)..(61): /note="Nucleotide may be methylated to form 5-methylcytosine"
caagacaaggtcctgactccgaaagcagctacagcttactctgtggatgaggcagagatccgtgcaaatttcaacaaacaggaacaagaaatgggaatatgactaataaccaaatggcacat

SEQ ID NO: 24319 - DNA, 122 bp, Homo sapiens
  misc_feature (61)..(62): /note="This region represents a CpG dinucleotide"
  misc_feature (61)..(61): /note="Nucleotide may be methylated to form 5-methylcytosine"
ttggatggctgccacaaggcagttttatgagccttgcaggctactttccaaaccggaaaacgcttaaatatgaaaggcacattttcaaaggtttctgctggttctcaagggaagtcctcttc

SEQ ID NO: 24320 - DNA, 122 bp, Homo sapiens
  misc_feature (61)..(62): /note="This region represents a CpG dinucleotide"
  misc_feature (61)..(61): /note="Nucleotide may be methylated to form 5-methylcytosine"
gttgggagccaagcacagggacctcagatgccgacaagtgtgccagtgtggtagggctggcgggcggaggccatgcatcacagctcaggtcattggaatgtctcctctttaaaggggctgct

SEQ ID NO: 24321 - DNA, 122 bp, Homo sapiens
  misc_feature (61)..(62): /note="This region represents a CpG dinucleotide"
  misc_feature (61)..(61): /note="Nucleotide may be methylated to form 5-methylcytosine"
ttaaaataagaaagacctgtttgcccagcagtgagtaagcggctatccagcaggagtcagcggaggtgaggttggtaaggttggctagtgctggatcgtcatgggattggatgctggcttga

SEQ ID NO: 24322 - DNA, 122 bp, Homo sapiens
  misc_feature (61)..(62): /note="This region represents a CpG dinucleotide"
  misc_feature (61)..(61): /note="Nucleotide may be methylated to form 5-methylcytosine"
tagctacaaggcctgggctacagcagagacagcccagcagggagggagagggtggtggagcggagggcaggagagagagtgcttctctgtgctgcctcctctgcttggctcagaaagtgtgc

SEQ ID NO: 24323 - DNA, 122 bp, Homo sapiens
  misc_feature (61)..(62): /note="This region represents a CpG dinucleotide"
  misc_feature (61)..(61): /note="Nucleotide may be methylated to form 5-methylcytosine"
cggactctgaaaactctggtatgattttgtgactcagaaaaccaactcacaggccgggtgcggtggctcacgcctgtaatcccagcactttgggaggccgaggcggcggattacgaggttag

SEQ ID NO: 24324 - DNA, 122 bp, Homo sapiens
  misc_feature (61)..(62): /note="This region represents a CpG dinucleotide"
  misc_feature (61)..(61): /note="Nucleotide may be methylated to form 5-methylcytosine"
catggggctggcctaaagtgaagaccccaggctcagcatggaagtgatacagctaggatgcggactcatgcctggccacactgagtcattctgaagcatgatgctgccttcctgatttggaa

SEQ ID NO: 24325 - DNA, 122 bp, Homo sapiens
  misc_feature (61)..(62): /note="This region represents a CpG dinucleotide"
  misc_feature (61)..(61): /note="Nucleotide may be methylated to form 5-methylcytosine"
acaatctccaattgccagaagagatagctattgtacatgtcccagggcaccaaaacgactcgcctttcacaagtccaggaaataatcttgcagatcaaattgtgataccctatcttgtttta

SEQ ID NO: 24326 - DNA, 122 bp, Homo sapiens
  misc_feature (61)..(62): /note="This region represents a CpG dinucleotide"
  misc_feature (61)..(61): /note="Nucleotide may be methylated to form 5-methylcytosine"
tcaagatgctttttgctttctttactcagacacacatccttgtgtgattttttgtgtgtgcgctttctaatatttttttcttgcccagtggctattactattttgccttgttcaaaattcat

SEQ ID NO: 24327 - DNA, 122 bp, Homo sapiens
  misc_feature (61)..(62): /note="This region represents a CpG dinucleotide"
  misc_feature (61)..(61): /note="Nucleotide may be methylated to form 5-methylcytosine"
ctttccagaagccatatagtaagtgctatgagccataccactgcacctgtgagaccagctcgtaattaaaattgtgagagtgtgtgacctccctgctaggcactggaaatgttgtaggtgca

SEQ ID NO: 24328 - DNA, 122 bp, Homo sapiens
  misc_feature (61)..(62): /note="This region represents a CpG dinucleotide"
  misc_feature (61)..(61): /note="Nucleotide may be methylated to form 5-methylcytosine"
tcagttagtttcagctgccagtaggcggctccaaaaaatattaaaaaaaaaaaaaaaacccgcaagtttgatgatctaacttctaaatctgtgtacagttgtggctccttcacagtttcagg

SEQ ID NO: 24329 - DNA, 122 bp, Homo sapiens
  misc_feature (61)..(62): /note="This region represents a CpG dinucleotide"
  misc_feature (61)..(61): /note="Nucleotide may be methylated to form 5-methylcytosine"
cctactgacacagggctagggccattcaggaagcagtcatttcagggataggcccactgccgcgcctgcctgctcatgtccacaagcagctgcccagctgatcaatcaccacaatttggggt

SEQ ID NO: 24330 - DNA, 122 bp, Homo sapiens
  misc_feature (61)..(62): /note="This region represents a CpG dinucleotide"
  misc_feature (61)..(61): /note="Nucleotide may be methylated to form 5-methylcytosine"
tgatgctatggggcaaataataagggtaggataaatcaaaaatataattccccactcctgcgagacataattaaccattttaaataataagctttctacatgtgtgaaagaactagagaact

SEQ ID NO: 24331 - DNA, 122 bp, Homo sapiens
  misc_feature (61)..(62): /note="This region represents a CpG dinucleotide"
  misc_feature (61)..(61): /note="Nucleotide may be methylated to form 5-methylcytosine"
ggtcccataagattataacagaactgaaaaattcctatcacctagcgacattgtagtaaacgtaaagttgtagagcaacaccactcgtgtttgtggctacataggtgtaaacctactgtgct

SEQ ID NO: 24332 - DNA, 122 bp, Homo sapiens
  misc_feature (61)..(62): /note="This region represents a CpG dinucleotide"
  misc_feature (61)..(61): /note="Nucleotide may be methylated to form 5-methylcytosine"
cccccgtaagatgacaataacagccccaccccaggatgtcaagatgaaggcagatagtaacgaggctgctagaagagttcagactccacaatgtgcctgcatgttccattatctaaatcagt

SEQ ID NO: 24333 - DNA, 122 bp, Homo sapiens
  misc_feature (61)..(62): /note="This region represents a CpG dinucleotide"
  misc_feature (61)..(61): /note="Nucleotide may be methylated to form 5-methylcytosine"
aagaaaaagaaatagaaacttgggagattatgaggattaagctgctacattaagtgtgaacgtcagtccaatacttgatgagtctgcagacacatgaatgggaaccaaagcagccttggggt

SEQ ID NO: 24334 - DNA, 122 bp, Homo sapiens
  misc_feature (61)..(62): /note="This region represents a CpG dinucleotide"
  misc_feature (61)..(61): /note="Nucleotide may be methylated to form 5-methylcytosine"
agtttactggcttagcagggtggggtgttgccaccactatcttggagtcccatgagaattcgcttcaggagattcctttgcagagaatgggctactgggctctgaaggttgactacaggcta

SEQ ID NO: 24335 - DNA, 122 bp, Homo sapiens
  misc_feature (61)..(62): /note="This region represents a CpG dinucleotide"
  misc_feature (61)..(61): /note="Nucleotide may be methylated to form 5-methylcytosine"
ggtttctccatgttggtcagcctggtgttgaactcccgacttaaggtgatccgcttgcttcggccccccaaagtgctgggattacaggcttgagccaccgcgcccagctaagattaatcttt

SEQ ID NO: 24336 - DNA, 122 bp, Homo sapiens
  misc_feature (61)..(62): /note="This region represents a CpG dinucleotide"
  misc_feature (61)..(61): /note="Nucleotide may be methylated to form 5-methylcytosine"
tttcgcctaaaggctttgatatttttcaaataaaaatttaaaagatccagtaccttctcccgaagcttcttcatagagtagtggatttttagaaaacacaaaggcctaggggtggggcgaga

SEQ ID NO: 24337 - DNA, 122 bp, Homo sapiens
  misc_feature (61)..(62): /note="This region represents a CpG dinucleotide"
  misc_feature (61)..(61): /note="Nucleotide may be methylated to form 5-methylcytosine"
cctggaatcagtgcattcatatcatccctcttaagtggctctggtggttatattattgtgcggtgctatgagtcactgtctattaatataacttacccagggcttgtaacaggacagctggc

SEQ ID NO: 24338 - DNA, 122 bp, Homo sapiens
  misc_feature (61)..(62): /note="This region represents a CpG dinucleotide"
  misc_feature (61)..(61): /note="Nucleotide may be methylated to form 5-methylcytosine"
gggaggggccgtccacagtgtcagcgagacaagggcacatacaaaatgcggggtaattgccgcttctctaattcgcggccctttgtgcggcggcgcggagccggcggccgcgctcccaagcc

SEQ ID NO: 24339 - DNA, 122 bp, Homo sapiens
  misc_feature (61)..(62): /note="This region represents a CpG dinucleotide"
  misc_feature (61)..(61): /note="Nucleotide may be methylated to form 5-methylcytosine"
tgaggccatgtttaagctcaggggtgacctggctgggaagagggtataaacccatgaacacgagtcagttgacagactaggattgccactttgtaaagaagagcccaagacctgatcagaat

SEQ ID NO: 24340 - DNA, 122 bp, Homo sapiens
  misc_feature (61)..(62): /note="This region represents a CpG dinucleotide"
  misc_feature (61)..(61): /note="Nucleotide may be methylated to form 5-methylcytosine"
ttattgatctcatttggaaatgattcacatttttatactcacttagcttcatgaaggttacgaatcagtagagtaccaagagaaggtattcaaaatgaccactttttgatatcttctccggg

SEQ ID NO: 24341 - DNA, 122 bp, Homo sapiens
  misc_feature (61)..(62): /note="This region represents a CpG dinucleotide"
  misc_feature (61)..(61): /note="Nucleotide may be methylated to form 5-methylcytosine"
agaggatgcctcctgaccaaatagtgttgtggtattttctgcactttaaagtcgttgtgccgggggaatgttctcttccgaaatccctcagcaggtcagaagggctcacacaacacagagag

SEQ ID NO: 24342 - DNA, 122 bp, Homo sapiens
  misc_feature (61)..(62): /note="This region represents a CpG dinucleotide"
  misc_feature (61)..(61): /note="Nucleotide may be methylated to form 5-methylcytosine"
aataacagtctatatgaatgctttactattttaacacacatgggccacagctgctgagcacgtttgtttacgtagctatgaaaccttctgtaaacaccactatctcaaaatcgcccatgtgt

SEQ ID NO: 24343 - DNA, 122 bp, Homo sapiens
  misc_feature (61)..(62): /note="This region represents a CpG dinucleotide"
  misc_feature (61)..(61): /note="Nucleotide may be methylated to form 5-methylcytosine"
gctggtgtgagtaagtggaaagccattttagagaagccagaattgggttgccatctgtcacgcatgggctttgctccttacacatattggtgaataaaatgtttaacaggctgtagccggaa

SEQ ID NO: 24344 - DNA, 122 bp, Homo sapiens
  misc_feature (61)..(62): /note="This region represents a CpG dinucleotide"
  misc_feature (61)..(61): /note="Nucleotide may be methylated to form 5-methylcytosine"
tgactgtccttcagcacgtacacggttcagcctcagctacagaccatcactgctacagagcgacaacttcccattcggacttaggcagcgtttcagttcattacagagaagtggttttctca

SEQ ID NO: 24345 - DNA, 122 bp, Homo sapiens
  misc_feature (61)..(62): /note="This region represents a CpG dinucleotide"
  misc_feature (61)..(61): /note="Nucleotide may be methylated to form 5-methylcytosine"
gccttaatgatgaataatgtaggggcccacaaacagcacacgaattagcaggaaaccaggcgtgggtgtgcctaactacagtgcaacttggtaaataccatgccactgtatcgttacagcag

SEQ ID NO: 24346 - DNA, 122 bp, Homo sapiens
  misc_feature (61)..(62): /note="This region represents a CpG dinucleotide"
  misc_feature (61)..(61): /note="Nucleotide may be methylated to form 5-methylcytosine"
aagcaacatttaaaggactaggttagtttctgacactaagtgacctccatttgcatacttcgccatgttgtgtgttttatggttgccttaagatgactatgttttttggtagcattgctgtg

SEQ ID NO: 24347 - DNA, 122 bp, Homo sapiens
  misc_feature (61)..(62): /note="This region represents a CpG dinucleotide"
  misc_feature (61)..(61): /note="Nucleotide may be methylated to form 5-methylcytosine"
taatcctcagaaccaccccatgaagtaaacaaggtgagaacagatatactcattttatgacggggcacactgaggcaccaaggagctcattgttctgccccatgtctccaacaatcacactc

SEQ ID NO: 24348 - DNA, 122 bp, Homo sapiens
  misc_feature (61)..(62): /note="This region represents a CpG dinucleotide"
  misc_feature (61)..(61): /note="Nucleotide may be methylated to form 5-methylcytosine"
atcttatatcatatgaattttttaatgagaaaatcaactaaagctgacagcaaaagttagcggggaaaaggatgtaattttgagatgtcaccatgcctccacagtgccaaaggccgaggggc

SEQ ID NO: 24349 - DNA, 122 bp, Homo sapiens
  misc_feature (61)..(62): /note="This region represents a CpG dinucleotide"
  misc_feature (61)..(61): /note="Nucleotide may be methylated to form 5-methylcytosine"
atgctgcacgtgcacgtggaccgtgacccccaggagctggtcacgccggtcaagtttgcccgtctctggactgagatccccacagccatcaccatcaaggagtgagaggggtggaggcaggg

SEQ ID NO: 24350 - DNA, 122 bp, Homo sapiens
  misc_feature (61)..(62): /note="This region represents a CpG dinucleotide"
  misc_feature (61)..(61): /note="Nucleotide may be methylated to form 5-methylcytosine"
ttttcactggttgaacagacacgtgagttcacacatgacaccatctattgggatgagtcacgttgcttgctcaacaactttaaggcctaggatcagtgacagaactccaggagcagcggggt

SEQ ID NO: 24351 - DNA, 122 bp, Homo sapiens
  misc_feature (61)..(62): /note="This region represents a CpG dinucleotide"
  misc_feature (61)..(61): /note="Nucleotide may be methylated to form 5-methylcytosine"
agagtccaagatttcacatcatacacccccattgacccattgtagtttgcacttccctggcgaccaggaaattttcattatatctggctgaagtccctctgattgctatgcaaacctatttc

SEQ ID NO: 24352 - DNA, 122 bp, Homo sapiens
  misc_feature (61)..(62): /note="This region represents a CpG dinucleotide"
  misc_feature (61)..(61): /note="Nucleotide may be methylated to form 5-methylcytosine"
ggtagagtggaaaggttacctaggtttcagtgcttgaaaagatttcagaaagcagtagtacgtctggttagactagaatcagtcctctcctgggggcagtggaatataatattttctgactg

SEQ ID NO: 24353 - DNA, 122 bp, Homo sapiens
  misc_feature (61)..(62): /note="This region represents a CpG dinucleotide"
  misc_feature (61)..(61): /note="Nucleotide may be methylated to form 5-methylcytosine"
tttatcatttggagactaactctcagtcctatatgcattccactttgtggattttactcacggtacacacacagcaggagctctctagggagacttgtagaaatgactattcaccctatgat

SEQ ID NO: 24354 - DNA, 122 bp, Homo sapiens
  misc_feature (61)..(62): /note="This region represents a CpG dinucleotide"
  misc_feature (61)..(61): /note="Nucleotide may be methylated to form 5-methylcytosine"
atatggtacttaatccctagaagcaggtatacactgggcgggatagcccagtggttaagacggtccctgctgtgcagcttactgttgtgtgtaacctcagacaagttacctcatccctctgg

SEQ ID NO: 24355 - DNA, 122 bp, Homo sapiens
  misc_feature (61)..(62): /note="This region represents a CpG dinucleotide"
  misc_feature (61)..(61): /note="Nucleotide may be methylated to form 5-methylcytosine"
cagggccgggcaagtacatcagcagcacagtcatcgactgagccaggcactgggctaagccgtccacatgcattctactcatcagcaatgtggccttggggaaggtatacacccctgtgcct

SEQ ID NO: 24356 - DNA, 122 bp, Homo sapiens
  misc_feature (61)..(62): /note="This region represents a CpG dinucleotide"
  misc_feature (61)..(61): /note="Nucleotide may be methylated to form 5-methylcytosine"
gcacaagcagttcaggcaccaaattgtgctgattggatttaaaggtatctaccacagggacgatcacaaatacaccagaaagattctgccagcactttcaggtgatatttcccaaggtgata

SEQ ID NO: 24357 - DNA, 122 bp, Homo sapiens
  misc_feature (61)..(62): /note="This region represents a CpG dinucleotide"
  misc_feature (61)..(61): /note="Nucleotide may be methylated to form 5-methylcytosine"
tgtctatttcatggattctttctatttttcaagtagagttggatcactagagggcaatatcggccaagagaaagaagaattcttcaccaccgtttctaggactggtgaaggtaagacatctg

SEQ ID NO: 24358 - DNA, 122 bp, Homo sapiens
  misc_feature (61)..(62): /note="This region represents a CpG dinucleotide"
  misc_feature (61)..(61): /note="Nucleotide may be methylated to form 5-methylcytosine"
atctccttgaaaattgaggccttttcgatagtttcgggtcaggtaaaaatggcctcctggcgtaagcttttcaaggttttttggaggctttttgtaaattgtgataggaactttggaccttg

SEQ ID NO: 24359 - DNA, 122 bp, Homo sapiens
  misc_feature (61)..(62): /note="This region represents a CpG dinucleotide"
  misc_feature (61)..(61): /note="Nucleotide may be methylated to form 5-methylcytosine"
ttgagctctgagctgtgcttcctcttcctgagctggcctctagtaagtgctcaataaacacgatggggagagggacactgaagcctaatctgcctgggtggaggatgaagcaagtaaaagga

SEQ ID NO: 24360 - DNA, 122 bp, Homo sapiens
  misc_feature (61)..(62): /note="This region represents a CpG dinucleotide"
  misc_feature (61)..(61): /note="Nucleotide may be methylated to form 5-methylcytosine"
cagacttgaaagcagaaactgaaagcagagaaaaccactacatttaagatggtggcttaacgatagcagtggaaaagaaacagcatgcattgggcatagatatcacattcttccaagaactt

SEQ ID NO: 24361 - DNA, 122 bp, Homo sapiens
  misc_feature (61)..(62): /note="This region represents a CpG dinucleotide"
  misc_feature (61)..(61): /note="Nucleotide may be methylated to form 5-methylcytosine"
ctggcacagagactccagccttgccggcctctcgcctcccaagcacagaagcctccagaacgctgcttcaaggacaagcccaggagacctgccatgctcatgcgtgtctttggaaacaggtt

SEQ ID NO: 24362 - DNA, 122 bp, Homo sapiens
  misc_feature (61)..(62): /note="This region represents a CpG dinucleotide"
  misc_feature (61)..(61): /note="Nucleotide may be methylated to form 5-methylcytosine"
ggtagttcctcaagttacagagtttccacatgacccagcaattatgctcccaggtagatacgcaaaagaatgaaaaacagtgactcagacagatatttgtaggacattgctcaatgcagcgt

SEQ ID NO: 24363 - DNA, 122 bp, Homo sapiens
  misc_feature (61)..(62): /note="This region represents a CpG dinucleotide"
  misc_feature (61)..(61): /note="Nucleotide may be methylated to form 5-methylcytosine"
aaaagtattttgagactgtaaaatagcccattccttattaaacttgctatttatttattccgagattatctcagctttggctagtgaaagcctttcaagatagtttctgttttcttttgact

SEQ ID NO: 24364 - DNA, 122 bp, Homo sapiens
  misc_feature (61)..(62): /note="This region represents a CpG dinucleotide"
  misc_feature (61)..(61): /note="Nucleotide may be methylated to form 5-methylcytosine"
tctccttgttggccagactgagaaccttcagcagcaagagctgctgttgctgtgggtcagcgatggaagtgatccggacgcggaccgagagcatggtggtggcgcgggagaagtttttgaaa

SEQ ID NO: 24365 - DNA, 122 bp, Homo sapiens
  misc_feature (61)..(62): /note="This region represents a CpG dinucleotide"
  misc_feature (61)..(61): /note="Nucleotide may be methylated to form 5-methylcytosine"
acttgttctaccctggtttgaggagtctgactgctctgagcctctgctcccctcccaagacgaggagatcagcactcggagacccgggagaggctgggctggctccctggccaggaggactc

SEQ ID NO: 24366 - DNA, 122 bp, Homo sapiens
  misc_feature (61)..(62): /note="This region represents a CpG dinucleotide"
  misc_feature (61)..(61): /note="Nucleotide may be methylated to form 5-methylcytosine"
cctctctttcggtttctgcacagtgagcctggagctcaaggaacttgctcctggggtgcccggcttgctgccctaccaacataggttcaagccctcccctccccctgcgcgccaggcctgtg

SEQ ID NO: 24367 - DNA, 122 bp, Homo sapiens
  misc_feature (61)..(62): /note="This region represents a CpG dinucleotide"
  misc_feature (61)..(61): /note="Nucleotide may be methylated to form 5-methylcytosine"
tcagaggggagacagagctcatagatttagcccaggcaagtcactaaacaaagacaaacccgccggacttggtggctcatgcctgtaatcccagcactttgggaggctgaggtgggtggatc

SEQ ID NO: 24368 - DNA, 122 bp, Homo sapiens
  misc_feature (61)..(62): /note="This region represents a CpG dinucleotide"
  misc_feature (61)..(61): /note="Nucleotide may be methylated to form 5-methylcytosine"
aaaaagtgaaactatcttcatcttcctgcaacatgaccttctataggtatacctaaggtgcgctgcacacttttcttgatgttatcactacgtacacaagtcaccaaccaggaagagttctc

SEQ ID NO: 24369 - DNA, 122 bp, Homo sapiens
  misc_feature (61)..(62): /note="This region represents a CpG dinucleotide"
  misc_feature (61)..(61): /note="Nucleotide may be methylated to form 5-methylcytosine"
atcaataaggaaagggaggcactgaacagtgctataaactaactggacctaacagacacacgcagagtactctagtctctgagagcagagcatatatttttctcaagtacacatgggacatt

SEQ ID NO: 24370 - DNA, 122 bp, Homo sapiens
  misc_feature (61)..(62): /note="This region represents a CpG dinucleotide"
  misc_feature (61)..(61): /note="Nucleotide may be methylated to form 5-methylcytosine"
gcttccggagtgtggaaccaccattcaaagctgttaaagacatggaagtgccgtggatgacgccatagctcagctctgccagcaacttaaccaaggttccagttccggaatatccagccttt

SEQ ID NO: 24371 - DNA, 122 bp, Homo sapiens
  misc_feature (61)..(62): /note="This region represents a CpG dinucleotide"
  misc_feature (61)..(61): /note="Nucleotide may be methylated to form 5-methylcytosine"
taggcactccccgaagtgcttttgcaggtattaactcatttaacctttgtaaggatcttacgaagtacatactgttactacatttgattggtaaatgaggaaactaaggtacaataatcttt

SEQ ID NO: 24372 - DNA, 122 bp, Homo sapiens
  misc_feature (61)..(62): /note="This region represents a CpG dinucleotide"
  misc_feature (61)..(61): /note="Nucleotide may be methylated to form 5-methylcytosine"
cagatgctggtaactttggcaattatcattttgtttggtgaacagtagtaaaacagtgtgcggtaaaagtgtttagagagagaggataaataaattgaacagttttgcaatgcaaagtggtt

SEQ ID NO: 24373 - DNA, 122 bp, Homo sapiens
  misc_feature (61)..(62): /note="This region represents a CpG dinucleotide"
  misc_feature (61)..(61): /note="Nucleotide may be methylated to form 5-methylcytosine"
atcaggcagaatatccagggactcagagcttatctcccggaaactggccaagggccattgcggaaatcaggcctttcttgggaatgtatagggtttgagcaactcagatctcctgagctaac

SEQ ID NO: 24374 - DNA, 122 bp, Homo sapiens
  misc_feature (61)..(62): /note="This region represents a CpG dinucleotide"
  misc_feature (61)..(61): /note="Nucleotide may be methylated to form 5-methylcytosine"
ttgcgatggagtggttggggataaaacacacacacacacacacacacacacacacacacacgacactaggtatgtgtgctcttgagagaagcccattctgatctaactgccaactcctcagg

SEQ ID NO: 24375 - DNA, 122 bp, Homo sapiens
  misc_feature (61)..(62): /note="This region represents a CpG dinucleotide"
  misc_feature (61)..(61): /note="Nucleotide may be methylated to form 5-methylcytosine"
cacacaaagtaatgcttctattcagagctggagtacttttcttcctggaagtaaagtagacgtttcacaggggagacactaaaagaggccttatgatcccaggaacactgataccaggaaga

SEQ ID NO: 24376 - DNA, 122 bp, Homo sapiens
  misc_feature (61)..(62): /note="This region represents a CpG dinucleotide"
  misc_feature (61)..(61): /note="Nucleotide may be methylated to form 5-methylcytosine"
agaaaaaggaaacagtgaactgttaccatggcgagctgtgcaagatgctgagatctgagacgaaattgaaatactgagatattgataagggctgaggcgatactgagatctggagagagaag

SEQ ID NO: 24377 - DNA, 122 bp, Homo sapiens
  misc_feature (61)..(62): /note="This region represents a CpG dinucleotide"
  misc_feature (61)..(61): /note="Nucleotide may be methylated to form 5-methylcytosine"
acgtgtgtatctatgtgcttaattctttgaatggcctatcattacattatgtgactctgccgtaatgtgtccaatcatcttctcattttggacattttgttgtttctagttttctgcaattc

SEQ ID NO: 24378 - DNA, 122 bp, Homo sapiens
  misc_feature (61)..(62): /note="This region represents a CpG dinucleotide"
  misc_feature (61)..(61): /note="Nucleotide may be methylated to form 5-methylcytosine"
ctcatcactcattccagaaactgagcaggttcttgattcattcagcttcttagcttctcacgttcggtcactctccaaatcccatttattcttcctcccagctcaatctctgttgaatctat

SEQ ID NO: 24379 - DNA, 122 bp, Homo sapiens
  misc_feature (61)..(62): /note="This region represents a CpG dinucleotide"
  misc_feature (61)..(61): /note="Nucleotide may be methylated to form 5-methylcytosine"
gacaaaggtggaacaagtttagcaacaaaataaaagcgtatataatccaaaatataaatacgcatggggccatattgacataactgaacaaataaatgaggaagaacagacaaatttccctc

SEQ ID NO: 24380 - DNA, 122 bp, Homo sapiens
  misc_feature (61)..(62): /note="This region represents a CpG dinucleotide"
  misc_feature (61)..(61): /note="Nucleotide may be methylated to form 5-methylcytosine"
tagctcttgtgctcttagacaacataaatgcagacagtcatggaagggctgcccagcccacgctaccacctctgagcccttacataagctctgtcaggtttaccttcctgctctggattgat

SEQ ID NO: 24381 - DNA, 122 bp, Homo sapiens
  misc_feature (61)..(62): /note="This region represents a CpG dinucleotide"
  misc_feature (61)..(61): /note="Nucleotide may be methylated to form 5-methylcytosine"
gccctgggcactgtggagcagagaaaagccatttccacaatactctaaattcttcacccacgaaatctgtaagtctaggtatttggttagtgtgtatgcctctaaatcagagttagattgtt

SEQ ID NO: 24382 - DNA, 122 bp, Homo sapiens
  misc_feature (61)..(62): /note="This region represents a CpG dinucleotide"
  misc_feature (61)..(61): /note="Nucleotide may be methylated to form 5-methylcytosine"
gaggaagtgcgggctcccggcatgcctcgcatccggccccagccctgagccacctcaggccgcccctggccagccctgaggcccgcccctcagcccaccactgtcagctggagcaggccggc

SEQ ID NO: 24383 - DNA, 122 bp, Homo sapiens
  misc_feature (61)..(62): /note="This region represents a CpG dinucleotide"
  misc_feature (61)..(61): /note="Nucleotide may be methylated to form 5-methylcytosine"
caaagaattttccaaaaatgttctcattgcatattttgcttatgtatatacactcttcagcgtgcatgccctccactcccatgccttagccacacctcatccctagtggacaggaacccatt

SEQ ID NO: 24384 - DNA, 122 bp, Homo sapiens
  misc_feature (61)..(62): /note="This region represents a CpG dinucleotide"
  misc_feature (61)..(61): /note="Nucleotide may be methylated to form 5-methylcytosine"
taagtattgtcttatgcaatactcattggcttattatctaaggctgcattcacacttcaacggcagaggtgagtcacttgtggccagctgtgaaaacgcaatttacttactatctggccctt

SEQ ID NO: 24385 - DNA, 122 bp, Homo sapiens
  misc_feature (61)..(62): /note="This region represents a CpG dinucleotide"
  misc_feature (61)..(61): /note="Nucleotide may be methylated to form 5-methylcytosine"
ggaggttgaggcaggagaatcacttgaacacaggaggcagaggttgcggtaagtggagatcgctccattgtttatttgcatgtggacataagaaagggttaacatggccgacaactatttca

SEQ ID NO: 24386 - DNA, 122 bp, Homo sapiens
  misc_feature (61)..(62): /note="This region represents a CpG dinucleotide"
  misc_feature (61)..(61): /note="Nucleotide may be methylated to form 5-methylcytosine"
aaatgagttcctgggctttaacgtcaaacagtttgagtttgcaaatattttcaccttacacgtgaatcaacacaggggatatgtgagaagacaaagctgttcacactgtcagcaagcttcca

SEQ ID NO: 24387 - DNA, 122 bp, Homo sapiens
  misc_feature (61)..(62): /note="This region represents a CpG dinucleotide"
  misc_feature (61)..(61): /note="Nucleotide may be methylated to form 5-methylcytosine"
tgcccgtggtcacagcacttgtcagtggcagagctgggattccaacctggccagggcttccggccagcaagccctgagctttttcctccctacagacacacacaggaagttactgcaaacct

SEQ ID NO: 24388 - DNA, 122 bp, Homo sapiens
  misc_feature (61)..(62): /note="This region represents a CpG dinucleotide"
  misc_feature (61)..(61): /note="Nucleotide may be methylated to form 5-methylcytosine"
caatgagcaataatgttgctcatagtaacattatctgtgatggccaaaaggcgtacagaacgcacatgtgcattaacagataaatggatgaacaaaatgtgctatattgtatacctacaata

SEQ ID NO: 24389 - DNA, 122 bp, Homo sapiens
  misc_feature (61)..(62): /note="This region represents a CpG dinucleotide"
  misc_feature (61)..(61): /note="Nucleotide may be methylated to form 5-methylcytosine"
tgagggaggacactagaatggccaggctcccgtggctggattccagcaagcctttcatagcgtcctctgccatgcaggcctggagggtgaagcagttcaggttgcaggctttgtgactcctc

SEQ ID NO: 24390 - DNA, 122 bp, Homo sapiens
  misc_feature (61)..(62): /note="This region represents a CpG dinucleotide"
  misc_feature (61)..(61): /note="Nucleotide may be methylated to form 5-methylcytosine"
tcggacttctcttattgcagtcacggccggcgggcggtgatggtggcagggagacagtcacgccctagccccaagccagctccccgcagcgaggaggcgcccccagatcctaggcccacccg

SEQ ID NO: 24391 - DNA, 122 bp, Homo sapiens
  misc_feature (61)..(62): /note="This region represents a CpG dinucleotide"
  misc_feature (61)..(61): /note="Nucleotide may be methylated to form 5-methylcytosine"
gggtacacttttactggcaccagagcagcccaggatggcagaaatgatgacaatgaagaccgtcaattaaattaacatttactgaatatcttccactgtgtcagggagcactcagagtagat

SEQ ID NO: 24392 - DNA, 122 bp, Homo sapiens
  misc_feature (61)..(62): /note="This region represents a CpG dinucleotide"
  misc_feature (61)..(61): /note="Nucleotide may be methylated to form 5-methylcytosine"
ttttaaattcacctggttttgtgcaaggattacaaatgatgatttagcagaattatcatacggaaggatgagaagagaaactagagagaacgaaatccaaccctggttacacccctgccatt

SEQ ID NO: 24393 - DNA, 122 bp, Homo sapiens
  misc_feature (61)..(62): /note="This region represents a CpG dinucleotide"
  misc_feature (61)..(61): /note="Nucleotide may be methylated to form 5-methylcytosine"
tcttaaaaaagaaggaaatccagtcataagctacagcatgtatgaatgttaagtgaaatacgccagtcacaaaagacaaatactgtgtaggtatccaaagtaatcaaactcatagaaacaga

SEQ ID NO: 24394 - DNA, 122 bp, Homo sapiens
  misc_feature (61)..(62): /note="This region represents a CpG dinucleotide"
  misc_feature (61)..(61): /note="Nucleotide may be methylated to form 5-methylcytosine"
cagagtgtgctaacctgcacatcttgaaggactaacatcttccaggtttgctgttgtttacgtgctgcctgtgaaaagcagagttttgagtgttttcagcaccaaagtcccctcaaagcaaa

SEQ ID NO: 24395 - DNA, 122 bp, Homo sapiens
  misc_feature (61)..(62): /note="This region represents a CpG dinucleotide"
  misc_feature (61)..(61): /note="Nucleotide may be methylated to form 5-methylcytosine"
cccacctcaggcatgtcaataaaccacaggcatgaaatcttcctcatagttcttggagggcgtgtttggctggacacatccatgctccatagttaaacctttagagaactacccaaaaatcc

SEQ ID NO: 24396 - DNA, 122 bp, Homo sapiens
  misc_feature (61)..(62): /note="This region represents a CpG dinucleotide"
  misc_feature (61)..(61): /note="Nucleotide may be methylated to form 5-methylcytosine"
gaaagttgttcacacttggtttcacctctcatcacatgctgagtattgaagccttactggcggtagctgacacagaaatgggtctgctatcagaatatgttcttagtaaatataaagtttga

SEQ ID NO: 24397 - DNA, 122 bp, Homo sapiens
  misc_feature (61)..(62): /note="This region represents a CpG dinucleotide"
  misc_feature (61)..(61): /note="Nucleotide may be methylated to form 5-methylcytosine"
ttcctgttcacatgtggctttctggttggtaaaggttttattaaatcagaggaatttgaacggaaagataatcatagtagcccaccaccaattgcctagggaaagggagagtgttgagtaga

SEQ ID NO: 24398 - DNA, 122 bp, Homo sapiens
  misc_feature (61)..(62): /note="This region represents a CpG dinucleotide"
  misc_feature (61)..(61): /note="Nucleotide may be methylated to form 5-methylcytosine"
ccacaagagctccagccccttcccataagctgcagcacagttggtctggccgtctgcattcgctgaaatgtaggcatgaaatgagaaacaccagcacatgtgagtcaccacttctcgggaat

SEQ ID NO: 24399 - DNA, 122 bp, Homo sapiens
  misc_feature (61)..(62): /note="This region represents a CpG dinucleotide"
  misc_feature (61)..(61): /note="Nucleotide may be methylated to form 5-methylcytosine"
gaccatcttctggttcattgtgagggtctcattaattcccatgaactcattcaaccaacacgtgcttgttgggctggtacagaagatgaacaaaggcagaggacacagattcaccatgattt

SEQ ID NO: 24400 - DNA, 122 bp, Homo sapiens
  misc_feature (61)..(62): /note="This region represents a CpG dinucleotide"
  misc_feature (61)..(61): /note="Nucleotide may be methylated to form 5-methylcytosine"
cgcttggcaccgggaactgtcctggatgtgagtgtcacagggctgaggccaccagggagtcgctctcacccaaaactcaaatttcctcctaagttgatctttgactcagcatcgagcctggt

SEQ ID NO: 24401 - DNA, 122 bp, Homo sapiens
  misc_feature (61)..(62): /note="This region represents a CpG dinucleotide"
  misc_feature (61)..(61): /note="Nucleotide may be methylated to form 5-methylcytosine"
ctctgtgaggcttccatttaatgtaaatcttgaaggaaaaacagacatctgtctggggcacgcaaacacacaagacaaggggttgatgtgagccagtgggtgccgcactattatgattcctt

SEQ ID NO: 24402 - DNA, 122 bp, Homo sapiens
  misc_feature (61)..(62): /note="This region represents a CpG dinucleotide"
  misc_feature (61)..(61): /note="Nucleotide may be methylated to form 5-methylcytosine"
gtccacgacaacgctgccttcccagtgtgggtggaagccaggaggcgattactcaagctccgaaactgaatgtgctgagcccacagtcccgcaggaggaagatgaccgggtaggtggggaag

SEQ ID NO: 24403 - DNA, 122 bp, Homo sapiens
  misc_feature (61)..(62): /note="This region represents a CpG dinucleotide"
  misc_feature (61)..(61): /note="Nucleotide may be methylated to form 5-methylcytosine"
catccagggcagggccaactaaacttccctctgaatgccactgcgctttatcaagacatccgtcatcatacaaaaatttaacttacttacagacacttctcacctacttggagtggtttttc

SEQ ID NO: 24404 - DNA, 122 bp, Homo sapiens
  misc_feature (61)..(62): /note="This region represents a CpG dinucleotide"
  misc_feature (61)..(61): /note="Nucleotide may be methylated to form 5-methylcytosine"
catggacacagagagtggaataacaactttggaaattcagaagggtggcagggtgggaggcgggtaaaggatgaagaattacttaatggctacaatatacgctatttgggtgatgggtacac

SEQ ID NO: 24405 - DNA, 122 bp, Homo sapiens
  misc_feature (61)..(62): /note="This region represents a CpG dinucleotide"
  misc_feature (61)..(61): /note="Nucleotide may be methylated to form 5-methylcytosine"
ccatcaaaaggtcagtgcatgaactcattgtgtatattcatacaatggagtaccatgatacgccaataaaaatgagtcaactacagataagcagaatatagaagaatctcacaaacacaacg

SEQ ID NO: 24406 - DNA, 122 bp, Homo sapiens
  misc_feature (61)..(62): /note="This region represents a CpG dinucleotide"
  misc_feature (61)..(61): /note="Nucleotide may be methylated to form 5-methylcytosine"
gcatataccaaaactcttgtaacactgggtatagtgactcacctctgtaatctagcacttcgtgaggacaaagtgggaggatggcttgaggccaggaggttgagaacagcctgggcaacata

SEQ ID NO: 24407 - DNA, 122 bp, Homo sapiens
  misc_feature (61)..(62): /note="This region represents a CpG dinucleotide"
  misc_feature (61)..(61): /note="Nucleotide may be methylated to form 5-methylcytosine"
aagcactggcttcatggaagacaatgtttccacggacaagggttgggggaaagatggtttcggaatgaaatttccaccacaggtcagatattagactctcataaggaacatgcaacctagat

SEQ ID NO: 24408 - DNA, 122 bp, Homo sapiens
  misc_feature (61)..(62): /note="This region represents a CpG dinucleotide"
  misc_feature (61)..(61): /note="Nucleotide may be methylated to form 5-methylcytosine"
gaactggactctgggcagtagccagttgggcatgcaggatgagtcactgtgtttccaaggcgagaagcagtagcagatgaacacaggtcacagacatcaggacctgtaccagcaagatcagc

SEQ ID NO: 24409 - DNA, 122 bp, Homo sapiens
  misc_feature (61)..(62): /note="This region represents a CpG dinucleotide"
  misc_feature (61)..(61): /note="Nucleotide may be methylated to form 5-methylcytosine"
aacaccatggaggctcttggcagtgtttccccacatccctctccccttcactgaccctggcgcttccccatgtgtcccctgtatggtgtggcatgggccctgtctctagggatttgtgagtc

SEQ ID NO: 24410 - DNA, 122 bp, Homo sapiens
  misc_feature (61)..(62): /note="This region represents a CpG dinucleotide"
  misc_feature (61)..(61): /note="Nucleotide may be methylated to form 5-methylcytosine"
agccaagccctctaccatttgccatggcaagagtataccaaattctaaacctgttgctcacgtatgccaccaactataaatgtcagcctcctctttcctagtcttcctgtccactcagcacc

SEQ ID NO: 24411 - DNA, 122 bp, Homo sapiens
  misc_feature (61)..(62): /note="This region represents a CpG dinucleotide"
  misc_feature (61)..(61): /note="Nucleotide may be methylated to form 5-methylcytosine"
attcctttccacattgaatcaagaaagatcagagtggccaataaaatacagcagaagtgacggtgggtcagagactaagctataaatgccactgatcatcctgtttactcatttctgtatca

SEQ ID NO: 24412 - DNA, 122 bp, Homo sapiens
  misc_feature (61)..(62): /note="This region represents a CpG dinucleotide"
  misc_feature (61)..(61): /note="Nucleotide may be methylated to form 5-methylcytosine"
accaccacttacctcctgctctcgttgaaatattacaacccgaccccccttgtcccctgtcgctagtaattctcccgtgtggttgaattctaccgtagagataatgtcagctgcaaagaaga

SEQ ID NO: 24413 - DNA, 122 bp, Homo sapiens
  misc_feature (61)..(62): /note="This region represents a CpG dinucleotide"
  misc_feature (61)..(61): /note="Nucleotide may be methylated to form 5-methylcytosine"
cagcaacaggaggaagcacagcattctgtgctcagactagtgtggcaggcctgcagaatgcgtgtgggcccttgttcctgtgcttggctgagggcttcctgagagcagttgctccatctctg

SEQ ID NO: 24414 - DNA, 122 bp, Homo sapiens
  misc_feature (61)..(62): /note="This region represents a CpG dinucleotide"
  misc_feature (61)..(61): /note="Nucleotide may be methylated to form 5-methylcytosine"
gctgcactccagcctgggcaagagtgagactccatctaaaaaaaaaaaaaaaaaaaatcacgaaagccattgcacataaattcaaaaaagtggaaaagcacacaaaaggtatacagttaaaa

SEQ ID NO: 24415 - DNA, 122 bp, Homo sapiens
  misc_feature (61)..(62): /note="This region represents a CpG dinucleotide"
  misc_feature (61)..(61): /note="Nucleotide may be methylated to form 5-methylcytosine"
gtcccaagccctctccctggcaggctgaccaaggcctatgagaacaccatgtgtgtgcatcgtcccttttcagccttgaggcaggtgcagcagtacctccttctcacagctgagcacctgga

SEQ ID NO: 24416 - DNA, 122 bp, Homo sapiens
  misc_feature (61)..(62): /note="This region represents a CpG dinucleotide"
  misc_feature (61)..(61): /note="Nucleotide may be methylated to form 5-methylcytosine"
ccaggtgatttgcacacaggtaaagcctgaaaagcctgcctcagaggatgtgaaagctctcgtttagttcagtgtggtcctcgggaaagctcttctgctcaccgcaagttggctggtttcca

SEQ ID NO: 24417 - DNA, 122 bp, Homo sapiens
  misc_feature (61)..(62): /note="This region represents a CpG dinucleotide"
  misc_feature (61)..(61): /note="Nucleotide may be methylated to form 5-methylcytosine"
atcctgggtactaatgctgaaaatgcatatattccaaggaatggtagccatcatatcccccgtatgagacagaacgattgaaccagatcctacacagcttgcctcaaatccctgggcaagac

SEQ ID NO: 24418 - DNA, 122 bp, Homo sapiens
  misc_feature (61)..(62): /note="This region represents a CpG dinucleotide"
  misc_feature (61)..(61): /note="Nucleotide may be methylated to form 5-methylcytosine"
ctcttcgtggacaaaggcgttcgattttccagaggaggccaagaatgggagccgtgggtccgtagcttggtgtagggcgtgagttccagtggtgagcagtgagacacgctgagctgggctgg

SEQ ID NO: 24419 - DNA, 122 bp, Homo sapiens
  misc_feature (61)..(62): /note="This region represents a CpG dinucleotide"
  misc_feature (61)..(61): /note="Nucleotide may be methylated to form 5-methylcytosine"
aggagaagtcggccccctgcactgctgtggatgaggtggaggactggagatttgctcatgcgtggagctgacgccaaagcctgtgtgttcaccattgggccacccagcctgttgggcaggac

SEQ ID NO: 24420 - DNA, 122 bp, Homo sapiens
  misc_feature (61)..(62): /note="This region represents a CpG dinucleotide"
  misc_feature (61)..(61): /note="Nucleotide may be methylated to form 5-methylcytosine"
agtatcttattttctgttgttggttagttaggctaagtaaattacagccaactcactctacgaaatattaggttgctgttaataatgcaaaatataaagatcatcacaacacagaaaaaaat

SEQ ID NO: 24421 - DNA, 122 bp, Homo sapiens
  misc_feature (61)..(62): /note="This region represents a CpG dinucleotide"
  misc_feature (61)..(61): /note="Nucleotide may be methylated to form 5-methylcytosine"
gggaggagtttgctgggtatgacttggatgagccagagtaaacccaagggagtagtctctcggtccataatctgttgtctgggaactcaggggtgggctggggacggtgggtacaaaggtca

SEQ ID NO: 24422 - DNA, 122 bp, Homo sapiens
  misc_feature (61)..(62): /note="This region represents a CpG dinucleotide"
  misc_feature (61)..(61): /note="Nucleotide may be methylated to form 5-methylcytosine"
cccacaaatcaccaccaagtatcagtaactttgacctttgagcacatattcttagcaggccgcgctcttagggatcccatgtattgactcatttaattatgacgtcaaaacacttactaccc

SEQ ID NO: 24423 - DNA, 122 bp, Homo sapiens
  misc_feature (61)..(62): /note="This region represents a CpG dinucleotide"
  misc_feature (61)..(61): /note="Nucleotide may be methylated to form 5-methylcytosine"
agtccctctctcagattccaatcacctcctgctgatttccatctaagtttcttggtgaatcgttatctgtgggcccaggtacatcaaggccgtaagctgaaaaattcctctgagcagaacca

SEQ ID NO: 24424 - DNA, 122 bp, Homo sapiens
  misc_feature (61)..(62): /note="This region represents a CpG dinucleotide"
  misc_feature (61)..(61): /note="Nucleotide may be methylated to form 5-methylcytosine"
agcgagctccctggagacccatgcagcgggtcaggtgccagctgccgccaggtctgtgcgcggggccgggccaccagcgtgcggcttcccgctctggagagtttatggcccctgtcctcgga

SEQ ID NO: 24425 - DNA, 122 bp, Homo sapiens
  misc_feature (61)..(62): /note="This region represents a CpG dinucleotide"
  misc_feature (61)..(61): /note="Nucleotide may be methylated to form 5-methylcytosine"
catatgtccctgagttgtttttcagaaacccagacccacatcaaatggacccactggagccgggtgtggtggctcatgcctgtaatcccaacactttgggaggctgaggcaggaggattgct

SEQ ID NO: 24426 - DNA, 122 bp, Homo sapiens
  misc_feature (61)..(62): /note="This region represents a CpG dinucleotide"
  misc_feature (61)..(61): /note="Nucleotide may be methylated to form 5-methylcytosine"
ctccaatttggctacctcccaaactaaagatcttcgtgtccaagcattgtcaccaggaagcgtattgctgaataaatgcattcttgagttaatgaatgggaggcagaaagccctgatgcagt

SEQ ID NO: 24427 - DNA, 122 bp, Homo sapiens
  misc_feature (61)..(62): /note="This region represents a CpG dinucleotide"
  misc_feature (61)..(61): /note="Nucleotide may be methylated to form 5-methylcytosine"
atcccagcctggggctggctctcacttttcagggcactgtgcaagacaggtgtaagttttcgtttctgttttgagcagacatggggttaaaaagcagaaagggatcatctatagaaactgaa

SEQ ID NO: 24428 - DNA, 122 bp, Homo sapiens
  misc_feature (61)..(62): /note="This region represents a CpG dinucleotide"
  misc_feature (61)..(61): /note="Nucleotide may be methylated to form 5-methylcytosine"
cactcagtttaaggaaacacagagcagagaggagaacattaaacaacaccctgaggaagccgtgagccaggctcagaacataagccactccacaggagaaatgacttcattttttcaacaaa

SEQ ID NO: 24429 - DNA, 122 bp, Homo sapiens
  misc_feature (61)..(62): /note="This region represents a CpG dinucleotide"
  misc_feature (61)..(61): /note="Nucleotide may be methylated to form 5-methylcytosine"
atactttggttagctttggggttctgagtgcctggatggctttttccattcattctcaggcggctcgcttctacattgtgagccagggcctggggatggatttttttttttttttttgagat

SEQ ID NO: 24430 - DNA, 122 bp, Homo sapiens
  misc_feature (61)..(62): /note="This region represents a CpG dinucleotide"
  misc_feature (61)..(61): /note="Nucleotide may be methylated to form 5-methylcytosine"
ttccagaaatgccatagaagctgagagatgcatagtcttaatgagctagaaacattctttcgcctggccatttagatccctgaccactcagaagtgccctgaattcaaatcatttaggtctg

SEQ ID NO: 24431 - DNA, 122 bp, Homo sapiens
  misc_feature (61)..(62): /note="This region represents a CpG dinucleotide"
  misc_feature (61)..(61): /note="Nucleotide may be methylated to form 5-methylcytosine"
tgtgatgaatgttgggcagggatgtttggtctggtgcctagggaggcaagaactccaagacgccaggatgagaattgcgacatctgcttgttgaactaatggaccttttcttacttaaaaaa

SEQ ID NO: 24432 - DNA, 122 bp, Homo sapiens
  misc_feature (61)..(62): /note="This region represents a CpG dinucleotide"
  misc_feature (61)..(61): /note="Nucleotide may be methylated to form 5-methylcytosine"
catataggttggtttcttcctctcaaattctctgatctctcagctgactataggctttagcggtgccctgtgtgatgacagcagggttttggatatagtaagtaggagccacttttggtatc

SEQ ID NO: 24433 - DNA, 122 bp, Homo sapiens
  misc_feature (61)..(62): /note="This region represents a CpG dinucleotide"
  misc_feature (61)..(61): /note="Nucleotide may be methylated to form 5-methylcytosine"
gtatcttgtctgtgctctagccccgagaaggtcttcttccctaatgttaccaaaatgcagcgacacctttaaagcgagagagagaaagacagaacaagtaagaggggacaggaaagacagag

SEQ ID NO: 24434 - DNA, 122 bp, Homo sapiens
  misc_feature (61)..(62): /note="This region represents a CpG dinucleotide"
  misc_feature (61)..(61): /note="Nucleotide may be methylated to form 5-methylcytosine"
cactggctttttttttttttttaattcgttccgctgcttggtttggggtctcttcccttccgcagcttggtcttgttgctgctcttgagtgtgacaaactgcaagtcgagagctcttgtcca

SEQ ID NO: 24435 - DNA, 122 bp, Homo sapiens
  misc_feature (61)..(62): /note="This region represents a CpG dinucleotide"
  misc_feature (61)..(61): /note="Nucleotide may be methylated to form 5-methylcytosine"
ttataaagggatggaacaggaaggtttctagctggtcaggctacccaaagaagaaagaaacgtgtttacccagcatttgccccatctcgaactgtgtgctgctggctggacaagaggcagga

SEQ ID NO: 24436 - DNA, 122 bp, Homo sapiens
  misc_feature (61)..(62): /note="This region represents a CpG dinucleotide"
  misc_feature (61)..(61): /note="Nucleotide may be methylated to form 5-methylcytosine"
acagtgggttccagaatcacctggtgactcagtctgagggaatgggctctaaacaggccacgctccacgtcagctcaaaaaaattaagagacagaaaatgggaaccattagttcaccctcac

SEQ ID NO: 24437 - DNA, 122 bp, Homo sapiens
  misc_feature (61)..(62): /note="This region represents a CpG dinucleotide"
  misc_feature (61)..(61): /note="Nucleotide may be methylated to form 5-methylcytosine"
tcttggtttaatcctgtttctgtggcagatttcagcttactgctcacactctgggtctcacggctcctatgacatcagtttcagtactgtaggtctgatcttcagttgggggtggtgctgga

SEQ ID NO: 24438 - DNA, 122 bp, Homo sapiens
  misc_feature (61)..(62): /note="This region represents a CpG dinucleotide"
  misc_feature (61)..(61): /note="Nucleotide may be methylated to form 5-methylcytosine"
accggaaggggcaggcagaggggtcacccagtgcgatgtcaagagtggggccggctggtccgggaatatgctggggagtggagcacgtttatattcgacgtaggaaaaacaatggagaggaa

SEQ ID NO: 24439 - DNA, 122 bp, Homo sapiens
  misc_feature (61)..(62): /note="This region represents a CpG dinucleotide"
  misc_feature (61)..(61): /note="Nucleotide may be methylated to form 5-methylcytosine"
accctggctccgagagagcggggacagtgacagtgcttcagacagtcacccactgaggaacgggcaccacccgtcgcccgagacctgtgtcgccacccactgaggaacgggcaccacccgtc

SEQ ID NO: 24440 - DNA, 122 bp, Homo sapiens
  misc_feature (61)..(62): /note="This region represents a CpG dinucleotide"
  misc_feature (61)..(61): /note="Nucleotide may be methylated to form 5-methylcytosine"
aactatatctttccaatgcatctagcagttagcatttctactaagtgatccaacttaatacgagcaataatgggacaatcaggcagcagatgcctcctggtctgacacactgagaaggacag

SEQ ID NO: 24441 - DNA, 122 bp, Homo sapiens
  misc_feature (61)..(62): /note="This region represents a CpG dinucleotide"
  misc_feature (61)..(61): /note="Nucleotide may be methylated to form 5-methylcytosine"
aagcagaaaaactttccaaacccttgctccaatatgtaattctccgtggctgatttctagcgaggaaccaaatttaaggtggatagaagaagcatattcattgaaggattggtctgtgttcc

SEQ ID NO: 24442 - DNA, 122 bp, Homo sapiens
  misc_feature (61)..(62): /note="This region represents a CpG dinucleotide"
  misc_feature (61)..(61): /note="Nucleotide may be methylated to form 5-methylcytosine"
ttacctagaagtggcagaaaagaactggaagggaagattgctatggattactgtatactccgctaagcattctctgtgaatgaactgcattcttgagtgaatcaccactggcattattgaat

SEQ ID NO: 24443 - DNA, 122 bp, Homo sapiens
  misc_feature (61)..(62): /note="This region represents a CpG dinucleotide"
  misc_feature (61)..(61): /note="Nucleotide may be methylated to form 5-methylcytosine"
tgacctcatgatacgcccgcctcggcctcccaaagtgctgggattacaggtgtgagccaccgcgcccagcaattttttgtattattagtaggcatggggtttcgacatgttggccagactgg

SEQ ID NO: 24444 - DNA, 122 bp, Homo sapiens
  misc_feature (61)..(62): /note="This region represents a CpG dinucleotide"
  misc_feature (61)..(61): /note="Nucleotide may be methylated to form 5-methylcytosine"
acaaagccattttgaggacagaaggaagaatttcctttcctagaaagttggtttgaatcacgagattagtactaaagaggagatgagtaattgaccacttctgtacgattagaaatgagtaa

SEQ ID NO: 24445 - DNA, 122 bp, Homo sapiens
  misc_feature (61)..(62): /note="This region represents a CpG dinucleotide"
  misc_feature (61)..(61): /note="Nucleotide may be methylated to form 5-methylcytosine"
aggtagctgacactgtgataagagcatcctgtgaactacccaaataaggaggaaaacgaacgcagctgagcatgggatgccatataaaaatcacttaaaccagtcgccactccttgtttcct

SEQ ID NO: 24446 - DNA, 122 bp, Homo sapiens
  misc_feature (61)..(62): /note="This region represents a CpG dinucleotide"
  misc_feature (61)..(61): /note="Nucleotide may be methylated to form 5-methylcytosine"
tgtgcaatatgataagcagataatgtgacgacagtccggacatgtcccaattcagaaatccgttttcttgcctgggactttccgtaatactggtgaattgtattttctgaaccggtattcag

SEQ ID NO: 24447 - DNA, 122 bp, Homo sapiens
  misc_feature (61)..(62): /note="This region represents a CpG dinucleotide"
  misc_feature (61)..(61): /note="Nucleotide may be methylated to form 5-methylcytosine"
taagccatagccaggcacccggggccttgactgaccctgcccccagctgggcctgagagccgccacttcctcggcccggccctgactatgaatgcagagaggcagcccttcctccagaggct

SEQ ID NO: 24448 - DNA, 122 bp, Homo sapiens
  misc_feature (61)..(62): /note="This region represents a CpG dinucleotide"
  misc_feature (61)..(61): /note="Nucleotide may be methylated to form 5-methylcytosine"
aaactctctgatgaggcacgtgtggatgggatggcagggctgagaaggccggctcccccacggggtgtgcacaacctacctccccagctgtttctgctaccggctggggccttcaactccac

SEQ ID NO: 24449 - DNA, 122 bp, Homo sapiens
  misc_feature (61)..(62): /note="This region represents a CpG dinucleotide"
  misc_feature (61)..(61): /note="Nucleotide may be methylated to form 5-methylcytosine"
agcaagacagtggatctgagctccatccccgcagtctgcactggccccttcatggcacagcgacagctttgccatcagccggcaagcatgcggggtgtggacgacacagccggagagagcag

SEQ ID NO: 24450 - DNA, 122 bp, Homo sapiens
  misc_feature (61)..(62): /note="This region represents a CpG dinucleotide"
  misc_feature (61)..(61): /note="Nucleotide may be methylated to form 5-methylcytosine"
tggttaagaaagaaaccctataaccagagttgaattcccttggtgaacgctacccaaaggcgtgcttcagggaggtgtaaccacagctatgtctgatatttaaactagccacgcattgctaa

SEQ ID NO: 24451 - DNA, 122 bp, Homo sapiens
  misc_feature (61)..(62): /note="This region represents a CpG dinucleotide"
  misc_feature (61)..(61): /note="Nucleotide may be methylated to form 5-methylcytosine"
cttattatgcgccaggtactgtgctgaggaattatgtgtaatcacttcatcttcatgctgcgcctacatggtgaacgtgcagtaggcatgatgtgtaccattttacagatgagtaaacaggc

SEQ ID NO: 24452 - DNA, 122 bp, Homo sapiens
  misc_feature (61)..(62): /note="This region represents a CpG dinucleotide"
  misc_feature (61)..(61): /note="Nucleotide may be methylated to form 5-methylcytosine"
ttcctcttaaatgactcacactctcatgtgggcagataagcagagagggcacacacagtgcgtagtgtatgacacagcacacacgatgctctaggagtacatagcagcagataaacacagtt

SEQ ID NO: 24453 - DNA, 122 bp, Homo sapiens
  misc_feature (61)..(62): /note="This region represents a CpG dinucleotide"
  misc_feature (61)..(61): /note="Nucleotide may be methylated to form 5-methylcytosine"
gaaacaaattctccagccctgagatgactgcagcctgggctgacagcttgacagcagcctcgtgagaggccctgagccagaattacccagctaaacccctcccagactgctgacccatagaa

SEQ ID NO: 24454 - DNA, 122 bp, Homo sapiens
  misc_feature (61)..(62): /note="This region represents a CpG dinucleotide"
  misc_feature (61)..(61): /note="Nucleotide may be methylated to form 5-methylcytosine"
tgcaaacatacctatcttctagatcagaggtcaggaaactacatctctgtgtcacaaacacgactgccgtgtgtttttgtaaataaagtttaggataaccacagtcattcattgcatattgt

SEQ ID NO: 24455 - DNA, 122 bp, Homo sapiens
  misc_feature (61)..(62): /note="This region represents a CpG dinucleotide"
  misc_feature (61)..(61): /note="Nucleotide may be methylated to form 5-methylcytosine"
gtgatctgagttatatgaaccatctacacgcccaaaatgtgggttcagggtaccccagtgcgtttcctcctgctggtccctgcatgctctgagctgtgggctggcttggggttggagcctta

SEQ ID NO: 24456 - DNA, 122 bp, Homo sapiens
  misc_feature (61)..(62): /note="This region represents a CpG dinucleotide"
  misc_feature (61)..(61): /note="Nucleotide may be methylated to form 5-methylcytosine"
tattgcagacaggacacttccttccctgtctgttggctcctgcttttgagtaaacaaagacgcagtcatttggactgatggtatctgacaaaagcagatgctggaggagaagacggttaaga

SEQ ID NO: 24457 - DNA, 122 bp, Homo sapiens
  misc_feature (61)..(62): /note="This region represents a CpG dinucleotide"
  misc_feature (61)..(61): /note="Nucleotide may be methylated to form 5-methylcytosine"
actactgaggccttcgaagaaaccacacggctgccttgggccccaaaagctgcggaaaagcgcagtattcagttaagcaaataactacttacactgtttattttggttacgattccttaagt

SEQ ID NO: 24458 - DNA, 122 bp, Homo sapiens
  misc_feature (61)..(62): /note="This region represents a CpG dinucleotide"
  misc_feature (61)..(61): /note="Nucleotide may be methylated to form 5-methylcytosine"
ttagcatgtgttccagacctgtcaaatcctaacaaagaaaaagatgataaatctgttatgcgcattgtaagtaatgactgtggttttaaaaataaaaattaagtgaaagcttccaaaaatgg

SEQ ID NO: 24459 - DNA, 122 bp, Homo sapiens
  misc_feature (61)..(62): /note="This region represents a CpG dinucleotide"
  misc_feature (61)..(61): /note="Nucleotide may be methylated to form 5-methylcytosine"
attgccctcttattttcatacttcttttctgtgatgcaatcaagtcttcatttttgatgccgtttttaataagccatctgtagtttatagacgaggcattctcagatgcatattaggaggtc

SEQ ID NO: 24460 - DNA, 122 bp, Homo sapiens
  misc_feature (61)..(62): /note="This region represents a CpG dinucleotide"
  misc_feature (61)..(61): /note="Nucleotide may be methylated to form 5-methylcytosine"
actgcggggtctctggagaggcttgctgcatgctgtggccaagtcagcagtgcactggggcgggcagggctggctggccttgggtgagaggggacacctggatggcaaactgatggaggctg

SEQ ID NO: 24461 - DNA, 122 bp, Homo sapiens
  misc_feature (61)..(62): /note="This region represents a CpG dinucleotide"
  misc_feature (61)..(61): /note="Nucleotide may be methylated to form 5-methylcytosine"
tggcaggattttcgctaacaccagtagagcttgcctctatgactggagtttggtagtactcgctgccacatagagtaaacttgagaagaatgtttgcacagccaggtcaagtgttacaaatc

SEQ ID NO: 24462 - DNA, 122 bp, Homo sapiens
  misc_feature (61)..(62): /note="This region represents a CpG dinucleotide"
  misc_feature (61)..(61): /note="Nucleotide may be methylated to form 5-methylcytosine"
gtgaccacttcttactcactcagagctttgtcatttcctgtttaaaatctttcagttggccgggtgcggtggctcacgcctgtaatcccagcactttgggaggctgaggcgggcggatcacg

SEQ ID NO: 24463 - DNA, 122 bp, Homo sapiens
  misc_feature (61)..(62): /note="This region represents a CpG dinucleotide"
  misc_feature (61)..(61): /note="Nucleotide may be methylated to form 5-methylcytosine"
tcagctttgtaggacataagaccgcccacactattcaactctgccactgcagccaggaagcggtcacacaccacacaggaatgaatgggcagcgctgtaattcattcaaacactgaacttgg

SEQ ID NO: 24464 - DNA, 122 bp, Homo sapiens
  misc_feature (61)..(62): /note="This region represents a CpG dinucleotide"
  misc_feature (61)..(61): /note="Nucleotide may be methylated to form 5-methylcytosine"
gaatcatcaaggttttcccatcttgactgtgttgaggtttatcccagcttgacttcccttcgtgtcttagcacatcctggtccactttccctgctatcagttgttaagtatttagagaatgc

SEQ ID NO: 24465 - DNA, 122 bp, Homo sapiens
  misc_feature (61)..(62): /note="This region represents a CpG dinucleotide"
  misc_feature (61)..(61): /note="Nucleotide may be methylated to form 5-methylcytosine"
ggggggcagtttcagcagattcctccaggtagcctaatgtgggagcagaagtgtaaaacccggcagccccatccaagtgccttctgcccaggaaaacaagtgcctgggctccagccgcaggc

SEQ ID NO: 24466 - DNA, 122 bp, Homo sapiens
  misc_feature (61)..(62): /note="This region represents a CpG dinucleotide"
  misc_feature (61)..(61): /note="Nucleotide may be methylated to form 5-methylcytosine"
cttcggcaaaggtatctggttccagctataagtcgctgtgggagaccaccaaaatggaggcgaaattggcctcggggcgcctcctggagaagcggtaggagtcggtggtggtgaaatggccc

SEQ ID NO: 24467 - DNA, 122 bp, Homo sapiens
  misc_feature (61)..(62): /note="This region represents a CpG dinucleotide"
  misc_feature (61)..(61): /note="Nucleotide may be methylated to form 5-methylcytosine"
atccctgaaactctccacatgccatattaacctgagctgcccacctgcaggttgctttcacgtgagagggaaatagattgctatcttctgtaagatactgtattggggataaggaggttcta

SEQ ID NO: 24468 - DNA, 122 bp, Homo sapiens
  misc_feature (61)..(62): /note="This region represents a CpG dinucleotide"
  misc_feature (61)..(61): /note="Nucleotide may be methylated to form 5-methylcytosine"
aaagagaatgggatcagggcccaggtctctctgccttagacaaacgcagagccctgtgcgcgaggaagaacactgcttcctgagacagaaaggatcgttagctagtgacacgggggttaatg

SEQ ID NO: 24469 - DNA, 122 bp, Homo sapiens
  misc_feature (61)..(62): /note="This region represents a CpG dinucleotide"
  misc_feature (61)..(61): /note="Nucleotide may be methylated to form 5-methylcytosine"
tttagtagagacaggtttcaccatgttacccaggttggtctcctgacctcacgatctgcccgtctcggcctcccaaagtgctgggattacaggcctgagccactgtgcccggcccaacaaga

SEQ ID NO: 24470 - DNA, 122 bp, Homo sapiens
  misc_feature (61)..(62): /note="This region represents a CpG dinucleotide"
  misc_feature (61)..(61): /note="Nucleotide may be methylated to form 5-methylcytosine"
ttgcagtgatgatgcacgtcctcctgggccagtccacggggtgcgcctgtacacactgggcgtgtgcggatacaagggcatgaatgcaggttggtcgcttgtcttcacacaggcatacgtgg

SEQ ID NO: 24471 - DNA, 122 bp, Homo sapiens
  misc_feature (61)..(62): /note="This region represents a CpG dinucleotide"
  misc_feature (61)..(61): /note="Nucleotide may be methylated to form 5-methylcytosine"
gggatactgtgacctttgtctagagttgatgggggtgtgatttgtgaaataaaacaggaccgtactgcttggaagaaggaaacggaagctgacataatggggattaattagttgattgctgt

SEQ ID NO: 24472 - DNA, 122 bp, Homo sapiens
  misc_feature (61)..(62): /note="This region represents a CpG dinucleotide"
  misc_feature (61)..(61): /note="Nucleotide may be methylated to form 5-methylcytosine"
ggtgagaagcccttctatacaggttccctccccgagctaagcaaaagcgttgaggtgacacgtgtcacctgttcctagaggatctgcactgaaggcggggcaagcaggacctgctgtacaca

SEQ ID NO: 24473 - DNA, 122 bp, Homo sapiens
  misc_feature (61)..(62): /note="This region represents a CpG dinucleotide"
  misc_feature (61)..(61): /note="Nucleotide may be methylated to form 5-methylcytosine"
ataaacatttacactaagcattgtgaggtatacagtgatcctaacacaaggaccacaacacgggaagcttagggactagttacagaaacaaatgtatacacaggaaacagaaaaaatgcaag

SEQ ID NO: 24474 - DNA, 122 bp, Homo sapiens
  misc_feature (61)..(62): /note="This region represents a CpG dinucleotide"
  misc_feature (61)..(61): /note="Nucleotide may be methylated to form 5-methylcytosine"
agaatcaaaggatttagagtacctactaggggtggtaaactaaatgccttcaggagtgcacgcaagtgaaatacttaagaggaagggcgtggcttgtggctaattgaggagtgaatgttctg

SEQ ID NO: 24475 - DNA, 122 bp, Homo sapiens
  misc_feature (61)..(62): /note="This region represents a CpG dinucleotide"
  misc_feature (61)..(61): /note="Nucleotide may be methylated to form 5-methylcytosine"
tgaggaaactaaagctcagaaagattaagagattatccaaggtcacacagcaagtggcagcgccagcaaacacaggtatctgacaaatcttgtgccctttccttggaggttagagaaataag

SEQ ID NO: 24476 - DNA, 122 bp, Homo sapiens
  misc_feature (61)..(62): /note="This region represents a CpG dinucleotide"
  misc_feature (61)..(61): /note="Nucleotide may be methylated to form 5-methylcytosine"
cagcagcagaggcattcattctccaagggtgttctatgagccttattggtcctccctgtacgatcagctgcgaaagaactgccagtgcaatcttgagactagatgaggagttacactgacag

SEQ ID NO: 24477 - DNA, 122 bp, Homo sapiens
  misc_feature (61)..(62): /note="This region represents a CpG dinucleotide"
  misc_feature (61)..(61): /note="Nucleotide may be methylated to form 5-methylcytosine"
cccccatgtggtcttcttgcctagctgggcctcctgtgccccagagcgagaatctgagaacgcaggaattgggttgggactgtgggaaatttgcatgtgccatggtaaccagcaaggggatc

SEQ ID NO: 24478 - DNA, 122 bp, Homo sapiens
  misc_feature (61)..(62): /note="This region represents a CpG dinucleotide"
  misc_feature (61)..(61): /note="Nucleotide may be methylated to form 5-methylcytosine"
gtctgtgtggaatgggcagcaagttataaggaatagtttcattactcctctcggctatatcggaaaccaaattaccaagtgaattctccacccagtaggaaagaagagactgtctgtcttac

SEQ ID NO: 24479 - DNA, 122 bp, Homo sapiens
  misc_feature (61)..(62): /note="This region represents a CpG dinucleotide"
  misc_feature (61)..(61): /note="Nucleotide may be methylated to form 5-methylcytosine"
ggcaggctctaggacagtgggtgtccccccaaatcccctcgtatccagatgaccaggaggcggctccctcccctgcccccagcccccagcctccagggctgtgccaagtgtggggatctggg

SEQ ID NO: 24480 - DNA, 122 bp, Homo sapiens
  misc_feature (61)..(62): /note="This region represents a CpG dinucleotide"
  misc_feature (61)..(61): /note="Nucleotide may be methylated to form 5-methylcytosine"
attactcatttctctaccccacaagtgaaactgatttagtcagtcagtttcagccaaaggcggtgaggaaatccggtcttgttgaactaaactataaatgacaaaaccaataataactcttt

SEQ ID NO: 24481 - DNA, 122 bp, Homo sapiens
  misc_feature (61)..(62): /note="This region represents a CpG dinucleotide"
  misc_feature (61)..(61): /note="Nucleotide may be methylated to form 5-methylcytosine"
aactcacctcaggtcttcgatgaaggtcagggaggtgtgcgttggtctttggtgagcacacggtatattatgagggtacaactgtcgctgccattgtgtctgttcagtgtgcctttgtaaag

SEQ ID NO: 24482 - DNA, 122 bp, Homo sapiens
  misc_feature (61)..(62): /note="This region represents a CpG dinucleotide"
  misc_feature (61)..(61): /note="Nucleotide may be methylated to form 5-methylcytosine"
atcccataacaggtgcttatataaacaggcccatttcctctacaacaggggttcagttaccgtggcaaggagcgagcagcaccgtgcacagcttaggccttctgctgtacatgccatggact

SEQ ID NO: 24483 - DNA, 122 bp, Homo sapiens
  misc_feature (61)..(62): /note="This region represents a CpG dinucleotide"
  misc_feature (61)..(61): /note="Nucleotide may be methylated to form 5-methylcytosine"
gcccggacgatctgacttactttttaaagcatccccctgtctgctgtgtggggaatggcccgtccatcagaattctcttgcggtgattacgtaggtgcagatgtaccgctaacctcactccc

SEQ ID NO: 24484 - DNA, 122 bp, Homo sapiens
  misc_feature (61)..(62): /note="This region represents a CpG dinucleotide"
  misc_feature (61)..(61): /note="Nucleotide may be methylated to form 5-methylcytosine"
attcttagcagacacatcttaacacacaaaaagcaacacgcaacaaaatagatcaagaaacgatgcaaagaaaagacatgctcaggtaagcacagtgcctactgtcctgggaaacacaacag

SEQ ID NO: 24485 - DNA, 122 bp, Homo sapiens
  misc_feature (61)..(62): /note="This region represents a CpG dinucleotide"
  misc_feature (61)..(61): /note="Nucleotide may be methylated to form 5-methylcytosine"
gatttatcctcgtgcaggattttaattgctctttggaggttgagccgtttcttttgactgcgcttcagcccatatcctgctgttaaatgctgggttaataagtaggggagcctttaatgcct

SEQ ID NO: 24486 - DNA, 122 bp, Homo sapiens
  misc_feature (61)..(62): /note="This region represents a CpG dinucleotide"
  misc_feature (61)..(61): /note="Nucleotide may be methylated to form 5-methylcytosine"
ggtttctgccctgctggtgtttatggacatacagatagtaagcagataattacagtgttacgagtgctaccatggcaatcatagcactacaattacagatttgaggataaaggtagacttct

SEQ ID NO: 24487 - DNA, 122 bp, Homo sapiens
  misc_feature (61)..(62): /note="This region represents a CpG dinucleotide"
  misc_feature (61)..(61): /note="Nucleotide may be methylated to form 5-methylcytosine"
aaggctctggggaagaatccttccttggctctttttagcttgtggcggcagtgggcagtccgtggcattccccagcttattgctgcatcactccagtctctgtctcttctgttctctcctct

SEQ ID NO: 24488 - DNA, 122 bp, Homo sapiens
  misc_feature (61)..(62): /note="This region represents a CpG dinucleotide"
  misc_feature (61)..(61): /note="Nucleotide may be methylated to form 5-methylcytosine"
cacactttgagaaccattgctgtaaatagagctctttacctggctcggacagtgtaaaatcgcccttaccattcatccacataattcagctagcttctaccatcctgtcatatagatgacta

SEQ ID NO: 24489 - DNA, 122 bp, Homo sapiens
  misc_feature (61)..(62): /note="This region represents a CpG dinucleotide"
  misc_feature (61)..(61): /note="Nucleotide may be methylated to form 5-methylcytosine"
ttttttgtagagtcagggtctagctaggttgcccaggttgctctcaaattcctgggcttacgcaatcctctgacttcagcctcccttacaggcatgctccaccacacccagtttaaagacat

SEQ ID NO: 24490 - DNA, 122 bp, Homo sapiens
  misc_feature (61)..(62): /note="This region represents a CpG dinucleotide"
  misc_feature (61)..(61): /note="Nucleotide may be methylated to form 5-methylcytosine"
gtacctgaaaataagatgaagacacaaaactcaattgcatttctgtatgtcatcagcaaacgtctagaaatgtaactatgacatcatttatagtagagtcagagaatgtcacatttatgtct

SEQ ID NO: 24491 - DNA, 122 bp, Homo sapiens
  misc_feature (61)..(62): /note="This region represents a CpG dinucleotide"
  misc_feature (61)..(61): /note="Nucleotide may be methylated to form 5-methylcytosine"
tccttccaccctgaggcctggctttgtcctttgtctgcaacttgtcagggtttttccctacgcctgggctccagatggctcttggctcacccagggccttttgctattgtgtgactcacaga

SEQ ID NO: 24492 - DNA, 122 bp, Homo sapiens
  misc_feature (61)..(62): /note="This region represents a CpG dinucleotide"
  misc_feature (61)..(61): /note="Nucleotide may be methylated to form 5-methylcytosine"
aagataagctcaatgattgaatctcattaatatcacccatatcaatcacagtgctggccacgtaatacacattcaataaatgtttatgcaagaaaaggtggaattgttttcaacattttgga

SEQ ID NO: 24493 - DNA, 122 bp, Homo sapiens
  misc_feature (61)..(62): /note="This region represents a CpG dinucleotide"
  misc_feature (61)..(61): /note="Nucleotide may be methylated to form 5-methylcytosine"
gaaacacctgtgtggcagataaggccaactgagtgtgatcagctgaggaaaccttagggacgcatgtcactcaatatttctttttccatgccaggcagggcagaggcacaatctagcctgtg

SEQ ID NO: 24494 - DNA, 122 bp, Homo sapiens
  misc_feature (61)..(62): /note="This region represents a CpG dinucleotide"
  misc_feature (61)..(61): /note="Nucleotide may be methylated to form 5-methylcytosine"
tttttttcctactcgtgtgaaagagaccgtgaaagtgaaaggaaaagaagatggtccaatcgcaagataagcaggccctgtagacaaagcagacagttcagctactaatgcagtgtggaagg

SEQ ID NO: 24495 - DNA, 122 bp, Homo sapiens
  misc_feature (61)..(62): /note="This region represents a CpG dinucleotide"
  misc_feature (61)..(61): /note="Nucleotide may be methylated to form 5-methylcytosine"
gttacatcatcaaatcttataagaccccgtatatgacctcaactactgggcttcaaattacgtataaactcaaggctttgacattctaagacctcaggctatggcagggctacactgccagc

SEQ ID NO: 24496 - DNA, 122 bp, Homo sapiens
  misc_feature (61)..(62): /note="This region represents a CpG dinucleotide"
  misc_feature (61)..(61): /note="Nucleotide may be methylated to form 5-methylcytosine"
cttattacaagagtcactttttgagtcatctacacgtatttccagagtacgctgtctccacgtccatctgaagcatttgtgatgtggcaccccttgaatttgtgtatgttgtcactggaaac

SEQ ID NO: 24497 - DNA, 122 bp, Homo sapiens
  misc_feature (61)..(62): /note="This region represents a CpG dinucleotide"
  misc_feature (61)..(61): /note="Nucleotide may be methylated to form 5-methylcytosine"
gtggcttaatagaaggcaaatgaagagagcattccaagcacagaaggaagtggtaaacagcgtcaaatgttgagagctcaagtcagataagaaatgagaactgtttattagatgtagcaata

SEQ ID NO: 24498 - DNA, 122 bp, Homo sapiens
  misc_feature (61)..(62): /note="This region represents a CpG dinucleotide"
  misc_feature (61)..(61): /note="Nucleotide may be methylated to form 5-methylcytosine"
caacctgggcaacatggcaaagcaaaaaatacaaaaaaattagccaagcatgatggtgtgcgcctgtggttccagctgagttaagaggatcacctaagcccagggagattgaggctgcggtg

SEQ ID NO: 24499 - DNA, 122 bp, Homo sapiens
  misc_feature (61)..(62): /note="This region represents a CpG dinucleotide"
  misc_feature (61)..(61): /note="Nucleotide may be methylated to form 5-methylcytosine"
cagcctggacgctcttgaccaccttcaaagcccaaatgccttcttttcactcatgtgtgacgactatctagttacaaggatacaagcagtccccagagaatttactgggtcttttcagaggc

SEQ ID NO: 24500 - DNA, 122 bp, Homo sapiens
  misc_feature (61)..(62): /note="This region represents a CpG dinucleotide"
  misc_feature (61)..(61): /note="Nucleotide may be methylated to form 5-methylcytosine"
aacaggaagtcttttgtggtgttctcaaaatcacatcacgtaggcagctgctcctacacacggctctgaacaagtcgtctcactggattttgcatgacagtattagttatcataaggacagg

SEQ ID NO: 24501 - DNA, 122 bp, Homo sapiens
  misc_feature (61)..(62): /note="This region represents a CpG dinucleotide"
  misc_feature (61)..(61): /note="Nucleotide may be methylated to form 5-methylcytosine"
agctgaactgtgctttggagttccacagaggatgggctgaagacccagccaaacaaaacacgccaaatagtaaatctgtcagaagctgaagttaacttgggaggtaccaaagatactttctc

SEQ ID NO: 24502 - DNA, 122 bp, Homo sapiens
  misc_feature (61)..(62): /note="This region represents a CpG dinucleotide"
  misc_feature (61)..(61): /note="Nucleotide may be methylated to form 5-methylcytosine"
tccctgctgcacgttaaagctgttctcttttgcactctgaaccggtcttttaccaccacacgtgattccgccacaccccacatcggtcatgtgagaaacgtgggttcactgagctgcgtgtg

SEQ ID NO: 24503 - DNA, 122 bp, Homo sapiens
  misc_feature (61)..(62): /note="This region represents a CpG dinucleotide"
  misc_feature (61)..(61): /note="Nucleotide may be methylated to form 5-methylcytosine"
ttattccccctagtgaccccactgaactctactgaaaaccttgcctcatcctcctgcccacgcctggccaaccccactgggaacagtcatctgcagggacaagcacaaattccaccctctgt

SEQ ID NO: 24504 - DNA, 122 bp, Homo sapiens
  misc_feature (61)..(62): /note="This region represents a CpG dinucleotide"
  misc_feature (61)..(61): /note="Nucleotide may be methylated to form 5-methylcytosine"
caaatcaactccaacagtcattttatcacttggctaaacattcagatacctgaatagtctcgcttgggtcagagaccttctgcttagctgggactgggcaaggcaccttgattgatggtccc

SEQ ID NO: 24505 - DNA, 122 bp, Homo sapiens
  misc_feature (61)..(62): /note="This region represents a CpG dinucleotide"
  misc_feature (61)..(61): /note="Nucleotide may be methylated to form 5-methylcytosine"
ggtacctagacattgtctctgcactctgctggcatattttcccctggaccacgaacccttcgtacctagtaacttgccacctgtgtttataaataccagcaatttgatttacagggtgaatt

SEQ ID NO: 24506 - DNA, 122 bp, Homo sapiens
  misc_feature (61)..(62): /note="This region represents a CpG dinucleotide"
  misc_feature (61)..(61): /note="Nucleotide may be methylated to form 5-methylcytosine"
agtcactgaataactccagtgttttggttacacagctagagagaagacgggtttgaagagcggtgctaagattccagacaggccagcagcaacagtcaagcagccagtaggtagctgccctt

SEQ ID NO: 24507 - DNA, 122 bp, Homo sapiens
  misc_feature (61)..(62): /note="This region represents a CpG dinucleotide"
  misc_feature (61)..(61): /note="Nucleotide may be methylated to form 5-methylcytosine"
ctggccaagaggactggggagaagcctgagattattcatttttaacaaactttctggggacgctgaagctgctgctcctggtaacacctttagtaacaacatagaaaaagagaccccactgg

SEQ ID NO: 24508 - DNA, 122 bp, Homo sapiens
  misc_feature (61)..(62): /note="This region represents a CpG dinucleotide"
  misc_feature (61)..(61): /note="Nucleotide may be methylated to form 5-methylcytosine"
gagcaagcaggagaggccacttccggttttctgcaggtcccagtgagcatgtgaagcctgcgcctgggcaagaggttggatactgggaggaagaagcttttccagtaccctttcccaaagac

SEQ ID NO: 24509 - DNA, 122 bp, Homo sapiens
  misc_feature (61)..(62): /note="This region represents a CpG dinucleotide"
  misc_feature (61)..(61): /note="Nucleotide may be methylated to form 5-methylcytosine"
tttgcctccctcacaaaggcggcggaaggtgatcgaattccggtgatgcgagttgttctccgtctataaatacgcctcgcccgagctgtgcggtaggcattgaggcagccagcgcaggggct

SEQ ID NO: 24510 - DNA, 122 bp, Homo sapiens
  misc_feature (61)..(62): /note="This region represents a CpG dinucleotide"
  misc_feature (61)..(61): /note="Nucleotide may be methylated to form 5-methylcytosine"
cagcaccttcacttcactgatgaggccaacagatcaagatgaataagctttctcagttgccgtgttatttaaacccacaagcaggcccctgccccttcctggaaggctgcggtgtaacacct

SEQ ID NO: 24511 - DNA, 122 bp, Homo sapiens
  misc_feature (61)..(62): /note="This region represents a CpG dinucleotide"
  misc_feature (61)..(61): /note="Nucleotide may be methylated to form 5-methylcytosine"
ctttgtaaattaaatagctattattttttcaaacctgtcaggatatgcttatgcagttgacgcacacgtgatcatagtcatgttcactgtgtctaaaagtgagaaaaatagaatccattttg

SEQ ID NO: 24512 - DNA, 122 bp, Homo sapiens
  misc_feature (61)..(62): /note="This region represents a CpG dinucleotide"
  misc_feature (61)..(61): /note="Nucleotide may be methylated to form 5-methylcytosine"
caatgatcctacttccaaataaggtcacatcctgaagtactcagggttagaactttagcacgtcttttttgggggggacacagttcaacctatggagcaaagcaaagcagggagggtgcatg

SEQ ID NO: 24513 - DNA, 122 bp, Homo sapiens
  misc_feature (61)..(62): /note="This region represents a CpG dinucleotide"
  misc_feature (61)..(61): /note="Nucleotide may be methylated to form 5-methylcytosine"
ggcttatcatgccttcaggaaagagatggaggaggaagcaactgatcaagagataagatacgctgagtatgatatttggaagtccagcaataaaatggccaggcagatcaccttactgtgaa

SEQ ID NO: 24514 - DNA, 122 bp, Homo sapiens
  misc_feature (61)..(62): /note="This region represents a CpG dinucleotide"
  misc_feature (61)..(61): /note="Nucleotide may be methylated to form 5-methylcytosine"
atgagccaccgcgcccagccaaaccagtcttcttaagtcaggggaggcccacactcctgccgtgtggatctcatttcctagcacttgagctctagcacctgtggaaaagagagctcctggaa

SEQ ID NO: 24515 - DNA, 122 bp, Homo sapiens
  misc_feature (61)..(62): /note="This region represents a CpG dinucleotide"
  misc_feature (61)..(61): /note="Nucleotide may be methylated to form 5-methylcytosine"
ttaaactctaccaactatttacttttggggatcccctatgaagactgtgcaaacaatttccgttctatgaatatgcttttctttttttttttttttttccagacagagtcttactatgtcaa

SEQ ID NO: 24516 - DNA, 122 bp, Homo sapiens
  misc_feature (61)..(62): /note="This region represents a CpG dinucleotide"
  misc_feature (61)..(61): /note="Nucleotide may be methylated to form 5-methylcytosine"
gagaaaatgtaaacaaaactcttaacatagcgcctgtcacattaataaatgctcagtaaacgtaagttccctgagggatccaggcacctcacaggcacccaacaacacttgatgaaataatg

SEQ ID NO: 24517 - DNA, 122 bp, Homo sapiens
  misc_feature (61)..(62): /note="This region represents a CpG dinucleotide"
  misc_feature (61)..(61): /note="Nucleotide may be methylated to form 5-methylcytosine"
ggagtcctctgggagaagtggttgaacaggtataagaaaaaacactgaatgtgtaacatgcgataacaagagaaggcctctggtagcactacaatccactgtctctcccaatagggcataac

SEQ ID NO: 24518 - DNA, 122 bp, Homo sapiens
  misc_feature (61)..(62): /note="This region represents a CpG dinucleotide"
  misc_feature (61)..(61): /note="Nucleotide may be methylated to form 5-methylcytosine"
cttacagagggatttttatttagtcaaagattaaaacaaaaacaggtttgtatttgcaatcgaaagagaagcagaagctgcccaagtacagtcatgcgccacagaatgtttcagtcaataac

SEQ ID NO: 24519 - DNA, 122 bp, Homo sapiens
  misc_feature (61)..(62): /note="This region represents a CpG dinucleotide"
  misc_feature (61)..(61): /note="Nucleotide may be methylated to form 5-methylcytosine"
tctttacctagttatcttgactaatccttcagtattatgcatggaggtagaagcctctgccgttgtcctggctgcccagtaggaacaggggttggaatctgttttcagattggtgcccatcc

SEQ ID NO: 24520 - DNA, 122 bp, Homo sapiens
  misc_feature (61)..(62): /note="This region represents a CpG dinucleotide"
  misc_feature (61)..(61): /note="Nucleotide may be methylated to form 5-methylcytosine"
attggattgtttgactgaaaaagctttgtttcctcctcagcttcagcctctttccatgtgcgttcctgaagctatgtgtgggatattagtatagaggaaggggaggtcttctcacctctttc

SEQ ID NO: 24521 - DNA, 122 bp, Homo sapiens
  misc_feature (61)..(62): /note="This region represents a CpG dinucleotide"
  misc_feature (61)..(61): /note="Nucleotide may be methylated to form 5-methylcytosine"
gcagaggctgagggcatctggagtttacttcctatttcttattgtttccctactagctggcgaagcacattgtctgatagaaatgaacttttggtgtatgtgtatctctgagccccatatga

SEQ ID NO: 24522 - DNA, 122 bp, Homo sapiens
  misc_feature (61)..(62): /note="This region represents a CpG dinucleotide"
  misc_feature (61)..(61): /note="Nucleotide may be methylated to form 5-methylcytosine"
ttcaggctggatactttccaggataagtcctacttgggatctgctttcattaatcctttgcgttaagtaatcatatttttgcaagcgtcttgtggtagctctaccaaatgctcctccaaacc

SEQ ID NO: 24523 - DNA, 122 bp, Homo sapiens
  misc_feature (61)..(62): /note="This region represents a CpG dinucleotide"
  misc_feature (61)..(61): /note="Nucleotide may be methylated to form 5-methylcytosine"
attttatgagacttgatataaggaaaatgggtgaagagaaaatgaaaagtaagggaaagtcgaccagtccaaatgacatgctaaagccccaaactcctgcttcaggggcattgctgctttgt

SEQ ID NO: 24524 - DNA, 122 bp, Homo sapiens
  misc_feature (61)..(62): /note="This region represents a CpG dinucleotide"
  misc_feature (61)..(61): /note="Nucleotide may be methylated to form 5-methylcytosine"
ccagccacacacattattctgaagagtgagccattgtctctgatcttatcaggatcacatcgtgggatcatatttatttggtcattctgaatataccctttaagtccaaagtgaaataacta

SEQ ID NO: 24525 - DNA, 122 bp, Homo sapiens
  misc_feature (61)..(62): /note="This region represents a CpG dinucleotide"
  misc_feature (61)..(61): /note="Nucleotide may be methylated to form 5-methylcytosine"
ctactcaggaggctgaggtggggggatggcttaagcccaggggtttgaagctgctgtgcgcgatgactgtggcactgcaattcagtcttggtgacagactgagaccctgtctcaaaaacata

SEQ ID NO: 24526 - DNA, 122 bp, Homo sapiens
  misc_feature (61)..(62): /note="This region represents a CpG dinucleotide"
  misc_feature (61)..(61): /note="Nucleotide may be methylated to form 5-methylcytosine"
aacttagtctttgatgcttttactttgacccccaggactttcctgttggagtgagcaggtcggttttctttgagctgtgcagcagcagtctccttggctaaactcaatccagcacaggacca

SEQ ID NO: 24527 - DNA, 122 bp, Homo sapiens
  misc_feature (61)..(62): /note="This region represents a CpG dinucleotide"
  misc_feature (61)..(61): /note="Nucleotide may be methylated to form 5-methylcytosine"
ccttgaaccttaattcctcagtacacttgagtataaaatacttttgagtcatatttcaaccgacaggctaaataagaggaggttttgatggctgtgagcagttgtgtggttcagagcagaga

SEQ ID NO: 24528 - DNA, 122 bp, Homo sapiens
  misc_feature (61)..(62): /note="This region represents a CpG dinucleotide"
  misc_feature (61)..(61): /note="Nucleotide may be methylated to form 5-methylcytosine"
cagattctctgagtgttcctcatctctgcctcagagaaggaaataagaagtgaggtactacgtagtacactgacacctagctggctgcagcctgcatgctggcccagccctgatctctacaa

SEQ ID NO: 24529 - DNA, 122 bp, Homo sapiens
  misc_feature (61)..(62): /note="This region represents a CpG dinucleotide"
  misc_feature (61)..(61): /note="Nucleotide may be methylated to form 5-methylcytosine"
attctgaacccagaagcccgagagagcttccaaaatgtaagtcagatgatgtcactcctccgtctttgcactcagagccagcctctgcatgctgagcctcatcttcctcacctgccacatgc

SEQ ID NO: 24530 - DNA, 122 bp, Homo sapiens
  misc_feature (61)..(62): /note="This region represents a CpG dinucleotide"
  misc_feature (61)..(61): /note="Nucleotide may be methylated to form 5-methylcytosine"
agaaaacataaaggaaatggtaagccactctgtggctggagatcattaactcttatcccccgtcttgccaaattcaagctgtcatgaagcagtgcctggctccagccttcctctcactgatc

SEQ ID NO: 24531 - DNA, 122 bp, Homo sapiens
  misc_feature (61)..(62): /note="This region represents a CpG dinucleotide"
  misc_feature (61)..(61): /note="Nucleotide may be methylated to form 5-methylcytosine"
gaagcagctgtggatgaggatgatgaggatgaggaagaaggggaggaagtggtggaggaccgagattactactatgacaccttcaaaggagatgactacaatgaggagaatcctactgaacc

SEQ ID NO: 24532 - DNA, 122 bp, Homo sapiens
  misc_feature (61)..(62): /note="This region represents a CpG dinucleotide"
  misc_feature (61)..(61): /note="Nucleotide may be methylated to form 5-methylcytosine"
caatgaaagcactttctagcagctgaaaacacatgactacagggatggatttttttaaaacgcaaggtgagacatccttaaattatgaaccaaaaagctcacccagagttgtcaaagagaga

SEQ ID NO: 24533 - DNA, 122 bp, Homo sapiens
  misc_feature (61)..(62): /note="This region represents a CpG dinucleotide"
  misc_feature (61)..(61): /note="Nucleotide may be methylated to form 5-methylcytosine"
cagatattccggcctcgagaacagctcatgctgagagccaacagcctgaagaaagcaattcgtcagatcatagaacacacagaaaaaggtaactggccttgtgatgaggaggggctttcctc

SEQ ID NO: 24534 - DNA, 122 bp, Homo sapiens
  misc_feature (61)..(62): /note="This region represents a CpG dinucleotide"
  misc_feature (61)..(61): /note="Nucleotide may be methylated to form 5-methylcytosine"
gccctgaactgtcacatcctctatggagtccaggaccagaatgatgaatccaaggtgtcacgccccctggcaccaggacacaggagaatgcagaggctgccaccaaatgcctgcaaggccag

SEQ ID NO: 24535 - DNA, 122 bp, Homo sapiens
  misc_feature (61)..(62): /note="This region represents a CpG dinucleotide"
  misc_feature (61)..(61): /note="Nucleotide may be methylated to form 5-methylcytosine"
gtaactcactggaaaagtgaaaaattctcaccttcacacccacagagataacgggggcggcgtgggggcaagccgaacgcatgcgtgtgctctgtgcactcaccgccgccctctccgcggct

SEQ ID NO: 24536 - DNA, 122 bp, Homo sapiens
  misc_feature (61)..(62): /note="This region represents a CpG dinucleotide"
  misc_feature (61)..(61): /note="Nucleotide may be methylated to form 5-methylcytosine"
caaaaataagcatgtaattattttcctcataaaagaattcactagagaagtgagtcactgcgcaaacatagtagaaagttgtacacccttgttatagaaagatatagcaaacgctgattgca

SEQ ID NO: 24537 - DNA, 122 bp, Homo sapiens
  misc_feature (61)..(62): /note="This region represents a CpG dinucleotide"
  misc_feature (61)..(61): /note="Nucleotide may be methylated to form 5-methylcytosine"
ttaaaatggattagtattctctggttacctaaaatgatgcccaatcagatataacaacaccgttttaaatattaatactaagtataatattctaagcatggtacagtaaatgtaacatacat

SEQ ID NO: 24538 - DNA, 122 bp, Homo sapiens
  misc_feature (61)..(62): /note="This region represents a CpG dinucleotide"
  misc_feature (61)..(61): /note="Nucleotide may be methylated to form 5-methylcytosine"
aatttgtatacagaaagggcttaagaaggatagtgtggttacagggagtgcttattgatgcgcttttatggcactttatatttgagaaaataagtatcctcatcaatgaagtggggattatt

SEQ ID NO: 24539 - DNA, 122 bp, Homo sapiens
  misc_feature (61)..(62): /note="This region represents a CpG dinucleotide"
  misc_feature (61)..(61): /note="Nucleotide may be methylated to form 5-methylcytosine"
ctctcgtggtgcgctggacgaacctgtgctgctgcagctggtggcgggtgtacttctgggcgtgaacttcacgctcactgggagcagcccatgcaccggccccctcggtgcgctcaggtctc

SEQ ID NO: 24540 - DNA, 122 bp, Homo sapiens
  misc_feature (61)..(62): /note="This region represents a CpG dinucleotide"
  misc_feature (61)..(61): /note="Nucleotide may be methylated to form 5-methylcytosine"
aggcgaatctcagcaggggcaccccgccaacacacccggcctcttctgagctgtccaggtcgtcaaaagcaaaacggcccagcccagaggccccgggagacagacgctgaggaacgcggtcc

SEQ ID NO: 24541 - DNA, 122 bp, Homo sapiens
  misc_feature (61)..(62): /note="This region represents a CpG dinucleotide"
  misc_feature (61)..(61): /note="Nucleotide may be methylated to form 5-methylcytosine"
gtgacttgtttctaaccaaaagaatgtggcaagtgatactaagtcacctctgaggttaggcgacaaaggctgtgtacaccctgccttcctctctctagcttgctcactgggatggtagccag

SEQ ID NO: 24542 - DNA, 122 bp, Homo sapiens
  misc_feature (61)..(62): /note="This region represents a CpG dinucleotide"
  misc_feature (61)..(61): /note="Nucleotide may be methylated to form 5-methylcytosine"
agcacagccctgtcttcccttcaggcatcaggtgtgtccagtctggaggtgtggcttttacgtggagcagatccccagttaggtcagtgtccacccacagctcctctgtgaagatgagaggc

SEQ ID NO: 24543 - DNA, 122 bp, Homo sapiens
  misc_feature (61)..(62): /note="This region represents a CpG dinucleotide"
  misc_feature (61)..(61): /note="Nucleotide may be methylated to form 5-methylcytosine"
ccgtgcagggaactgacggagattaaccgtcggcacatcactgagtcagtcaactccatccgtcgggtgagtcaggctcccgggccaccctaccccacctcccttccttcactcatcagaca

SEQ ID NO: 24544 - DNA, 122 bp, Homo sapiens
  misc_feature (61)..(62): /note="This region represents a CpG dinucleotide"
  misc_feature (61)..(61): /note="Nucleotide may be methylated to form 5-methylcytosine"
gggcctggctcacaattaggcagaagtgagcattgtggcattgtatgtcttcaaggattccgtttagaaactagactatgagatgaaatgaaacaatgcatgtaaagtgaccacaactgtac

SEQ ID NO: 24545 - DNA, 122 bp, Homo sapiens
  misc_feature (61)..(62): /note="This region represents a CpG dinucleotide"
  misc_feature (61)..(61): /note="Nucleotide may be methylated to form 5-methylcytosine"
gataaatgggtgaacagaatgtgatccacccatacaacagaatgtgactcagccatggaacgtcatggggctctgacccaggccacagcatgggtgagccctaaggacgtcacgctcagcgc

SEQ ID NO: 24546 - DNA, 122 bp, Homo sapiens
  misc_feature (61)..(62): /note="This region represents a CpG dinucleotide"
  misc_feature (61)..(61): /note="Nucleotide may be methylated to form 5-methylcytosine"
atattgccagttctgcttcagaccagtgcaacagtgtgactatcacaataaagtgagtcacgtgaattttttggtctctaagtgcacataaaagttatgtttattttatattgtagtctatt

SEQ ID NO: 24547 - DNA, 122 bp, Homo sapiens
  misc_feature (61)..(62): /note="This region represents a CpG dinucleotide"
  misc_feature (61)..(61): /note="Nucleotide may be methylated to form 5-methylcytosine"
atcatagagcctatcagctttacccattagactttccaacaacaaataaaaaatcctgaacgacaagaaaacccaacatcttaccttaacccaagccagcaaacactaaccatttaatgttg

SEQ ID NO: 24548 - DNA, 122 bp, Homo sapiens
  misc_feature (61)..(62): /note="This region represents a CpG dinucleotide"
  misc_feature (61)..(61): /note="Nucleotide may be methylated to form 5-methylcytosine"
taaacactcatcacctctgaaagtttcctcatgactctctgtaatcactcccttgccgatcgttcccaggcaaccactgatccactttctgtcacaataaatcagtcttcattttctagatt

SEQ ID NO: 24549 - DNA, 122 bp, Homo sapiens
  misc_feature (61)..(62): /note="This region represents a CpG dinucleotide"
  misc_feature (61)..(61): /note="Nucleotide may be methylated to form 5-methylcytosine"
tacgtgctctctttcaaaatgccctgggctaactggacttggcagcacaggttgctagagcgtgtaccaccctgagtcaagaggctcactgtccccaccctacacaagtcacttaacctctc

SEQ ID NO: 24550 - DNA, 122 bp, Homo sapiens
  misc_feature (61)..(62): /note="This region represents a CpG dinucleotide"
  misc_feature (61)..(61): /note="Nucleotide may be methylated to form 5-methylcytosine"
cacgcagtatttaccttgtggtacagtcctttgttttggaaacaaagatatcattattaacgtgttccttaccacagttgagggattgagtcttattattgcattatcactgacaaaatttg

SEQ ID NO: 24551 - DNA, 122 bp, Homo sapiens
  misc_feature (61)..(62): /note="This region represents a CpG dinucleotide"
  misc_feature (61)..(61): /note="Nucleotide may be methylated to form 5-methylcytosine"
cttcttaatcccatgaaatatgtttggctctttttgtgtgctctagaattaacactaatccgatctcttctgttttctacctgtttcctgttgatgctggaatgtcatgtgacttctcttct

SEQ ID NO: 24552 - DNA, 122 bp, Homo sapiens
  misc_feature (61)..(62): /note="This region represents a CpG dinucleotide"
  misc_feature (61)..(61): /note="Nucleotide may be methylated to form 5-methylcytosine"
ggccggaaatgctttctgcatccccaaataacctctggcagcctcagaaggtcatcaagccggtgctggagctggagcagctgctggggagaggctgctttgggtcttggcatggtctggtc

SEQ ID NO: 24553 - DNA, 122 bp, Homo sapiens
  misc_feature (61)..(62): /note="This region represents a CpG dinucleotide"
  misc_feature (61)..(61): /note="Nucleotide may be methylated to form 5-methylcytosine"
ctggtgaggggtaacacaactggtgaacagcactgaaaactcacttgagatcaatgatcacgaactgcaggtgagtcagcgcaattgcgtgcttcacccaagtcttatccagctgcagcaac

SEQ ID NO: 24554 - DNA, 122 bp, Homo sapiens
  misc_feature (61)..(62): /note="This region represents a CpG dinucleotide"
  misc_feature (61)..(61): /note="Nucleotide may be methylated to form 5-methylcytosine"
attttctggacagcaaaataataattagcatggctggtgagcagagggaaacgtctcactcgattgcacccagacatttctggataacatcattcttcagagtgtgacagtcgaggctgtct

SEQ ID NO: 24555 - DNA, 122 bp, Homo sapiens
  misc_feature (61)..(62): /note="This region represents a CpG dinucleotide"
  misc_feature (61)..(61): /note="Nucleotide may be methylated to form 5-methylcytosine"
tagtttgtgctgcttacaaatcccactctaaactcagctgtcagtgccctcccttggccacgcttcttggagatacaggctttctgcagaggatgccgcatgtcaacaaacacatccccaaa

SEQ ID NO: 24556 - DNA, 122 bp, Homo sapiens
  misc_feature (61)..(62): /note="This region represents a CpG dinucleotide"
  misc_feature (61)..(61): /note="Nucleotide may be methylated to form 5-methylcytosine"
gactacttaaaatatgctaggaatttttcatctatttcctttagctatcaccatacactacggtaaatattgtttctgacttacagatgaggcaaatgaggcttgaagagcttaaatacctt

SEQ ID NO: 24557 - DNA, 122 bp, Homo sapiens
  misc_feature (61)..(62): /note="This region represents a CpG dinucleotide"
  misc_feature (61)..(61): /note="Nucleotide may be methylated to form 5-methylcytosine"
caggaggatctaaagcaacgcagcctgcccacatgcctttcttaatcctgtgcaattatacgcaccctgggtgatgacactcgcagaggttattcttaaggcaagattactttcctcaccct

SEQ ID NO: 24558 - DNA, 122 bp, Homo sapiens
  misc_feature (61)..(62): /note="This region represents a CpG dinucleotide"
  misc_feature (61)..(61): /note="Nucleotide may be methylated to form 5-methylcytosine"
ggctctgagtaactgctacagagctattttttttttggtcttgtgcaagattctttagcacgaggcaagcagattaggctgaaagatatttcctggcatttgtcagattacttcaaatagtg

SEQ ID NO: 24559 - DNA, 122 bp, Homo sapiens
  misc_feature (61)..(62): /note="This region represents a CpG dinucleotide"
  misc_feature (61)..(61): /note="Nucleotide may be methylated to form 5-methylcytosine"
gttttttaaaaagaagagaaaaagtaataaaagagaagtgaaaagccaagtgaccacatacgaaaaagtacatcaaaagttagcagttttcagcctgagcaacatggcaaaaccccatctct

SEQ ID NO: 24560 - DNA, 122 bp, Homo sapiens
  misc_feature (61)..(62): /note="This region represents a CpG dinucleotide"
  misc_feature (61)..(61): /note="Nucleotide may be methylated to form 5-methylcytosine"
caagggaaggaactgcaggagggaggagccctgtcttattggttctagatccactgaaagcggccacagttctgaggacttgggcaggttccagaaacaatgccaaatctcccttgctagtc

SEQ ID NO: 24561 - DNA, 122 bp, Homo sapiens
  misc_feature (61)..(62): /note="This region represents a CpG dinucleotide"
  misc_feature (61)..(61): /note="Nucleotide may be methylated to form 5-methylcytosine"
atcaaagcattatctgatctagcttaaagataattagacagctcaacctccttttgccttcgtatattacataaacgaagaaaaacaaaaagcctaatagacttgtcagaaggtcacagctc

SEQ ID NO: 24562 - DNA, 122 bp, Homo sapiens
  misc_feature (61)..(62): /note="This region represents a CpG dinucleotide"
  misc_feature (61)..(61): /note="Nucleotide may be methylated to form 5-methylcytosine"
gccaatccctcactgattacctgattaaaaagtgatttattccaagggacacagggctctcgaaacaatcaaggaagtggaattctgccagttacacactctttgggtgaccagtatccaga

SEQ ID NO: 24563 - DNA, 122 bp, Homo sapiens
  misc_feature (61)..(62): /note="This region represents a CpG dinucleotide"
  misc_feature (61)..(61): /note="Nucleotide may be methylated to form 5-methylcytosine"
ggctgggcgcccttggtcacattgttggtgctcagagcctcagttcccacagctgtgcagcgagaggaagctgacggcaccgaccatggctgtggaggcctcatgtgtcaattgttgctgtt

SEQ ID NO: 24564 - DNA, 122 bp, Homo sapiens
  misc_feature (61)..(62): /note="This region represents a CpG dinucleotide"
  misc_feature (61)..(61): /note="Nucleotide may be methylated to form 5-methylcytosine"
ggctcttgagggcaaggactgtggaaaggggagattttcacaatctcagtacctaggacacggccacacacccctggcctcgctgagtcttcaggatgtccctgcccaaggatgaggctagg

SEQ ID NO: 24565 - DNA, 122 bp, Homo sapiens
  misc_feature (61)..(62): /note="This region represents a CpG dinucleotide"
  misc_feature (61)..(61): /note="Nucleotide may be methylated to form 5-methylcytosine"
agcaggtgctcagatggcgagatgattgctggtcaaatgaccgtaatcatgccaccatcacgttcagtcttgcaattaggaccttggtttccttttcattacaaacagggagttaagctaaa

SEQ ID NO: 24566 - DNA, 122 bp, Homo sapiens
  misc_feature (61)..(62): /note="This region represents a CpG dinucleotide"
  misc_feature (61)..(61): /note="Nucleotide may be methylated to form 5-methylcytosine"
ctaatatgggttgggccaaatagctggaattcctaagtcagaagttttctctgaaaggcacgtaactgactgacttgtccgtgtttgtggatttcactgctgcagcaagaggacctagaaaa

SEQ ID NO: 24567 - DNA, 122 bp, Homo sapiens
  misc_feature (61)..(62): /note="This region represents a CpG dinucleotide"
  misc_feature (61)..(61): /note="Nucleotide may be methylated to form 5-methylcytosine"
tggccagagacctatggatcatgactacatcccactgtcagatgacacactgggcagctacgacctgttggatccaaaatgtgagactcaaattactaaggcaattagtggcagggacagga

SEQ ID NO: 24568 - DNA, 122 bp, Homo sapiens
  misc_feature (61)..(62): /note="This region represents a CpG dinucleotide"
  misc_feature (61)..(61): /note="Nucleotide may be methylated to form 5-methylcytosine"
cagcaaggatgatgatactaccctgtattgattaagcattcattgtgtgccaggcaggcacggtgctcagccttttagaggcacttatctcatgcaacccatcctgacagcagccctccgag

SEQ ID NO: 24569 - DNA, 122 bp, Homo sapiens
  misc_feature (61)..(62): /note="This region represents a CpG dinucleotide"
  misc_feature (61)..(61): /note="Nucleotide may be methylated to form 5-methylcytosine"
gtttttatcttgaccgactagttaattgccaaaggattattttagataagtagcccttaacgtatgttgtgtggaacagcagcatcagcattacctgggaacttgcaagacatgaaacttcc

SEQ ID NO: 24570 - DNA, 122 bp, Homo sapiens
  misc_feature (61)..(62): /note="This region represents a CpG dinucleotide"
  misc_feature (61)..(61): /note="Nucleotide may be methylated to form 5-methylcytosine"
acctagtcatccatgctacatgattacaaaacatctgcaaaacatgcatcacacaatctgcgcacaacagttaaacaatactagaattaaatgttttaagggcataagaagccaaatacctg

SEQ ID NO: 24571 - DNA, 122 bp, Homo sapiens
  misc_feature (61)..(62): /note="This region represents a CpG dinucleotide"
  misc_feature (61)..(61): /note="Nucleotide may be methylated to form 5-methylcytosine"
aagtgattgagatcacccagggaagcttgctgagtgagaagaggaagtctagggctgagccgtaagcaaatgccaacatccaatgggcagcaggaaggaccctgcaaaacagtgtgagatgc

SEQ ID NO: 24572 - DNA, 122 bp, Homo sapiens
  misc_feature (61)..(62): /note="This region represents a CpG dinucleotide"
  misc_feature (61)..(61): /note="Nucleotide may be methylated to form 5-methylcytosine"
tcctagggcctgttttccagaaagaaaatactccactcctcaaatacagaaatctaataacgtaaatgatttttgtgttggcatttcatttcaggaaggagtaaacagtgagaacacacagt

SEQ ID NO: 24573 - DNA, 122 bp, Homo sapiens
  misc_feature (61)..(62): /note="This region represents a CpG dinucleotide"
  misc_feature (61)..(61): /note="Nucleotide may be methylated to form 5-methylcytosine"
ggtggataggaggagctttagggttagacaggcctgggttggaatcccagctctgtgcctcgctgtcactagctgtgtgtcctggggcttgttcttgaacttcactttcctagattgccaag

SEQ ID NO: 24574 - DNA, 122 bp, Homo sapiens
  misc_feature (61)..(62): /note="This region represents a CpG dinucleotide"
  misc_feature (61)..(61): /note="Nucleotide may be methylated to form 5-methylcytosine"
gtcttcattacagtggctggataccaccaaaagctttattacctgtttcctatgttttgacgttggacaaatgcaagtcatagcaaagatagcctgaggccaacaatgaagataccttacat

SEQ ID NO: 24575 - DNA, 122 bp, Homo sapiens
  misc_feature (61)..(62): /note="This region represents a CpG dinucleotide"
  misc_feature (61)..(61): /note="Nucleotide may be methylated to form 5-methylcytosine"
gaaaagggcaggccacctttgaagtatggggtgataaagagaggaaagatggagcaaatacgtgagacactagcgatctttaggaacagcgctgagttgtcttttaagaaaataaaagacct

SEQ ID NO: 24576 - DNA, 122 bp, Homo sapiens
  misc_feature (61)..(62): /note="This region represents a CpG dinucleotide"
  misc_feature (61)..(61): /note="Nucleotide may be methylated to form 5-methylcytosine"
tggcagattcagtgagggcctgcttagtcatagacggtgactccttgctatgtcctcatgcggcagatggggcaaggcagttctctggttttataagtgcatgactcccattcctaggcttg

SEQ ID NO: 24577 - DNA, 122 bp, Homo sapiens
  misc_feature (61)..(62): /note="This region represents a CpG dinucleotide"
  misc_feature (61)..(61): /note="Nucleotide may be methylated to form 5-methylcytosine"
aactaaaaatttggaatttgggggactgctgaagtgggtgtatgtctacctttcattttacgtctgagactaagaaaagtagagatgagaaaagcagagaatcttctatgtagaagcatgta

SEQ ID NO: 24578 - DNA, 122 bp, Homo sapiens
  misc_feature (61)..(62): /note="This region represents a CpG dinucleotide"
  misc_feature (61)..(61): /note="Nucleotide may be methylated to form 5-methylcytosine"
aaatgaaatctgccttcagaatagagcttagaatttgtccttgacacattctcatttccacgtatacactctgcacttactttacatacaccttatcttttttcagcttgtgatctttttca

SEQ ID NO: 24579 - DNA, 122 bp, Homo sapiens
  misc_feature (61)..(62): /note="This region represents a CpG dinucleotide"
  misc_feature (61)..(61): /note="Nucleotide may be methylated to form 5-methylcytosine"
cttgatacacaaactggtctggaatgcatttttccaaataagcaacacagcctgtggtcacgtcatcctgatggggctgccagagaacagttgtcatacaagtccttcccatttttagcatg

SEQ ID NO: 24580 - DNA, 122 bp, Homo sapiens
  misc_feature (61)..(62): /note="This region represents a CpG dinucleotide"
  misc_feature (61)..(61): /note="Nucleotide may be methylated to form 5-methylcytosine"
ttggggagatctgtgtcagatttgctcaattttagctgtggctttgactcacacaaataccgtatgttttagttgatttcaaactctgcctacagattaagagctcagggctaatgaaagcc

SEQ ID NO: 24581 - DNA, 122 bp, Homo sapiens
  misc_feature (61)..(62): /note="This region represents a CpG dinucleotide"
  misc_feature (61)..(61): /note="Nucleotide may be methylated to form 5-methylcytosine"
cttagaggccatttccaccctctggctccctgcaggccccctaccgggataccccctagacgcacccacacacccactctgagggtcactcagaatggccattgttctgtaggctgggaaag

SEQ ID NO: 24582 - DNA, 122 bp, Homo sapiens
  misc_feature (61)..(62): /note="This region represents a CpG dinucleotide"
  misc_feature (61)..(61): /note="Nucleotide may be methylated to form 5-methylcytosine"
agaaaggcaattccttgagcattaaataagcaacagtgaacttcatgcccattcctcattcgctttgaaaggcctaatttaatatgcatatactagaccaaaagactgaatcaagattaata

SEQ ID NO: 24583 - DNA, 122 bp, Homo sapiens
  misc_feature (61)..(62): /note="This region represents a CpG dinucleotide"
  misc_feature (61)..(61): /note="Nucleotide may be methylated to form 5-methylcytosine"
gtgatgtacggtagagcgtcattctctaaacttacttatacaactcgcagattccagagacgaggaaatggaaaggaaccactccacttcctctcgaatctgaaataaacatttgaactaga

SEQ ID NO: 24584 - DNA, 122 bp, Homo sapiens
  misc_feature (61)..(62): /note="This region represents a CpG dinucleotide"
  misc_feature (61)..(61): /note="Nucleotide may be methylated to form 5-methylcytosine"
aatatgaaacaaacgcttacttcctctgtctctcttcctttctctttctttttgtcagagcgacagtggctctcatttgattccctcagttcctatgctatttgtgtggaaataagcagatt

SEQ ID NO: 24585 - DNA, 122 bp, Homo sapiens
  misc_feature (61)..(62): /note="This region represents a CpG dinucleotide"
  misc_feature (61)..(61): /note="Nucleotide may be methylated to form 5-methylcytosine"
acgcgtaagactgcgacggtaccggggcggcggggaaggaccgagaggcgggaggagcagcggctcaggcgcctgcaaactggtggcctgaacgaggtagaccatgactgtggtttcagtgg

SEQ ID NO: 24586 - DNA, 122 bp, Homo sapiens
  misc_feature (61)..(62): /note="This region represents a CpG dinucleotide"
  misc_feature (61)..(61): /note="Nucleotide may be methylated to form 5-methylcytosine"
gtggccacactaaacaccagatttgcagtgcacataaaacagccttctgctggaagatgccgtctagggcttttacagttacagaggagaagtcgatccctgccttcaaagtttcagaggac

SEQ ID NO: 24587 - DNA, 122 bp, Homo sapiens
  misc_feature (61)..(62): /note="This region represents a CpG dinucleotide"
  misc_feature (61)..(61): /note="Nucleotide may be methylated to form 5-methylcytosine"
gtgagctcgtgcttggctctgagtcactattgtctgtaaaaagtataattgccctgcttacgctgtacatacagcttgctcacacccagtgagagagtaaagccatgttgaaactgtctgcg

SEQ ID NO: 24588 - DNA, 122 bp, Homo sapiens
  misc_feature (61)..(62): /note="This region represents a CpG dinucleotide"
  misc_feature (61)..(61): /note="Nucleotide may be methylated to form 5-methylcytosine"
aatagtgaaacactagagacaatctgttcatttgtaatataattgaagagagatgaggagcgaaccactaaggtatatatgagaagctctgactctgaggactctgcagaggagacaaaagg

SEQ ID NO: 24589 - DNA, 122 bp, Homo sapiens
  misc_feature (61)..(62): /note="This region represents a CpG dinucleotide"
  misc_feature (61)..(61): /note="Nucleotide may be methylated to form 5-methylcytosine"
acccaattcctgcccacattagccatcctgtttcacttaagtgggggaagaaccttgaagcggttgtgaagttcacactccaggggcataagctcactaaaatactgaggtctactcacagg

SEQ ID NO: 24590 - DNA, 122 bp, Homo sapiens
  misc_feature (61)..(62): /note="This region represents a CpG dinucleotide"
  misc_feature (61)..(61): /note="Nucleotide may be methylated to form 5-methylcytosine"
gattttacattaaattgcttattaggtgagagaatttttgtgggaccagaggaagaaatgcgttatatgtctcagtgctcttggcataattgtgtatgcagagtacatcttattttggtgat

SEQ ID NO: 24591 - DNA, 122 bp, Homo sapiens
  misc_feature (61)..(62): /note="This region represents a CpG dinucleotide"
  misc_feature (61)..(61): /note="Nucleotide may be methylated to form 5-methylcytosine"
atgcactgatttgttctacatgaagccagcctgtactgcattccagtttattttctggagcgtaattagtaatgatgatgattcgttaggtaaagagaaggaaatttatgaggctatggagt

SEQ ID NO: 24592 - DNA, 122 bp, Homo sapiens
  misc_feature (61)..(62): /note="This region represents a CpG dinucleotide"
  misc_feature (61)..(61): /note="Nucleotide may be methylated to form 5-methylcytosine"
ctcatccaccaaatctgaaggccttaaaattgtgtgttgggaggatgtgaattgggaggacggtgtcactagactgtggattagggatggtaaagtagggaggatgctattttgcaactata

SEQ ID NO: 24593 - DNA, 122 bp, Homo sapiens
  misc_feature (61)..(62): /note="This region represents a CpG dinucleotide"
  misc_feature (61)..(61): /note="Nucleotide may be methylated to form 5-methylcytosine"
ccttacctccattttgtagtagtagcccaaattctccttggtaattaggagcaatgatcccggaaagtatactaactcccttctttacctgttaattcagatgcatgaggagctcaaagtgg

SEQ ID NO: 24594 - DNA, 122 bp, Homo sapiens
  misc_feature (61)..(62): /note="This region represents a CpG dinucleotide"
  misc_feature (61)..(61): /note="Nucleotide may be methylated to form 5-methylcytosine"
tctctgggcccagaggatgaaggcgcctacagatgtgtggtagcagaggtcatgaaaacacgcacaggttcctggcaggtgcttcagagaaagcagtcaccagacagccacgtgcacctgag

SEQ ID NO: 24595 - DNA, 122 bp, Homo sapiens
  misc_feature (61)..(62): /note="This region represents a CpG dinucleotide"
  misc_feature (61)..(61): /note="Nucleotide may be methylated to form 5-methylcytosine"
tgctctgccctggtacctgggaccagggccatgcaccattgctttagagaacacctgctccgacccaggtcctgcaccagggatttcccaccagctgaatcagacacagttgctgtcctcag

SEQ ID NO: 24596 - DNA, 122 bp, Homo sapiens
  misc_feature (61)..(62): /note="This region represents a CpG dinucleotide"
  misc_feature (61)..(61): /note="Nucleotide may be methylated to form 5-methylcytosine"
tgcatggcttgggtggggatgactaacttgactcaaattactcatccctgggccagactgcggtagcctggggaccaggtgaaggaatctcaaccttatattgtaaaggcaatggggagcag

SEQ ID NO: 24597 - DNA, 122 bp, Homo sapiens
  misc_feature (61)..(62): /note="This region represents a CpG dinucleotide"
  misc_feature (61)..(61): /note="Nucleotide may be methylated to form 5-methylcytosine"
gtgagtagattagagggggtcgtgatgaagttgctgctttaactcatggatactgaaagacggagctgttggaaagtaaaaatatgttgttaatcataggggttatttttggcccagttagt

SEQ ID NO: 24598 - DNA, 122 bp, Homo sapiens
  misc_feature (61)..(62): /note="This region represents a CpG dinucleotide"
  misc_feature (61)..(61): /note="Nucleotide may be methylated to form 5-methylcytosine"
cagggagctgaaggcagattctaagagctgggtgtggatgctgcacccctgagcctgggccgcctgggttttgctcagtctgggaagtacttccaaacccactctttgctagtcttttacaa

SEQ ID NO: 24599 - DNA, 122 bp, Homo sapiens
  misc_feature (61)..(62): /note="This region represents a CpG dinucleotide"
  misc_feature (61)..(61): /note="Nucleotide may be methylated to form 5-methylcytosine"
agggttccacccaggtcaatgagttattagaggtcaggattacaaagtataaaacatgcccggaaaccagggtcattcccagagaaatgggatggcttatggtctgctcatccacccccaaa

SEQ ID NO: 24600 - DNA, 122 bp, Homo sapiens
  misc_feature (61)..(62): /note="This region represents a CpG dinucleotide"
  misc_feature (61)..(61): /note="Nucleotide may be methylated to form 5-methylcytosine"
ccccattcccactttgcagcctacattgaagccaaatcaaactattcacagctgccctggcgctctggactatgtcaagtacccttgactttgctcatgtagctggagggttctttcctctt

SEQ ID NO: 24601 - DNA, 122 bp, Homo sapiens
  misc_feature (61)..(62): /note="This region represents a CpG dinucleotide"
  misc_feature (61)..(61): /note="Nucleotide may be methylated to form 5-methylcytosine"
gcttaataagaaaaaacagagaaaaagcatacacacacccagacacaaacataaatttcacggcagaacatagttttctgtccagagaaagatgactgagagttactgctttatgacattta

SEQ ID NO: 24602 - DNA, 122 bp, Homo sapiens
  misc_feature (61)..(62): /note="This region represents a CpG dinucleotide"
  misc_feature (61)..(61): /note="Nucleotide may be methylated to form 5-methylcytosine"
gcacccttccctggaatgtgtcacagtttttatccatggcttggtaattgacacaaacaccgtagcctactgtataccctgaatgaggtgccagcagctgccagcttttgttgatgttttgg

SEQ ID NO: 24603 - DNA, 122 bp, Homo sapiens
  misc_feature (61)..(62): /note="This region represents a CpG dinucleotide"
  misc_feature (61)..(61): /note="Nucleotide may be methylated to form 5-methylcytosine"
ggatgtctcagctgcctgacacacactaaacttttgaagatttgagttttctcagtgttgcggcagctttgtcagctaaaaacagtttgatgctaaaggaagcttagcctctcatgttaatc

SEQ ID NO: 24604 - DNA, 122 bp, Homo sapiens
  misc_feature (61)..(62): /note="This region represents a CpG dinucleotide"
  misc_feature (61)..(61): /note="Nucleotide may be methylated to form 5-methylcytosine"
atataatttatttacatggtaaatccaagtataccaatgtacaaatataaaaatttgccacggacccataaaagtattgaagaaagagaaaatagggaagaggaggaaggaatatacggaaa

SEQ ID NO: 24605 - DNA, 122 bp, Homo sapiens
  misc_feature (61)..(62): /note="This region represents a CpG dinucleotide"
  misc_feature (61)..(61): /note="Nucleotide may be methylated to form 5-methylcytosine"
gcagagcgggtcgcagtcagtggcactggtccacatataaaagaagctcttaagagcgtacgataaagcctttgagaatattaatgtgatgtcaaggccttcagccagtccaaaagtattta

SEQ ID NO: 24606 - DNA, 122 bp, Homo sapiens
  misc_feature (61)..(62): /note="This region represents a CpG dinucleotide"
  misc_feature (61)..(61): /note="Nucleotide may be methylated to form 5-methylcytosine"
ccgcctgatctttgacaacctgaagaaatccatcatgtacaccctgaccagcaacatccccgagatcacgcccttcctgatgttcatcatcctcggtatacccctgcctctgggaaccataa

SEQ ID NO: 24607 - DNA, 122 bp, Homo sapiens
  misc_feature (61)..(62): /note="This region represents a CpG dinucleotide"
  misc_feature (61)..(61): /note="Nucleotide may be methylated to form 5-methylcytosine"
gagagcagaagttttaaacctcatttgaccttcatgaagttgtcaaaatcaccgtggctccgtaagaatgtgagtgcatgttcttattgcaagcctgttttaccaggccacaccagccataa

SEQ ID NO: 24608 - DNA, 122 bp, Homo sapiens
  misc_feature (61)..(62): /note="This region represents a CpG dinucleotide"
  misc_feature (61)..(61): /note="Nucleotide may be methylated to form 5-methylcytosine"
taaagggctcactcatcccatgctgctgttctgcaaggtaccatattactaagtacagctcgtgttcacagtaggtgccaacacatttcagagatgaggaaatgggagcccagagaggtcaa

SEQ ID NO: 24609 - DNA, 122 bp, Homo sapiens
  misc_feature (61)..(62): /note="This region represents a CpG dinucleotide"
  misc_feature (61)..(61): /note="Nucleotide may be methylated to form 5-methylcytosine"
caaaatgcaagccacacaaaaacacacccttgtggctttgtttttcctcctatagagttgcggggactcactgcaataggaagataagctgaatggccaaatgggcctaccagatttgaata

SEQ ID NO: 24610 - DNA, 122 bp, Homo sapiens
  misc_feature (61)..(62): /note="This region represents a CpG dinucleotide"
  misc_feature (61)..(61): /note="Nucleotide may be methylated to form 5-methylcytosine"
caaaggacaaagcgacagcagacggggcaggcgagacgtgaggcgagacgtgaggcgagccgtgaggcaagccggctcataaacgctcctaacggggaaaacagacgaacgaggagttggtg

SEQ ID NO: 24611 - DNA, 122 bp, Homo sapiens
  misc_feature (61)..(62): /note="This region represents a CpG dinucleotide"
  misc_feature (61)..(61): /note="Nucleotide may be methylated to form 5-methylcytosine"
actaatgagaccaatgaataggaaatgcttcacagatgtggtgacgaatcagctgcatctcgatggatgaatcaatatttctcaatgaaacaaagaatgggaatggaatgtcaggtagaagg

SEQ ID NO: 24612 - DNA, 122 bp, Homo sapiens
  misc_feature (61)..(62): /note="This region represents a CpG dinucleotide"
  misc_feature (61)..(61): /note="Nucleotide may be methylated to form 5-methylcytosine"
tctctcactatcctactctgtactgccagggacatgaatcatccctttgtcttgtgtgtccgtgttatctacactacccacccattactatataggaaaaaacatagcatatataggattcg

SEQ ID NO: 24613 - DNA, 122 bp, Homo sapiens
  misc_feature (61)..(62): /note="This region represents a CpG dinucleotide"
  misc_feature (61)..(61): /note="Nucleotide may be methylated to form 5-methylcytosine"
tgcttgtgtcctgagcaaactttctaacctatgtgggcaccaaattcctcatctgtaatacgggactgataatagccgttttggaaagttgacatggtgattaaaataatttgcttagctaa

SEQ ID NO: 24614 - DNA, 122 bp, Homo sapiens
  misc_feature (61)..(62): /note="This region represents a CpG dinucleotide"
  misc_feature (61)..(61): /note="Nucleotide may be methylated to form 5-methylcytosine"
gccaggcatggctcctctgagccaggagcacagagccccagggaacctttactaggcttacgttccctccctctcctgaggtctgccacaatagagcagctgaaatgacagtctggaaatgt

SEQ ID NO: 24615 - DNA, 122 bp, Homo sapiens
  misc_feature (61)..(62): /note="This region represents a CpG dinucleotide"
  misc_feature (61)..(61): /note="Nucleotide may be methylated to form 5-methylcytosine"
tcatttttacagctaatttagttgaaatgtcaggcttgtagttaagcagactgctagtaacggttcaaaaaattcctcatgagtggcacaccagtggccccaacctgtgagaagaaaagaat

SEQ ID NO: 24616 - DNA, 122 bp, Homo sapiens
  misc_feature (61)..(62): /note="This region represents a CpG dinucleotide"
  misc_feature (61)..(61): /note="Nucleotide may be methylated to form 5-methylcytosine"
gagggtccctgggctcccccaggtcagggcagaggtcctgaccccagtctagctctttagcgggggccaggcccgagatggccagctccgtttcccctgcgtggcctggcagcccctccagg

SEQ ID NO: 24617 - DNA, 122 bp, Homo sapiens
  misc_feature (61)..(62): /note="This region represents a CpG dinucleotide"
  misc_feature (61)..(61): /note="Nucleotide may be methylated to form 5-methylcytosine"
actttgtcttgaatgtctctcagtcagattcctgcagaataagcatgcaattggctcatccgacatatccagtgagattatccttgattggcagaatgctagttccacacttcctacaagaa

SEQ ID NO: 24618 - DNA, 122 bp, Homo sapiens
  misc_feature (61)..(62): /note="This region represents a CpG dinucleotide"
  misc_feature (61)..(61): /note="Nucleotide may be methylated to form 5-methylcytosine"
tatctgtgctatccaattcagtagccactaaccacacgtggctctgggccacttgaaatgcggtgagtgagacggaaggactgaattttaaattttcttttcttttaattcattacatttaa

SEQ ID NO: 24619 - DNA, 122 bp, Homo sapiens
  misc_feature (61)..(62): /note="This region represents a CpG dinucleotide"
  misc_feature (61)..(61): /note="Nucleotide may be methylated to form 5-methylcytosine"
gttgttatgttttcatcatcatcattaagatacccacttgtcatcactaagaactagatacgtgttttctatctgaaacttaagataacacataaatatccctgagctattttcttggcctt

SEQ ID NO: 24620 - DNA, 122 bp, Homo sapiens
  misc_feature (61)..(62): /note="This region represents a CpG dinucleotide"
  misc_feature (61)..(61): /note="Nucleotide may be methylated to form 5-methylcytosine"
tagctatgttagcagcttgaaggcacaacgtaaaaggaatgagctttcacaaggtgcttacgttagctgggtagtattggtcaaaggtactctgaagagtgaatgcagaaatcagttggctg

SEQ ID NO: 24621 - DNA, 122 bp, Homo sapiens
  misc_feature (61)..(62): /note="This region represents a CpG dinucleotide"
  misc_feature (61)..(61): /note="Nucleotide may be methylated to form 5-methylcytosine"
gttgagttccttcaagggcaagccaggcccccagccagcccagagaaggaaatgagcagccgatccacaggaaggtcacaagaaggtcacaggagcttagaacaacagatggaagccagagt

SEQ ID NO: 24622 - DNA, 122 bp, Homo sapiens
  misc_feature (61)..(62): /note="This region represents a CpG dinucleotide"
  misc_feature (61)..(61): /note="Nucleotide may be methylated to form 5-methylcytosine"
gccggcgcaggctgtgcaggtcctggaaagtgtagtccagcaggattaccagcttgttctcgctcaggtccagcagcgtgaggttgtccaggcgcgtgaagaccccgggcgggatgagcttc

SEQ ID NO: 24623 - DNA, 122 bp, Homo sapiens
  misc_feature (61)..(62): /note="This region represents a CpG dinucleotide"
  misc_feature (61)..(61): /note="Nucleotide may be methylated to form 5-methylcytosine"
catgttgcaataatgaattggccagcacttgtgtagtgcttcttgctgggtctcaggcaccgtggacgtgtgccaacgtttccacgtgctcttcacagcacctcgacgggtcgatcactaat

SEQ ID NO: 24624 - DNA, 122 bp, Homo sapiens
  misc_feature (61)..(62): /note="This region represents a CpG dinucleotide"
  misc_feature (61)..(61): /note="Nucleotide may be methylated to form 5-methylcytosine"
ccccttctggcttccagactgcgggcccagccacagccgtggagactaggcaggggcaggcgcctggggctccgcgaatgcagcatatatcctgctgatggcctaaggaacatacgctatga

SEQ ID NO: 24625 - DNA, 122 bp, Homo sapiens
  misc_feature (61)..(62): /note="This region represents a CpG dinucleotide"
  misc_feature (61)..(61): /note="Nucleotide may be methylated to form 5-methylcytosine"
ccatctaggatttctgcaattgctttgtagctgctcttcctgctcttataattcattaggcgtatagaattcagagcaatattttaaaaatataagttaaaattacatcattcattctcttc

SEQ ID NO: 24626 - DNA, 122 bp, Homo sapiens
  misc_feature (61)..(62): /note="This region represents a CpG dinucleotide"
  misc_feature (61)..(61): /note="Nucleotide may be methylated to form 5-methylcytosine"
ggacttgctgtacaagggagtcgccgtcctctcttgtgttgaccgagattcctcagcaggcgggggcagagccggggaaaagcctggaatgggaaggggaggctcaggtgcacctgagggag

SEQ ID NO: 24627 - DNA, 122 bp, Homo sapiens
  misc_feature (61)..(62): /note="This region represents a CpG dinucleotide"
  misc_feature (61)..(61): /note="Nucleotide may be methylated to form 5-methylcytosine"
tagtctgaaatgatcaaagcaccaggctcatataactgacttgagtattcaatgactcagcgactgtagaggctaccactactgttgctgttgtcactatcaaaagcacagcttatcccttc

SEQ ID NO: 24628 - DNA, 122 bp, Homo sapiens
  misc_feature (61)..(62): /note="This region represents a CpG dinucleotide"
  misc_feature (61)..(61): /note="Nucleotide may be methylated to form 5-methylcytosine"
gcgaagcccggccactgtcaccatgggctccagcctcgcctctctgggcctggtggtgagcggcttcagcaacaggtttccggtccccgcagagggtcccactctgaactcccgatttacag

SEQ ID NO: 24629 - DNA, 122 bp, Homo sapiens
  misc_feature (61)..(62): /note="This region represents a CpG dinucleotide"
  misc_feature (61)..(61): /note="Nucleotide may be methylated to form 5-methylcytosine"
tgccttgacaacggtttcaacagttcctttacaaaatactgtgactgtgctgtatttcaccgactagcttgaattttgagcatgcagcaatttggttgccaagacaatcaaactgtcttgtc

SEQ ID NO: 24630 - DNA, 122 bp, Homo sapiens
  misc_feature (61)..(62): /note="This region represents a CpG dinucleotide"
  misc_feature (61)..(61): /note="Nucleotide may be methylated to form 5-methylcytosine"
tttgccatcacttttaatggctaaagcagcaattacttttgcaccaacttaatacatcagcgttgaggggctggggggaaaagcactaataattgcacatagcaccagctctaatagttgaa

SEQ ID NO: 24631 - DNA, 122 bp, Homo sapiens
  misc_feature (61)..(62): /note="This region represents a CpG dinucleotide"
  misc_feature (61)..(61): /note="Nucleotide may be methylated to form 5-methylcytosine"
caggagactagaggcaggaaagagagcaatgagctgagggtggctaagctgggaggtgagcgagggtgccctggctgagaccttgaaaaactccacccatgatgatcaccattatactcctc

SEQ ID NO: 24632 - DNA, 122 bp, Homo sapiens
  misc_feature (61)..(62): /note="This region represents a CpG dinucleotide"
  misc_feature (61)..(61): /note="Nucleotide may be methylated to form 5-methylcytosine"
tatagcctgtgtttttctttgctggcctatggtgcctcccagtgcatggaagtggaagtacgggaccaatgcaattgatggtgatgatgccagtcattactaagctcctgtctaggcaggac

SEQ ID NO: 24633 - DNA, 122 bp, Homo sapiens
  misc_feature (61)..(62): /note="This region represents a CpG dinucleotide"
  misc_feature (61)..(61): /note="Nucleotide may be methylated to form 5-methylcytosine"
gtgagaactccatgggaatgaaaactgctgcctgcacagaagccttgccacccagctcttcgggcgagtcatgttcagttctgccctcctcccaggcacacacctccggatgttctggaaga

SEQ ID NO: 24634 - DNA, 122 bp, Homo sapiens
  misc_feature (61)..(62): /note="This region represents a CpG dinucleotide"
  misc_feature (61)..(61): /note="Nucleotide may be methylated to form 5-methylcytosine"
agaagttcccaggaaggctcctatgtaaagcatgcttctcctgtcatggtatttggcacccgtcattgacaacacttgtttaataagctctgtgggtacagccccatgtatattcatacaca

SEQ ID NO: 24635 - DNA, 122 bp, Homo sapiens
  misc_feature (61)..(62): /note="This region represents a CpG dinucleotide"
  misc_feature (61)..(61): /note="Nucleotide may be methylated to form 5-methylcytosine"
aaaaacttaagtgtgtggcaggaaaaaaaaaattaactcatcttcctgaccagcaaatgacgtccaggcattcagtttgatgccgtaaagtggagcaaaccaaactgtctagtacaatttgc

SEQ ID NO: 24636 - DNA, 122 bp, Homo sapiens
  misc_feature (61)..(62): /note="This region represents a CpG dinucleotide"
  misc_feature (61)..(61): /note="Nucleotide may be methylated to form 5-methylcytosine"
ttctatgttacggctaattccctgcaagctagcctgactttcagagcattcaactgagtacgtggctgttctccaccatgaggccagcacgtggttaatgaccccaattctggcattgtttc

SEQ ID NO: 24637 - DNA, 122 bp, Homo sapiens
  misc_feature (61)..(62): /note="This region represents a CpG dinucleotide"
  misc_feature (61)..(61): /note="Nucleotide may be methylated to form 5-methylcytosine"
atgccttgcattactgcttgcaaacagccatgaccgttgggctttaaagccctgcctccacgctgtctcagctttagacagctgacttcagagccactcatctgctgctcagcagctgggta

SEQ ID NO: 24638 - DNA, 122 bp, Homo sapiens
  misc_feature (61)..(62): /note="This region represents a CpG dinucleotide"
  misc_feature (61)..(61): /note="Nucleotide may be methylated to form 5-methylcytosine"
gtttcatccccacttgctagctgtgtcattttaagtaagataagttgcctcttcagttctcggttcctcaccttgaaaattgggataatgatcataatgaatggataggttattgtgaaaat

SEQ ID NO: 24639 - DNA, 122 bp, Homo sapiens
  misc_feature (61)..(62): /note="This region represents a CpG dinucleotide"
  misc_feature (61)..(61): /note="Nucleotide may be methylated to form 5-methylcytosine"
gtctttttgtgatcaaagtgatatttctaaaatgcaaatctgctgtcattcctcttctttcgcaatcattccccattgctttcagggtgaagtccagactccctggcatggcatacagggac

SEQ ID NO: 24640 - DNA, 122 bp, Homo sapiens
  misc_feature (61)..(62): /note="This region represents a CpG dinucleotide"
  misc_feature (61)..(61): /note="Nucleotide may be methylated to form 5-methylcytosine"
gttcttatctacagacatgcaaatgtcatatcctgtccagcctagaggttcagttgacaacgcttattcccctgtggaaaaccgaatttgcctacattcacacctttgcttcaacagcttga

SEQ ID NO: 24641 - DNA, 122 bp, Homo sapiens
  misc_feature (61)..(62): /note="This region represents a CpG dinucleotide"
  misc_feature (61)..(61): /note="Nucleotide may be methylated to form 5-methylcytosine"
tattgtttactgaaattacaagtcaaattcattgaccataaatcaagatcaaagtgtttacgaaaggtcctccatgatgtacaaaaagcctttggcagtaaagagcttttaccagatctgaa

SEQ ID NO: 24642 - DNA, 122 bp, Homo sapiens
  misc_feature (61)..(62): /note="This region represents a CpG dinucleotide"
  misc_feature (61)..(61): /note="Nucleotide may be methylated to form 5-methylcytosine"
gtacactgtattttttgtggaagatcattttccatcttaaaatatatactggttgagttacgtttacattgctccataggacaatcccatgagtacattataagtcctcgatggctgttgta

SEQ ID NO: 24643 - DNA, 122 bp, Homo sapiens
  misc_feature (61)..(62): /note="This region represents a CpG dinucleotide"
  misc_feature (61)..(61): /note="Nucleotide may be methylated to form 5-methylcytosine"
atattatgctcagctgtggtcattatggtgtctcccctactgtaactccaaagagtagctcgcatatttctatgtgggttagtcactggatccttaataaaccaagaatgtaagacactgat

SEQ ID NO: 24644 - DNA, 122 bp, Homo sapiens
  misc_feature (61)..(62): /note="This region represents a CpG dinucleotide"
  misc_feature (61)..(61): /note="Nucleotide may be methylated to form 5-methylcytosine"
atgatgcacacaaaatcctgagacaaagaccatctcaggcaagtcctgtagagcaggttgcgcacttccctgaaaagactagtcacagtcaattctcactccccaggagacccattgtagtt

SEQ ID NO: 24645 - DNA, 122 bp, Homo sapiens
  misc_feature (61)..(62): /note="This region represents a CpG dinucleotide"
  misc_feature (61)..(61): /note="Nucleotide may be methylated to form 5-methylcytosine"
tattgtgacacgtgggttataatgagttagggcctacttaagaagaaagtggaaagaaagcgggtaaaattgttgctcagatactagcatgtgggtggagatatagatatagatataggtat

SEQ ID NO: 24646 - DNA, 122 bp, Homo sapiens
  misc_feature (61)..(62): /note="This region represents a CpG dinucleotide"
  misc_feature (61)..(61): /note="Nucleotide may be methylated to form 5-methylcytosine"
aacagaacaaaggcaaaaaataaaataaaataaaatagaagaaactgaaatgaatgagtgcgctgccaaaggagcaagaattcagctcattcaggtatatttcaagatcaggttgataggcg

SEQ ID NO: 24647 - DNA, 122 bp, Homo sapiens
  misc_feature (61)..(62): /note="This region represents a CpG dinucleotide"
  misc_feature (61)..(61): /note="Nucleotide may be methylated to form 5-methylcytosine"
ccatgtggaaagaaaaaggcaaatgagtgacttgtttttaaaacccaggtaataagtctgcgctagtaacagcgctacttacggacacttgttccaagtctaggccagactgaacacacaaa

SEQ ID NO: 24648 - DNA, 122 bp, Homo sapiens
  misc_feature (61)..(62): /note="This region represents a CpG dinucleotide"
  misc_feature (61)..(61): /note="Nucleotide may be methylated to form 5-methylcytosine"
agaatagtcctgctccctcttgtccactgaagttcatgtctacgtgtgcatgcatagatgcgtgtctgtgcaggccaggatgtgtgtggttgtgtataagctagcctgcacacgtctgagtg

SEQ ID NO: 24649 - DNA, 122 bp, Homo sapiens
  misc_feature (61)..(62): /note="This region represents a CpG dinucleotide"
  misc_feature (61)..(61): /note="Nucleotide may be methylated to form 5-methylcytosine"
caacagccaagcttcttggtagttttctatactcatttagtcactttcttaccttccattcgctcaaaccttctccaatctaggttccagccccatcactcagcagacattattctcattaa

SEQ ID NO: 24650 - DNA, 122 bp, Homo sapiens
  misc_feature (61)..(62): /note="This region represents a CpG dinucleotide"
  misc_feature (61)..(61): /note="Nucleotide may be methylated to form 5-methylcytosine"
gggaacccagacggaacaactcagcctctttcctcagggagtaagtctaagacctggcttcgagtacattcggtgaaagaaagctcattgggagccgcaattttggctagctagtgaaaaaa

SEQ ID NO: 24651 - DNA, 122 bp, Homo sapiens
  misc_feature (61)..(62): /note="This region represents a CpG dinucleotide"
  misc_feature (61)..(61): /note="Nucleotide may be methylated to form 5-methylcytosine"
ttcttggtcattcttaaggccatggcaggagcacagttcaaaatccaattcacaaggcaacgtctggaagaaagaatcaagtatgtgtgtagtgcatgatgtacctcagctactgtagtgaa

SEQ ID NO: 24652 - DNA, 122 bp, Homo sapiens
  misc_feature (61)..(62): /note="This region represents a CpG dinucleotide"
  misc_feature (61)..(61): /note="Nucleotide may be methylated to form 5-methylcytosine"
gcccctgtcggatcccgcacctttctaagcctgtggttgcttcacccgctgcagagcacacgcaacccagcctcagcatcacagccgcagctctgttcagcggagcagccagccagggcgga

SEQ ID NO: 24653 - DNA, 122 bp, Homo sapiens
  misc_feature (61)..(62): /note="This region represents a CpG dinucleotide"
  misc_feature (61)..(61): /note="Nucleotide may be methylated to form 5-methylcytosine"
gtaataacatttccctaacctgtggaaagaaagaaaaatattgagccattacaggattgtcgtcaggatcaaatgagatgatacatgtgaaatctctgtgtaaggtttaaaggattgcacaa

SEQ ID NO: 24654 - DNA, 122 bp, Homo sapiens
  misc_feature (61)..(62): /note="This region represents a CpG dinucleotide"
  misc_feature (61)..(61): /note="Nucleotide may be methylated to form 5-methylcytosine"
cccaatctaaccagtacaagatcagctaacccactctccctaatgccacaggtggtaacacgtcattttcagcaactgtctacagagacatccatgacacctcccctccctcactcttcata

SEQ ID NO: 24655 - DNA, 122 bp, Homo sapiens
  misc_feature (61)..(62): /note="This region represents a CpG dinucleotide"
  misc_feature (61)..(61): /note="Nucleotide may be methylated to form 5-methylcytosine"
aatacatatatgttggtgtgggtggggatgtcccggagtacgtgggggcgagggtgcctgcgtgcctcctgatctgcaaggatctatctagtgtgtgtgcctgggagtgtgtgtgtgtgtgt

SEQ ID NO: 24656 - DNA, 122 bp, Homo sapiens
  misc_feature (61)..(62): /note="This region represents a CpG dinucleotide"
  misc_feature (61)..(61): /note="Nucleotide may be methylated to form 5-methylcytosine"
cattttggtttaataaaaatatttatttcttaccacattattctcaggtctagcatatcacgtgatacatggaagtggttggtatgtatttattgaatgttaaaataaacaaacaaacaagc

SEQ ID NO: 24657 - DNA, 122 bp, Homo sapiens
  misc_feature (61)..(62): /note="This region represents a CpG dinucleotide"
  misc_feature (61)..(61): /note="Nucleotide may be methylated to form 5-methylcytosine"
ccttcttcttatcattatcattatcagcagtagtagtaacagataatgactatcaattgacgtgggagacaattacaattacatgtcattgtgaaactcattaggtgactgtgatttagagt

SEQ ID NO: 24658 - DNA, 122 bp, Homo sapiens
  misc_feature (61)..(62): /note="This region represents a CpG dinucleotide"
  misc_feature (61)..(61): /note="Nucleotide may be methylated to form 5-methylcytosine"
ggggctgggggctgggggctgacgtttctccctctcaaagttcaggttgaattgccctaacgtgctgattactgcaccgaggatgccggtatctggcttgtaataattatagatttcctctg

SEQ ID NO: 24659 - DNA, 122 bp, Homo sapiens
  misc_feature (61)..(62): /note="This region represents a CpG dinucleotide"
  misc_feature (61)..(61): /note="Nucleotide may be methylated to form 5-methylcytosine"
gtgtaatgtgggatgtgagaggaggtgagtggctacagaaggtgaggagtggaaggtgcacgcaagcttcaagggattagtaaactaacactgaaaagaggaagtggtttctgtagctactg

SEQ ID NO: 24660 - DNA, 122 bp, Homo sapiens
  misc_feature (61)..(62): /note="This region represents a CpG dinucleotide"
  misc_feature (61)..(61): /note="Nucleotide may be methylated to form 5-methylcytosine"
gtactttgcatttggcacttcctgcttctgaggaaccagccagtggttagcattgttatgcgtttttctcctgttttgagtttgtgaaatgtttaccatttatttctgcttacctgttttct

SEQ ID NO: 24661 - DNA, 122 bp, Homo sapiens
  misc_feature (61)..(62): /note="This region represents a CpG dinucleotide"
  misc_feature (61)..(61): /note="Nucleotide may be methylated to form 5-methylcytosine"
tccttgtggattcatatggaaatggacacctgccatgtttgcaggcagaaaaacaggcttcgaattccacccacacctgatggctattctctgcctggaacgcctctcttaccctcccatgg

SEQ ID NO: 24662 - DNA, 122 bp, Homo sapiens
  misc_feature (61)..(62): /note="This region represents a CpG dinucleotide"
  misc_feature (61)..(61): /note="Nucleotide may be methylated to form 5-methylcytosine"
ggaccagagagaccaaatggataaaacaggaggattttattaaggtgtgcaccggctcagcggattcgcatccaaaaggctgagacctgaacagaaacagggcttgacttttatacacattt

SEQ ID NO: 24663 - DNA, 122 bp, Homo sapiens
  misc_feature (61)..(62): /note="This region represents a CpG dinucleotide"
  misc_feature (61)..(61): /note="Nucleotide may be methylated to form 5-methylcytosine"
ttcccaagcactctgagccctctctcatcagtcacgaggagaggagaaagtgctggactacgagcacaaaggcctggctctgacacaactgctgtgtgacactgagcaagtcctgccctctc

SEQ ID NO: 24664 - DNA, 122 bp, Homo sapiens
  misc_feature (61)..(62): /note="This region represents a CpG dinucleotide"
  misc_feature (61)..(61): /note="Nucleotide may be methylated to form 5-methylcytosine"
aataggtaagaatgacccatctttcatttctggctttaataatgtgagtctttttttcaccgtgtcagtctagctaaacattttccaattttgtttatctgttcaaagaaccaacttttgat

SEQ ID NO: 24665 - DNA, 122 bp, Homo sapiens
  misc_feature (61)..(62): /note="This region represents a CpG dinucleotide"
  misc_feature (61)..(61): /note="Nucleotide may be methylated to form 5-methylcytosine"
cacgtggtaagtggtgactcaggatgacacagctctttggaaatgcctagagcttgtgtccgtgtaccattgggcacaatccttctcaggatggcatcatcttctatttcagaatgagatgg

SEQ ID NO: 24666 - DNA, 122 bp, Homo sapiens
  misc_feature (61)..(62): /note="This region represents a CpG dinucleotide"
  misc_feature (61)..(61): /note="Nucleotide may be methylated to form 5-methylcytosine"
cttcctgtgaggtgtcatcagcagcacaagatcagacatagccaggtctacacaggcttgcgtctttccacaagttcactttattgatgcttactcaattagaaaagtcatgagccaggcgt

SEQ ID NO: 24667 - DNA, 122 bp, Homo sapiens
  misc_feature (61)..(62): /note="This region represents a CpG dinucleotide"
  misc_feature (61)..(61): /note="Nucleotide may be methylated to form 5-methylcytosine"
gagaaatatgtacctggtgtcgagatggtgctataatcccgctcctctgaacctcttctgcgtcacccccacagtgaagcaaccacacatcacactgcagccacactgaattagctgccaaa

SEQ ID NO: 24668 - DNA, 122 bp, Homo sapiens
  misc_feature (61)..(62): /note="This region represents a CpG dinucleotide"
  misc_feature (61)..(61): /note="Nucleotide may be methylated to form 5-methylcytosine"
cacccggccagtgaactctgaaagctcggtcagtaggtggaggaggaataacggcagcagcgggcaagggaacactcccagaaatcacgcaagaccttcgatgtgcacagtgtggctgcaaa

SEQ ID NO: 24669 - DNA, 122 bp, Homo sapiens
  misc_feature (61)..(62): /note="This region represents a CpG dinucleotide"
  misc_feature (61)..(61): /note="Nucleotide may be methylated to form 5-methylcytosine"
aaacaaaaccgcatccttgagcaagccctcaaaccgagtccatttcccggcctcctcccccgtggtctgcgtatttccacagagctcaaaatcagaccaggccagagctccccaaacatttg

SEQ ID NO: 24670 - DNA, 122 bp, Homo sapiens
  misc_feature (61)..(62): /note="This region represents a CpG dinucleotide"
  misc_feature (61)..(61): /note="Nucleotide may be methylated to form 5-methylcytosine"
tctgtgtggttgtagcaaggactcagcctcatgtagcacgaataggggtgtggttcatggcgtgttgacccagcagagcactccctcccactaacttgttctgcatgtgtagagtctcccca

SEQ ID NO: 24671 - DNA, 122 bp, Homo sapiens
  misc_feature (61)..(62): /note="This region represents a CpG dinucleotide"
  misc_feature (61)..(61): /note="Nucleotide may be methylated to form 5-methylcytosine"
atgctcctccaccccaactcctatttctcctaagtattaatatttagtctggaagagtcccgtgagattatctccaatgtctgatgctatacccctgcataggggggtggggatatactttg

SEQ ID NO: 24672 - DNA, 122 bp, Homo sapiens
  misc_feature (61)..(62): /note="This region represents a CpG dinucleotide"
  misc_feature (61)..(61): /note="Nucleotide may be methylated to form 5-methylcytosine"
agagaatgcttcacggatggcaacaattccttgcctttggacaccaagtaggggtggttgcggcaggatccgggtgctttaaaaccttcaggtagattcagatcacctgtaataatgaaaag

SEQ ID NO: 24673 - DNA, 122 bp, Homo sapiens
  misc_feature (61)..(62): /note="This region represents a CpG dinucleotide"
  misc_feature (61)..(61): /note="Nucleotide may be methylated to form 5-methylcytosine"
aaggaaaaccagggtacggttatgaaagtaggtaaaaggcatggaggcagagccccagagcgcaggcagaaatgattcacctcaggttacaccagtagttgcagggtcaggctgtggacatc

SEQ ID NO: 24674 - DNA, 122 bp, Homo sapiens
  misc_feature (61)..(62): /note="This region represents a CpG dinucleotide"
  misc_feature (61)..(61): /note="Nucleotide may be methylated to form 5-methylcytosine"
cagcttgagacagatggaaacaagagaagaaacagtggagtggtaacggaagtgttgacacgactccagatattaggcaagaaggctgtgatcaagtaacagagaattaatttcagttgtgt

SEQ ID NO: 24675 - DNA, 122 bp, Homo sapiens
  misc_feature (61)..(62): /note="This region represents a CpG dinucleotide"
  misc_feature (61)..(61): /note="Nucleotide may be methylated to form 5-methylcytosine"
atataaaaacaatgacatgctttcatacctttcttgccattgcttaaattcccttatgaccgccccagatatagatcacaccctgacattcttagctactgtgggaatggagacttgaagaa

SEQ ID NO: 24676 - DNA, 122 bp, Homo sapiens
  misc_feature (61)..(62): /note="This region represents a CpG dinucleotide"
  misc_feature (61)..(61): /note="Nucleotide may be methylated to form 5-methylcytosine"
ggaaaccagcaggcaggtttgggcaggagggagctggctcaccacaaaggcaagggaaggcgaaggctaggtgtcttctgccagcatcgggggcccaatgggggctctttctgggggggtca

SEQ ID NO: 24677 - DNA, 122 bp, Homo sapiens
  misc_feature (61)..(62): /note="This region represents a CpG dinucleotide"
  misc_feature (61)..(61): /note="Nucleotide may be methylated to form 5-methylcytosine"
tttttccaacttggtagcatcccattgtgtcctcttacagggccaattagccatgttaaacgtctaatagcctggcaggatcagagctctcccaactcacatccctatactggtgaaagcat

SEQ ID NO: 24678 - DNA, 122 bp, Homo sapiens
  misc_feature (61)..(62): /note="This region represents a CpG dinucleotide"
  misc_feature (61)..(61): /note="Nucleotide may be methylated to form 5-methylcytosine"
taaatgagttgaacaaaagagcaccttggtgcacttatcctctgcagtgataggtaggggcgatgagatttagaagacaaaccttttatgtagtgaaagagcatgcattttttttccgtggg

SEQ ID NO: 24679 - DNA, 122 bp, Homo sapiens
  misc_feature (61)..(62): /note="This region represents a CpG dinucleotide"
  misc_feature (61)..(61): /note="Nucleotide may be methylated to form 5-methylcytosine"
aaaaagtgaaactactaagggaggaggggtgaggggaccccttcccatgctcctttatcacgttaaggtgcttcacagcttaaacatcccatgattattagttaactccctgcagtctgaga

SEQ ID NO: 24680 - DNA, 122 bp, Homo sapiens
  misc_feature (61)..(62): /note="This region represents a CpG dinucleotide"
  misc_feature (61)..(61): /note="Nucleotide may be methylated to form 5-methylcytosine"
gcgggcgcctggggaggggagcgcctgggcagctgtgggcttggtggtgagcatggtggccgcgctgccagggtggggccatgccgggggtcccggccggcccaggctacccctggtcatcc

SEQ ID NO: 24681 - DNA, 122 bp, Homo sapiens
  misc_feature (61)..(62): /note="This region represents a CpG dinucleotide"
  misc_feature (61)..(61): /note="Nucleotide may be methylated to form 5-methylcytosine"
tatcacaaagattggctgggggcagtggctcatgcttgtaattccagcactttgggaggacgaggcatgagcctcactagaggccaggagttccagagcagcctggccaacatagggaaacc

SEQ ID NO: 24682 - DNA, 122 bp, Homo sapiens
  misc_feature (61)..(62): /note="This region represents a CpG dinucleotide"
  misc_feature (61)..(61): /note="Nucleotide may be methylated to form 5-methylcytosine"
ctgccaggccctaggcctagggccccaccctaggaatgttcagcccccaatcatcatcagcggcactggctagagagcaagtctaagggaagctggcctcagtgtttctggaaactcaggaa

SEQ ID NO: 24683 - DNA, 122 bp, Homo sapiens
  misc_feature (61)..(62): /note="This region represents a CpG dinucleotide"
  misc_feature (61)..(61): /note="Nucleotide may be methylated to form 5-methylcytosine"
ctcatttccacatacccaaatcatgcccattcttccaggcacagctcatatgagatgtgacgttgcacctgaagctcagagcagagtgtcgggcatccattagtaaaagtttgatgctaata

SEQ ID NO: 24684 - DNA, 122 bp, Homo sapiens
  misc_feature (61)..(62): /note="This region represents a CpG dinucleotide"
  misc_feature (61)..(61): /note="Nucleotide may be methylated to form 5-methylcytosine"
tgatagaaaaaactaaaaatcaaatggtgtcagagcttaaaaatctcttacttcatttgccgtgtaatctttatgcatttgatttttgcttcaggatccttacctataaagcatacccattt

SEQ ID NO: 24685 - DNA, 122 bp, Homo sapiens
  misc_feature (61)..(62): /note="This region represents a CpG dinucleotide"
  misc_feature (61)..(61): /note="Nucleotide may be methylated to form 5-methylcytosine"
actttgcaggagagagcagtagcagacctgggctattaacacaccacagttaattctctgcgggaacttttactaggtgggacttgtggaaggagaaaacgtctgtaaacagtgcatgctcc

SEQ ID NO: 24686 - DNA, 122 bp, Homo sapiens
  misc_feature (61)..(62): /note="This region represents a CpG dinucleotide"
  misc_feature (61)..(61): /note="Nucleotide may be methylated to form 5-methylcytosine"
cggctgcggggagtcagctctcaccgcccacctccttcccagatagtctctgtgcccactcgacggcccggcaagcccagcccctgcctgccacggccacagcagcctcagagagctgccct

SEQ ID NO: 24687 - DNA, 122 bp, Homo sapiens
  misc_feature (61)..(62): /note="This region represents a CpG dinucleotide"
  misc_feature (61)..(61): /note="Nucleotide may be methylated to form 5-methylcytosine"
ggtggtgcaaataggagttaactcaactccctgggagtcatatttggcaataaccagtcacgtggaaaatgtacatccccaatactgttgcacaatgctggaaacccggagcaggcaatgag

SEQ ID NO: 24688 - DNA, 122 bp, Homo sapiens
  misc_feature (61)..(62): /note="This region represents a CpG dinucleotide"
  misc_feature (61)..(61): /note="Nucleotide may be methylated to form 5-methylcytosine"
acaactcaacattcccagtgctgttagtagtttaaggtttctccgcaatgccaggacattcgatgccaacatatgtgagtagtttagtgacttcatttctaggcttcatgccaagaatttct

SEQ ID NO: 24689 - DNA, 122 bp, Homo sapiens
  misc_feature (61)..(62): /note="This region represents a CpG dinucleotide"
  misc_feature (61)..(61): /note="Nucleotide may be methylated to form 5-methylcytosine"
tatcccaaattgaggcaaagggcaggtttttgtatcctctcctggactagtcattggatgcggtctgtcctcagggaggggcgtttttttgggcgaggctgcttcctttaatccagggcagg

SEQ ID NO: 24690 - DNA, 122 bp, Homo sapiens
  misc_feature (61)..(62): /note="This region represents a CpG dinucleotide"
  misc_feature (61)..(61): /note="Nucleotide may be methylated to form 5-methylcytosine"
ttcacaccattaacaatgaccagctgtgaagaagcagatcaccccacctgaggacagccccgaaggaagaggtgcttttaccaccacccaaggatgaaagcagtgatttctccttcaaatcc

SEQ ID NO: 24691 - DNA, 122 bp, Homo sapiens
  misc_feature (61)..(62): /note="This region represents a CpG dinucleotide"
  misc_feature (61)..(61): /note="Nucleotide may be methylated to form 5-methylcytosine"
agtgagaggggtggaggcagggtgggcggggcaggggcagaggctggagtgggtgtatctcggggaccttcatgcctcatggcctccaccctcagctatgattccaacctcaacgcgtcccg

SEQ ID NO: 24692 - DNA, 122 bp, Homo sapiens
  misc_feature (61)..(62): /note="This region represents a CpG dinucleotide"
  misc_feature (61)..(61): /note="Nucleotide may be methylated to form 5-methylcytosine"
actacagtaagtcttcacttaacattgacaataggttctttgactttaagcgaaaccatacgtaacaaaatcaatttttttctcatcacttataaggaaatgacgttattagaggacctgct

SEQ ID NO: 24693 - DNA, 122 bp, Homo sapiens
  misc_feature (61)..(62): /note="This region represents a CpG dinucleotide"
  misc_feature (61)..(61): /note="Nucleotide may be methylated to form 5-methylcytosine"
gatggtcacagttacaggaagtaccaatataactatattgtaccaatatatcgtaatgtgcgccaacagtggtggtcctttttggtcctttttttcttttctgtgttctactttaacatttc

SEQ ID NO: 24694 - DNA, 122 bp, Homo sapiens
  misc_feature (61)..(62): /note="This region represents a CpG dinucleotide"
  misc_feature (61)..(61): /note="Nucleotide may be methylated to form 5-methylcytosine"
tgtgggaagggctgacttttctacctgttgccaaagacctgctgtctgtggcagccgcaacgatatttgtcctgctattaatcctctggaatcgatcaaatatcaaaaataacttctctttg

SEQ ID NO: 24695 - DNA, 122 bp, Homo sapiens
  misc_feature (61)..(62): /note="This region represents a CpG dinucleotide"
  misc_feature (61)..(61): /note="Nucleotide may be methylated to form 5-methylcytosine"
ataccaaacctgagattacaatttaaacattgctatcaaagctcaggaagtacagacagacgttggggcatttttgtgacagggaagtattctggtttttacattactgaaatttgctaagg

SEQ ID NO: 24696 - DNA, 122 bp, Homo sapiens
  misc_feature (61)..(62): /note="This region represents a CpG dinucleotide"
  misc_feature (61)..(61): /note="Nucleotide may be methylated to form 5-methylcytosine"
aagttgaggtggtttcaatacagctcttcttagacaggcagatggactttacaacatatgcgtgtcctgcccaagcttatactacactggtaatcctcataaagtaaaaatacctcttagtc

SEQ ID NO: 24697 - DNA, 122 bp, Homo sapiens
  misc_feature (61)..(62): /note="This region represents a CpG dinucleotide"
  misc_feature (61)..(61): /note="Nucleotide may be methylated to form 5-methylcytosine"
gttcaaagtacatgctttttctttctatccaggtcttgtccttatactgaatttgcagctcggtaagtcatggactccatgttttatcattgaatgtatatatacgagataaaccatactat

SEQ ID NO: 24698 - DNA, 122 bp, Homo sapiens
  misc_feature (61)..(62): /note="This region represents a CpG dinucleotide"
  misc_feature (61)..(61): /note="Nucleotide may be methylated to form 5-methylcytosine"
ctctctagctgttttccttcactaatatttccaaaacacacaacaacagttggcatcgctcgcatataaacagctcttccatgtcactgagaaaacgagcaagatccagggaggaaaaatgg

SEQ ID NO: 24699 - DNA, 122 bp, Homo sapiens
  misc_feature (61)..(62): /note="This region represents a CpG dinucleotide"
  misc_feature (61)..(61): /note="Nucleotide may be methylated to form 5-methylcytosine"
tacatagcgatgaactagccaggacacattgttatttttcccctggtttgcctccctgttcgtaatcctccgtcaccgttcacatttctattgattttcagccaaactcgggggttggcaaa

SEQ ID NO: 24700 - DNA, 122 bp, Homo sapiens
  misc_feature (61)..(62): /note="This region represents a CpG dinucleotide"
  misc_feature (61)..(61): /note="Nucleotide may be methylated to form 5-methylcytosine"
ttgtatctctacttttaagtggaatttcccaaagtcaattaattaccaagcccttttctccgtgtctagacatctccctaacagtgggagcaagcagatatgagtttagaggtacactttgg

SEQ ID NO: 24701 - DNA, 122 bp, Homo sapiens
  misc_feature (61)..(62): /note="This region represents a CpG dinucleotide"
  misc_feature (61)..(61): /note="Nucleotide may be methylated to form 5-methylcytosine"
taagggagaaacctgttttttcttatgcaatccccagagtgtaaacaggcaagttcgtctcgtctcttcaactgcttacttttgtattgttgttacctgtttgtggtttttttttgggtttt

SEQ ID NO: 24702 - DNA, 122 bp, Homo sapiens
  misc_feature (61)..(62): /note="This region represents a CpG dinucleotide"
  misc_feature (61)..(61): /note="Nucleotide may be methylated to form 5-methylcytosine"
taaagcaatttagccctgcataccaagtcaggccctaccttctaacccagtaacaccactcggtggaaagtggcttatggctcttttatacaataggagacacttgcgtggggcactaataa

SEQ ID NO: 24703 - DNA, 122 bp, Homo sapiens
  misc_feature (61)..(62): /note="This region represents a CpG dinucleotide"
  misc_feature (61)..(61): /note="Nucleotide may be methylated to form 5-methylcytosine"
cagatctatggagcctggaagcacatcccacatagaaaacatgcagtcagatggaaagaacgaatgagagctatggttgacatgaatatctggcttgctttcttttcatgtaatttgggaac

SEQ ID NO: 24704 - DNA, 122 bp, Homo sapiens
  misc_feature (61)..(62): /note="This region represents a CpG dinucleotide"
  misc_feature (61)..(61): /note="Nucleotide may be methylated to form 5-methylcytosine"
gtatatagataaatagctctttgaggaagacgcggtcgtaggtgttgcggatcgctgatccgcacgctcctgctactgactcaccgctgttcgccctcgccgaggaaccagtcgctcaggaa

SEQ ID NO: 24705 - DNA, 122 bp, Homo sapiens
  misc_feature (61)..(62): /note="This region represents a CpG dinucleotide"
  misc_feature (61)..(61): /note="Nucleotide may be methylated to form 5-methylcytosine"
gccaattcctaacccaaagttttcccaacagaaccttagtagaacaaaatgctttaagcacgtagtgtacaccctcattgcatgtcaaaaagaactggtattatttcaggaagaacaactca

SEQ ID NO: 24706 - DNA, 122 bp, Homo sapiens
  misc_feature (61)..(62): /note="This region represents a CpG dinucleotide"
  misc_feature (61)..(61): /note="Nucleotide may be methylated to form 5-methylcytosine"
atcagtaaggggaagggagtactgagggaggagattgtgtagttcatcaaatcagagcggcgtttgctgggatgacatcctgcattcagagtggacaagggaaagatggagatggagagcct

SEQ ID NO: 24707 - DNA, 122 bp, Homo sapiens
  misc_feature (61)..(62): /note="This region represents a CpG dinucleotide"
  misc_feature (61)..(61): /note="Nucleotide may be methylated to form 5-methylcytosine"
tccccacgttcagggtgctttgtggcccgactccaaggggtgtcattctcattgagtttgcgagaacattcctggagtgacatcagaactgccccagccagaggctcaggggctgtttgctt

SEQ ID NO: 24708 - DNA, 122 bp, Homo sapiens
  misc_feature (61)..(62): /note="This region represents a CpG dinucleotide"
  misc_feature (61)..(61): /note="Nucleotide may be methylated to form 5-methylcytosine"
ctaactggccaaaggatgtcatccagaaaagctttcacaatagggagctggccccgtggccgctgtccaggaagttcagttgcagacggactgggctgaataagatggggccacccagcaag

SEQ ID NO: 24709 - DNA, 122 bp, Homo sapiens
  misc_feature (61)..(62): /note="This region represents a CpG dinucleotide"
  misc_feature (61)..(61): /note="Nucleotide may be methylated to form 5-methylcytosine"
acgactgttgtgaacactgaatgggccaacaaacctaaacgttaaatgaactgataacgccgtcagcacggagcaggcgctgggtgtttgcgctcttgcgcgtgcgctctgtggggcgcagg

SEQ ID NO: 24710 - DNA, 122 bp, Homo sapiens
  misc_feature (61)..(62): /note="This region represents a CpG dinucleotide"
  misc_feature (61)..(61): /note="Nucleotide may be methylated to form 5-methylcytosine"
attgcaaaacacaggaaaatgtatgtttcaagaagtgggtgactgtgctgagagttactacgggatcaagtaagataaggacttaagacattctaaggaaattaccagcaagaacatccatg

SEQ ID NO: 24711 - DNA, 122 bp, Homo sapiens
  misc_feature (61)..(62): /note="This region represents a CpG dinucleotide"
  misc_feature (61)..(61): /note="Nucleotide may be methylated to form 5-methylcytosine"
gcattgactaatcatttcctgaatcattactaagtgatgcttcatacaattcttggcaaccgagtcttttaaactgcaacagatgtgaagtggtgagtaatatacttccgtatttttctccc

SEQ ID NO: 24712 - DNA, 122 bp, Homo sapiens
  misc_feature (61)..(62): /note="This region represents a CpG dinucleotide"
  misc_feature (61)..(61): /note="Nucleotide may be methylated to form 5-methylcytosine"
aaatgaggtgaggacgtaatgtcctatcacaggactgggcacatagtagcactcaacaaacgtcagctccattctggagaataaagaataatctcattagaactcctgggagaaaaacatga

SEQ ID NO: 24713 - DNA, 122 bp, Homo sapiens
  misc_feature (61)..(62): /note="This region represents a CpG dinucleotide"
  misc_feature (61)..(61): /note="Nucleotide may be methylated to form 5-methylcytosine"
atatttctcacaactcagtttggctccctggaaggcatttcttttgaatcaactgcaattcgtatctaacaatttcatagcttacaagtaagactgctattaaaatgttaactaattctggg

SEQ ID NO: 24714 - DNA, 122 bp, Homo sapiens
  misc_feature (61)..(62): /note="This region represents a CpG dinucleotide"
  misc_feature (61)..(61): /note="Nucleotide may be methylated to form 5-methylcytosine"
gctacaaccaagccttcctgtgtgttctcacctgccccagctgggtgaggtctcaggccacgctcttccttgggcccctgggatggtgcctagttgcataactatttgaatggctctgcagg

SEQ ID NO: 24715 - DNA, 122 bp, Homo sapiens
  misc_feature (61)..(62): /note="This region represents a CpG dinucleotide"
  misc_feature (61)..(61): /note="Nucleotide may be methylated to form 5-methylcytosine"
aaaatggattgtactttgttttccttcataaagggtaatgaggatataatctcaaagctacgcttgaccatcatctgtcaaaccaaagcaaataagccagtgcctgtctttccttattgtaa

SEQ ID NO: 24716 - DNA, 122 bp, Homo sapiens
  misc_feature (61)..(62): /note="This region represents a CpG dinucleotide"
  misc_feature (61)..(61): /note="Nucleotide may be methylated to form 5-methylcytosine"
caagacatcttctatcaagctcctaatcaggccctcaatcaagttccatgttctctttggcggcgtattggaagcgtgaagtttaggcccacactttgctatccacaagctgacagagaggc

SEQ ID NO: 24717 - DNA, 122 bp, Homo sapiens
  misc_feature (61)..(62): /note="This region represents a CpG dinucleotide"
  misc_feature (61)..(61): /note="Nucleotide may be methylated to form 5-methylcytosine"
agcaaagccggccagacaacctctccaatctacgatatctatcaaatggggctggagtgtcgtgctctatctcctggggcctttggataaaatccttggcaaattttacattgcagaatgtt

SEQ ID NO: 24718 - DNA, 122 bp, Homo sapiens
  misc_feature (61)..(62): /note="This region represents a CpG dinucleotide"
  misc_feature (61)..(61): /note="Nucleotide may be methylated to form 5-methylcytosine"
agaagttgggactatttaaacagattagaatgctaaggttttgtgaggtcacacagagagcgagtgacagagtccagactgaatctggggttactcacctccaaatgcttccctgggtaaaa

SEQ ID NO: 24719 - DNA, 122 bp, Homo sapiens
  misc_feature (61)..(62): /note="This region represents a CpG dinucleotide"
  misc_feature (61)..(61): /note="Nucleotide may be methylated to form 5-methylcytosine"
aaattaacctgttgatgaacagccatgtatccagaaacagaatgtatcacttaaccacagcgaacagtgttttgtttgcaataagatggttgagtgctttttggcagtgtttacctgagtgt

SEQ ID NO: 24720 - DNA, 122 bp, Homo sapiens
  misc_feature (61)..(62): /note="This region represents a CpG dinucleotide"
  misc_feature (61)..(61): /note="Nucleotide may be methylated to form 5-methylcytosine"
gtttttctaaataggtgcatttttaaatgatgatagtacactgaatcatgatttcaggaacgtcaggatcagattctccaggacaggctgtggaagctgaagaaatagtaaaacaacttgat

SEQ ID NO: 24721 - DNA, 122 bp, Homo sapiens
  misc_feature (61)..(62): /note="This region represents a CpG dinucleotide"
  misc_feature (61)..(61): /note="Nucleotide may be methylated to form 5-methylcytosine"
tactgcccgttagcaaatccacaatacctatagctattactatcgccatgcttggtgattcgtggatgttctggggaatcacatgaacctgcgtatctgtgactcatgcatatgttcctcct

SEQ ID NO: 24722 - DNA, 122 bp, Homo sapiens
  misc_feature (61)..(62): /note="This region represents a CpG dinucleotide"
  misc_feature (61)..(61): /note="Nucleotide may be methylated to form 5-methylcytosine"
agttctgcagattgtcctccaggggctgcaagctgtgctttcaggaaacactcaagtgtccgctctggacaggatcagctcagggaggaggggcaggtgcccagctcctgcctgccagattt

SEQ ID NO: 24723 - DNA, 122 bp, Homo sapiens
  misc_feature (61)..(62): /note="This region represents a CpG dinucleotide"
  misc_feature (61)..(61): /note="Nucleotide may be methylated to form 5-methylcytosine"
agaggcagtaggatctgtgtaaaacttactgtggccacataagatgatgtcttctctttccgccttctcacttacgcaaacatattgcctcttataaaagacttgttatatgtggccaccca

SEQ ID NO: 24724 - DNA, 122 bp, Homo sapiens
  misc_feature (61)..(62): /note="This region represents a CpG dinucleotide"
  misc_feature (61)..(61): /note="Nucleotide may be methylated to form 5-methylcytosine"
tcccaggctcaagtggatcctcccactccagctacgtgggactataggcatgtgccagcacgtgcagctaatttttttttttttttgtagagatgaggtccttctttgttgcccaggctggt

SEQ ID NO: 24725 - DNA, 122 bp, Homo sapiens
  misc_feature (61)..(62): /note="This region represents a CpG dinucleotide"
  misc_feature (61)..(61): /note="Nucleotide may be methylated to form 5-methylcytosine"
ttaaaaatgagcaggaagctcatgtatgtttgcatttcagtgagccgggtcctgacctgccgccacccatcacggtcagcgtggtgcatcttaccgaggaggcgcaggcctggattcttttg

SEQ ID NO: 24726 - DNA, 122 bp, Homo sapiens
  misc_feature (61)..(62): /note="This region represents a CpG dinucleotide"
  misc_feature (61)..(61): /note="Nucleotide may be methylated to form 5-methylcytosine"
cctagttcataggtggtacattcttgctgtgtcctcacatgatggaagaactaactagctcgctgcggcctcttttataaaggcactaatcccattcaggagagttccccttcatgacctaa

SEQ ID NO: 24727 - DNA, 122 bp, Homo sapiens
  misc_feature (61)..(62): /note="This region represents a CpG dinucleotide"
  misc_feature (61)..(61): /note="Nucleotide may be methylated to form 5-methylcytosine"
cttaaaaccttctaatctctgcctatcatctttgagatcaggtccagagttatctggctccggccctatcaaactctctaatcatttatctcaccattaaagtcacacatttcactttccag

SEQ ID NO: 24728 - DNA, 122 bp, Homo sapiens
  misc_feature (61)..(62): /note="This region represents a CpG dinucleotide"
  misc_feature (61)..(61): /note="Nucleotide may be methylated to form 5-methylcytosine"
ggggaaagagcagaaaaaaaaaaccaaccataacaacaacaacaacagaaagcagagaaacgaaggtctggtgctagtacaaggaaagaaagcaacatggcagaggaccatattgactagtg

SEQ ID NO: 24729 - DNA, 122 bp, Homo sapiens
  misc_feature (61)..(62): /note="This region represents a CpG dinucleotide"
  misc_feature (61)..(61): /note="Nucleotide may be methylated to form 5-methylcytosine"
ttgatgttggaaaaacgtggccgatagacttgctggattcagggctgccacgaaccttcacgctgcaaaaactcagtatctggaagtgcagcgaagccaggcacagtgaacaagcttccttc

SEQ ID NO: 24730 - DNA, 122 bp, Homo sapiens
  misc_feature (61)..(62): /note="This region represents a CpG dinucleotide"
  misc_feature (61)..(61): /note="Nucleotide may be methylated to form 5-methylcytosine"
acctcaagagagtagctattgtagaaaagaacagaaactcaaaacacggtataagataaacgaccagataaacactaaggcactgtaaatttaaatgatggacactgtccagaatatgtcca

SEQ ID NO: 24731 - DNA, 122 bp, Homo sapiens
  misc_feature (61)..(62): /note="This region represents a CpG dinucleotide"
  misc_feature (61)..(61): /note="Nucleotide may be methylated to form 5-methylcytosine"
tagaccgggtcttggtcgggacaagcgaacgttgtgggggcgttgtgagaaaaacccccgcgaggctgggccggctgttcgtccttgggccagccttgacggctctggttggttggggcaag

SEQ ID NO: 24732 - DNA, 122 bp, Homo sapiens
  misc_feature (61)..(62): /note="This region represents a CpG dinucleotide"
  misc_feature (61)..(61): /note="Nucleotide may be methylated to form 5-methylcytosine"
gatagtgattcctctgatggatctaagcaaagtacagtgaaaatgattcaccattctagacggcattaagaacatttgtgattcatgggaaaaagtaaaaatatcaacattaggctggtgag

SEQ ID NO: 24733 - DNA, 122 bp, Homo sapiens
  misc_feature (61)..(62): /note="This region represents a CpG dinucleotide"
  misc_feature (61)..(61): /note="Nucleotide may be methylated to form 5-methylcytosine"
tttaagttctcattgcccaactgtatactctgagtcactgtcctgtcacagccatatttccggctggcattgtgtctgcaaccaagagtgtgactgcaagaacacaaggcactgtgcaaaga

SEQ ID NO: 24734 - DNA, 122 bp, Homo sapiens
  misc_feature (61)..(62): /note="This region represents a CpG dinucleotide"
  misc_feature (61)..(61): /note="Nucleotide may be methylated to form 5-methylcytosine"
gaatgcaaaagcttcaaatgcagactatgcaggtgtgttgttctggcaactcaaataccacgagctgtgctgccttcagttatgtgatttgctagagtgatgaacaactcttgttaaagttc

SEQ ID NO: 24735 - DNA, 122 bp, Homo sapiens
  misc_feature (61)..(62): /note="This region represents a CpG dinucleotide"
  misc_feature (61)..(61): /note="Nucleotide may be methylated to form 5-methylcytosine"
tttcagtttgtggaaagtgacgactttggacatccactgttccccagtagcggggctgtccgggtgaatgtacatcctctttggcatttcggggtcggccttaccagccaccatccaccgag

SEQ ID NO: 24736 - DNA, 122 bp, Homo sapiens
  misc_feature (61)..(62): /note="This region represents a CpG dinucleotide"
  misc_feature (61)..(61): /note="Nucleotide may be methylated to form 5-methylcytosine"
tcccagcttctggtgattccaggaaatccttggtgttccttgacttgtgtcttcttaacccgtctctacctccatttcctccattttaactgggtcatcttccctgtgtctgtctacacatg

SEQ ID NO: 24737 - DNA, 122 bp, Homo sapiens
  misc_feature (61)..(62): /note="This region represents a CpG dinucleotide"
  misc_feature (61)..(61): /note="Nucleotide may be methylated to form 5-methylcytosine"
ccttacagggagaaactgacacaaaaagatggaatatagtgtagaaaatattagaaacttcgaggatcaatctatgatttgattaataggatttctaaacatagaaagctaaaaaaattgag

SEQ ID NO: 24738 - DNA, 122 bp, Homo sapiens
  misc_feature (61)..(62): /note="This region represents a CpG dinucleotide"
  misc_feature (61)..(61): /note="Nucleotide may be methylated to form 5-methylcytosine"
agctcctcccatatggtggacatggaaagttgtttagtctgtctaatatgatgatgatgccgattaccatgagcatcactgaaggtactgtgtgtacagagcctagcctgcagtctgggtgt

SEQ ID NO: 24739 - DNA, 122 bp, Homo sapiens
  misc_feature (61)..(62): /note="This region represents a CpG dinucleotide"
  misc_feature (61)..(61): /note="Nucleotide may be methylated to form 5-methylcytosine"
aatcttattaaactaacctatcaaatctaatcttattaaatcccaaacactggcagggcacggtggctcactcctgtaatcccagcactttgggaggtcgaggcaggtggatcacctgaggt

SEQ ID NO: 24740 - DNA, 122 bp, Homo sapiens
  misc_feature (61)..(62): /note="This region represents a CpG dinucleotide"
  misc_feature (61)..(61): /note="Nucleotide may be methylated to form 5-methylcytosine"
ctgtagtcccagctacttggagggctgaggtgggaggattgcttgagcccaggagtttgacgctgcagtgagcgagattgtgccactcgtaacagagcgagaccctgtctcaccaaaaaaaa

SEQ ID NO: 24741 - DNA, 122 bp, Homo sapiens
  misc_feature (61)..(62): /note="This region represents a CpG dinucleotide"
  misc_feature (61)..(61): /note="Nucleotide may be methylated to form 5-methylcytosine"
ctcatagcataaatgtctccatacagcaaatgacagagaatttttatctgctgctaataccgccaaatgcaacagaagagtgaaactcagaaaagcctagattagataaagaccgtgacagg

SEQ ID NO: 24742 - DNA, 122 bp, Homo sapiens
  misc_feature (61)..(62): /note="This region represents a CpG dinucleotide"
  misc_feature (61)..(61): /note="Nucleotide may be methylated to form 5-methylcytosine"
aatttctcattttagaaatatttcccctgaacgtcgcatcaactaggatggtggttcaaacgtttaaagcaatggaactctttatttgcattcttcctataaaatgcattatcagtggtggc

SEQ ID NO: 24743 - DNA, 122 bp, Homo sapiens
  misc_feature (61)..(62): /note="This region represents a CpG dinucleotide"
  misc_feature (61)..(61): /note="Nucleotide may be methylated to form 5-methylcytosine"
gcttatagccttggccccatcagaacttgcttccaaatattccctttgtggggctggggacgcccactgggctgggggtgctacactggccttgaagtcctggccacctgccagggtcaaca

SEQ ID NO: 24744 - DNA, 122 bp, Homo sapiens
  misc_feature (61)..(62): /note="This region represents a CpG dinucleotide"
  misc_feature (61)..(61): /note="Nucleotide may be methylated to form 5-methylcytosine"
agaaaccctggctcagtgagtctcctttccttatctgctgaaccatcacagggcctactacgggcactcctatgatgatcagagagtacatggcacctgctcagcacagtgcctggcacgca

SEQ ID NO: 24745 - DNA, 122 bp, Homo sapiens
  misc_feature (61)..(62): /note="This region represents a CpG dinucleotide"
  misc_feature (61)..(61): /note="Nucleotide may be methylated to form 5-methylcytosine"
agtaaaggatgcagaatgacaaattctagcctctgtgaggcaggatttgctgatttgctgcgttgtttaaggagataatggctctttttcatgggacagtttcaggcaatggctgggacagg

SEQ ID NO: 24746 - DNA, 122 bp, Homo sapiens
  misc_feature (61)..(62): /note="This region represents a CpG dinucleotide"
  misc_feature (61)..(61): /note="Nucleotide may be methylated to form 5-methylcytosine"
gagtgtgggcgtggtaggtcagggaacgacttattcagctaatgcttccaaaaccctccccgctaaaggaaaagcatctggagactaaatatgtaaaatgacattggctatagagtcccacc

SEQ ID NO: 24747 - DNA, 122 bp, Homo sapiens
  misc_feature (61)..(62): /note="This region represents a CpG dinucleotide"
  misc_feature (61)..(61): /note="Nucleotide may be methylated to form 5-methylcytosine"
cctcttccagcctggaagagcatctgtcctacgctcctccttccgggagtgactcccgcccgcatctcggggtgggaagggttcaggaaacacagaccagcttatcttaaggaagcctggtc

SEQ ID NO: 24748 - DNA, 122 bp, Homo sapiens
  misc_feature (61)..(62): /note="This region represents a CpG dinucleotide"
  misc_feature (61)..(61): /note="Nucleotide may be methylated to form 5-methylcytosine"
ttatttttttgaaacctctctttttacaagctgtgcaaatcttgaccccttggtgtcaggcgatgaaccttgttctgttttgttgctgttacctttaggaactgaactatccagccatcttc

SEQ ID NO: 24749 - DNA, 122 bp, Homo sapiens
  misc_feature (61)..(62): /note="This region represents a CpG dinucleotide"
  misc_feature (61)..(61): /note="Nucleotide may be methylated to form 5-methylcytosine"
ttgggggataggcacctcttctgaaaaagaatgggctaagagatccaggagagagcttttcgccccatatacccacccccttgggctccaggaaccaggaaggagggagaggacagaaagga

SEQ ID NO: 24750 - DNA, 122 bp, Homo sapiens
  misc_feature (61)..(62): /note="This region represents a CpG dinucleotide"
  misc_feature (61)..(61): /note="Nucleotide may be methylated to form 5-methylcytosine"
cagatacaaccgtgtggccctgcatggtgcacagcacctgcttccctggggctgactgtacgtgacacataaactgctgtccatctggtctgtccagctttgggtgttatccccatagggtg

SEQ ID NO: 24751 - DNA, 122 bp, Homo sapiens
  misc_feature (61)..(62): /note="This region represents a CpG dinucleotide"
  misc_feature (61)..(61): /note="Nucleotide may be methylated to form 5-methylcytosine"
gtgtctacgtgtcttttgaacacactgataatgctgtctgcattaagacttccggccagccgccctgtccgggagggaggtgggggggtcagccccccgcccggccggccgccccatccggg

SEQ ID NO: 24752 - DNA, 122 bp, Homo sapiens
  misc_feature (61)..(62): /note="This region represents a CpG dinucleotide"
  misc_feature (61)..(61): /note="Nucleotide may be methylated to form 5-methylcytosine"
ccataatttctggtccatcaaggctgattgccctttcttgtcttcaaatgctgtctcatgcgcgtgtgcaaacacacacacacacacacacacacacacagagatagagatacacacacatg

SEQ ID NO: 24753 - DNA, 122 bp, Homo sapiens
  misc_feature (61)..(62): /note="This region represents a CpG dinucleotide"
  misc_feature (61)..(61): /note="Nucleotide may be methylated to form 5-methylcytosine"
tggcccgtagagggtagggagagcatagtgtggggaggaagagagctgcacatggtgaaacgcagggcccaacagcaggccctggtcttaggtgctgccaggttcattccaactgctcacag

SEQ ID NO: 24754 - DNA, 122 bp, Homo sapiens
  misc_feature (61)..(62): /note="This region represents a CpG dinucleotide"
  misc_feature (61)..(61): /note="Nucleotide may be methylated to form 5-methylcytosine"
accaaaaacaggtcttggctgagcgaggtggctcatccctgtaatcctgagaggtgacagcgtgctggcagtcctcagagccctcgcttgctctcggcacctcctctgcctgggctcccact

SEQ ID NO: 24755 - DNA, 122 bp, Homo sapiens
  misc_feature (61)..(62): /note="This region represents a CpG dinucleotide"
  misc_feature (61)..(61): /note="Nucleotide may be methylated to form 5-methylcytosine"
ctgggattataggcatgagccactgtgccccgcccagtctcaggtatttcttcatagcagcgtgaaaatgaactaatatgtatcccagaaccagaaaatgtgagagtaggaagacaatttac

SEQ ID NO: 24756 - DNA, 122 bp, Homo sapiens
  misc_feature (61)..(62): /note="This region represents a CpG dinucleotide"
  misc_feature (61)..(61): /note="Nucleotide may be methylated to form 5-methylcytosine"
aacatcctcaagccaggactgcatgtgaggaagacagcgccagcatcactgtttcatagtcggatccacaaagcccggggaagtggccggcagaagacaacacggaagccacacagcagaga

SEQ ID NO: 24757 - DNA, 122 bp, Homo sapiens
  misc_feature (61)..(62): /note="This region represents a CpG dinucleotide"
  misc_feature (61)..(61): /note="Nucleotide may be methylated to form 5-methylcytosine"
atatagaccgctgtagttttcccctgggaatttccctggacgatgcttcaaaagtgtctccgctactttcttcctcagatccttcctgtctgagctgctggtgtctttggttatgagtccta

SEQ ID NO: 24758 - DNA, 122 bp, Homo sapiens
  misc_feature (61)..(62): /note="This region represents a CpG dinucleotide"
  misc_feature (61)..(61): /note="Nucleotide may be methylated to form 5-methylcytosine"
attccagattgatgatggctttactatgttttcaaacatttaattgatgaattatcttcacggtatttcttaaggcatgtcaagtatttatcagaggttttgcttttagaaaaaaatgaatc

SEQ ID NO: 24759 - DNA, 122 bp, Homo sapiens
  misc_feature (61)..(62): /note="This region represents a CpG dinucleotide"
  misc_feature (61)..(61): /note="Nucleotide may be methylated to form 5-methylcytosine"
tgaagggtcaacaagtgtattactgcctgtcttcaccttcttgtgaccctaattttaagacggcaccttataggattcagaaagtagattatagtgctgcatttccgcagactaattttaga

SEQ ID NO: 24760 - DNA, 122 bp, Homo sapiens
  misc_feature (61)..(62): /note="This region represents a CpG dinucleotide"
  misc_feature (61)..(61): /note="Nucleotide may be methylated to form 5-methylcytosine"
acgagaggcgggaagaggcacacacagggagtgtgcggaagctgtgagtcatccagaacacgcagcggcctggcccggggccggggccccaggggtgctcacgaggcaggggcagcccctgt

SEQ ID NO: 24761 - DNA, 122 bp, Homo sapiens
  misc_feature (61)..(62): /note="This region represents a CpG dinucleotide"
  misc_feature (61)..(61): /note="Nucleotide may be methylated to form 5-methylcytosine"
tagagttgggtactgagtctgggtggggtgggaaaggaagaacaaacaaaagggcaaggacgtcaggaagcccagagagcttgggggaaagcattacaaagctgtctatgttttagttaaag

SEQ ID NO: 24762 - DNA, 122 bp, Homo sapiens
  misc_feature (61)..(62): /note="This region represents a CpG dinucleotide"
  misc_feature (61)..(61): /note="Nucleotide may be methylated to form 5-methylcytosine"
atcctcagagccctgctccgcaactgtccgtgcccggcgagggccgtgggtcccgagtcgcggcacccactctcgagacgtccgtccgcaccccagaactcgggcccaaggatgcccgtggc

SEQ ID NO: 24763 - DNA, 122 bp, Homo sapiens
  misc_feature (61)..(62): /note="This region represents a CpG dinucleotide"
  misc_feature (61)..(61): /note="Nucleotide may be methylated to form 5-methylcytosine"
gcctcgacacacctaacgaatggaggcgggccggaggccggtggaaccagctcgagctctcgagggccgtttgggggctcgcgccgtacggcttgtgaagtctcgcgcctctccccttagtc

SEQ ID NO: 24764 - DNA, 122 bp, Homo sapiens
  misc_feature (61)..(62): /note="This region represents a CpG dinucleotide"
  misc_feature (61)..(61): /note="Nucleotide may be methylated to form 5-methylcytosine"
aacagcctctgtgtgagttgcaggactgaggtcctctgcaatttctcagggaaatacttccgggagacgcagtcctcagtgcctggaggtctctgggtccaggtgagtgtggtgtgagtaat

SEQ ID NO: 24765 - DNA, 122 bp, Homo sapiens
  misc_feature (61)..(62): /note="This region represents a CpG dinucleotide"
  misc_feature (61)..(61): /note="Nucleotide may be methylated to form 5-methylcytosine"
atgtagagggtccatatggcctcagaatgacctgtgagtctcaccagttcctataacaaacgccacagatgcctcatgtgaagagcaagttttgtaaggaagctctggcattgagtgaagtc

SEQ ID NO: 24766 - DNA, 122 bp, Homo sapiens
  misc_feature (61)..(62): /note="This region represents a CpG dinucleotide"
  misc_feature (61)..(61): /note="Nucleotide may be methylated to form 5-methylcytosine"
agccaccgtgcctggcctaggttttcttttgcttgtgtaccaatgtttttggctggttggcgtcttgtttgtgctgaaatagcaagccagttttcctcactttggagctgcattgtctatca

SEQ ID NO: 24767 - DNA, 122 bp, Homo sapiens
  misc_feature (61)..(62): /note="This region represents a CpG dinucleotide"
  misc_feature (61)..(61): /note="Nucleotide may be methylated to form 5-methylcytosine"
gccgggggtcgtggatggcagcccctcttgggcttggtgattggctggtgacttcaggcacgtcgagggcccctccaacctcagcctcctcccctctggtacaatgcgggctgaaagaggtg

SEQ ID NO: 24768 - DNA, 122 bp, Homo sapiens
  misc_feature (61)..(62): /note="This region represents a CpG dinucleotide"
  misc_feature (61)..(61): /note="Nucleotide may be methylated to form 5-methylcytosine"
cgaactcctgaccttaggtgatctgcccacctcagcctcccaaagtcctgggattacaggcgtgagccaccacgccctgtcatgaatcaaagttttaactaatgattgtgagctgcaacaaa

SEQ ID NO: 24769 - DNA, 122 bp, Homo sapiens
  misc_feature (61)..(62): /note="This region represents a CpG dinucleotide"
  misc_feature (61)..(61): /note="Nucleotide may be methylated to form 5-methylcytosine"
gtgctctctaatcattgggctgctgcctggtctgcatgactatcctgagagtcactctgtcggtagccttgttcattcaattactatcatctccacctcattccattgcttctactccctat

SEQ ID NO: 24770 - DNA, 122 bp, Homo sapiens
  misc_feature (61)..(62): /note="This region represents a CpG dinucleotide"
  misc_feature (61)..(61): /note="Nucleotide may be methylated to form 5-methylcytosine"
ccagcccagccccacccacagatcccctgctcctgttgtgttctgttgtaaatcatttggcgagactgtattttagtaactgctgcctaacttccctgtgttctatttgagaggcgcctgtc

SEQ ID NO: 24771 - DNA, 122 bp, Homo sapiens
  misc_feature (61)..(62): /note="This region represents a CpG dinucleotide"
  misc_feature (61)..(61): /note="Nucleotide may be methylated to form 5-methylcytosine"
cagatcagatagttaatcttgcatttcagttgttccaggtacctttaaatattctttatacgcatcactactttgacaatattgtagttgatccaccactagattttgccattaatgcatta

SEQ ID NO: 24772 - DNA, 122 bp, Homo sapiens
  misc_feature (61)..(62): /note="This region represents a CpG dinucleotide"
  misc_feature (61)..(61): /note="Nucleotide may be methylated to form 5-methylcytosine"
cactcacagatttagcaaaaacaagcaaacaaataaaaaacaaaacaaaagcaaatcttgcggtacacagattttctaataaagattgtgttgaagtgagtcaggcacaataggtgccctca

SEQ ID NO: 24773 - DNA, 122 bp, Homo sapiens
  misc_feature (61)..(62): /note="This region represents a CpG dinucleotide"
  misc_feature (61)..(61): /note="Nucleotide may be methylated to form 5-methylcytosine"
ctaaaagctttttgggttaaggacatggtcattccatgttacagcttattttttcctaatcgaaatccccaaatgatcaatttcctagtcttcttccatgctttttctccactgcactatca

SEQ ID NO: 24774 - DNA, 122 bp, Homo sapiens
  misc_feature (61)..(62): /note="This region represents a CpG dinucleotide"
  misc_feature (61)..(61): /note="Nucleotide may be methylated to form 5-methylcytosine"
ccatcctaaccagtgctggaatattcgttaatgctgccatccctaatgagtcacaattaacgtggtttagtgtaattctattgtgaggcacagcatgctcacctagcaaaaccagagcacac

SEQ ID NO: 24775 - DNA, 122 bp, Homo sapiens
  misc_feature (61)..(62): /note="This region represents a CpG dinucleotide"
  misc_feature (61)..(61): /note="Nucleotide may be methylated to form 5-methylcytosine"
actgctctcaggggacttcaaatttactaacagtatcgtatttgtaatggggctcatgagcgcggacattgattatgcttctcaaactatgtatctatgttacaaatacttttgcacataca

SEQ ID NO: 24776 - DNA, 122 bp, Homo sapiens
  misc_feature (61)..(62): /note="This region represents a CpG dinucleotide"
  misc_feature (61)..(61): /note="Nucleotide may be methylated to form 5-methylcytosine"
gagagatgagaagtcttggttatttgtcaccttctgattttaacatctcagcagctaacacgtttgttttaaaatcttgagccagaaacgtgtatgtggatgggatgtggctcatcctgctg

SEQ ID NO: 24777 - DNA, 122 bp, Homo sapiens
  misc_feature (61)..(62): /note="This region represents a CpG dinucleotide"
  misc_feature (61)..(61): /note="Nucleotide may be methylated to form 5-methylcytosine"
tttttgccatcctgcttctccttggccccagcccctcagatagttccctgcgtgaggacacgggtgagggtttagagctcacacctgctgaccagatgccttcacttttttctatgcttttt

SEQ ID NO: 24778 - DNA, 122 bp, Homo sapiens
  misc_feature (61)..(62): /note="This region represents a CpG dinucleotide"
  misc_feature (61)..(61): /note="Nucleotide may be methylated to form 5-methylcytosine"
ggggctgagggttcctagagcaaatggcacaatgccacgaggcccgatctatccctatgacggaatctaaggtttcagcaagtatctgctggcttggtcatggcttgctcctcagtttgtag

SEQ ID NO: 24779 - DNA, 122 bp, Homo sapiens
  misc_feature (61)..(62): /note="This region represents a CpG dinucleotide"
  misc_feature (61)..(61): /note="Nucleotide may be methylated to form 5-methylcytosine"
tcttgattagtcattagtatgtagttggtatgaattgggtattataattaatctgggaaccgagtactatctagggtagccaaagagaaaggagtcattatcaggaaagtaaaatcactggt

SEQ ID NO: 24780 - DNA, 122 bp, Homo sapiens
  misc_feature (61)..(62): /note="This region represents a CpG dinucleotide"
  misc_feature (61)..(61): /note="Nucleotide may be methylated to form 5-methylcytosine"
acatgacctcaggcaaattacttaaatcctctgagcctcagttgcttcatctgaagaatgcgaccagacaggtggattttcaggcatgcaataaggtggcacaccttcaatcagagattctt

SEQ ID NO: 24781 - DNA, 122 bp, Homo sapiens
  misc_feature (61)..(62): /note="This region represents a CpG dinucleotide"
  misc_feature (61)..(61): /note="Nucleotide may be methylated to form 5-methylcytosine"
aggtgcacttacgtgtgccaccaggagcctggttgctggaaagggcatgtgtcagcaccacggggctgctacactatcctggcatatctgctgccatcctggggacctcaccctcatccctg

SEQ ID NO: 24782 - DNA, 122 bp, Homo sapiens
  misc_feature (61)..(62): /note="This region represents a CpG dinucleotide"
  misc_feature (61)..(61): /note="Nucleotide may be methylated to form 5-methylcytosine"
tggttgtggaagtttctgagtgttccacctcaagcctggtctcctggtctagctgaggagcgtgcagtgcgcggcccatggagaatatgcaggcagaggctgatcccagcttctgtgggttc

SEQ ID NO: 24783 - DNA, 122 bp, Homo sapiens
  misc_feature (61)..(62): /note="This region represents a CpG dinucleotide"
  misc_feature (61)..(61): /note="Nucleotide may be methylated to form 5-methylcytosine"
acatcccccatctcagagcagggctctctaaaagcagttcacccagtgaaacaaaaatgacgacactggggaacactcagctcagtttcaaggcaaccaggaaaaataatcacaaattaaga

SEQ ID NO: 24784 - DNA, 122 bp, Homo sapiens
  misc_feature (61)..(62): /note="This region represents a CpG dinucleotide"
  misc_feature (61)..(61): /note="Nucleotide may be methylated to form 5-methylcytosine"
gaataaataaaactttgcatattgaatgttgaaagctccaggctcttctctaactcagctcgtagaatgctggtcttacatgctgcaggctggagtttggaagactcacctctaggaaatct

SEQ ID NO: 24785 - DNA, 122 bp, Homo sapiens
  misc_feature (61)..(62): /note="This region represents a CpG dinucleotide"
  misc_feature (61)..(61): /note="Nucleotide may be methylated to form 5-methylcytosine"
tatctcaagttgatcagtcttcaaggaagaataataaattgtagaaatcttgatcataaacgacatgaagaaaagggaataaaaaaattaaggatttagaatagttcaaaacaggtccatta

SEQ ID NO: 24786 - DNA, 122 bp, Homo sapiens
  misc_feature (61)..(62): /note="This region represents a CpG dinucleotide"
  misc_feature (61)..(61): /note="Nucleotide may be methylated to form 5-methylcytosine"
ctcctgacttccactactcactgcatgaggattattctgtggaaaccagagtactaaggacgaggcgctggatgatttggtcaaagtcaaatgtgccaagtcagcatcgagcagctattttt

SEQ ID NO: 24787 - DNA, 122 bp, Homo sapiens
  misc_feature (61)..(62): /note="This region represents a CpG dinucleotide"
  misc_feature (61)..(61): /note="Nucleotide may be methylated to form 5-methylcytosine"
gctgcgcacagcgatggcaggccagcatgtgttccgagtgggagtgggctcagtggcactcggagcagctggccagcgtggctgggccctggcagtgaggggcttagcacccgggccagcag

SEQ ID NO: 24788 - DNA, 122 bp, Homo sapiens
  misc_feature (61)..(62): /note="This region represents a CpG dinucleotide"
  misc_feature (61)..(61): /note="Nucleotide may be methylated to form 5-methylcytosine"
gtgatctgcccgcctcagcctcccaaagtgctgggattacaggcatgagccaccgcacctcgccgggtaatgattcttgagacaagaggtggttaagtagcattattatgtaatgtttatat

SEQ ID NO: 24789 - DNA, 122 bp, Homo sapiens
  misc_feature (61)..(62): /note="This region represents a CpG dinucleotide"
  misc_feature (61)..(61): /note="Nucleotide may be methylated to form 5-methylcytosine"
aatgcactgactgaagaaacagcacacttactgctggcaagactctgaaataatgggtatcgtggcatggtttgggaaagttgcttgccatggaatgtgtggttcaggcaaatcgtttatca

SEQ ID NO: 24790 - DNA, 122 bp, Homo sapiens
  misc_feature (61)..(62): /note="This region represents a CpG dinucleotide"
  misc_feature (61)..(61): /note="Nucleotide may be methylated to form 5-methylcytosine"
tacttactgatttcaaacatttggaactaaactggaacgtatttttctttccgatttctgcgtttttgaggtgtgtgtaaacccaccagcgcagcagctgggagggcccttcaaaggtgggc

SEQ ID NO: 24791 - DNA, 122 bp, Homo sapiens
  misc_feature (61)..(62): /note="This region represents a CpG dinucleotide"
  misc_feature (61)..(61): /note="Nucleotide may be methylated to form 5-methylcytosine"
cactaaaaagggaggaaaatctcaattctgctagtttcgatctggaatacaaacgacaggcgccaggcttcccatctcacaatgagtgccttggagagatggtggtgtgccaggggtggggg

SEQ ID NO: 24792 - DNA, 122 bp, Homo sapiens
  misc_feature (61)..(62): /note="This region represents a CpG dinucleotide"
  misc_feature (61)..(61): /note="Nucleotide may be methylated to form 5-methylcytosine"
aatggagcaaaggtgatgtttcacttcatcacgtccagcactgtcccaaggttaaatgggcgcgtgaggacagttttctccggtcctggcgggtttgcccacctgccggccagcgttctgcg

SEQ ID NO: 24793 - DNA, 122 bp, Homo sapiens
  misc_feature (61)..(62): /note="This region represents a CpG dinucleotide"
  misc_feature (61)..(61): /note="Nucleotide may be methylated to form 5-methylcytosine"
tgcaattacattccacttctccagagttcctggagctcagcactggagcctggaatgattcgtcatgactaggtaatatcactcatatttagtaactatattggcatgcgagtttcctcttg

SEQ ID NO: 24794 - DNA, 122 bp, Homo sapiens
  misc_feature (61)..(62): /note="This region represents a CpG dinucleotide"
  misc_feature (61)..(61): /note="Nucleotide may be methylated to form 5-methylcytosine"
tcagtatctttgggtggcttatgcttattttaaaataatatccagttgctgcttgttgcacgaagtccagactcaagagagaatgagcatcattcagataatgcctcactgaaaaaaaaaaa

SEQ ID NO: 24795 - DNA, 122 bp, Homo sapiens
  misc_feature (61)..(62): /note="This region represents a CpG dinucleotide"
  misc_feature (61)..(61): /note="Nucleotide may be methylated to form 5-methylcytosine"
tcaatctctttgttcatatgcacaggctcttaatctctgttttccctttctttagagtaccgtagtctcagatgataaacttctctgaagctaatttcttcactgctgccctggagtgtctc

SEQ ID NO: 24796 - DNA, 122 bp, Homo sapiens
  misc_feature (61)..(62): /note="This region represents a CpG dinucleotide"
  misc_feature (61)..(61): /note="Nucleotide may be methylated to form 5-methylcytosine"
ccttcacttgaagctactttttatctgatggcctggactaaacagaggagtatctgttgacgtaagatagtaatgactaatcccaaaggtggctttgctgaagaaacaaagcatgtttaaaa

SEQ ID NO: 24797 - DNA, 122 bp, Homo sapiens
  misc_feature (61)..(62): /note="This region represents a CpG dinucleotide"
  misc_feature (61)..(61): /note="Nucleotide may be methylated to form 5-methylcytosine"
ggcggccacacctctccctccaaggctgattcagcagtgagtttcgtaaagctgttctgacgcttgagaagtcctcttaacactaagcaggtagtggattatggttgcttacttgctttatt

SEQ ID NO: 24798 - DNA, 122 bp, Homo sapiens
  misc_feature (61)..(62): /note="This region represents a CpG dinucleotide"
  misc_feature (61)..(61): /note="Nucleotide may be methylated to form 5-methylcytosine"
cttccccaatcaatactcttaaaatttcctatgcttgtctttactttaatctcctaatcccgtcatcttcgtaaactgaagatgtatgttgcctcaagaccctgtgatggttgcattaactg

SEQ ID NO: 24799 - DNA, 122 bp, Homo sapiens
  misc_feature (61)..(62): /note="This region represents a CpG dinucleotide"
  misc_feature (61)..(61): /note="Nucleotide may be methylated to form 5-methylcytosine"
ggcttgactgcgggccctcaggtgtccttgtccagggctcagcctccccatcctctgcagcggggacattctaagtgagtgtcttgtttaaaaaataaaggtggtaaaaactggagtgtgag

SEQ ID NO: 24800 - DNA, 122 bp, Homo sapiens
  misc_feature (61)..(62): /note="This region represents a CpG dinucleotide"
  misc_feature (61)..(61): /note="Nucleotide may be methylated to form 5-methylcytosine"
tctcaacctgtctgtgcctcaggttctccttctgtaaaagggccatcgtggttcctgtggcgtgggagggtgacaattactgtggtgaggggtgtggagcttgcagcagtgcttgtcacagc

SEQ ID NO: 24801 - DNA, 122 bp, Homo sapiens
  misc_feature (61)..(62): /note="This region represents a CpG dinucleotide"
  misc_feature (61)..(61): /note="Nucleotide may be methylated to form 5-methylcytosine"
cttctaaaccatagtgtattcacaggccacattccagcaagctcacaagtgccagcctgacgtgagtagtgctaatatcaaatctgacaacttccgttcggagtcaggcaggcagaatggta

SEQ ID NO: 24802 - DNA, 122 bp, Homo sapiens
  misc_feature (61)..(62): /note="This region represents a CpG dinucleotide"
  misc_feature (61)..(61): /note="Nucleotide may be methylated to form 5-methylcytosine"
caaaccacttttgagctttccactaattgggcagaggctgcacacaccatcattgcaaatcgataggggttttgaagccctgggtgtttcctgtttctggcacagcatggcaactgtcccag

SEQ ID NO: 24803 - DNA, 122 bp, Homo sapiens
  misc_feature (61)..(62): /note="This region represents a CpG dinucleotide"
  misc_feature (61)..(61): /note="Nucleotide may be methylated to form 5-methylcytosine"
aagtccaaacaagctttgcaagtccaggtctctcacaagttcatagtaatctcttcctggcgagagccacaaagcaatgggtgataccagaatggtgcttaccattcttaagtggagaaaat

SEQ ID NO: 24804 - DNA, 122 bp, Homo sapiens
  misc_feature (61)..(62): /note="This region represents a CpG dinucleotide"
  misc_feature (61)..(61): /note="Nucleotide may be methylated to form 5-methylcytosine"
cagaggcaatgacagttgtcaattcttgactgcttactttggaacgcgtggggcgggtctcgtgacattttatattgtattccctcactgtactaatcttttcacatgcccatctccccagc

SEQ ID NO: 24805 - DNA, 122 bp, Homo sapiens
  misc_feature (61)..(62): /note="This region represents a CpG dinucleotide"
  misc_feature (61)..(61): /note="Nucleotide may be methylated to form 5-methylcytosine"
tgcggccaactggacctggaaccttgcagggaaggaattctgggaagcatgggacccgcacggctcagctgacacagtataaactcaccagagcttgtccttgcttgtaaggcagtgaaaag

SEQ ID NO: 24806 - DNA, 122 bp, Homo sapiens
  misc_feature (61)..(62): /note="This region represents a CpG dinucleotide"
  misc_feature (61)..(61): /note="Nucleotide may be methylated to form 5-methylcytosine"
aaaagaatatttagtccacaaaccagtcaaaattaccactgaaatctaaaactaatttaacgcacatttttctccttctgaaatagtccagcctacaaccatgagctaaaatcagttaatac

SEQ ID NO: 24807 - DNA, 122 bp, Homo sapiens
  misc_feature (61)..(62): /note="This region represents a CpG dinucleotide"
  misc_feature (61)..(61): /note="Nucleotide may be methylated to form 5-methylcytosine"
aattgcccaagtcacaacatctttctagtggagccatgtacctgttttgagtcattgccacggtttttggaacaagctcccgcctacttgctgggactgagcctctctggcatgctctgacc

SEQ ID NO: 24808 - DNA, 122 bp, Homo sapiens
  misc_feature (61)..(62): /note="This region represents a CpG dinucleotide"
  misc_feature (61)..(61): /note="Nucleotide may be methylated to form 5-methylcytosine"
ccaacaacttcctgctgcgaagcagcggggaatcaaagcgtttgagagccttttcacacccgagagtggtgcagggcctaattaaatggccctcatatcctgcagcctggtggaggccgcat

SEQ ID NO: 24809 - DNA, 122 bp, Homo sapiens
  misc_feature (61)..(62): /note="This region represents a CpG dinucleotide"
  misc_feature (61)..(61): /note="Nucleotide may be methylated to form 5-methylcytosine"
tgaaatcagaccatcagccctgcaactctctccacatagtccagtccattccgggaccaacgcctgcaccctcagacaaggacaacccaaaagtgctctgcggctttaggacagagctcacc

SEQ ID NO: 24810 - DNA, 122 bp, Homo sapiens
  misc_feature (61)..(62): /note="This region represents a CpG dinucleotide"
  misc_feature (61)..(61): /note="Nucleotide may be methylated to form 5-methylcytosine"
tgggaagcagtatttaagctgtgtttacagtaagcactgtgagaaataaccggctaagcgcgtttgttattgttcagtcttttgatgtgcttttaaaaagtcgcatctccataaaacaccct

SEQ ID NO: 24811 - DNA, 122 bp, Homo sapiens
  misc_feature (61)..(62): /note="This region represents a CpG dinucleotide"
  misc_feature (61)..(61): /note="Nucleotide may be methylated to form 5-methylcytosine"
tggaggcagtaaggagattaggccccatctgcacagagggcaagatgggagctgcccaagcgtcaccatccagggggagccagaagccagcagcaaggtggctcatccccccaaacactgtg

SEQ ID NO: 24812 - DNA, 122 bp, Homo sapiens
  misc_feature (61)..(62): /note="This region represents a CpG dinucleotide"
  misc_feature (61)..(61): /note="Nucleotide may be methylated to form 5-methylcytosine"
gtggttctgagacagttacaggagtgctgtgcgtcacaggaggggccggaggcgctgctacggttcacagaggagagaaaggacaagtcatcatcacatcactgcatgggatttcagagcgt

SEQ ID NO: 24813 - DNA, 122 bp, Homo sapiens
  misc_feature (61)..(62): /note="This region represents a CpG dinucleotide"
  misc_feature (61)..(61): /note="Nucleotide may be methylated to form 5-methylcytosine"
aagtggtcacttccacacacgtattttctcatttaagtgtcatggaatgagaacattttacgagctaggacctattattctctactgtaggacacaggtcatattattcttttatcacagag

SEQ ID NO: 24814 - DNA, 122 bp, Homo sapiens
  misc_feature (61)..(62): /note="This region represents a CpG dinucleotide"
  misc_feature (61)..(61): /note="Nucleotide may be methylated to form 5-methylcytosine"
tccagacagcccctaatctactgcttagtccccaccctgagctcctccgtcctcagggcccgaatccactcacgtcttcctggcagggttgtaaggaaagggtagggctctccttgggaggt

SEQ ID NO: 24815 - DNA, 122 bp, Homo sapiens
  misc_feature (61)..(62): /note="This region represents a CpG dinucleotide"
  misc_feature (61)..(61): /note="Nucleotide may be methylated to form 5-methylcytosine"
ctccaccatgttatgatgcaacatgagacactcaccagaagctgaccagatgggctgccccgtcttggactttccagcctctagaataatgagctaaataaaccacttttctttacaaatta

SEQ ID NO: 24816 - DNA, 122 bp, Homo sapiens
  misc_feature (61)..(62): /note="This region represents a CpG dinucleotide"
  misc_feature (61)..(61): /note="Nucleotide may be methylated to form 5-methylcytosine"
aaaggaccagtaacttctgctgctgatgtagctgccacagggattagggctggtgaggcacgtgtttaagtctcaggttccttaatgccagatgtgtagtctcagtcaatttcctcatttct

SEQ ID NO: 24817 - DNA, 122 bp, Homo sapiens
  misc_feature (61)..(62): /note="This region represents a CpG dinucleotide"
  misc_feature (61)..(61): /note="Nucleotide may be methylated to form 5-methylcytosine"
agagaaattcatcatttttgtatctctactttcattttctgtaaacaatgtacaacttaacgtacaaaattgctatgatcaggtctgctggtagttctagatttaaatatggaaaagcctca

SEQ ID NO: 24818 - DNA, 122 bp, Homo sapiens
  misc_feature (61)..(62): /note="This region represents a CpG dinucleotide"
  misc_feature (61)..(61): /note="Nucleotide may be methylated to form 5-methylcytosine"
aaatgccttcacatgcatgcacacatagtgacccaccccacacatgtgcatgcattctcacgcatgctccacacacacacgggggcacacacatacgcacaggccgcacatgcccacaccca

SEQ ID NO: 24819 - DNA, 122 bp, Homo sapiens
  misc_feature (61)..(62): /note="This region represents a CpG dinucleotide"
  misc_feature (61)..(61): /note="Nucleotide may be methylated to form 5-methylcytosine"
tatatcacctaatcttcagtcctattctgacattctcttggagagctggttttgccttttcgtttatttgccttttataaaactgaaggctcatcaacttctcagcaaacaggaaaatatat

SEQ ID NO: 24820 - DNA, 122 bp, Homo sapiens
  misc_feature (61)..(62): /note="This region represents a CpG dinucleotide"
  misc_feature (61)..(61): /note="Nucleotide may be methylated to form 5-methylcytosine"
ctctcccctcaccttgggttccatgggtttgggtgagctggcatcaacccgtgatccaaccgtgaacctgtgaccctgctctggcctatgagatcatcacatctacccagccaaagtgattg

SEQ ID NO: 24821 - DNA, 122 bp, Homo sapiens
  misc_feature (61)..(62): /note="This region represents a CpG dinucleotide"
  misc_feature (61)..(61): /note="Nucleotide may be methylated to form 5-methylcytosine"
ttgacatcaggttgatgaaatcacacatgtagtggcccaggtgtacacgggcttgttccccggagcatggctgaagtctctttatgaataataaaattgttgtattttgtgcagcagggagg

SEQ ID NO: 24822 - DNA, 122 bp, Homo sapiens
  misc_feature (61)..(62): /note="This region represents a CpG dinucleotide"
  misc_feature (61)..(61): /note="Nucleotide may be methylated to form 5-methylcytosine"
tcccttacctctcctcagacctccttttgggtgtgtgagtcttacatgaacagtcatttccgtcacaagagttcaaggctgcagtaagccacagttgcaccaccgtactccagcctgggcag

SEQ ID NO: 24823 - DNA, 122 bp, Homo sapiens
  misc_feature (61)..(62): /note="This region represents a CpG dinucleotide"
  misc_feature (61)..(61): /note="Nucleotide may be methylated to form 5-methylcytosine"
ccactgcattctcttggtgaaagcaagccacagccctatcccacatttaaggagagaggacgacacaagacagaggctactaggatgttaagttcaatgtcacagacccccacaaccacctc

SEQ ID NO: 24824 - DNA, 122 bp, Homo sapiens
  misc_feature (61)..(62): /note="This region represents a CpG dinucleotide"
  misc_feature (61)..(61): /note="Nucleotide may be methylated to form 5-methylcytosine"
acacacacagacttcacctatggctgaacttctgcccttgggtgaccaacaccattaggacgcgggtcaaaaggttgtagtgtgacagaaaatgcagccttattgaatgaaagagaaaatga

SEQ ID NO: 24825 - DNA, 122 bp, Homo sapiens
  misc_feature (61)..(62): /note="This region represents a CpG dinucleotide"
  misc_feature (61)..(61): /note="Nucleotide may be methylated to form 5-methylcytosine"
cttatttaaaagccattctgtttattaaaataatagttttggatgagaaacaatgaaattcgtagaatgctcatagaataacctttgctgcacaacagactgtctggggatcttcattaaaa

SEQ ID NO: 24826 - DNA, 122 bp, Homo sapiens
  misc_feature (61)..(62): /note="This region represents a CpG dinucleotide"
  misc_feature (61)..(61): /note="Nucleotide may be methylated to form 5-methylcytosine"
ctcatctcctactgccctccctctccctctctgctcttgcaatagctggaataggccaggcgcgcttcatgctcaggaccttgaatgctttgtgccttgatattgccttgccacacttccca

SEQ ID NO: 24827 - DNA, 122 bp, Homo sapiens
  misc_feature (61)..(62): /note="This region represents a CpG dinucleotide"
  misc_feature (61)..(61): /note="Nucleotide may be methylated to form 5-methylcytosine"
tgacctcgtgatctgcccgcctcagcctcccaaagtgctgggattacaggcatgagccaccgtgcctggccacatttctgtatatcttgcaagcagacacactgtctgtcttttatttgatc

SEQ ID NO: 24828 - DNA, 122 bp, Homo sapiens
  misc_feature (61)..(62): /note="This region represents a CpG dinucleotide"
  misc_feature (61)..(61): /note="Nucleotide may be methylated to form 5-methylcytosine"
agactggaaaccaccctggacaggatgctgttccatcacagggcacactcacacccacaccgatgcccacactcactcttactgggaccattgagacatgccagtgaaactgacttgcacat

SEQ ID NO: 24829 - DNA, 122 bp, Homo sapiens
  misc_feature (61)..(62): /note="This region represents a CpG dinucleotide"
  misc_feature (61)..(61): /note="Nucleotide may be methylated to form 5-methylcytosine"
ttttattatcaccatctgcttgaaattctaaacaatgttggtgattaaaatactcctcctcgaaagggtaggctcacccccaaccttggtacaccactgtaacaagctctccataccaatta

SEQ ID NO: 24830 - DNA, 122 bp, Homo sapiens
  misc_feature (61)..(62): /note="This region represents a CpG dinucleotide"
  misc_feature (61)..(61): /note="Nucleotide may be methylated to form 5-methylcytosine"
cagacatactctgatctcagtctttggatatgccaagtcccacgcccttcaggtcccaaacgccaagcctcctgtatagacacttgagctgccatctgccatgggcatgggagacttgacac

SEQ ID NO: 24831 - DNA, 122 bp, Homo sapiens
  misc_feature (61)..(62): /note="This region represents a CpG dinucleotide"
  misc_feature (61)..(61): /note="Nucleotide may be methylated to form 5-methylcytosine"
gatattgcaaaaagttgtgccaccctaggctatatgatataaacttagaaagtctatcaacgtgaaaggtgaagagacctctagagacatcggggacaaactccaaatttgggaaaggtcca

SEQ ID NO: 24832 - DNA, 122 bp, Homo sapiens
  misc_feature (61)..(62): /note="This region represents a CpG dinucleotide"
  misc_feature (61)..(61): /note="Nucleotide may be methylated to form 5-methylcytosine"
ttaataataatataacaatagttatatagcatgctttgtgtcaggccttgttttaagtgccggctaaccataggtcgaaggcttcctggattccctagcagaggaatgaatgacatgaaagg

SEQ ID NO: 24833 - DNA, 122 bp, Homo sapiens
  misc_feature (61)..(62): /note="This region represents a CpG dinucleotide"
  misc_feature (61)..(61): /note="Nucleotide may be methylated to form 5-methylcytosine"
tttgaagactacaagcgggaggtgttggaggccctgggtgaagtcatggtcagccggccccgagagtgagctttccttcccagaagtctcccgagagacatatttgtgtggcctagaagtcc

SEQ ID NO: 24834 - DNA, 122 bp, Homo sapiens
  misc_feature (61)..(62): /note="This region represents a CpG dinucleotide"
  misc_feature (61)..(61): /note="Nucleotide may be methylated to form 5-methylcytosine"
agagccttaattatggatgactcttggtaattccaagaagattatccagtatgtgtgtcacgtgggtcccttgccttttacctattgaccatttcaccacttgaaagtactttatatcctca

SEQ ID NO: 24835 - DNA, 122 bp, Homo sapiens
  misc_feature (61)..(62): /note="This region represents a CpG dinucleotide"
  misc_feature (61)..(61): /note="Nucleotide may be methylated to form 5-methylcytosine"
gatttctggacacacatcctggttgggctttctggagctttatgaatttgtagatttatacgtttcaccaagtttagaaaacatcccgttcatcccgttacgtcttacttcaaagctgtgag

SEQ ID NO: 24836 - DNA, 122 bp, Homo sapiens
  misc_feature (61)..(62): /note="This region represents a CpG dinucleotide"
  misc_feature (61)..(61): /note="Nucleotide may be methylated to form 5-methylcytosine"
catggttgttcacatttgctgccacggaacaccgccagtcttcacttggaaacagaatcacgccttgtgaagagatcatccctaagcaggagagaagctactaaaggtgagaattttcttca

SEQ ID NO: 24837 - DNA, 122 bp, Homo sapiens
  misc_feature (61)..(62): /note="This region represents a CpG dinucleotide"
  misc_feature (61)..(61): /note="Nucleotide may be methylated to form 5-methylcytosine"
caagctggaaggttgtgggtttacgggagtgagggtgaggaacacctggcccgctcagggcgaaaaccgcttaaaggcattgttaagccacaaacaatgagcatgagcggtctgtgtcttaa

SEQ ID NO: 24838 - DNA, 122 bp, Homo sapiens
  misc_feature (61)..(62): /note="This region represents a CpG dinucleotide"
  misc_feature (61)..(61): /note="Nucleotide may be methylated to form 5-methylcytosine"
aggtatctgctccagtttctaccttcggtagtgacaatgtgtttgtttgcatttcccacacgtgtgtccaatgtttgcttgttttcttcttcaggaaatcaactttttgtgagtgtgctgaa

SEQ ID NO: 24839 - DNA, 122 bp, Homo sapiens
  misc_feature (61)..(62): /note="This region represents a CpG dinucleotide"
  misc_feature (61)..(61): /note="Nucleotide may be methylated to form 5-methylcytosine"
ctgtgagcacaccggcctgtaaacaaaatcataaatgttatttggcatgataccaggggacgcaactgggagttagagaagcctatggcagtacagttgtaagtttccacaataaactgcat

SEQ ID NO: 24840 - DNA, 122 bp, Homo sapiens
  misc_feature (61)..(62): /note="This region represents a CpG dinucleotide"
  misc_feature (61)..(61): /note="Nucleotide may be methylated to form 5-methylcytosine"
aattgtctgcaagcttctcaaaggcatagactacagacaatgaattggctgaatgagtcacggtagcatggagtgagggaatgggaaacaaatagattacacagtctgtttttccaagagtt

SEQ ID NO: 24841 - DNA, 122 bp, Homo sapiens
  misc_feature (61)..(62): /note="This region represents a CpG dinucleotide"
  misc_feature (61)..(61): /note="Nucleotide may be methylated to form 5-methylcytosine"
tgtgtccaattcagttaaccatgagctgcatgtggccactgagcatcttcgaatgtggctcgtgtgactgaatacatgaatttttaatttaattttaatagacacatgtacctagtggctat

SEQ ID NO: 24842 - DNA, 122 bp, Homo sapiens
  misc_feature (61)..(62): /note="This region represents a CpG dinucleotide"
  misc_feature (61)..(61): /note="Nucleotide may be methylated to form 5-methylcytosine"
ttttttctgaaggcttttttcctttgacattttctatttttctaactaaaagaccggctccgtgagtttaaaggattataatcttttgcatttgtatttttctgcatgcattgaagagcatt

SEQ ID NO: 24843 - DNA, 122 bp, Homo sapiens
  misc_feature (61)..(62): /note="This region represents a CpG dinucleotide"
  misc_feature (61)..(61): /note="Nucleotide may be methylated to form 5-methylcytosine"
tgaacatgaaacaatctagaaagtcagtggtgtgtggaacagcccaaagcaggccagctccgccacaaggtccagtctctaacccaaccctgctgccactcagctctgtggcctcgggcagc

SEQ ID NO: 24844 - DNA, 122 bp, Homo sapiens
  misc_feature (61)..(62): /note="This region represents a CpG dinucleotide"
  misc_feature (61)..(61): /note="Nucleotide may be methylated to form 5-methylcytosine"
atgacacgatgagagctggctcctgttcaaggcggatccgcagtcttcaagacagaagtacgcttgatgtggcttcagaagtgaggggtgagtaacagcagcagacccaggcacaggccaca

SEQ ID NO: 24845 - DNA, 122 bp, Homo sapiens
  misc_feature (61)..(62): /note="This region represents a CpG dinucleotide"
  misc_feature (61)..(61): /note="Nucleotide may be methylated to form 5-methylcytosine"
ctatatgtagaagcagagatccactggatgcacatacaagaaggaaccagtgtgaacaggcggcagcaccaatgtgaaaatgagtgagctggaatatactgcttcatggccaagctgatcca

SEQ ID NO: 24846 - DNA, 122 bp, Homo sapiens
  misc_feature (61)..(62): /note="This region represents a CpG dinucleotide"
  misc_feature (61)..(61): /note="Nucleotide may be methylated to form 5-methylcytosine"
ctatgaacttttgttgattagtagataatagacagctggagcttcttaataccagacttacgcacctaaccttttggggaaatgtgctccaaaggtctgtggcaaggactctggatccactg

SEQ ID NO: 24847 - DNA, 122 bp, Homo sapiens
  misc_feature (61)..(62): /note="This region represents a CpG dinucleotide"
  misc_feature (61)..(61): /note="Nucleotide may be methylated to form 5-methylcytosine"
tccatgaataaatgacaaaaccaatgtgttcagtcttactaatcaaggtagcagatttctcgaatacttgtatgacatggaagaaattactaaccatacagtaggttctcgtttttcagtta

SEQ ID NO: 24848 - DNA, 122 bp, Homo sapiens
  misc_feature (61)..(62): /note="This region represents a CpG dinucleotide"
  misc_feature (61)..(61): /note="Nucleotide may be methylated to form 5-methylcytosine"
tgaggccggcgtagaaggccacgcgcggcaccgtggtgtaggtggcagtgctgatggcgccgctgccccccgcgcccggcagccccggagggcccggcttgcctggctcacccttctccccc

SEQ ID NO: 24849 - DNA, 122 bp, Homo sapiens
  misc_feature (61)..(62): /note="This region represents a CpG dinucleotide"
  misc_feature (61)..(61): /note="Nucleotide may be methylated to form 5-methylcytosine"
aataagggttactcagacacaagcactgctgtacgacgacagtggatctgatcaccgagacggctgctgagtaactaacgagtggggcgcgtctacactgtggaggtgctggacagagggag

SEQ ID NO: 24850 - DNA, 122 bp, Homo sapiens
  misc_feature (61)..(62): /note="This region represents a CpG dinucleotide"
  misc_feature (61)..(61): /note="Nucleotide may be methylated to form 5-methylcytosine"
acaaaaagcctcacctccaaatacattgctgaggacgcagggccccgtcttcccacctgacgcactacacaccacgtcagctgtcacaggaggtctgagtgctttatgaagctgcctgcttt

SEQ ID NO: 24851 - DNA, 122 bp, Homo sapiens
  misc_feature (61)..(62): /note="This region represents a CpG dinucleotide"
  misc_feature (61)..(61): /note="Nucleotide may be methylated to form 5-methylcytosine"
ttgcagtaccttcacaaatagggttattttgcctaaatattagagggcacttcactttttcgaagggcatctcttaatctatgctattcaaaccattcttttgagacacataacctatcatt

SEQ ID NO: 24852 - DNA, 122 bp, Homo sapiens
  misc_feature (61)..(62): /note="This region represents a CpG dinucleotide"
  misc_feature (61)..(61): /note="Nucleotide may be methylated to form 5-methylcytosine"
tgctccgctgaaactgtacttggctgaaactgtacttggcaatatcacctctgacctccacgttgctgaaccccatgaacacttttaatcttaggcctcttggcagcctccgatacagctga

SEQ ID NO: 24853 - DNA, 122 bp, Homo sapiens
  misc_feature (61)..(62): /note="This region represents a CpG dinucleotide"
  misc_feature (61)..(61): /note="Nucleotide may be methylated to form 5-methylcytosine"
atacttaagaatgttacatatttcatttctcccaggatcactcagcctaagagaagaattcgaggttacttttagggaggaaaggacacttacactgggaattcaatcgatggtagttaagc

SEQ ID NO: 24854 - DNA, 122 bp, Homo sapiens
  misc_feature (61)..(62): /note="This region represents a CpG dinucleotide"
  misc_feature (61)..(61): /note="Nucleotide may be methylated to form 5-methylcytosine"
ttctggcaaacggtgagatacagccaggcaaggaaccagattctgcctgtctttgtggaccgcatgaaggaatttgggctttatttaaagcagagtgggtggcctctgcagggttttaaaca

SEQ ID NO: 24855 - DNA, 122 bp, Homo sapiens
  misc_feature (61)..(62): /note="This region represents a CpG dinucleotide"
  misc_feature (61)..(61): /note="Nucleotide may be methylated to form 5-methylcytosine"
accggaaacagaatgtgctgactaagcaacctgagcaacctcatgatgactgttcacatacgtaatgagtttctgtaggtaatcatttttgaaagattttgctagactaattttaactctgg

SEQ ID NO: 24856 - DNA, 122 bp, Homo sapiens
  misc_feature (61)..(62): /note="This region represents a CpG dinucleotide"
  misc_feature (61)..(61): /note="Nucleotide may be methylated to form 5-methylcytosine"
tttaacaagtgggatggaagagacgttatttccctgaaaaaatctgctgaattggccaggcgcggtggctcatgcctataatcccagcactctgggaggccgaggcgggtgaatcacaaagt

SEQ ID NO: 24857 - DNA, 122 bp, Homo sapiens
  misc_feature (61)..(62): /note="This region represents a CpG dinucleotide"
  misc_feature (61)..(61): /note="Nucleotide may be methylated to form 5-methylcytosine"
tgtaatcagtttaactgtttgtgtccaaggttcagaagaacacactatcatcttcacaaccgagcaatgactctattccacaattttaggaactacatattgataagaatcaagacctttcc

SEQ ID NO: 24858 - DNA, 122 bp, Homo sapiens
  misc_feature (61)..(62): /note="This region represents a CpG dinucleotide"
  misc_feature (61)..(61): /note="Nucleotide may be methylated to form 5-methylcytosine"
agtgatccacccacctcagcctcccaaagtgctgggattacaggcgtgagccaccacacccggcctgtaagctatattaaagagtttaaacctaatgctaagagcagtaaaatgccattgaa

SEQ ID NO: 24859 - DNA, 122 bp, Homo sapiens
  misc_feature (61)..(62): /note="This region represents a CpG dinucleotide"
  misc_feature (61)..(61): /note="Nucleotide may be methylated to form 5-methylcytosine"
ggcccgagcccagctgtatttaccctccacctccccgcctcatgaagggttagacggcttcgcccaagaattgagtcgaagcttgtcagtcggattggaaaagaacttgaagaaaaaggtga

SEQ ID NO: 24860 - DNA, 122 bp, Homo sapiens
  misc_feature (61)..(62): /note="This region represents a CpG dinucleotide"
  misc_feature (61)..(61): /note="Nucleotide may be methylated to form 5-methylcytosine"
gactcactggcactcctgaaacaagccaaaatgtacatgtacatcaaaggcctatgcatgcgtcatattcactaacatttcattggcccaaatcagtcacatggctaagcccaacatcagtg

SEQ ID NO: 24861 - DNA, 122 bp, Homo sapiens
  misc_feature (61)..(62): /note="This region represents a CpG dinucleotide"
  misc_feature (61)..(61): /note="Nucleotide may be methylated to form 5-methylcytosine"
acagagtcagggcctgagtcatcggaggaaggctggcgtgactcggtcacttggtgtgtgcgtggtggtgtcgcttagtcatcctggaaaggcctgcgtggtattgcgtgcactctaagaag

SEQ ID NO: 24862 - DNA, 122 bp, Homo sapiens
  misc_feature (61)..(62): /note="This region represents a CpG dinucleotide"
  misc_feature (61)..(61): /note="Nucleotide may be methylated to form 5-methylcytosine"
atgactaatctgtttatagtaagctgaaaataggatatgaaccatttctggcatataacacgaggccattcaggaacatttaattatggaaaaacattcacaatttgtaaacttaattctgt

SEQ ID NO: 24863 - DNA, 122 bp, Homo sapiens
  misc_feature (61)..(62): /note="This region represents a CpG dinucleotide"
  misc_feature (61)..(61): /note="Nucleotide may be methylated to form 5-methylcytosine"
ccttgttcagtagaatcctgttaagtgggtttatcaagaatcctctacacttgatgtctccgcttagtgattttccattcactgaccccgaggaacttcgctccttggctatgaatcctgag

SEQ ID NO: 24864 - DNA, 122 bp, Homo sapiens
  misc_feature (61)..(62): /note="This region represents a CpG dinucleotide"
  misc_feature (61)..(61): /note="Nucleotide may be methylated to form 5-methylcytosine"
catctctatcatcataaatcaatcatgaaacacaagatgttccaccaagcactacacaagcgaactacatagatgttgtacctacccactagggcttgtgatagaaacgacagagcacttaa

SEQ ID NO: 24865 - DNA, 122 bp, Homo sapiens
  misc_feature (61)..(62): /note="This region represents a CpG dinucleotide"
  misc_feature (61)..(61): /note="Nucleotide may be methylated to form 5-methylcytosine"
tgcccagcctcatggcttcccccaccagcaatgtcccccctcccagtgcccacgccataccgcttatcattccagcaaacacaaagttctctcgggcagggagggggagccaggcacctggc

SEQ ID NO: 24866 - DNA, 122 bp, Homo sapiens
  misc_feature (61)..(62): /note="This region represents a CpG dinucleotide"
  misc_feature (61)..(61): /note="Nucleotide may be methylated to form 5-methylcytosine"
actcccaccaccaaccctcccctggtgctcccagttgggcaatatggccagaggtgagcacgtttgtcaggaatggaattaggcagggaatgaaaacaggtctggcctctgggaaaactggc

SEQ ID NO: 24867 - DNA, 122 bp, Homo sapiens
  misc_feature (61)..(62): /note="This region represents a CpG dinucleotide"
  misc_feature (61)..(61): /note="Nucleotide may be methylated to form 5-methylcytosine"
tgtcccatctgtaaaatgagggttgtaaatgtgcccaaacagctggggatgaatgcaaagcgccccacgccccgtgtcactcccagccaggagcaagagggcaccatgccagtgctgcctct

SEQ ID NO: 24868 - DNA, 122 bp, Homo sapiens
  misc_feature (61)..(62): /note="This region represents a CpG dinucleotide"
  misc_feature (61)..(61): /note="Nucleotide may be methylated to form 5-methylcytosine"
aatattgaaataaaatagacataggtttgtatcttggctgtagctctggtcccttggatacgttatgtaatttttctttgccttatttcactttctgtatagtgaagatcatagttgctaat

SEQ ID NO: 24869 - DNA, 122 bp, Homo sapiens
  misc_feature (61)..(62): /note="This region represents a CpG dinucleotide"
  misc_feature (61)..(61): /note="Nucleotide may be methylated to form 5-methylcytosine"
cacgggaaaaaccacaggtcactctatcttggttctagagataaagtccccgacaccggacgagtttttcgccagccccaaggaccagcaagccaggtccaaagaatcataaagttactgat

SEQ ID NO: 24870 - DNA, 122 bp, Homo sapiens
  misc_feature (61)..(62): /note="This region represents a CpG dinucleotide"
  misc_feature (61)..(61): /note="Nucleotide may be methylated to form 5-methylcytosine"
atactttctttaaactatatgtttaaaaatagtttaatgtattttaatattaacagcaaacgtgcaagaagtgcacagaagacagataacattaaaaacatgtacttgcatgtaggacaact

SEQ ID NO: 24871 - DNA, 122 bp, Homo sapiens
  misc_feature (61)..(62): /note="This region represents a CpG dinucleotide"
  misc_feature (61)..(61): /note="Nucleotide may be methylated to form 5-methylcytosine"
caccgcccctcagtgtcaacttcctgcaacttatctgagatgtgttacccgcatctcacacgtccccccaccggcgcccccacttccacccccgccttcagcaagagactggaactctgagg

SEQ ID NO: 24872 - DNA, 122 bp, Homo sapiens
  misc_feature (61)..(62): /note="This region represents a CpG dinucleotide"
  misc_feature (61)..(61): /note="Nucleotide may be methylated to form 5-methylcytosine"
gactcagaactgggtggatgcagcgctgaagtgtagaatagccatggttacacacccttccgcagttgttatagggatatttcctggtaatgtattgtaaaaggacaatttcccagtatatt

SEQ ID NO: 24873 - DNA, 122 bp, Homo sapiens
  misc_feature (61)..(62): /note="This region represents a CpG dinucleotide"
  misc_feature (61)..(61): /note="Nucleotide may be methylated to form 5-methylcytosine"
gaccaaggccatgcacacatgcataggcattgacaactatgaaaaggctgctgcttggggcgtggtggctcatgcctgtaatcccagcactatgggaggccgaggcaggcatatcacctgag

SEQ ID NO: 24874 - DNA, 122 bp, Homo sapiens
  misc_feature (61)..(62): /note="This region represents a CpG dinucleotide"
  misc_feature (61)..(61): /note="Nucleotide may be methylated to form 5-methylcytosine"
agcatttcacccccgcctgttggcatttcactctccagaaggacttggtgtcacttcagacgtagagagtttgttttgctgggctctgccagaatagttataaatcacacgtttctagtact

SEQ ID NO: 24875 - DNA, 122 bp, Homo sapiens
  misc_feature (61)..(62): /note="This region represents a CpG dinucleotide"
  misc_feature (61)..(61): /note="Nucleotide may be methylated to form 5-methylcytosine"
ccttactgcatgtgttgtcacatatgtgcaatgccatgctcctgagcctttgattgcagacgtgtgggaagtgggccccgtccccacccccagtgccaccctgctctgcttctcttcccttg

SEQ ID NO: 24876 - DNA, 122 bp, Homo sapiens
  misc_feature (61)..(62): /note="This region represents a CpG dinucleotide"
  misc_feature (61)..(61): /note="Nucleotide may be methylated to form 5-methylcytosine"
attgttattatgattattattcagaggaggagagtatcaggaaaggctgaagagaaatcacgaagtcttagaactggattggacctaggagattatttgggctaaactaccaaacacaggat

SEQ ID NO: 24877 - DNA, 122 bp, Homo sapiens
  misc_feature (61)..(62): /note="This region represents a CpG dinucleotide"
  misc_feature (61)..(61): /note="Nucleotide may be methylated to form 5-methylcytosine"
cacagctagcagttaataaaggatttaaaaattccaatccaagaagccctataaatatttcgggatgaaataaatcccttagacttagtgattactgtatattacacaactctagatttatg

SEQ ID NO: 24878 - DNA, 122 bp, Homo sapiens
  misc_feature (61)..(62): /note="This region represents a CpG dinucleotide"
  misc_feature (61)..(61): /note="Nucleotide may be methylated to form 5-methylcytosine"
gcctcagcctcccaaagtgctgggattacaggcgtgagccaccccacccagcccttcccacgtattctggcagggaatgctgttgtcccccaagcctaccctaagaggaagacttcttctgg

SEQ ID NO: 24879 - DNA, 122 bp, Homo sapiens
  misc_feature (61)..(62): /note="This region represents a CpG dinucleotide"
  misc_feature (61)..(61): /note="Nucleotide may be methylated to form 5-methylcytosine"
aatgttgtggaaggcacacaaagctgcagcctcacctaggcagggttagtgtgggaaggacgtgggaatcaccctgtgaccaagaacaaagaggaacagcacagaacaagtaccctgggaag

SEQ ID NO: 24880 - DNA, 122 bp, Homo sapiens
  misc_feature (61)..(62): /note="This region represents a CpG dinucleotide"
  misc_feature (61)..(61): /note="Nucleotide may be methylated to form 5-methylcytosine"
tcaggtttgtttaaactagtaggtttgttaaaggacataatcctgtcaggcttatcttcccgtggtattgactggcctggcagatcaaaaatgagtggtaagtggcataaaaatggtgaata

SEQ ID NO: 24881 - DNA, 122 bp, Homo sapiens
  misc_feature (61)..(62): /note="This region represents a CpG dinucleotide"
  misc_feature (61)..(61): /note="Nucleotide may be methylated to form 5-methylcytosine"
gcttggggctttctaactgcccactcagtaacccaatacaggactataaaatggtgcagacgctttggaagactctctgacagttcttcaaacgattaaacgtggttgccatataacccagc

SEQ ID NO: 24882 - DNA, 122 bp, Homo sapiens
  misc_feature (61)..(62): /note="This region represents a CpG dinucleotide"
  misc_feature (61)..(61): /note="Nucleotide may be methylated to form 5-methylcytosine"
tccaggttgacacatggtggcagggcggagcttgagaggggtgtggttaggtcaggtcagcggacaagggccatatccagccacccacgctggccattcgcagtgtgccatcactgtgcggg

SEQ ID NO: 24883 - DNA, 122 bp, Homo sapiens
  misc_feature (61)..(62): /note="This region represents a CpG dinucleotide"
  misc_feature (61)..(61): /note="Nucleotide may be methylated to form 5-methylcytosine"
ggattacaggcgtagccaccacgcccagccctgttgttatatcattttctattctctgtgcgtatgaaataatccacagggggccaggcatggtggctcatgcctgtaatcccagcactttg

SEQ ID NO: 24884 - DNA, 122 bp, Homo sapiens
  misc_feature (61)..(62): /note="This region represents a CpG dinucleotide"
  misc_feature (61)..(61): /note="Nucleotide may be methylated to form 5-methylcytosine"
tctggccaaggcctgcctgagctgtccaagaggaagtctgcacagcctgtcctgtgggtgcgtgtatgtgtgtgtgtgtgtgtgtgtgtgtgtgtgtgtgtggtgactgattagactcattt

SEQ ID NO: 24885 - DNA, 122 bp, Homo sapiens
  misc_feature (61)..(62): /note="This region represents a CpG dinucleotide"
  misc_feature (61)..(61): /note="Nucleotide may be methylated to form 5-methylcytosine"
ttaattttcctctaagcagctgcctacagtctatgattcactggccatgaattgcaattgcgttatcacctgagaacacaaaaagactttggagaattagcatataagccaggaggggattt

SEQ ID NO: 24886 - DNA, 122 bp, Homo sapiens
  misc_feature (61)..(62): /note="This region represents a CpG dinucleotide"
  misc_feature (61)..(61): /note="Nucleotide may be methylated to form 5-methylcytosine"
ttattccttttaattggacttcctactattcctgtcatgctgatattaggcaagatgattcgctgggaggactatgtgcttagactgtggcgcaaatactcgaataaactacaaattttaaa

SEQ ID NO: 24887 - DNA, 122 bp, Homo sapiens
  misc_feature (61)..(62): /note="This region represents a CpG dinucleotide"
  misc_feature (61)..(61): /note="Nucleotide may be methylated to form 5-methylcytosine"
tgtctctattccctcctaaccctccatgaaagtgacaggaaagggacaaaaagacattggcgcacaaaagcgaagagaacatgaaaggagtcacagcagagagaggtcaactgaatgactgc

SEQ ID NO: 24888 - DNA, 122 bp, Homo sapiens
  misc_feature (61)..(62): /note="This region represents a CpG dinucleotide"
  misc_feature (61)..(61): /note="Nucleotide may be methylated to form 5-methylcytosine"
ccgctccacacctgagctgccgccaagctaactcaatccgagccggcgcatttgagaaggcgcctgtgagggtcgctcctcagccgccgcgctcccactccgcgtccccactccgcgccgcc

SEQ ID NO: 24889 - DNA, 122 bp, Homo sapiens
  misc_feature (61)..(62): /note="This region represents a CpG dinucleotide"
  misc_feature (61)..(61): /note="Nucleotide may be methylated to form 5-methylcytosine"
tttttttgtggggatgtcctgtgcattgtaggatttttggtaacgtctctggcctctatccgctagatgccggtagcacctcctcccagttgtaacaaccaaatatacctccagacattgtc

SEQ ID NO: 24890 - DNA, 122 bp, Homo sapiens
  misc_feature (61)..(62): /note="This region represents a CpG dinucleotide"
  misc_feature (61)..(61): /note="Nucleotide may be methylated to form 5-methylcytosine"
agtttatttgagcattcagctatttgtggatggggcagtaccagaccacaggtggtttagcgctccaccaagaaggtaagggaaactttttgaaggtgttcatagaagtaaggcaaattaaa

SEQ ID NO: 24891 - DNA, 122 bp, Homo sapiens
  misc_feature (61)..(62): /note="This region represents a CpG dinucleotide"
  misc_feature (61)..(61): /note="Nucleotide may be methylated to form 5-methylcytosine"
aatcctttgcggtggttctttccccaggctcaggcaggttccccttacgcacgtactgatcggttctcggctgaacactcgtgggaaccttctgcagacctccggctccctctgtgcagcgc

SEQ ID NO: 24892 - DNA, 122 bp, Homo sapiens
  misc_feature (61)..(62): /note="This region represents a CpG dinucleotide"
  misc_feature (61)..(61): /note="Nucleotide may be methylated to form 5-methylcytosine"
cccgaatttcctggagctccagagaccccacgtcaagaattcctagtgtatataaaagcccgtttgagctctaacatccatgattaacagtctctgggttgggtaactctgttggcttaaat

SEQ ID NO: 24893 - DNA, 122 bp, Homo sapiens
  misc_feature (61)..(62): /note="This region represents a CpG dinucleotide"
  misc_feature (61)..(61): /note="Nucleotide may be methylated to form 5-methylcytosine"
tttcgtccaagaaaagctatgtgagtacgccaacgccggcctgaaatcttcctaagaatgcgtgcttatagcctatttgtttaaacagggggagaaagttaacattcaaacaccagagattc

SEQ ID NO: 24894 - DNA, 122 bp, Homo sapiens
  misc_feature (61)..(62): /note="This region represents a CpG dinucleotide"
  misc_feature (61)..(61): /note="Nucleotide may be methylated to form 5-methylcytosine"
ctggatcaaccacatactggtggacgatgagccagcggtggatcaaaacagattccctaacgatggacagacaggcaatggcgcctaggtactattgttgaagatttcctattttaaatctt

SEQ ID NO: 24895 - DNA, 122 bp, Homo sapiens
  misc_feature (61)..(62): /note="This region represents a CpG dinucleotide"
  misc_feature (61)..(61): /note="Nucleotide may be methylated to form 5-methylcytosine"
ccaggaggaccccaatctggcggatgaacatccccttcagcctctcagttagctgactgacgttgatatccaagatgatctccaccaggttgtttttcctgggatctggaaagcatgtggat

SEQ ID NO: 24896 - DNA, 122 bp, Homo sapiens
  misc_feature (61)..(62): /note="This region represents a CpG dinucleotide"
  misc_feature (61)..(61): /note="Nucleotide may be methylated to form 5-methylcytosine"
tgaacttctgaccttaggtgatccgcctgcctcagcctcccaaagtgctgggactacaggcgtgagccaccgcagtcttaaatggttaatgaggattaggaaatctatcaattattcaacag

SEQ ID NO: 24897 - DNA, 122 bp, Homo sapiens
  misc_feature (61)..(62): /note="This region represents a CpG dinucleotide"
  misc_feature (61)..(61): /note="Nucleotide may be methylated to form 5-methylcytosine"
ctgtcttgccagtatggccaaaggcattcatttccgaggcagctggccagggctgagccgcggacaattaactgggccacagggccctgggctcacaaccttcctgctggatcctgaacaca

SEQ ID NO: 24898 - DNA, 122 bp, Homo sapiens
  misc_feature (61)..(62): /note="This region represents a CpG dinucleotide"
  misc_feature (61)..(61): /note="Nucleotide may be methylated to form 5-methylcytosine"
gtagtccatgagaacagattttcccatcttgagcagactctgcagagccacaaacaatgccgccttatgagctctggtcagtctggtcatgggatacctgtggggatttctttcctgtcgga

SEQ ID NO: 24899 - DNA, 122 bp, Homo sapiens
  misc_feature (61)..(62): /note="This region represents a CpG dinucleotide"
  misc_feature (61)..(61): /note="Nucleotide may be methylated to form 5-methylcytosine"
ctgttagcagactgagctttactgtcctgtgccggctgttcagagaccactgtgcctggccgaagactgaggcagggacttcaggccagggggccaggctggcttttcctgcctttcacttc

SEQ ID NO: 24900 - DNA, 122 bp, Homo sapiens
  misc_feature (61)..(62): /note="This region represents a CpG dinucleotide"
  misc_feature (61)..(61): /note="Nucleotide may be methylated to form 5-methylcytosine"
tatgtcttaaatactattatagtaggaaagggagaggagaaaattccccacccactcccccgatttggcccgtgtagcttccctttgagggtgtgtgacttgccatctgcaaaagtcatggc

SEQ ID NO: 24901 - DNA, 122 bp, Homo sapiens
  misc_feature (61)..(62): /note="This region represents a CpG dinucleotide"
  misc_feature (61)..(61): /note="Nucleotide may be methylated to form 5-methylcytosine"
ctgcccccaccccggggaccctgtgacatggtgcctgagaggcaggcatagaggcttctccgccagcctcctctggacggcaggctcactgccaggccagcctccgagagggagagagagag

SEQ ID NO: 24902 - DNA, 122 bp, Homo sapiens
  misc_feature (61)..(62): /note="This region represents a CpG dinucleotide"
  misc_feature (61)..(61): /note="Nucleotide may be methylated to form 5-methylcytosine"
ctcaagctatcctctcgcctcggcctcccaaagggttgggattacaagcaagagacgttgcgccaggcctcaaatagtgtgtctcaacatgaggtcaacagacacattgggaaggctaagtt

SEQ ID NO: 24903 - DNA, 122 bp, Homo sapiens
  misc_feature (61)..(62): /note="This region represents a CpG dinucleotide"
  misc_feature (61)..(61): /note="Nucleotide may be methylated to form 5-methylcytosine"
ttaaaagcggccaagccggctcaacaaacatggccaaatgctgctgctactgtttgctcacgtcgtcgcaaggtaaacattgggcaagtacttgccactctaagtatgatacagatggaaac

SEQ ID NO: 24904 - DNA, 122 bp, Homo sapiens
  misc_feature (61)..(62): /note="This region represents a CpG dinucleotide"
  misc_feature (61)..(61): /note="Nucleotide may be methylated to form 5-methylcytosine"
tttgttttttttttctgaccagcagcccccaggccccttgcacgggctgagtctggcccccgcccctcccactgggtaaaggtaaacaagaggcatgtaagggggaaggacagagccctact

SEQ ID NO: 24905 - DNA, 122 bp, Homo sapiens
  misc_feature (61)..(62): /note="This region represents a CpG dinucleotide"
  misc_feature (61)..(61): /note="Nucleotide may be methylated to form 5-methylcytosine"
aaaacaaacaaagaaaaaaaacaagggagcttgaaaactgagggatgctgtaggattctgcggcctgctaaccgattatgtgtattaatcagataggctaattgttgtaaccaccctctaat

SEQ ID NO: 24906 - DNA, 122 bp, Homo sapiens
  misc_feature (61)..(62): /note="This region represents a CpG dinucleotide"
  misc_feature (61)..(61): /note="Nucleotide may be methylated to form 5-methylcytosine"
tgagctgactcaccactaatgacaaagacaaaatttgacctcagcatctaaacctgcaagcgtatatagaatatcatgttcttttttctatttttgttacctattcagacagctgacgaata

SEQ ID NO: 24907 - DNA, 122 bp, Homo sapiens
  misc_feature (61)..(62): /note="This region represents a CpG dinucleotide"
  misc_feature (61)..(61): /note="Nucleotide may be methylated to form 5-methylcytosine"
ttacttctggtggattaagtgctgcttaaatactaagactatccattctcttttgcctcacgcctctctactaaactgcagctcagttctgcctctcataatatgtatgttgagtaacatta

SEQ ID NO: 24908 - DNA, 122 bp, Homo sapiens
  misc_feature (61)..(62): /note="This region represents a CpG dinucleotide"
  misc_feature (61)..(61): /note="Nucleotide may be methylated to form 5-methylcytosine"
ctctgaggtcgtgcagcaaattcgtggcaggtccactgactgctaggccaggggtcttgtcgctggtccacgcagaaaggaaggatggctactttctgttcctcccctgaccaccaccccat

SEQ ID NO: 24909 - DNA, 122 bp, Homo sapiens
  misc_feature (61)..(62): /note="This region represents a CpG dinucleotide"
  misc_feature (61)..(61): /note="Nucleotide may be methylated to form 5-methylcytosine"
tctgtctttaaacttcaggaagtcacagtagaatcacaatgtcagacacagtctacgaaacgcttcgtatatgttacctcatttgatctttgtaatcaacccatgaggcaggtggggtgtgg

SEQ ID NO: 24910 - DNA, 122 bp, Homo sapiens
  misc_feature (61)..(62): /note="This region represents a CpG dinucleotide"
  misc_feature (61)..(61): /note="Nucleotide may be methylated to form 5-methylcytosine"
cacctgtttattttggccagtttgttagcctgctctttttgtgtgtggttttcccctcttcgtaatagataactataatgcaattagttgtataagtagaagaaacttatgttttccttctt

SEQ ID NO: 24911 - DNA, 122 bp, Homo sapiens
  misc_feature (61)..(62): /note="This region represents a CpG dinucleotide"
  misc_feature (61)..(61): /note="Nucleotide may be methylated to form 5-methylcytosine"
ttagtagagacggagtaatcttctgtttgaggaaatgatcaccattttacaccttcgctgcgtgtgctggtctgtaatctgctattggcggaaatgatcaccgttttacaccttcactgcgt

SEQ ID NO: 24912 - DNA, 122 bp, Homo sapiens
  misc_feature (61)..(62): /note="This region represents a CpG dinucleotide"
  misc_feature (61)..(61): /note="Nucleotide may be methylated to form 5-methylcytosine"
atatcctgtttctctgacacataaccctgccctgcggtggtgtggtttcaaggtccagagcgcagggtgagcaaggggcttagtaagtgccctgaagctagcactcacttcctcccacagag

SEQ ID NO: 24913 - DNA, 122 bp, Homo sapiens
  misc_feature (61)..(62): /note="This region represents a CpG dinucleotide"
  misc_feature (61)..(61): /note="Nucleotide may be methylated to form 5-methylcytosine"
taaagaaaaacttgacaatagttgatcatacccataaggatgaaaaaaaaataaggaagtcgtgggttaaaaatagctccacagagtgagccttagtgaataaaaaaggaggtaagtccacc

SEQ ID NO: 24914 - DNA, 122 bp, Homo sapiens
  misc_feature (61)..(62): /note="This region represents a CpG dinucleotide"
  misc_feature (61)..(61): /note="Nucleotide may be methylated to form 5-methylcytosine"
catcagaggaaaacagtgacaacattaattggcagaaagccaaacctacccaaaagtttccgcattttctataaatgatgaacaaaataatgaatggaaaagtccctctatattttatcaat

SEQ ID NO: 24915 - DNA, 122 bp, Homo sapiens
  misc_feature (61)..(62): /note="This region represents a CpG dinucleotide"
  misc_feature (61)..(61): /note="Nucleotide may be methylated to form 5-methylcytosine"
tatgcagacagtccttcaaaaggtaagcagtccacagcccagcagaatgctttctttgagcgtcttggcctgaaaattttctattattctctcctttggcgctaacttcccaaaacttaatc

SEQ ID NO: 24916 - DNA, 122 bp, Homo sapiens
  misc_feature (61)..(62): /note="This region represents a CpG dinucleotide"
  misc_feature (61)..(61): /note="Nucleotide may be methylated to form 5-methylcytosine"
tgggaagttcgaaagcacagcaccagcattttgtgagcacttttatgctgtattgtccagcggcggaagagcagaagggcaagtgagcacttgtgaaagagtgaggaccaaggatgggagtt

SEQ ID NO: 24917 - DNA, 122 bp, Homo sapiens
  misc_feature (61)..(62): /note="This region represents a CpG dinucleotide"
  misc_feature (61)..(61): /note="Nucleotide may be methylated to form 5-methylcytosine"
ttttgagactttgctgattctcctttctctcttgagggtttcttgttttcccttcctccccgggttgtgctagtagctgctctcaactactcacactccctggggagattcctacacttcct

SEQ ID NO: 24918 - DNA, 122 bp, Homo sapiens
  misc_feature (61)..(62): /note="This region represents a CpG dinucleotide"
  misc_feature (61)..(61): /note="Nucleotide may be methylated to form 5-methylcytosine"
gctgcttgaactccatgccacaaggcaacactgtaaagaagctgaaagcagagagaatatcgaatattgcaagtcgagcattttacctgcagttatgtgcaaggatgctcagaccttttcct

SEQ ID NO: 24919 - DNA, 122 bp, Homo sapiens
  misc_feature (61)..(62): /note="This region represents a CpG dinucleotide"
  misc_feature (61)..(61): /note="Nucleotide may be methylated to form 5-methylcytosine"
aatccaaaccactctgtataaagaactttcttccttgtgccatttgtcatttttaaaggccgtttatagacttagatgtctttttggtcattaacattcctaataactttttctgaagtgtt

SEQ ID NO: 24920 - DNA, 122 bp, Homo sapiens
  misc_feature (61)..(62): /note="This region represents a CpG dinucleotide"
  misc_feature (61)..(61): /note="Nucleotide may be methylated to form 5-methylcytosine"
aggtactgtgatgctaatcatctctgtgggagcagttcctctctccagtacacctcagatcgcagtaaaaagtgacctcttgagattcttgagtatgttttgttgtgtttagtgcagtacca

SEQ ID NO: 24921 - DNA, 122 bp, Homo sapiens
  misc_feature (61)..(62): /note="This region represents a CpG dinucleotide"
  misc_feature (61)..(61): /note="Nucleotide may be methylated to form 5-methylcytosine"
tggaacagccacacccccgcttaggacacagagataggaaggccgcaccacccctccccccgacctggacacagagatggaaagaccacactccccaagacacagagatggaaagaccatac

SEQ ID NO: 24922 - DNA, 122 bp, Homo sapiens
  misc_feature (61)..(62): /note="This region represents a CpG dinucleotide"
  misc_feature (61)..(61): /note="Nucleotide may be methylated to form 5-methylcytosine"
gaaaagtaaatataaaaacactttcttgaattctagcagtagtgaacaaaggcgtgaatacggaagattttcaaaagtttagcatgaaagatgccatacgtgctgttgccaacacttggaac

SEQ ID NO: 24923 - DNA, 122 bp, Homo sapiens
  misc_feature (61)..(62): /note="This region represents a CpG dinucleotide"
  misc_feature (61)..(61): /note="Nucleotide may be methylated to form 5-methylcytosine"
ttttctccaaatgaggtcacatttacagctccaggattaggacctgctgtctttgggtgccgctattcagccgactcctcttgccatctgtcttcctcataggcttttcagctctgcttgag

SEQ ID NO: 24924 - DNA, 122 bp, Homo sapiens
  misc_feature (61)..(62): /note="This region represents a CpG dinucleotide"
  misc_feature (61)..(61): /note="Nucleotide may be methylated to form 5-methylcytosine"
gttgctttctagacacctcttcctgagtcacttcacccctaaaaccaaccttctctcctacgtgaagagttataaaacatggcttctgcccccgggagctcataacttagtcagagagacac

SEQ ID NO: 24925 - DNA, 122 bp, Homo sapiens
  misc_feature (61)..(62): /note="This region represents a CpG dinucleotide"
  misc_feature (61)..(61): /note="Nucleotide may be methylated to form 5-methylcytosine"
cagggactgggccacatcccctcttccagctttaagatctgggatttgagactgcatcaccggcctcaacactaagacttctttgcaggcctaagctctggaatgccacagaagcccccagg

SEQ ID NO: 24926 - DNA, 122 bp, Homo sapiens
  misc_feature (61)..(62): /note="This region represents a CpG dinucleotide"
  misc_feature (61)..(61): /note="Nucleotide may be methylated to form 5-methylcytosine"
aggaaggataaagttaataatgcaaaccaacaaaaaaccccacaaatccataaaagatcacgtgctaggctaaaatgagaagggctacaaaaagaaaaaatgaccatcatccttgtctggaa

SEQ ID NO: 24927 - DNA, 122 bp, Homo sapiens
  misc_feature (61)..(62): /note="This region represents a CpG dinucleotide"
  misc_feature (61)..(61): /note="Nucleotide may be methylated to form 5-methylcytosine"
atccctgagctggcagcttcaattggctctccgtgtcctggctggctggcagctcctgggcgaggtggcatgtgccgtgactactagagatcgctgtcatgggcccactcccccgccttctt

SEQ ID NO: 24928 - DNA, 122 bp, Homo sapiens
  misc_feature (61)..(62): /note="This region represents a CpG dinucleotide"
  misc_feature (61)..(61): /note="Nucleotide may be methylated to form 5-methylcytosine"
ctgatgggggaacagggaagaaacctcaaatgcctacctgataattctgggcagcttcttcgatcaagctgacattatgggatttgtggtccttggattcacgacacacaaaacagaggaac

SEQ ID NO: 24929 - DNA, 122 bp, Homo sapiens
  misc_feature (61)..(62): /note="This region represents a CpG dinucleotide"
  misc_feature (61)..(61): /note="Nucleotide may be methylated to form 5-methylcytosine"
agtgtccagttagattgttgcctatgcaactgtctctgaatgagtacttttcctggctgccgagccacacacttgactcatcagccttcttagcgattctgtgagccacgtgatagtcattc

SEQ ID NO: 24930 - DNA, 122 bp, Homo sapiens
  misc_feature (61)..(62): /note="This region represents a CpG dinucleotide"
  misc_feature (61)..(61): /note="Nucleotide may be methylated to form 5-methylcytosine"
actgataacattggctgtgtgtttactaacagtatttgtctagcaagccattatatctaacggccaaaatacaaagttacagtcaaagaatgaatcaagtactcaagaaaacagaaacctca

SEQ ID NO: 24931 - DNA, 122 bp, Homo sapiens
  misc_feature (61)..(62): /note="This region represents a CpG dinucleotide"
  misc_feature (61)..(61): /note="Nucleotide may be methylated to form 5-methylcytosine"
ttctttaaagctcacattttatagtatcactgctacaaactatttaatgaaatgtggcatcgggtgaaaagaggcatttgtttgatccttgaacgaattaatctcacgtacttccctgtttg

SEQ ID NO: 24932 - DNA, 122 bp, Homo sapiens
  misc_feature (61)..(62): /note="This region represents a CpG dinucleotide"
  misc_feature (61)..(61): /note="Nucleotide may be methylated to form 5-methylcytosine"
tttgtttgtaaacctattgacataaatagtctgacctgtcacaaattaccttttagctaccgtatgttatgtatagaacagtcaaaactgataacattttgctttcatcagttttgtgttag

SEQ ID NO: 24933 - DNA, 122 bp, Homo sapiens
  misc_feature (61)..(62): /note="This region represents a CpG dinucleotide"
  misc_feature (61)..(61): /note="Nucleotide may be methylated to form 5-methylcytosine"
gctgtcctggctggaactgaaacttagaaatgattccgtttcctctgcagggctcctggccggagtccccgatcccctaggggcctgagggctgtggtgggggcctggcagggctccaggta

SEQ ID NO: 24934 - DNA, 122 bp, Homo sapiens
  misc_feature (61)..(62): /note="This region represents a CpG dinucleotide"
  misc_feature (61)..(61): /note="Nucleotide may be methylated to form 5-methylcytosine"
ctaacattggcagtaagtctaacttgaaaacattccttctgtatccacagaactccacctcgcaacattctatggctctcacatgagagctgagggtctaagaacaaagaacattctctttc

SEQ ID NO: 24935 - DNA, 122 bp, Homo sapiens
  misc_feature (61)..(62): /note="This region represents a CpG dinucleotide"
  misc_feature (61)..(61): /note="Nucleotide may be methylated to form 5-methylcytosine"
gctgcatagtattcattatatatataaatatacatacatataccacatttttacatttcacgttttctttatccatcagttcactcttaggtgattccatactttggctattatgaataatg

SEQ ID NO: 24936 - DNA, 122 bp, Homo sapiens
  misc_feature (61)..(62): /note="This region represents a CpG dinucleotide"
  misc_feature (61)..(61): /note="Nucleotide may be methylated to form 5-methylcytosine"
gcgtgaccctggggaacggttaggtggctgtggcaaggagatgccaggttggaggcgtggcgagggtgagatggtgcctgctgcctcgtgccagccctggctcagctgtgttgagccccctc

SEQ ID NO: 24937 - DNA, 122 bp, Homo sapiens
  misc_feature (61)..(62): /note="This region represents a CpG dinucleotide"
  misc_feature (61)..(61): /note="Nucleotide may be methylated to form 5-methylcytosine"
ttgctttgtggtgatgcaggcagctatcccatgtcactttactttgactttgtgaagcaccgtgtgttttgcaagatttgccttttcactttgtgttgcaagaccagtagggctagaatcta

SEQ ID NO: 24938 - DNA, 122 bp, Homo sapiens
  misc_feature (61)..(62): /note="This region represents a CpG dinucleotide"
  misc_feature (61)..(61): /note="Nucleotide may be methylated to form 5-methylcytosine"
taaaatgctggacaggcttggtatggagcattcacagggtggggctggcacagagtgggacggagcagtgagaggaacaacattgtctggctaattgcatgacttacagtctgaacaacact

SEQ ID NO: 24939 - DNA, 122 bp, Homo sapiens
  misc_feature (61)..(62): /note="This region represents a CpG dinucleotide"
  misc_feature (61)..(61): /note="Nucleotide may be methylated to form 5-methylcytosine"
gccctaactagattagaaactgacatgttctaccccagggcctccgcgaacgacagcaggcgagaatccttgctctggacacggggaacagggtcagcatctcgtctcctatctccaccgac

SEQ ID NO: 24940 - DNA, 122 bp, Homo sapiens
  misc_feature (61)..(62): /note="This region represents a CpG dinucleotide"
  misc_feature (61)..(61): /note="Nucleotide may be methylated to form 5-methylcytosine"
gaaaaatgtgtgtcatcaagatttttctgtaccgtttaatttgttaggcctttctgggcacgctgactttgtgcaacattgaactaccttattagaagaaacactcgcaacagttaatgaga

SEQ ID NO: 24941 - DNA, 122 bp, Homo sapiens
  misc_feature (61)..(62): /note="This region represents a CpG dinucleotide"
  misc_feature (61)..(61): /note="Nucleotide may be methylated to form 5-methylcytosine"
aacttgactagagatagacttcagtgtatgcaaaattgtattagagcttataggatagcacgtatttcatgctgttatcagagtagggaggttgatctagatttgcttattctttttagttg

SEQ ID NO: 24942 - DNA, 122 bp, Homo sapiens
  misc_feature (61)..(62): /note="This region represents a CpG dinucleotide"
  misc_feature (61)..(61): /note="Nucleotide may be methylated to form 5-methylcytosine"
cggccgcgaggccctgagatgaggctccaaagaccccgacaggccccggcgggtgggaggcgcgcgccccggggcgggcggggctccccctaccggccagacccggggagaggcgcgcggag

SEQ ID NO: 24943 - DNA, 122 bp, Homo sapiens
  misc_feature (61)..(62): /note="This region represents a CpG dinucleotide"
  misc_feature (61)..(61): /note="Nucleotide may be methylated to form 5-methylcytosine"
ttatgaactccagagtaaacaaaaagtttgtacaataagggaaatataatatgagaataacgcttacacagtcataagtactgaatatgacattagcgtgttgggtgctgaagagagttgaa

SEQ ID NO: 24944 - DNA, 122 bp, Homo sapiens
  misc_feature (61)..(62): /note="This region represents a CpG dinucleotide"
  misc_feature (61)..(61): /note="Nucleotide may be methylated to form 5-methylcytosine"
ttagagcatattatttgctatgagaactttgagaacttatttattttaacataggatatacgttaaagtatgccctaaaggacagtgcttctcaaacttcagtatgcttacaaatgaccagc

SEQ ID NO: 24945 - DNA, 122 bp, Homo sapiens
  misc_feature (61)..(62): /note="This region represents a CpG dinucleotide"
  misc_feature (61)..(61): /note="Nucleotide may be methylated to form 5-methylcytosine"
aaaactgccctgagctgctactctctcctagggggttgccctgctctgcaggagcagtcacggagctgtaacaccaccagagggggaacactgacgcttcaattaagctgtttcttctactt

SEQ ID NO: 24946 - DNA, 122 bp, Homo sapiens
  misc_feature (61)..(62): /note="This region represents a CpG dinucleotide"
  misc_feature (61)..(61): /note="Nucleotide may be methylated to form 5-methylcytosine"
aactgaaaaaaggaaaccagtttctaggtgggctctgttgcctgtatttgactcactcaccgataacacactcataaactgacacacacataaactctgttgggctctcaggatataagaac

SEQ ID NO: 24947 - DNA, 122 bp, Homo sapiens
  misc_feature (61)..(62): /note="This region represents a CpG dinucleotide"
  misc_feature (61)..(61): /note="Nucleotide may be methylated to form 5-methylcytosine"
aagaccagtgctggatgagcctctagtaatgacaacattttagttgttagtggtataatacggaagagatattttgcacaggctgctttggagaactttcaaattatcctttgtttggtaac

SEQ ID NO: 24948 - DNA, 122 bp, Homo sapiens
  misc_feature (61)..(62): /note="This region represents a CpG dinucleotide"
  misc_feature (61)..(61): /note="Nucleotide may be methylated to form 5-methylcytosine"
ctccaggctcttaatctcattcacttggctggtcatggctaataactaacactcattgggcgcttaatgtttggcaggcagcattctcagtgttttatgcagattcattcatttagtcatca

SEQ ID NO: 24949 - DNA, 122 bp, Homo sapiens
  misc_feature (61)..(62): /note="This region represents a CpG dinucleotide"
  misc_feature (61)..(61): /note="Nucleotide may be methylated to form 5-methylcytosine"
gcttctgtggacacaacaacactgttaatcaacaggaactaatcagcatttatgtaacaccgcaaacgcagccgaatacacattttattcgtgtcgatgggacatttagcaagatatgaagt

SEQ ID NO: 24950 - DNA, 122 bp, Homo sapiens
  misc_feature (61)..(62): /note="This region represents a CpG dinucleotide"
  misc_feature (61)..(61): /note="Nucleotide may be methylated to form 5-methylcytosine"
atccacctgcctcggcctcccaaagtgctgggattacaggcatgagccacctgcccggcccgaaaatgttttttaaaaaattagctggacttgatggtttatgcctgtattcccagctactc

SEQ ID NO: 24951 - DNA, 122 bp, Homo sapiens
  misc_feature (61)..(62): /note="This region represents a CpG dinucleotide"
  misc_feature (61)..(61): /note="Nucleotide may be methylated to form 5-methylcytosine"
tggcatcctgccctgcgtgtgggctccagcctgctgccatctggggaaactgagtcatggcgaggctcgaggatgtttctcagaccacaccagtccctgaaggtcccctgacctcccaattt

SEQ ID NO: 24952 - DNA, 122 bp, Homo sapiens
  misc_feature (61)..(62): /note="This region represents a CpG dinucleotide"
  misc_feature (61)..(61): /note="Nucleotide may be methylated to form 5-methylcytosine"
gaatgacctctgtttttctgcattggcacagtggcccagctgcttccaaatgtgttgttacggaccttaaaggggtactggttaaagattatgtcttaattttggcccacaatatgtttaca

SEQ ID NO: 24953 - DNA, 122 bp, Homo sapiens
  misc_feature (61)..(62): /note="This region represents a CpG dinucleotide"
  misc_feature (61)..(61): /note="Nucleotide may be methylated to form 5-methylcytosine"
acgagaagaacacatggtactccaggtcctgacgaggtgaacgggtgtactctgagaagacgtagacaccagtcacagcaaaaatgtagaagaagatgagcagcaacatcaagaggaaggtc

SEQ ID NO: 24954 - DNA, 122 bp, Homo sapiens
  misc_feature (61)..(62): /note="This region represents a CpG dinucleotide"
  misc_feature (61)..(61): /note="Nucleotide may be methylated to form 5-methylcytosine"
tgggaaaacctactaaaaatggataaatttccagacacatccagactaccaagactgaaccgggatgaaatccaaagccagaacagaccaacaacaaataatgggatcgaagcagtaatgaa

SEQ ID NO: 24955 - DNA, 122 bp, Homo sapiens
  misc_feature (61)..(62): /note="This region represents a CpG dinucleotide"
  misc_feature (61)..(61): /note="Nucleotide may be methylated to form 5-methylcytosine"
tatttacctgaaatattgggtctcctgctttttgttcccattccaatgtcatatgatccccgtaccagtatgtcacatgatctcaaaccactatgtcacatgatcatgataggtgaacttgg

SEQ ID NO: 24956 - DNA, 122 bp, Homo sapiens
  misc_feature (61)..(62): /note="This region represents a CpG dinucleotide"
  misc_feature (61)..(61): /note="Nucleotide may be methylated to form 5-methylcytosine"
tggttctacatctaaatctttagctagatttaccaattctcatatagcacgtaagaaatccgggctatgaaacaaaaggaaataagcacattcacctttcctgctatccctcatttcctcca

SEQ ID NO: 24957 - DNA, 122 bp, Homo sapiens
  misc_feature (61)..(62): /note="This region represents a CpG dinucleotide"
  misc_feature (61)..(61): /note="Nucleotide may be methylated to form 5-methylcytosine"
attgtgtgcatgtgtatgtatgtgtgtgcatgcgtatgcacacacaaacaaatgcacacacgtgaacagtcacacacaggcacacctcgtgtgtcacaaaatcagagttggaaaggacccca

SEQ ID NO: 24958 - DNA, 122 bp, Homo sapiens
  misc_feature (61)..(62): /note="This region represents a CpG dinucleotide"
  misc_feature (61)..(61): /note="Nucleotide may be methylated to form 5-methylcytosine"
aaagaaagaaaatatagtttctgaaatttgggattgccgagtagcagacccagtgggctccgggacaggatggagaggcctgggtggcgtccgtgaggctgcctggctagcagcggcgccca

SEQ ID NO: 24959 - DNA, 122 bp, Homo sapiens
  misc_feature (61)..(62): /note="This region represents a CpG dinucleotide"
  misc_feature (61)..(61): /note="Nucleotide may be methylated to form 5-methylcytosine"
tagtacaatgtcctcagcaccaagcgtcagagacctccgcgcaattggcagcatcttctgcgtgtagctacaggtccctgagagagaccggcgcgcctctcccacaggggcgatcctccctc

SEQ ID NO: 24960 - DNA, 122 bp, Homo sapiens
  misc_feature (61)..(62): /note="This region represents a CpG dinucleotide"
  misc_feature (61)..(61): /note="Nucleotide may be methylated to form 5-methylcytosine"
cacccagcagcctttctcctagattcctctgtggcactcactcagccttgtgcttggtcccgtgctgcctcctctcctttttccccttctaggctcttcctcctcttcccaggcccgccatc

SEQ ID NO: 24961 - DNA, 122 bp, Homo sapiens
  misc_feature (61)..(62): /note="This region represents a CpG dinucleotide"
  misc_feature (61)..(61): /note="Nucleotide may be methylated to form 5-methylcytosine"
gtgtgaggatgaggataaacaggtctgctataggtcaggtgaccacacatcctggttacccgttgcaggtctggcttttgcctcttgttctaattatttaatagcaccataaactatatggc

SEQ ID NO: 24962 - DNA, 122 bp, Homo sapiens
  misc_feature (61)..(62): /note="This region represents a CpG dinucleotide"
  misc_feature (61)..(61): /note="Nucleotide may be methylated to form 5-methylcytosine"
gcaccacgaggtcattgtccactggtagtaggtggcatggatgacgactcatgggtgtaacgtgtgaacaacaacagatacaccggctggagtcagccacacttggaattctggctgtaatg

SEQ ID NO: 24963 - DNA, 122 bp, Homo sapiens
  misc_feature (61)..(62): /note="This region represents a CpG dinucleotide"
  misc_feature (61)..(61): /note="Nucleotide may be methylated to form 5-methylcytosine"
actacactcttgcatcacaccaagcatgaaagagtttacattccagagaaaaaggtttatcgctgtctcttggtttttcagactattgaaggccaagtgttcagatggtcttgttttgtggg

SEQ ID NO: 24964 - DNA, 122 bp, Homo sapiens
  misc_feature (61)..(62): /note="This region represents a CpG dinucleotide"
  misc_feature (61)..(61): /note="Nucleotide may be methylated to form 5-methylcytosine"
ttaaattcttgtttacaattctctttactacttcgaggcctctagttttgatcaaatccccgctagtttccttgtcttcaaacccagggggaaatgatttgcaacagatgatgtgtataggg

SEQ ID NO: 24965 - DNA, 122 bp, Homo sapiens
  misc_feature (61)..(62): /note="This region represents a CpG dinucleotide"
  misc_feature (61)..(61): /note="Nucleotide may be methylated to form 5-methylcytosine"
taaaggagcccagaagcaatggtggagccgtcaggagtggaaacagcatcgagccatgaacgtctttaaacctgaggaggcaaaagaaaagagcagtgttcccagaactggtaagagctgtg

SEQ ID NO: 24966 - DNA, 122 bp, Homo sapiens
  misc_feature (61)..(62): /note="This region represents a CpG dinucleotide"
  misc_feature (61)..(61): /note="Nucleotide may be methylated to form 5-methylcytosine"
acatctggctaatcaagtgaagatgaggccaaactggatgaaggcgggcctgaaatccaacgactggtgaccttataaggagggagagcttcaaagacccaggcagtcatagagggaagaag

SEQ ID NO: 24967 - DNA, 122 bp, Homo sapiens
  misc_feature (61)..(62): /note="This region represents a CpG dinucleotide"
  misc_feature (61)..(61): /note="Nucleotide may be methylated to form 5-methylcytosine"
cgggagacgaaggatgggatgtgaggcggtcctgccttgccgccttctgtccctagtctccgggtccccgccctccagccgcctttgattcgtgactgggtcacggtcctcactcattcctc

SEQ ID NO: 24968 - DNA, 122 bp, Homo sapiens
  misc_feature (61)..(62): /note="This region represents a CpG dinucleotide"
  misc_feature (61)..(61): /note="Nucleotide may be methylated to form 5-methylcytosine"
tgaatgcggccccagatagcaatggctaattggtgactggagctaataacattggccgagcgagcagggcagataaggaagggaaagaaaatccactaatagccttgccatctatctggaaa

SEQ ID NO: 24969 - DNA, 122 bp, Homo sapiens
  misc_feature (61)..(62): /note="This region represents a CpG dinucleotide"
  misc_feature (61)..(61): /note="Nucleotide may be methylated to form 5-methylcytosine"
gcataggtgaacattctcaaatgccagctctaagaatctgccagatgagggcttaaccgccgcctctggtcctcagcttgagccctgcagtgaatgttttctgagcctatttcctgagtctg

SEQ ID NO: 24970 - DNA, 122 bp, Homo sapiens
  misc_feature (61)..(62): /note="This region represents a CpG dinucleotide"
  misc_feature (61)..(61): /note="Nucleotide may be methylated to form 5-methylcytosine"
cagatcaccctgtctagagcctactgccacttaacgcttttttagcagtagatggcagcacgtggccccacatcttcatcccggtaataaagacagaaatctgaacatcatcttagtcttct

SEQ ID NO: 24971 - DNA, 122 bp, Homo sapiens
  misc_feature (61)..(62): /note="This region represents a CpG dinucleotide"
  misc_feature (61)..(61): /note="Nucleotide may be methylated to form 5-methylcytosine"
ggggctaggctgtttgctcacaggatcttaaaccagaagtaactactagaagcaatattgcgggaactgccacactcaggtctggtccacactgagtcactagggtgaagaaagggagtctg

SEQ ID NO: 24972 - DNA, 122 bp, Homo sapiens
  misc_feature (61)..(62): /note="This region represents a CpG dinucleotide"
  misc_feature (61)..(61): /note="Nucleotide may be methylated to form 5-methylcytosine"
gcttaataaaaccaagacagccagcacctcctgcaaactaaatccacgttctgttcgatgcgtagacgttattctgggtcggctccaggtgtccaagagttgttcagtgtgtgttcattagg

SEQ ID NO: 24973 - DNA, 122 bp, Homo sapiens
  misc_feature (61)..(62): /note="This region represents a CpG dinucleotide"
  misc_feature (61)..(61): /note="Nucleotide may be methylated to form 5-methylcytosine"
caaaccctcaggtcctctgtcagagcctatttactctaattttagcacatttcaaatgggcgtggtagtgtttaaatggtttcccagcccacagtaagtcagaggtagcaaattagataaga

SEQ ID NO: 24974 - DNA, 122 bp, Homo sapiens
  misc_feature (61)..(62): /note="This region represents a CpG dinucleotide"
  misc_feature (61)..(61): /note="Nucleotide may be methylated to form 5-methylcytosine"
aagaccatggaggtgacttcagtatccatagagctggaaaagaacttcagcaattttccccgacagtactttgccctaaggaaaatccttaaacagctaattggtgagttgttcccaaaagg

SEQ ID NO: 24975 - DNA, 122 bp, Homo sapiens
  misc_feature (61)..(62): /note="This region represents a CpG dinucleotide"
  misc_feature (61)..(61): /note="Nucleotide may be methylated to form 5-methylcytosine"
cccagagcctctgtggtttttaagagtaacacacaggaaggaagctcactgaggtgcaaccgttattagtaccttggggagtttaacaggagcacagtgtagaagcaaaacagctttgtgga

SEQ ID NO: 24976 - DNA, 122 bp, Homo sapiens
  misc_feature (61)..(62): /note="This region represents a CpG dinucleotide"
  misc_feature (61)..(61): /note="Nucleotide may be methylated to form 5-methylcytosine"
aatgacatataatcctatacaccaacaggataatatcacgagtgtgtgtggcaacactgccgcatgttaatcctgcctgcctcctgggatgatctttctcatcccagcagagcctacagagc

SEQ ID NO: 24977 - DNA, 122 bp, Homo sapiens
  misc_feature (61)..(62): /note="This region represents a CpG dinucleotide"
  misc_feature (61)..(61): /note="Nucleotide may be methylated to form 5-methylcytosine"
ttttggtgctgtgactcagatatgaaccagggttgctgtggccacatgcagagtactaaccgttgtatgagcataacctataatttattattactattattattatgattttgaggtggagt

SEQ ID NO: 24978 - DNA, 122 bp, Homo sapiens
  misc_feature (61)..(62): /note="This region represents a CpG dinucleotide"
  misc_feature (61)..(61): /note="Nucleotide may be methylated to form 5-methylcytosine"
aacttgtgatcctttcttgaagcaaggtaactcacacctcctttacaaggactccggaggcgttctctgatacagtgaaacaggctgagtcagaagcagtaagggacagctgactcctgatc

SEQ ID NO: 24979 - DNA, 122 bp, Homo sapiens
  misc_feature (61)..(62): /note="This region represents a CpG dinucleotide"
  misc_feature (61)..(61): /note="Nucleotide may be methylated to form 5-methylcytosine"
gaacagagcatgtgtggttcatgggactcactccagcagtgatgatacaatgctgctgcccgttcagtactgtgcctctacttaaccaaagctcctggaggacaggaactgtatctgactca

SEQ ID NO: 24980 - DNA, 122 bp, Homo sapiens
  misc_feature (61)..(62): /note="This region represents a CpG dinucleotide"
  misc_feature (61)..(61): /note="Nucleotide may be methylated to form 5-methylcytosine"
tggggtccgaggaggcagagctgcggggaggggcagtgagatgaggggccagccgctgctcgggacccaccactacctgtggcgtcccccagcccaacttggcagcacccgacaacccgcgg

SEQ ID NO: 24981 - DNA, 122 bp, Homo sapiens
  misc_feature (61)..(62): /note="This region represents a CpG dinucleotide"
  misc_feature (61)..(61): /note="Nucleotide may be methylated to form 5-methylcytosine"
acttcctttagctctgaaaaactcatctgattcacttcagaaaactgctctacaaagggccgtaactgcatttgatatgaaagattgtaatctctcagatttgaaatatctcatatgagtgg

SEQ ID NO: 24982 - DNA, 122 bp, Homo sapiens
  misc_feature (61)..(62): /note="This region represents a CpG dinucleotide"
  misc_feature (61)..(61): /note="Nucleotide may be methylated to form 5-methylcytosine"
agcaggtgattctgactcaacatctcattgcattacaattagggcttatatttcaaaaagcgaagagggacatgaaggcacttaagtgcataacctctaaactggctagaacaggtccacag

SEQ ID NO: 24983 - DNA, 122 bp, Homo sapiens
  misc_feature (61)..(62): /note="This region represents a CpG dinucleotide"
  misc_feature (61)..(61): /note="Nucleotide may be methylated to form 5-methylcytosine"
ctgcttacttcttaactggctcaagggatagtttctatttgttgtgcctattttccccttcgttgcaaagattcagctctaatttcatttccatcacaaaagaattggcaaataactaaagc

SEQ ID NO: 24984 - DNA, 122 bp, Homo sapiens
  misc_feature (61)..(62): /note="This region represents a CpG dinucleotide"
  misc_feature (61)..(61): /note="Nucleotide may be methylated to form 5-methylcytosine"
agaaaaggaacccaggatgggcagaaatgagggtaatgagaaatgggaacagagtgaggtcgggctagacatcttgtggagtgaactgaggccggtatctacccagggccactccctagatc

SEQ ID NO: 24985 - DNA, 122 bp, Homo sapiens
  misc_feature (61)..(62): /note="This region represents a CpG dinucleotide"
  misc_feature (61)..(61): /note="Nucleotide may be methylated to form 5-methylcytosine"
ataataaatttgtgctactattcaaccattaaaaaaaaaggaaatcctgtcagtttttgacgccatagaagaacttggaggatattttgctaagcaaataagccaggcacagaaagacacat

SEQ ID NO: 24986 - DNA, 122 bp, Homo sapiens
  misc_feature (61)..(62): /note="This region represents a CpG dinucleotide"
  misc_feature (61)..(61): /note="Nucleotide may be methylated to form 5-methylcytosine"
gtctaccctgcaaggggtcctgaggatggtgatccagccagtgagtcagaatctgacttacgcccaggagccagctacctcaaagtgctgagcacatcaaattcaaaatggctggtgaaaat

SEQ ID NO: 24987 - DNA, 122 bp, Homo sapiens
  misc_feature (61)..(62): /note="This region represents a CpG dinucleotide"
  misc_feature (61)..(61): /note="Nucleotide may be methylated to form 5-methylcytosine"
aagatgagtaagccatcagagagcttacaatcaagaaatggtattgtattcagcccctatcgcatgctttgtacaaagcaggtacacacaaaaaaatctcatgggaagcctgcagaaattac

SEQ ID NO: 24988 - DNA, 122 bp, Homo sapiens
  misc_feature (61)..(62): /note="This region represents a CpG dinucleotide"
  misc_feature (61)..(61): /note="Nucleotide may be methylated to form 5-methylcytosine"
atagctataaatggctgggacacactggaatccaattctagcactctttatcctgctaatcgaacccaaggaataggccccaacccagctcacttatatccttgtgctgtagcctggagcaa

SEQ ID NO: 24989 - DNA, 122 bp, Homo sapiens
  misc_feature (61)..(62): /note="This region represents a CpG dinucleotide"
  misc_feature (61)..(61): /note="Nucleotide may be methylated to form 5-methylcytosine"
tggtcttgaactcctgaccctgtaatcccagagtgctgggattacagaagtgagccactacgcccggctgactcacttctttgtaacaggaagtcactaacactagatactgaccatcagca

SEQ ID NO: 24990 - DNA, 122 bp, Homo sapiens
  misc_feature (61)..(62): /note="This region represents a CpG dinucleotide"
  misc_feature (61)..(61): /note="Nucleotide may be methylated to form 5-methylcytosine"
gacctgagaggctgaaggaggatccgaaaggctgatacagcggggctgaggggggatccgcggggttggcgggggctgagaaatgaccctgtagttcacagcaaaatggagtaatttatgtc

SEQ ID NO: 24991 - DNA, 122 bp, Homo sapiens
  misc_feature (61)..(62): /note="This region represents a CpG dinucleotide"
  misc_feature (61)..(61): /note="Nucleotide may be methylated to form 5-methylcytosine"
cacagctgcattttctattccaacccccatattccctcgagttatgactttgtagccacacgacactttggtttaacggaagcagattgatcaagagatgagattataagaggaggaagaga

SEQ ID NO: 24992 - DNA, 122 bp, Homo sapiens
  misc_feature (61)..(62): /note="This region represents a CpG dinucleotide"
  misc_feature (61)..(61): /note="Nucleotide may be methylated to form 5-methylcytosine"
tatttttagtagagatggggttttgccacgttggccaggctggtctcaagctcccaacctcgagtgatccacctaccacgcctcccaagttgctaggattacaggcatgagccaccatgccc

SEQ ID NO: 24993 - DNA, 122 bp, Homo sapiens
  misc_feature (61)..(62): /note="This region represents a CpG dinucleotide"
  misc_feature (61)..(61): /note="Nucleotide may be methylated to form 5-methylcytosine"
gggcagaacggctttgtgctgtcctgaaacaacactctggtttaatgagctccttgtacacgcagggcaattgtcagtgaaatctgcccattaaaatgcatgtggtttggaaggaggcttgg

SEQ ID NO: 24994 - DNA, 122 bp, Homo sapiens
  misc_feature (61)..(62): /note="This region represents a CpG dinucleotide"
  misc_feature (61)..(61): /note="Nucleotide may be methylated to form 5-methylcytosine"
catcggctcatgcttattacaaactggttctattggttcagcttttaaaaaaattgcctccgttgctaatagttttaaattaatctaggtcttacaaaacaccttcagtaaataaagtattt

SEQ ID NO: 24995 - DNA, 122 bp, Homo sapiens
  misc_feature (61)..(62): /note="This region represents a CpG dinucleotide"
  misc_feature (61)..(61): /note="Nucleotide may be methylated to form 5-methylcytosine"
ctgcagcccaggagctcatcctccgtcttcctgaggcgaacgggggcctgggggaccatgcgggaaaaccccttctcatccccaggcttttgggaccccctccctgcctccagcctgttctg

SEQ ID NO: 24996 - DNA, 122 bp, Homo sapiens
  misc_feature (61)..(62): /note="This region represents a CpG dinucleotide"
  misc_feature (61)..(61): /note="Nucleotide may be methylated to form 5-methylcytosine"
cccaggtgatccgactgcctcaccctcccaaagtgctgggattagaggcatgagccactgcgcctggcctggtgactaagtagttttctaagagattaataaagccttgggaaattggaatg

SEQ ID NO: 24997 - DNA, 122 bp, Homo sapiens
  misc_feature (61)..(62): /note="This region represents a CpG dinucleotide"
  misc_feature (61)..(61): /note="Nucleotide may be methylated to form 5-methylcytosine"
aaagtactggcattacaggcgtgagccaccatgcccggccactttagttctatttcagaacgatatttcagcatattttttgaaatgtctagggagatgtagaaacatttaaaagacactta

SEQ ID NO: 24998 - DNA, 122 bp, Homo sapiens
  misc_feature (61)..(62): /note="This region represents a CpG dinucleotide"
  misc_feature (61)..(61): /note="Nucleotide may be methylated to form 5-methylcytosine"
tatagtcttatgctgtttgttaaatttgttcctaagtattttattcttttctgatgcttccgtaaataaaattcaaatatatatgtgtgtgtgtatatatatatatatatatatatatatat

SEQ ID NO: 24999 - DNA, 122 bp, Homo sapiens
  misc_feature (61)..(62): /note="This region represents a CpG dinucleotide"
  misc_feature (61)..(61): /note="Nucleotide may be methylated to form 5-methylcytosine"
tacaagtataaaactcctaagaggcagtgcacaatacagatgtagttctgagctatcacacggccaccagcagcaccctactaaatagctgtgggaaagagacaggtctgacacataaatgg

SEQ ID NO: 25000 - DNA, 122 bp, Homo sapiens
  misc_feature (61)..(62): /note="This region represents a CpG dinucleotide"
  misc_feature (61)..(61): /note="Nucleotide may be methylated to form 5-methylcytosine"
ttcccagtgtacagactattagtatacgatgcatgcaaacagagaggtgctttattgaagcgggacaagacctctattcatagtaaagtcaaacaaaccacgcatgtgaaaacctccactta

SEQ ID NO: 25001 - DNA, 122 bp, Homo sapiens
  misc_feature (61)..(62): /note="This region represents a CpG dinucleotide"
  misc_feature (61)..(61): /note="Nucleotide may be methylated to form 5-methylcytosine"
gtgctgggattacaggcgtgagccaccacgcctggctgcaaccagcttttcttaagagcacggtttcttaatccaggcctgtgatcctctgatgcacagagatttgttggcatgtctgtcat

SEQ ID NO: 25002 - DNA, 122 bp, Homo sapiens
  misc_feature (61)..(62): /note="This region represents a CpG dinucleotide"
  misc_feature (61)..(61): /note="Nucleotide may be methylated to form 5-methylcytosine"
atagaggaccacagtccctgagagcccctctaagaactggagcacagttctcaggattctcgcaccagggcaatgaacttcctatcacagggcgttctcaagtgtggcatgccaaagattct

SEQ ID NO: 25003 - DNA, 122 bp, Homo sapiens
  misc_feature (61)..(62): /note="This region represents a CpG dinucleotide"
  misc_feature (61)..(61): /note="Nucleotide may be methylated to form 5-methylcytosine"
cctggaatcagtcccaggctagagggcagagtccaggagactgccacctgccacgctgtccgctatttgttcaaaggtttctcagcttagtgacaaaatgagcaaagaaagaagtgaggagg

SEQ ID NO: 25004 - DNA, 122 bp, Homo sapiens
  misc_feature (61)..(62): /note="This region represents a CpG dinucleotide"
  misc_feature (61)..(61): /note="Nucleotide may be methylated to form 5-methylcytosine"
tgaaatcctgatagttgataatccaagtgcaaatgaatcttcaagacccagattcccctgcgctaaaagtccatctgggttgtgaaacaccagggctggagccaggagaggcgggagaacgg

SEQ ID NO: 25005 - DNA, 122 bp, Homo sapiens
  misc_feature (61)..(62): /note="This region represents a CpG dinucleotide"
  misc_feature (61)..(61): /note="Nucleotide may be methylated to form 5-methylcytosine"
ggccagaaaaaattactaatagcaacacaaatcctctccatcaactatgtgatcccaaagcgccatatttattctaactttctaaaagcaaaaatgcagtcagggtgttcaaaatgagttct

SEQ ID NO: 25006 - DNA, 122 bp, Homo sapiens
  misc_feature (61)..(62): /note="This region represents a CpG dinucleotide"
  misc_feature (61)..(61): /note="Nucleotide may be methylated to form 5-methylcytosine"
agcagtgaaagtgctgacagtggggacagtgtcaatccatccacttctagtcattttacccgtgagtactgaaatcagaaccgaagtcaattgtctggttctacagcaaaactaattgtgtc

SEQ ID NO: 25007 - DNA, 122 bp, Homo sapiens
  misc_feature (61)..(62): /note="This region represents a CpG dinucleotide"
  misc_feature (61)..(61): /note="Nucleotide may be methylated to form 5-methylcytosine"
gggttgaggggtgggtgtctgttgctcactcacagtgaagcaatgactgcagggcatgttcgcaggaggcctctagcaagtttctcaatgggcccctgcagtacttccttctccaggcagct

SEQ ID NO: 25008 - DNA, 122 bp, Homo sapiens
  misc_feature (61)..(62): /note="This region represents a CpG dinucleotide"
  misc_feature (61)..(61): /note="Nucleotide may be methylated to form 5-methylcytosine"
acaccagacccaggtcggccgtagcttctcggggacagagcctggtcgctggacaaaggccgaggccaggcaggctctcccacttccgggaaagccgaggagcagcagaggggccgccggag

SEQ ID NO: 25009 - DNA, 122 bp, Homo sapiens
  misc_feature (61)..(62): /note="This region represents a CpG dinucleotide"
  misc_feature (61)..(61): /note="Nucleotide may be methylated to form 5-methylcytosine"
agacatacaatgaccaggaaaacatctgcctgttgctttctcacctgtgtatttatctaccgattacaatgtgacacagaaaagggatattgggtagaaaaaatatatagccaagtcaaaat

SEQ ID NO: 25010 - DNA, 122 bp, Homo sapiens
  misc_feature (61)..(62): /note="This region represents a CpG dinucleotide"
  misc_feature (61)..(61): /note="Nucleotide may be methylated to form 5-methylcytosine"
agtcctctgccggcatccagccctgatgattgattctaatccaggccgcttctgaggacacgaggaaaaggctgttagcataggccctactgcgtacctggcagacccaagttcatcatctc

SEQ ID NO: 25011 - DNA, 122 bp, Homo sapiens
  misc_feature (61)..(62): /note="This region represents a CpG dinucleotide"
  misc_feature (61)..(61): /note="Nucleotide may be methylated to form 5-methylcytosine"
tgtggtctcagaattcctgtcttaacagttctgctgagctacccatctggcatttcttcacgtgcctggtccctggaggcttggcccttaatcctgaatattgaaatctcaaaagatcaaaa

SEQ ID NO: 25012 - DNA, 122 bp, Homo sapiens
  misc_feature (61)..(62): /note="This region represents a CpG dinucleotide"
  misc_feature (61)..(61): /note="Nucleotide may be methylated to form 5-methylcytosine"
gtgatccacctgcctcagtctcccaaaatgctgggattacaggctgtgagctaccacacccggccaaccaagttgacttctgattaaccagcttttagggaaggcctctaagatttccagtt

SEQ ID NO: 25013 - DNA, 122 bp, Homo sapiens
  misc_feature (61)..(62): /note="This region represents a CpG dinucleotide"
  misc_feature (61)..(61): /note="Nucleotide may be methylated to form 5-methylcytosine"
tcgccccagagatcccagggaaggactctgtttcctgcgcgccactccagaaagttcctccggtgcccctggaggtcattctgccccacgtgcaatcctgtcctctccaccccatcacatgg

SEQ ID NO: 25014 - DNA, 122 bp, Homo sapiens
  misc_feature (61)..(62): /note="This region represents a CpG dinucleotide"
  misc_feature (61)..(61): /note="Nucleotide may be methylated to form 5-methylcytosine"
tttaaaaaaattattattcctttcttttctttttttgtttttctaaagctctaccacttacggtgtggttttggagaaactggtttatctgtgcttcaggtttcccacctgtaaagcaaagc

SEQ ID NO: 25015 - DNA, 122 bp, Homo sapiens
  misc_feature (61)..(62): /note="This region represents a CpG dinucleotide"
  misc_feature (61)..(61): /note="Nucleotide may be methylated to form 5-methylcytosine"
aatccctagcatttcttagtactgattgtgagcttcccctctgcatgttagcatgcagttcgtgacgattcactacaaatctgctctttatggagggagagtatagggggagcccagtatca

SEQ ID NO: 25016 - DNA, 122 bp, Homo sapiens
  misc_feature (61)..(62): /note="This region represents a CpG dinucleotide"
  misc_feature (61)..(61): /note="Nucleotide may be methylated to form 5-methylcytosine"
tgacattatcggcatgaataaaagatgagatctgctaggggtggctgtcaggatcctccccgcacaggcgaggctcccggcaagactgacagtaagaggctctgcgggaaggagctgggcgg

SEQ ID NO: 25017 - DNA, 122 bp, Homo sapiens
  misc_feature (61)..(62): /note="This region represents a CpG dinucleotide"
  misc_feature (61)..(61): /note="Nucleotide may be methylated to form 5-methylcytosine"
aggattctgtgaaatgattgttttggcttgccactcaataataatgtaacctccttattccgagggatgtagttcactacaatgggaaggggtatatataggtattggagagagactcctat

SEQ ID NO: 25018 - DNA, 122 bp, Homo sapiens
  misc_feature (61)..(62): /note="This region represents a CpG dinucleotide"
  misc_feature (61)..(61): /note="Nucleotide may be methylated to form 5-methylcytosine"
cttccttctctaaccctcaaagtggaaattcccactattgtgggaatttcaacagctgtacgtatgaggaggaaggtcacattttggcaggcattaatttacaccacacggcaaatactgtc

SEQ ID NO: 25019 - DNA, 122 bp, Homo sapiens
  misc_feature (61)..(62): /note="This region represents a CpG dinucleotide"
  misc_feature (61)..(61): /note="Nucleotide may be methylated to form 5-methylcytosine"
ccctggtgtcacaaagcaggttgggcagggctgaaatccaaacccaggcctcatttcaggcgctgctgtttccatcatcccaagaacaagaccagctggccttctgcagtccctgccaggtc

SEQ ID NO: 25020 - DNA, 122 bp, Homo sapiens
  misc_feature (61)..(62): /note="This region represents a CpG dinucleotide"
  misc_feature (61)..(61): /note="Nucleotide may be methylated to form 5-methylcytosine"
ctattcccacttcacctcctttacaatttcctgcagtgaacttcccaggcagacctcctgcgcccatgaaccagggtttctggattagacactgtgtggtccctgatgaatcactgcaccac

SEQ ID NO: 25021 - DNA, 122 bp, Homo sapiens
  misc_feature (61)..(62): /note="This region represents a CpG dinucleotide"
  misc_feature (61)..(61): /note="Nucleotide may be methylated to form 5-methylcytosine"
cggacttccacaagtaggtcaagaataataatgtgcagacctaattcctctaatttacggcgaacatctcatggtcaatctccccgcggtcaaaggactgtgtatctcttcctctcagagcc

SEQ ID NO: 25022 - DNA, 122 bp, Homo sapiens
  misc_feature (61)..(62): /note="This region represents a CpG dinucleotide"
  misc_feature (61)..(61): /note="Nucleotide may be methylated to form 5-methylcytosine"
tcactacctcattatctctacacttcaaaatacatatacctagattgaatgataatgttacgatacaagctctgcttgtagaatataaacctgacaacaagtaaatgaacagcgtttcgtta

SEQ ID NO: 25023 - DNA, 122 bp, Homo sapiens
  misc_feature (61)..(62): /note="This region represents a CpG dinucleotide"
  misc_feature (61)..(61): /note="Nucleotide may be methylated to form 5-methylcytosine"
ataacaggaaatttcaaataacaggaaaccaagaccagcaaggcgggtggctccaccctgcgtcgggcctcagtcagcccccgggggaggccatgaacgccacggggaccccggtggccccc

SEQ ID NO: 25024 - DNA, 122 bp, Homo sapiens
  misc_feature (61)..(62): /note="This region represents a CpG dinucleotide"
  misc_feature (61)..(61): /note="Nucleotide may be methylated to form 5-methylcytosine"
cggtgctcctcctgctgtctacactgcctacgaatagtacctgtctgagtcagagtgacccgtgtgaatacagggatgcaggggtttggggagaggtgggaggggacgtggcttgtcacatg

SEQ ID NO: 25025 - DNA, 122 bp, Homo sapiens
  misc_feature (61)..(62): /note="This region represents a CpG dinucleotide"
  misc_feature (61)..(61): /note="Nucleotide may be methylated to form 5-methylcytosine"
aacataataatccatctatacaaacctgcaagagcacagaagacagatacccaagagtttcgctgagcattgtgtgtaatgacaaaaacagctacaaactacttagctgttcatcaagagag

SEQ ID NO: 25026 - DNA, 122 bp, Homo sapiens
  misc_feature (61)..(62): /note="This region represents a CpG dinucleotide"
  misc_feature (61)..(61): /note="Nucleotide may be methylated to form 5-methylcytosine"
aaaatataaatacttaaaagtaatgtcctcaaaaggcagagtaaaatacccacacatacacgaatcctttgaacttcatcaagggggttaacttttgcttctctgtaatgccagtattacct

SEQ ID NO: 25027 - DNA, 122 bp, Homo sapiens
  misc_feature (61)..(62): /note="This region represents a CpG dinucleotide"
  misc_feature (61)..(61): /note="Nucleotide may be methylated to form 5-methylcytosine"
cccactaccatccctgcacacacaccaccatctctgggcacccactaccatccttgcacacgcaccactgtccttgcacacctgttaacatccctgggtacccatcaccatctctgtacatc

SEQ ID NO: 25028 - DNA, 122 bp, Homo sapiens
  misc_feature (61)..(62): /note="This region represents a CpG dinucleotide"
  misc_feature (61)..(61): /note="Nucleotide may be methylated to form 5-methylcytosine"
aaattccaaattgtgtcaagggtaaaatgtttctgtgtttgaaaggccaaggcagaattgcgtaacccagaagaggacgatataatgctacccaaggaacaaattgcaaggctttaaacatt

SEQ ID NO: 25029 - DNA, 122 bp, Homo sapiens
  misc_feature (61)..(62): /note="This region represents a CpG dinucleotide"
  misc_feature (61)..(61): /note="Nucleotide may be methylated to form 5-methylcytosine"
cttaatgtggaaattaagggacttacctcttttaagagactgggttgtgctgtgttgccccggtttgaatgcagtggctattgagagcacagtcatgcaccctacagctttgatcttctgag

SEQ ID NO: 25030 - DNA, 122 bp, Homo sapiens
  misc_feature (61)..(62): /note="This region represents a CpG dinucleotide"
  misc_feature (61)..(61): /note="Nucleotide may be methylated to form 5-methylcytosine"
acacagagtgatccgccctcttttccctggtgaatcacgcagcctaactcaccatgttcccggccacgccacagtgaatcacgcagcctaactcaccaggttactggcctaactcaccatgt

SEQ ID NO: 25031 - DNA, 122 bp, Homo sapiens
  misc_feature (61)..(62): /note="This region represents a CpG dinucleotide"
  misc_feature (61)..(61): /note="Nucleotide may be methylated to form 5-methylcytosine"
ccggtattctttataccctttcatatttcagaattaatttcaaattatgtaggctggtttcgtgcccagcagactcaatgctcagcagaatagcacaagtggtacatttactagagctcagg

SEQ ID NO: 25032 - DNA, 122 bp, Homo sapiens
  misc_feature (61)..(62): /note="This region represents a CpG dinucleotide"
  misc_feature (61)..(61): /note="Nucleotide may be methylated to form 5-methylcytosine"
cttcctcccgtccccgttggcggctggcaggctgtggtggtttcgggcagggaagggccccgcagtgtccctcctgtggccacacacactcctttattgctccagcgcccacctgctgcttg

SEQ ID NO: 25033 - DNA, 122 bp, Homo sapiens
  misc_feature (61)..(62): /note="This region represents a CpG dinucleotide"
  misc_feature (61)..(61): /note="Nucleotide may be methylated to form 5-methylcytosine"
tgttccttcagatgtgtccagagtttcctccttctggtgggttcctggtctccttgacttcggaacaaagccgccggaccctcacggtgagtgttacagctcttaaagatagtgtgtccgga

SEQ ID NO: 25034 - DNA, 122 bp, Homo sapiens
  misc_feature (61)..(62): /note="This region represents a CpG dinucleotide"
  misc_feature (61)..(61): /note="Nucleotide may be methylated to form 5-methylcytosine"
cctgctgacagtagctggtacctgttacctactcagagtgtcacatgccacaagccagagcgtcttggcagttctcagcaccttgacatcacttccttgctaccactcagagcggcagtgac

SEQ ID NO: 25035 - DNA, 122 bp, Homo sapiens
  misc_feature (61)..(62): /note="This region represents a CpG dinucleotide"
  misc_feature (61)..(61): /note="Nucleotide may be methylated to form 5-methylcytosine"
ctcaagttatgtgatagtgcctggatcttaagcccttcaaaacttatgttgaaatttgatcgccagtgttggaggtggggcctgatgggaggtgtttgtgtcctcatattgagaaacttctc

SEQ ID NO: 25036 - DNA, 122 bp, Homo sapiens
  misc_feature (61)..(62): /note="This region represents a CpG dinucleotide"
  misc_feature (61)..(61): /note="Nucleotide may be methylated to form 5-methylcytosine"
cgtgggagtgacagccaacactgtcctgcccacacccaaaggggaagagattatgcaggacgtgtacaccagggggcgtgaatctcagaattctgcccagcacatggtcttgttcccagttc

SEQ ID NO: 25037 - DNA, 122 bp, Homo sapiens
  misc_feature (61)..(62): /note="This region represents a CpG dinucleotide"
  misc_feature (61)..(61): /note="Nucleotide may be methylated to form 5-methylcytosine"
ggggtttccacagcgaggagcctccaccgcttgcccacccgcacccgcgtcccagagccgcgccctagtacctgaagccagacagaccggtcagcccaaggtccgtgaggccagggtgggaa

SEQ ID NO: 25038 - DNA, 122 bp, Homo sapiens
  misc_feature (61)..(62): /note="This region represents a CpG dinucleotide"
  misc_feature (61)..(61): /note="Nucleotide may be methylated to form 5-methylcytosine"
aactgagccttttgtgtcaatctcccatcctctcctgccttgtgaagtttctggggtggccgagttggaaccaacttcaaaccctcttatgtctctgattcactttccaaaccctccctctc

SEQ ID NO: 25039 - DNA, 122 bp, Homo sapiens
  misc_feature (61)..(62): /note="This region represents a CpG dinucleotide"
  misc_feature (61)..(61): /note="Nucleotide may be methylated to form 5-methylcytosine"
atctgctttgtaaccctatgtaaataatacgtgactcaggatagcatgccccaaaattcacgtccacctggatttcagaacaggactttatttggaaatagggcctttactgatgtaattca

SEQ ID NO: 25040 - DNA, 122 bp, Homo sapiens
  misc_feature (61)..(62): /note="This region represents a CpG dinucleotide"
  misc_feature (61)..(61): /note="Nucleotide may be methylated to form 5-methylcytosine"
gaccttctatttggaaaccagaacaaacaaggaaacaaagaaacaaataattctgctttccgataggtgctggttttacttccgctggctgagctgttgttcctgaggtcagaccccagcca

SEQ ID NO: 25041 - DNA, 122 bp, Homo sapiens
  misc_feature (61)..(62): /note="This region represents a CpG dinucleotide"
  misc_feature (61)..(61): /note="Nucleotide may be methylated to form 5-methylcytosine"
gctgttttgcatgtattaactcatttatcctcataactactctgtgaattaggtcatactcgccctgttttacagaagagccagctgaggcctggagagagtaagtgatttcctgaagatta

SEQ ID NO: 25042 - DNA, 122 bp, Homo sapiens
  misc_feature (61)..(62): /note="This region represents a CpG dinucleotide"
  misc_feature (61)..(61): /note="Nucleotide may be methylated to form 5-methylcytosine"
gtcggccctggagcattctcaggactctgcctgcccctgggggcttccagagcaagactacggggtggtctttcccactcagaacttgtaagtcacacgacttgcccgagccagaggtgact

SEQ ID NO: 25043 - DNA, 122 bp, Homo sapiens
  misc_feature (61)..(62): /note="This region represents a CpG dinucleotide"
  misc_feature (61)..(61): /note="Nucleotide may be methylated to form 5-methylcytosine"
tgtaggaccctgctccctctcaggggtgaagatcccatctttgaaatgcctgacttctctcggacagtccattattgaggaaagacttagacattttacagcgctgtcaggcattccgtgat

SEQ ID NO: 25044 - DNA, 122 bp, Homo sapiens
  misc_feature (61)..(62): /note="This region represents a CpG dinucleotide"
  misc_feature (61)..(61): /note="Nucleotide may be methylated to form 5-methylcytosine"
gctccagaggaaattcccaaaggaagagacaactcagaagcactttaaattgcaacaccacggcaccacggcaaagagataagagggagcatgccaaatccctagttttggggctactctct

SEQ ID NO: 25045 - DNA, 122 bp, Homo sapiens
  misc_feature (61)..(62): /note="This region represents a CpG dinucleotide"
  misc_feature (61)..(61): /note="Nucleotide may be methylated to form 5-methylcytosine"
tctcagaagctgtgtgtgtgtgtgtgtgtgtgtgtgtgtgtgtgtgtgtgtgcgcgcgcgcgcgtagatgcacaaaagctccgcgtggcaggtggtctcctgtaacacggctgagggggcgg

SEQ ID NO: 25046 - DNA, 122 bp, Homo sapiens
  misc_feature (61)..(62): /note="This region represents a CpG dinucleotide"
  misc_feature (61)..(61): /note="Nucleotide may be methylated to form 5-methylcytosine"
tgtatggtgatactaatatgatggctagtgtgattattctatagctagttggagcagtcacgatacacacacccaaagaatgagaagttggattgatccaaggaaggattttgccagacagg

SEQ ID NO: 25047 - DNA, 122 bp, Homo sapiens
  misc_feature (61)..(62): /note="This region represents a CpG dinucleotide"
  misc_feature (61)..(61): /note="Nucleotide may be methylated to form 5-methylcytosine"
tcaagggaagtataaaatgagattctgggattagcaagcatctgtgcgcgtgagggggcccgaagcttaagcttcattagcttcacgtctcaaactgcctctgcaatgttcttcatgagatt

SEQ ID NO: 25048 - DNA, 122 bp, Homo sapiens
  misc_feature (61)..(62): /note="This region represents a CpG dinucleotide"
  misc_feature (61)..(61): /note="Nucleotide may be methylated to form 5-methylcytosine"
taatgtcatatataagatggactcactgataaacagacttgaaagaaatgaggaagcaagcgttgtgtacatctggaggaagccgtttccaagcagagggggaacaaaagtaaaggcctgaa

SEQ ID NO: 25049 - DNA, 122 bp, Homo sapiens
  misc_feature (61)..(62): /note="This region represents a CpG dinucleotide"
  misc_feature (61)..(61): /note="Nucleotide may be methylated to form 5-methylcytosine"
ttcaaaaacaaaactaactcctaatctcccaaatgtctggtttatgcctattccagatgacggtgttatttaattctgacctaagattgaggcactgctatatctattaactttaaaataag

SEQ ID NO: 25050 - DNA, 122 bp, Homo sapiens
  misc_feature (61)..(62): /note="This region represents a CpG dinucleotide"
  misc_feature (61)..(61): /note="Nucleotide may be methylated to form 5-methylcytosine"
gctaggaactaagttcctaaggcactctgctctataaacaagcttgtcacactacataaacgtggcatgtcaagggattgaaagtctgctctaaataatgacaggaaagggaaactgccata

SEQ ID NO: 25051 - DNA, 122 bp, Homo sapiens
  misc_feature (61)..(62): /note="This region represents a CpG dinucleotide"
  misc_feature (61)..(61): /note="Nucleotide may be methylated to form 5-methylcytosine"
tctggggacagatgcccatcaaaccaactgaagatgcctccaggcctcccaataggtgttcgagccccacccttgctgtgcagaggctgggaaactcctcaggaatcctgcctgacttcctc

SEQ ID NO: 25052 - DNA, 122 bp, Homo sapiens
  misc_feature (61)..(62): /note="This region represents a CpG dinucleotide"
  misc_feature (61)..(61): /note="Nucleotide may be methylated to form 5-methylcytosine"
gtaatgagcatcttcatccctttccttcaagattagaagaatatcattcttatggtattccgaaacatatgactcaaacacttgaccaaccagtgtaacttgatcgctattcatcttgaatc

SEQ ID NO: 25053 - DNA, 122 bp, Homo sapiens
  misc_feature (61)..(62): /note="This region represents a CpG dinucleotide"
  misc_feature (61)..(61): /note="Nucleotide may be methylated to form 5-methylcytosine"
acctggagggggccctgttgaacagctaatcttaggaacacagcatgaggactgggagttcgagggagggccagtcaatggagtgcagactgtggactggcttgtttttttttaaccccgag

SEQ ID NO: 25054 - DNA, 122 bp, Homo sapiens
  misc_feature (61)..(62): /note="This region represents a CpG dinucleotide"
  misc_feature (61)..(61): /note="Nucleotide may be methylated to form 5-methylcytosine"
aggtatcatggaaaacctttaaggaaataggctgagttgactgagaagctcagagacaagcgtgtggctagcgataacaatgactgtcaggtttgttcagacctagcttatctatagaaagc

SEQ ID NO: 25055 - DNA, 122 bp, Homo sapiens
  misc_feature (61)..(62): /note="This region represents a CpG dinucleotide"
  misc_feature (61)..(61): /note="Nucleotide may be methylated to form 5-methylcytosine"
accaatcacaaagcatgtccacaagggcttggggcttccgtgtgaccagcatgtcagtgtcgtttgtgtcccggaatgaagcaagctgctgtgtttggaagcatcttcgttggtttggtttc

SEQ ID NO: 25056 - DNA, 122 bp, Homo sapiens
  misc_feature (61)..(62): /note="This region represents a CpG dinucleotide"
  misc_feature (61)..(61): /note="Nucleotide may be methylated to form 5-methylcytosine"
cccttggtcctgacatgggtgtggcatttgattggctctagtcccaggtctgacaacatgcggaagagcaggaagaatagagaggagctgccacttccagagggcctggctgtgtgctgggc

SEQ ID NO: 25057 - DNA, 122 bp, Homo sapiens
  misc_feature (61)..(62): /note="This region represents a CpG dinucleotide"
  misc_feature (61)..(61): /note="Nucleotide may be methylated to form 5-methylcytosine"
ggacaggccagcgaccccaatgcatatgagctgatacagaaaattcacaccctgcagaagcgtctcatcagcaagactgaagaggtggttgaaaaagagctgctcctccaggtagcattttt

SEQ ID NO: 25058 - DNA, 122 bp, Homo sapiens
  misc_feature (61)..(62): /note="This region represents a CpG dinucleotide"
  misc_feature (61)..(61): /note="Nucleotide may be methylated to form 5-methylcytosine"
ccaagatctgttatagtgagttgtttctcctagttgtcagatagcagagaaaaaaatgtacgcccgcagaatccagcctttgatccagcgttcctggagaaccctcactcatttatgaagcg

SEQ ID NO: 25059 - DNA, 122 bp, Homo sapiens
  misc_feature (61)..(62): /note="This region represents a CpG dinucleotide"
  misc_feature (61)..(61): /note="Nucleotide may be methylated to form 5-methylcytosine"
caccacagcccctgtaaccagccaacaaattcgagttaaatgcctattctttgtcccacacgtattagttacagagagtggagaacaagtggcagatagaggctgagggaagccaacccact

SEQ ID NO: 25060 - DNA, 122 bp, Homo sapiens
  misc_feature (61)..(62): /note="This region represents a CpG dinucleotide"
  misc_feature (61)..(61): /note="Nucleotide may be methylated to form 5-methylcytosine"
aaatccttgtcttcaacaggtctggtcagctctgaagattccctgaaatgtgacatgtagcgtgactgtttgcattctgagtagcccactacactggtataaattcacaaatttggagagtc

SEQ ID NO: 25061 - DNA, 122 bp, Homo sapiens
  misc_feature (61)..(62): /note="This region represents a CpG dinucleotide"
  misc_feature (61)..(61): /note="Nucleotide may be methylated to form 5-methylcytosine"
gaaagaagctaatgaatcagccttcaaagtgagcaaacacatgagccattcaattaatcacgcatgagtcttcaaatccatgtccacatcaggctttgtctctcactagttggggaaacttg

SEQ ID NO: 25062 - DNA, 122 bp, Homo sapiens
  misc_feature (61)..(62): /note="This region represents a CpG dinucleotide"
  misc_feature (61)..(61): /note="Nucleotide may be methylated to form 5-methylcytosine"
gacgtggttgccttttcattttgtcctgccccttggcttgttctttctgatccaacacagcggagtctgcttgttcattggccaaatgtcaacaagtcaccataaagggctgccaaggaaaa

SEQ ID NO: 25063 - DNA, 122 bp, Homo sapiens
  misc_feature (61)..(62): /note="This region represents a CpG dinucleotide"
  misc_feature (61)..(61): /note="Nucleotide may be methylated to form 5-methylcytosine"
cactcataaaaagaccaactttagcaccattttcaatcaagaatattccttgaggccaggcggcgtggctcacacctgtaatcccagcactctgggaggcttggggcgggtggatcacctga

SEQ ID NO: 25064 - DNA, 122 bp, Homo sapiens
  misc_feature (61)..(62): /note="This region represents a CpG dinucleotide"
  misc_feature (61)..(61): /note="Nucleotide may be methylated to form 5-methylcytosine"
gattacaggcgtgacccactgctcccgacagagtattcattagtttcattgctgtcttttcgtccatgtaagctttgaaacagtgagaagatgcagccctgttgagttggcaactaatgaaa

SEQ ID NO: 25065 - DNA, 122 bp, Homo sapiens
  misc_feature (61)..(62): /note="This region represents a CpG dinucleotide"
  misc_feature (61)..(61): /note="Nucleotide may be methylated to form 5-methylcytosine"
actgttctcgactctaataagattgtgatcctctggatttggtgtccactctgaacgcggcgtgggtgtttaacaactgtgacgggacagatgtcattaatgtgaaaatgctcgcagccttc

SEQ ID NO: 25066 - DNA, 122 bp, Homo sapiens
  misc_feature (61)..(62): /note="This region represents a CpG dinucleotide"
  misc_feature (61)..(61): /note="Nucleotide may be methylated to form 5-methylcytosine"
gggaatggcaactggagagatgactgtgtcagagagaccacaacccttcagaagaaggtgcgaatcagggcctggtcctgcatgcaggtgattgaattagaaatgaaacaagactgaattaa

SEQ ID NO: 25067 - DNA, 122 bp, Homo sapiens
  misc_feature (61)..(62): /note="This region represents a CpG dinucleotide"
  misc_feature (61)..(61): /note="Nucleotide may be methylated to form 5-methylcytosine"
gcatcataccaggctcacctgtagttctgcctgaaccatgcaatttagggtttaattatacgctgtcttgcattgtttctactaattgttgcataggtcaatcttatactttcattcatcat

SEQ ID NO: 25068 - DNA, 122 bp, Homo sapiens
  misc_feature (61)..(62): /note="This region represents a CpG dinucleotide"
  misc_feature (61)..(61): /note="Nucleotide may be methylated to form 5-methylcytosine"
tctccccatgaaagttccactcaaactaatctgaatctagttcaagtcctcatcatctctcgcctggttgactgccacagacttctgtcttccctgactctgatgttatctgaaccatctgc

SEQ ID NO: 25069 - DNA, 122 bp, Homo sapiens
  misc_feature (61)..(62): /note="This region represents a CpG dinucleotide"
  misc_feature (61)..(61): /note="Nucleotide may be methylated to form 5-methylcytosine"
cagatactgaggtcacccattgtgttcaagttcctttaatttatctgaaatgagtctgggcgtggtggctcacgcctgtaatcccagcactttgggaagccaagccgggtggatcacttgag

SEQ ID NO: 25070 - DNA, 122 bp, Homo sapiens
  misc_feature (61)..(62): /note="This region represents a CpG dinucleotide"
  misc_feature (61)..(61): /note="Nucleotide may be methylated to form 5-methylcytosine"
ttaggtgtgagtcggagccttaaacctaaaccggaagagccacagagatcaagggctgcacggtcagactataggcacaattaaaatgggagaatgtcagaggcaaaagaggcttactcgat

SEQ ID NO: 25071 - DNA, 122 bp, Homo sapiens
  misc_feature (61)..(62): /note="This region represents a CpG dinucleotide"
  misc_feature (61)..(61): /note="Nucleotide may be methylated to form 5-methylcytosine"
ggctaagtgacatttttgccagatgactcccccttttcggagtacagcgacatcagtgggcggacacacgccatggcggagagagtagacagccactctcctctcagcccggctgctgcccc

SEQ ID NO: 25072 - DNA, 122 bp, Homo sapiens
  misc_feature (61)..(62): /note="This region represents a CpG dinucleotide"
  misc_feature (61)..(61): /note="Nucleotide may be methylated to form 5-methylcytosine"
ttcaagtgattctcctgcctcagcctcccgagtagctgggattacaggcatgtgccaccacggcaggctaattttgtattttaagtagagatggggttgctccatgttggtcaggctggtct

SEQ ID NO: 25073 - DNA, 122 bp, Homo sapiens
  misc_feature (61)..(62): /note="This region represents a CpG dinucleotide"
  misc_feature (61)..(61): /note="Nucleotide may be methylated to form 5-methylcytosine"
taacttttataaatcagaagaaaaatccttgtttaacccatcaaaactatttgttcaaaacgaagcccctggtcacaatcatgtggactgaacagcagattcctggcctcatcatagaccca

SEQ ID NO: 25074 - DNA, 122 bp, Homo sapiens
  misc_feature (61)..(62): /note="This region represents a CpG dinucleotide"
  misc_feature (61)..(61): /note="Nucleotide may be methylated to form 5-methylcytosine"
aaaggtaaatatgaacaagagcttgttgaatacctattgtgtcctagaaactgccaggagcgctgaaaaaagaggacatcaaagattattttttaaagtttttgtttatttatggctttttt

SEQ ID NO: 25075 - DNA, 122 bp, Homo sapiens
  misc_feature (61)..(62): /note="This region represents a CpG dinucleotide"
  misc_feature (61)..(61): /note="Nucleotide may be methylated to form 5-methylcytosine"
aaaagccaaaacaagcaagcaaacaaaaacatgcaggcaaggcattttagtcaactcccacgtcaacctatctaagtggtcaggagagatcaggttataaaagaaaggtcagttgtcaactg

SEQ ID NO: 25076 - DNA, 122 bp, Homo sapiens
  misc_feature (61)..(62): /note="This region represents a CpG dinucleotide"
  misc_feature (61)..(61): /note="Nucleotide may be methylated to form 5-methylcytosine"
gaaattccagtcaaatgagacctctgtctccttgggcctctgaatcagtcccagggaaggcggctgattggccttgtttgagtcacgcactctccctctgatggacatctgttattgccacg

SEQ ID NO: 25077 - DNA, 122 bp, Homo sapiens
  misc_feature (61)..(62): /note="This region represents a CpG dinucleotide"
  misc_feature (61)..(61): /note="Nucleotide may be methylated to form 5-methylcytosine"
tgtaagttacctaataccacattataagccaccctcacacttagtggcttaaaacaaccacgctttattattgttcatgcatctgtgggtcagttggacagttctgctcatcagggccagga

SEQ ID NO: 25078 - DNA, 122 bp, Homo sapiens
  misc_feature (61)..(62): /note="This region represents a CpG dinucleotide"
  misc_feature (61)..(61): /note="Nucleotide may be methylated to form 5-methylcytosine"
gagggttatttttaataaccaatattaattcttaaatgtggttaacagttccttcggttacgcagctcaactacactgagcagttgctatgtggtagcccctgagccgggggtggggtattg

SEQ ID NO: 25079 - DNA, 122 bp, Homo sapiens
  misc_feature (61)..(62): /note="This region represents a CpG dinucleotide"
  misc_feature (61)..(61): /note="Nucleotide may be methylated to form 5-methylcytosine"
tctggaatttctatgctgattcattaaaaatgccaacgtgtttattattcactgtccacacgcctaccaattctgggattatgagatagtctgagtactttgtcaacatcaattcttagaat

SEQ ID NO: 25080 - DNA, 122 bp, Homo sapiens
  misc_feature (61)..(62): /note="This region represents a CpG dinucleotide"
  misc_feature (61)..(61): /note="Nucleotide may be methylated to form 5-methylcytosine"
catagccaatttggatttcctgaagcttaagtgtcagggcgcctgtcagggcccgaggaacgtgtttacagagctgtatatttttgggtaaaatttgtgaaagcaagatatttcagctgcaa

SEQ ID NO: 25081 - DNA, 122 bp, Homo sapiens
  misc_feature (61)..(62): /note="This region represents a CpG dinucleotide"
  misc_feature (61)..(61): /note="Nucleotide may be methylated to form 5-methylcytosine"
tttccccttgccaccagccttggtctctcctggcataggagccattccatggtttgtggtcgagttgactagaagacagctctgggtggccacctttgtttaggatgcatgaacttaaagcc

SEQ ID NO: 25082 - DNA, 122 bp, Homo sapiens
  misc_feature (61)..(62): /note="This region represents a CpG dinucleotide"
  misc_feature (61)..(61): /note="Nucleotide may be methylated to form 5-methylcytosine"
accaggcgtaatgaaattcctttgaagcaggacttctaaccctaatttaaaagcagtattcggattattcacatcatgtattttccacaaatggatcctcggctcaggttttcttattttat

SEQ ID NO: 25083 - DNA, 122 bp, Homo sapiens
  misc_feature (61)..(62): /note="This region represents a CpG dinucleotide"
  misc_feature (61)..(61): /note="Nucleotide may be methylated to form 5-methylcytosine"
acggtctccttcataaatgctctactttacactgttttatgaacatgcatttcattttcccgactttgtgcctttgtcttgcagctttaccctcttggaatacatgattcgtctcttttgct

SEQ ID NO: 25084 - DNA, 122 bp, Homo sapiens
  misc_feature (61)..(62): /note="This region represents a CpG dinucleotide"
  misc_feature (61)..(61): /note="Nucleotide may be methylated to form 5-methylcytosine"
aagtgagagtcagctacctcctccaagggggcctccacagtgagagcgcacacagttgtccgtctgcaagaactgttggtacttaccatagcaaacatgtacggacagggcctccaccttca

SEQ ID NO: 25085 - DNA, 122 bp, Homo sapiens
  misc_feature (61)..(62): /note="This region represents a CpG dinucleotide"
  misc_feature (61)..(61): /note="Nucleotide may be methylated to form 5-methylcytosine"
tattttgtgactctcagctctttgagaaggcagtgtgtctcagaaagccagcggtaaaagcgatggttgctaagggaacaattgaattgctgacactgagacatgtaatgtgactgaaaact

SEQ ID NO: 25086 - DNA, 122 bp, Homo sapiens
  misc_feature (61)..(62): /note="This region represents a CpG dinucleotide"
  misc_feature (61)..(61): /note="Nucleotide may be methylated to form 5-methylcytosine"
cacctggaaaggagggcaagaactgggcagggggaggagagtcatgctaggctggggaggcgaggaaaacttgggggcaggacagggccaggcatgtcccaaagacaactggcctggcctag

SEQ ID NO: 25087 - DNA, 122 bp, Homo sapiens
  misc_feature (61)..(62): /note="This region represents a CpG dinucleotide"
  misc_feature (61)..(61): /note="Nucleotide may be methylated to form 5-methylcytosine"
gacagtgtacacccaggattttgttctcagtctgatagtcatctgaaatgaccaatgatgcgggaagtaccctttccagatgctggctcagccagggccgagtgacctgttgcagagtccat

SEQ ID NO: 25088 - DNA, 122 bp, Homo sapiens
  misc_feature (61)..(62): /note="This region represents a CpG dinucleotide"
  misc_feature (61)..(61): /note="Nucleotide may be methylated to form 5-methylcytosine"
ctatttctgatccaccaaaatagcaactttatatgtccaacccaatttgtacaggattcacgagttgagggagggtctaaaatagtttctgagtggaagccctgcttttctgggttgaatat

SEQ ID NO: 25089 - DNA, 122 bp, Homo sapiens
  misc_feature (61)..(62): /note="This region represents a CpG dinucleotide"
  misc_feature (61)..(61): /note="Nucleotide may be methylated to form 5-methylcytosine"
gatcacaatcactctattgatctttggccaatcattttggccaaatcactctggccattgcgtggatactggactcgggtaggcattgagggtgagagaggaggcaggaaaaccagttgagg

SEQ ID NO: 25090 - DNA, 122 bp, Homo sapiens
  misc_feature (61)..(62): /note="This region represents a CpG dinucleotide"
  misc_feature (61)..(61): /note="Nucleotide may be methylated to form 5-methylcytosine"
gtagtgaataaaggagaaagatattcctacctgcatgaagcttacattctaggagaataacgtgaagaaagaacagaagcttgccagatgaatgatccacaaagaaatgaacagtgtatctt

SEQ ID NO: 25091 - DNA, 122 bp, Homo sapiens
  misc_feature (61)..(62): /note="This region represents a CpG dinucleotide"
  misc_feature (61)..(61): /note="Nucleotide may be methylated to form 5-methylcytosine"
tttttcagcttctcttcctcaaagagacaaagctgttcctgaaatgaatgggcacatgtacgttgatgatgtatgttggctggccaagtgaaagagagtctcacctgcccattcaggatatg

SEQ ID NO: 25092 - DNA, 122 bp, Homo sapiens
  misc_feature (61)..(62): /note="This region represents a CpG dinucleotide"
  misc_feature (61)..(61): /note="Nucleotide may be methylated to form 5-methylcytosine"
catcagcttgtcaactggtcatgtgctttaagatcagccatctcggacattgaggtgaggcggagagagggaagcaggtttgtgagagctctgaggcagagtggtcaatgattaagagctca

SEQ ID NO: 25093 - DNA, 122 bp, Homo sapiens
  misc_feature (61)..(62): /note="This region represents a CpG dinucleotide"
  misc_feature (61)..(61): /note="Nucleotide may be methylated to form 5-methylcytosine"
cacctgaggccactctccctggacggggggcgggcggcactgagaggcggccataaaaaccggagtttatttaataaaacaagagcccacgcggcagcagttgcctccaagatgaatgacaa

SEQ ID NO: 25094 - DNA, 122 bp, Homo sapiens
  misc_feature (61)..(62): /note="This region represents a CpG dinucleotide"
  misc_feature (61)..(61): /note="Nucleotide may be methylated to form 5-methylcytosine"
cagttgttctcaacctgctaccaaataccaacctggaaatatgccactatttaaaaagcccgaagaatagggttttgtttttcctttttaattgtttggtgttcaaactacatagtaaacca

SEQ ID NO: 25095 - DNA, 122 bp, Homo sapiens
  misc_feature (61)..(62): /note="This region represents a CpG dinucleotide"
  misc_feature (61)..(61): /note="Nucleotide may be methylated to form 5-methylcytosine"
tgggcgggggcgcctgttaagatctaaaatagatatgttggattgatattctcacgtgttcggtgtggaaaacaaaacaagtacatgctttagaagcaacaacaatgaaatccttttgaaat

SEQ ID NO: 25096 - DNA, 122 bp, Homo sapiens
  misc_feature (61)..(62): /note="This region represents a CpG dinucleotide"
  misc_feature (61)..(61): /note="Nucleotide may be methylated to form 5-methylcytosine"
gggttgctgggaagccaggtcacagggagctcgagaggtgcgggaaggcagctgggcctgcgataaatcagccgccataacctgcccgctttcccagagtcagtctgctccctggggtgcag

SEQ ID NO: 25097 - DNA, 122 bp, Homo sapiens
  misc_feature (61)..(62): /note="This region represents a CpG dinucleotide"
  misc_feature (61)..(61): /note="Nucleotide may be methylated to form 5-methylcytosine"
ttctttgtggtttttacaagccctcttaggctcctaatatttctatagcaacaatttcaacgtttattttagaatgtggtcagaattaaccgacagaagaccaaacaggataaaataggttt

SEQ ID NO: 25098 - DNA, 122 bp, Homo sapiens
  misc_feature (61)..(62): /note="This region represents a CpG dinucleotide"
  misc_feature (61)..(61): /note="Nucleotide may be methylated to form 5-methylcytosine"
ttcattgctaagttctaaagccgtcatgactggatcttcactagacaatgacaggtaagccggacttgccaggcctttataggcattaatcctagatctggagtggctaaacgagtcatgct

SEQ ID NO: 25099 - DNA, 122 bp, Homo sapiens
  misc_feature (61)..(62): /note="This region represents a CpG dinucleotide"
  misc_feature (61)..(61): /note="Nucleotide may be methylated to form 5-methylcytosine"
aaacaaaaacaaaaaaaaaacaaagcaaaaccatatggttatctcaatagatggagaaaacgcagttgacaaaaattcagtactcatttatgagaaaagttctcagcaaactatgaatagaa

SEQ ID NO: 25100 - DNA, 122 bp, Homo sapiens
  misc_feature (61)..(62): /note="This region represents a CpG dinucleotide"
  misc_feature (61)..(61): /note="Nucleotide may be methylated to form 5-methylcytosine"
tcgtggcaccttttaccacctgatatgttcaatggctctatgtttgtttgtagtaagtctcgcctgactagaatataagacccatgggagaagagactttctgctctacccttggcacatac

SEQ ID NO: 25101 - DNA, 122 bp, Homo sapiens
  misc_feature (61)..(62): /note="This region represents a CpG dinucleotide"
  misc_feature (61)..(61): /note="Nucleotide may be methylated to form 5-methylcytosine"
tcttgcctctaattttcttctcccccaatttttttgactaaaaagggttttttgctgtttcgttgttgttgtttcgcaatcaccagtcctaaaatgaagctaaaaatttattttcattttat

SEQ ID NO: 25102 - DNA, 122 bp, Homo sapiens
  misc_feature (61)..(62): /note="This region represents a CpG dinucleotide"
  misc_feature (61)..(61): /note="Nucleotide may be methylated to form 5-methylcytosine"
aaatgcagttaaaaagtatacgtataatatgtatattatatatatatatacacacacacacgtaatagcctgtagtgagattattttaaagacacttcctagtgttaaagaacccttgaagt

SEQ ID NO: 25103 - DNA, 122 bp, Homo sapiens
  misc_feature (61)..(62): /note="This region represents a CpG dinucleotide"
  misc_feature (61)..(61): /note="Nucleotide may be methylated to form 5-methylcytosine"
taaagcccttactcagcacaaggcatagtgccaggctctgggatgcatagatgagggatacgtcataggcatcattgtgttcttaaagtaggcattgttgcagggagtattgagtgtaggaa

SEQ ID NO: 25104 - DNA, 122 bp, Homo sapiens
  misc_feature (61)..(62): /note="This region represents a CpG dinucleotide"
  misc_feature (61)..(61): /note="Nucleotide may be methylated to form 5-methylcytosine"
gaataaataaataacgaatgatttgtttggaaataaaacaaacactggctggggtagcagcgaagctgtaaaaggctaggctggggacctagtctggttgcctgttacatgcatggcttggg

SEQ ID NO: 25105 - DNA, 122 bp, Homo sapiens
  misc_feature (61)..(62): /note="This region represents a CpG dinucleotide"
  misc_feature (61)..(61): /note="Nucleotide may be methylated to form 5-methylcytosine"
caagcaagagcgcctggcacacagatggggctgaatcactgttcacagaatgctcattaacgcatgaatgaatcaatgaatacgcagtagataaaagattgtgaaacttaaccacggcatga

SEQ ID NO: 25106 - DNA, 122 bp, Homo sapiens
  misc_feature (61)..(62): /note="This region represents a CpG dinucleotide"
  misc_feature (61)..(61): /note="Nucleotide may be methylated to form 5-methylcytosine"
ttgtaatcaagaaagggcagcagaaccagctggagaaggtgccccatgaacatactcaggcgccacctctggacagtctcatgttgactcagcagaacctggacgtgtgtgttttgaaagca

SEQ ID NO: 25107 - DNA, 122 bp, Homo sapiens
  misc_feature (61)..(62): /note="This region represents a CpG dinucleotide"
  misc_feature (61)..(61): /note="Nucleotide may be methylated to form 5-methylcytosine"
aaactttcctatgaggtatggccaacaaattgcaggaactgttgtggagggcagggattccgaagtatgtctgcctagtacacaggctgctggcactggctgtgtccagatgtccctagtct

SEQ ID NO: 25108 - DNA, 122 bp, Homo sapiens
  misc_feature (61)..(62): /note="This region represents a CpG dinucleotide"
  misc_feature (61)..(61): /note="Nucleotide may be methylated to form 5-methylcytosine"
aaatgtcactgtcccctctgacccctgcctccaccaaggttcctcagtgttctccgtaggcggattctggatttctccagctgaggtgacctgggcaccagatccttctgggtttgagaagg

SEQ ID NO: 25109 - DNA, 122 bp, Homo sapiens
  misc_feature (61)..(62): /note="This region represents a CpG dinucleotide"
  misc_feature (61)..(61): /note="Nucleotide may be methylated to form 5-methylcytosine"
cagaaagagaacaatgcaggccatctatcatagcagcctctaacctagaggtgacttgcccgctgcagcctcatttctcagttctgtaattaccacccctcccacagactggacaccacagc

SEQ ID NO: 25110 - DNA, 122 bp, Homo sapiens
  misc_feature (61)..(62): /note="This region represents a CpG dinucleotide"
  misc_feature (61)..(61): /note="Nucleotide may be methylated to form 5-methylcytosine"
ggagaggaaggaggaaggacgctcacggtgcgacagctctggccacgctggcgggagctacgtgatgatcctggcgatggcttgcagggaggggaagtcgtcgtcccgggcagcatgcagcg

SEQ ID NO: 25111 - DNA, 122 bp, Homo sapiens
  misc_feature (61)..(62): /note="This region represents a CpG dinucleotide"
  misc_feature (61)..(61): /note="Nucleotide may be methylated to form 5-methylcytosine"
gtcatttctgagtgccattagagccaccaacctgttctgggcctaggctgggtctgtaagcgcccctgttctcgtaaatactttatttgtagagttcctgctgctgggctggccagcacttc

SEQ ID NO: 25112 - DNA, 122 bp, Homo sapiens
  misc_feature (61)..(62): /note="This region represents a CpG dinucleotide"
  misc_feature (61)..(61): /note="Nucleotide may be methylated to form 5-methylcytosine"
gaatattcagagaagtaggcctcataaactttagagctctaataagtcagaaacaggaaacgtttatttaaatagtgtagtcttaatttctttaatataaaacccccccaaatctgatgaaa

SEQ ID NO: 25113 - DNA, 122 bp, Homo sapiens
  misc_feature (61)..(62): /note="This region represents a CpG dinucleotide"
  misc_feature (61)..(61): /note="Nucleotide may be methylated to form 5-methylcytosine"
tttcagggtgtggctcagctgataagaacagagaaaacagccatggtgcctgtctgttctcggctgaatgttccttgtagcaggttaaacaaagccctgtagagagaagcttgaccaccggt

SEQ ID NO: 25114 - DNA, 122 bp, Homo sapiens
  misc_feature (61)..(62): /note="This region represents a CpG dinucleotide"
  misc_feature (61)..(61): /note="Nucleotide may be methylated to form 5-methylcytosine"
gtagatattagtgtattgatttacaattagcccaagtctaccaatttttgaccacccaatcgtggcctctcttacacaattatagtccacagagaacactttgctgtgtgctgaatgatttc

SEQ ID NO: 25115 - DNA, 122 bp, Homo sapiens
  misc_feature (61)..(62): /note="This region represents a CpG dinucleotide"
  misc_feature (61)..(61): /note="Nucleotide may be methylated to form 5-methylcytosine"
gcctcattggctgttgtgggtgtctctgaagctcatgttgaattgctgtcaaatgcccagcgtgttcttggtggtgacacagccacattgtgtaaatacatttcttaagtcatttgtgtgta

SEQ ID NO: 25116 - DNA, 122 bp, Homo sapiens
  misc_feature (61)..(62): /note="This region represents a CpG dinucleotide"
  misc_feature (61)..(61): /note="Nucleotide may be methylated to form 5-methylcytosine"
tctgcctgaaaaccctaaatgctttccctgttacaatcctttataatacttgaatttgaacgctttatgacagcagggtcaaataaataagataacttgggttcaaagtctgtttttcttta

SEQ ID NO: 25117 - DNA, 122 bp, Homo sapiens
  misc_feature (61)..(62): /note="This region represents a CpG dinucleotide"
  misc_feature (61)..(61): /note="Nucleotide may be methylated to form 5-methylcytosine"
ttgaagtgcacactgattgacacgacatgttggaagccaacggtaaaacaacctgccatccgtaaggcacatctccaacatgtcagtaaacaaggagaacagacgttaagtgaacatgagca

SEQ ID NO: 25118 - DNA, 122 bp, Homo sapiens
  misc_feature (61)..(62): /note="This region represents a CpG dinucleotide"
  misc_feature (61)..(61): /note="Nucleotide may be methylated to form 5-methylcytosine"
aaatgaagaggattacataattgttttgaaatgattatttttggctacaaggatcaacaacgagggtgatgtcagtccgacactggataggcagttactgggtagatgtcctcgcagtagct

SEQ ID NO: 25119 - DNA, 122 bp, Homo sapiens
  misc_feature (61)..(62): /note="This region represents a CpG dinucleotide"
  misc_feature (61)..(61): /note="Nucleotide may be methylated to form 5-methylcytosine"
ataccagtcagctccaacatggaagcaatcaggggacactagctgggatgtcatcacctgcgtgggcactgcaagctgccatgggagatgctcccaggtgggagcagctttcaggaggccag

SEQ ID NO: 25120 - DNA, 122 bp, Homo sapiens
  misc_feature (61)..(62): /note="This region represents a CpG dinucleotide"
  misc_feature (61)..(61): /note="Nucleotide may be methylated to form 5-methylcytosine"
ggaagggtgtcagaaatgaggctctcgtggataacaatatgccagaaggctatctgcccccgtattgcagatagattgaaagtaaggatcagaatagggtaagcttcggttataattagtat

SEQ ID NO: 25121 - DNA, 122 bp, Homo sapiens
  misc_feature (61)..(62): /note="This region represents a CpG dinucleotide"
  misc_feature (61)..(61): /note="Nucleotide may be methylated to form 5-methylcytosine"
ctttcttagctgccctggctggtgtttcatgtccaccagctctgcgttcagcacagcactcggacttgcctaggaattgtaagatttcttttcaaatttattgaggaccccaaagcacttca

SEQ ID NO: 25122 - DNA, 122 bp, Homo sapiens
  misc_feature (61)..(62): /note="This region represents a CpG dinucleotide"
  misc_feature (61)..(61): /note="Nucleotide may be methylated to form 5-methylcytosine"
gcttactcaactttcagttcctctaaatatttctagggtatctctctgtccatctctctacggaaaagccctccctttaaaaatcatcttcatactcaacctaactttctactgttactttg

SEQ ID NO: 25123 - DNA, 122 bp, Homo sapiens
  misc_feature (61)..(62): /note="This region represents a CpG dinucleotide"
  misc_feature (61)..(61): /note="Nucleotide may be methylated to form 5-methylcytosine"
ttttgcacccactggaaataataaaagttactcaagcagtaagcaacaagcagtcccccacgtcactctaattcctgccaactgtccattgtatggatgccagaagccactgagccatggaa

SEQ ID NO: 25124 - DNA, 122 bp, Homo sapiens
  misc_feature (61)..(62): /note="This region represents a CpG dinucleotide"
  misc_feature (61)..(61): /note="Nucleotide may be methylated to form 5-methylcytosine"
gggtctgtgctttagcaactgactaggagcgaaggtccaagtgggactctggactgggagcgagggctgagactaaagtcgccacatcaggctgcttgttccgttcactcagcaaatattta

SEQ ID NO: 25125 - DNA, 122 bp, Homo sapiens
  misc_feature (61)..(62): /note="This region represents a CpG dinucleotide"
  misc_feature (61)..(61): /note="Nucleotide may be methylated to form 5-methylcytosine"
acccttatgagaagtgaaggttttgtaaactttccagtattaatttgggcgggtattccccgcttgtggcttgtttctgtcctagctggaggtgtaaaatgcacaatgtgtagcaggtagaa

SEQ ID NO: 25126 - DNA, 122 bp, Homo sapiens
  misc_feature (61)..(62): /note="This region represents a CpG dinucleotide"
  misc_feature (61)..(61): /note="Nucleotide may be methylated to form 5-methylcytosine"
cactgctgctgaatacattcccgcagctcccggttacttacaggctaaaattcaaactcccgctcatacagccctccatgagctggctgctggccctctgccagcctctgttacaggatatg

SEQ ID NO: 25127 - DNA, 122 bp, Homo sapiens
  misc_feature (61)..(62): /note="This region represents a CpG dinucleotide"
  misc_feature (61)..(61): /note="Nucleotide may be methylated to form 5-methylcytosine"
ctgggagaggagggcaatctgacccaattgtgtggttttttggcttgcaagaaatcttctcgcctaggctgcaaggactgctacatagaattacaaaaagttattgctacaaagcacttaaa

SEQ ID NO: 25128 - DNA, 122 bp, Homo sapiens
  misc_feature (61)..(62): /note="This region represents a CpG dinucleotide"
  misc_feature (61)..(61): /note="Nucleotide may be methylated to form 5-methylcytosine"
agaaggcaacttttttgaaccagtactgctccttgcagagcaggactaacccataggcagcgggctgagttggcaacatatgggctgttggcagctgtacttatacccacttttaattatat

SEQ ID NO: 25129 - DNA, 122 bp, Homo sapiens
  misc_feature (61)..(62): /note="This region represents a CpG dinucleotide"
  misc_feature (61)..(61): /note="Nucleotide may be methylated to form 5-methylcytosine"
cagatgttgccatagctacctggtgtgggagaccccacaaaagtcaaagttcaaagtcagcggacgtgacaattaagaaaacactggaagacctactctcagagggaaacacagtctcctca

SEQ ID NO: 25130 - DNA, 122 bp, Homo sapiens
  misc_feature (61)..(62): /note="This region represents a CpG dinucleotide"
  misc_feature (61)..(61): /note="Nucleotide may be methylated to form 5-methylcytosine"
ccagctgagctctgaagccagattgtctgggttcagattctttctctacacttgcagccacgtggcttcagtcaaattgccctctgagactcagtttttctcattggtaaaatgaggataat

SEQ ID NO: 25131 - DNA, 122 bp, Homo sapiens
  misc_feature (61)..(62): /note="This region represents a CpG dinucleotide"
  misc_feature (61)..(61): /note="Nucleotide may be methylated to form 5-methylcytosine"
acagttcttggcccagtgcctggctcatggtgagttctcagtaaataaccatgaccagcacgttgggaggctgagacaggaggatctcctgagcccaggagttcgagaccagcctgggcaac

SEQ ID NO: 25132 - DNA, 122 bp, Homo sapiens
  misc_feature (61)..(62): /note="This region represents a CpG dinucleotide"
  misc_feature (61)..(61): /note="Nucleotide may be methylated to form 5-methylcytosine"
gatcacacagagagtcccacaggtcatggtaaagaattcagattttttttttttttttggcggtggggggaggcaatagaatgccactgaatgattttgatcaagagaaaaacacagtctgg

SEQ ID NO: 25133 - DNA, 122 bp, Homo sapiens
  misc_feature (61)..(62): /note="This region represents a CpG dinucleotide"
  misc_feature (61)..(61): /note="Nucleotide may be methylated to form 5-methylcytosine"
tcgtgtctctaagcctcagcttcctaatctgtgaaacaggctgatggaccagtgagataacgcctgtgaggtgcttatcacctgatactgcctcttcttgctggcacatcaagctggaggat

SEQ ID NO: 25134 - DNA, 122 bp, Homo sapiens
  misc_feature (61)..(62): /note="This region represents a CpG dinucleotide"
  misc_feature (61)..(61): /note="Nucleotide may be methylated to form 5-methylcytosine"
ctactcccttggagcctgcttatttctgggataccagatgaaagaatatttctgagcctacgtgactaaagaccaggctgtggaaacaggtcacgaggaagcctgtgccctcaggtgggcat

SEQ ID NO: 25135 - DNA, 122 bp, Homo sapiens
  misc_feature (61)..(62): /note="This region represents a CpG dinucleotide"
  misc_feature (61)..(61): /note="Nucleotide may be methylated to form 5-methylcytosine"
tctgttgattactaactgaagcctcaattccccaatctttaaaatagggataataatacccgtatcataggagtgttatgttaaacaagaaaatctatgtgagaatgtcactgtctgcttgc

SEQ ID NO: 25136 - DNA, 122 bp, Homo sapiens
  misc_feature (61)..(62): /note="This region represents a CpG dinucleotide"
  misc_feature (61)..(61): /note="Nucleotide may be methylated to form 5-methylcytosine"
agggtgggggtgggacgcgtgcgattgcgggtgggtgtgtgcgggtaggagtgtgggctccgtgcctgtgattctgaatgagtgcgccaggctgggcgtgactctgggtctggggacagtgg

SEQ ID NO: 25137 - DNA, 122 bp, Homo sapiens
  misc_feature (61)..(62): /note="This region represents a CpG dinucleotide"
  misc_feature (61)..(61): /note="Nucleotide may be methylated to form 5-methylcytosine"
gctgacgtgtgtgaactccaacttcatgagagatcctgagtcagaatgacctggctaagccgcttccaaaatcctgaaccacagaaactgagataataaatgtttattgttttatgccaatg

SEQ ID NO: 25138 - DNA, 122 bp, Homo sapiens
  misc_feature (61)..(62): /note="This region represents a CpG dinucleotide"
  misc_feature (61)..(61): /note="Nucleotide may be methylated to form 5-methylcytosine"
cccaccgccttgcgtacgcacaggggcccggggacggggtggccgggaagggcaggggaacggctgccccagcccgcgccgggcgtgcatacacaacgcacccacactcacacacacacaca

SEQ ID NO: 25139 - DNA, 122 bp, Homo sapiens
  misc_feature (61)..(62): /note="This region represents a CpG dinucleotide"
  misc_feature (61)..(61): /note="Nucleotide may be methylated to form 5-methylcytosine"
gtctctgactaaatttaatacttctttggaccaaggtacctggtggaggaagataatgcacgggcctcaaaggtgtcgaatttttagaactcttgtaaagggatgcacttgagaactatctg

SEQ ID NO: 25140 - DNA, 122 bp, Homo sapiens
  misc_feature (61)..(62): /note="This region represents a CpG dinucleotide"
  misc_feature (61)..(61): /note="Nucleotide may be methylated to form 5-methylcytosine"
ggggccttcctatgcctcatgcatcaggccctttggagccctgggagcagacggccatggcggctgaagctgcagtggatgcactcatgatgatgaggataataatagttgctaacatttct

SEQ ID NO: 25141 - DNA, 122 bp, Homo sapiens
  misc_feature (61)..(62): /note="This region represents a CpG dinucleotide"
  misc_feature (61)..(61): /note="Nucleotide may be methylated to form 5-methylcytosine"
taccattttgcataacctacgttactcatctttctttaatttgtgcatatttgtaaacaacgttctattaattcagcctgccatccactacagtgtaatcttaggaaggcagagcaagaatt

SEQ ID NO: 25142 - DNA, 122 bp, Homo sapiens
  misc_feature (61)..(62): /note="This region represents a CpG dinucleotide"
  misc_feature (61)..(61): /note="Nucleotide may be methylated to form 5-methylcytosine"
cacctatctggatcttagtttcttcttttataaagttaggcacttgagccccatggtcttcgaggtccctgtcagacccaagtttgatttttctccatcccttgggaacagggcagtccacc

SEQ ID NO: 25143 - DNA, 122 bp, Homo sapiens
  misc_feature (61)..(62): /note="This region represents a CpG dinucleotide"
  misc_feature (61)..(61): /note="Nucleotide may be methylated to form 5-methylcytosine"
gaaatctaaaggctgaaaaagaggcagccctgataagagtcagaagacaattctactgagcgaatagttgtttaaaaaacaatctgtaactagtccagtttcacatctggggtattgaataa

SEQ ID NO: 25144 - DNA, 122 bp, Homo sapiens
  misc_feature (61)..(62): /note="This region represents a CpG dinucleotide"
  misc_feature (61)..(61): /note="Nucleotide may be methylated to form 5-methylcytosine"
tgagttgcacatcctgtagatgagcgcaaagagatgagtaaaaaataaccaaacactgtacgtgagaagtcataatctttaaagatacaggatttgtcttaagagtaatggctttaaaaact

SEQ ID NO: 25145 - DNA, 122 bp, Homo sapiens
  misc_feature (61)..(62): /note="This region represents a CpG dinucleotide"
  misc_feature (61)..(61): /note="Nucleotide may be methylated to form 5-methylcytosine"
acaagctacagtctcataaaatacacaaagtaatcctcaaaatgccacatttggccttaacgaaatataacttttgaatattaccgtttacactccaggtctgttaaccacaagtaggccgt

SEQ ID NO: 25146 - DNA, 122 bp, Homo sapiens
  misc_feature (61)..(62): /note="This region represents a CpG dinucleotide"
  misc_feature (61)..(61): /note="Nucleotide may be methylated to form 5-methylcytosine"
tggatttgcccaggccattatccaggtccccgacatcaaatgaattctataatttgtaaacgcagccgagtggcttttacagaggaatgtcgggaagtgataaaaaaaatacttctgataga

SEQ ID NO: 25147 - DNA, 122 bp, Homo sapiens
  misc_feature (61)..(62): /note="This region represents a CpG dinucleotide"
  misc_feature (61)..(61): /note="Nucleotide may be methylated to form 5-methylcytosine"
gtgactaagggagggctctaaacagctctggccaaaggaacttcatgctgggatggccaccgtctatattcacactgtctcattagtagccatgctgtctgctcggcacttgaaatgtggct

SEQ ID NO: 25148 - DNA, 122 bp, Homo sapiens
  misc_feature (61)..(62): /note="This region represents a CpG dinucleotide"
  misc_feature (61)..(61): /note="Nucleotide may be methylated to form 5-methylcytosine"
cacagtcttgtcttccccaccccatctctcaccccaaaccagccaccaccctagtccctacggtcacagctgcaggtgaagccttggccctgccctcccactgccggggccctgggggtgaa

SEQ ID NO: 25149 - DNA, 122 bp, Homo sapiens
  misc_feature (61)..(62): /note="This region represents a CpG dinucleotide"
  misc_feature (61)..(61): /note="Nucleotide may be methylated to form 5-methylcytosine"
tctgaactgctctgtagaaaaacaaacaccacacaatgcaattgatgaatggcaggttcgcgataaatcccaatggttagtattaaaaatgcaaacactgtaacccttgataaaacagagct

SEQ ID NO: 25150 - DNA, 122 bp, Homo sapiens
  misc_feature (61)..(62): /note="This region represents a CpG dinucleotide"
  misc_feature (61)..(61): /note="Nucleotide may be methylated to form 5-methylcytosine"
ttggaaacacttaatgcgctctccaaatggggagtctgttggggaggccctggcgggagccggggctacatccaggtcctcggcttggtggccttgttcacttatttgttcaggaagcagca

SEQ ID NO: 25151 - DNA, 122 bp, Homo sapiens
  misc_feature (61)..(62): /note="This region represents a CpG dinucleotide"
  misc_feature (61)..(61): /note="Nucleotide may be methylated to form 5-methylcytosine"
tttaggcttaatttgctcatctataaaacaaatagaacaactctcagcctttttctgagacgctgaatattcccgtaggtgttaatgcagcttgtgctgcattgcggtgtgaaaagtaatct

SEQ ID NO: 25152 - DNA, 122 bp, Homo sapiens
  misc_feature (61)..(62): /note="This region represents a CpG dinucleotide"
  misc_feature (61)..(61): /note="Nucleotide may be methylated to form 5-methylcytosine"
actgggggtttgagtcacaggcaggcacaggaggaggccaccagagttccatctttgtgacgcagcaccatggagttcctgtgttggtctctgagtctttgcccatgttattccctctacct

SEQ ID NO: 25153 - DNA, 122 bp, Homo sapiens
  misc_feature (61)..(62): /note="This region represents a CpG dinucleotide"
  misc_feature (61)..(61): /note="Nucleotide may be methylated to form 5-methylcytosine"
gaaccagcaaagcaagagaggagttgcaatggctagaattgtgtaacttgccttcagccacgtagccatggtggcagagctaggatttgaattcaagtctttgtgactcattgtcatgaggc

SEQ ID NO: 25154 - DNA, 122 bp, Homo sapiens
  misc_feature (61)..(62): /note="This region represents a CpG dinucleotide"
  misc_feature (61)..(61): /note="Nucleotide may be methylated to form 5-methylcytosine"
atttctgagctatttggctgatgagcacagatgagcagagccaaccggctttaacatcctcgatgcatgaacaataaaggcttattgttgcatgaggttttgtgtggttcatcttatatagc

SEQ ID NO: 25155 - DNA, 122 bp, Homo sapiens
  misc_feature (61)..(62): /note="This region represents a CpG dinucleotide"
  misc_feature (61)..(61): /note="Nucleotide may be methylated to form 5-methylcytosine"
aataataatactggcatttccttgtttggcacttgattataattgaaattgcacatttttcgtgtttattggccaactgtaacttaagtgaatcctcttcatatgccttttccctaaaggta

SEQ ID NO: 25156 - DNA, 122 bp, Homo sapiens
  misc_feature (61)..(62): /note="This region represents a CpG dinucleotide"
  misc_feature (61)..(61): /note="Nucleotide may be methylated to form 5-methylcytosine"
gtgacagctcttgtctcctttcccactctttgaaggtaactattatacttaactctttggcgtatagtcttccaaatatatttctttttctgtttgttttcttctccagataaagtttcccc

SEQ ID NO: 25157 - DNA, 122 bp, Homo sapiens
  misc_feature (61)..(62): /note="This region represents a CpG dinucleotide"
  misc_feature (61)..(61): /note="Nucleotide may be methylated to form 5-methylcytosine"
tgaggaggtctcagaataccaagaagtaactgcctaggtggatgatagccctgtattacccgtacattgtctatccatagttgtctgtctctctcaaagcttgtctttctttctctcttaaa

SEQ ID NO: 25158 - DNA, 122 bp, Homo sapiens
  misc_feature (61)..(62): /note="This region represents a CpG dinucleotide"
  misc_feature (61)..(61): /note="Nucleotide may be methylated to form 5-methylcytosine"
tgagtttgtttaggccttaaagccagccatccatggacttttcagttacatgagccaatacgtttccacttttctgtagctcagttgaattaggttattacgctttctgctactggcaatgg

SEQ ID NO: 25159 - DNA, 122 bp, Homo sapiens
  misc_feature (61)..(62): /note="This region represents a CpG dinucleotide"
  misc_feature (61)..(61): /note="Nucleotide may be methylated to form 5-methylcytosine"
agaagatgaagactaaggccaagctgcaaatggccaggctatttattgcaaaaatacttccgcaaagaacctatctgcaaatacccacagagggtttttccctcttttgggtgccaattctt

SEQ ID NO: 25160 - DNA, 122 bp, Homo sapiens
  misc_feature (61)..(62): /note="This region represents a CpG dinucleotide"
  misc_feature (61)..(61): /note="Nucleotide may be methylated to form 5-methylcytosine"
actgtgagagtctgggggactctctgctattgactcattgcattatcatctattccatgacgttgatgatgatgactaagagaattgcaacaataatgaggacaacagacaaggctaataac

SEQ ID NO: 25161 - DNA, 122 bp, Homo sapiens
  misc_feature (61)..(62): /note="This region represents a CpG dinucleotide"
  misc_feature (61)..(61): /note="Nucleotide may be methylated to form 5-methylcytosine"
gggcaggaagaagagaatcccctgtttgtaagagaacagtcacatactagatgctgtctacggcttgtgaaaaacacaaggaaacggccacctgagagtactaaagtggccaggcccacggg

SEQ ID NO: 25162 - DNA, 122 bp, Homo sapiens
  misc_feature (61)..(62): /note="This region represents a CpG dinucleotide"
  misc_feature (61)..(61): /note="Nucleotide may be methylated to form 5-methylcytosine"
agccagactcttggctgcggcaaaggtggactctgaactcattagctgtaggatatcaggcgagttttctaatctgtttgggcccggtttctcatctgcaaaatggggataatacttacctt

SEQ ID NO: 25163 - DNA, 122 bp, Homo sapiens
  misc_feature (61)..(62): /note="This region represents a CpG dinucleotide"
  misc_feature (61)..(61): /note="Nucleotide may be methylated to form 5-methylcytosine"
ggccctcacctggggaggtggtgaccgcaagcctgacagccccaaagccttcagagatgccgcctggggacactttgggaaagtccaggcggaggacacctgggaatgtgatagtgacacaa

SEQ ID NO: 25164 - DNA, 122 bp, Homo sapiens
  misc_feature (61)..(62): /note="This region represents a CpG dinucleotide"
  misc_feature (61)..(61): /note="Nucleotide may be methylated to form 5-methylcytosine"
ccaggatgtgtgcactttctatatgtgctggacctcaactaaaaacaaacagtagccaggcgtgctggcacgtgcctgtaatcccagctacccagggggttggggggggaaccgaggcagga

SEQ ID NO: 25165 - DNA, 122 bp, Homo sapiens
  misc_feature (61)..(62): /note="This region represents a CpG dinucleotide"
  misc_feature (61)..(61): /note="Nucleotide may be methylated to form 5-methylcytosine"
tcaattgccccttcatctcagagcagttagttctctgctaactctaggcaggaaacaggccggacagtggttacgaacttccaagattacagactgcctccatgactaagagactgctcagc

SEQ ID NO: 25166 - DNA, 122 bp, Homo sapiens
  misc_feature (61)..(62): /note="This region represents a CpG dinucleotide"
  misc_feature (61)..(61): /note="Nucleotide may be methylated to form 5-methylcytosine"
ccacatgcctgtaatcccaactacttgggaggctgacacagcagaatcacttgaatttggcgggaggcagaggttgcagtgagctgagattgcaccactgcactccagcctgggtgacaaag

SEQ ID NO: 25167 - DNA, 122 bp, Homo sapiens
  misc_feature (61)..(62): /note="This region represents a CpG dinucleotide"
  misc_feature (61)..(61): /note="Nucleotide may be methylated to form 5-methylcytosine"
aaaagctgatctggtttgactccgctggaggtggggcctggagcaggccttgcgctgttgcgtaactggctgtgttctggtgaggccttgctcccaaccccacacgctcctccctctgaggc

SEQ ID NO: 25168 - DNA, 122 bp, Homo sapiens
  misc_feature (61)..(62): /note="This region represents a CpG dinucleotide"
  misc_feature (61)..(61): /note="Nucleotide may be methylated to form 5-methylcytosine"
ccactcccagaaaaccagctccctggggacggctgtttcctcccagcaaggcagcaggggcgagaccgtgaaagaaccatcctgtgttctcagctgtgcacttccctcacgttcttactctg

SEQ ID NO: 25169 - DNA, 122 bp, Homo sapiens
  misc_feature (61)..(62): /note="This region represents a CpG dinucleotide"
  misc_feature (61)..(61): /note="Nucleotide may be methylated to form 5-methylcytosine"
cacgcactgcacacttttgcagcttggcagcagccggctaaaccatgcggcccaagggtgcgggaggctgcacggcccaggctcgtacaagtcattctaggaagttcccgcaaagacaacac

SEQ ID NO: 25170 - DNA, 122 bp, Homo sapiens
  misc_feature (61)..(62): /note="This region represents a CpG dinucleotide"
  misc_feature (61)..(61): /note="Nucleotide may be methylated to form 5-methylcytosine"
aaccccatgctttcactgtgtacctaagagtgccttttacaagataggagctcaaaagtacgtgttgtttaaataatggaagctgttactaaatctgaatgtcaggtccttatcatttttag

SEQ ID NO: 25171 - DNA, 122 bp, Homo sapiens
  misc_feature (61)..(62): /note="This region represents a CpG dinucleotide"
  misc_feature (61)..(61): /note="Nucleotide may be methylated to form 5-methylcytosine"
agacataaaaggcattgaggcttcttccttattctttcttagatcagtccctgtgggagacgccggttgccatgttgcgaagatactcaagcaatcctatggagaggtacacattgtgaaac

SEQ ID NO: 25172 - DNA, 122 bp, Homo sapiens
  misc_feature (61)..(62): /note="This region represents a CpG dinucleotide"
  misc_feature (61)..(61): /note="Nucleotide may be methylated to form 5-methylcytosine"
ataaattagaggaagcaatttcggaacaacggaaccttcaaactataaatactgaattatcgaacacttgccaggcacttcagcagaagacaaggaaactgaagagtgagtagcaaatattc

SEQ ID NO: 25173 - DNA, 122 bp, Homo sapiens
  misc_feature (61)..(62): /note="This region represents a CpG dinucleotide"
  misc_feature (61)..(61): /note="Nucleotide may be methylated to form 5-methylcytosine"
taaaatagtcaaactcacagaagcagacagtagaatagtgggtgccaggagctgggggaacgggaaatgggaagttgctgctcaaggagtataaatgttcagttaagcaagttgactaagtt

SEQ ID NO: 25174 - DNA, 122 bp, Homo sapiens
  misc_feature (61)..(62): /note="This region represents a CpG dinucleotide"
  misc_feature (61)..(61): /note="Nucleotide may be methylated to form 5-methylcytosine"
ctatggtcaaggtgatggagtgacccagccagtcagtctgcaggatgtgtgattgcacaccgtccttaccaagcaaatagaggaagctcgagaaggtatttgcagagcctcagaaaaatgct

SEQ ID NO: 25175 - DNA, 122 bp, Homo sapiens
  misc_feature (61)..(62): /note="This region represents a CpG dinucleotide"
  misc_feature (61)..(61): /note="Nucleotide may be methylated to form 5-methylcytosine"
cttaatctgtctctgtccggctgtgtcttgtgccagctcttttcttctctttaaaatgttcgcttttatcacttcctggtattactatttctactatttagtctctgctaattcttctcaaa

SEQ ID NO: 25176 - DNA, 122 bp, Homo sapiens
  misc_feature (61)..(62): /note="This region represents a CpG dinucleotide"
  misc_feature (61)..(61): /note="Nucleotide may be methylated to form 5-methylcytosine"
acagcacaccaactcaaacctcattcattcattcattcattcatgtgtccttttaacagacgtctactagacaccttgtgtgtccatgaaccaaataccatgcttaagaccaaggattcaga

SEQ ID NO: 25177 - DNA, 122 bp, Homo sapiens
  misc_feature (61)..(62): /note="This region represents a CpG dinucleotide"
  misc_feature (61)..(61): /note="Nucleotide may be methylated to form 5-methylcytosine"
gagggtggcagtgggaggaatgcccagtaacatacgtagcattttagcaaaagtaaatgacgtgctattttctccctatatgaaagtgttaaaatagtcccttttttttttttttttttttt

SEQ ID NO: 25178 - DNA, 122 bp, Homo sapiens
  misc_feature (61)..(62): /note="This region represents a CpG dinucleotide"
  misc_feature (61)..(61): /note="Nucleotide may be methylated to form 5-methylcytosine"
ccatgcatttgtttcttttaatatggcaccatgtggaagtgtagttttgctcaactcatacgtgtgtgaaagaaagcatagtgaatatgactaagtgcataggcccaggaaccagatgacct

SEQ ID NO: 25179 - DNA, 122 bp, Homo sapiens
  misc_feature (61)..(62): /note="This region represents a CpG dinucleotide"
  misc_feature (61)..(61): /note="Nucleotide may be methylated to form 5-methylcytosine"
gaagtgctattcattcttaaagcagaagcagcagaggagaaatcagagacaccaactctgcggacctgctgaaggaagtgaactacagggcattgttccattccctgagaacagcaaacacc

SEQ ID NO: 25180 - DNA, 122 bp, Homo sapiens
  misc_feature (61)..(62): /note="This region represents a CpG dinucleotide"
  misc_feature (61)..(61): /note="Nucleotide may be methylated to form 5-methylcytosine"
taaaagcaactgtgtgacgattcctccaagcaagaaattggaattgaatgtctcaagtctcgttgcggttgctgaggggattggatatagggacctggactccaacatgaagaagctaggga

SEQ ID NO: 25181 - DNA, 122 bp, Homo sapiens
  misc_feature (61)..(62): /note="This region represents a CpG dinucleotide"
  misc_feature (61)..(61): /note="Nucleotide may be methylated to form 5-methylcytosine"
caaaagtctcctgtacacaacgcaggtggtggctgactgtcagttccccaagggcactgacgcctcagccctctcagtaccctctcctcccctggcaggctgcttgacactcagtgacagcc

SEQ ID NO: 25182 - DNA, 122 bp, Homo sapiens
  misc_feature (61)..(62): /note="This region represents a CpG dinucleotide"
  misc_feature (61)..(61): /note="Nucleotide may be methylated to form 5-methylcytosine"
tggagcaagggttcgattggcggagctcaggtaacatgtccacactttagctaaggagggcgggcaacttgatggacagctccaccaagactgcacagaagtgcagagttccagatccctct

SEQ ID NO: 25183 - DNA, 122 bp, Homo sapiens
  misc_feature (61)..(62): /note="This region represents a CpG dinucleotide"
  misc_feature (61)..(61): /note="Nucleotide may be methylated to form 5-methylcytosine"
actcgaaaaacaagggccaattaactgaaagtaatccaggactacctccctgaaaagctgcgctctagtcaggagtaggccgaagcggccttctgacacagcatgactcagcaggtttggag

SEQ ID NO: 25184 - DNA, 122 bp, Homo sapiens
  misc_feature (61)..(62): /note="This region represents a CpG dinucleotide"
  misc_feature (61)..(61): /note="Nucleotide may be methylated to form 5-methylcytosine"
cctcccatctcgggttccaggaggatcacaagctattcagcaggcaagactcagattagccgctgttcaagctctggcatgcatggtatatatggatacatccaaggtcaccagggcactat

SEQ ID NO: 25185 - DNA, 122 bp, Homo sapiens
  misc_feature (61)..(62): /note="This region represents a CpG dinucleotide"
  misc_feature (61)..(61): /note="Nucleotide may be methylated to form 5-methylcytosine"
gctgggcctgctccgtcttcccctctcctaacttcaccatgctcaggtctgtctcctgtacgttagctgctgctgcaacctgtcaccctccaacttggggtgtaacaaactaatttcctaag

SEQ ID NO: 25186 - DNA, 122 bp, Homo sapiens
  misc_feature (61)..(62): /note="This region represents a CpG dinucleotide"
  misc_feature (61)..(61): /note="Nucleotide may be methylated to form 5-methylcytosine"
tgctgatttgggaggtcagaatcttgttctgggctttattagcatttcgctcaagtcaagcgaatcaccttgtcaagtcatatgcagagaaggcagaacatgacgttggaggaaagaaaaca

SEQ ID NO: 25187 - DNA, 122 bp, Homo sapiens
  misc_feature (61)..(62): /note="This region represents a CpG dinucleotide"
  misc_feature (61)..(61): /note="Nucleotide may be methylated to form 5-methylcytosine"
aggtaaggaaactgaggcacacgttggaatgactatcttgggtggcttcttagcagcagacgtgatggtgaagcctgtgtctctgacttccagcattgaatgaaggtgctaaagggtggggc

SEQ ID NO: 25188 - DNA, 122 bp, Homo sapiens
  misc_feature (61)..(62): /note="This region represents a CpG dinucleotide"
  misc_feature (61)..(61): /note="Nucleotide may be methylated to form 5-methylcytosine"
actgaggcccagagaggttactcagcttgccctaggcaatacagccaagagtggcagaaccggaatttgagtccagactgtctcaccccagggtgcatgagcaccacacaccagtatggctg

SEQ ID NO: 25189 - DNA, 122 bp, Homo sapiens
  misc_feature (61)..(62): /note="This region represents a CpG dinucleotide"
  misc_feature (61)..(61): /note="Nucleotide may be methylated to form 5-methylcytosine"
cagtgtcatctgaatggggtgtgggttcagagactggcccgtcgaatcagtatgggctgccggctctcttattacatcctgagcatgtgtgtcttgggcccttacagatatacttgctgttg

SEQ ID NO: 25190 - DNA, 122 bp, Homo sapiens
  misc_feature (61)..(62): /note="This region represents a CpG dinucleotide"
  misc_feature (61)..(61): /note="Nucleotide may be methylated to form 5-methylcytosine"
ttgtaggttgatattactcttgatttctcaatgggaaatctttttccctttcctaatacacgggaagtgaaaacgtcactgaattccccagtaataagaaacatacagatactttcattttt

SEQ ID NO: 25191 - DNA, 122 bp, Homo sapiens
  misc_feature (61)..(62): /note="This region represents a CpG dinucleotide"
  misc_feature (61)..(61): /note="Nucleotide may be methylated to form 5-methylcytosine"
aaataggaagaagggcaatctcatgagagaacataagtttagttttggtaatgttgtgctcgggcctgaaagacagccagacagtaaggtacaggagacagctaatcttctggatttagagt

SEQ ID NO: 25192 - DNA, 122 bp, Homo sapiens
  misc_feature (61)..(62): /note="This region represents a CpG dinucleotide"
  misc_feature (61)..(61): /note="Nucleotide may be methylated to form 5-methylcytosine"
acagttctaggcttatcagagaaaaggcccagttacctatttatcccacccacctttctgcgggaacaggagataatggtgcttctagtgctctagaaaaaacatcccacaggaatccaagc

SEQ ID NO: 25193 - DNA, 122 bp, Homo sapiens
  misc_feature (61)..(62): /note="This region represents a CpG dinucleotide"
  misc_feature (61)..(61): /note="Nucleotide may be methylated to form 5-methylcytosine"
caaaaagccaattgctctttgcacatttccaattctatttcttcttttccttctgtagcccgaactgatgaaacagcccaaacttaccaaaacacagaaacatttatttctgaaatacccag

SEQ ID NO: 25194 - DNA, 122 bp, Homo sapiens
  misc_feature (61)..(62): /note="This region represents a CpG dinucleotide"
  misc_feature (61)..(61): /note="Nucleotide may be methylated to form 5-methylcytosine"
aaggggccagagaaaactacacctcagtatattgtctcttttccagcaaatgtggctgcccgcttccagggcagttcagcaaccttggctgataaaataggaacctgagcctcatctacagt

SEQ ID NO: 25195 - DNA, 122 bp, Homo sapiens
  misc_feature (61)..(62): /note="This region represents a CpG dinucleotide"
  misc_feature (61)..(61): /note="Nucleotide may be methylated to form 5-methylcytosine"
tcgagaacttggtgctgattagaggtgtgattgcattcatggtaatagggatgagtgtcacgaactgctgtgtgttctgctggtgagcttcactgcaatactgcactaaccagtgagtgtaa

SEQ ID NO: 25196 - DNA, 122 bp, Homo sapiens
  misc_feature (61)..(62): /note="This region represents a CpG dinucleotide"
  misc_feature (61)..(61): /note="Nucleotide may be methylated to form 5-methylcytosine"
caccagtttaggaggagcatggcagatttaaaatctcttttcaccccttttcaagctcagcgctgtttcctcttactctagacccctgcatcccttctgctccccccaacctagagcccctg

SEQ ID NO: 25197 - DNA, 122 bp, Homo sapiens
  misc_feature (61)..(62): /note="This region represents a CpG dinucleotide"
  misc_feature (61)..(61): /note="Nucleotide may be methylated to form 5-methylcytosine"
aaaaagagtgaaaagatggggaagaagaaggaagagaggagtgagatgccagaattccttcgtgtgcctccagaattcccaggaaatgctcatgatgttagctcatatttgctgaagtccag

SEQ ID NO: 25198 - DNA, 122 bp, Homo sapiens
  misc_feature (61)..(62): /note="This region represents a CpG dinucleotide"
  misc_feature (61)..(61): /note="Nucleotide may be methylated to form 5-methylcytosine"
gttccgtttgtaaagagcaaggctgcacagacctgtctgctccgttgagacagtgaaggccgtctcacaaccgcaccttgggactcgcttccacataacacctcttctgttcctctcacggt

SEQ ID NO: 25199 - DNA, 122 bp, Homo sapiens
  misc_feature (61)..(62): /note="This region represents a CpG dinucleotide"
  misc_feature (61)..(61): /note="Nucleotide may be methylated to form 5-methylcytosine"
aggcgcgaaggcacggaggccgcgctgagtgccctctccctccctgcagaagatggtgaccgccttgggcactcactggcacccagagcatttctgctgcgtcagttgcggggagcccttcg

SEQ ID NO: 25200 - DNA, 122 bp, Homo sapiens
  misc_feature (61)..(62): /note="This region represents a CpG dinucleotide"
  misc_feature (61)..(61): /note="Nucleotide may be methylated to form 5-methylcytosine"
catttgctctagacaaactgctaaacgcaattgtttctgacaatggattactctgtatcccgtgggggaattctcagacagcagcattagaaggggccttagagatcaaccatttctcttat

SEQ ID NO: 25201 - DNA, 122 bp, Homo sapiens
  misc_feature (61)..(62): /note="This region represents a CpG dinucleotide"
  misc_feature (61)..(61): /note="Nucleotide may be methylated to form 5-methylcytosine"
agtgctggagacacacgtgatcgttggactcctgggcaatcctaattgcctcctgcagggcgagctctgcctgttgactaatgacagactaaacattaatatcccattaataatcacaaaca

SEQ ID NO: 25202 - DNA, 122 bp, Homo sapiens
  misc_feature (61)..(62): /note="This region represents a CpG dinucleotide"
  misc_feature (61)..(61): /note="Nucleotide may be methylated to form 5-methylcytosine"
ttgtgggaggaaggcgatgtctggccttttttgcacagctgctgttgcctgcccagagatcgggaactctgccccgtaggactggaagaaacctcagtaatgggaataagactttgtccaat

SEQ ID NO: 25203 - DNA, 122 bp, Homo sapiens
  misc_feature (61)..(62): /note="This region represents a CpG dinucleotide"
  misc_feature (61)..(61): /note="Nucleotide may be methylated to form 5-methylcytosine"
gttaagtacttcaaacaatgaccaccacagggtgttattcatccttagttgatttacacacgtaaatgcatatcatattttctacattggcacaactaacgttgtccacaagtaacatgaat

SEQ ID NO: 25204 - DNA, 122 bp, Homo sapiens
  misc_feature (61)..(62): /note="This region represents a CpG dinucleotide"
  misc_feature (61)..(61): /note="Nucleotide may be methylated to form 5-methylcytosine"
caggagtccaccctcttttccattcacatcctgcagaaggaactactgagtcacaaagtacgtgaataaagttgccaaggccatggctcagttctaagctggatggaaacgctttggaaact

SEQ ID NO: 25205 - DNA, 122 bp, Homo sapiens
  misc_feature (61)..(62): /note="This region represents a CpG dinucleotide"
  misc_feature (61)..(61): /note="Nucleotide may be methylated to form 5-methylcytosine"
taccttgttttcttttttcagcatttatgtatctttttaaaagcgtgccacacacatctgcgtacagtcacaggcttatgatcagcagagatctctaggatgaaactatttaaatctgaaaa

SEQ ID NO: 25206 - DNA, 122 bp, Homo sapiens
  misc_feature (61)..(62): /note="This region represents a CpG dinucleotide"
  misc_feature (61)..(61): /note="Nucleotide may be methylated to form 5-methylcytosine"
acctgtacttaagaagtgccaacatacaagtaagcacaaaatacaattgaaaaacttcaacgaaaagaagataagagaatctaagttaatgttaaatgatagaagtacctatctttgtattt

SEQ ID NO: 25207 - DNA, 122 bp, Homo sapiens
  misc_feature (61)..(62): /note="This region represents a CpG dinucleotide"
  misc_feature (61)..(61): /note="Nucleotide may be methylated to form 5-methylcytosine"
cagactgtcctgtgttgggatgtgaatcatctctttacccagagtatgcaccgctgtacacgctatctactcattagtcattgagctcatctgctccttgacagccaatcattatggcttga

SEQ ID NO: 25208 - DNA, 122 bp, Homo sapiens
  misc_feature (61)..(62): /note="This region represents a CpG dinucleotide"
  misc_feature (61)..(61): /note="Nucleotide may be methylated to form 5-methylcytosine"
gtcatagaagccagagttcttcttcctcaaggtgggtcacagaaactagaacttctctcccgcaaagcaagccataaaacctatgtaggcctctctcccttcccacttaaagaccttcatct

SEQ ID NO: 25209 - DNA, 122 bp, Homo sapiens
  misc_feature (61)..(62): /note="This region represents a CpG dinucleotide"
  misc_feature (61)..(61): /note="Nucleotide may be methylated to form 5-methylcytosine"
gagaacacgtgtgtaataggtggcacctgcctggctgtataaccaggtggcatccctctccgtctttgcaatctcttcctggattgtctgggatccagatcacattctggttcaatggacat

SEQ ID NO: 25210 - DNA, 122 bp, Homo sapiens
  misc_feature (61)..(62): /note="This region represents a CpG dinucleotide"
  misc_feature (61)..(61): /note="Nucleotide may be methylated to form 5-methylcytosine"
caaggttcatgcagcccaacaaatgattgttgagcacctctcggagccaaagtccttaggcgagtgtggtgacttcctggaaggaggatgcagacttccagagagcccccccaacggacgtg

SEQ ID NO: 25211 - DNA, 122 bp, Homo sapiens
  misc_feature (61)..(62): /note="This region represents a CpG dinucleotide"
  misc_feature (61)..(61): /note="Nucleotide may be methylated to form 5-methylcytosine"
tctgctttttctccccttcaatttagttgacaggttaatttcagaactgagtgctgcttacgaaggtcagtgtgaccagctgaaccacctcagctggtgtctttcaggacactcatctctca

SEQ ID NO: 25212 - DNA, 122 bp, Homo sapiens
  misc_feature (61)..(62): /note="This region represents a CpG dinucleotide"
  misc_feature (61)..(61): /note="Nucleotide may be methylated to form 5-methylcytosine"
aggcggcagggcaagaaacagggttggggggggtgtgggcgcgagtgactcacccgtaagcggtgtgaggactcccaacccagtgctcactgtgtcacagaagagctgcttggtccctggct

SEQ ID NO: 25213 - DNA, 122 bp, Homo sapiens
  misc_feature (61)..(62): /note="This region represents a CpG dinucleotide"
  misc_feature (61)..(61): /note="Nucleotide may be methylated to form 5-methylcytosine"
gtttcaagttccatattattggccaaccttgacaagtcatttatcctgacttggcttgctcgttggtaaatgaggatgatgatactctatttctgggctgtaaagatcaaataagataatgt

SEQ ID NO: 25214 - DNA, 122 bp, Homo sapiens
  misc_feature (61)..(62): /note="This region represents a CpG dinucleotide"
  misc_feature (61)..(61): /note="Nucleotide may be methylated to form 5-methylcytosine"
tcctaatgcaagctgaaaatgtgatagtaaagaggcccaaggtttcactgataaggctaacgtgttgtttctgtatttacagaaaaaatattaataggcatatttatagatgcataagccaa

SEQ ID NO: 25215 - DNA, 122 bp, Homo sapiens
  misc_feature (61)..(62): /note="This region represents a CpG dinucleotide"
  misc_feature (61)..(61): /note="Nucleotide may be methylated to form 5-methylcytosine"
ctccttgagtagcaagatcatccaggatttaagtgactcttgcttcggtttcctaaaaagcgccctggaggttcccaggctttaccgaagaaccaataaggtcagcgccatttatgggagag

SEQ ID NO: 25216 - DNA, 122 bp, Homo sapiens
  misc_feature (61)..(62): /note="This region represents a CpG dinucleotide"
  misc_feature (61)..(61): /note="Nucleotide may be methylated to form 5-methylcytosine"
cacatgcaaggcagaagccagtttttttaaaacccaatctgagctagccagctagcctcccgcaaagtgaggtgggtgggtgggtgtgggtgtgtgtgtgtgtgtgtgtgtgagagagagag

SEQ ID NO: 25217 - DNA, 122 bp, Homo sapiens
  misc_feature (61)..(62): /note="This region represents a CpG dinucleotide"
  misc_feature (61)..(61): /note="Nucleotide may be methylated to form 5-methylcytosine"
gtggcaagtctcaaaacatttatttgagagaatctaatcctctagtagttgaattcccaacgctcctattttaggacgtcattcatggcgtggagattaaaccttcatgtgtcctttactat

SEQ ID NO: 25218 - DNA, 122 bp, Homo sapiens
  misc_feature (61)..(62): /note="This region represents a CpG dinucleotide"
  misc_feature (61)..(61): /note="Nucleotide may be methylated to form 5-methylcytosine"
tacctttttttcattattccctgtgtcagtgtcagcaccttctgctgaaactcactacagcgtatctctacaaaatctcttgcctttcttagggaggaaagtgacacgattcagccagtttt

SEQ ID NO: 25219 - DNA, 122 bp, Homo sapiens
  misc_feature (61)..(62): /note="This region represents a CpG dinucleotide"
  misc_feature (61)..(61): /note="Nucleotide may be methylated to form 5-methylcytosine"
gtccaccacatccgtgaacttacccagaatctcgtgaccggaagctgcggagctggggttcgagccccacgggttctcctcctgcagtcctgccgtcctcgcagtggcatcctctttctgcg

SEQ ID NO: 25220 - DNA, 122 bp, Homo sapiens
  misc_feature (61)..(62): /note="This region represents a CpG dinucleotide"
  misc_feature (61)..(61): /note="Nucleotide may be methylated to form 5-methylcytosine"
gaatataagctagaatgaaggcaatgactgtgtttctgttcactcatgctcaccacctaacggcatagtgcagtcactttatgattcattggtggaatgagtatatatttgaactttattta

SEQ ID NO: 25221 - DNA, 122 bp, Homo sapiens
  misc_feature (61)..(62): /note="This region represents a CpG dinucleotide"
  misc_feature (61)..(61): /note="Nucleotide may be methylated to form 5-methylcytosine"
gcagatcgaacaaaaatcttgaaacgtggtcatccaactgcattattaagtaatctttagcggggaatagcccttgaaactagctccagatatttctgtggtcgctctggaataattagact

SEQ ID NO: 25222 - DNA, 122 bp, Homo sapiens
  misc_feature (61)..(62): /note="This region represents a CpG dinucleotide"
  misc_feature (61)..(61): /note="Nucleotide may be methylated to form 5-methylcytosine"
tgagggcatttagagcctagcacatggtaaacactatgataaacgttttcattatttttccgtttgtccactgggtcaggatgtatagtctttttttgtgtctgggatggaatttaaaatat

SEQ ID NO: 25223 - DNA, 122 bp, Homo sapiens
  misc_feature (61)..(62): /note="This region represents a CpG dinucleotide"
  misc_feature (61)..(61): /note="Nucleotide may be methylated to form 5-methylcytosine"
tcctctttctgccctgttgggctagacctagatatactttatagttatttgtagatgttccgtctcaagatcatgctatgatcttgaggggaagaggaaacagtcttactcacctttatctc

SEQ ID NO: 25224 - DNA, 122 bp, Homo sapiens
  misc_feature (61)..(62): /note="This region represents a CpG dinucleotide"
  misc_feature (61)..(61): /note="Nucleotide may be methylated to form 5-methylcytosine"
tttgattggagcccggccatgcttgtgacatattgtctgtgactgttaaccacactgccgcggcaggactgagtcattgccaggaaatttacggccagcaaagctgaatatatttgctactt

SEQ ID NO: 25225 - DNA, 122 bp, Homo sapiens
  misc_feature (61)..(62): /note="This region represents a CpG dinucleotide"
  misc_feature (61)..(61): /note="Nucleotide may be methylated to form 5-methylcytosine"
ttatttccaattctggaatcctgcaatgaataatctctagatgagtgacagtgtgaattacgtaatacaggtacttttcttttccaaaattctccaatgataaagaacagttctagaataac

SEQ ID NO: 25226 - DNA, 122 bp, Homo sapiens
  misc_feature (61)..(62): /note="This region represents a CpG dinucleotide"
  misc_feature (61)..(61): /note="Nucleotide may be methylated to form 5-methylcytosine"
aggaggaagaaggggtcagcttcaagcctgacgttctaggggggagccgcttcttaagtacgtgctaggatcaagggtgcatttgcaaacttttcaaaatgccttagaggaggtaggagtca

SEQ ID NO: 25227 - DNA, 122 bp, Homo sapiens
  misc_feature (61)..(62): /note="This region represents a CpG dinucleotide"
  misc_feature (61)..(61): /note="Nucleotide may be methylated to form 5-methylcytosine"
tttagtcctgtttatgtgatgaatcacttttattgatttgtgtatgttgaatcaatcttgcgtcctggagatgatgcttacttgatcatggtggatttgctttttggtgagctgctggattc

SEQ ID NO: 25228 - DNA, 122 bp, Homo sapiens
  misc_feature (61)..(62): /note="This region represents a CpG dinucleotide"
  misc_feature (61)..(61): /note="Nucleotide may be methylated to form 5-methylcytosine"
cctgagtcatcgttcccctcctgtgccacctccttacaacaaactcgggcacagcacagacgaggatgtgattattgtgtgaagtgaatctgtaagatgagctatgtgtccaatgacttcag

SEQ ID NO: 25229 - DNA, 122 bp, Homo sapiens
  misc_feature (61)..(62): /note="This region represents a CpG dinucleotide"
  misc_feature (61)..(61): /note="Nucleotide may be methylated to form 5-methylcytosine"
cctgcccgtgaggcgtgtgtgtgcacacgtgcgtgtgcgtgtgtcctccagggcgggctccgggaagggggtgtgcactcacggtaaccttcagtcactgaggaacaaacacagggccctcc

SEQ ID NO: 25230 - DNA, 122 bp, Homo sapiens
  misc_feature (61)..(62): /note="This region represents a CpG dinucleotide"
  misc_feature (61)..(61): /note="Nucleotide may be methylated to form 5-methylcytosine"
ccaggtttggggattcctgggactgaaagacagaacaaccaaatccaagtcagtatgtcacgctgcagtgtaaagtaggtgacatcacccagcagtgctctgcccaggcccagccagggcgt

SEQ ID NO: 25231 - DNA, 122 bp, Homo sapiens
  misc_feature (61)..(62): /note="This region represents a CpG dinucleotide"
  misc_feature (61)..(61): /note="Nucleotide may be methylated to form 5-methylcytosine"
gaccctcattacggcattaggatgggattaccttgctctcttctgaaatactagcttatccgtggcaccagcaacaaatacaagcagcttgtctgatggaaaggtcctctacttaagaacta

SEQ ID NO: 25232 - DNA, 122 bp, Homo sapiens
  misc_feature (61)..(62): /note="This region represents a CpG dinucleotide"
  misc_feature (61)..(61): /note="Nucleotide may be methylated to form 5-methylcytosine"
atgtggacctgcttgcctcttcccgccactggccgcctgtctatgtggtagatatggccacgtcagtggccctgtgtgctgacctctgctacccagagctgactaaccagatgtgggggagg

SEQ ID NO: 25233 - DNA, 122 bp, Homo sapiens
  misc_feature (61)..(62): /note="This region represents a CpG dinucleotide"
  misc_feature (61)..(61): /note="Nucleotide may be methylated to form 5-methylcytosine"
ggtaatacctgtttgcttatccttctttgtccagctctgggatgttaccattccttcaggcgtgctgttttctccttaggcagtcttacacacactcatgacttccttccattgtcctccac

SEQ ID NO: 25234 - DNA, 122 bp, Homo sapiens
  misc_feature (61)..(62): /note="This region represents a CpG dinucleotide"
  misc_feature (61)..(61): /note="Nucleotide may be methylated to form 5-methylcytosine"
tctccttcaattgtattggtacgtctttttcatttcttgtggccttcatgaagaaatgaacggtgcagaatggttggtcaatgataatgccaacaatagttatgactaaatgatgattcact

SEQ ID NO: 25235 - DNA, 122 bp, Homo sapiens
  misc_feature (61)..(62): /note="This region represents a CpG dinucleotide"
  misc_feature (61)..(61): /note="Nucleotide may be methylated to form 5-methylcytosine"
ccctttcagagggaagagagcatgtgcacagccacaagggaagcaatagtctggcatatccggacactcctttgcaaaggctcccaatattcttttacagtggaggaaagcatcaaggcatg

SEQ ID NO: 25236 - DNA, 122 bp, Homo sapiens
  misc_feature (61)..(62): /note="This region represents a CpG dinucleotide"
  misc_feature (61)..(61): /note="Nucleotide may be methylated to form 5-methylcytosine"
cattcacaggtgagagacagaacaatgtagtcaagtcagttcatcagcatgttggcaaatcggagtcccaggcttggagaagacctttgcagtgaaggcatgtggaaagagaatgtggcaag

SEQ ID NO: 25237 - DNA, 122 bp, Homo sapiens
  misc_feature (61)..(62): /note="This region represents a CpG dinucleotide"
  misc_feature (61)..(61): /note="Nucleotide may be methylated to form 5-methylcytosine"
aggtatgacagagtggtttgccctttctgtcattctcccatgtgaggacacaacaagaggcgccatctataaagaaaagactgggccttcaccagacaccacatctgcctgcaccttgacct

SEQ ID NO: 25238 - DNA, 122 bp, Homo sapiens
  misc_feature (61)..(62): /note="This region represents a CpG dinucleotide"
  misc_feature (61)..(61): /note="Nucleotide may be methylated to form 5-methylcytosine"
gctactgcctttgggccttgacatagccttggggatgggcaacacaaatgttatccaacccgttggcaggtgaggcaggtcaggccaacacaagttgaggggcccgtccagagcaacaggtg

SEQ ID NO: 25239 - DNA, 122 bp, Homo sapiens
  misc_feature (61)..(62): /note="This region represents a CpG dinucleotide"
  misc_feature (61)..(61): /note="Nucleotide may be methylated to form 5-methylcytosine"
aattggctccaatcagggaaagccaggtctgggctttataaacagtgacagcagctccaccgttagaagagcaggtagaaaggtcacactggaaacaccatttccaagcacagagtaattac

SEQ ID NO: 25240 - DNA, 122 bp, Homo sapiens
  misc_feature (61)..(62): /note="This region represents a CpG dinucleotide"
  misc_feature (61)..(61): /note="Nucleotide may be methylated to form 5-methylcytosine"
aatagggtttggcaatctagctggatagcatccctgccccttgaagagatgtttttgtggcgccacactactgacttaggcataatgcctagagatggattagaactgcacaatgaactagt

SEQ ID NO: 25241 - DNA, 122 bp, Homo sapiens
  misc_feature (61)..(62): /note="This region represents a CpG dinucleotide"
  misc_feature (61)..(61): /note="Nucleotide may be methylated to form 5-methylcytosine"
tggccagaccgtgaaggttaccttgaccttgtctgcatgataaatacaactggagcggggcggaaggcacaccattcagaaaagcaaactgcttgcatcttctttatttttaatctcactcc

SEQ ID NO: 25242 - DNA, 122 bp, Homo sapiens
  misc_feature (61)..(62): /note="This region represents a CpG dinucleotide"
  misc_feature (61)..(61): /note="Nucleotide may be methylated to form 5-methylcytosine"
aattttgtaaccttccgctcagtttccggtaaccgccattttgtctcctgtaacaatttacgcgccgtgtaactgtgaatctttcaaaggtatgttttactggagtgatttctggttatttc

SEQ ID NO: 25243 - DNA, 122 bp, Homo sapiens
  misc_feature (61)..(62): /note="This region represents a CpG dinucleotide"
  misc_feature (61)..(61): /note="Nucleotide may be methylated to form 5-methylcytosine"
attggctaccaggaacttgcttattaggtctgttgacatggcaatgccagagcactgtcacgtaaggcagagattggagctaagattctaaagttgtggttcttactttgaaaggagataaa

SEQ ID NO: 25244 - DNA, 122 bp, Homo sapiens
  misc_feature (61)..(62): /note="This region represents a CpG dinucleotide"
  misc_feature (61)..(61): /note="Nucleotide may be methylated to form 5-methylcytosine"
agcaagtgctgctatagaagctgcagccagttatctggaagatttaactaagatcactgacgaacatggctacactaaactgtagcacataccactgcacctgggagcatttttatttttaa

SEQ ID NO: 25245 - DNA, 122 bp, Homo sapiens
  misc_feature (61)..(62): /note="This region represents a CpG dinucleotide"
  misc_feature (61)..(61): /note="Nucleotide may be methylated to form 5-methylcytosine"
ttctgtgtgtagtggtatttcattgtggttttaatttgcatttctctgatggctaatgaacgtcttttcatgtgcttgtcttccgtgtatcctgtgtggtgaagtgtcatcagatcttttgc

SEQ ID NO: 25246 - DNA, 122 bp, Homo sapiens
  misc_feature (61)..(62): /note="This region represents a CpG dinucleotide"
  misc_feature (61)..(61): /note="Nucleotide may be methylated to form 5-methylcytosine"
taaaaattccaagaattcacatgcagctgttatgctgtaccacaataataataaagccatcgttttcaatactcacggttcagtcgatcatgtcagatgtttggaggttgtcattttttcct

SEQ ID NO: 25247 - DNA, 122 bp, Homo sapiens
  misc_feature (61)..(62): /note="This region represents a CpG dinucleotide"
  misc_feature (61)..(61): /note="Nucleotide may be methylated to form 5-methylcytosine"
tgacaccaaagacttgagttaatgacaacgctaacctgaactgtgaattctcctgcatttcgcctgagtgtgtcatcactgtaaagtgttgcaatgtgagtctgggcaattaacgcccagag

SEQ ID NO: 25248 - DNA, 122 bp, Homo sapiens
  misc_feature (61)..(62): /note="This region represents a CpG dinucleotide"
  misc_feature (61)..(61): /note="Nucleotide may be methylated to form 5-methylcytosine"
ataattttattacctatagttgtcatgttgtacattagatcgttagacttgttcagcctacgtacctgttcctttatattctctgacctatatctcttcctttactaactcccacatcactg

SEQ ID NO: 25249 - DNA, 122 bp, Homo sapiens
  misc_feature (61)..(62): /note="This region represents a CpG dinucleotide"
  misc_feature (61)..(61): /note="Nucleotide may be methylated to form 5-methylcytosine"
aaaacatacgcatatacccagcaaacacagactgacagtgactcaccctgatctcatgctcggtaatcaggttcagatatcctggtccttcagcatgagtgtggttctcaggtctgtctctc

SEQ ID NO: 25250 - DNA, 122 bp, Homo sapiens
  misc_feature (61)..(62): /note="This region represents a CpG dinucleotide"
  misc_feature (61)..(61): /note="Nucleotide may be methylated to form 5-methylcytosine"
aattcaaatttattttaaagaacaaatgtcttgcccttgctgatgagaaaagaacattagcggggaaacagaggagaaaaacataagaaactcattagaaaaagaggcatcatttttgtcac

SEQ ID NO: 25251 - DNA, 122 bp, Homo sapiens
  misc_feature (61)..(62): /note="This region represents a CpG dinucleotide"
  misc_feature (61)..(61): /note="Nucleotide may be methylated to form 5-methylcytosine"
cttacagagcagttgtgtcaccctgatgaatcacagaatgcggtatgttctgcaggtctgcgtgaactgctgtgtgaaagcagcttagcagtgtcggtgggtaatgaacatgggtgtgggtt

SEQ ID NO: 25252 - DNA, 122 bp, Homo sapiens
  misc_feature (61)..(62): /note="This region represents a CpG dinucleotide"
  misc_feature (61)..(61): /note="Nucleotide may be methylated to form 5-methylcytosine"
ggcacgatactgtgtcctccttagtacatggtattgggaggcccacccagctgtttgtctcgttactggtgggagtaacttttgccccttggttaagacagcgtctgccaggtttcccttaa

SEQ ID NO: 25253 - DNA, 122 bp, Homo sapiens
  misc_feature (61)..(62): /note="This region represents a CpG dinucleotide"
  misc_feature (61)..(61): /note="Nucleotide may be methylated to form 5-methylcytosine"
atatcagatgatgatgtgaagaagcagattgtgaactgtaaagtgaaaaggtcttaaacacgagagataagcaaaggggtgtgtatttcaggtaacatacaaacacaagggaaacagacctc

SEQ ID NO: 25254 - DNA, 122 bp, Homo sapiens
  misc_feature (61)..(62): /note="This region represents a CpG dinucleotide"
  misc_feature (61)..(61): /note="Nucleotide may be methylated to form 5-methylcytosine"
taacactatagtttctttgtttaggtagcttttcctttttaagctcacattccttgtaatcggattatgaaattagaaagctaaaatcaaagagccaagacattaatacttatgacaacctt

SEQ ID NO: 25255 - DNA, 122 bp, Homo sapiens
  misc_feature (61)..(62): /note="This region represents a CpG dinucleotide"
  misc_feature (61)..(61): /note="Nucleotide may be methylated to form 5-methylcytosine"
gaagttcaattttcatcatacgtattatcttgtgttattttccttttctcttcctccttccgtgttatctatatctagtcaccaaattcttctttgcaagaaaggtaaggatattaaagcaa

SEQ ID NO: 25256 - DNA, 122 bp, Homo sapiens
  misc_feature (61)..(62): /note="This region represents a CpG dinucleotide"
  misc_feature (61)..(61): /note="Nucleotide may be methylated to form 5-methylcytosine"
agagctatgttcatatttttaattaggtgattaaaaatatttgaaacggcagcaagacaacggtcagcttttggtaatccaaaggaaaaggtgacatgattagcactggcaagcttaagttt

SEQ ID NO: 25257 - DNA, 122 bp, Homo sapiens
  misc_feature (61)..(62): /note="This region represents a CpG dinucleotide"
  misc_feature (61)..(61): /note="Nucleotide may be methylated to form 5-methylcytosine"
ctcaagtgatgtgcctgcctcagcctcccaaggtgcagggattacaggcgtgagccattgcgcccagcccaggcttagcatttttagtgcagtcaggtttgctgatgcagagagttgcgtaa

SEQ ID NO: 25258 - DNA, 122 bp, Homo sapiens
  misc_feature (61)..(62): /note="This region represents a CpG dinucleotide"
  misc_feature (61)..(61): /note="Nucleotide may be methylated to form 5-methylcytosine"
agtaaggctgagacctacagagctgcattctcaagtggtgaggcattcttagtcacaggacgcgatacaggtcaaaggccttgctggtgaaaggatgtggtaaagaagctggtcaaaaccca

SEQ ID NO: 25259 - DNA, 122 bp, Homo sapiens
  misc_feature (61)..(62): /note="This region represents a CpG dinucleotide"
  misc_feature (61)..(61): /note="Nucleotide may be methylated to form 5-methylcytosine"
caactgaatgtcccttgaccacaacctttcatactctgtattttacttgtttaatgccttcgcagcccgaggcaggtgaaaagtaagataatctaggattgaggatggggataacagaattt

SEQ ID NO: 25260 - DNA, 122 bp, Homo sapiens
  misc_feature (61)..(62): /note="This region represents a CpG dinucleotide"
  misc_feature (61)..(61): /note="Nucleotide may be methylated to form 5-methylcytosine"
tagaggtgtgagccacggcacctgccccaatcaacaggtatttattgagcatctactatacgccaggcactggtaaagactgtgagaatgcagtattgaacaagacaaagctctctgttctg

SEQ ID NO: 25261 - DNA, 122 bp, Homo sapiens
  misc_feature (61)..(62): /note="This region represents a CpG dinucleotide"
  misc_feature (61)..(61): /note="Nucleotide may be methylated to form 5-methylcytosine"
agtcatcttaacagtacatgtattgcaacacagtagccattgcttaaatacctttgggatcgcttttattcttttaatatatacagagctaataaacatttgtcagttgagttttgggaact

SEQ ID NO: 25262 - DNA, 122 bp, Homo sapiens
  misc_feature (61)..(62): /note="This region represents a CpG dinucleotide"
  misc_feature (61)..(61): /note="Nucleotide may be methylated to form 5-methylcytosine"
tgttttcatgtagaaatgcttgcttttgcgtttttgtttcttagcatatatgctttatgtcgcaagttgtagtgagtcagtgggtagagtgctggctctttcaggtgcatttgctatttatt

SEQ ID NO: 25263 - DNA, 122 bp, Homo sapiens
  misc_feature (61)..(62): /note="This region represents a CpG dinucleotide"
  misc_feature (61)..(61): /note="Nucleotide may be methylated to form 5-methylcytosine"
cgcacgggtgccagaatgttcatcctgcctgcggccttgcagggcgccctgagaaggcgccgaggccggatccgcgtcagcgacccgggcgcgtggagacccgacgatcacccgcggccggg

SEQ ID NO: 25264 - DNA, 122 bp, Homo sapiens
  misc_feature (61)..(62): /note="This region represents a CpG dinucleotide"
  misc_feature (61)..(61): /note="Nucleotide may be methylated to form 5-methylcytosine"
ttaggagaagcggagccttgcctctggtgcttcctgtgaactacaatctgaatgacaatccggcagcccagagcctcccctggattccagggaagccgggaaaagctgcttcctgcgggact

SEQ ID NO: 25265 - DNA, 122 bp, Homo sapiens
  misc_feature (61)..(62): /note="This region represents a CpG dinucleotide"
  misc_feature (61)..(61): /note="Nucleotide may be methylated to form 5-methylcytosine"
gggaggcctcaggaaacttacaatcatgatggaaggcaaaggggaagcgggcacctcttacgtggcctgagcaggaggaagaaagggagttgcctacacacttttaaaaaaaacagatctcg

SEQ ID NO: 25266 - DNA, 122 bp, Homo sapiens
  misc_feature (61)..(62): /note="This region represents a CpG dinucleotide"
  misc_feature (61)..(61): /note="Nucleotide may be methylated to form 5-methylcytosine"
gggaggcccttcaggtcggtagcctgtggaattagcatggtttggtgctctcactcctcacgctctccagtagccaagacaagaggcccctggctagctctggtaatgcacctcctgctggg

SEQ ID NO: 25267 - DNA, 122 bp, Homo sapiens
  misc_feature (61)..(62): /note="This region represents a CpG dinucleotide"
  misc_feature (61)..(61): /note="Nucleotide may be methylated to form 5-methylcytosine"
ctgccagcggtgacatgggtgaagggctgcgcgcgtgagcaggaataaagcgagaaatcacgacagagttggtcacgaggacattaagatgcattacatttgcccgcgtatctacctacaaa

SEQ ID NO: 25268 - DNA, 122 bp, Homo sapiens
  misc_feature (61)..(62): /note="This region represents a CpG dinucleotide"
  misc_feature (61)..(61): /note="Nucleotide may be methylated to form 5-methylcytosine"
ccttgtgggattcactcatctggtttcatactgagtcactgtctcacggggatgaagtaccgttggagttcactcttgataacagggagaaagaattatgcgctgttaaaaagaaagatgtc

SEQ ID NO: 25269 - DNA, 122 bp, Homo sapiens
  misc_feature (61)..(62): /note="This region represents a CpG dinucleotide"
  misc_feature (61)..(61): /note="Nucleotide may be methylated to form 5-methylcytosine"
aacaccctgtggctccgtgggtgaaggcggtgctggctccttccctgtgtgtggatcagccgtgcctgggactcaggtcgggttgggtcaggctgtgtcgggctagggagcccagtctcccc

SEQ ID NO: 25270 - DNA, 122 bp, Homo sapiens
  misc_feature (61)..(62): /note="This region represents a CpG dinucleotide"
  misc_feature (61)..(61): /note="Nucleotide may be methylated to form 5-methylcytosine"
cagtctctggaaattctgctcactttgtgggtcccgtcctcgccctttccagctgcactgcgcaggctatttatgattcatggcatgatgtcactaaaatggacagtgctcctcactgagcc

SEQ ID NO: 25271 - DNA, 122 bp, Homo sapiens
  misc_feature (61)..(62): /note="This region represents a CpG dinucleotide"
  misc_feature (61)..(61): /note="Nucleotide may be methylated to form 5-methylcytosine"
ttaatgaaactactgagtgatgggaggaaaaaaggagagaatgctacttaacaggttcagcgatagcctaatagtagaattaggtacttaatctgggttctcaaggatgaatccgtatttga

SEQ ID NO: 25272 - DNA, 122 bp, Homo sapiens
  misc_feature (61)..(62): /note="This region represents a CpG dinucleotide"
  misc_feature (61)..(61): /note="Nucleotide may be methylated to form 5-methylcytosine"
tcatgttacggcaaaccttaagctgaatgaacaacttttcttctcttgaatatatcttaacgccaaattttgagtgcttttttgttacccatcctcatatgtcccagctagaaagaatcctg

SEQ ID NO: 25273 - DNA, 122 bp, Homo sapiens
  misc_feature (61)..(62): /note="This region represents a CpG dinucleotide"
  misc_feature (61)..(61): /note="Nucleotide may be methylated to form 5-methylcytosine"
caatcaatccttctagtcacttgatctttctatggttttaaagcaactggttttgggagtcgaccatgaactgactcagaaaatgattaccagaagtggggttcaaaaaaagctctgggcag

SEQ ID NO: 25274 - DNA, 122 bp, Homo sapiens
  misc_feature (61)..(62): /note="This region represents a CpG dinucleotide"
  misc_feature (61)..(61): /note="Nucleotide may be methylated to form 5-methylcytosine"
aaacacggagttgtcagtgatattaacaagggacctaagaaactctccaaatcaggagcccgaggcccagggacagaacaagcttaaagggtaaagtgggcaccaaaaccaaagtcctactc

SEQ ID NO: 25275 - DNA, 122 bp, Homo sapiens
  misc_feature (61)..(62): /note="This region represents a CpG dinucleotide"
  misc_feature (61)..(61): /note="Nucleotide may be methylated to form 5-methylcytosine"
agagggaggagatgtaggtctgggcttccacagggacctggtattttaggatcagggtaccgctggcctgaggcttggatcattcagagcctgggggtggaatggctggcagcctgtggccc

SEQ ID NO: 25276 - DNA, 122 bp, Homo sapiens
  misc_feature (61)..(62): /note="This region represents a CpG dinucleotide"
  misc_feature (61)..(61): /note="Nucleotide may be methylated to form 5-methylcytosine"
ccagaaagctgctgatgaggcaaaatttggtctatcaggtctgacattgcatgtaccagacgtgctgctacttaaagaaatgatggctacttcttttgtaaaagggataaccatcttacaaa

SEQ ID NO: 25277 - DNA, 122 bp, Homo sapiens
  misc_feature (61)..(62): /note="This region represents a CpG dinucleotide"
  misc_feature (61)..(61): /note="Nucleotide may be methylated to form 5-methylcytosine"
tttcagctaatttggagtgaggaggaagaaagttgcaatgaaaaaaacagggaacccaaacgctcttgctgatgaaagagcctcagtcattgactgcagcacatcaaagagcacaagatggg

SEQ ID NO: 25278 - DNA, 122 bp, Homo sapiens
  misc_feature (61)..(62): /note="This region represents a CpG dinucleotide"
  misc_feature (61)..(61): /note="Nucleotide may be methylated to form 5-methylcytosine"
gtgtttatgagtcattagggaatcattttaagcttatcccatttctcttaagtacacagacggttttagaatctgtacttttaatgattggtgctgcttagacggtcaaggcaaatttgagt

SEQ ID NO: 25279 - DNA, 122 bp, Homo sapiens
  misc_feature (61)..(62): /note="This region represents a CpG dinucleotide"
  misc_feature (61)..(61): /note="Nucleotide may be methylated to form 5-methylcytosine"
tccaattgtgacaaccggaaatgtctctaagaattgccaaatgcctagtgaaatcatcctcgctccacttttggcaaccactgtttcacatgatacctgtttttttgaggtgctttagtatt

SEQ ID NO: 25280 - DNA, 122 bp, Homo sapiens
  misc_feature (61)..(62): /note="This region represents a CpG dinucleotide"
  misc_feature (61)..(61): /note="Nucleotide may be methylated to form 5-methylcytosine"
atggtattggattagagtccccttatgaagtaggcttttaaaatgttagtaagcttgttacgaatgcaggtttctaggctttggccacagatcctgagtcatagttggtctgagatgaaccc

SEQ ID NO: 25281 - DNA, 122 bp, Homo sapiens
  misc_feature (61)..(62): /note="This region represents a CpG dinucleotide"
  misc_feature (61)..(61): /note="Nucleotide may be methylated to form 5-methylcytosine"
ctcagtgccatcgggattagagctaatgagttggaagaagttaacaatgcttcgggccagcggaggcccaggagacctctcaggccccgcgttgtggccgcctttcaccactgaggtgtaat

SEQ ID NO: 25282 - DNA, 122 bp, Homo sapiens
  misc_feature (61)..(62): /note="This region represents a CpG dinucleotide"
  misc_feature (61)..(61): /note="Nucleotide may be methylated to form 5-methylcytosine"
taagatctgggaggatcccagattaaagcttcctatgtcttcttcctgtgagtcagtacacgtcaccttcctagcacatcaatgggtaaaaatatgtacagaatattgtcaaccagggaaac

SEQ ID NO: 25283 - DNA, 122 bp, Homo sapiens
  misc_feature (61)..(62): /note="This region represents a CpG dinucleotide"
  misc_feature (61)..(61): /note="Nucleotide may be methylated to form 5-methylcytosine"
gtcaggaaatggcctcttcctggtgccggctgccaatttaccacttttagagaggcagtgcgataattgccaaaccatcacccgacatgtctagtgggtcggtgggagacccctctctgggc

SEQ ID NO: 25284 - DNA, 122 bp, Homo sapiens
  misc_feature (61)..(62): /note="This region represents a CpG dinucleotide"
  misc_feature (61)..(61): /note="Nucleotide may be methylated to form 5-methylcytosine"
gtggcctctttattctttcctttatgtggctcagtgatgatgacactgctccgttgcctccgtttccttgtgggagaaggaggtagggaagggttaaagtggacttgccccagatcaggcgt

SEQ ID NO: 25285 - DNA, 122 bp, Homo sapiens
  misc_feature (61)..(62): /note="This region represents a CpG dinucleotide"
  misc_feature (61)..(61): /note="Nucleotide may be methylated to form 5-methylcytosine"
gtatcttcaacaatgtttacagactttttatagctcttctcacatgaagtgtttaccctccgtttgtggcttatcatgaactgaccagcaatatgttctgatgaacaaataaagtttttctt

SEQ ID NO: 25286 - DNA, 122 bp, Homo sapiens
  misc_feature (61)..(62): /note="This region represents a CpG dinucleotide"
  misc_feature (61)..(61): /note="Nucleotide may be methylated to form 5-methylcytosine"
aagcagatgtctgtacagatctgaccaggtaacttggggttgaagcagaaggggctgacccgtctctcagagtccagtgaagtagcccccaagaagactggggcaaacatagaattaagaca

SEQ ID NO: 25287 - DNA, 122 bp, Homo sapiens
  misc_feature (61)..(62): /note="This region represents a CpG dinucleotide"
  misc_feature (61)..(61): /note="Nucleotide may be methylated to form 5-methylcytosine"
gaaagattccacagtgaatcagaggcagtacgtggactttaaagctcatagggctgggcgcggtggctcacgtctataatcccaacactttgggaggccaaggcaggtggatcacaaggttg

SEQ ID NO: 25288 - DNA, 122 bp, Homo sapiens
  misc_feature (61)..(62): /note="This region represents a CpG dinucleotide"
  misc_feature (61)..(61): /note="Nucleotide may be methylated to form 5-methylcytosine"
acccattttatagacaatgaaagaaaagctcaaaaagcttccatcacttgcccagacttacggtggaaaggattccaaccaagatttgtggaattccctgttcagagctccctccccaacat

SEQ ID NO: 25289 - DNA, 122 bp, Homo sapiens
  misc_feature (61)..(62): /note="This region represents a CpG dinucleotide"
  misc_feature (61)..(61): /note="Nucleotide may be methylated to form 5-methylcytosine"
tataagttttgtaaaatctttgtggggagagaaaggggaaatacacactagactaggccacggcataatgtacctcccatgtgaatctggcttagtgtgcaaatgtatgttttcagagaagg

SEQ ID NO: 25290 - DNA, 122 bp, Homo sapiens
  misc_feature (61)..(62): /note="This region represents a CpG dinucleotide"
  misc_feature (61)..(61): /note="Nucleotide may be methylated to form 5-methylcytosine"
tccagaaacgctaggtgaacacagaaaactgaaccagctgcagtgaatataccaaacacacgcacacacatcaaatatcttcagaaagagggagcgtgagcaagccagcacactttccttgt

SEQ ID NO: 25291 - DNA, 122 bp, Homo sapiens
  misc_feature (61)..(62): /note="This region represents a CpG dinucleotide"
  misc_feature (61)..(61): /note="Nucleotide may be methylated to form 5-methylcytosine"
gaccaaaaaataagtgtgtatgtgtgtgtgtatgagagagagggagagagagagaaagaacgatgcattcacgccaaatgaagccacagtaagttatgctaaagttttacagcatttcaaac

SEQ ID NO: 25292 - DNA, 122 bp, Homo sapiens
  misc_feature (61)..(62): /note="This region represents a CpG dinucleotide"
  misc_feature (61)..(61): /note="Nucleotide may be methylated to form 5-methylcytosine"
ctgtttggatctcgttaatctctgcaaaatccctgtgcccacaagctggcgtccaaaactcgcttctactggattgaagaatggcctacttcagttcaccaggggctcctaagggagacttt

SEQ ID NO: 25293 - DNA, 122 bp, Homo sapiens
  misc_feature (61)..(62): /note="This region represents a CpG dinucleotide"
  misc_feature (61)..(61): /note="Nucleotide may be methylated to form 5-methylcytosine"
ctggcagacaataagctgaagctttcattagcagcttaagctgaggactatctatgcaaccgatactccctgtgtgctccccgggactgcttaatgtgagcccttgtggagcgattggcacc

SEQ ID NO: 25294 - DNA, 122 bp, Homo sapiens
  misc_feature (61)..(62): /note="This region represents a CpG dinucleotide"
  misc_feature (61)..(61): /note="Nucleotide may be methylated to form 5-methylcytosine"
cagagtagtagtacttaatgtccaggtgctaagcttttctccactgccttggttcacagacggctgtcatcagttacgactacctcacttccctgaagagtgtcccttatggctcagaggag

SEQ ID NO: 25295 - DNA, 122 bp, Homo sapiens
  misc_feature (61)..(62): /note="This region represents a CpG dinucleotide"
  misc_feature (61)..(61): /note="Nucleotide may be methylated to form 5-methylcytosine"
tgggctcaagcgatcctcccgcctcggcctctcaaagtgctgggactacaggtttagtcacggtgcctgccctgaatgttctattttaaacaagaaaaccaaaccaaacccaacaacaaacc

SEQ ID NO: 25296 - DNA, 122 bp, Homo sapiens
  misc_feature (61)..(62): /note="This region represents a CpG dinucleotide"
  misc_feature (61)..(61): /note="Nucleotide may be methylated to form 5-methylcytosine"
taacatccatctccttgtaatgtgtgcatcgttttatcacactggagattaagttcctctcgtaaaggcctttacatttttgagactcacttttaacagagctctttccaaagcactattgt

SEQ ID NO: 25297 - DNA, 122 bp, Homo sapiens
  misc_feature (61)..(62): /note="This region represents a CpG dinucleotide"
  misc_feature (61)..(61): /note="Nucleotide may be methylated to form 5-methylcytosine"
tattaacaagagcatggtggtgagaattaatcatcatccaagagcctggctcataataagcgcacaatagtattgttattttcattatgaaccatgaaatatttcagctgaaagggacctgg

SEQ ID NO: 25298 - DNA, 122 bp, Homo sapiens
  misc_feature (61)..(62): /note="This region represents a CpG dinucleotide"
  misc_feature (61)..(61): /note="Nucleotide may be methylated to form 5-methylcytosine"
ttgagtactgggatatagattaacttgagttcagtcaaggctgccttgtctttcttaatacgatgttaataagaaacgagccaccctagccagaaaagccaaaaagatatattctatcccca

SEQ ID NO: 25299 - DNA, 122 bp, Homo sapiens
  misc_feature (61)..(62): /note="This region represents a CpG dinucleotide"
  misc_feature (61)..(61): /note="Nucleotide may be methylated to form 5-methylcytosine"
ggtttcacctcttcctttttaaatttaaattctgtttaaattgaagtgctactgcattcccgtggttggcagctcaaaaagcaagaaataaatcaggagaaaaagtctctcttctacctcca

SEQ ID NO: 25300 - DNA, 122 bp, Homo sapiens
  misc_feature (61)..(62): /note="This region represents a CpG dinucleotide"
  misc_feature (61)..(61): /note="Nucleotide may be methylated to form 5-methylcytosine"
gcagccgcctgcttctgccggctggagttgcttaagttgccacgacaaccaagggcccaacgatgtcctcacaagcagcactaaatggaagctctaaattaattcacccgcctgtgtttttg

SEQ ID NO: 25301 - DNA, 122 bp, Homo sapiens
  misc_feature (61)..(62): /note="This region represents a CpG dinucleotide"
  misc_feature (61)..(61): /note="Nucleotide may be methylated to form 5-methylcytosine"
aggtttgtgtaggttaagaaactagacctcagaaatgatttcatgtcttggataaagtcacgcataaccccacaaggtaaaagctgtatcaggtttgattggcaagtgagtgcctcatgcat

SEQ ID NO: 25302 - DNA, 122 bp, Homo sapiens
  misc_feature (61)..(62): /note="This region represents a CpG dinucleotide"
  misc_feature (61)..(61): /note="Nucleotide may be methylated to form 5-methylcytosine"
aaaaaatctataaggaacggctggccctgtacagatttttcaatgatgtcaccacagaaacggctgaaatgtcacataattagtgaaggtggctgcttccttgtgtgatatgagggacctca

SEQ ID NO: 25303 - DNA, 122 bp, Homo sapiens
  misc_feature (61)..(62): /note="This region represents a CpG dinucleotide"
  misc_feature (61)..(61): /note="Nucleotide may be methylated to form 5-methylcytosine"
tgaaaattgagcaaaagcttgaagcaggtgatggagctggccaaggtgctgagggaagagcgttgtaggctgaatcaacaggataaaggcattaggagactccctggtgagtctgaggctct

SEQ ID NO: 25304 - DNA, 122 bp, Homo sapiens
  misc_feature (61)..(62): /note="This region represents a CpG dinucleotide"
  misc_feature (61)..(61): /note="Nucleotide may be methylated to form 5-methylcytosine"
gactgtgtctgctgtgttgtctgttataagatgtttcagacctattttgcatactggcagcgacaagttgagacttgttcaacttgacacagtcctgtggtcatagcgaatctttctaaagc

SEQ ID NO: 25305 - DNA, 122 bp, Homo sapiens
  misc_feature (61)..(62): /note="This region represents a CpG dinucleotide"
  misc_feature (61)..(61): /note="Nucleotide may be methylated to form 5-methylcytosine"
cggcattgtctgtttctaaagaattgtaaactttcatgtgttacattacagaaatctgaacggagaggattaaccaaataccatttggacttaaaagcagcttgaggccgggcgcggtggct

SEQ ID NO: 25306 - DNA, 122 bp, Homo sapiens
  misc_feature (61)..(62): /note="This region represents a CpG dinucleotide"
  misc_feature (61)..(61): /note="Nucleotide may be methylated to form 5-methylcytosine"
aaagaaaaaaatgcaatgagaccaatgaatatttggaagcttatggacacaagatggcaccgttcccttacatgagggatagaatggcttattatttctttcaaattcccttttggtcaatt

SEQ ID NO: 25307 - DNA, 122 bp, Homo sapiens
  misc_feature (61)..(62): /note="This region represents a CpG dinucleotide"
  misc_feature (61)..(61): /note="Nucleotide may be methylated to form 5-methylcytosine"
ataaatagcagtaccattttacaaaatcagaagctaggaaaatgtatttggcctttgactcgtggttggtcctcagtgaatgttcagtgaatagaattataaaatctctttgttcttttttg

SEQ ID NO: 25308 - DNA, 122 bp, Homo sapiens
  misc_feature (61)..(62): /note="This region represents a CpG dinucleotide"
  misc_feature (61)..(61): /note="Nucleotide may be methylated to form 5-methylcytosine"
cccacctgttattaacttccatgacattgacaccttaggagagtccagcctgctgtctcacggcttctaagaagccaaacccagctttgaaacacaacataagagagaggccacaatactat

SEQ ID NO: 25309 - DNA, 122 bp, Homo sapiens
  misc_feature (61)..(62): /note="This region represents a CpG dinucleotide"
  misc_feature (61)..(61): /note="Nucleotide may be methylated to form 5-methylcytosine"
acccagcccccagccctcctagagacagaggctttgcggggggtgtctaatttctgtccccggaaacctctgaccaccaacttccccatttcaggaaaaagcctggtgtgggtggggtgggg

SEQ ID NO: 25310 - DNA, 122 bp, Homo sapiens
  misc_feature (61)..(62): /note="This region represents a CpG dinucleotide"
  misc_feature (61)..(61): /note="Nucleotide may be methylated to form 5-methylcytosine"
gtatgacaactccacagagtgctcttgctgtctcttcaaaagattatggctttggtcaggcgtggtggctcatgcctgtaatcctagcactttgggtggctgaagcaggcagatcacttgag

SEQ ID NO: 25311 - DNA, 122 bp, Homo sapiens
  misc_feature (61)..(62): /note="This region represents a CpG dinucleotide"
  misc_feature (61)..(61): /note="Nucleotide may be methylated to form 5-methylcytosine"
gaggtaagttttagtaggaaactgaaagaaaccaaggcccaacaaaatgaggcaactagacggagtgactggggaagtttccagccaagtcagatataaaatttgtactgtgaaaaactgtt

SEQ ID NO: 25312 - DNA, 122 bp, Homo sapiens
  misc_feature (61)..(62): /note="This region represents a CpG dinucleotide"
  misc_feature (61)..(61): /note="Nucleotide may be methylated to form 5-methylcytosine"
tctttgttgtcaacaccgggaatagtagtgctgctcctgaacaactggctcatctgatcacgtggacactgaatgttactgattgcatctctctcttgctgagctgacaccaaaaggcttag

SEQ ID NO: 25313 - DNA, 122 bp, Homo sapiens
  misc_feature (61)..(62): /note="This region represents a CpG dinucleotide"
  misc_feature (61)..(61): /note="Nucleotide may be methylated to form 5-methylcytosine"
acacatactacaataccaacaaaccctgcaaacatgatgctaagctcaagaatctagacacgaaaggcacatggtatacatatatgattcaacttctggaaaatgtccagaacaggaaaatc

SEQ ID NO: 25314 - DNA, 122 bp, Homo sapiens
  misc_feature (61)..(62): /note="This region represents a CpG dinucleotide"
  misc_feature (61)..(61): /note="Nucleotide may be methylated to form 5-methylcytosine"
tcgtgattggtgtgaaaatgaaacctgctccttccagaacaatgagaatgctacctctgccgacaacattcccatccaactaagatcaagccagattgctcttgagtcattggttagtaacc

SEQ ID NO: 25315 - DNA, 122 bp, Homo sapiens
  misc_feature (61)..(62): /note="This region represents a CpG dinucleotide"
  misc_feature (61)..(61): /note="Nucleotide may be methylated to form 5-methylcytosine"
tcactcctgaggtgcctgccagtctgtacactgggcaccatggagtccttggcatgtttgcgtttcctgaactgggctcccagccacagcattgcattatcctcatgcaaaccaggtaattt

SEQ ID NO: 25316 - DNA, 122 bp, Homo sapiens
  misc_feature (61)..(62): /note="This region represents a CpG dinucleotide"
  misc_feature (61)..(61): /note="Nucleotide may be methylated to form 5-methylcytosine"
catgatccaaattttcactgcccccaccaccatctccgggaaaaggaaagggactggagacgggagaggagctaggaattgagttaatcaccaatgcccaatgattaatcattaattaatca

SEQ ID NO: 25317 - DNA, 122 bp, Homo sapiens
  misc_feature (61)..(62): /note="This region represents a CpG dinucleotide"
  misc_feature (61)..(61): /note="Nucleotide may be methylated to form 5-methylcytosine"
caaggtgttccagtcgggggcctccgggacatgcctcagcaacttttcttacatgcaaaacgcacccagctcgagctcccccaacttctcctgcaaaggcaggaatggtttgagcagggcca

SEQ ID NO: 25318 - DNA, 122 bp, Homo sapiens
  misc_feature (61)..(62): /note="This region represents a CpG dinucleotide"
  misc_feature (61)..(61): /note="Nucleotide may be methylated to form 5-methylcytosine"
ccacacttctatctctatatctgcctcctgcaagctgaacaaaacaatgtgctgcttctacgggaactctgagccagacagcccagacttttacaggaggaaaaagcaagttttaccttttt

SEQ ID NO: 25319 - DNA, 122 bp, Homo sapiens
  misc_feature (61)..(62): /note="This region represents a CpG dinucleotide"
  misc_feature (61)..(61): /note="Nucleotide may be methylated to form 5-methylcytosine"
aggtgctgcattagggctttctgtgtttcatctcatcccatacctgccaagcccttcctacggctactttattttagagatgagcaaagtgaggcttgtgcccaaggaaacagagctagcat

SEQ ID NO: 25320 - DNA, 122 bp, Homo sapiens
  misc_feature (61)..(62): /note="This region represents a CpG dinucleotide"
  misc_feature (61)..(61): /note="Nucleotide may be methylated to form 5-methylcytosine"
ctccgagggagcaggcgagtcctctcttgtcagaggccacatccctgcacctgcgcagcacggcacatcctggggctcagcgtcctgcgtggaacatactcaagtccatccacatcctctgc

SEQ ID NO: 25321 - DNA, 122 bp, Homo sapiens
  misc_feature (61)..(62): /note="This region represents a CpG dinucleotide"
  misc_feature (61)..(61): /note="Nucleotide may be methylated to form 5-methylcytosine"
tcctcacgagttgaactaacaagagaagaaaaacccaggatatgagaaatcattggattgcgcaggtgccctctgccaattggttagcaagtttttacgagcaaatctggtggttatccttt

SEQ ID NO: 25322 - DNA, 122 bp, Homo sapiens
  misc_feature (61)..(62): /note="This region represents a CpG dinucleotide"
  misc_feature (61)..(61): /note="Nucleotide may be methylated to form 5-methylcytosine"
aacatgatctctgaaagtcaccacctccccctcttatcacttacaaatgtgaaaccctagcgctttggactccattcagcctgtccctgcattgagagcaaatacgctccctgcaagcaaaa

SEQ ID NO: 25323 - DNA, 122 bp, Homo sapiens
  misc_feature (61)..(62): /note="This region represents a CpG dinucleotide"
  misc_feature (61)..(61): /note="Nucleotide may be methylated to form 5-methylcytosine"
gggaagggcctctgggtggagcaatcccacactagcctatgttcagtagggaatgtgtcacggcacagtggcacaggcaagcaacctaaggatgttgaagcttcttgggtcaggtctccaaa

SEQ ID NO: 25324 - DNA, 122 bp, Homo sapiens
  misc_feature (61)..(62): /note="This region represents a CpG dinucleotide"
  misc_feature (61)..(61): /note="Nucleotide may be methylated to form 5-methylcytosine"
tttaactgtttggcaatatacaataacttattgttaactctgatttccctactgccatatcgaatgctagaacttattccatctatctagctgtactttgtacccattaatgtgaatgggtt

SEQ ID NO: 25325 - DNA, 122 bp, Homo sapiens
  misc_feature (61)..(62): /note="This region represents a CpG dinucleotide"
  misc_feature (61)..(61): /note="Nucleotide may be methylated to form 5-methylcytosine"
aaggaaagggaagaggcggagcgtgggagcgcacagtgtcaggaatacaatagtgctccgcgccgcctcagccgccgccgccgcccaaccgcctgcccagcgctgaggcctgacgggccggg

SEQ ID NO: 25326 - DNA, 122 bp, Homo sapiens
  misc_feature (61)..(62): /note="This region represents a CpG dinucleotide"
  misc_feature (61)..(61): /note="Nucleotide may be methylated to form 5-methylcytosine"
aatcaagctattctcttgaaataagatttttgacctctatttcattatgaatacatgatacgctcccatctttccccaccctcaacccacagagtggcctaagaaaagtgagatggggacaa

SEQ ID NO: 25327 - DNA, 122 bp, Homo sapiens
  misc_feature (61)..(62): /note="This region represents a CpG dinucleotide"
  misc_feature (61)..(61): /note="Nucleotide may be methylated to form 5-methylcytosine"
ctatgggattctcatgtaggtggaaatgcttgagtgggcgcctctggcctttggtctacacgcactagcctgatacacgtctcctccaccaggctgtaaacctcgtgaagtatcggttttat

SEQ ID NO: 25328 - DNA, 122 bp, Homo sapiens
  misc_feature (61)..(62): /note="This region represents a CpG dinucleotide"
  misc_feature (61)..(61): /note="Nucleotide may be methylated to form 5-methylcytosine"
cgtgatgtccttggtcaagggctctcctctgggccggtggtggttgcagagagaagcccccgccgccgtcgctcctcgggaaaggaagtcgcgggtgaacaaccgaatatgcgatgaaaagg

SEQ ID NO: 25329 - DNA, 122 bp, Homo sapiens
  misc_feature (61)..(62): /note="This region represents a CpG dinucleotide"
  misc_feature (61)..(61): /note="Nucleotide may be methylated to form 5-methylcytosine"
acagaagatcacttgttgatcttcacttgcaatttcatttccctgtagcgtggctcattccgttgttttcttttctctgtttaaggaaatggcatcagattttcatgatagcatgtacagcc

SEQ ID NO: 25330 - DNA, 122 bp, Homo sapiens
  misc_feature (61)..(62): /note="This region represents a CpG dinucleotide"
  misc_feature (61)..(61): /note="Nucleotide may be methylated to form 5-methylcytosine"
ttaaattattaattatttttagagatagagtcttgctctgtcatccaaggaatgcattggcgggatcatagcacaatacagcctagaactcctgggctcaaaagatcctcccacctcagcct

SEQ ID NO: 25331 - DNA, 122 bp, Homo sapiens
  misc_feature (61)..(62): /note="This region represents a CpG dinucleotide"
  misc_feature (61)..(61): /note="Nucleotide may be methylated to form 5-methylcytosine"
tgcatacatgaactatgccagagtaatgtttacagatactttgtaaccaatttcaggaggcgtttttagctggatgtgtagttaattagaccaacttatttccaaatggtttgttaacattt

SEQ ID NO: 25332 - DNA, 122 bp, Homo sapiens
  misc_feature (61)..(62): /note="This region represents a CpG dinucleotide"
  misc_feature (61)..(61): /note="Nucleotide may be methylated to form 5-methylcytosine"
gggaggttgcttctgtcggaggactgctgcgagttctgccagagagagcagctcttgtcccggaacatgaggtaggtggtggggcttggggacacgcggctggactggccggagaagtcctc

SEQ ID NO: 25333 - DNA, 122 bp, Homo sapiens
  misc_feature (61)..(62): /note="This region represents a CpG dinucleotide"
  misc_feature (61)..(61): /note="Nucleotide may be methylated to form 5-methylcytosine"
accacttgaaaattcactattggcatcgggcatgtgagtacttggaatgattgcagaagacgtatcagaaaatgttccatcattttttctacccttcatcttatcttttaactttgcaaaag

SEQ ID NO: 25334 - DNA, 122 bp, Homo sapiens
  misc_feature (61)..(62): /note="This region represents a CpG dinucleotide"
  misc_feature (61)..(61): /note="Nucleotide may be methylated to form 5-methylcytosine"
cttttctactctgtttactaagaaactctgagttcttttagtttgattagagtgaaaacccggatcactgcttcctgtgtttcagacctactgccagaattttattttttcaggggcaaaat

SEQ ID NO: 25335 - DNA, 122 bp, Homo sapiens
  misc_feature (61)..(62): /note="This region represents a CpG dinucleotide"
  misc_feature (61)..(61): /note="Nucleotide may be methylated to form 5-methylcytosine"
tatcagaccaaaggattacaaataaatcccctagtattgttgatgtggcatttttccttccgaagagcaatggtttttcttttcacttgcttttggtattggtttaactccacattggggtt

SEQ ID NO: 25336 - DNA, 122 bp, Homo sapiens
  misc_feature (61)..(62): /note="This region represents a CpG dinucleotide"
  misc_feature (61)..(61): /note="Nucleotide may be methylated to form 5-methylcytosine"
aaagtgtccctccccattttacattgttctcagaaatgcatgggggatgtagtttctacacgccactgctgtctgattttttgataatagccatctagtgggtgtgaagtggtatcacactg

SEQ ID NO: 25337 - DNA, 122 bp, Homo sapiens
  misc_feature (61)..(62): /note="This region represents a CpG dinucleotide"
  misc_feature (61)..(61): /note="Nucleotide may be methylated to form 5-methylcytosine"
tcacgctttcactgcctttgccagggcctgttacagtgtgctggatggcagcagttctagcgcagatgtactcatcgcctggaagcacggataatgagctccactcctttcatgctcagcag

SEQ ID NO: 25338 - DNA, 122 bp, Homo sapiens
  misc_feature (61)..(62): /note="This region represents a CpG dinucleotide"
  misc_feature (61)..(61): /note="Nucleotide may be methylated to form 5-methylcytosine"
ccaagtgttgctcaactagcctgatgagtcataagaggcaagagctgcattttagttatacgcaggaggaccaagggatgacatgatgttttaaagttggtttgtgaggtgtaattcaataa

SEQ ID NO: 25339 - DNA, 122 bp, Homo sapiens
  misc_feature (61)..(62): /note="This region represents a CpG dinucleotide"
  misc_feature (61)..(61): /note="Nucleotide may be methylated to form 5-methylcytosine"
ttgaagtgatactgagtatgaatcatcctctctgaactgcgtcacagaattacccactgtcgggaaacttaaagatagtttcagtgtttaaaaattctcaggaaattctttcaaatgttcaa

SEQ ID NO: 25340 - DNA, 122 bp, Homo sapiens
  misc_feature (61)..(62): /note="This region represents a CpG dinucleotide"
  misc_feature (61)..(61): /note="Nucleotide may be methylated to form 5-methylcytosine"
gtgaaacaggggaggcaaagagaatgaggtaggtggtatgatcctggaaagtgcacaatgcgatctctgacatgcctgcttcccattggaaaaagacaaattcctcattcctcttcttggta

SEQ ID NO: 25341 - DNA, 122 bp, Homo sapiens
  misc_feature (61)..(62): /note="This region represents a CpG dinucleotide"
  misc_feature (61)..(61): /note="Nucleotide may be methylated to form 5-methylcytosine"
ctcaactgtaaggacatgtgactggtctccttataagaagaggagattaaaacacagacacgcacagaaggagagatacatgcaaacatcagaggaaaacagctatctacaagccaaggaga

SEQ ID NO: 25342 - DNA, 122 bp, Homo sapiens
  misc_feature (61)..(62): /note="This region represents a CpG dinucleotide"
  misc_feature (61)..(61): /note="Nucleotide may be methylated to form 5-methylcytosine"
agatttcttttaaacagtttgaatgaggaccaaggagtttaatgtcatggaatttctttgcgattacacttgttataagatagttttagtacttcaaaaagaatgtagtaaactggtatgta

SEQ ID NO: 25343 - DNA, 122 bp, Homo sapiens
  misc_feature (61)..(62): /note="This region represents a CpG dinucleotide"
  misc_feature (61)..(61): /note="Nucleotide may be methylated to form 5-methylcytosine"
cttacagaattaaaagacaaggtgtgactctcctggtgtctgttgtgtattaacagggaccgtctgacaaatggtaacttaatccagaagaagagtaaatctaggttgttctgtgcaggctt

SEQ ID NO: 25344 - DNA, 122 bp, Homo sapiens
  misc_feature (61)..(62): /note="This region represents a CpG dinucleotide"
  misc_feature (61)..(61): /note="Nucleotide may be methylated to form 5-methylcytosine"
tgctgtgggaaaaggtaatatatctgagttcccatggatctggttgataggttcacctggcgtgttccatatggggccaggcccaggccacacctgtggtgctaacacctggggtggaggga

SEQ ID NO: 25345 - DNA, 122 bp, Homo sapiens
  misc_feature (61)..(62): /note="This region represents a CpG dinucleotide"
  misc_feature (61)..(61): /note="Nucleotide may be methylated to form 5-methylcytosine"
aggcgaaggtcagtgaagcagaggaagttaaagagctgtgagttggtgggtgactcaccccggtgatgtcagctagtttatgctggtgagctcttcatcagaactggagaaatgtggttaga

SEQ ID NO: 25346 - DNA, 122 bp, Homo sapiens
  misc_feature (61)..(62): /note="This region represents a CpG dinucleotide"
  misc_feature (61)..(61): /note="Nucleotide may be methylated to form 5-methylcytosine"
atccagtctcccatctgcatagaagtatctcactctgcctttttctcttttctttagctacgcacagactcagagaagcgctcactggcagaaagtgggctgagctggtttagtgaatcaga

SEQ ID NO: 25347 - DNA, 122 bp, Homo sapiens
  misc_feature (61)..(62): /note="This region represents a CpG dinucleotide"
  misc_feature (61)..(61): /note="Nucleotide may be methylated to form 5-methylcytosine"
aggtgttctccacagccggttatgaagtgagtaacctgagttcataaatgagcagttgggcgggctcctcttccaggctcttaaatggggagcagggcgtggtgctccgggataagagaaaa

SEQ ID NO: 25348 - DNA, 122 bp, Homo sapiens
  misc_feature (61)..(62): /note="This region represents a CpG dinucleotide"
  misc_feature (61)..(61): /note="Nucleotide may be methylated to form 5-methylcytosine"
ggggttgggaggagggagaaaatctatagctgttacagtttcccagcaatgatccagttccgcagcaatgacccagttctccagcaatgatccagttcttcaggttggaaacagcacacaca

SEQ ID NO: 25349 - DNA, 122 bp, Homo sapiens
  misc_feature (61)..(62): /note="This region represents a CpG dinucleotide"
  misc_feature (61)..(61): /note="Nucleotide may be methylated to form 5-methylcytosine"
aaccacagtgacatactacctcacatccactaggatagctataatcaaaaagatacataacgaacaagtcttggtgacaatgtggaaaaagtgaaaccataacacactgctgtcatgaaagt

SEQ ID NO: 25350 - DNA, 122 bp, Homo sapiens
  misc_feature (61)..(62): /note="This region represents a CpG dinucleotide"
  misc_feature (61)..(61): /note="Nucleotide may be methylated to form 5-methylcytosine"
cctgggtctgtccccatgtaagatcctgcctggggaagttgttcagtgttgttgctcccccgccttccctgacccccctctttctgagcatttttagcactcgtggtttcctccagctgtca

SEQ ID NO: 25351 - DNA, 122 bp, Homo sapiens
  misc_feature (61)..(62): /note="This region represents a CpG dinucleotide"
  misc_feature (61)..(61): /note="Nucleotide may be methylated to form 5-methylcytosine"
ttgaaaaacagtgttattatgtgattggtttttcataggcatcacttccaccctctgagacgagactcagactgcaagctagtcagggaatctccaagataaagagagcaaaagggagatct

SEQ ID NO: 25352 - DNA, 122 bp, Homo sapiens
  misc_feature (61)..(62): /note="This region represents a CpG dinucleotide"
  misc_feature (61)..(61): /note="Nucleotide may be methylated to form 5-methylcytosine"
gtgaagtatcacatcagaaactagctcagatcaaagggcgtgtgacaactgaggctagaacgctcactgccttagcccagccatagcaccttcggagagcagggctgtctgcacgggacata

SEQ ID NO: 25353 - DNA, 122 bp, Homo sapiens
  misc_feature (61)..(62): /note="This region represents a CpG dinucleotide"
  misc_feature (61)..(61): /note="Nucleotide may be methylated to form 5-methylcytosine"
ttcctggctgtccagaagaacaagcctatcagcaagaaggaaatgattcagaggtccaaacggtaagaccaagaaaacaagagtttgtgtacaagtgttaaccaggccaccaagtggtcagg

SEQ ID NO: 25354 - DNA, 122 bp, Homo sapiens
  misc_feature (61)..(62): /note="This region represents a CpG dinucleotide"
  misc_feature (61)..(61): /note="Nucleotide may be methylated to form 5-methylcytosine"
tgggatagcagaacccttttttcacccaacaactgttagcagattaggatggctgggcagcgggggaagggtgggggcatactcctttcctataattcccttctctgaacctcatggaattt

SEQ ID NO: 25355 - DNA, 122 bp, Homo sapiens
  misc_feature (61)..(62): /note="This region represents a CpG dinucleotide"
  misc_feature (61)..(61): /note="Nucleotide may be methylated to form 5-methylcytosine"
tattttgtaaaactgacatcctaacactggcacctagaatacttttccatctgagtctaacgtaccccactgcctctaatacggcccgcactacgatgagctacttcagtgggtgggaccaa

SEQ ID NO: 25356 - DNA, 122 bp, Homo sapiens
  misc_feature (61)..(62): /note="This region represents a CpG dinucleotide"
  misc_feature (61)..(61): /note="Nucleotide may be methylated to form 5-methylcytosine"
acgccagaggctgcacgcgtgacaaggcagcaacgcagtgactcagccccacagtgctcacgccccacacaacacccatcttaatggcagagccatggcaaaacagctgccagcaccaggca

SEQ ID NO: 25357 - DNA, 122 bp, Homo sapiens
  misc_feature (61)..(62): /note="This region represents a CpG dinucleotide"
  misc_feature (61)..(61): /note="Nucleotide may be methylated to form 5-methylcytosine"
ctgcagtgcttctgtactcaggccacagcccattgcattattcattgttgtacgtttctccgtgtcctatttcattatccttggagcctagtgtgatcagtaagtgtctgttgaactaacta

SEQ ID NO: 25358 - DNA, 122 bp, Homo sapiens
  misc_feature (61)..(62): /note="This region represents a CpG dinucleotide"
  misc_feature (61)..(61): /note="Nucleotide may be methylated to form 5-methylcytosine"
aaactgctgctgggaaagagttgaagcaggagcagacggtgttgcaattcaattcagtggcgaggtgcgcctttccataggtgtggttagttatgacaggtattggttcctggctctactgc

SEQ ID NO: 25359 - DNA, 122 bp, Homo sapiens
  misc_feature (61)..(62): /note="This region represents a CpG dinucleotide"
  misc_feature (61)..(61): /note="Nucleotide may be methylated to form 5-methylcytosine"
tgcacacaccgtcctggcacacgccgtgctggctgcagtcattcgggcactgcctcacaccgcaatcctcgccagagtagccgtcctcgcacacacaccgcccatctaggcactggccgcgg

SEQ ID NO: 25360 - DNA, 122 bp, Homo sapiens
  misc_feature (61)..(62): /note="This region represents a CpG dinucleotide"
  misc_feature (61)..(61): /note="Nucleotide may be methylated to form 5-methylcytosine"
tcaatatggtttgccattattgacataggattgcaaagataagtttgtaatttttttacacgagcacattcatctggacattgtatgacctttcggaagtgttgatcatagccttcaagagt

SEQ ID NO: 25361 - DNA, 122 bp, Homo sapiens
  misc_feature (61)..(62): /note="This region represents a CpG dinucleotide"
  misc_feature (61)..(61): /note="Nucleotide may be methylated to form 5-methylcytosine"
aggatgaataaaatgcagtccctgaccttaagatgcttaatgaagtctggccgggcaccacggctcacacctgtaatcccaacactttaggaggctgaggcaggcagattgcttgagcccag

SEQ ID NO: 25362 - DNA, 122 bp, Homo sapiens
  misc_feature (61)..(62): /note="This region represents a CpG dinucleotide"
  misc_feature (61)..(61): /note="Nucleotide may be methylated to form 5-methylcytosine"
tggtattcccaggaggtcaggtagaaagactgcaaagcacagctgttccaacccccaacacggtggagaaaacggccaaagtcacagatgctgtaaaaagtgatactgaagagctcaagctt

SEQ ID NO: 25363 - DNA, 122 bp, Homo sapiens
  misc_feature (61)..(62): /note="This region represents a CpG dinucleotide"
  misc_feature (61)..(61): /note="Nucleotide may be methylated to form 5-methylcytosine"
cctccccgtggaagagcaggttttcgtccacgagcctgagcagcacaagccgcaccagctcgcccatgtacttgccacctatgagcttctcatacctggacatagggcaggtccattacatc

SEQ ID NO: 25364 - DNA, 122 bp, Homo sapiens
  misc_feature (61)..(62): /note="This region represents a CpG dinucleotide"
  misc_feature (61)..(61): /note="Nucleotide may be methylated to form 5-methylcytosine"
ccactgagtcaccggcgctcggggaggggccaggtccactgccagttgaatctggttctgcggtcgcttgctttggggaactcaggcaagcgtcctgaacacttcaaaacctcccaatgatc

SEQ ID NO: 25365 - DNA, 122 bp, Homo sapiens
  misc_feature (61)..(62): /note="This region represents a CpG dinucleotide"
  misc_feature (61)..(61): /note="Nucleotide may be methylated to form 5-methylcytosine"
cagacatctacagaacacatctgttgagctgtgtagccttcaggctgggccatggttcctcgactttccaggtctgacttatctatacctccctgagttatggaggtcaatttcaggattgt

SEQ ID NO: 25366 - DNA, 122 bp, Homo sapiens
  misc_feature (61)..(62): /note="This region represents a CpG dinucleotide"
  misc_feature (61)..(61): /note="Nucleotide may be methylated to form 5-methylcytosine"
tgctaagcattgatggccctttctggctctaatgccagagcaaccctgacttctaggtcacggttgtaaaataaattgttgcaatgggatccaaaaaagggggaagtttatactagagagct

SEQ ID NO: 25367 - DNA, 122 bp, Homo sapiens
  misc_feature (61)..(62): /note="This region represents a CpG dinucleotide"
  misc_feature (61)..(61): /note="Nucleotide may be methylated to form 5-methylcytosine"
aactcgggtcttcagcacatggtggggagcagcagcagatctagtcaaacctgcagctaacgtatgtgacactgtgtgctgcacagtaggcgaccagggaagctttcgttttcatcttctta

SEQ ID NO: 25368 - DNA, 122 bp, Homo sapiens
  misc_feature (61)..(62): /note="This region represents a CpG dinucleotide"
  misc_feature (61)..(61): /note="Nucleotide may be methylated to form 5-methylcytosine"
cacatgaagtcaacagcacatgtttactgggcaaattgaatgatgcacaatacccagcaccgtgctgatgcataagtattcagcatgctgaaagtactgagcatgtatttccctggaataaa

SEQ ID NO: 25369 - DNA, 122 bp, Homo sapiens
  misc_feature (61)..(62): /note="This region represents a CpG dinucleotide"
  misc_feature (61)..(61): /note="Nucleotide may be methylated to form 5-methylcytosine"
ggtcccctagagggagctagaggtagccacactcagtgtttcttgttttccctccagatgcgttatttgtgtataacgatatatatgtctgtgtatttacatatagattagtgaggtttgtc

SEQ ID NO: 25370 - DNA, 122 bp, Homo sapiens
  misc_feature (61)..(62): /note="This region represents a CpG dinucleotide"
  misc_feature (61)..(61): /note="Nucleotide may be methylated to form 5-methylcytosine"
cctatacagccatatgtagcgatgtcataagttgtttttcaagctggcctttgctccctacgaagacaggaacgttttgcaatcagtgtcctttagagaatgttggctcaccaaagactagt

SEQ ID NO: 25371 - DNA, 122 bp, Homo sapiens
  misc_feature (61)..(62): /note="This region represents a CpG dinucleotide"
  misc_feature (61)..(61): /note="Nucleotide may be methylated to form 5-methylcytosine"
gaatgcactcaattgcctaatagttctcgtcaccttgtgtttcagtagccctatgactaacgctctcttctgactcaatgttttcttacatacaaggtcccaaggtacaagggttagtctgt

SEQ ID NO: 25372 - DNA, 122 bp, Homo sapiens
  misc_feature (61)..(62): /note="This region represents a CpG dinucleotide"
  misc_feature (61)..(61): /note="Nucleotide may be methylated to form 5-methylcytosine"
aagtgtcatatgtaaaccaagcttctgtagtgcagcctttttaaaacacaaggtcaagggcggtgttgtggtttaagtagtgaaaaggccatgggttttagagacatatactccttggattt

SEQ ID NO: 25373 - DNA, 122 bp, Homo sapiens
  misc_feature (61)..(62): /note="This region represents a CpG dinucleotide"
  misc_feature (61)..(61): /note="Nucleotide may be methylated to form 5-methylcytosine"
gttttgtgaataaacatttcccaagaaaaaagcagagaaaggaggtgggaaattaagtcacggaggggaacatggtagcttatgagcatgaccgccacacaaccaggaccacagttagtggt

SEQ ID NO: 25374 - DNA, 122 bp, Homo sapiens
  misc_feature (61)..(62): /note="This region represents a CpG dinucleotide"
  misc_feature (61)..(61): /note="Nucleotide may be methylated to form 5-methylcytosine"
gcatgcctaacgtcacgcgaagtcttctaacccatacgcgctgatgaatcctggcaactccgttagggagacacgacttatcaaacccttttcatggcccagctgaaatgacacactgacgt

SEQ ID NO: 25375 - DNA, 122 bp, Homo sapiens
  misc_feature (61)..(62): /note="This region represents a CpG dinucleotide"
  misc_feature (61)..(61): /note="Nucleotide may be methylated to form 5-methylcytosine"
cctcaaaggatgagcaggacttaaagggaccaaggaaaaggacaatccaagcagtgacaacggaatgagaagacaagtaataggccttcagagtgacaaggtcctttggctgaatgcaggct

SEQ ID NO: 25376 - DNA, 122 bp, Homo sapiens
  misc_feature (61)..(62): /note="This region represents a CpG dinucleotide"
  misc_feature (61)..(61): /note="Nucleotide may be methylated to form 5-methylcytosine"
gtcctgcgccttagagagatgcgtgaatcccttacctttaccatactctgaattggtcaacggcagaatggaagccctacaaaaattgaaaagttggttgcatgctaacattcatagtggaa

SEQ ID NO: 25377 - DNA, 122 bp, Homo sapiens
  misc_feature (61)..(62): /note="This region represents a CpG dinucleotide"
  misc_feature (61)..(61): /note="Nucleotide may be methylated to form 5-methylcytosine"
ccagagcctatatgcttaaccacaaagccatcctgccttaaatgacatggccttaaaagccgagttatccaatacagtaggttaagtgaaaaaggtgctgccaggctactgagatgaaaaga

SEQ ID NO: 25378 - DNA, 122 bp, Homo sapiens
  misc_feature (61)..(62): /note="This region represents a CpG dinucleotide"
  misc_feature (61)..(61): /note="Nucleotide may be methylated to form 5-methylcytosine"
ctccagcctacgtcagcacgcaggcaagtgccctccacttcctcctgctcaatgctatctcgcctgtacagccaccagctccagtggaaatgacccagcactaggcccaagaccacaccctt

SEQ ID NO: 25379 - DNA, 122 bp, Homo sapiens
  misc_feature (61)..(62): /note="This region represents a CpG dinucleotide"
  misc_feature (61)..(61): /note="Nucleotide may be methylated to form 5-methylcytosine"
aatctattataattttatatcttacaaaatcaacaactctaaggctcagaatttatctaacgctttttcccccgggagctcattttgtagacatgatctcattcattcttgaggagcagtca

SEQ ID NO: 25380 - DNA, 122 bp, Homo sapiens
  misc_feature (61)..(62): /note="This region represents a CpG dinucleotide"
  misc_feature (61)..(61): /note="Nucleotide may be methylated to form 5-methylcytosine"
aaatcaataagtcagtgaatgttggcaggtgttcagagattttttctgtgtgtcattcaccgtggcacagttaagtaactgcttatgattaagtttttcacagtctcagaaaataaggagtt

SEQ ID NO: 25381 - DNA, 122 bp, Homo sapiens
  misc_feature (61)..(62): /note="This region represents a CpG dinucleotide"
  misc_feature (61)..(61): /note="Nucleotide may be methylated to form 5-methylcytosine"
ctattccctaagtatgttccaaaatgccaagggcaagatgtgttgtttttccaaggctggcggttttaataccaccatctcagcaaggtcagcttgggtggaagacatgacttcaccaggtc

SEQ ID NO: 25382 - DNA, 122 bp, Homo sapiens
  misc_feature (61)..(62): /note="This region represents a CpG dinucleotide"
  misc_feature (61)..(61): /note="Nucleotide may be methylated to form 5-methylcytosine"
ataaactgtaaaaaagttcacaataatatgtatgatgaactttccagtaaacttaaagcacgtcacacatgtttttttctctcattcacctctttcacttcttcccacaatttctacgtcaa

SEQ ID NO: 25383 - DNA, 122 bp, Homo sapiens
  misc_feature (61)..(62): /note="This region represents a CpG dinucleotide"
  misc_feature (61)..(61): /note="Nucleotide may be methylated to form 5-methylcytosine"
ctctccttctgttgaagggtgttcagctggagaactgccctcagccgattcctgaagcaccgtcctgaagtggtgctttccaaaccttaatgtgactaggcatcacctgagtctcttgtttc

SEQ ID NO: 25384 - DNA, 122 bp, Homo sapiens
  misc_feature (61)..(62): /note="This region represents a CpG dinucleotide"
  misc_feature (61)..(61): /note="Nucleotide may be methylated to form 5-methylcytosine"
caagtcactgaggtaggacaaaaggttgctacggtcctattattttatggttattataagcgtactggaactctaaaaagaacttgttgtataatataattctatacaaggtatgtagccca

SEQ ID NO: 25385 - DNA, 122 bp, Homo sapiens
  misc_feature (61)..(62): /note="This region represents a CpG dinucleotide"
  misc_feature (61)..(61): /note="Nucleotide may be methylated to form 5-methylcytosine"
tttttacacatgacatctgcttcctaaacattccagttaagcccatgagtaatgcccgtccgttcctctggttgctcttccttcactgcccactttcactgctccacttttcccctacctgc

SEQ ID NO: 25386 - DNA, 122 bp, Homo sapiens
  misc_feature (61)..(62): /note="This region represents a CpG dinucleotide"
  misc_feature (61)..(61): /note="Nucleotide may be methylated to form 5-methylcytosine"
cacaactcagcaaccagttgggctgcttccctctgacgcacttgcttctcatccggggagcggggagtctccgtcttcacaagtgggcaggcttcactgagcccagaggcccctggggcaga

SEQ ID NO: 25387 - DNA, 122 bp, Homo sapiens
  misc_feature (61)..(62): /note="This region represents a CpG dinucleotide"
  misc_feature (61)..(61): /note="Nucleotide may be methylated to form 5-methylcytosine"
atcacccacctcaactccagagctcaggctgtgggagactataaattaagggcacagggccgggcatggtggctcacacctataataacactttgggaggctgaggcaggtgaattacctga

SEQ ID NO: 25388 - DNA, 122 bp, Homo sapiens
  misc_feature (61)..(62): /note="This region represents a CpG dinucleotide"
  misc_feature (61)..(61): /note="Nucleotide may be methylated to form 5-methylcytosine"
taccaggcagctttctgcttgatttggtatctttatagctgattgcctctattgcaaaagcgtaatttgaagcctcagccaggccctggttgctgcaagatgattacttgactcaatctaga

SEQ ID NO: 25389 - DNA, 122 bp, Homo sapiens
  misc_feature (61)..(62): /note="This region represents a CpG dinucleotide"
  misc_feature (61)..(61): /note="Nucleotide may be methylated to form 5-methylcytosine"
gcttacttgtagcattgtcacataacatggtgtgctttggactttgctgaactttagtcccgtaagtccatttgctttgtgattcttggactttttaaactttggaatttcaaagttttaat

SEQ ID NO: 25390 - DNA, 122 bp, Homo sapiens
  misc_feature (61)..(62): /note="This region represents a CpG dinucleotide"
  misc_feature (61)..(61): /note="Nucleotide may be methylated to form 5-methylcytosine"
tagcaagattgagtatgcccagtaaatgctagatattattatcccactagacactgaaaacggtcccctttcctgggttgtgttgctggccttgccacaggcaatgccgagggcagctgcct

SEQ ID NO: 25391 - DNA, 122 bp, Homo sapiens
  misc_feature (61)..(62): /note="This region represents a CpG dinucleotide"
  misc_feature (61)..(61): /note="Nucleotide may be methylated to form 5-methylcytosine"
gggagtttgcttttggaatggacacaatgctgtacagcatgctgcatacgcatcttgagccgtgggcagagcgatgacagactcgtcagcttcgttgagttctagtggcatgttcaagtgtt

SEQ ID NO: 25392 - DNA, 122 bp, Homo sapiens
  misc_feature (61)..(62): /note="This region represents a CpG dinucleotide"
  misc_feature (61)..(61): /note="Nucleotide may be methylated to form 5-methylcytosine"
tgattcttgctaagcttgcaatgttcttgcaatgatcaatactggtagccactccattaccgtacccacggtttagaaggtagtttgtatttttccttctttttcttttaccacaaacttta

SEQ ID NO: 25393 - DNA, 122 bp, Homo sapiens
  misc_feature (61)..(62): /note="This region represents a CpG dinucleotide"
  misc_feature (61)..(61): /note="Nucleotide may be methylated to form 5-methylcytosine"
ttatctgctgatatctccaaagcaagttatatggtcaagtccaaggtcaagaagcagggacgtacattccatataccatgaagccaaagcatgtcacacagtcaaactcaacatcaataggt

SEQ ID NO: 25394 - DNA, 122 bp, Homo sapiens
  misc_feature (61)..(62): /note="This region represents a CpG dinucleotide"
  misc_feature (61)..(61): /note="Nucleotide may be methylated to form 5-methylcytosine"
aagtatttctggttgacaagtcacaatcctctacctagtgattcagggggattccttctacgccataactacatcatcccctagggttttgtcatcttctgcatccaactagcaagaagaga

SEQ ID NO: 25395 - DNA, 122 bp, Homo sapiens
  misc_feature (61)..(62): /note="This region represents a CpG dinucleotide"
  misc_feature (61)..(61): /note="Nucleotide may be methylated to form 5-methylcytosine"
gttggataaatgatatttattaataggaacaggtatgcattctatgttccattttcctctcgtttttacctttctaattcacagcccacatgagtcatgctaatatacacaaagagggctca

SEQ ID NO: 25396 - DNA, 122 bp, Homo sapiens
  misc_feature (61)..(62): /note="This region represents a CpG dinucleotide"
  misc_feature (61)..(61): /note="Nucleotide may be methylated to form 5-methylcytosine"
agtctctgcctgcatagcctattatttctcacaagcaatccatgaagaaggttaagacaacggactttcacgccagactgcctgggttcttatcaagtatgtgacttagtttatatatttgt

SEQ ID NO: 25397 - DNA, 122 bp, Homo sapiens
  misc_feature (61)..(62): /note="This region represents a CpG dinucleotide"
  misc_feature (61)..(61): /note="Nucleotide may be methylated to form 5-methylcytosine"
cctgctactcaggaaacacacgcctatgctaatagactggagttcacaaggcctgggtctcgccctgctctgctctgcccaactgaagaacccaaatcaatggcttcatctctccagacagt

SEQ ID NO: 25398 - DNA, 122 bp, Homo sapiens
  misc_feature (61)..(62): /note="This region represents a CpG dinucleotide"
  misc_feature (61)..(61): /note="Nucleotide may be methylated to form 5-methylcytosine"
catgccctcagtcggctcttattcttgtacaagacgtagtctttgccagtgctcttattgcgaaagaaattgattccttccttaagactggcaacttcaacaggtgataggcacaacaggat

SEQ ID NO: 25399 - DNA, 122 bp, Homo sapiens
  misc_feature (61)..(62): /note="This region represents a CpG dinucleotide"
  misc_feature (61)..(61): /note="Nucleotide may be methylated to form 5-methylcytosine"
gaaaaacatactgtgacatggttcatattttccccccagatgtttttctgttttctctcacgtactcaaaatgtccagttaattaaggaaaacactgtagtggatttctttagtgaagcttt

SEQ ID NO: 25400 - DNA, 122 bp, Homo sapiens
  misc_feature (61)..(62): /note="This region represents a CpG dinucleotide"
  misc_feature (61)..(61): /note="Nucleotide may be methylated to form 5-methylcytosine"
acttaaatatctggacaaagacatatgcttctggaaaaagattgtttcttttgttcagatcgtgccaagtagaaatactgtctctattactgtggacatttttattatcatgtctcaacagg

SEQ ID NO: 25401 - DNA, 122 bp, Homo sapiens
  misc_feature (61)..(62): /note="This region represents a CpG dinucleotide"
  misc_feature (61)..(61): /note="Nucleotide may be methylated to form 5-methylcytosine"
gactttctttgctgagtcacccaaggcatttcttcatttaaatgttcttccttggccaggcgcagtggctcaggcccaatgcggtggctcacgcctgtaatctcaacactttgggaggccga

SEQ ID NO: 25402 - DNA, 122 bp, Homo sapiens
  misc_feature (61)..(62): /note="This region represents a CpG dinucleotide"
  misc_feature (61)..(61): /note="Nucleotide may be methylated to form 5-methylcytosine"
tgagtgagcagataaaggagcttgaattagtctatagaacaatagggtagctctctggaccggtcagtgactcagaatattgatgaaagttgtgtaactgagcagagaaaagaggtatgcct

SEQ ID NO: 25403 - DNA, 122 bp, Homo sapiens
  misc_feature (61)..(62): /note="This region represents a CpG dinucleotide"
  misc_feature (61)..(61): /note="Nucleotide may be methylated to form 5-methylcytosine"
tggtgttaaatgttagctagaatgtcacaaggccagtccttagggacagtgtgacacacacgtcaccttgaccaccagatgagtaagctgcaccacgtgctgttttcagacttttgaaatct

SEQ ID NO: 25404 - DNA, 122 bp, Homo sapiens
  misc_feature (61)..(62): /note="This region represents a CpG dinucleotide"
  misc_feature (61)..(61): /note="Nucleotide may be methylated to form 5-methylcytosine"
ttgaaggataagaaggagcttactgggcttattataagtgggtagaagcacactcttcaccgtgggaacagtaagtgaaggacacagaatcatgaaagataaatgcattgtagagaacactg

SEQ ID NO: 25405 - DNA, 122 bp, Homo sapiens
  misc_feature (61)..(62): /note="This region represents a CpG dinucleotide"
  misc_feature (61)..(61): /note="Nucleotide may be methylated to form 5-methylcytosine"
ccagtcccgttaataaagacttagggtctgtctttacccatttgttcatttgaaattccccgtctttacttcccccataaccaggaaacagatctacacccatgtttaacttataaagagat

SEQ ID NO: 25406 - DNA, 122 bp, Homo sapiens
  misc_feature (61)..(62): /note="This region represents a CpG dinucleotide"
  misc_feature (61)..(61): /note="Nucleotide may be methylated to form 5-methylcytosine"
ttacaggcgtgagccactgtgctggccaaagtccagttttattaaataagaaaccaagaccggatatatgggggctcatgcctgtgatctcagcatgttgggagatcaaggcaataggattg

SEQ ID NO: 25407 - DNA, 122 bp, Homo sapiens
  misc_feature (61)..(62): /note="This region represents a CpG dinucleotide"
  misc_feature (61)..(61): /note="Nucleotide may be methylated to form 5-methylcytosine"
tggtgtgttgcagggagaagccagctctcccgatgcttgagatgttctggatgtcaggcccggcttcctccctccactgttctgagcaagaagcatctgactgttttcttactggaactggc

SEQ ID NO: 25408 - DNA, 122 bp, Homo sapiens
  misc_feature (61)..(62): /note="This region represents a CpG dinucleotide"
  misc_feature (61)..(61): /note="Nucleotide may be methylated to form 5-methylcytosine"
tttctgtcccggtggggaaagccttaacacatcctgaaaaggtgcaaacaagcactagcacggactggtagtccacagcatggacagttctgttaagtctgtaaccacgcttttacaaggca

SEQ ID NO: 25409 - DNA, 122 bp, Homo sapiens
  misc_feature (61)..(62): /note="This region represents a CpG dinucleotide"
  misc_feature (61)..(61): /note="Nucleotide may be methylated to form 5-methylcytosine"
ttctaccttcagagagcttatactccagcagcaaataaagacattagttacaagcagtcacgatcagtggtgaatcacattatcatagttgaaataagttgtgcctttttgtcctccaactt

SEQ ID NO: 25410 - DNA, 122 bp, Homo sapiens
  misc_feature (61)..(62): /note="This region represents a CpG dinucleotide"
  misc_feature (61)..(61): /note="Nucleotide may be methylated to form 5-methylcytosine"
ggtgtgtccagcctcgatgtaggaggaacagggagaaactgatttgctattcataaaatgcgtctgcagaaacagattaactcctgatccactttcacggctgaagcagagcctgccttgta

SEQ ID NO: 25411 - DNA, 122 bp, Homo sapiens
  misc_feature (61)..(62): /note="This region represents a CpG dinucleotide"
  misc_feature (61)..(61): /note="Nucleotide may be methylated to form 5-methylcytosine"
aagttgttaatgtatgaataatactgacttacctcaaataagatgttcagattgagagtacgagatgagaagtctgagtcaacaaagtaaaatgtgatgggttatattagcaaaacaagtta

SEQ ID NO: 25412 - DNA, 122 bp, Homo sapiens
  misc_feature (61)..(62): /note="This region represents a CpG dinucleotide"
  misc_feature (61)..(61): /note="Nucleotide may be methylated to form 5-methylcytosine"
gatgctcattagggctcaggcacagattactatcacaatgtacttatctcaacatgctatcgtcagaccacacagtcaaatcaaattttgaaggctcaaaggatgtgtactgaagaacatcc

SEQ ID NO: 25413 - DNA, 122 bp, Homo sapiens
  misc_feature (61)..(62): /note="This region represents a CpG dinucleotide"
  misc_feature (61)..(61): /note="Nucleotide may be methylated to form 5-methylcytosine"
tgatgctgtcctaatgacaaagccctcacttaggaacatcctgtacctagaaaaacttctcgtcagagctcagggtaaactctcagggcctcaaggaataagagctgtttcctgagattcca

SEQ ID NO: 25414 - DNA, 122 bp, Homo sapiens
  misc_feature (61)..(62): /note="This region represents a CpG dinucleotide"
  misc_feature (61)..(61): /note="Nucleotide may be methylated to form 5-methylcytosine"
gcactcctcctgtctcaccctcccaaagtgctgggattgtaggcgtgagtcactgcaccccgctagccttttttagtagtatgaagctaactgcctggaactgacaagtttatacccacttg

SEQ ID NO: 25415 - DNA, 122 bp, Homo sapiens
  misc_feature (61)..(62): /note="This region represents a CpG dinucleotide"
  misc_feature (61)..(61): /note="Nucleotide may be methylated to form 5-methylcytosine"
gagttcctttggggcacaatgctagcctctttctgccttttccttttaattcctggcttacgttaccctatttcagtttttatttttaaatttaaaatgtgatcatgtccctctggtcttcc

SEQ ID NO: 25416 - DNA, 122 bp, Homo sapiens
  misc_feature (61)..(62): /note="This region represents a CpG dinucleotide"
  misc_feature (61)..(61): /note="Nucleotide may be methylated to form 5-methylcytosine"
caggaattctgtggttaggcttctagggttcaagtctcagctctgcagtctctagctatacggccttctgtggtgcagtagttaagcagggcttacagaatgtcaagatgtaaggtaatctc

SEQ ID NO: 25417 - DNA, 122 bp, Homo sapiens
  misc_feature (61)..(62): /note="This region represents a CpG dinucleotide"
  misc_feature (61)..(61): /note="Nucleotide may be methylated to form 5-methylcytosine"
tcctgagtcactcagtgatggagggaagcctgtaggacttgatagacaaggatcacttcacgatgagtcacatttgatcctcacttgggccatgagaagagggggactgctgaagtgggttt

SEQ ID NO: 25418 - DNA, 122 bp, Homo sapiens
  misc_feature (61)..(62): /note="This region represents a CpG dinucleotide"
  misc_feature (61)..(61): /note="Nucleotide may be methylated to form 5-methylcytosine"
acacaggagcaagccctgactctttggtcatgacgctcagagatgtgaacatgtgtttcccgctacgtgaagaagccagtgtgaggaaacaaggctgggaagaacccagccgagaggaggag

SEQ ID NO: 25419 - DNA, 122 bp, Homo sapiens
  misc_feature (61)..(62): /note="This region represents a CpG dinucleotide"
  misc_feature (61)..(61): /note="Nucleotide may be methylated to form 5-methylcytosine"
tcctcgttgttgcagttaatagcattagtttgttaattactgtatattttaaaagtaagacgaaagggaattcccactggagacttgttcttggctgaaacaatgtgatatgagggaaggaa

SEQ ID NO: 25420 - DNA, 122 bp, Homo sapiens
  misc_feature (61)..(62): /note="This region represents a CpG dinucleotide"
  misc_feature (61)..(61): /note="Nucleotide may be methylated to form 5-methylcytosine"
cattcaagatgtggcccgactgcttcgaacagcctacactcaggtacaggagcaaagaagcgacttaaagttggaatatatatttaagcaggaagcagagcataaaagtttggaaaatttgc

SEQ ID NO: 25421 - DNA, 122 bp, Homo sapiens
  misc_feature (61)..(62): /note="This region represents a CpG dinucleotide"
  misc_feature (61)..(61): /note="Nucleotide may be methylated to form 5-methylcytosine"
tgattatggacccctcccgaaaacaaaggtcatgtcaatgaaatataactcttatgctgtcgtcatgaagactactgctactttcactttctaaaaccatgttccttttttggtatttttca

SEQ ID NO: 25422 - DNA, 122 bp, Homo sapiens
  misc_feature (61)..(62): /note="This region represents a CpG dinucleotide"
  misc_feature (61)..(61): /note="Nucleotide may be methylated to form 5-methylcytosine"
cggctcacaggacagcttgctggggttgccagccggcccttgacttaaatagccctgccccgctgcattcctggcccagcccagcccagcccagcccacccctgcgtgtagtatcctccagc

SEQ ID NO: 25423 - DNA, 122 bp, Homo sapiens
  misc_feature (61)..(62): /note="This region represents a CpG dinucleotide"
  misc_feature (61)..(61): /note="Nucleotide may be methylated to form 5-methylcytosine"
cccgttgctgagagagaccgggggacacgatagcctgttgctgagagagaccggggaacacggtagcctgttgctgagagaggtcatttcccggatctttgtcctgcgtccgcccacagctg

SEQ ID NO: 25424 - DNA, 122 bp, Homo sapiens
  misc_feature (61)..(62): /note="This region represents a CpG dinucleotide"
  misc_feature (61)..(61): /note="Nucleotide may be methylated to form 5-methylcytosine"
tcacattggtgacaagcagaagagattaggttgtcctttgatttgttgatacacatgccacgctgtcagatgatatttgagattatgccctgagctcagagatgcatagcgtgaggatgaca

SEQ ID NO: 25425 - DNA, 122 bp, Homo sapiens
  misc_feature (61)..(62): /note="This region represents a CpG dinucleotide"
  misc_feature (61)..(61): /note="Nucleotide may be methylated to form 5-methylcytosine"
gtcatctgttttcttatctgttaacaaatgtttatcctgaggatgacaaatggagcatcacgtttgcacttttttttattaccctttcctctcttccccatgtgtgttcagcattacttaga

SEQ ID NO: 25426 - DNA, 122 bp, Homo sapiens
  misc_feature (61)..(62): /note="This region represents a CpG dinucleotide"
  misc_feature (61)..(61): /note="Nucleotide may be methylated to form 5-methylcytosine"
aaacaatcacttactaaatcagatcggctcatttgtatttcactcccagccatactgggacgctagtttcagtgtaatggcaattatctatggcatgtactttatggaggtattttgtttgg

SEQ ID NO: 25427 - DNA, 122 bp, Homo sapiens
  misc_feature (61)..(62): /note="This region represents a CpG dinucleotide"
  misc_feature (61)..(61): /note="Nucleotide may be methylated to form 5-methylcytosine"
aatgttagatatgttctcattgttgtgcaacacatctccaagtttttcgtgttgcaaaaccgaaactctgtactcattaaacaacaattccccatttatcccctcctcccagccccggcaac

SEQ ID NO: 25428 - DNA, 122 bp, Homo sapiens
  misc_feature (61)..(62): /note="This region represents a CpG dinucleotide"
  misc_feature (61)..(61): /note="Nucleotide may be methylated to form 5-methylcytosine"
atctctcacacagcttgaggtagctcaagaggagagcaaagggtggtgagacatacaactcgacagccactgtttttaaacagtaaccgtgttcactgaaccaagcaaaaactgggaaatgc

SEQ ID NO: 25429 - DNA, 122 bp, Homo sapiens
  misc_feature (61)..(62): /note="This region represents a CpG dinucleotide"
  misc_feature (61)..(61): /note="Nucleotide may be methylated to form 5-methylcytosine"
gaagtggacagaggaatgatccgggccagcctgggcattctcatggcctacaggacagagcgcttctctgaggctggaagggttactgcagccttcacttggcacccacagccctgagacat

SEQ ID NO: 25430 - DNA, 122 bp, Homo sapiens
  misc_feature (61)..(62): /note="This region represents a CpG dinucleotide"
  misc_feature (61)..(61): /note="Nucleotide may be methylated to form 5-methylcytosine"
agacgttggtttacagcccttattcctgggagctcttatgtatttgagctacatataactcgttcttctctagccttggccatagtgatcaagggcccctggaacttgaatgcatatagtca

SEQ ID NO: 25431 - DNA, 122 bp, Homo sapiens
  misc_feature (61)..(62): /note="This region represents a CpG dinucleotide"
  misc_feature (61)..(61): /note="Nucleotide may be methylated to form 5-methylcytosine"
gtgtttcatggggtaatttttatgggattttattcaaaggctgccttcagtagtggcttacgctggcaatcaagcatccaagtgccttgtcaaaggagaggctcttagacatctttagatct

SEQ ID NO: 25432 - DNA, 122 bp, Homo sapiens
  misc_feature (61)..(62): /note="This region represents a CpG dinucleotide"
  misc_feature (61)..(61): /note="Nucleotide may be methylated to form 5-methylcytosine"
gcacctaaggtggagtcggggaagcttacatggtgcctagggagctggggaccgaggggtcgggaacagagattaaaagatgcatcagagaaggtaaaagccactgtttatgacttcacagg

SEQ ID NO: 25433 - DNA, 122 bp, Homo sapiens
  misc_feature (61)..(62): /note="This region represents a CpG dinucleotide"
  misc_feature (61)..(61): /note="Nucleotide may be methylated to form 5-methylcytosine"
ctcaggtgatccacccgcctccacctcccaaagggctgggattacaggtgtgagccaccgcgccaggccaagttctgttaaacttttagtaaggctgaaggcttaggcatgttttgaccatt

SEQ ID NO: 25434 - DNA, 122 bp, Homo sapiens
  misc_feature (61)..(62): /note="This region represents a CpG dinucleotide"
  misc_feature (61)..(61): /note="Nucleotide may be methylated to form 5-methylcytosine"
ttcctggagctgggtttcggacacttgccagactggggtgtctcccttctctgggctacacgtaattttggttcttttaaagtaaacagcgagatggaaatgtctggtcaccaagagacagg

SEQ ID NO: 25435 - DNA, 122 bp, Homo sapiens
  misc_feature (61)..(62): /note="This region represents a CpG dinucleotide"
  misc_feature (61)..(61): /note="Nucleotide may be methylated to form 5-methylcytosine"
tttccgtcccatgcgcccagcacagttactcttccaccccatgctcccagcacactcttccgtcccatgtgcccagtgcagtcttccgtcccatgcgcccagtgcagttactcttccgtccc

SEQ ID NO: 25436 - DNA, 122 bp, Homo sapiens
  misc_feature (61)..(62): /note="This region represents a CpG dinucleotide"
  misc_feature (61)..(61): /note="Nucleotide may be methylated to form 5-methylcytosine"
aaaaaaaaaacaacccacaaaaccaaaatgctattaatcctgccacaatatttttaattacgtacaaagatctgacatgtcacccagggacccatttcacccactgctctgtttggccgcca

SEQ ID NO: 25437 - DNA, 122 bp, Homo sapiens
  misc_feature (61)..(62): /note="This region represents a CpG dinucleotide"
  misc_feature (61)..(61): /note="Nucleotide may be methylated to form 5-methylcytosine"
cttggagctctagctccgactgcagactctgtggttctcacaaccacccgtttcctctgacggcatcacagaccgtcgaggagccaccttccccaagttcctgtttctaggggagcagctgc

SEQ ID NO: 25438 - DNA, 122 bp, Homo sapiens
  misc_feature (61)..(62): /note="This region represents a CpG dinucleotide"
  misc_feature (61)..(61): /note="Nucleotide may be methylated to form 5-methylcytosine"
attttaatttgagttcacctgtcatcctgggacctcagctgtaatctccttttccctgcacggctgactgagaatgcatttccttgtgctttactaggactggaaaaacccagttatgatca

SEQ ID NO: 25439 - DNA, 122 bp, Homo sapiens
  misc_feature (61)..(62): /note="This region represents a CpG dinucleotide"
  misc_feature (61)..(61): /note="Nucleotide may be methylated to form 5-methylcytosine"
gcttgggagggagggcccagcagcttgattggctgcagaagcccagagactagtgtctcccgtaagcccaggggctgttctgggggtgcagggcagagccaggaggaagcatagcacactgg

SEQ ID NO: 25440 - DNA, 122 bp, Homo sapiens
  misc_feature (61)..(62): /note="This region represents a CpG dinucleotide"
  misc_feature (61)..(61): /note="Nucleotide may be methylated to form 5-methylcytosine"
aacacatccttcttaatggtcaaatgtcagaagtatttgtttcaaaatgagtaacaagtacgtgcagtatcagcactctactggtaactgaagtcctgcattgtctaatacaatagctacta

SEQ ID NO: 25441 - DNA, 122 bp, Homo sapiens
  misc_feature (61)..(62): /note="This region represents a CpG dinucleotide"
  misc_feature (61)..(61): /note="Nucleotide may be methylated to form 5-methylcytosine"
gtgatatatataggactccacccaggtctatcctataatgaaagcctgacctacttttttcgaaaccatactctttcccaaggagtctgaatatcttaataggataggtggccagtgaaatt

SEQ ID NO: 25442 - DNA, 122 bp, Homo sapiens
  misc_feature (61)..(62): /note="This region represents a CpG dinucleotide"
  misc_feature (61)..(61): /note="Nucleotide may be methylated to form 5-methylcytosine"
ctttttaatttaaagcagggtctgcatatcatctgaagtaatctctctttggggacaccccgcatgtccagaactgccatccggtattgtggtggccctaaggctaggggtagcatggagac

SEQ ID NO: 25443 - DNA, 122 bp, Homo sapiens
  misc_feature (61)..(62): /note="This region represents a CpG dinucleotide"
  misc_feature (61)..(61): /note="Nucleotide may be methylated to form 5-methylcytosine"
aggcagccacgcctgtgctctttggactctggtgggtggggaggcttcctggtcactaaccgctcaacatcaacctggacctgcggcagtgtctgtgctgactggcgtccccagcttagcta

SEQ ID NO: 25444 - DNA, 122 bp, Homo sapiens
  misc_feature (61)..(62): /note="This region represents a CpG dinucleotide"
  misc_feature (61)..(61): /note="Nucleotide may be methylated to form 5-methylcytosine"
aaaggctggagcgcagacagggcaaatgaactcatgtgagcccttctgcaatcactgttacggctttgtatttattcatcttgcaccgcacttaaatgtgcaataaaaagcaaaaagtgtgc

SEQ ID NO: 25445 - DNA, 122 bp, Homo sapiens
  misc_feature (61)..(62): /note="This region represents a CpG dinucleotide"
  misc_feature (61)..(61): /note="Nucleotide may be methylated to form 5-methylcytosine"
tggcggcagagggaagagccccacgtgggccagctgtgagggtggcaagcagcagggaggcggaactcctaagccaggagccgaggcggggcctgacatgcactcctggccttggcgggcgc

SEQ ID NO: 25446 - DNA, 122 bp, Homo sapiens
  misc_feature (61)..(62): /note="This region represents a CpG dinucleotide"
  misc_feature (61)..(61): /note="Nucleotide may be methylated to form 5-methylcytosine"
ggccaaggatctgggccatttaagtggagtcttgaaggatgagtaggtgttaggcacagacgcacagaggcaggcaaagccacaggctgttggtttaggcaaaaattgagactggctggata

SEQ ID NO: 25447 - DNA, 122 bp, Homo sapiens
  misc_feature (61)..(62): /note="This region represents a CpG dinucleotide"
  misc_feature (61)..(61): /note="Nucleotide may be methylated to form 5-methylcytosine"
cttttccactaatgtcctttttctgttctaggatccaatccaggatactacattgcatcacgtttatttattcttttgcagtctgtgacagttgctcaatccttccttcttttctatgagca

SEQ ID NO: 25448 - DNA, 122 bp, Homo sapiens
  misc_feature (61)..(62): /note="This region represents a CpG dinucleotide"
  misc_feature (61)..(61): /note="Nucleotide may be methylated to form 5-methylcytosine"
agatgaatggctacacaccctcagcgtgctgaaggactaccgactgccacacaatacaaacgaacaaaccattgatgcgtgactcaacacacaccctcagcgtgctgaaggactaccgactg

SEQ ID NO: 25449 - DNA, 122 bp, Homo sapiens
  misc_feature (61)..(62): /note="This region represents a CpG dinucleotide"
  misc_feature (61)..(61): /note="Nucleotide may be methylated to form 5-methylcytosine"
atttgcctttttatttgattgactacatccaacttgtttagcaatctacccagctaaccgcgttcactcacgtttaactatatagcattgctctgtatttgtctttcctttcagactgagca

SEQ ID NO: 25450 - DNA, 122 bp, Homo sapiens
  misc_feature (61)..(62): /note="This region represents a CpG dinucleotide"
  misc_feature (61)..(61): /note="Nucleotide may be methylated to form 5-methylcytosine"
cttggttccagggagactccctcgatgctattccagcctttcagatggcctgttgtgtgacgctggctgtgtctcaatttccggtttgatcaatggttttacattacttcagccacaaaatc

SEQ ID NO: 25451 - DNA, 122 bp, Homo sapiens
  misc_feature (61)..(62): /note="This region represents a CpG dinucleotide"
  misc_feature (61)..(61): /note="Nucleotide may be methylated to form 5-methylcytosine"
aaaggggtcagggagagatccagcaggaaaggctcttctagtggaccaaccgcttacatccggactattactccacccagtcttccaaggagattctccagtgttagcctttcaggttccta

SEQ ID NO: 25452 - DNA, 122 bp, Homo sapiens
  misc_feature (61)..(62): /note="This region represents a CpG dinucleotide"
  misc_feature (61)..(61): /note="Nucleotide may be methylated to form 5-methylcytosine"
agggacttccttcctcatcttatttccttctctgggagcctctgggaggaagtacagcttcgggcgtttctcaacgtgtgacatagtcccattggcagaacatgacatgattttcgggatgt

SEQ ID NO: 25453 - DNA, 122 bp, Homo sapiens
  misc_feature (61)..(62): /note="This region represents a CpG dinucleotide"
  misc_feature (61)..(61): /note="Nucleotide may be methylated to form 5-methylcytosine"
caaactcacctttgtctgacttttttttttcatgacagaaccttgttgcctcatctccctcgtctgctaacacatatctcaaatcaatagctcgttgggaaaactagggtaattttgtgttt

SEQ ID NO: 25454 - DNA, 122 bp, Homo sapiens
  misc_feature (61)..(62): /note="This region represents a CpG dinucleotide"
  misc_feature (61)..(61): /note="Nucleotide may be methylated to form 5-methylcytosine"
aatggaacacaggaaataaccatatgtgaaccagagatctaaatcaaccaagttaacagacggggcctgacaggttccagataatctgtagagtcttaagttgtcttgaccatgagcaggtt

SEQ ID NO: 25455 - DNA, 122 bp, Homo sapiens
  misc_feature (61)..(62): /note="This region represents a CpG dinucleotide"
  misc_feature (61)..(61): /note="Nucleotide may be methylated to form 5-methylcytosine"
tacaggcaactcagcttgtaataagggtataactcagggtttgactccttagtcaattaacgtctccaaaagagtggtgttaaaataggcatatatgtgtgtgtgaatgcattatataaaaa

SEQ ID NO: 25456 - DNA, 122 bp, Homo sapiens
  misc_feature (61)..(62): /note="This region represents a CpG dinucleotide"
  misc_feature (61)..(61): /note="Nucleotide may be methylated to form 5-methylcytosine"
atgatgatgatgatgatgaccacaccagactcagtgccaggcactgctctaagtgctttacgggattatttcacttagtactcacaagaatgctatgggatagtgccaccactatcccaatt

SEQ ID NO: 25457 - DNA, 122 bp, Homo sapiens
  misc_feature (61)..(62): /note="This region represents a CpG dinucleotide"
  misc_feature (61)..(61): /note="Nucleotide may be methylated to form 5-methylcytosine"
tcggcaggttcacacgcttcagacgtgagtgtgagcaccctgcataatagggctttgtcccggctcctgggagccagcgtctgcagagccctggcggcggagggcggtggagggcggcggcc

SEQ ID NO: 25458 - DNA, 122 bp, Homo sapiens
  misc_feature (61)..(62): /note="This region represents a CpG dinucleotide"
  misc_feature (61)..(61): /note="Nucleotide may be methylated to form 5-methylcytosine"
gggtcaagtcaacttctgtggagtgatttgtgtgtttctcacgatatgcaaacagacatgcgtacaaaaagaaacatgtacatgctgcatagttagcatagaggaggaagtggttagtgctg

SEQ ID NO: 25459 - DNA, 122 bp, Homo sapiens
  misc_feature (61)..(62): /note="This region represents a CpG dinucleotide"
  misc_feature (61)..(61): /note="Nucleotide may be methylated to form 5-methylcytosine"
cgaattaagccactgaaccaagtactggcccagccacagaatggacttttatgtccagttcgctgacgtccctcatggatacagggtgctgaggtgggactcaagttatataggggagtgtt

SEQ ID NO: 25460 - DNA, 122 bp, Homo sapiens
  misc_feature (61)..(62): /note="This region represents a CpG dinucleotide"
  misc_feature (61)..(61): /note="Nucleotide may be methylated to form 5-methylcytosine"
aaaacatgaagctatacatacagtttctaaatttgttttgtataatgtcttcttcctccacgggtgtttcttcttgaagacggaattttgaaaagcttctgattcttctgttgcatcatcct

SEQ ID NO: 25461 - DNA, 122 bp, Homo sapiens
  misc_feature (61)..(62): /note="This region represents a CpG dinucleotide"
  misc_feature (61)..(61): /note="Nucleotide may be methylated to form 5-methylcytosine"
acacagaggaaactccccctcccagccctaccccaagcacatccttgcttctctcagtcacgccagttacaccaacaggggcagctctggggaggacatttggaaaatagtcaagagagggt

SEQ ID NO: 25462 - DNA, 122 bp, Homo sapiens
  misc_feature (61)..(62): /note="This region represents a CpG dinucleotide"
  misc_feature (61)..(61): /note="Nucleotide may be methylated to form 5-methylcytosine"
attttcacattctttcctgttaaacccacacagaacctcagaatccttcccaacccaaagcgcaaggcagccattggacatcaaatgtggttgaagtatttacaagataaaaaaaattattt

SEQ ID NO: 25463 - DNA, 122 bp, Homo sapiens
  misc_feature (61)..(62): /note="This region represents a CpG dinucleotide"
  misc_feature (61)..(61): /note="Nucleotide may be methylated to form 5-methylcytosine"
ctgtccctgtggattgggctcctctaggtgactcagatgtggaatcactcagttcttgcccgttcagcataatgtcctccaggttcatccaagtcgtagtgcgtgtgggtgctttattcctc

SEQ ID NO: 25464 - DNA, 122 bp, Homo sapiens
  misc_feature (61)..(62): /note="This region represents a CpG dinucleotide"
  misc_feature (61)..(61): /note="Nucleotide may be methylated to form 5-methylcytosine"
acatattttatgagaattaattcagaagtcacacagatgtggcctctaggggctggcagtcgtgtttgccccaaatatcactataaaggaattatatgacattaaaaataatgtattcttat

SEQ ID NO: 25465 - DNA, 122 bp, Homo sapiens
  misc_feature (61)..(62): /note="This region represents a CpG dinucleotide"
  misc_feature (61)..(61): /note="Nucleotide may be methylated to form 5-methylcytosine"
attgaaaatagtttttgctttcttggaaccgcttgttttattgccaacttaatttgactccgttggtcttgtgtgtgctcaggccagcccaaaaatctcaggaaaatgagggactgcttgat

SEQ ID NO: 25466 - DNA, 122 bp, Homo sapiens
  misc_feature (61)..(62): /note="This region represents a CpG dinucleotide"
  misc_feature (61)..(61): /note="Nucleotide may be methylated to form 5-methylcytosine"
attgagatttaatcccagatgtaaactgaggacacaggccatccccaatttcccactcttcgtgctgttcacttatacccttccctgcatagagctgcctctacctccctccagccctgaca

SEQ ID NO: 25467 - DNA, 122 bp, Homo sapiens
  misc_feature (61)..(62): /note="This region represents a CpG dinucleotide"
  misc_feature (61)..(61): /note="Nucleotide may be methylated to form 5-methylcytosine"
cagagacctggaccgaggcgtcccctcccctatccagctctggcctcggcctggcaaacccgggcaggagccccctcacctggttcacagcccctgagctgtgggagcacatggcggacacc

SEQ ID NO: 25468 - DNA, 122 bp, Homo sapiens
  misc_feature (61)..(62): /note="This region represents a CpG dinucleotide"
  misc_feature (61)..(61): /note="Nucleotide may be methylated to form 5-methylcytosine"
gggggcatgtttagggccaagaaaatgggccttggggctctggctgctcctcgttgcccacggtggttcagttctctctgtggggaggcagcgggagtgacagccaggacagatgaatgggg

SEQ ID NO: 25469 - DNA, 122 bp, Homo sapiens
  misc_feature (61)..(62): /note="This region represents a CpG dinucleotide"
  misc_feature (61)..(61): /note="Nucleotide may be methylated to form 5-methylcytosine"
ttaaattattgttaactgtagtcacctgctgtacaatagatcactaaaatttattcctcccgtccgactgaaattttgtaccctttgactaacatctcccctttccctgtctagctcctgtt

SEQ ID NO: 25470 - DNA, 122 bp, Homo sapiens
  misc_feature (61)..(62): /note="This region represents a CpG dinucleotide"
  misc_feature (61)..(61): /note="Nucleotide may be methylated to form 5-methylcytosine"
ttgcacggggaggggcggagcttacctaaaacaaacccacggttacagaaacaagagaagcggagctttgtgcttgcctaaagacgtacccacaactacatagataacggagagttatgcag

SEQ ID NO: 25471 - DNA, 122 bp, Homo sapiens
  misc_feature (61)..(62): /note="This region represents a CpG dinucleotide"
  misc_feature (61)..(61): /note="Nucleotide may be methylated to form 5-methylcytosine"
agaccttgccctttgctctatgtccaaaggtgagtctaaatgtccagccacacctgtatgcggtgatgcctgtgggtttgggtgtgggagcctgcaggtacaatgcctgtgaaaggtataat

SEQ ID NO: 25472 - DNA, 122 bp, Homo sapiens
  misc_feature (61)..(62): /note="This region represents a CpG dinucleotide"
  misc_feature (61)..(61): /note="Nucleotide may be methylated to form 5-methylcytosine"
acttcctggtcatcatgagagtttggccttggcactctgcttcaagctgtaactactgcccgtcatggaggcaaaggcaattcggatataggcaattagtaggctaattagtaggtgaacat

SEQ ID NO: 25473 - DNA, 122 bp, Homo sapiens
  misc_feature (61)..(62): /note="This region represents a CpG dinucleotide"
  misc_feature (61)..(61): /note="Nucleotide may be methylated to form 5-methylcytosine"
tgccagctggaactgtggagacgcacatttggtcaggcagcgttccttcccctttccccacgggtgtcctgcttgtatctcaggagattacacaggccattgcctgtcttccagctggctaa

SEQ ID NO: 25474 - DNA, 122 bp, Homo sapiens
  misc_feature (61)..(62): /note="This region represents a CpG dinucleotide"
  misc_feature (61)..(61): /note="Nucleotide may be methylated to form 5-methylcytosine"
ccaagttatagaatttggtgagaacccaggttgagggaaagaggaaaaaaagtaaaaccacgaattaaattaacagagtgctgctagtatgagagttggaatgagttaacagattcctaacc

SEQ ID NO: 25475 - DNA, 122 bp, Homo sapiens
  misc_feature (61)..(62): /note="This region represents a CpG dinucleotide"
  misc_feature (61)..(61): /note="Nucleotide may be methylated to form 5-methylcytosine"
aaaataggaaaaaaaaaattccacaaagtttcaaaaagcaaaacttcaatctgccctacacgaagcacttctttgaatccatgtgaatgaagtgatgtgtaggcctgtattatgtattctag

SEQ ID NO: 25476 - DNA, 122 bp, Homo sapiens
  misc_feature (61)..(62): /note="This region represents a CpG dinucleotide"
  misc_feature (61)..(61): /note="Nucleotide may be methylated to form 5-methylcytosine"
ctacaacctctctgggtcactgcctgccagctgaggtactcagagaaagttctgggcggccgcgcgtggtggctcacgtctgtagtcccagcactttgggaggccaaggtggatgggtcacg

SEQ ID NO: 25477 - DNA, 122 bp, Homo sapiens
  misc_feature (61)..(62): /note="This region represents a CpG dinucleotide"
  misc_feature (61)..(61): /note="Nucleotide may be methylated to form 5-methylcytosine"
gaactggctggcagtcactaagcaggctctggacagcatgaagccacgtgagattaatcacggggaggacctggccagccatctactgcaattgagagcacacctgacccgccagctgctgg

SEQ ID NO: 25478 - DNA, 122 bp, Homo sapiens
  misc_feature (61)..(62): /note="This region represents a CpG dinucleotide"
  misc_feature (61)..(61): /note="Nucleotide may be methylated to form 5-methylcytosine"
aactcaaacctcacagaaaccctttgaggtcggtactattaacaatccccattttacatacgagtaaactgaagcatggatagactaaagtaaagtgcctgaggtcaactagtgaggaggcg

SEQ ID NO: 25479 - DNA, 122 bp, Homo sapiens
  misc_feature (61)..(62): /note="This region represents a CpG dinucleotide"
  misc_feature (61)..(61): /note="Nucleotide may be methylated to form 5-methylcytosine"
aattattgtcttcagggagttctctagaggctgcgggcgtgcactgctcaaatccacttgcgtgagaagctcatgaggagggtagttagctgacagtttccagctgcggcccctctggctct

SEQ ID NO: 25480 - DNA, 122 bp, Homo sapiens
  misc_feature (61)..(62): /note="This region represents a CpG dinucleotide"
  misc_feature (61)..(61): /note="Nucleotide may be methylated to form 5-methylcytosine"
tcctgggcctgcccaggtatctgcaaactcccgggttccacagcaccttgtatttcatgacgatacaaaggagtagctattggggctctatctgctgagggagattcatcagacaccccgat

SEQ ID NO: 25481 - DNA, 122 bp, Homo sapiens
  misc_feature (61)..(62): /note="This region represents a CpG dinucleotide"
  misc_feature (61)..(61): /note="Nucleotide may be methylated to form 5-methylcytosine"
gctgtggcaatccagtttatgcagaacatactgatcccaggcttggtgtaagcgcatgctcgtcaatattttaaacccgtaaccggactttcttccgtggtatttttagaaataccagtaga

SEQ ID NO: 25482 - DNA, 122 bp, Homo sapiens
  misc_feature (61)..(62): /note="This region represents a CpG dinucleotide"
  misc_feature (61)..(61): /note="Nucleotide may be methylated to form 5-methylcytosine"
attcatccacttgtagttgtttgaaaacggacttgcaacactctcgttgctcaatcactgcgcagcataatctcagctctttgtgatgattcagaagccatttcaggatgttgccaggtgct

SEQ ID NO: 25483 - DNA, 122 bp, Homo sapiens
  misc_feature (61)..(62): /note="This region represents a CpG dinucleotide"
  misc_feature (61)..(61): /note="Nucleotide may be methylated to form 5-methylcytosine"
tttagctttccccagagcccccttataaaacattcagatatctactgcccaacagtgaatcgtggagctttttaataaaagataaatgagtacctgtttgggaatgtattttccattttccc

SEQ ID NO: 25484 - DNA, 122 bp, Homo sapiens
  misc_feature (61)..(62): /note="This region represents a CpG dinucleotide"
  misc_feature (61)..(61): /note="Nucleotide may be methylated to form 5-methylcytosine"
ccctgccccacacgggacgaagaacctgcagtgccatgttccgtgagccaagggtgaacacggtcgcacctcacgcagtcgtgcagcaggtcctggcagatgatgcatgtcagcgtctcctc

SEQ ID NO: 25485 - DNA, 122 bp, Homo sapiens
  misc_feature (61)..(62): /note="This region represents a CpG dinucleotide"
  misc_feature (61)..(61): /note="Nucleotide may be methylated to form 5-methylcytosine"
gcgtctttggcagtagtgggcgtgcttgcgggtccaggagggcccctctcccgcgaccgccgaccacgatgagagcgtgaagaccctctcgaaaggaagggctctgctctacacactggtgt

SEQ ID NO: 25486 - DNA, 122 bp, Homo sapiens
  misc_feature (61)..(62): /note="This region represents a CpG dinucleotide"
  misc_feature (61)..(61): /note="Nucleotide may be methylated to form 5-methylcytosine"
ttctaagagcttcacaacaagcctatgaaataggtgctaccactctttacagatgaagaacggatgcaagttcacacaagcagtgcatttcagagttgaaatcagaaactatatagtttaga

SEQ ID NO: 25487 - DNA, 122 bp, Homo sapiens
  misc_feature (61)..(62): /note="This region represents a CpG dinucleotide"
  misc_feature (61)..(61): /note="Nucleotide may be methylated to form 5-methylcytosine"
tggaatcagcatggtgacctccctatgcctatgctgagctggtttattgagtatgagctacgcggcaggccccacaacccagctgcctcactaagagagaattaaggagctatcctgaaggt

SEQ ID NO: 25488 - DNA, 122 bp, Homo sapiens
  misc_feature (61)..(62): /note="This region represents a CpG dinucleotide"
  misc_feature (61)..(61): /note="Nucleotide may be methylated to form 5-methylcytosine"
tgacgatggttggtatgagggagttatgaatggagtgactgggctttttcctgggaattacgttgagtctatcatgcattattctgagtaaagctcagcagggctgtgcttgcctcacagga

SEQ ID NO: 25489 - DNA, 122 bp, Homo sapiens
  misc_feature (61)..(62): /note="This region represents a CpG dinucleotide"
  misc_feature (61)..(61): /note="Nucleotide may be methylated to form 5-methylcytosine"
ttgcctactggattctaaggtacaaaacttctggaattaacatatcaacaccaaatgagacgtttatttattgccaaaagatattatcagaaatgccacagtctaacgagggagaaaaaaaa

SEQ ID NO: 25490 - DNA, 122 bp, Homo sapiens
  misc_feature (61)..(62): /note="This region represents a CpG dinucleotide"
  misc_feature (61)..(61): /note="Nucleotide may be methylated to form 5-methylcytosine"
ccggagctgttcctattcggccatcttggctcctcctctcataattatttcttgaatgtgcgttgcattgcagaatgacttatgtgggctgggtttaaaaaatttacaattttctttctttc

SEQ ID NO: 25491 - DNA, 122 bp, Homo sapiens
  misc_feature (61)..(62): /note="This region represents a CpG dinucleotide"
  misc_feature (61)..(61): /note="Nucleotide may be methylated to form 5-methylcytosine"
taaaacttttctttctttacttttcctttgtcactcaccttctggcagctgggcacctatcgctcatcatacacttgtccctcctcattctattcagcaagtaatcttgcctttctcttgga

SEQ ID NO: 25492 - DNA, 122 bp, Homo sapiens
  misc_feature (61)..(62): /note="This region represents a CpG dinucleotide"
  misc_feature (61)..(61): /note="Nucleotide may be methylated to form 5-methylcytosine"
cttaacaagattaaatgagaatccacccagggtattttgtgcagctctcagcagttgatacgtgttgatacaatgctatgtattgtcagggttgtgataagttgattaatattattaatata

SEQ ID NO: 25493 - DNA, 122 bp, Homo sapiens
  misc_feature (61)..(62): /note="This region represents a CpG dinucleotide"
  misc_feature (61)..(61): /note="Nucleotide may be methylated to form 5-methylcytosine"
taatatctgctttgcaaggttgttgtaagggctgaatgaagtaacgggaaatctggggtacgtgggagatagtaaatggcagccgtccctgtgcgccccctgacacctcccgcccggtccta

SEQ ID NO: 25494 - DNA, 122 bp, Homo sapiens
  misc_feature (61)..(62): /note="This region represents a CpG dinucleotide"
  misc_feature (61)..(61): /note="Nucleotide may be methylated to form 5-methylcytosine"
tggaatgcaatgtgtcaatattttgagaagtattttttttctttcaagattataagtatgcgaggagagatcgtcgcaaaagtacagttaaaaggtttcggctaagataagaactccttcac

SEQ ID NO: 25495 - DNA, 122 bp, Homo sapiens
  misc_feature (61)..(62): /note="This region represents a CpG dinucleotide"
  misc_feature (61)..(61): /note="Nucleotide may be methylated to form 5-methylcytosine"
ggatagtataggtaatttgaagtattagcacatttaagaaaggaaaaaactactttaaaacgtacagaggcacaaagtgagcagacagctactaaaatggcaggttatattccacagaaaag

SEQ ID NO: 25496 - DNA, 122 bp, Homo sapiens
  misc_feature (61)..(62): /note="This region represents a CpG dinucleotide"
  misc_feature (61)..(61): /note="Nucleotide may be methylated to form 5-methylcytosine"
ctccgttgcacgtaccctaacaaccacccaaggagggggtgttgtctttgtatcccagaacggttaagcagcttacttgggatcacacagtaagtagcgtggcaagaacttgcactcaagct

SEQ ID NO: 25497 - DNA, 122 bp, Homo sapiens
  misc_feature (61)..(62): /note="This region represents a CpG dinucleotide"
  misc_feature (61)..(61): /note="Nucleotide may be methylated to form 5-methylcytosine"
gcttctctttttgagacatttcaagtacttttctcagtattatgaggtagattacatgtacgaatgactcaacatttctgaggctgcttaagagtgttttctggtaagcctagccactacat

SEQ ID NO: 25498 - DNA, 122 bp, Homo sapiens
  misc_feature (61)..(62): /note="This region represents a CpG dinucleotide"
  misc_feature (61)..(61): /note="Nucleotide may be methylated to form 5-methylcytosine"
aattttggagaatattgggacaaattaatttcaacaaatatgttgcaggagaaaaggagacgagaaggacaagtggagaaaaccgtagattacaagagacttagttcaatatgaagcaacct

SEQ ID NO: 25499 - DNA, 122 bp, Homo sapiens
  misc_feature (61)..(62): /note="This region represents a CpG dinucleotide"
  misc_feature (61)..(61): /note="Nucleotide may be methylated to form 5-methylcytosine"
ctggagtaattcaagaatcctgagtgaggggggctctgctgtcttcaacatgtggctccacggtcagcctggaattgacattcatgttgcccaggagaatatggaagacctggcaggaggct

SEQ ID NO: 25500 - DNA, 122 bp, Homo sapiens
  misc_feature (61)..(62): /note="This region represents a CpG dinucleotide"
  misc_feature (61)..(61): /note="Nucleotide may be methylated to form 5-methylcytosine"
tccgggaggagaggcacagccagggcttcctctttagaatgtggtgtccttattactgcccgttttgcctcctcgtctgcctttgtttcctttggcctccagtgttcctgccttttgtgcac

SEQ ID NO: 25501 - DNA, 122 bp, Homo sapiens
  misc_feature (61)..(62): /note="This region represents a CpG dinucleotide"
  misc_feature (61)..(61): /note="Nucleotide may be methylated to form 5-methylcytosine"
gaggaaaaaaagcctgaccacatcctctatcaagtggtcagttagataaaatctattactcgtattgtttaaaatctctgacaataaaattggatggtatataactctaactttgaaataac

SEQ ID NO: 25502 - DNA, 122 bp, Homo sapiens
  misc_feature (61)..(62): /note="This region represents a CpG dinucleotide"
  misc_feature (61)..(61): /note="Nucleotide may be methylated to form 5-methylcytosine"
tgtatgactaaggagcatcaagtgactaccaaacccaaactccccatcaagcactgggtacgaactgtgagtaaaaacttcctggccaggggcagtggctcatgcctgtaatcccagcactt

SEQ ID NO: 25503 - DNA, 122 bp, Homo sapiens
  misc_feature (61)..(62): /note="This region represents a CpG dinucleotide"
  misc_feature (61)..(61): /note="Nucleotide may be methylated to form 5-methylcytosine"
cccagctgggacagggaatcacccaggacagagtccacctttgtccaggcaggaaccctgcgcctcaggccaccttgtctgtgcagacacctgttctggcctgcaccacggccccgtccact

SEQ ID NO: 25504 - DNA, 122 bp, Homo sapiens
  misc_feature (61)..(62): /note="This region represents a CpG dinucleotide"
  misc_feature (61)..(61): /note="Nucleotide may be methylated to form 5-methylcytosine"
aatgtgaccctgaggaggccgggccagggaagagagaatgcagctttattctttcagagccgaggaatgccctggaagggaaccgaagcctgagtattggggttaaactaggtgagaggaga

SEQ ID NO: 25505 - DNA, 122 bp, Homo sapiens
  misc_feature (61)..(62): /note="This region represents a CpG dinucleotide"
  misc_feature (61)..(61): /note="Nucleotide may be methylated to form 5-methylcytosine"
agtgagcctgccttctatcttaaaagccaaaaaggctaaataccgtctcaacctccctcgcgctaggggtgcaggcagtgacctaagtttagccaatccaagacactcactgaggactttga

SEQ ID NO: 25506 - DNA, 122 bp, Homo sapiens
  misc_feature (61)..(62): /note="This region represents a CpG dinucleotide"
  misc_feature (61)..(61): /note="Nucleotide may be methylated to form 5-methylcytosine"
ccagggctgctcagacagttccacagatgagtcaggatcccatactccttccagctttatcgcctgccaccgtaaggatgtggctctcgttagcattatctaagacggcagatggggctcta

SEQ ID NO: 25507 - DNA, 122 bp, Homo sapiens
  misc_feature (61)..(62): /note="This region represents a CpG dinucleotide"
  misc_feature (61)..(61): /note="Nucleotide may be methylated to form 5-methylcytosine"
gtggggtgagcccctgatgagtgtcagctgttactgtgtcgatcagtgcatctgactgttcgtatctgcctcttgcttagcctgtgtgacctcaggcacttgtgttctgggcctcagtcttc

SEQ ID NO: 25508 - DNA, 122 bp, Homo sapiens
  misc_feature (61)..(62): /note="This region represents a CpG dinucleotide"
  misc_feature (61)..(61): /note="Nucleotide may be methylated to form 5-methylcytosine"
cagagaaccccaacagcaagagagccccaggtgatgctggctctccacgtgcatccggcacgtttcactgcagccatcatcaacttggcaaagtaggcaagctcagcttgtggtttccattt

SEQ ID NO: 25509 - DNA, 122 bp, Homo sapiens
  misc_feature (61)..(62): /note="This region represents a CpG dinucleotide"
  misc_feature (61)..(61): /note="Nucleotide may be methylated to form 5-methylcytosine"
acagtgtctgggaagtaggtattcaatgaacaatagataatcttcataattacttaatttcgcctcacagcactgtgtgggaagtcagaattctccattttcaaggctagaagtgaggcaca

SEQ ID NO: 25510 - DNA, 122 bp, Homo sapiens
  misc_feature (61)..(62): /note="This region represents a CpG dinucleotide"
  misc_feature (61)..(61): /note="Nucleotide may be methylated to form 5-methylcytosine"
ggttaatccctctgtggaaacattgggttgaaagcccggaggaggtcaggggtctgattacggcttctgtttacatataaacttcctggtcctaggagacaatcggaggggtgggggaaggg

SEQ ID NO: 25511 - DNA, 122 bp, Homo sapiens
  misc_feature (61)..(62): /note="This region represents a CpG dinucleotide"
  misc_feature (61)..(61): /note="Nucleotide may be methylated to form 5-methylcytosine"
tattccaaagaaaactattattattatattttcttcagtgtctttttctatgttagttaccgtatacttactaaatatgcgtattcacaaatattgacttgattgaacttatcacctacctt

SEQ ID NO: 25512 - DNA, 122 bp, Homo sapiens
  misc_feature (61)..(62): /note="This region represents a CpG dinucleotide"
  misc_feature (61)..(61): /note="Nucleotide may be methylated to form 5-methylcytosine"
tggctgcgtgaacatcatgacaaagacctagatgaggcagcctactacacacctgtacaacgtgggactgtactgaatactgtaggcaattgtgacacaatggtaagtattaatatttgtgg

SEQ ID NO: 25513 - DNA, 122 bp, Homo sapiens
  misc_feature (61)..(62): /note="This region represents a CpG dinucleotide"
  misc_feature (61)..(61): /note="Nucleotide may be methylated to form 5-methylcytosine"
gccctgaactcagcagagagctgaggactggtttccctgggtgggactgacccacttcagcgggaagaagagggtatgtggactggaggttgtgccagcgtgggctgggatggggacagagg

SEQ ID NO: 25514 - DNA, 122 bp, Homo sapiens
  misc_feature (61)..(62): /note="This region represents a CpG dinucleotide"
  misc_feature (61)..(61): /note="Nucleotide may be methylated to form 5-methylcytosine"
acctgccctcttttctgtcacggtacatacaaggaaatacattccacaaaaccacatagtcgctgtcatttatcacaagtgtttccccaaattacaaagtcttaatacttctttgtctccta

SEQ ID NO: 25515 - DNA, 122 bp, Homo sapiens
  misc_feature (61)..(62): /note="This region represents a CpG dinucleotide"
  misc_feature (61)..(61): /note="Nucleotide may be methylated to form 5-methylcytosine"
tcccatggcctttcatctgtgtgtgtgcatccctaatgtctcttcccctttttataaggacgtgagtcctatccaattagggtcccacccttatgagctcattcagccttaattacttcttc

SEQ ID NO: 25516 - DNA, 122 bp, Homo sapiens
  misc_feature (61)..(62): /note="This region represents a CpG dinucleotide"
  misc_feature (61)..(61): /note="Nucleotide may be methylated to form 5-methylcytosine"
ctttgtttgctgtgattcctggtggaagaatgctggttctagctttggctctgccatccccgtgtagtgtggcaggaagcaatgcatttccctttctgggcctcgtctcctgccctgtgcac

SEQ ID NO: 25517 - DNA, 122 bp, Homo sapiens
  misc_feature (61)..(62): /note="This region represents a CpG dinucleotide"
  misc_feature (61)..(61): /note="Nucleotide may be methylated to form 5-methylcytosine"
tactttttttcactttctgctatcagtaaattctttttgaaactgcaaagccgcttgtttcggaaacaaattgaggaaaaatctggacagttcttcctcggcacaagagagggagagagatc

SEQ ID NO: 25518 - DNA, 122 bp, Homo sapiens
  misc_feature (61)..(62): /note="This region represents a CpG dinucleotide"
  misc_feature (61)..(61): /note="Nucleotide may be methylated to form 5-methylcytosine"
ggggattaaataagatcacccctaggaggcacttagcactgtctctgcaacatgagaaaacgtcaacattgtcacctcttctatttttctccaaaaatagggagactgatgtgatgattaac

SEQ ID NO: 25519 - DNA, 122 bp, Homo sapiens
  misc_feature (61)..(62): /note="This region represents a CpG dinucleotide"
  misc_feature (61)..(61): /note="Nucleotide may be methylated to form 5-methylcytosine"
ctcaagcaatccgccctcctcagcctcccaaagtgctgagattacaggcgtgagccaccacgcctggcctgtgcacacattacttttgcaattagacaaaatgttcagtggttgcctagatt

SEQ ID NO: 25520 - DNA, 122 bp, Homo sapiens
  misc_feature (61)..(62): /note="This region represents a CpG dinucleotide"
  misc_feature (61)..(61): /note="Nucleotide may be methylated to form 5-methylcytosine"
gtctaatgaacatggcaggtatttgggactaagagcagaattatggtgcaagagcttacacgtagcatgggagtccaacagatgcagagtcagttccctgactcaccagctgaccttgggca

SEQ ID NO: 25521 - DNA, 122 bp, Homo sapiens
  misc_feature (61)..(62): /note="This region represents a CpG dinucleotide"
  misc_feature (61)..(61): /note="Nucleotide may be methylated to form 5-methylcytosine"
acgtgatgtgagaacctgaggagctcggcgttcacagcatcaggtaagcctcagtgcagacggcatgtggcagagctgagaatgcacagaatgcaaattcgctgcttcagagctaaacctcc

SEQ ID NO: 25522 - DNA, 122 bp, Homo sapiens
  misc_feature (61)..(62): /note="This region represents a CpG dinucleotide"
  misc_feature (61)..(61): /note="Nucleotide may be methylated to form 5-methylcytosine"
cttgttccctgccgtcctcctagtacctacctcagtgcttggagaatgcatgaatgtatgcgtgccccagtcctccctgccatccacacatcctgcccacattccccagagcagctttgaca

SEQ ID NO: 25523 - DNA, 122 bp, Homo sapiens
  misc_feature (61)..(62): /note="This region represents a CpG dinucleotide"
  misc_feature (61)..(61): /note="Nucleotide may be methylated to form 5-methylcytosine"
cgatggttttgtcaacagaaagcagttctttcttggcaggtggccatggggtgcagccgccgcacaggctctccagggccttgtatccccaagctctgctagcagagttcccttagcaggca

SEQ ID NO: 25524 - DNA, 122 bp, Homo sapiens
  misc_feature (61)..(62): /note="This region represents a CpG dinucleotide"
  misc_feature (61)..(61): /note="Nucleotide may be methylated to form 5-methylcytosine"
ggtgtctcctggctcagaccctgatgtggccctgttaccctggtgcccgacggaaataggcggccggcagcctgccagagtggggcagtccagccaagagcaagggtagggtggggtgagga

SEQ ID NO: 25525 - DNA, 122 bp, Homo sapiens
  misc_feature (61)..(62): /note="This region represents a CpG dinucleotide"
  misc_feature (61)..(61): /note="Nucleotide may be methylated to form 5-methylcytosine"
ctgatagattgagaacaagcttttaaagggcttaatcactttgtgtgcaaatatatcctgcgaaatacaagtgagtgtgacaggtttggcggaacattttgttagcagctagcttgtgctcc

SEQ ID NO: 25526 - DNA, 122 bp, Homo sapiens
  misc_feature (61)..(62): /note="This region represents a CpG dinucleotide"
  misc_feature (61)..(61): /note="Nucleotide may be methylated to form 5-methylcytosine"
ctaatgaataattaattcattcagctattattttgtgcctattctatggtaggcactctacgagacacatgaggaacaaagatatgtaagacaaggtctctgtattttgaggaactcttatt

SEQ ID NO: 25527 - DNA, 122 bp, Homo sapiens
  misc_feature (61)..(62): /note="This region represents a CpG dinucleotide"
  misc_feature (61)..(61): /note="Nucleotide may be methylated to form 5-methylcytosine"
atccctgcccagtttactgagtgccttttccatttgcatccactgtccattaggccaaggcgtttgaagtgtttctgtacagcaggtacatttaagactctccaggaagaaagggggaagaa

SEQ ID NO: 25528 - DNA, 122 bp, Homo sapiens
  misc_feature (61)..(62): /note="This region represents a CpG dinucleotide"
  misc_feature (61)..(61): /note="Nucleotide may be methylated to form 5-methylcytosine"
ggcccagaccttgagtcctcagggacactgtgttgctgagcagggcagctctggagtggccgtggaggggagggagtgatggtttctagtggagaccagggaaggcttcttggaggaggcat

SEQ ID NO: 25529 - DNA, 122 bp, Homo sapiens
  misc_feature (61)..(62): /note="This region represents a CpG dinucleotide"
  misc_feature (61)..(61): /note="Nucleotide may be methylated to form 5-methylcytosine"
gtctcttcccttctggctgtaagagacttagcttgcctctgagctccttctctttggggtcgcccagggctctgccaaatgcacaaaaaaccccccccctttttttggtgggggaggtcatg

SEQ ID NO: 25530 - DNA, 122 bp, Homo sapiens
  misc_feature (61)..(62): /note="This region represents a CpG dinucleotide"
  misc_feature (61)..(61): /note="Nucleotide may be methylated to form 5-methylcytosine"
gctggctttaaaataggaagttatcctggattatcctataatcacaagaacccttaaaagcggaagagggaattggagaaccagagaaactgcagcatgggaagggcttggcttggtattgc

SEQ ID NO: 25531 - DNA, 122 bp, Homo sapiens
  misc_feature (61)..(62): /note="This region represents a CpG dinucleotide"
  misc_feature (61)..(61): /note="Nucleotide may be methylated to form 5-methylcytosine"
gatcatgcaaaggaagtagagtaataaaggacctatgagattcattgacattgtggttgtcgaaggaggcaccttctagccagaaaatggaagatttctttccagtgattcatatgtattac

SEQ ID NO: 25532 - DNA, 122 bp, Homo sapiens
  misc_feature (61)..(62): /note="This region represents a CpG dinucleotide"
  misc_feature (61)..(61): /note="Nucleotide may be methylated to form 5-methylcytosine"
tcctttagtttatcctgtccccaaatcctagggtgtttgtgacaatcaaataagaagttacgtaagtagatagaaacttgtcagcccagtatgggccaatgcaggaagttttggacttggaa

SEQ ID NO: 25533 - DNA, 122 bp, Homo sapiens
  misc_feature (61)..(62): /note="This region represents a CpG dinucleotide"
  misc_feature (61)..(61): /note="Nucleotide may be methylated to form 5-methylcytosine"
ttaattctactccagcttccctgaaaaataggacttgagcccaattccttgcaggcttcacggccagcagagcacagtggtgtatcaccctgctggaagctatagttgatgactttatggct

SEQ ID NO: 25534 - DNA, 122 bp, Homo sapiens
  misc_feature (61)..(62): /note="This region represents a CpG dinucleotide"
  misc_feature (61)..(61): /note="Nucleotide may be methylated to form 5-methylcytosine"
cccagggagcagcctagagaaggaaagaaactgtttctcgaatgctagctgtaggtagggcgttcccaggtgtgactgaaatgacagtctggctcagagcacactgccttttcttcccacct

SEQ ID NO: 25535 - DNA, 122 bp, Homo sapiens
  misc_feature (61)..(62): /note="This region represents a CpG dinucleotide"
  misc_feature (61)..(61): /note="Nucleotide may be methylated to form 5-methylcytosine"
ggtggtgccagactggggttcagatccctgccacatttacatgggctttgtgacacacgacgggtcatctaatgtctctgaactgcagcttctgcctatgtagaatgggagcagtaacacag

SEQ ID NO: 25536 - DNA, 122 bp, Homo sapiens
  misc_feature (61)..(62): /note="This region represents a CpG dinucleotide"
  misc_feature (61)..(61): /note="Nucleotide may be methylated to form 5-methylcytosine"
cccctcattaactgggatgtcttctcggcccaggacctcctggccagagcatctggccggcgccccagccagccccacaccaggccccgtggttccaggagcccggccaggctggggaagag

SEQ ID NO: 25537 - DNA, 122 bp, Homo sapiens
  misc_feature (61)..(62): /note="This region represents a CpG dinucleotide"
  misc_feature (61)..(61): /note="Nucleotide may be methylated to form 5-methylcytosine"
ctggcacatggcattcaagcaatcatgcatttagtaaatatttattgagcacctcgtatacgccaggctgtgttgtaaacacagagcctcaccaaccaaagggagaagccagattccccctt

SEQ ID NO: 25538 - DNA, 122 bp, Homo sapiens
  misc_feature (61)..(62): /note="This region represents a CpG dinucleotide"
  misc_feature (61)..(61): /note="Nucleotide may be methylated to form 5-methylcytosine"
ggtgtttttaaagagcagtctgatcctggttcagctctgtcaccggtttggaaatactgccgtgcagtcggtgggtcattgcctctcagtttcttcctagcaatttgctggtgtctgctacc

SEQ ID NO: 25539 - DNA, 122 bp, Homo sapiens
  misc_feature (61)..(62): /note="This region represents a CpG dinucleotide"
  misc_feature (61)..(61): /note="Nucleotide may be methylated to form 5-methylcytosine"
ggcctgaatgacgtgacctttcaaccatctttctaaagaatattgtgaattacaccccttcgcatgtaagaaaagtttctgctggtatctaaggaatattgtctcatgggacctcagctgag

SEQ ID NO: 25540 - DNA, 122 bp, Homo sapiens
  misc_feature (61)..(62): /note="This region represents a CpG dinucleotide"
  misc_feature (61)..(61): /note="Nucleotide may be methylated to form 5-methylcytosine"
cgaatttctagctcctgcgtctccattgccggtcctaaaagtcgccgtttcactaagcttcggaacctgactccgagaaatctattcgttcgtcccaagatctcagccagaaagagaaatcc

SEQ ID NO: 25541 - DNA, 122 bp, Homo sapiens
  misc_feature (61)..(62): /note="This region represents a CpG dinucleotide"
  misc_feature (61)..(61): /note="Nucleotide may be methylated to form 5-methylcytosine"
aatatggctcatctttgttaaaaagtatatttaattttttacatttaatatcattctaaacgggtaaggaaggtgaaagattgagttggataaaactgttagaaagtaaatatgataacaga

SEQ ID NO: 25542 - DNA, 122 bp, Homo sapiens
  misc_feature (61)..(62): /note="This region represents a CpG dinucleotide"
  misc_feature (61)..(61): /note="Nucleotide may be methylated to form 5-methylcytosine"
tgtaatactctaaattatagttcaataatttttttcaattctttttcctggcctatcctccgcctccatccaggtgtctcaccttctactcaccatacaagctatctactaaatttcacctg

SEQ ID NO: 25543 - DNA, 122 bp, Homo sapiens
  misc_feature (61)..(62): /note="This region represents a CpG dinucleotide"
  misc_feature (61)..(61): /note="Nucleotide may be methylated to form 5-methylcytosine"
tccataaactacagatctgtacctggtagccacccaccctctgtctgtgctcactcaccgcggctctgagcacaggcctctatgtcaacagccaaagccacaagccacacctgtggaaccca

SEQ ID NO: 25544 - DNA, 122 bp, Homo sapiens
  misc_feature (61)..(62): /note="This region represents a CpG dinucleotide"
  misc_feature (61)..(61): /note="Nucleotide may be methylated to form 5-methylcytosine"
aaagcctgaaaagcctgcctcagaggatgtgaaagctctcgtttagttcagtgtggtcctcgggaaagctcttctgctcaccgcaagttggctggtttccaaagctgtgcgtgccagcttgg

SEQ ID NO: 25545 - DNA, 122 bp, Homo sapiens
  misc_feature (61)..(62): /note="This region represents a CpG dinucleotide"
  misc_feature (61)..(61): /note="Nucleotide may be methylated to form 5-methylcytosine"
ggtttactttaaaccaccaggttctcaattctgtgattcatgtaagatattatttctttccgtctctgatctagtttccaaagaatattaatctgctatgcctgatctttactactaggtgt

SEQ ID NO: 25546 - DNA, 122 bp, Homo sapiens
  misc_feature (61)..(62): /note="This region represents a CpG dinucleotide"
  misc_feature (61)..(61): /note="Nucleotide may be methylated to form 5-methylcytosine"
agcctccgtgtgaagtgcagcggcaggcagttccagctcccccacccacagtaaatgccacggaaccttagcattacagacttgctcctgctaggttggtggtaatatctgcaattctttat

SEQ ID NO: 25547 - DNA, 122 bp, Homo sapiens
  misc_feature (61)..(62): /note="This region represents a CpG dinucleotide"
  misc_feature (61)..(61): /note="Nucleotide may be methylated to form 5-methylcytosine"
catgccagagtccctgtgagaacgctggaccctcgattactaacatacgtttcaaaacctcggaggtattgaactagcagtgatggaagaacaagcaacagaagcaacaggatcccagctgc

SEQ ID NO: 25548 - DNA, 122 bp, Homo sapiens
  misc_feature (61)..(62): /note="This region represents a CpG dinucleotide"
  misc_feature (61)..(61): /note="Nucleotide may be methylated to form 5-methylcytosine"
ctagtctggggcggggacttgggagcgcctaaaacttgcgaggagggcggggccgcagaccggtcctttaaaggttggaagtggccccgaggcgccggcagccctgggcggtcccgggaatc

SEQ ID NO: 25549 - DNA, 122 bp, Homo sapiens
  misc_feature (61)..(62): /note="This region represents a CpG dinucleotide"
  misc_feature (61)..(61): /note="Nucleotide may be methylated to form 5-methylcytosine"
ccgggggctgctgagaaaggccctgctccctggaggcaacaggtgctgagagacctggaacgaaaaacggtcacagacaacccaccagcctttcaaagtcaacgtggtaggtggcgataatc

SEQ ID NO: 25550 - DNA, 122 bp, Homo sapiens
  misc_feature (61)..(62): /note="This region represents a CpG dinucleotide"
  misc_feature (61)..(61): /note="Nucleotide may be methylated to form 5-methylcytosine"
atccagtctcacactgacataataggaatgttaaaaggatcttatagagaggaactggctcgtttcttggtgtactagtcagggttctccagagaattagaaccaataggatatagatagag

SEQ ID NO: 25551 - DNA, 122 bp, Homo sapiens
  misc_feature (61)..(62): /note="This region represents a CpG dinucleotide"
  misc_feature (61)..(61): /note="Nucleotide may be methylated to form 5-methylcytosine"
aagggatgagggagtaggaaagaaacttcaagatcaaccactggccctcacaccgagctgcgcacaccccaaggccaagggaggctggaaacccttgtcatccttgggaaatgggggagggc

SEQ ID NO: 25552 - DNA, 122 bp, Homo sapiens
  misc_feature (61)..(62): /note="This region represents a CpG dinucleotide"
  misc_feature (61)..(61): /note="Nucleotide may be methylated to form 5-methylcytosine"
ataagagacagagaaaagataaccttaaagctaagcagggcagaagtaagagagatggaacgagggagaaagagacctcaaagagaaatcactaaataatggctttgaaaatctactcagtt

SEQ ID NO: 25553 - DNA, 122 bp, Homo sapiens
  misc_feature (61)..(62): /note="This region represents a CpG dinucleotide"
  misc_feature (61)..(61): /note="Nucleotide may be methylated to form 5-methylcytosine"
tgggacgtcaggcgcgcgccgccacgcccggctaattttttgtgttttttgtagagggggcgtcttcccgcgttggccaggctgttctcggactgctggcttctgctgggattacaggcctg

SEQ ID NO: 25554 - DNA, 122 bp, Homo sapiens
  misc_feature (61)..(62): /note="This region represents a CpG dinucleotide"
  misc_feature (61)..(61): /note="Nucleotide may be methylated to form 5-methylcytosine"
gagtagatcgggcttgtgacacctgtgtgtgtaccttcactcaatattatctttctggaacggagcagaaaaaaataaacttcaattaggtgaaagtttgtgtatttgctcttctcttagca

SEQ ID NO: 25555 - DNA, 122 bp, Homo sapiens
  misc_feature (61)..(62): /note="This region represents a CpG dinucleotide"
  misc_feature (61)..(61): /note="Nucleotide may be methylated to form 5-methylcytosine"
gggcgtggacccacagtgcccagaccctacttgtcctagaaggagtggcctgggaggccccgcctccgccctcactggccgccgttggctcctcccactcgtgtcttgacagcttattctcg

SEQ ID NO: 25556 - DNA, 122 bp, Homo sapiens
  misc_feature (61)..(62): /note="This region represents a CpG dinucleotide"
  misc_feature (61)..(61): /note="Nucleotide may be methylated to form 5-methylcytosine"
atgaataatcaaacttactgcaggaagcaaatgaagtgcctctgtaagatatactcaaaacgtctgctgtgcaaatgatgaagctgatgaaattgagtctatgttgaaatattttatttata

SEQ ID NO: 25557 - DNA, 122 bp, Homo sapiens
  misc_feature (61)..(62): /note="This region represents a CpG dinucleotide"
  misc_feature (61)..(61): /note="Nucleotide may be methylated to form 5-methylcytosine"
cagataaacaatgtaagaaactgaaatggaccacgatcctagaaggatgtgatcagaggacgttgggatttccaatggaaaggtttggatgtgctgggacacaccaccttctcccctgtgcc

SEQ ID NO: 25558 - DNA, 122 bp, Homo sapiens
  misc_feature (61)..(62): /note="This region represents a CpG dinucleotide"
  misc_feature (61)..(61): /note="Nucleotide may be methylated to form 5-methylcytosine"
catttttccgtatcactagttcaggcaacaatgctactgatcagctctatgtcctagcttcgtgtgaccttgagcaagttattcagcctcttgaggactcactttcctggtgagtccagtag

SEQ ID NO: 25559 - DNA, 122 bp, Homo sapiens
  misc_feature (61)..(62): /note="This region represents a CpG dinucleotide"
  misc_feature (61)..(61): /note="Nucleotide may be methylated to form 5-methylcytosine"
agacattatgtcattcttctgattgtgaatttaattaacatcctgattcctggatggtatcgtgggcctattgaatgagaatctctggagctagaactggaaatctgcattttaacaaataa

SEQ ID NO: 25560 - DNA, 122 bp, Homo sapiens
  misc_feature (61)..(62): /note="This region represents a CpG dinucleotide"
  misc_feature (61)..(61): /note="Nucleotide may be methylated to form 5-methylcytosine"
caattcttacttggcccagtgccttgaatgtggctatgtatgcaataaatatttgtcgaacgaacgattaaacgaatagtagtgttggcaggcagtatagtattatgtaaagagcatgcaca

SEQ ID NO: 25561 - DNA, 122 bp, Homo sapiens
  misc_feature (61)..(62): /note="This region represents a CpG dinucleotide"
  misc_feature (61)..(61): /note="Nucleotide may be methylated to form 5-methylcytosine"
tggtctacagcattatttcactttcatttgtaatcagacttcaccccgaagcaaatgcatcgtttacagggaaagaatattctgtggtacaatgaattctcgtccctcctgcccagtcacta

SEQ ID NO: 25562 - DNA, 122 bp, Homo sapiens
  misc_feature (61)..(62): /note="This region represents a CpG dinucleotide"
  misc_feature (61)..(61): /note="Nucleotide may be methylated to form 5-methylcytosine"
gattcatattcgaaggaccggggaccttggatagtaaaaccagtggcatcttcaagggggcggggcgtctacctgatcaacaatgtaagtatgcagcagatggcaaacctctctcctcactt

SEQ ID NO: 25563 - DNA, 122 bp, Homo sapiens
  misc_feature (61)..(62): /note="This region represents a CpG dinucleotide"
  misc_feature (61)..(61): /note="Nucleotide may be methylated to form 5-methylcytosine"
aaagaaaggaaatggaaacatgaattcataaggctgcacctttctctctctgcaaattcccgagggaaggtgatccattagaaacagaggcagacatgccaaaagcaataaaggggcaggct

SEQ ID NO: 25564 - DNA, 122 bp, Homo sapiens
  misc_feature (61)..(62): /note="This region represents a CpG dinucleotide"
  misc_feature (61)..(61): /note="Nucleotide may be methylated to form 5-methylcytosine"
gtggactatttaaagacagaagtgcaggacttgtatcaacataactgcttccagtagatgcggcagggttcaaggagtcctgcctagtggaaacaagttcttggtctgattttaacctgcca

SEQ ID NO: 25565 - DNA, 122 bp, Homo sapiens
  misc_feature (61)..(62): /note="This region represents a CpG dinucleotide"
  misc_feature (61)..(61): /note="Nucleotide may be methylated to form 5-methylcytosine"
tctaagaagggaacccccaaatttaattaaagccttaagcacaattaattaaaagtgaaacgtaattgtacaagcagttaatcacccaccatagggcatgattaacaaagcaacctttccct

SEQ ID NO: 25566 - DNA, 122 bp, Homo sapiens
  misc_feature (61)..(62): /note="This region represents a CpG dinucleotide"
  misc_feature (61)..(61): /note="Nucleotide may be methylated to form 5-methylcytosine"
tatcgaatgatgttaaaattacatgaaagacatattctgtgtttaaacaaaatccccaagcgtctcctccctgcttctccacaaacaaaaattattttttgacattttctttaaggttttat

SEQ ID NO: 25567 - DNA, 122 bp, Homo sapiens
  misc_feature (61)..(62): /note="This region represents a CpG dinucleotide"
  misc_feature (61)..(61): /note="Nucleotide may be methylated to form 5-methylcytosine"
cagaagagcttcctggggcctcggaaggattactgggactttctctgcactgccctacgacggcagcggggaaacatggagccaatccactttgtccgttcccaggacaaggtatccagggc

SEQ ID NO: 25568 - DNA, 122 bp, Homo sapiens
  misc_feature (61)..(62): /note="This region represents a CpG dinucleotide"
  misc_feature (61)..(61): /note="Nucleotide may be methylated to form 5-methylcytosine"
gggagtttctctctcttcttacagtcttcttatttgaaaatactgcagctgtacaatggccgtatattgtatgtaatacaaggccactataaaggttttagaggacagaaaaataagttata

SEQ ID NO: 25569 - DNA, 122 bp, Homo sapiens
  misc_feature (61)..(62): /note="This region represents a CpG dinucleotide"
  misc_feature (61)..(61): /note="Nucleotide may be methylated to form 5-methylcytosine"
acaggcgtgagccaccgcgcctggcatcagtgcatactttttgaagtgattccaagttatcgcccgcttttttcgtgtaacatataaatacatctctgtatctagaaatatccaatgcataa

SEQ ID NO: 25570 - DNA, 122 bp, Homo sapiens
  misc_feature (61)..(62): /note="This region represents a CpG dinucleotide"
  misc_feature (61)..(61): /note="Nucleotide may be methylated to form 5-methylcytosine"
gtcctgtgcattcaaagcttttgttgccaatggaagcacaggtgtgtgcacctaagtcaacgttcagaggatatttgaaaaagtggtcttacctagaactcctggataaaataagcatcacg

SEQ ID NO: 25571 - DNA, 122 bp, Homo sapiens
  misc_feature (61)..(62): /note="This region represents a CpG dinucleotide"
  misc_feature (61)..(61): /note="Nucleotide may be methylated to form 5-methylcytosine"
caatgcaatgtcaaaaaaaaaacaaaaaaacctcctaagttatagatggctcaacagtaacgtacatctgattgccttgagctttgcatgggattaagaaaagagggttagaattaagtgat

SEQ ID NO: 25572 - DNA, 122 bp, Homo sapiens
  misc_feature (61)..(62): /note="This region represents a CpG dinucleotide"
  misc_feature (61)..(61): /note="Nucleotide may be methylated to form 5-methylcytosine"
ttttctctatgacactatcatttcctttagggcaggcactttgtctttcatttctgtgaccgttacctgtctggcccatagtaaccaatcaaggaatgggtctttgatttagtgtatgaata

SEQ ID NO: 25573 - DNA, 122 bp, Homo sapiens
  misc_feature (61)..(62): /note="This region represents a CpG dinucleotide"
  misc_feature (61)..(61): /note="Nucleotide may be methylated to form 5-methylcytosine"
ggagaggcagagtgtccttcagtcttgacgcctgggagctgtggatgcctcattgttgctcgtcttgcgacataaaataacagcatgctagtggccaaaaggcatgaagtgttcaaacttat

SEQ ID NO: 25574 - DNA, 122 bp, Homo sapiens
  misc_feature (61)..(62): /note="This region represents a CpG dinucleotide"
  misc_feature (61)..(61): /note="Nucleotide may be methylated to form 5-methylcytosine"
acgcaggggagagagggtggagacggggtctgcagggcaggcttgagagctccagcacagcgttgtctagaatcaagatgctaggacttagtagtaagtgtcaccttagtgttgtcttgatg

SEQ ID NO: 25575 - DNA, 122 bp, Homo sapiens
  misc_feature (61)..(62): /note="This region represents a CpG dinucleotide"
  misc_feature (61)..(61): /note="Nucleotide may be methylated to form 5-methylcytosine"
ccatgttcacagccctaataataattctgatcacgccacttcagcatcttgtgtcaaagtcgaaactggcttccccgcccccttcaatctgaaagctgccaagtcctcacacacttcacatt

SEQ ID NO: 25576 - DNA, 122 bp, Homo sapiens
  misc_feature (61)..(62): /note="This region represents a CpG dinucleotide"
  misc_feature (61)..(61): /note="Nucleotide may be methylated to form 5-methylcytosine"
ctttggtcctcagaagtatcaggtattagtctctgccggaagcaaagcattggtcacttccgtcagaggtgaatgtcttggctgtctataattcctcagtcaggtgctttctgggcatgtgt

SEQ ID NO: 25577 - DNA, 122 bp, Homo sapiens
  misc_feature (61)..(62): /note="This region represents a CpG dinucleotide"
  misc_feature (61)..(61): /note="Nucleotide may be methylated to form 5-methylcytosine"
caaatagcatctgctgtgtcagctaaacacccacagcatttctttttactggctatcatacgtgtgcaatattgagccctccctcctccttcttatttggtttccactttcagtaaacctta

SEQ ID NO: 25578 - DNA, 122 bp, Homo sapiens
  misc_feature (61)..(62): /note="This region represents a CpG dinucleotide"
  misc_feature (61)..(61): /note="Nucleotide may be methylated to form 5-methylcytosine"
gacatcttctatcaagctcctaatcaggccctcaatcaagttccatgttctctttggcggcgtattggaagcgtgaagtttaggcccacactttgctatccacaagctgacagagaggcaac

SEQ ID NO: 25579 - DNA, 122 bp, Homo sapiens
  misc_feature (61)..(62): /note="This region represents a CpG dinucleotide"
  misc_feature (61)..(61): /note="Nucleotide may be methylated to form 5-methylcytosine"
gtctgaaaattgtagtgtccgttttctctttagccataaagttttgcttaaatgctgagtcgcgttttaatgctctactagatgtacatataagaatactaaatggagggaaagtaatttct

SEQ ID NO: 25580 - DNA, 122 bp, Homo sapiens
  misc_feature (61)..(62): /note="This region represents a CpG dinucleotide"
  misc_feature (61)..(61): /note="Nucleotide may be methylated to form 5-methylcytosine"
taatgtttaatgtagccatgcctagactgagattctttttcttttgaaataagtagcctgcggaattaatgcatatttttgttggcactgcatcaaaattgacatcaccggaaataatgtat

SEQ ID NO: 25581 - DNA, 122 bp, Homo sapiens
  misc_feature (61)..(62): /note="This region represents a CpG dinucleotide"
  misc_feature (61)..(61): /note="Nucleotide may be methylated to form 5-methylcytosine"
aatcaacttgaatgacagtctaggctgcaaggacttcaagccctagtgctgtgctgggctcggaactagtggacttggagagcacatgccccaatgagacatcagccagggcagctaaagga

SEQ ID NO: 25582 - DNA, 122 bp, Homo sapiens
  misc_feature (61)..(62): /note="This region represents a CpG dinucleotide"
  misc_feature (61)..(61): /note="Nucleotide may be methylated to form 5-methylcytosine"
ttcaggcctcacagtgaaatcaggacaagatattcctgcgtagtcctcattcccttgctgcgcttgtcagggaagtggagcacagggtaaagtttgaacttgaagttgggcagatctggatt

SEQ ID NO: 25583 - DNA, 122 bp, Homo sapiens
  misc_feature (61)..(62): /note="This region represents a CpG dinucleotide"
  misc_feature (61)..(61): /note="Nucleotide may be methylated to form 5-methylcytosine"
tgctttctggtttctctggcacatagctgacatcacagggcttactccttgtgatttaggcggcagctgcaggaacagccttctggaaagataaaaccagcatcatttgtctcacctctcct

SEQ ID NO: 25584 - DNA, 122 bp, Homo sapiens
  misc_feature (61)..(62): /note="This region represents a CpG dinucleotide"
  misc_feature (61)..(61): /note="Nucleotide may be methylated to form 5-methylcytosine"
gagaaaactgcctcagtttcccaaagacacatttactgggtgttaggcttggtcctaggccgtacagctagcccttggtcaaagatcttacaaccaattggagagagtgttaactaacacag

SEQ ID NO: 25585 - DNA, 122 bp, Homo sapiens
  misc_feature (61)..(62): /note="This region represents a CpG dinucleotide"
  misc_feature (61)..(61): /note="Nucleotide may be methylated to form 5-methylcytosine"
aacatgcctctctaagtcatcctgtaaggtgaccccgaagtgtgacttgtcacaccatcccgccttctttaccgcctgagccgtggagggcagcctggcctgatgcaccaaggattcatgct

SEQ ID NO: 25586 - DNA, 122 bp, Homo sapiens
  misc_feature (61)..(62): /note="This region represents a CpG dinucleotide"
  misc_feature (61)..(61): /note="Nucleotide may be methylated to form 5-methylcytosine"
cagaggagactgagacttggtagttgaggccacctgcctgaagtggtaacaggttggaagcggaaggcattagatttgaatcctgtctgtctgatgcccaagtgcctggtctcttctctgcc

SEQ ID NO: 25587 - DNA, 122 bp, Homo sapiens
  misc_feature (61)..(62): /note="This region represents a CpG dinucleotide"
  misc_feature (61)..(61): /note="Nucleotide may be methylated to form 5-methylcytosine"
taacataaaatgcaagtcaatctgcagagccccattcagctccatgccttcagtagagaacgtgtgtgtgtaacactgggctatactgccccaagtgagagttctcccctatgatgggtagg

SEQ ID NO: 25588 - DNA, 122 bp, Homo sapiens
  misc_feature (61)..(62): /note="This region represents a CpG dinucleotide"
  misc_feature (61)..(61): /note="Nucleotide may be methylated to form 5-methylcytosine"
aattctgttaaatgggacttttaatactctctcaagtcttgtttttattcctcctctctccgctgtaattcataacctcatcctctctaccctgaactatttatttattttgtgtgtgtgtg

SEQ ID NO: 25589 - DNA, 122 bp, Homo sapiens
  misc_feature (61)..(62): /note="This region represents a CpG dinucleotide"
  misc_feature (61)..(61): /note="Nucleotide may be methylated to form 5-methylcytosine"
tttggtcacagtagttcatcatgtagcccaagatagggtagcccaagtcagcctaaatctcgtggtgcttcagtggcactgaaagccaaccatagcttccaaacctgacgtagatactttaa

SEQ ID NO: 25590 - DNA, 122 bp, Homo sapiens
  misc_feature (61)..(62): /note="This region represents a CpG dinucleotide"
  misc_feature (61)..(61): /note="Nucleotide may be methylated to form 5-methylcytosine"
caattgaactacagtcatgcaccgcattacaaagttttactcaacaacagaccacatatacgacagtgtttgcataagatcataatagatctgaaaaattcctgttgcctaatgagtcgcag

SEQ ID NO: 25591 - DNA, 122 bp, Homo sapiens
  misc_feature (61)..(62): /note="This region represents a CpG dinucleotide"
  misc_feature (61)..(61): /note="Nucleotide may be methylated to form 5-methylcytosine"
ttcctttctctaagacaaacctaagtaaaagcctgagctttgagtcctatgctcagcacacgggaaggagatgttaataattaaaataaagttgatatcctgtctttagggagttcccttga

SEQ ID NO: 25592 - DNA, 122 bp, Homo sapiens
  misc_feature (61)..(62): /note="This region represents a CpG dinucleotide"
  misc_feature (61)..(61): /note="Nucleotide may be methylated to form 5-methylcytosine"
gcggtgaaacgctgtccgaatgagagggcggccacatgcttaaggtgccagtgaaaaaaccgacagccagaattctacagccaggaaagatgtcctccagaaataaagtaaagtaatgccaa

SEQ ID NO: 25593 - DNA, 122 bp, Homo sapiens
  misc_feature (61)..(62): /note="This region represents a CpG dinucleotide"
  misc_feature (61)..(61): /note="Nucleotide may be methylated to form 5-methylcytosine"
gccaggctgggcggggcctgtgtaggtagagggaggagttaaccagcatggaagagagagcgtccaatcagaaagctgagggccaggcactgggccaatggagcaatttggaggggagccaa

SEQ ID NO: 25594 - DNA, 122 bp, Homo sapiens
  misc_feature (61)..(62): /note="This region represents a CpG dinucleotide"
  misc_feature (61)..(61): /note="Nucleotide may be methylated to form 5-methylcytosine"
gccgtggccctgggactgcatctctactcccattagtatgcactccctcactctgggccacgtaatctgtttatgcacgtatgatatcaaaaacaggaggcaggtgctgccgtcttgcgttc

SEQ ID NO: 25595 - DNA, 122 bp, Homo sapiens
  misc_feature (61)..(62): /note="This region represents a CpG dinucleotide"
  misc_feature (61)..(61): /note="Nucleotide may be methylated to form 5-methylcytosine"
acagcattcaaactaaggcagtctcttgaatgcaccaaaaaaagcaaaagtactatctcccgaaatcacttgccagaggtagtttttgaaacaagttgaactgtagatcacattttatcttt

SEQ ID NO: 25596 - DNA, 122 bp, Homo sapiens
  misc_feature (61)..(62): /note="This region represents a CpG dinucleotide"
  misc_feature (61)..(61): /note="Nucleotide may be methylated to form 5-methylcytosine"
ccgggctgtgcttggagtaccagtgctcgcccggggctatactgaatgagtaagcagccccgtctgcttttgctgtgcaaaggtaagggtggaggccgctccactttcttcaaaaggccccg

SEQ ID NO: 25597 - DNA, 122 bp, Homo sapiens
  misc_feature (61)..(62): /note="This region represents a CpG dinucleotide"
  misc_feature (61)..(61): /note="Nucleotide may be methylated to form 5-methylcytosine"
cttattcagaaaaaaaaaatgaactgcattctcaaagccaataaagataaaagaaacctacgttagtccaaaacagcacagctcaagggtgggaattgcacaagattaaggtttgtcctcag

SEQ ID NO: 25598 - DNA, 122 bp, Homo sapiens
  misc_feature (61)..(62): /note="This region represents a CpG dinucleotide"
  misc_feature (61)..(61): /note="Nucleotide may be methylated to form 5-methylcytosine"
caaatctacacagatgaggggaagggtcaggaaatcagccctctgatcctaatgcccccacgcataccccactcacatctctggaggaagaagggatgagactataccccagaaaacctgcc

SEQ ID NO: 25599 - DNA, 122 bp, Homo sapiens
  misc_feature (61)..(62): /note="This region represents a CpG dinucleotide"
  misc_feature (61)..(61): /note="Nucleotide may be methylated to form 5-methylcytosine"
agcagagagttcaaaaataaacacaacacattctccctgaatcaacttgcaatattgtaacgcttcacaaactgtctttttgcttttgtatagagatccaaatttcgcatgagcaaaacagg

SEQ ID NO: 25600 - DNA, 122 bp, Homo sapiens
  misc_feature (61)..(62): /note="This region represents a CpG dinucleotide"
  misc_feature (61)..(61): /note="Nucleotide may be methylated to form 5-methylcytosine"
ggcctgggttgtctgatgcacctctgagtcaggtctcagggacaaacctttcaacctgtgcgcttcagtgcagcctcctacaaaagggaatcccagaacataaccatatctctgaataaggt

SEQ ID NO: 25601 - DNA, 122 bp, Homo sapiens
  misc_feature (61)..(62): /note="This region represents a CpG dinucleotide"
  misc_feature (61)..(61): /note="Nucleotide may be methylated to form 5-methylcytosine"
aacaaaaggggtgggggttcccagcaggaaggctcacacctgcaggaggccacacgtgagcgtgtgtacatgtgcgtgtgtgcttgtgcagggcgctcccagcctccaggtgatctgctgcc

SEQ ID NO: 25602 - DNA, 122 bp, Homo sapiens
  misc_feature (61)..(62): /note="This region represents a CpG dinucleotide"
  misc_feature (61)..(61): /note="Nucleotide may be methylated to form 5-methylcytosine"
gctgcaaaaagtcttacagaagggaggagagggggttgtcagcaggagcagcccaggagacgctcatgagaatacgcaagggtctgcaccagtcagcacttggaattgtccctcctgggaga

SEQ ID NO: 25603 - DNA, 122 bp, Homo sapiens
  misc_feature (61)..(62): /note="This region represents a CpG dinucleotide"
  misc_feature (61)..(61): /note="Nucleotide may be methylated to form 5-methylcytosine"
cggaagcgaacttcctgtcactgccgacagggattcactagatgtacataacagaagtggcgcaggaaggcattttttcaatagaaaatttgaaagcatatcagattcctagaaaaggaagc

SEQ ID NO: 25604 - DNA, 122 bp, Homo sapiens
  misc_feature (61)..(62): /note="This region represents a CpG dinucleotide"
  misc_feature (61)..(61): /note="Nucleotide may be methylated to form 5-methylcytosine"
ataattgaatttaataacaagcttttacttccgttgtatctgtttcttcctccatgtttccgctgtcttgtttgtggcggtggcttctggtttgcccagtgttgatcacaatataatgtttc

SEQ ID NO: 25605 - DNA, 122 bp, Homo sapiens
  misc_feature (61)..(62): /note="This region represents a CpG dinucleotide"
  misc_feature (61)..(61): /note="Nucleotide may be methylated to form 5-methylcytosine"
cacaccttgaaaggcaaacagggcaggcctagttttctcttcaaagacaggaaagattaacgctctgggaaaatggagcccaatgggaatttcaaacacacgatgtggttcttccagccagt

SEQ ID NO: 25606 - DNA, 122 bp, Homo sapiens
  misc_feature (61)..(62): /note="This region represents a CpG dinucleotide"
  misc_feature (61)..(61): /note="Nucleotide may be methylated to form 5-methylcytosine"
ggtgaggacaggaacaatgacttccaagctcttcacatgcaggactggggactggaagtccggctgagcctgtattattttgaaatcctattcagctgtgaaagcttagattgcattattca

SEQ ID NO: 25607 - DNA, 122 bp, Homo sapiens
  misc_feature (61)..(62): /note="This region represents a CpG dinucleotide"
  misc_feature (61)..(61): /note="Nucleotide may be methylated to form 5-methylcytosine"
aggaaatgtccactcctttgggggtgatttttctcctcaagttgtagccaacattttgtccgtaactgatttcagggcaaacatttctgacatcttcctccagctcagtctgccatgccttg

SEQ ID NO: 25608 - DNA, 122 bp, Homo sapiens
  misc_feature (61)..(62): /note="This region represents a CpG dinucleotide"
  misc_feature (61)..(61): /note="Nucleotide may be methylated to form 5-methylcytosine"
ctattaaagaataagaacttctttatgaatgatcccaaacattaccccactgcctatagtcgttttgctttttatgacaagatataactgatttacatgactgttcatgggagaagctcaaa

SEQ ID NO: 25609 - DNA, 122 bp, Homo sapiens
  misc_feature (61)..(62): /note="This region represents a CpG dinucleotide"
  misc_feature (61)..(61): /note="Nucleotide may be methylated to form 5-methylcytosine"
atacaggatactgaaggcagctctaaagcagggctttcaaaggcatgttgtgtggtgacacgggaaatgaggtgtcatctcccagggcacagcagccatgaagatccgtggacattccttta

SEQ ID NO: 25610 - DNA, 122 bp, Homo sapiens
  misc_feature (61)..(62): /note="This region represents a CpG dinucleotide"
  misc_feature (61)..(61): /note="Nucleotide may be methylated to form 5-methylcytosine"
tatataaggcaagaaagaccacacacttacttcctggacctaaagctacacagaaaccatcgttgttcaccaccccaccccacccaggccacttccccaccccatctccttctgactttgtc

SEQ ID NO: 25611 - DNA, 122 bp, Homo sapiens
  misc_feature (61)..(62): /note="This region represents a CpG dinucleotide"
  misc_feature (61)..(61): /note="Nucleotide may be methylated to form 5-methylcytosine"
taccccgagagcggaagaaaggcaaacaggcggaagcccacagccgaggccatcgcgctgcgcatgatccgtggcaaccgtccttccttgacctttgcccactggaaaagccaatcccaagt

SEQ ID NO: 25612 - DNA, 122 bp, Homo sapiens
  misc_feature (61)..(62): /note="This region represents a CpG dinucleotide"
  misc_feature (61)..(61): /note="Nucleotide may be methylated to form 5-methylcytosine"
gggctagaggcgcgtttgccaggcagcgcgctgcccctgcgcatcgccagccctgacagacgtgcaccacggaagggacgtgattgtggctgccttctcgggagactcaaattctttggatc

SEQ ID NO: 25613 - DNA, 122 bp, Homo sapiens
  misc_feature (61)..(62): /note="This region represents a CpG dinucleotide"
  misc_feature (61)..(61): /note="Nucleotide may be methylated to form 5-methylcytosine"
ctctgatattacactagaacaacaactcttaaagggtagttgcaacatgaaatctgaaatcgtatcaaggaatatgattgatatgatgcctcttttcttccttggttacattaaaatctatt

SEQ ID NO: 25614 - DNA, 122 bp, Homo sapiens
  misc_feature (61)..(62): /note="This region represents a CpG dinucleotide"
  misc_feature (61)..(61): /note="Nucleotide may be methylated to form 5-methylcytosine"
accttgcagctcttgttctattatgtgctgtgtccctacacttaatcctgaaaactcttacgggatttgtcactttacagctaaggaagtttagcttgaagaggctgccaattctgccgaag

SEQ ID NO: 25615 - DNA, 122 bp, Homo sapiens
  misc_feature (61)..(62): /note="This region represents a CpG dinucleotide"
  misc_feature (61)..(61): /note="Nucleotide may be methylated to form 5-methylcytosine"
ctaatgttatccctcccccagccccccagcccccaacaggccccagtgtgtgatgtttcccgccctgtgtccaagtcagatctggctatttctaaaggccaggatgactcattttttcaagg

SEQ ID NO: 25616 - DNA, 122 bp, Homo sapiens
  misc_feature (61)..(62): /note="This region represents a CpG dinucleotide"
  misc_feature (61)..(61): /note="Nucleotide may be methylated to form 5-methylcytosine"
gacatcaccagtgcaatttgaagcagtaacatcctcagggcaccccaagccacaggctgacgtatggtggccaacgtctaaatgttgacacctgacctgggggaggggtgtcttgtattctg

SEQ ID NO: 25617 - DNA, 122 bp, Homo sapiens
  misc_feature (61)..(62): /note="This region represents a CpG dinucleotide"
  misc_feature (61)..(61): /note="Nucleotide may be methylated to form 5-methylcytosine"
tacaagcttttgtttctcaaagcataaaagtatcataaatattttgctgggatgcttctgcgtttctctcttaacctcatgacatgttttttttcttcttccttcttcctttttttttggtg

SEQ ID NO: 25618 - DNA, 122 bp, Homo sapiens
  misc_feature (61)..(62): /note="This region represents a CpG dinucleotide"
  misc_feature (61)..(61): /note="Nucleotide may be methylated to form 5-methylcytosine"
aggggcggggcagcttttgttggttcagcttcatcattcctcactcttattattggatatcgcatatgaatgcttgtataagttgtgaatgggaaatctgcttctcagtttctcctttaaaa

SEQ ID NO: 25619 - DNA, 122 bp, Homo sapiens
  misc_feature (61)..(62): /note="This region represents a CpG dinucleotide"
  misc_feature (61)..(61): /note="Nucleotide may be methylated to form 5-methylcytosine"
gcatttaacagtgaacaagataatatcatatatataaatttcatttaatcctcacaaagacgctatgggatggatgttgtttccatttttccaacaagtaaactgaggctatttaagagtgg

SEQ ID NO: 25620 - DNA, 122 bp, Homo sapiens
  misc_feature (61)..(62): /note="This region represents a CpG dinucleotide"
  misc_feature (61)..(61): /note="Nucleotide may be methylated to form 5-methylcytosine"
tcttcatgctcctccagggcaaactacaccctccttggcaggagcagggagcaagctgagcggtcaaggcagctaaacctgccagccacacagaccagctcacaggactggagagtaatggt

SEQ ID NO: 25621 - DNA, 122 bp, Homo sapiens
  misc_feature (61)..(62): /note="This region represents a CpG dinucleotide"
  misc_feature (61)..(61): /note="Nucleotide may be methylated to form 5-methylcytosine"
ttcacacatacttgttgagcatcctaccatgggccagggttaggcaagggactgatcatacggacaggaaggagtcccagatcatgcccttggggagttcatagtttagtgggaggagagat

SEQ ID NO: 25622 - DNA, 122 bp, Homo sapiens
  misc_feature (61)..(62): /note="This region represents a CpG dinucleotide"
  misc_feature (61)..(61): /note="Nucleotide may be methylated to form 5-methylcytosine"
tcactagccacctcagccattcacacccagtgggctaaacaaggatacatttataggacacgtgtcactcactgggcagggtggggctggggcagagaggggtatcatttattgtgttaacg

SEQ ID NO: 25623 - DNA, 122 bp, Homo sapiens
  misc_feature (61)..(62): /note="This region represents a CpG dinucleotide"
  misc_feature (61)..(61): /note="Nucleotide may be methylated to form 5-methylcytosine"
tggtaagagcctgggaagagatgctgtctgtggtgagcacgtgatagacattccacgacccgacctgtcggtgccctggttctcattgtttcttctcatttccagctgcatttatctcttgt

SEQ ID NO: 25624 - DNA, 122 bp, Homo sapiens
  misc_feature (61)..(62): /note="This region represents a CpG dinucleotide"
  misc_feature (61)..(61): /note="Nucleotide may be methylated to form 5-methylcytosine"
actaatgtgtttttaaccagttactgtagttcccacagtaagcaagttaggtaatgtatacgcatatttgagtgtcagaattaggcccatttcttctctatgtcagtacaagggctatgatg

SEQ ID NO: 25625 - DNA, 122 bp, Homo sapiens
  misc_feature (61)..(62): /note="This region represents a CpG dinucleotide"
  misc_feature (61)..(61): /note="Nucleotide may be methylated to form 5-methylcytosine"
tgaggaaaggggaggcgggggccgctgggtcatccctcccacaggcccatcattgggatgcgtcctgaacgcccatcaagcccatggcccttgtgatccaggtggggaaactaaggcccaga

SEQ ID NO: 25626 - DNA, 122 bp, Homo sapiens
  misc_feature (61)..(62): /note="This region represents a CpG dinucleotide"
  misc_feature (61)..(61): /note="Nucleotide may be methylated to form 5-methylcytosine"
ttcaacctcatctcatgcaatgattttatatattgctgtcatggcatttatcctgcattacggtaatctgcattagaatgtgtgctgttaggaatatgaaacattgtctaatttgcttcttt

SEQ ID NO: 25627 - DNA, 122 bp, Homo sapiens
  misc_feature (61)..(62): /note="This region represents a CpG dinucleotide"
  misc_feature (61)..(61): /note="Nucleotide may be methylated to form 5-methylcytosine"
tgcccgtcagtcctcatgtctacctgggcgaccccattttgaagatgcagaactgaggtccggagaggcctgggtagctgcctaagggtggggtagaagcatggtgccggctcagccaccct

SEQ ID NO: 25628 - DNA, 122 bp, Homo sapiens
  misc_feature (61)..(62): /note="This region represents a CpG dinucleotide"
  misc_feature (61)..(61): /note="Nucleotide may be methylated to form 5-methylcytosine"
ccggaacataaaagttctcaggaaatcacgattaataataaacagtaacaaataatgatccgtccaaaccaagagaagataatctcctttggctgtaagaaaatatgacttaaacagctctt

SEQ ID NO: 25629 - DNA, 122 bp, Homo sapiens
  misc_feature (61)..(62): /note="This region represents a CpG dinucleotide"
  misc_feature (61)..(61): /note="Nucleotide may be methylated to form 5-methylcytosine"
cttccgtgggtaattagacatggctactctggtcacagcgtttcagctgcttagctatgccgctaacgtcacgtgtcgaagtttttacttcagtaataagaattgtatagtattcaagaagg

SEQ ID NO: 25630 - DNA, 122 bp, Homo sapiens
  misc_feature (61)..(62): /note="This region represents a CpG dinucleotide"
  misc_feature (61)..(61): /note="Nucleotide may be methylated to form 5-methylcytosine"
actgtaggcttatttcctcattactaaggccattccagattcctaagctttacctggtcccgcccatagcttcatttcctactatgcctccaccctatttcccagtcatccagaataacttg

SEQ ID NO: 25631 - DNA, 122 bp, Homo sapiens
  misc_feature (61)..(62): /note="This region represents a CpG dinucleotide"
  misc_feature (61)..(61): /note="Nucleotide may be methylated to form 5-methylcytosine"
cgagttgtatgtgttaaatatgtacggcttcttgtatgtaaccacccaacaggttcaccacgcccactgcctagacagggccaattgatcaagatagggccaattgatcaagacaggggaaa

SEQ ID NO: 25632 - DNA, 122 bp, Homo sapiens
  misc_feature (61)..(62): /note="This region represents a CpG dinucleotide"
  misc_feature (61)..(61): /note="Nucleotide may be methylated to form 5-methylcytosine"
cgccgtcgctgctccagagactgcatgtccaggcagacagcgctgacattttctctcctgcgtggggaccagcgctgagccatacaggctccctcagggtggggtctcttgcgcgcccctcg

SEQ ID NO: 25633 - DNA, 122 bp, Homo sapiens
  misc_feature (61)..(62): /note="This region represents a CpG dinucleotide"
  misc_feature (61)..(61): /note="Nucleotide may be methylated to form 5-methylcytosine"
aactctattatacagctacattaattaaaatagtatggtactggcataaaaacagacatacgaaccaatggaacagaatagaaattccagaaataaacccatgcatctgtggtcaactaatc

SEQ ID NO: 25634 - DNA, 122 bp, Homo sapiens
  misc_feature (61)..(62): /note="This region represents a CpG dinucleotide"
  misc_feature (61)..(61): /note="Nucleotide may be methylated to form 5-methylcytosine"
atttttatgctgaatggtggtaatggcttatgtcctgacaagtgtgtgtcaaatgattgtcgtgacagaatgatgtgtgtaggtacctgtccagtgtgtctctgtcttgcaaatctatagtt

SEQ ID NO: 25635 - DNA, 122 bp, Homo sapiens
  misc_feature (61)..(62): /note="This region represents a CpG dinucleotide"
  misc_feature (61)..(61): /note="Nucleotide may be methylated to form 5-methylcytosine"
ggttgtgcttgttgggggacttggagaggcagagcacgttcgactcttcactgaccgtctcgcggtacgagacgaccgggtcagatttctgcaaaaagaggttaagtcccactcttgcctgg

SEQ ID NO: 25636 - DNA, 122 bp, Homo sapiens
  misc_feature (61)..(62): /note="This region represents a CpG dinucleotide"
  misc_feature (61)..(61): /note="Nucleotide may be methylated to form 5-methylcytosine"
ggaagggagaaggccaccatttctgtttatgtcctgtttccaccttatcagcagcctagacgccaacaatgagccctgtgggacaggcctcacccattccctgctccggacatttgtccagc

SEQ ID NO: 25637 - DNA, 122 bp, Homo sapiens
  misc_feature (61)..(62): /note="This region represents a CpG dinucleotide"
  misc_feature (61)..(61): /note="Nucleotide may be methylated to form 5-methylcytosine"
taattgatctataagtagataagcacactcagccttattaacaccacattctaaccattacgttacatgatatgtggaaaattggtgcctttatcactatggaaccagctgcatgttgaact

SEQ ID NO: 25638 - DNA, 122 bp, Homo sapiens
  misc_feature (61)..(62): /note="This region represents a CpG dinucleotide"
  misc_feature (61)..(61): /note="Nucleotide may be methylated to form 5-methylcytosine"
caagagtctccagaggcaaggaggcatggttagaaaacagcccattcagcagacactggacggtacagatcctatccctggggtgttcataaccaggacagatcagattctaggccaccaat

SEQ ID NO: 25639 - DNA, 122 bp, Homo sapiens
  misc_feature (61)..(62): /note="This region represents a CpG dinucleotide"
  misc_feature (61)..(61): /note="Nucleotide may be methylated to form 5-methylcytosine"
agtggttacctgactgaaacatgagacacatgtggggcagagctgagtcaacctgcacagcgcacccagggccaggctccatcagatcacagccagaccagagcaagtcctgccaatatcag

SEQ ID NO: 25640 - DNA, 122 bp, Homo sapiens
  misc_feature (61)..(62): /note="This region represents a CpG dinucleotide"
  misc_feature (61)..(61): /note="Nucleotide may be methylated to form 5-methylcytosine"
ccacagtgtgtggaggtcctgcatcagagccaacagtgagaatgcaagcatgtgctacagcggagtccctttgaggaacctcctcactgcccagcaagcaaagaaaacaagcaagtttctgg

SEQ ID NO: 25641 - DNA, 122 bp, Homo sapiens
  misc_feature (61)..(62): /note="This region represents a CpG dinucleotide"
  misc_feature (61)..(61): /note="Nucleotide may be methylated to form 5-methylcytosine"
tgtgtgatttactcctttaggatggcttagacccatgattgcatctgttcttgattatggcgccgcttttaaccacagagatgactcagcactggaaggttagctgtgctgcccaaggtcac

SEQ ID NO: 25642 - DNA, 122 bp, Homo sapiens
  misc_feature (61)..(62): /note="This region represents a CpG dinucleotide"
  misc_feature (61)..(61): /note="Nucleotide may be methylated to form 5-methylcytosine"
ggggaaattcttccttcccgtgctggtgaaaacatgatgatgacacactgaaatgcgttgcgttttgtcagcaaattctgtcagaagcacggcaaacgctggagaaggtttgaggaagcgca

SEQ ID NO: 25643 - DNA, 122 bp, Homo sapiens
  misc_feature (61)..(62): /note="This region represents a CpG dinucleotide"
  misc_feature (61)..(61): /note="Nucleotide may be methylated to form 5-methylcytosine"
cttctctccatgcccctgaatctgttcatttcaaggtcatgaataacctcttttgccaaacgcagtggccaccactgtgtcttcatcttattcaactttcgaaaatatttgacatagttgat

SEQ ID NO: 25644 - DNA, 122 bp, Homo sapiens
  misc_feature (61)..(62): /note="This region represents a CpG dinucleotide"
  misc_feature (61)..(61): /note="Nucleotide may be methylated to form 5-methylcytosine"
ccatcagcaaggacaattcttgagacagggtgcagctgtgagctgttggcaacctatgctcgtagcacctggaaaatggggatatgatttgtcctcactaaactcatgttgaaatttgatcc

SEQ ID NO: 25645 - DNA, 122 bp, Homo sapiens
  misc_feature (61)..(62): /note="This region represents a CpG dinucleotide"
  misc_feature (61)..(61): /note="Nucleotide may be methylated to form 5-methylcytosine"
cacaaaatcagagggttctttttaatcattagctttacccatccatctggaaaaataaagcggtgtaaaagcctacaagcatcaggaagcaaagaagactggaagtacaggcttaactaagt

SEQ ID NO: 25646 - DNA, 122 bp, Homo sapiens
  misc_feature (61)..(62): /note="This region represents a CpG dinucleotide"
  misc_feature (61)..(61): /note="Nucleotide may be methylated to form 5-methylcytosine"
cattatttctaaacatgaaagagatcacatcagaaattctgcaacattcataaacacagacggtgtcagcagacttgatacagcataaatagaacaaatgcagtgaactagacagcacccag

SEQ ID NO: 25647 - DNA, 122 bp, Homo sapiens
  misc_feature (61)..(62): /note="This region represents a CpG dinucleotide"
  misc_feature (61)..(61): /note="Nucleotide may be methylated to form 5-methylcytosine"
accagatgaccactaatgatgaaagtttctcaagggttctgaacacacaacatccaatggcgtttctgctgcttgaacagcttagcaggacatgtcagtccttcattgccccttctcacact

SEQ ID NO: 25648 - DNA, 122 bp, Homo sapiens
  misc_feature (61)..(62): /note="This region represents a CpG dinucleotide"
  misc_feature (61)..(61): /note="Nucleotide may be methylated to form 5-methylcytosine"
tggaaatgagtccctttcttggggagactctcagtaacttagtgataattgtttatgttacgcctcccagtgctgtgcgtgcctagactgtactgaactatttttggtatgcagcctaataa

SEQ ID NO: 25649 - DNA, 122 bp, Homo sapiens
  misc_feature (61)..(62): /note="This region represents a CpG dinucleotide"
  misc_feature (61)..(61): /note="Nucleotide may be methylated to form 5-methylcytosine"
accgtgcccagccaggaagcacaatgtaaattccataaatgtttcatcaccagcagctgacgccctccacccagcctctatgatctgccatccctggctgtggttcctggtcacctcatggt

SEQ ID NO: 25650 - DNA, 122 bp, Homo sapiens
  misc_feature (61)..(62): /note="This region represents a CpG dinucleotide"
  misc_feature (61)..(61): /note="Nucleotide may be methylated to form 5-methylcytosine"
agttttaatttcttaaccatataaatcatgattcctaatttaatttcattgtgtctccatcgccccttgagatacttgccttcttaatattttcaaatcaacatttttgctataaaacgaca

SEQ ID NO: 25651 - DNA, 122 bp, Homo sapiens
  misc_feature (61)..(62): /note="This region represents a CpG dinucleotide"
  misc_feature (61)..(61): /note="Nucleotide may be methylated to form 5-methylcytosine"
atttgggaggaagaaaaagatgaacttggttttgatccaagtaacctcagagaataatgacgtgggagcattttacaatgcaaacaataaatggaaaagcatgaatttatgtactgtatgtg

SEQ ID NO: 25652 - DNA, 122 bp, Homo sapiens
  misc_feature (61)..(62): /note="This region represents a CpG dinucleotide"
  misc_feature (61)..(61): /note="Nucleotide may be methylated to form 5-methylcytosine"
ttccggtgcaactggattcaggaactcaaacaatgtcatcagaaatctgtctatctctatcgcttggatctgatttccttgtgtttgctcaaatctcaagcaggtaaatatgccacagcagc

SEQ ID NO: 25653 - DNA, 122 bp, Homo sapiens
  misc_feature (61)..(62): /note="This region represents a CpG dinucleotide"
  misc_feature (61)..(61): /note="Nucleotide may be methylated to form 5-methylcytosine"
ttcaactcaaagatagaaaagagaaattttgtatgtgatgcaaatgagtcatctttgctgcggaggagtgatagcgatggattactctagtgtgccttaagacctaacttctttcaaaccag

SEQ ID NO: 25654 - DNA, 122 bp, Homo sapiens
  misc_feature (61)..(62): /note="This region represents a CpG dinucleotide"
  misc_feature (61)..(61): /note="Nucleotide may be methylated to form 5-methylcytosine"
ctgtgtggtcccagagggagacccatggggaaggctatgggcaggtgtctttcactttagcgactaagaagccttttgaggaattaagactgtccaaagatggttggggtattttgaaaaga

SEQ ID NO: 25655 - DNA, 122 bp, Homo sapiens
  misc_feature (61)..(62): /note="This region represents a CpG dinucleotide"
  misc_feature (61)..(61): /note="Nucleotide may be methylated to form 5-methylcytosine"
aacttacgcacagctcgagggaagtttcctgtcttaacacgccgagggctgagtgaggagcgcagccgtctacccagcaacctctgcacgtggcttttgaaagacatgagttatgaatgatt

SEQ ID NO: 25656 - DNA, 122 bp, Homo sapiens
  misc_feature (61)..(62): /note="This region represents a CpG dinucleotide"
  misc_feature (61)..(61): /note="Nucleotide may be methylated to form 5-methylcytosine"
tagcagtgtctaagctgtcttcatgagctgagtcagtccttgcaaaataggggagtcacacgaccagtcaagtcagttccttggctggggacatgggccactgacccacatggtgtcagctg

SEQ ID NO: 25657 - DNA, 122 bp, Homo sapiens
  misc_feature (61)..(62): /note="This region represents a CpG dinucleotide"
  misc_feature (61)..(61): /note="Nucleotide may be methylated to form 5-methylcytosine"
gtgccattttgactgtagttcaaaagcagacatcacctggcactcacctgcaagaagaagcgtgtggcttagtggacacagcatgggctctataggaaaagtcttgctcctgccacctaccc

SEQ ID NO: 25658 - DNA, 122 bp, Homo sapiens
  misc_feature (61)..(62): /note="This region represents a CpG dinucleotide"
  misc_feature (61)..(61): /note="Nucleotide may be methylated to form 5-methylcytosine"
aaggccatgccagtcaaaggtgatgtcatgcaccctataggtcactatgactcagtataccgtggcttgctctgataacctgactctggcagaacatcacatgatgattagcagactcctgg

SEQ ID NO: 25659 - DNA, 122 bp, Homo sapiens
  misc_feature (61)..(62): /note="This region represents a CpG dinucleotide"
  misc_feature (61)..(61): /note="Nucleotide may be methylated to form 5-methylcytosine"
gaggctacctgaagccacccctgtgggctgccagctggtccaggcaatgcgtgggaggagcgtgaggtccctttgtcagcagcctgactgcctcctaaaggactggggggtggcagtggctg

SEQ ID NO: 25660 - DNA, 122 bp, Homo sapiens
  misc_feature (61)..(62): /note="This region represents a CpG dinucleotide"
  misc_feature (61)..(61): /note="Nucleotide may be methylated to form 5-methylcytosine"
gtacagagctggaaatccatacatggctgaccaccctgtaagggctgcagacacagtgagcgttcactttgccctggcaactggaactgtctcctccagtcctcaccacaaccgttttacag

SEQ ID NO: 25661 - DNA, 122 bp, Homo sapiens
  misc_feature (61)..(62): /note="This region represents a CpG dinucleotide"
  misc_feature (61)..(61): /note="Nucleotide may be methylated to form 5-methylcytosine"
atgccattttaggcctcagcccacctgcacccaggcactcattaaaacagcacgctgctccgcactgcctcgtgttgtctgttggcatgctctcagggatcaaaccaattcaagaaccttat

SEQ ID NO: 25662 - DNA, 122 bp, Homo sapiens
  misc_feature (61)..(62): /note="This region represents a CpG dinucleotide"
  misc_feature (61)..(61): /note="Nucleotide may be methylated to form 5-methylcytosine"
ccctgtctttgataggaaacaccagatgcaacaattagctctgctgtcatctaggaatatcgtagccattgttgttgctgctgtaagctagaaatactgctgctgccatggcagaactgtga

SEQ ID NO: 25663 - DNA, 122 bp, Homo sapiens
  misc_feature (61)..(62): /note="This region represents a CpG dinucleotide"
  misc_feature (61)..(61): /note="Nucleotide may be methylated to form 5-methylcytosine"
gcaaagcaaatacataggattgaccaaaccaaagctttgcaggcagtggaggttctgatacgagctgtaccctgcagttcatgcatatcacttgaagagtgaggttatgactcacaagtggg

SEQ ID NO: 25664 - DNA, 122 bp, Homo sapiens
  misc_feature (61)..(62): /note="This region represents a CpG dinucleotide"
  misc_feature (61)..(61): /note="Nucleotide may be methylated to form 5-methylcytosine"
atacttacagacatttccttaataattctacctaactgtcattttccaacagtctcttcacgtgaatagtcaccgatcactgctgggtgcagtggctcatgcctgtaatcccagcactttgg

SEQ ID NO: 25665 - DNA, 122 bp, Homo sapiens
  misc_feature (61)..(62): /note="This region represents a CpG dinucleotide"
  misc_feature (61)..(61): /note="Nucleotide may be methylated to form 5-methylcytosine"
cacgccaccgcctttgagttggacacagatggcaacccctttgaccaggacatctacgggcgcgaggagctgcgcagccccaagctgttctacgccgaccaccccttcatcttcctagtgcg

SEQ ID NO: 25666 - DNA, 122 bp, Homo sapiens
  misc_feature (61)..(62): /note="This region represents a CpG dinucleotide"
  misc_feature (61)..(61): /note="Nucleotide may be methylated to form 5-methylcytosine"
tcttccttaattagttacaggactatatctgcaactcctgtgatttattcgctcagtgcccgtgtcactgtcacccactggtggggtgtgcttgttgtaaatacccatttaaatgtttacat

SEQ ID NO: 25667 - DNA, 122 bp, Homo sapiens
  misc_feature (61)..(62): /note="This region represents a CpG dinucleotide"
  misc_feature (61)..(61): /note="Nucleotide may be methylated to form 5-methylcytosine"
tccccaaaatgttgccccatatgccttttccttttgatgattttactttgatcctttcaccgtaatccattatagtcacaagtatcactgtatatgctgtaagtcctcctagtgagtcagaa

SEQ ID NO: 25668 - DNA, 122 bp, Homo sapiens
  misc_feature (61)..(62): /note="This region represents a CpG dinucleotide"
  misc_feature (61)..(61): /note="Nucleotide may be methylated to form 5-methylcytosine"
cttcctctacttacagccaactagtgtcatcagctatttgtgatacctcttcaaagttttcgatggcatatttgcttccattttcaaaaggaaataacaaaagaataaatcaagaactaatg

SEQ ID NO: 25669 - DNA, 122 bp, Homo sapiens
  misc_feature (61)..(62): /note="This region represents a CpG dinucleotide"
  misc_feature (61)..(61): /note="Nucleotide may be methylated to form 5-methylcytosine"
tgtttcttctacaagccaaggaaaaccaaaggttgccaggaaaccactggaaactaagaccgaagcaaagattctacccttctgttttataagattaaagattcttttgatgacaggacaca

SEQ ID NO: 25670 - DNA, 122 bp, Homo sapiens
  misc_feature (61)..(62): /note="This region represents a CpG dinucleotide"
  misc_feature (61)..(61): /note="Nucleotide may be methylated to form 5-methylcytosine"
ttggcttgactcttagctgaactcaccaaaaataatttctgtaagagactgagacgtctacgagtaggtttttcagaattagtaaacataaatcaaggatacacaggtagatttgaatttca

SEQ ID NO: 25671 - DNA, 122 bp, Homo sapiens
  misc_feature (61)..(62): /note="This region represents a CpG dinucleotide"
  misc_feature (61)..(61): /note="Nucleotide may be methylated to form 5-methylcytosine"
ttaggaattaggaagcttgggctctaacctgtttctgtcactgaaggtttgcagggcccacgtatgagtcatgtctctgctctgcatcctatctgctcactaggcataacagaactgacctt

SEQ ID NO: 25672 - DNA, 122 bp, Homo sapiens
  misc_feature (61)..(62): /note="This region represents a CpG dinucleotide"
  misc_feature (61)..(61): /note="Nucleotide may be methylated to form 5-methylcytosine"
actggacctcgcaaaaccatagatctacatcagaggagagagaaggaagcctggcaaagacggaaaactcatcaggtagacagaaaggttatgactgggaaagactattttggcaaacagag

SEQ ID NO: 25673 - DNA, 122 bp, Homo sapiens
  misc_feature (61)..(62): /note="This region represents a CpG dinucleotide"
  misc_feature (61)..(61): /note="Nucleotide may be methylated to form 5-methylcytosine"
ggagtgactgctacaggtttggggtttcatcttggagtggtgaaaatgttctaaaagtgacggtaaaagtgatggtaatgatggttgcacaactccgtgaatatacaaaaaaccatcaaatt

SEQ ID NO: 25674 - DNA, 122 bp, Homo sapiens
  misc_feature (61)..(62): /note="This region represents a CpG dinucleotide"
  misc_feature (61)..(61): /note="Nucleotide may be methylated to form 5-methylcytosine"
gcaggtgatggggctcccctccgtcctcgtgggacgggtcctgccttgggccccaaaagccgaccgcggttcattagcgctgcttctgggatcatcccgcagccctttccgcgctcctttgc

SEQ ID NO: 25675 - DNA, 122 bp, Homo sapiens
  misc_feature (61)..(62): /note="This region represents a CpG dinucleotide"
  misc_feature (61)..(61): /note="Nucleotide may be methylated to form 5-methylcytosine"
gccatggctagccagcctgggaagctggctaaatgctggtttttcttgtccagtgagtcccgtgtggcctcaagctcctgtgccaagggctgcagcatggactccagccgccgcagggctgt

SEQ ID NO: 25676 - DNA, 122 bp, Homo sapiens
  misc_feature (61)..(62): /note="This region represents a CpG dinucleotide"
  misc_feature (61)..(61): /note="Nucleotide may be methylated to form 5-methylcytosine"
gctggtcctcatctacctgattcagaaagagccagctattgtcatctgattttagctggacggtacagggcttactgcccaggtttaccaggtaccagcctaggctagacctgttctgtgca

SEQ ID NO: 25677 - DNA, 122 bp, Homo sapiens
  misc_feature (61)..(62): /note="This region represents a CpG dinucleotide"
  misc_feature (61)..(61): /note="Nucleotide may be methylated to form 5-methylcytosine"
ttctgtccaaaacaacgacctcccataaactttatttaacaccattgatcttttttcctacgtctaagtcaccccaactgttataaattcctattacaaagggatccctgctatgctaattg

SEQ ID NO: 25678 - DNA, 122 bp, Homo sapiens
  misc_feature (61)..(62): /note="This region represents a CpG dinucleotide"
  misc_feature (61)..(61): /note="Nucleotide may be methylated to form 5-methylcytosine"
agagggtttcctgcccactcctactcccacctccttgctcagctcacagtcacccaagcacgcacacacagctctgccatgctcctgtgtgcagtttgcaaggtattaaaccctcagagcca

SEQ ID NO: 25679 - DNA, 122 bp, Homo sapiens
  misc_feature (61)..(62): /note="This region represents a CpG dinucleotide"
  misc_feature (61)..(61): /note="Nucleotide may be methylated to form 5-methylcytosine"
ccttagctgtaatttgaggggaaatatgcccaccttacacatttttaaaaaatatattttcgtttgtatattgctgatcagtatctttggcccgaattctgtttagcacagagaagctcatt

SEQ ID NO: 25680 - DNA, 122 bp, Homo sapiens
  misc_feature (61)..(62): /note="This region represents a CpG dinucleotide"
  misc_feature (61)..(61): /note="Nucleotide may be methylated to form 5-methylcytosine"
accccctgcggcagtcccggatccgagcaacccccaatggctgtgtgtggaaggaggaagcgagaatgtggttacttaggcagggccatgtgacagcccacaccccattgtttgtgacagct

SEQ ID NO: 25681 - DNA, 122 bp, Homo sapiens
  misc_feature (61)..(62): /note="This region represents a CpG dinucleotide"
  misc_feature (61)..(61): /note="Nucleotide may be methylated to form 5-methylcytosine"
tgggaatgactgacagccttgactcaagggaggtttggccaggaaagtgtgtgtttgtaacgctggggtagaattgtgcagagagagagccccaggggatcaaggaatcagggcactgaggt

SEQ ID NO: 25682 - DNA, 122 bp, Homo sapiens
  misc_feature (61)..(62): /note="This region represents a CpG dinucleotide"
  misc_feature (61)..(61): /note="Nucleotide may be methylated to form 5-methylcytosine"
aaagtaaggaacctgtcccagctgcagtgagcccgagggaggtgtgactctggaagaagacgcagagatgaaacactgctggctctgctgacaggaatggctttgagccagagtgtggtggc

SEQ ID NO: 25683 - DNA, 122 bp, Homo sapiens
  misc_feature (61)..(62): /note="This region represents a CpG dinucleotide"
  misc_feature (61)..(61): /note="Nucleotide may be methylated to form 5-methylcytosine"
aggcaccaaaatgattttccagtttgaaagcttccccagttacacttggatgcagtaaatcggatgtaaaagctaagaactgatacaaaatcactatttctaataatgttaattataaaagc

SEQ ID NO: 25684 - DNA, 122 bp, Homo sapiens
  misc_feature (61)..(62): /note="This region represents a CpG dinucleotide"
  misc_feature (61)..(61): /note="Nucleotide may be methylated to form 5-methylcytosine"
ctccagttaccaggcagtgctgtcaggctgggactctccgtgatgggtgtcctggaagtccgtatctctagaaaggatgtaatttatgaagcacacatcattgcctctgaaactagagaggc

SEQ ID NO: 25685 - DNA, 122 bp, Homo sapiens
  misc_feature (61)..(62): /note="This region represents a CpG dinucleotide"
  misc_feature (61)..(61): /note="Nucleotide may be methylated to form 5-methylcytosine"
aaacattcatataatgcatatgtacatgctctgtgccaggcagtgctcaaggtgttaggacgggaaagaacagccttgctaaaaatcactgctatcacggggagcttacattctagtagaga

SEQ ID NO: 25686 - DNA, 122 bp, Homo sapiens
  misc_feature (61)..(62): /note="This region represents a CpG dinucleotide"
  misc_feature (61)..(61): /note="Nucleotide may be methylated to form 5-methylcytosine"
gtaccttataattataaacacacgtctttcagctcttctgtgtattcttcccaggcagaacggaaatatgtcacttaaattagcacttggagtacagagtggatgccaaatttgggttagca

SEQ ID NO: 25687 - DNA, 122 bp, Homo sapiens
  misc_feature (61)..(62): /note="This region represents a CpG dinucleotide"
  misc_feature (61)..(61): /note="Nucleotide may be methylated to form 5-methylcytosine"
ctggaaagagaactctggtttggaggggttcccaggcctctcactttaggtactgcaggacgcaagggatcatgtctgcaagctggtccagagatgggtactgatatctggaaaagagaggc

SEQ ID NO: 25688 - DNA, 122 bp, Homo sapiens
  misc_feature (61)..(62): /note="This region represents a CpG dinucleotide"
  misc_feature (61)..(61): /note="Nucleotide may be methylated to form 5-methylcytosine"
tacctgatagttcatctacaagactgataacatcatctgctgtccactctttagtgctagcgtcatatagtaacttaatggcatcagccaaacctttcagactgaattcatctgtaggttct

SEQ ID NO: 25689 - DNA, 122 bp, Homo sapiens
  misc_feature (61)..(62): /note="This region represents a CpG dinucleotide"
  misc_feature (61)..(61): /note="Nucleotide may be methylated to form 5-methylcytosine"
ctgctacttaatgtatttggtatgtgggagaaactcgtaactctgggactgcccagtgtacggcgtctgtcacgtctgaagtgtgagcattccaaaggctcacagccacccagctcagaact

SEQ ID NO: 25690 - DNA, 122 bp, Homo sapiens
  misc_feature (61)..(62): /note="This region represents a CpG dinucleotide"
  misc_feature (61)..(61): /note="Nucleotide may be methylated to form 5-methylcytosine"
gccacccacacctgccatgggcactaaactccagggcaggggcattgtttaccttatttgcggggccatctcagcctttagcccaggcctgtatacaataggtgttttggctgggtgtagtg

SEQ ID NO: 25691 - DNA, 122 bp, Homo sapiens
  misc_feature (61)..(62): /note="This region represents a CpG dinucleotide"
  misc_feature (61)..(61): /note="Nucleotide may be methylated to form 5-methylcytosine"
cagtcctcctcctctaccttttgggcttatgatccagccatgccaaccatgttggtcttgcgctctgtggaatgtcctgatttcatgtctttcttatgagtgtgtttgtatttgcagttcct

SEQ ID NO: 25692 - DNA, 122 bp, Homo sapiens
  misc_feature (61)..(62): /note="This region represents a CpG dinucleotide"
  misc_feature (61)..(61): /note="Nucleotide may be methylated to form 5-methylcytosine"
ccttggcttaggtgaggtcttagttacggctctgtgtcctcccaccattacgttctcatgcgatttatgacacgcctctcccctgaattctgatctttatatgttatcactgcgtcctctga

SEQ ID NO: 25693 - DNA, 122 bp, Homo sapiens
  misc_feature (61)..(62): /note="This region represents a CpG dinucleotide"
  misc_feature (61)..(61): /note="Nucleotide may be methylated to form 5-methylcytosine"
gtagggaaagactaaacaggtaggcaagaactaggtcatggggtgccctggaggccatgtcgacctgatgatattcatttgaagaacaatagggagctattggaggctttctccactaacta

SEQ ID NO: 25694 - DNA, 122 bp, Homo sapiens
  misc_feature (61)..(62): /note="This region represents a CpG dinucleotide"
  misc_feature (61)..(61): /note="Nucleotide may be methylated to form 5-methylcytosine"
gtagagcgaggacactttcggaatccaggaggccatctggaaggatcccagaccacacaacggagcaacgtgtgtatccccatatctgcagaatgtgtgcatgactgagatcattaacagac

SEQ ID NO: 25695 - DNA, 122 bp, Homo sapiens
  misc_feature (61)..(62): /note="This region represents a CpG dinucleotide"
  misc_feature (61)..(61): /note="Nucleotide may be methylated to form 5-methylcytosine"
acccgtctgagagttgacttcataatcgagatggctacgaagtgactaatggacaggtagcgtaaaacgcacggatacactagacaaaggaatgattcatatcctggatgagacagagtggg

SEQ ID NO: 25696 - DNA, 122 bp, Homo sapiens
  misc_feature (61)..(62): /note="This region represents a CpG dinucleotide"
  misc_feature (61)..(61): /note="Nucleotide may be methylated to form 5-methylcytosine"
attttcctcctcctgcagccgcaggctgccaatgcagttgccgcacgtgcctgaggagggcgccctcccctgctctgctagatgccgcccttgtccttggacagtcggctgggagcggagaa

SEQ ID NO: 25697 - DNA, 122 bp, Homo sapiens
  misc_feature (61)..(62): /note="This region represents a CpG dinucleotide"
  misc_feature (61)..(61): /note="Nucleotide may be methylated to form 5-methylcytosine"
ttcaagctatcctcccacctcagcctccaaagtagccaggactacaggtgtgcgccaccacgcccggccaatttttttatgtattgcagggacagggtttcaccatgttgcccaggctggtc

SEQ ID NO: 25698 - DNA, 122 bp, Homo sapiens
  misc_feature (61)..(62): /note="This region represents a CpG dinucleotide"
  misc_feature (61)..(61): /note="Nucleotide may be methylated to form 5-methylcytosine"
gtaggatttctgcctggctctagtgatcaggctggacatccctgataatctgcttcaccccgttgctcctctgagcctgggtcctgccttgctgttctgagtcctccctctgtaggagttca

SEQ ID NO: 25699 - DNA, 122 bp, Homo sapiens
  misc_feature (61)..(62): /note="This region represents a CpG dinucleotide"
  misc_feature (61)..(61): /note="Nucleotide may be methylated to form 5-methylcytosine"
tcaatattattatacaagaatagtgtgtttcaaaaatatatgtatatacactgtcatatacgtgtgtgtatacgtgtatatgcatacttttgctgctggtgttcataaaatatcaatacaaa

SEQ ID NO: 25700 - DNA, 122 bp, Homo sapiens
  misc_feature (61)..(62): /note="This region represents a CpG dinucleotide"
  misc_feature (61)..(61): /note="Nucleotide may be methylated to form 5-methylcytosine"
caagcctttcatccactgctcttacaggtacctaatgtcctggcacaggggttgtaataccgttgggaattgcccatgatattgcagtcgctgtgccaggacattaggtaatctgaattaga

SEQ ID NO: 25701 - DNA, 122 bp, Homo sapiens
  misc_feature (61)..(62): /note="This region represents a CpG dinucleotide"
  misc_feature (61)..(61): /note="Nucleotide may be methylated to form 5-methylcytosine"
caaactgtaacagtgttaagcaatttgtttcttggggaagtgtttaggtcatacaggctacgccctcattattaatgctactatgaaaagggcttgctagaatgcattctctctcttctgtt

SEQ ID NO: 25702 - DNA, 122 bp, Homo sapiens
  misc_feature (61)..(62): /note="This region represents a CpG dinucleotide"
  misc_feature (61)..(61): /note="Nucleotide may be methylated to form 5-methylcytosine"
cttctggagtccgtcaggtgtgaagtgagcgctggagctgatgctcgctctgcttcagggcggttttcctggtgtgttcgcagtgtgacaggaaaatcaccttgcctggaaatggtccatat

SEQ ID NO: 25703 - DNA, 122 bp, Homo sapiens
  misc_feature (61)..(62): /note="This region represents a CpG dinucleotide"
  misc_feature (61)..(61): /note="Nucleotide may be methylated to form 5-methylcytosine"
gaagaaagcagtttctaggtgggtgcccgtcccgtctgctctcgccgtctgctgggattccgagaaagaagatgctggttgctcacggtatgctcaacccctctgccccacggcgctgcagg

SEQ ID NO: 25704 - DNA, 122 bp, Homo sapiens
  misc_feature (61)..(62): /note="This region represents a CpG dinucleotide"
  misc_feature (61)..(61): /note="Nucleotide may be methylated to form 5-methylcytosine"
actctacatttaattttttgatgatacctcatattgttaaggattacttcagagttagagcgagtgagtcagagtcagagtcacttcagagtcagagtgagggtacacttattccagtagtg

SEQ ID NO: 25705 - DNA, 122 bp, Homo sapiens
  misc_feature (61)..(62): /note="This region represents a CpG dinucleotide"
  misc_feature (61)..(61): /note="Nucleotide may be methylated to form 5-methylcytosine"
atctacaagtcatcgggtgtccactcgccttctctccatttcaggaagtcttcctccacccgccccacctgctttgtgctcagcaaccagcgttcaagagatcttcaaagaataaatgtagg

SEQ ID NO: 25706 - DNA, 122 bp, Homo sapiens
  misc_feature (61)..(62): /note="This region represents a CpG dinucleotide"
  misc_feature (61)..(61): /note="Nucleotide may be methylated to form 5-methylcytosine"
tacgagggtttggtgtacgaccaaggttaagtcaacctgcttgtttcactgcctggtcatcgtgtttgggttcatgtcagggatataagccaagtctgtgcaatcagaacaatgaggcacaa

SEQ ID NO: 25707 - DNA, 122 bp, Homo sapiens
  misc_feature (61)..(62): /note="This region represents a CpG dinucleotide"
  misc_feature (61)..(61): /note="Nucleotide may be methylated to form 5-methylcytosine"
caagaatagagataagaccagagtgtggaaatctgggtgccaatctatggaatttgtattcgtattgatataaattaaatatcatggaaaatttaaggacaggaagctacatgatcacattt

SEQ ID NO: 25708 - DNA, 122 bp, Homo sapiens
  misc_feature (61)..(62): /note="This region represents a CpG dinucleotide"
  misc_feature (61)..(61): /note="Nucleotide may be methylated to form 5-methylcytosine"
ggcacttggcccagagtggactccagcttgccacctgtcacccaggctggagtgcagtggcgtgatcttgtctcactgcagcctcaacgtcctgggctcaggcgatcttccctacctccctc

SEQ ID NO: 25709 - DNA, 122 bp, Homo sapiens
  misc_feature (61)..(62): /note="This region represents a CpG dinucleotide"
  misc_feature (61)..(61): /note="Nucleotide may be methylated to form 5-methylcytosine"
gtttgcagtcaaggtggagaacagctgctgtagcagagcagttatgatagattgaaaggacgtgcttacctgcacttctgtgtgaccttatgttatctggctttcaaaggggtcgctttctt

SEQ ID NO: 25710 - DNA, 122 bp, Homo sapiens
  misc_feature (61)..(62): /note="This region represents a CpG dinucleotide"
  misc_feature (61)..(61): /note="Nucleotide may be methylated to form 5-methylcytosine"
ccaaaatagttcccaagccatgtttctatgctgctgtgatgctgggacagccaacacaggcgccgtttctcaaagaagaaacatgcatgtaaatcaggtttcacctgggcgggctgggccgg

SEQ ID NO: 25711 - DNA, 122 bp, Homo sapiens
  misc_feature (61)..(62): /note="This region represents a CpG dinucleotide"
  misc_feature (61)..(61): /note="Nucleotide may be methylated to form 5-methylcytosine"
aaatatacacagtcatgcatcacataatgacattggtcaatgatggaccacatatacgaccgtggtcctgtaagactgtaaggcggtatttgtactgtatgctctctacgtttaggtatgtt

SEQ ID NO: 25712 - DNA, 122 bp, Homo sapiens
  misc_feature (61)..(62): /note="This region represents a CpG dinucleotide"
  misc_feature (61)..(61): /note="Nucleotide may be methylated to form 5-methylcytosine"
aagagggaaagacagactaacgtatcacaagtaaacatgacatgaaagaaaactgataaacgtagtggcaagtagtagatgtttaggtgactcaaataaggatcagatgtatgcaattacaa

SEQ ID NO: 25713 - DNA, 122 bp, Homo sapiens
  misc_feature (61)..(62): /note="This region represents a CpG dinucleotide"
  misc_feature (61)..(61): /note="Nucleotide may be methylated to form 5-methylcytosine"
cccgttcttggggttgatcttgaacttggccccatgaggcctatagtgcacgggagtgggcgtccgctcctcctccagggagcgcaggtagtggccgggcaggcgggaacagatgccctccc

SEQ ID NO: 25714 - DNA, 122 bp, Homo sapiens
  misc_feature (61)..(62): /note="This region represents a CpG dinucleotide"
  misc_feature (61)..(61): /note="Nucleotide may be methylated to form 5-methylcytosine"
gggtaggcatgagaagttagtatcaggaggagggcctgtgtgctaggtaagcgtttaacacggatggactcattaatcccctgaccagggagtttgctataggctgtttcacagtcttaagg

SEQ ID NO: 25715 - DNA, 122 bp, Homo sapiens
  misc_feature (61)..(62): /note="This region represents a CpG dinucleotide"
  misc_feature (61)..(61): /note="Nucleotide may be methylated to form 5-methylcytosine"
aaaacagggttaagagatgggtaagaaaataggtctctttactttccttggtatagtgaacgttattatacatgttgtatttaaatgtttttgacctaacttgattgacaacaatgtaaaca

SEQ ID NO: 25716 - DNA, 122 bp, Homo sapiens
  misc_feature (61)..(62): /note="This region represents a CpG dinucleotide"
  misc_feature (61)..(61): /note="Nucleotide may be methylated to form 5-methylcytosine"
tcatacggaaaagcacaacgcaaaaactacagcatatattttttccctctaagctttttccgcacccttgtggacttaccctttgctgcgttctgagagtgcacagatgaccaaatagacca

SEQ ID NO: 25717 - DNA, 122 bp, Homo sapiens
  misc_feature (61)..(62): /note="This region represents a CpG dinucleotide"
  misc_feature (61)..(61): /note="Nucleotide may be methylated to form 5-methylcytosine"
atcggattccaagcagctcaggggattgtctttttctagcaccttcttgccactcctaagcgtcctccgtgaccccggctgggatttagcctggtgctgtgtcagccccgggctcccagggg

SEQ ID NO: 25718 - DNA, 122 bp, Homo sapiens
  misc_feature (61)..(62): /note="This region represents a CpG dinucleotide"
  misc_feature (61)..(61): /note="Nucleotide may be methylated to form 5-methylcytosine"
cccctcccatcaaggagctccttatttttgcctcctcttgttgtacttactgtggagggccgtggaagcctttgaggaccagaagtcttgaggcgataggttctactcgtgaatcctttgaa

SEQ ID NO: 25719 - DNA, 122 bp, Homo sapiens
  misc_feature (61)..(62): /note="This region represents a CpG dinucleotide"
  misc_feature (61)..(61): /note="Nucleotide may be methylated to form 5-methylcytosine"
gttcgaatttatctgtgtgatttatttccaatcccagctggtggattagagcctgagcaccgctctcctccttttcctccccactaatcatcacttctagttattctagcaaataagttact

SEQ ID NO: 25720 - DNA, 122 bp, Homo sapiens
  misc_feature (61)..(62): /note="This region represents a CpG dinucleotide"
  misc_feature (61)..(61): /note="Nucleotide may be methylated to form 5-methylcytosine"
ctgaaggtgtcttaaagtagttaaagacaggttctctagaaagctgactcacagtggtttcgatggcttacatgggtcaaatttgaaacatccttgtactaaaacaaaatagcgtaccaagt

SEQ ID NO: 25721 - DNA, 122 bp, Homo sapiens
  misc_feature (61)..(62): /note="This region represents a CpG dinucleotide"
  misc_feature (61)..(61): /note="Nucleotide may be methylated to form 5-methylcytosine"
aaatcactgaatccaacaactttatttcaaaggcaggtaaactactgtccagacaggtgacgtgactcacccatgatgatggcctgggattagaagccaagtcttccattcctggccctgag

SEQ ID NO: 25722 - DNA, 122 bp, Homo sapiens
  misc_feature (61)..(62): /note="This region represents a CpG dinucleotide"
  misc_feature (61)..(61): /note="Nucleotide may be methylated to form 5-methylcytosine"
gcagtgaaagtggcattttcttttgtttggtagtaacataccacattgcaccaagcatatcgctggtgggtgtgattactatatcagataaagaaatctcattgaagaatctaacacaaatg

SEQ ID NO: 25723 - DNA, 122 bp, Homo sapiens
  misc_feature (61)..(62): /note="This region represents a CpG dinucleotide"
  misc_feature (61)..(61): /note="Nucleotide may be methylated to form 5-methylcytosine"
cacagctaggcctctttataaccggcgagtctttttcctttcacacgccatttgcaggcgcgtggcatggtatttgtaactaattttcagtagcaagtgggtcactggtattcacagagtca

SEQ ID NO: 25724 - DNA, 122 bp, Homo sapiens
  misc_feature (61)..(62): /note="This region represents a CpG dinucleotide"
  misc_feature (61)..(61): /note="Nucleotide may be methylated to form 5-methylcytosine"
tcccactattctacagaatatactctgaattgatcaagccagtcttcccacttctctctgcgtgagccaagccttttctcatttccctgctttcaattatccaggagtggtaaattcaaaca

SEQ ID NO: 25725 - DNA, 122 bp, Homo sapiens
  misc_feature (61)..(62): /note="This region represents a CpG dinucleotide"
  misc_feature (61)..(61): /note="Nucleotide may be methylated to form 5-methylcytosine"
acaaatggggtttggatggttcactgtctgtgttcagcatatctatccagagccccaattcgtctctccttccggtgaccgatgcctgattactactgtggtacctaggcagggcctccggg

SEQ ID NO: 25726 - DNA, 122 bp, Homo sapiens
  misc_feature (61)..(62): /note="This region represents a CpG dinucleotide"
  misc_feature (61)..(61): /note="Nucleotide may be methylated to form 5-methylcytosine"
ttggtgaggtcctctggccccgccccgccagggaggatttccaggccggcccgaccagctcgccctgcatacacttcttggctgtgtgcgctcagcaggacgtgggaggctccggcttcaag

SEQ ID NO: 25727 - DNA, 122 bp, Homo sapiens
  misc_feature (61)..(62): /note="This region represents a CpG dinucleotide"
  misc_feature (61)..(61): /note="Nucleotide may be methylated to form 5-methylcytosine"
agacttaatatctcataaatacagacacgctctctaaatgcatgctctgggaaagccagccggctgcgatagatgaaaaccgctcaccagtccccagctgacccggcgctgtcttttctgag

SEQ ID NO: 25728 - DNA, 122 bp, Homo sapiens
  misc_feature (61)..(62): /note="This region represents a CpG dinucleotide"
  misc_feature (61)..(61): /note="Nucleotide may be methylated to form 5-methylcytosine"
gactttgtttttactgaaaaattgaaacattaattttttcccttatgatttgtaccaaatcgtataagaaagaagaatgtcagcctgtagacccaacccaggaacttgctatttccatctga

SEQ ID NO: 25729 - DNA, 122 bp, Homo sapiens
  misc_feature (61)..(62): /note="This region represents a CpG dinucleotide"
  misc_feature (61)..(61): /note="Nucleotide may be methylated to form 5-methylcytosine"
ttcctattttctctgccaaggtcataaaccttgaagtggaaaggatccttggacgtcaggcggtgcagcctccttgaggttctgaaatctggcagccacattctggcctacagcagtccagc

SEQ ID NO: 25730 - DNA, 122 bp, Homo sapiens
  misc_feature (61)..(62): /note="This region represents a CpG dinucleotide"
  misc_feature (61)..(61): /note="Nucleotide may be methylated to form 5-methylcytosine"
cgccaaggtcaagcttcccatcctaagaatcacagacagcccggccatgcaccaccacttcgagcctccgaccaactgatagctgctggtcccaagtagcgctaggattttcgctttcccag

SEQ ID NO: 25731 - DNA, 122 bp, Homo sapiens
  misc_feature (61)..(62): /note="This region represents a CpG dinucleotide"
  misc_feature (61)..(61): /note="Nucleotide may be methylated to form 5-methylcytosine"
ccctgcagcagctccaggcctgggtctggaaactcactcatttagtgaatatctgtcgaacggaactggatttgggtttccttgtgggtaagaagagggcaggtggtgcgaagttagaggat

SEQ ID NO: 25732 - DNA, 122 bp, Homo sapiens
  misc_feature (61)..(62): /note="This region represents a CpG dinucleotide"
  misc_feature (61)..(61): /note="Nucleotide may be methylated to form 5-methylcytosine"
aatacagggacagagaaacaggttaagcgcccccaagggaacgtagtcagcagatccagacgatgagaagccctacggggcaaacagctccttccttcaccaagtgaatcataaggaaaaag

SEQ ID NO: 25733 - DNA, 122 bp, Homo sapiens
  misc_feature (61)..(62): /note="This region represents a CpG dinucleotide"
  misc_feature (61)..(61): /note="Nucleotide may be methylated to form 5-methylcytosine"
ggtgcccaaacccagtctgttcaatggcatcacccggtttatcatgacaactacttcaggcggtgggcagccattactcacacagcagcagagatgaagaaccaccaccctgtgggcaaacc

SEQ ID NO: 25734 - DNA, 122 bp, Homo sapiens
  misc_feature (61)..(62): /note="This region represents a CpG dinucleotide"
  misc_feature (61)..(61): /note="Nucleotide may be methylated to form 5-methylcytosine"
cagtgttcagtcaagacgtatacagggtgagcctttcagaaaacgtgtacccggggaccacggtgctacaggtgactgccacggaccaggatgagggtgtcaatgccgagattactttctct

SEQ ID NO: 25735 - DNA, 122 bp, Homo sapiens
  misc_feature (61)..(62): /note="This region represents a CpG dinucleotide"
  misc_feature (61)..(61): /note="Nucleotide may be methylated to form 5-methylcytosine"
ctttttcctctctccacccccaatattagtgctttcatcatggctacttcctcccagccacgctgtggcaaacaagggcagtttgtcatcatgaggtcacataatatccttatatgaatgac

SEQ ID NO: 25736 - DNA, 122 bp, Homo sapiens
  misc_feature (61)..(62): /note="This region represents a CpG dinucleotide"
  misc_feature (61)..(61): /note="Nucleotide may be methylated to form 5-methylcytosine"
cacccgcctcggcctcccaaagtgctgggattacaggagtgagccaccatgcccagcccacggatgtttacagagcttctgaagacacttggggttcaaaaagcactgcttccatttgcaat

SEQ ID NO: 25737 - DNA, 122 bp, Homo sapiens
  misc_feature (61)..(62): /note="This region represents a CpG dinucleotide"
  misc_feature (61)..(61): /note="Nucleotide may be methylated to form 5-methylcytosine"
gaggtctgggtcactgctgggtcccattctgggctctgggcccaggtatgggctggtgggcgttaaagggcttatgcagggctgccccaaaaatgggtgaatgtgttagtgcatgcacacac

SEQ ID NO: 25738 - DNA, 122 bp, Homo sapiens
  misc_feature (61)..(62): /note="This region represents a CpG dinucleotide"
  misc_feature (61)..(61): /note="Nucleotide may be methylated to form 5-methylcytosine"
agttcacacactgagccactcgcacatgcgagcacattccttccttccttctcactctctcggcccttgacttctacaagcccatggaacatttctggaaagacgttcttgatccagcaggg

SEQ ID NO: 25739 - DNA, 122 bp, Homo sapiens
  misc_feature (61)..(62): /note="This region represents a CpG dinucleotide"
  misc_feature (61)..(61): /note="Nucleotide may be methylated to form 5-methylcytosine"
gtaaggacaccttctgagtctgcacccctttaattgacacataggggatgtgacccctgacgtttctgcttcccttattctttctgcaactaagcaaacatagaatgtggattttcccatgc

SEQ ID NO: 25740 - DNA, 122 bp, Homo sapiens
  misc_feature (61)..(62): /note="This region represents a CpG dinucleotide"
  misc_feature (61)..(61): /note="Nucleotide may be methylated to form 5-methylcytosine"
ataaaggccgcacccaaaccatcccagattaagcaggggttcaaccgtggtggggttcagcggctgtaaacctcataaagctgcagacaccctcgtgtgcctgagttgctcaagtggtttgt

SEQ ID NO: 25741 - DNA, 122 bp, Homo sapiens
  misc_feature (61)..(62): /note="This region represents a CpG dinucleotide"
  misc_feature (61)..(61): /note="Nucleotide may be methylated to form 5-methylcytosine"
cgtgagacaaggatttacaaaatttcctcacctcctctcctccagattccatgcacaaggcgtctagctagaggagttagcaaatagtctataacgtgaaggttcaaactctagtataattc

SEQ ID NO: 25742 - DNA, 122 bp, Homo sapiens
  misc_feature (61)..(62): /note="This region represents a CpG dinucleotide"
  misc_feature (61)..(61): /note="Nucleotide may be methylated to form 5-methylcytosine"
attatgatttcaaccatgagactacatgaaattaagcaacatttaatgtttaatccctagcgaatgacatacttttgctctgggatgtgatttgtttgccgtaattcgttttagtgatattt

SEQ ID NO: 25743 - DNA, 122 bp, Homo sapiens
  misc_feature (61)..(62): /note="This region represents a CpG dinucleotide"
  misc_feature (61)..(61): /note="Nucleotide may be methylated to form 5-methylcytosine"
atactgctttgctcagccatgctcctagcttctccaacagacatggagtcttgctggtcacgaaatctcttgtttcatacatgttcctcctcttctcctgtgaccctggggtccctcagtct

SEQ ID NO: 25744 - DNA, 122 bp, Homo sapiens
  misc_feature (61)..(62): /note="This region represents a CpG dinucleotide"
  misc_feature (61)..(61): /note="Nucleotide may be methylated to form 5-methylcytosine"
gaggctcccccaccctcagctgcttccctgcaagtgccccgtgtctgcatcccatgcttgcgcagtggctaattctggtgtctcatcagacagtaattatgggggaatcagcagtgccgtca

SEQ ID NO: 25745 - DNA, 122 bp, Homo sapiens
  misc_feature (61)..(62): /note="This region represents a CpG dinucleotide"
  misc_feature (61)..(61): /note="Nucleotide may be methylated to form 5-methylcytosine"
ctgcccccatccacggtggctgctttcagttccccaatgattctgcattttaacgaaaagcgtgatcctcttccattcagttagtataattgttacccagacaaatcactataattaaattc

SEQ ID NO: 25746 - DNA, 122 bp, Homo sapiens
  misc_feature (61)..(62): /note="This region represents a CpG dinucleotide"
  misc_feature (61)..(61): /note="Nucleotide may be methylated to form 5-methylcytosine"
ttttggagcaaattttaactgaacacattgtcagagggtcaggccaagtttggcactgctcgtgtatctcagccaccttccagttttcagcacgatgtctgaactgaaaaaacaccattgct

SEQ ID NO: 25747 - DNA, 122 bp, Homo sapiens
  misc_feature (61)..(62): /note="This region represents a CpG dinucleotide"
  misc_feature (61)..(61): /note="Nucleotide may be methylated to form 5-methylcytosine"
agtggtgagtaacagcctggcctgagacacaggctcacgcatctgacactggctgagccgcgcactagctgagtggccttgggcatgttttgtaacctccttgactgttcccttatctgtga

SEQ ID NO: 25748 - DNA, 122 bp, Homo sapiens
  misc_feature (61)..(62): /note="This region represents a CpG dinucleotide"
  misc_feature (61)..(61): /note="Nucleotide may be methylated to form 5-methylcytosine"
cccactgggcacccgctagggaaacaatgggagggatgaaaacagagaaggaaaagaaagcggatccagggttcccacctccctgggtgaacccgactatcaatgcccacattagacaaaag

SEQ ID NO: 25749 - DNA, 122 bp, Homo sapiens
  misc_feature (61)..(62): /note="This region represents a CpG dinucleotide"
  misc_feature (61)..(61): /note="Nucleotide may be methylated to form 5-methylcytosine"
gataggtcacgcaggatgaggactgagaactctgagagctgatcattaggtttagcagtgcgtttaagtcatcagtgactgacaagaacaactgcaggcgtgcatctgatggggatgggttc

SEQ ID NO: 25750 - DNA, 122 bp, Homo sapiens
  misc_feature (61)..(62): /note="This region represents a CpG dinucleotide"
  misc_feature (61)..(61): /note="Nucleotide may be methylated to form 5-methylcytosine"
ctacaaagactatttcaattcacaccatcaataatactgtagaaaaatgccagtgaaactcgcatttatcatgtttgtattctgcctttttttttttttttgatatggagacttgctctatc

SEQ ID NO: 25751 - DNA, 122 bp, Homo sapiens
  misc_feature (61)..(62): /note="This region represents a CpG dinucleotide"
  misc_feature (61)..(61): /note="Nucleotide may be methylated to form 5-methylcytosine"
aaacattatacttaagctcagaacaaagtccacagaaagttaaatgtctttaaaaccacacgaaaatatcatccttaagtgcatttattttaaattaagaatttaaaattaagaattgagct

SEQ ID NO: 25752 - DNA, 122 bp, Homo sapiens
  misc_feature (61)..(62): /note="This region represents a CpG dinucleotide"
  misc_feature (61)..(61): /note="Nucleotide may be methylated to form 5-methylcytosine"
aagagaaggcatgcgttaaattgtggtcatgcggagctaagtgtctttgagacattaaatcggacacgtcctgtaggttatacaggcgccaaggaagaaaatctgcataagaacacagtttt

SEQ ID NO: 25753 - DNA, 122 bp, Homo sapiens
  misc_feature (61)..(62): /note="This region represents a CpG dinucleotide"
  misc_feature (61)..(61): /note="Nucleotide may be methylated to form 5-methylcytosine"
gaggagagggagggtggaggcctggcagtttacaggggcctgggagtggttagactcaggcggtgaacatggtgtgatgatgttatggtgactcagtatgccatctatccatattgtatgga

SEQ ID NO: 25754 - DNA, 122 bp, Homo sapiens
  misc_feature (61)..(62): /note="This region represents a CpG dinucleotide"
  misc_feature (61)..(61): /note="Nucleotide may be methylated to form 5-methylcytosine"
cactccgactcgtatgcctgctctctttaaaatagccaatcggaattagcttaaactgtgcggaccaaccctagccaatagtggaacgacacagcagtaagggctacctgcatcaggaataa

SEQ ID NO: 25755 - DNA, 122 bp, Homo sapiens
  misc_feature (61)..(62): /note="This region represents a CpG dinucleotide"
  misc_feature (61)..(61): /note="Nucleotide may be methylated to form 5-methylcytosine"
gaactcctggcctcaagggatccttccatctcagcctgccaaatgctgggattataggcacgagccactgcccccagctgcgatacagaatattttcatcatcacagaatgttttatttgac

SEQ ID NO: 25756 - DNA, 122 bp, Homo sapiens
  misc_feature (61)..(62): /note="This region represents a CpG dinucleotide"
  misc_feature (61)..(61): /note="Nucleotide may be methylated to form 5-methylcytosine"
ctcatgtttgtccttatctccaaggcaaaatacaaacactgtttcagggagctgcttctccgctccaagacaaatgagctgttgaagtgtcatgattttaaaatctggtgatatacataaag

SEQ ID NO: 25757 - DNA, 122 bp, Homo sapiens
  misc_feature (61)..(62): /note="This region represents a CpG dinucleotide"
  misc_feature (61)..(61): /note="Nucleotide may be methylated to form 5-methylcytosine"
aatcactctaagtggtgttcctgtcaccctttaaggtagcctggtcagaattcctgcttccgggccctagcacctactctggcctgaccatttcagccaagggggaagggatgatgttgagg

SEQ ID NO: 25758 - DNA, 122 bp, Homo sapiens
  misc_feature (61)..(62): /note="This region represents a CpG dinucleotide"
  misc_feature (61)..(61): /note="Nucleotide may be methylated to form 5-methylcytosine"
ggagggaaggaaagtgtgtacagacacgcctagttgtctgactaaatggcctttcccaaacgccttctctcctgctgttttttctatagaaagagaaatatgaaatactttcccagccacca

SEQ ID NO: 25759 - DNA, 122 bp, Homo sapiens
  misc_feature (61)..(62): /note="This region represents a CpG dinucleotide"
  misc_feature (61)..(61): /note="Nucleotide may be methylated to form 5-methylcytosine"
gagttctattctaattgtggcaggaagccactgagggtttagaatagaagagtgtcataacgtgacattcactttaaaagagcactctggcctacttgtggttgatttccagttgtctgagc

SEQ ID NO: 25760 - DNA, 122 bp, Homo sapiens
  misc_feature (61)..(62): /note="This region represents a CpG dinucleotide"
  misc_feature (61)..(61): /note="Nucleotide may be methylated to form 5-methylcytosine"
gtgtttcttcttgaagacggaattttgaaaagcttctgattcttctgttgcatcatcctccgtgacacctcataatgcagatggccaccacgcccagccagggcatggacaggcaaccacct

SEQ ID NO: 25761 - DNA, 122 bp, Homo sapiens
  misc_feature (61)..(62): /note="This region represents a CpG dinucleotide"
  misc_feature (61)..(61): /note="Nucleotide may be methylated to form 5-methylcytosine"
agcttctaacagtagtttcaagcacaaatctccaagaaaatgtgcacctttcagactaaacgtcataaaaataattagtgttattaaccttagtgaaaaataaaattctggcttgtaaaaca

SEQ ID NO: 25762 - DNA, 122 bp, Homo sapiens
  misc_feature (61)..(62): /note="This region represents a CpG dinucleotide"
  misc_feature (61)..(61): /note="Nucleotide may be methylated to form 5-methylcytosine"
gggcagcagctgccatatggccacagtcagctggatcagatgtttataagcttccttcttcgtccctctctgtcctctcagcctcctaatttgatcacggctaccttgtgagctgccctcca

SEQ ID NO: 25763 - DNA, 122 bp, Homo sapiens
  misc_feature (61)..(62): /note="This region represents a CpG dinucleotide"
  misc_feature (61)..(61): /note="Nucleotide may be methylated to form 5-methylcytosine"
aaattctaagagatatgaaattcaaaggacattgtcaacacttttctggctcagcttttacgaaagtcttcagagttcagtagccctttgttcaatgtaacagaagtactaactaatttgag

SEQ ID NO: 25764 - DNA, 122 bp, Homo sapiens
  misc_feature (61)..(62): /note="This region represents a CpG dinucleotide"
  misc_feature (61)..(61): /note="Nucleotide may be methylated to form 5-methylcytosine"
ctccctgctcctgtccatctcttctataaacaccaccttgcccgagagccaagcccagcccggtttgcctctggagtctggaacaatgactcagtttgtgcctcatcacagtttgagcccga

SEQ ID NO: 25765 - DNA, 122 bp, Homo sapiens
  misc_feature (61)..(62): /note="This region represents a CpG dinucleotide"
  misc_feature (61)..(61): /note="Nucleotide may be methylated to form 5-methylcytosine"
ttgaaggaaagaccccaggaaagtgggatttgggtgttcgggtcacgagtgggctgaaggcgcctctactcacctgcacgtagtccaccgaatctccgagcgccttgaaggctgtgtacatg

SEQ ID NO: 25766 - DNA, 122 bp, Homo sapiens
  misc_feature (61)..(62): /note="This region represents a CpG dinucleotide"
  misc_feature (61)..(61): /note="Nucleotide may be methylated to form 5-methylcytosine"
gtgggctggcagtgtgcttcctgcacccagcgccagcccgccctggggaggggctgaacccgccctgctcgtgataaggcacaagcaagggctgccctgaaggaagctccaaagagaaagga

SEQ ID NO: 25767 - DNA, 122 bp, Homo sapiens
  misc_feature (61)..(62): /note="This region represents a CpG dinucleotide"
  misc_feature (61)..(61): /note="Nucleotide may be methylated to form 5-methylcytosine"
ccagggaaagccccactgagaaagcaacactgggaaaagaccagaggaagtgaggcaggtcgccatggagataactgtaagaagactctttgaagagcaagaacagtgaatgagaggggtct

SEQ ID NO: 25768 - DNA, 122 bp, Homo sapiens
  misc_feature (61)..(62): /note="This region represents a CpG dinucleotide"
  misc_feature (61)..(61): /note="Nucleotide may be methylated to form 5-methylcytosine"
tcatagtccaagggtgcttaggaagctgatttctttacctcatcgacttccacccattagcggtgctaaggaaaacaaatgggattgaaaaggcaagttgccagatacataaaaataatctg

SEQ ID NO: 25769 - DNA, 122 bp, Homo sapiens
  misc_feature (61)..(62): /note="This region represents a CpG dinucleotide"
  misc_feature (61)..(61): /note="Nucleotide may be methylated to form 5-methylcytosine"
cctgagagttgacttgaagctgacaggtggcttgagggactgcatgtgtagagacccctccgtgcacacacatgatacccacagataacccaggtgcaaatgggctcctctctccgctctgc

SEQ ID NO: 25770 - DNA, 122 bp, Homo sapiens
  misc_feature (61)..(62): /note="This region represents a CpG dinucleotide"
  misc_feature (61)..(61): /note="Nucleotide may be methylated to form 5-methylcytosine"
taagtaaaagccaatagtgccctcctgtggcccattacctatgaaacaatttctcatattcgtcataaaatatttcactgtaggaaatatggatttcattgcaactcaattagtaatcatta

SEQ ID NO: 25771 - DNA, 122 bp, Homo sapiens
  misc_feature (61)..(62): /note="This region represents a CpG dinucleotide"
  misc_feature (61)..(61): /note="Nucleotide may be methylated to form 5-methylcytosine"
caacagcgtgcacattcttccccagggcaccacttccgcctccctcatccccactgctcccgatccctgtccacagacccacttcccgccctggtgtgatcctcgtggccactgtggcccct

SEQ ID NO: 25772 - DNA, 122 bp, Homo sapiens
  misc_feature (61)..(62): /note="This region represents a CpG dinucleotide"
  misc_feature (61)..(61): /note="Nucleotide may be methylated to form 5-methylcytosine"
ggaatctctgtatggcctcgcagtttgcagagtgcttcaccttctaaatgaagcctggagcgccatttcagactgaatcaaaccgtagatgccatgtgtacctacgcaacaaatctgcgcat

SEQ ID NO: 25773 - DNA, 122 bp, Homo sapiens
  misc_feature (61)..(62): /note="This region represents a CpG dinucleotide"
  misc_feature (61)..(61): /note="Nucleotide may be methylated to form 5-methylcytosine"
ggcccagtagtgcacgcaggtaatcccagcactttggggggccacggtgggaggagcccacgagtccaggagttaaagatgagcctgggcaacatagcaacatcccatctctacaaaaaaaa

SEQ ID NO: 25774 - DNA, 122 bp, Homo sapiens
  misc_feature (61)..(62): /note="This region represents a CpG dinucleotide"
  misc_feature (61)..(61): /note="Nucleotide may be methylated to form 5-methylcytosine"
ggtcatgacatccaaggtacctctgcatcattctcatcctctaaatttagattaaatacccgtggcaaaaagattaaagtttcacggctggcaagtgtctgactttaatgggacagacgcat

SEQ ID NO: 25775 - DNA, 122 bp, Homo sapiens
  misc_feature (61)..(62): /note="This region represents a CpG dinucleotide"
  misc_feature (61)..(61): /note="Nucleotide may be methylated to form 5-methylcytosine"
agtatctaggagggctgtctcagagggtgtggagaggtaccactcccatccacttcccatcgacccagacagtagtgccgtgcagctgaagaccagagagcatactttccagggacaattaa

SEQ ID NO: 25776 - DNA, 122 bp, Homo sapiens
  misc_feature (61)..(62): /note="This region represents a CpG dinucleotide"
  misc_feature (61)..(61): /note="Nucleotide may be methylated to form 5-methylcytosine"
agtctgtctccctctgactactgctctagagccgattagtgtttccaggtacctagtaagcgcttccagaactgttctgtgcagaaacaggcatgtgggctatatcttcatctttcccgttt

SEQ ID NO: 25777 - DNA, 122 bp, Homo sapiens
  misc_feature (61)..(62): /note="This region represents a CpG dinucleotide"
  misc_feature (61)..(61): /note="Nucleotide may be methylated to form 5-methylcytosine"
tcatatggcaaaggtgaagggacttttcagatataattaagctctctaatcagttaacttcgggttaatcaaaagaagattctcttgggttttgaaggtgagcccttcaataaaaaacatag

SEQ ID NO: 25778 - DNA, 122 bp, Homo sapiens
  misc_feature (61)..(62): /note="This region represents a CpG dinucleotide"
  misc_feature (61)..(61): /note="Nucleotide may be methylated to form 5-methylcytosine"
tgggattttacaaagatgaaaacctcttacacagttttaatgaatgagttggcaaatatccgattagttgttcacattcttatcatttctttcattgttcatagtcagccttagccagagaa

SEQ ID NO: 25779 - DNA, 122 bp, Homo sapiens
  misc_feature (61)..(62): /note="This region represents a CpG dinucleotide"
  misc_feature (61)..(61): /note="Nucleotide may be methylated to form 5-methylcytosine"
atatatacttacaatggaacctagcacttctaggtatttatccaagagaaatgaaacatacgcccatgaaaagacttacgcatgaatgttcatggcattatttatagtggccccaatctgaa

SEQ ID NO: 25780 - DNA, 122 bp, Homo sapiens
  misc_feature (61)..(62): /note="This region represents a CpG dinucleotide"
  misc_feature (61)..(61): /note="Nucleotide may be methylated to form 5-methylcytosine"
ggggaagccacccgggaggaacctccccacgtgtggccttaggcaaggccctgaccctggcggcaccccatgagtacgtagctcagccaatcatgtcgttcagtgctgtaagctcattcccc

SEQ ID NO: 25781 - DNA, 122 bp, Homo sapiens
  misc_feature (61)..(62): /note="This region represents a CpG dinucleotide"
  misc_feature (61)..(61): /note="Nucleotide may be methylated to form 5-methylcytosine"
taattggcgctaggctttgttgtaggaagtttgtaagttttaaaatagcaagtagattcacgtagaccttgtcaggaaattggtcactatccatctaggccctagaagtgagaggaggaatc

SEQ ID NO: 25782 - DNA, 122 bp, Homo sapiens
  misc_feature (61)..(62): /note="This region represents a CpG dinucleotide"
  misc_feature (61)..(61): /note="Nucleotide may be methylated to form 5-methylcytosine"
agtatgaacccttatttggcagtatctgttcctctttgctgtcgtagctgcttcctgttacgtgaggtgcccctcttcctcctcattcttaaattttgaaactctttttaaggttggactta

SEQ ID NO: 25783 - DNA, 122 bp, Homo sapiens
  misc_feature (61)..(62): /note="This region represents a CpG dinucleotide"
  misc_feature (61)..(61): /note="Nucleotide may be methylated to form 5-methylcytosine"
aattggtcgcagccggtgctagggaaagacaggctcccagtagatagaaaacacctgaaacgggtgataagcagcttcccggtaagatcttagcagttgggcgagtgtactcaagcatgagc

SEQ ID NO: 25784 - DNA, 122 bp, Homo sapiens
  misc_feature (61)..(62): /note="This region represents a CpG dinucleotide"
  misc_feature (61)..(61): /note="Nucleotide may be methylated to form 5-methylcytosine"
ttcctgtctttaagtgcaccagtgctacttttcagctggctgcatttcctcttaagctttcgaggtgtaaatacattggatttgaatgtgtgtctgtttgcattgggcagaggtggattgct

SEQ ID NO: 25785 - DNA, 122 bp, Homo sapiens
  misc_feature (61)..(62): /note="This region represents a CpG dinucleotide"
  misc_feature (61)..(61): /note="Nucleotide may be methylated to form 5-methylcytosine"
agattgcttctagagatcttttgaaaatttcacacgattgaaggcttaggggcttcactgcgttcgcatttcaaactcagatcagtgggatcacaatcaaaaatagaggtctggaaaatttt

SEQ ID NO: 25786 - DNA, 122 bp, Homo sapiens
  misc_feature (61)..(62): /note="This region represents a CpG dinucleotide"
  misc_feature (61)..(61): /note="Nucleotide may be methylated to form 5-methylcytosine"
agggagattaaaacaagaccacgtggttggtgacatcactgagctgctgggtcaaaccatcgctgaagccttctcttctggatgtcagctacagaagccaatagaccccctttgttacatta

SEQ ID NO: 25787 - DNA, 122 bp, Homo sapiens
  misc_feature (61)..(62): /note="This region represents a CpG dinucleotide"
  misc_feature (61)..(61): /note="Nucleotide may be methylated to form 5-methylcytosine"
cacccctgtggctctaggaatcagccatacaatcgacttactgctcagatcattagctgacgagaccccaatgactcatcacatctgttggttaattgagagtgagaggactggagcacaca

SEQ ID NO: 25788 - DNA, 122 bp, Homo sapiens
  misc_feature (61)..(62): /note="This region represents a CpG dinucleotide"
  misc_feature (61)..(61): /note="Nucleotide may be methylated to form 5-methylcytosine"
cttttgatatcaattctaagttcagacagcttctggcctacttcctgttatactgaccagcgtatgtttatactaatagtgactcaggattaaaaggaatgtaatattggcaaatgacattt

SEQ ID NO: 25789 - DNA, 122 bp, Homo sapiens
  misc_feature (61)..(62): /note="This region represents a CpG dinucleotide"
  misc_feature (61)..(61): /note="Nucleotide may be methylated to form 5-methylcytosine"
ctgctcagcattgggtcagttcttaattatccacgaatgggtcagaaactccgtacacagcgttttcctgataccttgaatgtcattggaacttcacagaggagccaacggaagagcgtggg

SEQ ID NO: 25790 - DNA, 122 bp, Homo sapiens
  misc_feature (61)..(62): /note="This region represents a CpG dinucleotide"
  misc_feature (61)..(61): /note="Nucleotide may be methylated to form 5-methylcytosine"
gagacactaaggaaaagatctaaacaaagttctatggcagagatctcatccatcagacttcgacaactattaggagggctgaatccaggctaccaagggaacactttaagaatattctggtc

SEQ ID NO: 25791 - DNA, 122 bp, Homo sapiens
  misc_feature (61)..(62): /note="This region represents a CpG dinucleotide"
  misc_feature (61)..(61): /note="Nucleotide may be methylated to form 5-methylcytosine"
catcttgggagctcttattacaaaatttaaattcctgaatcaacagagcatttcaaacagcgaactgttgaactcctccaagaagatcatgttgcagagggcaacggaaggtcaggaacttc

SEQ ID NO: 25792 - DNA, 122 bp, Homo sapiens
  misc_feature (61)..(62): /note="This region represents a CpG dinucleotide"
  misc_feature (61)..(61): /note="Nucleotide may be methylated to form 5-methylcytosine"
ctgagtgcttccgagtgaactctccctattcaagcctctctctccagcagaagggtcaggcggctaatcattaaatcaaactaatgtcaccctatcacaatcagcctgagagaaggagggtt

SEQ ID NO: 25793 - DNA, 122 bp, Homo sapiens
  misc_feature (61)..(62): /note="This region represents a CpG dinucleotide"
  misc_feature (61)..(61): /note="Nucleotide may be methylated to form 5-methylcytosine"
tatgaccctcattggcttaagactgtattgccttaagactacctgaagtcattatgcccacgtgacctaaggggtggaagtcccattatcctcacaggtgtagaatgggatcagatcaagtc

SEQ ID NO: 25794 - DNA, 122 bp, Homo sapiens
  misc_feature (61)..(62): /note="This region represents a CpG dinucleotide"
  misc_feature (61)..(61): /note="Nucleotide may be methylated to form 5-methylcytosine"
atcttttgattccgctattgaggtagaggcgggacgggggaagcagctttcagtaagacccgcccgctcttgccctgtcagtttaccattgccatggcaacacccggaagttgccgccccct

SEQ ID NO: 25795 - DNA, 122 bp, Homo sapiens
  misc_feature (61)..(62): /note="This region represents a CpG dinucleotide"
  misc_feature (61)..(61): /note="Nucleotide may be methylated to form 5-methylcytosine"
acggcggtaccagctctctgtgatagcagtgcagagcacggagctcgggccgcagcacagcgagcccgcccacctctacatcatcacctgtgagtgccgtgggccctgcgcgtgggcggggc

SEQ ID NO: 25796 - DNA, 122 bp, Homo sapiens
  misc_feature (61)..(62): /note="This region represents a CpG dinucleotide"
  misc_feature (61)..(61): /note="Nucleotide may be methylated to form 5-methylcytosine"
cagaaaagattgctgctacatacattaggatgttaactgggtacactgatcacagggcttcgataacccaagtaagtggcaaggtgttgatacacttgcagaatatcaactgagcctagccg

SEQ ID NO: 25797 - DNA, 122 bp, Homo sapiens
  misc_feature (61)..(62): /note="This region represents a CpG dinucleotide"
  misc_feature (61)..(61): /note="Nucleotide may be methylated to form 5-methylcytosine"
tacaaagtaaaaatatttacgagagctaaatcagcaaaatgatcaaacataaacattccccgtacatctattctgtttacatatcactcagacaagtgtaaataatcttaatactctgaaga

SEQ ID NO: 25798 - DNA, 122 bp, Homo sapiens
  misc_feature (61)..(62): /note="This region represents a CpG dinucleotide"
  misc_feature (61)..(61): /note="Nucleotide may be methylated to form 5-methylcytosine"
ctcccacagttgactttggtgtgagtgctcagctggacaggactgtggggcggagaaatacgttcataggcactccctactggatggctcctgaggtcatcgcctgtgatgagaacccagat

SEQ ID NO: 25799 - DNA, 122 bp, Homo sapiens
  misc_feature (61)..(62): /note="This region represents a CpG dinucleotide"
  misc_feature (61)..(61): /note="Nucleotide may be methylated to form 5-methylcytosine"
actgtagtgcagcccaccacccagtctttcaggtgagagaagtgatttctgggggtgctgcgggggaggatgggtagaagaggatctaaaaacaaggaaaactccccctacagcccatcact

SEQ ID NO: 25800 - DNA, 122 bp, Homo sapiens
  misc_feature (61)..(62): /note="This region represents a CpG dinucleotide"
  misc_feature (61)..(61): /note="Nucleotide may be methylated to form 5-methylcytosine"
cagtctcctgtcatccccagcagggagctcagagtcaagcccaaagtgtctgtgtgcactcgtggcttccagagatcagcttgaagccaggagttactttgttagcaaagtttagatgtaac

SEQ ID NO: 25801 - DNA, 122 bp, Homo sapiens
  misc_feature (61)..(62): /note="This region represents a CpG dinucleotide"
  misc_feature (61)..(61): /note="Nucleotide may be methylated to form 5-methylcytosine"
ccctgctattttacccgggctgactttgggctgaattgagtctgtttgtccactatgaaacgttggcaaccaccaagagtggagaaaaatacaagcacatttgaatgtttcgtatcttttta

SEQ ID NO: 25802 - DNA, 122 bp, Homo sapiens
  misc_feature (61)..(62): /note="This region represents a CpG dinucleotide"
  misc_feature (61)..(61): /note="Nucleotide may be methylated to form 5-methylcytosine"
aacaattgactggattagtggatgctgaaagcattcagcaaatggcaccctaaaatatgccgctggtttgccactgacttcaaaatgaggtcacttgggcacagcacatgcagggaggggct

SEQ ID NO: 25803 - DNA, 122 bp, Homo sapiens
  misc_feature (61)..(62): /note="This region represents a CpG dinucleotide"
  misc_feature (61)..(61): /note="Nucleotide may be methylated to form 5-methylcytosine"
ttaatatgtggcttaaacccagcactcagacatctgagaacacgcattggattcctgaggcgtcacagcaatgctcagcaggctggctgccacatggtggcccaagaagcaggtgcttgtta

SEQ ID NO: 25804 - DNA, 122 bp, Homo sapiens
  misc_feature (61)..(62): /note="This region represents a CpG dinucleotide"
  misc_feature (61)..(61): /note="Nucleotide may be methylated to form 5-methylcytosine"
tttgagtgattctgtatactgatagggaatatcaagagtgttactgggttttgtgaatcacgggccttgaaagtattattaatgaataaatgacataatcaatagacaaggtagaaatgaat

SEQ ID NO: 25805 - DNA, 122 bp, Homo sapiens
  misc_feature (61)..(62): /note="This region represents a CpG dinucleotide"
  misc_feature (61)..(61): /note="Nucleotide may be methylated to form 5-methylcytosine"
tgtttgtgtatacgaggaaggtggagtcaccggttcttcgtggccatcagaggaccgacacgcccataggtctcatgcattaagtctgcgttgagcaatccctaacacggtttttgcctaca

SEQ ID NO: 25806 - DNA, 122 bp, Homo sapiens
  misc_feature (61)..(62): /note="This region represents a CpG dinucleotide"
  misc_feature (61)..(61): /note="Nucleotide may be methylated to form 5-methylcytosine"
ctctatcttattgagcacacttttgacggtggagatgccgctttattgcaaatccctccccggactcctcctcttcttccaaaattcaggctgaagacaattgccctgattccctaacctaa

SEQ ID NO: 25807 - DNA, 122 bp, Homo sapiens
  misc_feature (61)..(62): /note="This region represents a CpG dinucleotide"
  misc_feature (61)..(61): /note="Nucleotide may be methylated to form 5-methylcytosine"
aacaaaaatctcactcactgattagtaacctttttcagttacaaagaaaaacaacatactcgctaaactccctaacatcaggagccatcaggcaaattatctcaagtcttgatttacaaacc

SEQ ID NO: 25808 - DNA, 122 bp, Homo sapiens
  misc_feature (61)..(62): /note="This region represents a CpG dinucleotide"
  misc_feature (61)..(61): /note="Nucleotide may be methylated to form 5-methylcytosine"
cctcttaattggacttacagttccacattgctggggaggcctcagaatcacggtgggaggcgaaaggctttctcacatggcagtggcaagagaaaataaggaagatgcaaaagcggagcccc

SEQ ID NO: 25809 - DNA, 122 bp, Homo sapiens
  misc_feature (61)..(62): /note="This region represents a CpG dinucleotide"
  misc_feature (61)..(61): /note="Nucleotide may be methylated to form 5-methylcytosine"
attacagttgagagcagagcaaatcctttaattgtataagagcatcagattaagcagtaacgtccatgcagttcattctgctagctggtagtctcttctcagaaacaaatgtttactaagta

SEQ ID NO: 25810 - DNA, 122 bp, Homo sapiens
  misc_feature (61)..(62): /note="This region represents a CpG dinucleotide"
  misc_feature (61)..(61): /note="Nucleotide may be methylated to form 5-methylcytosine"
acctgcaccccagatgaaaatgtacccaaatgcatcgttcatgctgggaaacctctggaacgtaatgggaggaaggatcgggcgagccctgtccggctcctgttcttacactctcgtgcctg

SEQ ID NO: 25811 - DNA, 122 bp, Homo sapiens
  misc_feature (61)..(62): /note="This region represents a CpG dinucleotide"
  misc_feature (61)..(61): /note="Nucleotide may be methylated to form 5-methylcytosine"
aatcttttataaaacatttctccagtaaattgtgctatataatatgccatgtggcatcatcgtaaaatacccaaatctgtacatgctcatctctagggaattctggtgaagaaacagtcaac

SEQ ID NO: 25812 - DNA, 122 bp, Homo sapiens
  misc_feature (61)..(62): /note="This region represents a CpG dinucleotide"
  misc_feature (61)..(61): /note="Nucleotide may be methylated to form 5-methylcytosine"
agcggctccaaggacagagtctccagatccaggacagctggtggccttcacattgttttgcgtctcccaggttctcttaattataaccaatttgccaccctcagcaattccttgttcccctc

SEQ ID NO: 25813 - DNA, 122 bp, Homo sapiens
  misc_feature (61)..(62): /note="This region represents a CpG dinucleotide"
  misc_feature (61)..(61): /note="Nucleotide may be methylated to form 5-methylcytosine"
tcctcaccacaaccacaggaggcaggtactaccatcatcccctgttcacagatgaggaaacgacagaggaagatgaagtttcctgcccaaggtcacaccccaaagtgttggaggagccgggc

SEQ ID NO: 25814 - DNA, 122 bp, Homo sapiens
  misc_feature (61)..(62): /note="This region represents a CpG dinucleotide"
  misc_feature (61)..(61): /note="Nucleotide may be methylated to form 5-methylcytosine"
aagttgtagtgagagagagggaagatgacagtttggttttagttgatgtgtacagaaatacgggtgcccaggagcccacaaaacggccagaggagaaatgctttcaaaggcaagctgcaggg

SEQ ID NO: 25815 - DNA, 122 bp, Homo sapiens
  misc_feature (61)..(62): /note="This region represents a CpG dinucleotide"
  misc_feature (61)..(61): /note="Nucleotide may be methylated to form 5-methylcytosine"
caggtgcaaaactgagcctcagttgactcatttggaaatagcagagttgtggtttactgacgtggaagcactggattggggcagacttattgtgtgcaacatgggccacattaacttggaaa

SEQ ID NO: 25816 - DNA, 122 bp, Homo sapiens
  misc_feature (61)..(62): /note="This region represents a CpG dinucleotide"
  misc_feature (61)..(61): /note="Nucleotide may be methylated to form 5-methylcytosine"
gttgtgactggcatcgctgaggctgtttctttgtgtataaaatcgaataaggacacatcacgtgctagcaatccaccagcatagggcgaaggctcagcaaagagaagttctctcctcctctg

SEQ ID NO: 25817 - DNA, 122 bp, Homo sapiens
  misc_feature (61)..(62): /note="This region represents a CpG dinucleotide"
  misc_feature (61)..(61): /note="Nucleotide may be methylated to form 5-methylcytosine"
ttggagctccagcaggtgttgtctggagtttgaccaaaacaacagtagctcagctgccagcgaactgaattacacctgaagcctttctaggcataaatgactgttctttgcactctctccac

SEQ ID NO: 25818 - DNA, 122 bp, Homo sapiens
  misc_feature (61)..(62): /note="This region represents a CpG dinucleotide"
  misc_feature (61)..(61): /note="Nucleotide may be methylated to form 5-methylcytosine"
gcctctcttggaaagttgatctccctgcttttcttctcctctgtttcatgccatgaatttcgcactaacagtcctcccccatccagggtccagccagcctcttgcttgctaaggcagaggaa

SEQ ID NO: 25819 - DNA, 122 bp, Homo sapiens
  misc_feature (61)..(62): /note="This region represents a CpG dinucleotide"
  misc_feature (61)..(61): /note="Nucleotide may be methylated to form 5-methylcytosine"
cctcactgggaggtggtaaagctcttacacacctaggctctgaagccagactcttggctgcggcaaaggtggactctgaactcattagctgtaggatatcaggcgagttttctaatctgttt

SEQ ID NO: 25820 - DNA, 122 bp, Homo sapiens
  misc_feature (61)..(62): /note="This region represents a CpG dinucleotide"
  misc_feature (61)..(61): /note="Nucleotide may be methylated to form 5-methylcytosine"
aacactggctcacggtgtatcttctgttcttggaacagccttttattataaacatatcaacgataaaaatacttactccaaaatgcaagtctgtgaacacatcctataaggcagatggaaag

SEQ ID NO: 25821 - DNA, 122 bp, Homo sapiens
  misc_feature (61)..(62): /note="This region represents a CpG dinucleotide"
  misc_feature (61)..(61): /note="Nucleotide may be methylated to form 5-methylcytosine"
ccagggctgagaagagagcctgagcatggcccccagcatcactagggctaagctgcatgtcgctgggcgggccctacgcctctccgagctcacaggctagacctgaccaggcgcactgccca

SEQ ID NO: 25822 - DNA, 122 bp, Homo sapiens
  misc_feature (61)..(62): /note="This region represents a CpG dinucleotide"
  misc_feature (61)..(61): /note="Nucleotide may be methylated to form 5-methylcytosine"
tattcccaaataagcattagctttgggatctgtgggctagcagtttgggcttggttcagccggatgattttctgggctctgttgtgctcactcactcgtgtcgatagtgagccagcaggttg

SEQ ID NO: 25823 - DNA, 122 bp, Homo sapiens
  misc_feature (61)..(62): /note="This region represents a CpG dinucleotide"
  misc_feature (61)..(61): /note="Nucleotide may be methylated to form 5-methylcytosine"
ggctgggatgatggggcagaggccacatgggtttggctgggatgatgggcagaggccacacgggttcggctgggacgataggcagaagccacatgggttcggctgggacgataggcagaggc

SEQ ID NO: 25824 - DNA, 122 bp, Homo sapiens
  misc_feature (61)..(62): /note="This region represents a CpG dinucleotide"
  misc_feature (61)..(61): /note="Nucleotide may be methylated to form 5-methylcytosine"
tctttctttggcctctcagcttcctgggactctggggcaggtttggatagtcctgccaaccgcagaacactcatcaaggtgggagtggaaactgctgcagagaagaatcccatttgtgtttg

SEQ ID NO: 25825 - DNA, 122 bp, Homo sapiens
  misc_feature (61)..(62): /note="This region represents a CpG dinucleotide"
  misc_feature (61)..(61): /note="Nucleotide may be methylated to form 5-methylcytosine"
gacaggaaaacgttctgcgcagggcagcccagggcacgtgggtgcttaggaatgctgctgcgcatgtgtgagagaaaaaacagcactctcaattctgtgttgttataggggaggccaccagg

SEQ ID NO: 25826 - DNA, 122 bp, Homo sapiens
  misc_feature (61)..(62): /note="This region represents a CpG dinucleotide"
  misc_feature (61)..(61): /note="Nucleotide may be methylated to form 5-methylcytosine"
ctccagttgctggcaaacgtctgcagcctgtggtggtactcctccgtactgtaggtcttacggtgctaaaacaaaacacgccagtagcaagtcatggaaacaggctgcagctccctagaggg

SEQ ID NO: 25827 - DNA, 122 bp, Homo sapiens
  misc_feature (61)..(62): /note="This region represents a CpG dinucleotide"
  misc_feature (61)..(61): /note="Nucleotide may be methylated to form 5-methylcytosine"
tagtttttttcctgtccttctcatctgggacttgctgtcatgattctgggcttcagaaaccgtatccccagagcatgtaacacttatcttgtctgtgaaaaatattaaatgaatgcatatgt

SEQ ID NO: 25828 - DNA, 122 bp, Homo sapiens
  misc_feature (61)..(62): /note="This region represents a CpG dinucleotide"
  misc_feature (61)..(61): /note="Nucleotide may be methylated to form 5-methylcytosine"
tttaatttctacattgatgtgacgagctatgatgtggtgagccagtatgtgccagctgtgcgttattctaacagtgtcagttatggtagacgtaaacatgtacatttgcatttgaagctatt

SEQ ID NO: 25829 - DNA, 122 bp, Homo sapiens
  misc_feature (61)..(62): /note="This region represents a CpG dinucleotide"
  misc_feature (61)..(61): /note="Nucleotide may be methylated to form 5-methylcytosine"
tttttagttttaacataaatgataatatattataaatactgttcatgcaatgtgtcccagcgcattaccaccttcacatatactatttatgcctgcaatgttctttcagtacttcatacacc

SEQ ID NO: 25830 - DNA, 122 bp, Homo sapiens
  misc_feature (61)..(62): /note="This region represents a CpG dinucleotide"
  misc_feature (61)..(61): /note="Nucleotide may be methylated to form 5-methylcytosine"
ggtgggaatgtgagcatcctcatacacagaaggcaggacaggagcatgctttggtgtgagcgtctggcaggcaatctggcagtaacatattacctttggaacatttgtgtgttttgcgtatt

SEQ ID NO: 25831 - DNA, 122 bp, Homo sapiens
  misc_feature (61)..(62): /note="This region represents a CpG dinucleotide"
  misc_feature (61)..(61): /note="Nucleotide may be methylated to form 5-methylcytosine"
aatacatacaatggaatgctattcagcattaaaaagaaaggaaagtgacacatgtgacaacgttaatgtaccttgtggacattatgctaggggaaataagccaactacaaaaagacaaatac

SEQ ID NO: 25832 - DNA, 122 bp, Homo sapiens
  misc_feature (61)..(62): /note="This region represents a CpG dinucleotide"
  misc_feature (61)..(61): /note="Nucleotide may be methylated to form 5-methylcytosine"
gctgctccaagcagccttggaatgttttacctctggtaatgtggaagaaaaataaaagaacggccatcctcagtctgtttcaccataatgtgtagttacaataccaagaaattttgagttat

SEQ ID NO: 25833 - DNA, 122 bp, Homo sapiens
  misc_feature (61)..(62): /note="This region represents a CpG dinucleotide"
  misc_feature (61)..(61): /note="Nucleotide may be methylated to form 5-methylcytosine"
tgactccgcacaccggggtgacttctcaggttctcggggtggcagctgcagtgatgacaccgcttcctggtggtcacgccgcgggcaggacgcgggaggccaggtccgtgcatcccgcgtgt

SEQ ID NO: 25834 - DNA, 122 bp, Homo sapiens
  misc_feature (61)..(62): /note="This region represents a CpG dinucleotide"
  misc_feature (61)..(61): /note="Nucleotide may be methylated to form 5-methylcytosine"
agccaagacatattaaaagcagaggttccaacagaccaccacagctggcaagaagccaaacgcatgcaaacccgagatggagttttaaagggccattgaaattaattcccttgaagaggaat

SEQ ID NO: 25835 - DNA, 122 bp, Homo sapiens
  misc_feature (61)..(62): /note="This region represents a CpG dinucleotide"
  misc_feature (61)..(61): /note="Nucleotide may be methylated to form 5-methylcytosine"
ccaagaagctgtagtttccttcctgtgtgaatattaggtgtgagaagagttcacagctcacggctttggcagagccaatatttgacttgcagtgttccccggcagaaaggcagaagaggcct

SEQ ID NO: 25836 - DNA, 122 bp, Homo sapiens
  misc_feature (61)..(62): /note="This region represents a CpG dinucleotide"
  misc_feature (61)..(61): /note="Nucleotide may be methylated to form 5-methylcytosine"
aaacatgatgatgacacactgaaatgcgttgcgttttgtcagcaaattctgtcagaagcacggcaaacgctggagaaggtttgaggaagcgcatcctgaagctgatggcaccgtgtgggggc

SEQ ID NO: 25837 - DNA, 122 bp, Homo sapiens
  misc_feature (61)..(62): /note="This region represents a CpG dinucleotide"
  misc_feature (61)..(61): /note="Nucleotide may be methylated to form 5-methylcytosine"
cagggtccaccagctgttaagacagccatgaagctcaggtcttccggcagctacctggcacgacttacaggcatcagggatttcatgtgaacccctggcaataattacaattattccgtagt

SEQ ID NO: 25838 - DNA, 122 bp, Homo sapiens
  misc_feature (61)..(62): /note="This region represents a CpG dinucleotide"
  misc_feature (61)..(61): /note="Nucleotide may be methylated to form 5-methylcytosine"
ggtaaaccttgaagcaggacaattctttttttttttttttttttaaatgaagtaaaacagcgtgttaagtaagggctaatagaactagtgtctgaagatgttttgtcttgtaatatatgtgc

SEQ ID NO: 25839 - DNA, 122 bp, Homo sapiens
  misc_feature (61)..(62): /note="This region represents a CpG dinucleotide"
  misc_feature (61)..(61): /note="Nucleotide may be methylated to form 5-methylcytosine"
ttatgtgctaaaccattagctctgactcaaatccagcttcctagtctctcatcagccctccgcctgggctaatgagcagaggtgaaatcactggataagtggctctcaaagtgtggccctca

SEQ ID NO: 25840 - DNA, 122 bp, Homo sapiens
  misc_feature (61)..(62): /note="This region represents a CpG dinucleotide"
  misc_feature (61)..(61): /note="Nucleotide may be methylated to form 5-methylcytosine"
aactttccacctcagttcccctaaatgaaatcaatgtctaaccacatgaccctcagttaccgaaagcattaccaaaaacaaaggcagattattagattgtggtgataactgtacaactctgt

SEQ ID NO: 25841 - DNA, 122 bp, Homo sapiens
  misc_feature (61)..(62): /note="This region represents a CpG dinucleotide"
  misc_feature (61)..(61): /note="Nucleotide may be methylated to form 5-methylcytosine"
gagaaaaaaggaatgacagaaagacactgacacttaaaacaagaggaagcaggctggacacgtaaaaaaaatctgaatatttgtgaacagacatcagcaggcatgaagtgatgaatacttgg

SEQ ID NO: 25842 - DNA, 122 bp, Homo sapiens
  misc_feature (61)..(62): /note="This region represents a CpG dinucleotide"
  misc_feature (61)..(61): /note="Nucleotide may be methylated to form 5-methylcytosine"
gtgactaggtcagtcttctaacttcctctttatcccttcttactccttctgcaaacagtacgatgctgggcagagtggaagatcccttattgtctcaccctggggcaaggagatgggctaga

SEQ ID NO: 25843 - DNA, 122 bp, Homo sapiens
  misc_feature (61)..(62): /note="This region represents a CpG dinucleotide"
  misc_feature (61)..(61): /note="Nucleotide may be methylated to form 5-methylcytosine"
ctcctcctcataaacacaccacacccttatttagttcaagagtgcttaatcaggaaataacgaaattgtgagtaataagtcatattatcagtgtgataggggagtgataagtacacattgag

SEQ ID NO: 25844 - DNA, 122 bp, Homo sapiens
  misc_feature (61)..(62): /note="This region represents a CpG dinucleotide"
  misc_feature (61)..(61): /note="Nucleotide may be methylated to form 5-methylcytosine"
gacaagctcttttaaaactaaacaaacaacaaagcatgctgctgaaatgagtaatgatcacggactgaaaatttttcactgtggactaaaatcctggaaatggtttgtagctctaatcccag

SEQ ID NO: 25845 - DNA, 122 bp, Homo sapiens
  misc_feature (61)..(62): /note="This region represents a CpG dinucleotide"
  misc_feature (61)..(61): /note="Nucleotide may be methylated to form 5-methylcytosine"
atgtggaaaaaaaaaaaaggccttgatttatgagatctcagaactgcttcttaggaagggcggattcctccagtaatctaatgggctttcatttcctcattgcctcagtcgctgtctggaga

SEQ ID NO: 25846 - DNA, 122 bp, Homo sapiens
  misc_feature (61)..(62): /note="This region represents a CpG dinucleotide"
  misc_feature (61)..(61): /note="Nucleotide may be methylated to form 5-methylcytosine"
gacgtcgatgggcagcgggcacgctgggcaccgcccaagcttttccttttggagctgcttcgtgatgccgtcttcatttggaacaagggggggttcatgccaaaattaggaaaaacagcctt

SEQ ID NO: 25847 - DNA, 122 bp, Homo sapiens
  misc_feature (61)..(62): /note="This region represents a CpG dinucleotide"
  misc_feature (61)..(61): /note="Nucleotide may be methylated to form 5-methylcytosine"
tttatggtattttgtcatgacagcccaagctgagcaatatcagtatcactctcttatttacgtctacattagataacatgtgtcactttcatggcacatgactatggtgctaatagaagttt

SEQ ID NO: 25848 - DNA, 122 bp, Homo sapiens
  misc_feature (61)..(62): /note="This region represents a CpG dinucleotide"
  misc_feature (61)..(61): /note="Nucleotide may be methylated to form 5-methylcytosine"
aagtaggctatcatgagaaatgctgggggtgtggagcccttgcaaacacttcccaggatccgaaagcagaaaggatagaggaaaggcattagactaagccatgagagtcatggcaggaagag

SEQ ID NO: 25849 - DNA, 122 bp, Homo sapiens
  misc_feature (61)..(62): /note="This region represents a CpG dinucleotide"
  misc_feature (61)..(61): /note="Nucleotide may be methylated to form 5-methylcytosine"
ttctgaacctgtccctgcagcaagattttgcagtgtgagtcactgaaattctcatctttgcgtgggagccttgggtgaattgtgctctcagtggtgagtgggtgtggcaagggatgaccagg

SEQ ID NO: 25850 - DNA, 122 bp, Homo sapiens
  misc_feature (61)..(62): /note="This region represents a CpG dinucleotide"
  misc_feature (61)..(61): /note="Nucleotide may be methylated to form 5-methylcytosine"
ttaagctaccagggtaggtggaggggcaaaaccaggtggaggctgggtcaggcgggtccacgtgctggctctccacatgcaaggcaaacaatggctcttgtgggggttgagggtggttctct

SEQ ID NO: 25851 - DNA, 122 bp, Homo sapiens
  misc_feature (61)..(62): /note="This region represents a CpG dinucleotide"
  misc_feature (61)..(61): /note="Nucleotide may be methylated to form 5-methylcytosine"
agagctcccgcccgtagggacacctgcagctggcgggagaggggtaggggagctgtaagccggcggcacagggcggagtatgccacagccccaacccacccctccaggtcctccccgcgatg

SEQ ID NO: 25852 - DNA, 122 bp, Homo sapiens
  misc_feature (61)..(62): /note="This region represents a CpG dinucleotide"
  misc_feature (61)..(61): /note="Nucleotide may be methylated to form 5-methylcytosine"
ccaaggagctcccgcgccacaggaggctggaaggggcaggaaggaccctccctggccccccggagggagtggggccctgagacgcctggatttctgacttctgaccccagaactttgaggga

SEQ ID NO: 25853 - DNA, 122 bp, Homo sapiens
  misc_feature (61)..(62): /note="This region represents a CpG dinucleotide"
  misc_feature (61)..(61): /note="Nucleotide may be methylated to form 5-methylcytosine"
ggaaaaaggttcttagggcaaaagaaccaaagctctacagtatagtagaggtggaaggagcgtggatatcaataagaaaaaaatgccacaccaagcaatgcagaaagggcaatggcatgaac

SEQ ID NO: 25854 - DNA, 122 bp, Homo sapiens
  misc_feature (61)..(62): /note="This region represents a CpG dinucleotide"
  misc_feature (61)..(61): /note="Nucleotide may be methylated to form 5-methylcytosine"
acatgcttgtcaggtgagtgtgcttttccctctcatgagttcgctgaattaaagggaaagcgtgttgtgtgacatggagtcactgagtcattaacctagtcttatgggaatttggcttacac

SEQ ID NO: 25855 - DNA, 122 bp, Homo sapiens
  misc_feature (61)..(62): /note="This region represents a CpG dinucleotide"
  misc_feature (61)..(61): /note="Nucleotide may be methylated to form 5-methylcytosine"
gtcagactgtcttgtgggagtggggcatgcagattaaaaatgacttcacagcccctccctcgcaggttagggagcatgacatctattggcagctgggcatctgatggctgagagccaggcac

SEQ ID NO: 25856 - DNA, 122 bp, Homo sapiens
  misc_feature (61)..(62): /note="This region represents a CpG dinucleotide"
  misc_feature (61)..(61): /note="Nucleotide may be methylated to form 5-methylcytosine"
tgacctcgtgatccgcctgccgcggcctcccaaagtgctgggattacaggcatgaaccaccgtgcctggcagagcttgtagttttctgatttatgtgtgtgtgtgttttttaacttggaaaa

SEQ ID NO: 25857 - DNA, 122 bp, Homo sapiens
  misc_feature (61)..(62): /note="This region represents a CpG dinucleotide"
  misc_feature (61)..(61): /note="Nucleotide may be methylated to form 5-methylcytosine"
ctaattagtcaccaagtccttagaatttatcctgctctactgcatgtttcttcctcaaaccgtccttcacctctgtactgcagcccctttagaaattagcttgagaggccagatgtggtggc

SEQ ID NO: 25858 - DNA, 122 bp, Homo sapiens
  misc_feature (61)..(62): /note="This region represents a CpG dinucleotide"
  misc_feature (61)..(61): /note="Nucleotide may be methylated to form 5-methylcytosine"
tctgggaagcagaagttacagtgagccaagatcacgccactgcactccagcctgggtgaccgagggagactctgtctcagtaaaacaaaggaaagaaaagaaaagaaaagaagagacacaga

SEQ ID NO: 25859 - DNA, 122 bp, Homo sapiens
  misc_feature (61)..(62): /note="This region represents a CpG dinucleotide"
  misc_feature (61)..(61): /note="Nucleotide may be methylated to form 5-methylcytosine"
gttcaagcagatgagtcaagtgtggattttcagggtgggctgaagtgaggagctgtggcacgggtcggaaagccagccaggaagccgttctgatagttcacctcattggagctggactaagt

SEQ ID NO: 25860 - DNA, 122 bp, Homo sapiens
  misc_feature (61)..(62): /note="This region represents a CpG dinucleotide"
  misc_feature (61)..(61): /note="Nucleotide may be methylated to form 5-methylcytosine"
cttggaccaaattaatttagccgggagttaaaaatagcctccgagacttctatcctcatccgtagttctgatgagcaaaaggagacagtgggggagtgggtggcatggccattctcttgacc

SEQ ID NO: 25861 - DNA, 122 bp, Homo sapiens
  misc_feature (61)..(62): /note="This region represents a CpG dinucleotide"
  misc_feature (61)..(61): /note="Nucleotide may be methylated to form 5-methylcytosine"
cgcctttctgggttttccgctgaggtttgttgaaaagacgcctcccagactcttcactcacgaagtgtgttacaaaaactctcccggcaactgtcctgaccctcaccaatcacgctacagcc

SEQ ID NO: 25862 - DNA, 122 bp, Homo sapiens
  misc_feature (61)..(62): /note="This region represents a CpG dinucleotide"
  misc_feature (61)..(61): /note="Nucleotide may be methylated to form 5-methylcytosine"
ctggagacgggggaagtagagggtgcccgcggagatctgagcgcagagaccctaggagggcgggttccagatcccataaatgagataattaacgggatttacagcactcctaggcggggctc

SEQ ID NO: 25863 - DNA, 122 bp, Homo sapiens
  misc_feature (61)..(62): /note="This region represents a CpG dinucleotide"
  misc_feature (61)..(61): /note="Nucleotide may be methylated to form 5-methylcytosine"
aagtgaatatatgggcacaggtgtgagggaggagaagccttgggcctttgggcagccaggcgacttacaaaagaagacgcagagttgacagttggatttaaagtgtttgtgccagtcaggca

SEQ ID NO: 25864 - DNA, 122 bp, Homo sapiens
  misc_feature (61)..(62): /note="This region represents a CpG dinucleotide"
  misc_feature (61)..(61): /note="Nucleotide may be methylated to form 5-methylcytosine"
agaggaacatgagtttgggttagggggcagtaatcagagtaggaagaatagataaccatacgactaacttttaagatgctgactaaagatggcagggatgtgagtcatgtgggattaactgg

SEQ ID NO: 25865 - DNA, 122 bp, Homo sapiens
  misc_feature (61)..(62): /note="This region represents a CpG dinucleotide"
  misc_feature (61)..(61): /note="Nucleotide may be methylated to form 5-methylcytosine"
ctgttttattcagctactgtatacagctgagtatgtaatgaataacccagctggtgtttacgggacagctaatactgcacattcagcaaatgctaggtagggtcagcatcacatttttggaa

SEQ ID NO: 25866 - DNA, 122 bp, Homo sapiens
  misc_feature (61)..(62): /note="This region represents a CpG dinucleotide"
  misc_feature (61)..(61): /note="Nucleotide may be methylated to form 5-methylcytosine"
gatgagattcctgagaagttgatcatcaattcacccaatcttgccattcatactgaggaccgtcctgaggctgtgggcagtttctcacatccctggaacaggcaatgtcaccagtaaaatag

SEQ ID NO: 25867 - DNA, 122 bp, Homo sapiens
  misc_feature (61)..(62): /note="This region represents a CpG dinucleotide"
  misc_feature (61)..(61): /note="Nucleotide may be methylated to form 5-methylcytosine"
gtgtggaacccgttctcggggcggtggggaccagggaggcttggaacagcaggtgcatggcgtgatcggattgtgtcttaagaacatcccgtagccgctgtgggtaggagagatggggatac

SEQ ID NO: 25868 - DNA, 122 bp, Homo sapiens
  misc_feature (61)..(62): /note="This region represents a CpG dinucleotide"
  misc_feature (61)..(61): /note="Nucleotide may be methylated to form 5-methylcytosine"
ccacatccagcagggacagggacagctcgcggctgggatagcgtcagccctgggccacggcggcttggcaccacatcccgtgacagctctgtctccaggcgtgctccccagccctgcctgaa

SEQ ID NO: 25869 - DNA, 122 bp, Homo sapiens
  misc_feature (61)..(62): /note="This region represents a CpG dinucleotide"
  misc_feature (61)..(61): /note="Nucleotide may be methylated to form 5-methylcytosine"
ctcctgcctgcacgcgctggagcagctcgcagatggcaagctgcgcttcgtggtggagcccgtggaggcctccttcccacagctcctggtttacgagcgcctccagcaactggtaggtccag

SEQ ID NO: 25870 - DNA, 122 bp, Homo sapiens
  misc_feature (61)..(62): /note="This region represents a CpG dinucleotide"
  misc_feature (61)..(61): /note="Nucleotide may be methylated to form 5-methylcytosine"
gttaactcttccccaccaaacaataactagccccatccattatcacgctaagaaaagtttcgtaagtaattacacaacaattagtcatgtcttagcctatttccctagaaagtggattcatg

SEQ ID NO: 25871 - DNA, 122 bp, Homo sapiens
  misc_feature (61)..(62): /note="This region represents a CpG dinucleotide"
  misc_feature (61)..(61): /note="Nucleotide may be methylated to form 5-methylcytosine"
acatgaggatgagtcagtgtcaagactcccagtggggccatcggatcattactgcatgatcgtcttaagcctttgttagtgaatccctcagactcacgccttcttctctccaggcctgaaca

SEQ ID NO: 25872 - DNA, 122 bp, Homo sapiens
  misc_feature (61)..(62): /note="This region represents a CpG dinucleotide"
  misc_feature (61)..(61): /note="Nucleotide may be methylated to form 5-methylcytosine"
tgcacacaaaaggttaattcaggcgctactgcttccacacagggcggccatctgcagcttcgggcggggcggaaggggaaatggtctcttttattgttcactaggtttcgccgtgcagcttg

SEQ ID NO: 25873 - DNA, 122 bp, Homo sapiens
  misc_feature (61)..(62): /note="This region represents a CpG dinucleotide"
  misc_feature (61)..(61): /note="Nucleotide may be methylated to form 5-methylcytosine"
ggctgaagaaggggcccacagcctccggtagcggccagctgcagatgtctgcaaaagcagcgcccacttgggcctgccgaccttgaagtcagacaggccagtgacactagtcagtcatcact

SEQ ID NO: 25874 - DNA, 122 bp, Homo sapiens
  misc_feature (61)..(62): /note="This region represents a CpG dinucleotide"
  misc_feature (61)..(61): /note="Nucleotide may be methylated to form 5-methylcytosine"
ttacagatgaggagttgaagcccagagagaggtgtgccttacccaaggtcacagaaagtacgtcactgtcaggttatgactctgggccagactgcctatctgtggatgtctttgtggtgaag

SEQ ID NO: 25875 - DNA, 122 bp, Homo sapiens
  misc_feature (61)..(62): /note="This region represents a CpG dinucleotide"
  misc_feature (61)..(61): /note="Nucleotide may be methylated to form 5-methylcytosine"
tggccaggccgtggcttctgctccgggcctggggacgggtggagagaccctgcccgcagacgtcccccgtcggaggtggggagacaggctggcagcaggagcggcctgtgtacacttcccta

SEQ ID NO: 25876 - DNA, 122 bp, Homo sapiens
  misc_feature (61)..(62): /note="This region represents a CpG dinucleotide"
  misc_feature (61)..(61): /note="Nucleotide may be methylated to form 5-methylcytosine"
ttggtaatacagcattcattttccttctgtttttaatgtgactgtgcttaggttactttccgcaccagaatctatcactgcaacatcaacagtcagggagtcatctgtctggacatccttaa

SEQ ID NO: 25877 - DNA, 122 bp, Homo sapiens
  misc_feature (61)..(62): /note="This region represents a CpG dinucleotide"
  misc_feature (61)..(61): /note="Nucleotide may be methylated to form 5-methylcytosine"
tgttcattcagcagaaacttcactgggttcctcttgggtgtcagggcagggctggggccccggaggctcaggacgagtcagtctctatccctgccctccttagttgaatatggaagactcat

SEQ ID NO: 25878 - DNA, 122 bp, Homo sapiens
  misc_feature (61)..(62): /note="This region represents a CpG dinucleotide"
  misc_feature (61)..(61): /note="Nucleotide may be methylated to form 5-methylcytosine"
actagctgtgaccttgagcacattcactttcctgaacttcaagttttctcatctgtgagtcgcggttaataatacttacacagtggccctaaaaaatcagagaggaaaaaaaagtctatgca

SEQ ID NO: 25879 - DNA, 122 bp, Homo sapiens
  misc_feature (61)..(62): /note="This region represents a CpG dinucleotide"
  misc_feature (61)..(61): /note="Nucleotide may be methylated to form 5-methylcytosine"
agcagtatgactggctggaaggcataaagcagcagacatggggagaagttcagtgaaaggcggcagagcaacacagcagggctgaggtgcccaggcccagagacagaccctgtagctggtgg

SEQ ID NO: 25880 - DNA, 122 bp, Homo sapiens
  misc_feature (61)..(62): /note="This region represents a CpG dinucleotide"
  misc_feature (61)..(61): /note="Nucleotide may be methylated to form 5-methylcytosine"
tttaaatagagatcagaaaatgcactagacctcagttctaataactattattttaaaacccgaaagtctgtatctttcaaataaacatttttttcccacattctttctgcctggaaaataaa

SEQ ID NO: 25881 - DNA, 122 bp, Homo sapiens
  misc_feature (61)..(62): /note="This region represents a CpG dinucleotide"
  misc_feature (61)..(61): /note="Nucleotide may be methylated to form 5-methylcytosine"
cactgggagggtcatcttgggaagcagccagaacaaatgcccataagtcttaatggtaaccgtgctgccaattcctaagattcttagcatttgctagatcagaaattaataatagatggaaa

SEQ ID NO: 25882 - DNA, 122 bp, Homo sapiens
  misc_feature (61)..(62): /note="This region represents a CpG dinucleotide"
  misc_feature (61)..(61): /note="Nucleotide may be methylated to form 5-methylcytosine"
cttggtgtttcctagttttctttgagattttctcaatattgtcttgctatctgagcaaggcgggcttctgcttccagaccatcactttatttttattttttcaaagtgaaagtaagattatt

SEQ ID NO: 25883 - DNA, 122 bp, Homo sapiens
  misc_feature (61)..(62): /note="This region represents a CpG dinucleotide"
  misc_feature (61)..(61): /note="Nucleotide may be methylated to form 5-methylcytosine"
attactcattctctcactgactcacacagagcaacttcccgtcctgaaaagttcatttatcgtaagtaccctgtaaagatgtaccattttttatcttttataccatgttttactgtacgttt

SEQ ID NO: 25884 - DNA, 122 bp, Homo sapiens
  misc_feature (61)..(62): /note="This region represents a CpG dinucleotide"
  misc_feature (61)..(61): /note="Nucleotide may be methylated to form 5-methylcytosine"
gtgcagtggcctgtcagcacttgggaggagccacatgtgcatttgtttactgaagttgtgcgcatgctttcttgagacatttttcccttatcagtcaggtgttcctagaggaaggtcacata

SEQ ID NO: 25885 - DNA, 122 bp, Homo sapiens
  misc_feature (61)..(62): /note="This region represents a CpG dinucleotide"
  misc_feature (61)..(61): /note="Nucleotide may be methylated to form 5-methylcytosine"
ccctgaggctgttagaagttctggacatttaatcagcattagcaaggccacctatgtcagcggtggcagaagctgcctgctattggacctgcctctgattatgactcagtggctctccacca

SEQ ID NO: 25886 - DNA, 122 bp, Homo sapiens
  misc_feature (61)..(62): /note="This region represents a CpG dinucleotide"
  misc_feature (61)..(61): /note="Nucleotide may be methylated to form 5-methylcytosine"
atttctctaccgtcccagggagaataattggaaaagcgagccctgagtactcagcccacccgcccttctcctgctgaactgtcgaacgtagccaccagctagcctgagcttgttctgatgtc

SEQ ID NO: 25887 - DNA, 122 bp, Homo sapiens
  misc_feature (61)..(62): /note="This region represents a CpG dinucleotide"
  misc_feature (61)..(61): /note="Nucleotide may be methylated to form 5-methylcytosine"
ttgggatggagggaattcctagggtatggaactttcagcactaaaacttggtctccctagcgtggtgcacaggaaagctggtctgataggtactgaaaacattcaaactagattcagttccg

SEQ ID NO: 25888 - DNA, 122 bp, Homo sapiens
  misc_feature (61)..(62): /note="This region represents a CpG dinucleotide"
  misc_feature (61)..(61): /note="Nucleotide may be methylated to form 5-methylcytosine"
gacattcgtttatgtctccctcagtttcaggcttggtgggcatgtggtcagagtctaaatcgacaaggggtggggatttcaccagctgaattagtgtccaataattagtttgttaccttccc

SEQ ID NO: 25889 - DNA, 122 bp, Homo sapiens
  misc_feature (61)..(62): /note="This region represents a CpG dinucleotide"
  misc_feature (61)..(61): /note="Nucleotide may be methylated to form 5-methylcytosine"
gtcatcgcctttctttttgtggcctgaaacgatgtcatcaattcgcagtagcagaactgccgtctaggagaaaaaccacagatgcaaagaggtcagcagagaaggaaaggacacttttcttt

SEQ ID NO: 25890 - DNA, 122 bp, Homo sapiens
  misc_feature (61)..(62): /note="This region represents a CpG dinucleotide"
  misc_feature (61)..(61): /note="Nucleotide may be methylated to form 5-methylcytosine"
gcaactgctcagcccggctgttgtgctgcagaagcagccaaaggcacgtgggtcagtgagcgtggctgtgtcccagtgaaacaattttcagaaacaggctgcgcaggattggcaggacttgg

SEQ ID NO: 25891 - DNA, 122 bp, Homo sapiens
  misc_feature (61)..(62): /note="This region represents a CpG dinucleotide"
  misc_feature (61)..(61): /note="Nucleotide may be methylated to form 5-methylcytosine"
gacttccactactcactgcatgaggattattctgtggaaaccagagtactaaggacgaggcgctggatgatttggtcaaagtcaaatgtgccaagtcagcatcgagcagctatttttgcctt

SEQ ID NO: 25892 - DNA, 122 bp, Homo sapiens
  misc_feature (61)..(62): /note="This region represents a CpG dinucleotide"
  misc_feature (61)..(61): /note="Nucleotide may be methylated to form 5-methylcytosine"
tcacactgccttccattcatttgcacaaaccccaaaaccagaagttatatttgggaacaccgtaatgcttatcccaagtcaaatccattgcaaagtcctgtttaccatacctcttaaatggc

SEQ ID NO: 25893 - DNA, 122 bp, Homo sapiens
  misc_feature (61)..(62): /note="This region represents a CpG dinucleotide"
  misc_feature (61)..(61): /note="Nucleotide may be methylated to form 5-methylcytosine"
caatataccttaagtgaactctgagaacccaatttggaaataaacctgtatgctgacagtcgtgttctcagcatctctcataaataccaatattctgcaaagtcatccactttcaaaactcc

SEQ ID NO: 25894 - DNA, 122 bp, Homo sapiens
  misc_feature (61)..(62): /note="This region represents a CpG dinucleotide"
  misc_feature (61)..(61): /note="Nucleotide may be methylated to form 5-methylcytosine"
ctcgctgaaaaggaacgctaaatgactgtgttcttttaaggacagaaggaaggacacatacgacttgattagggaggtaagtcgccaaaatggcgcacattgcacaatatgcagaaaacagc

SEQ ID NO: 25895 - DNA, 122 bp, Homo sapiens
  misc_feature (61)..(62): /note="This region represents a CpG dinucleotide"
  misc_feature (61)..(61): /note="Nucleotide may be methylated to form 5-methylcytosine"
ggcgcacagtacatacggctcatggcatttcagggagcggcaagccagttgctgccaacccgcccgatgactgtgtctaaggcggaatctggaagcctctctgagcctccgtctccctcact

SEQ ID NO: 25896 - DNA, 122 bp, Homo sapiens
  misc_feature (61)..(62): /note="This region represents a CpG dinucleotide"
  misc_feature (61)..(61): /note="Nucleotide may be methylated to form 5-methylcytosine"
agctccatagatttccctgagaggactttgtttacttgggaaagggaatggagaactttccgggctaagtttgttgttgaaagcaatacagatcttggtgaagagcaattaataggaggctg

SEQ ID NO: 25897 - DNA, 122 bp, Homo sapiens
  misc_feature (61)..(62): /note="This region represents a CpG dinucleotide"
  misc_feature (61)..(61): /note="Nucleotide may be methylated to form 5-methylcytosine"
tatcccttggaaaaggggcacctattttatccttacccaatctgtacagaaacagcagaccgagagctgcttccatgtaagtctcacctctcttcagccagtgagggtgtgtggtgaaaggt

SEQ ID NO: 25898 - DNA, 122 bp, Homo sapiens
  misc_feature (61)..(62): /note="This region represents a CpG dinucleotide"
  misc_feature (61)..(61): /note="Nucleotide may be methylated to form 5-methylcytosine"
caacagaggctcctgcagctgctcataaaccactcggggacactggtgcagtccactgaacgaagcagcacactgctaatctggaaaaatatagcagagctaacacacataaagcttttaaa

SEQ ID NO: 25899 - DNA, 122 bp, Homo sapiens
  misc_feature (61)..(62): /note="This region represents a CpG dinucleotide"
  misc_feature (61)..(61): /note="Nucleotide may be methylated to form 5-methylcytosine"
ctggcttttgcacagctctgccaacaggtgccactgcaaatgtgtggtgcccaatgctcacgagtgcttttacttgtggtcaacagccccttgcgttcctgagacagagtttccaaactttt

SEQ ID NO: 25900 - DNA, 122 bp, Homo sapiens
  misc_feature (61)..(62): /note="This region represents a CpG dinucleotide"
  misc_feature (61)..(61): /note="Nucleotide may be methylated to form 5-methylcytosine"
tggcggggtgggtcccttttgctgggctggactgtacatatgttaatagcgcaaacccgacgccacatttttataattgtgattaaactttattgtacaaaagtgtttggtcggtgtatttg

SEQ ID NO: 25901 - DNA, 122 bp, Homo sapiens
  misc_feature (61)..(62): /note="This region represents a CpG dinucleotide"
  misc_feature (61)..(61): /note="Nucleotide may be methylated to form 5-methylcytosine"
taacttggccaaggttgctcagcaaataagagacaaatcagaatttacacccaggcagtccggctcagaaatctagggtcttcaccatgacacaatgccaccattccaatatctgcctttat

SEQ ID NO: 25902 - DNA, 122 bp, Homo sapiens
  misc_feature (61)..(62): /note="This region represents a CpG dinucleotide"
  misc_feature (61)..(61): /note="Nucleotide may be methylated to form 5-methylcytosine"
ccattgagacattgtttgtggtagggactggcctttctgtgttaagccactcctcctcttcgtggccttaaaatctaccatcaatacaaaggaggctgttgtctgctgagtgagggcctggg

SEQ ID NO: 25903 - DNA, 122 bp, Homo sapiens
  misc_feature (61)..(62): /note="This region represents a CpG dinucleotide"
  misc_feature (61)..(61): /note="Nucleotide may be methylated to form 5-methylcytosine"
gtaactggcaaaagcagattttatgttcctaggagaaagcttgtttggttaaagccatcacgcctgtaacatgtttaccagttttttatttcaagagctgaaagttaaggatataagattcc

SEQ ID NO: 25904 - DNA, 122 bp, Homo sapiens
  misc_feature (61)..(62): /note="This region represents a CpG dinucleotide"
  misc_feature (61)..(61): /note="Nucleotide may be methylated to form 5-methylcytosine"
gttcctgctctctcagagcctgcagggctgccttctccctgccctgctgcctgggtgaggcgccactgcccatgacagctcattcttgctgcccaggaagaccagcgccagacaagtggaga

SEQ ID NO: 25905 - DNA, 122 bp, Homo sapiens
  misc_feature (61)..(62): /note="This region represents a CpG dinucleotide"
  misc_feature (61)..(61): /note="Nucleotide may be methylated to form 5-methylcytosine"
cacccggctcccggccttagggttcctgcttttccatggggtcttggggtggtgcatccccggcacccctacagcatccgccccttccgagcatgtcttccccgtcacagagaacttcatgt

SEQ ID NO: 25906 - DNA, 122 bp, Homo sapiens
  misc_feature (61)..(62): /note="This region represents a CpG dinucleotide"
  misc_feature (61)..(61): /note="Nucleotide may be methylated to form 5-methylcytosine"
tctgagaggaagataactgcatctctcgcaggatcaggtggcagcagaagagacggtggacgcactcaaaaccatcccgttcctcgactggggcgggctgtgttgtgcacacccggcccggc

SEQ ID NO: 25907 - DNA, 122 bp, Homo sapiens
  misc_feature (61)..(62): /note="This region represents a CpG dinucleotide"
  misc_feature (61)..(61): /note="Nucleotide may be methylated to form 5-methylcytosine"
catagatggtattttggagatcatagctcaagcctgctagctctgctgcatatgcatactcgttgagtgagtctttgaggagctcaaggtacaaataggccatgttacagtgcaaggggtcc

SEQ ID NO: 25908 - DNA, 122 bp, Homo sapiens
  misc_feature (61)..(62): /note="This region represents a CpG dinucleotide"
  misc_feature (61)..(61): /note="Nucleotide may be methylated to form 5-methylcytosine"
tcgcactgttcatctttgtgtcctcgacacccagcccagtccctggaaagcacacagaaacgagttgactggtttctggtcccagcactaaccctgcgtaaacatagttcttagcaatggct

SEQ ID NO: 25909 - DNA, 122 bp, Homo sapiens
  misc_feature (61)..(62): /note="This region represents a CpG dinucleotide"
  misc_feature (61)..(61): /note="Nucleotide may be methylated to form 5-methylcytosine"
atgctgaccgcaggcccgcagcccaggacggggtggcagggttgacccaggccttcctgccgcagtcaggggtcaggtctgaaaacacagagatgatggaactacggggcctgtcttctaga

SEQ ID NO: 25910 - DNA, 122 bp, Homo sapiens
  misc_feature (61)..(62): /note="This region represents a CpG dinucleotide"
  misc_feature (61)..(61): /note="Nucleotide may be methylated to form 5-methylcytosine"
tacctgggtggtgattgtgggcctgactcgcagcttgaggcagggctcctttggaatcaacgtgcctagcttttgagcttgccagtgacacacagaggccatcttatcagctctggacaggg

SEQ ID NO: 25911 - DNA, 122 bp, Homo sapiens
  misc_feature (61)..(62): /note="This region represents a CpG dinucleotide"
  misc_feature (61)..(61): /note="Nucleotide may be methylated to form 5-methylcytosine"
tttcttccaggggctggtgtccaaaagcagaggtggagcgtgcctgacaaacaggccacgcgggggccctggagagggccacctcgcacccaccctggttgcacctacagcacccaaggtcc

SEQ ID NO: 25912 - DNA, 122 bp, Homo sapiens
  misc_feature (61)..(62): /note="This region represents a CpG dinucleotide"
  misc_feature (61)..(61): /note="Nucleotide may be methylated to form 5-methylcytosine"
ggtaagagaacaaatatttaccttcttagcatctgcagaagccctcagcccttctggcagcgggtgcactaaaggcaaaaccgcagcactgacacgctgaaaatgagaatcagaaacctgtt

SEQ ID NO: 25913 - DNA, 122 bp, Homo sapiens
  misc_feature (61)..(62): /note="This region represents a CpG dinucleotide"
  misc_feature (61)..(61): /note="Nucleotide may be methylated to form 5-methylcytosine"
tacacatcatttctttcatttttggcctgtggataggagcaaagctgtattcagactaaccgggcccaggtacaaacaacctgtagctcattctacctctgattcatctcttgaattctgtt

SEQ ID NO: 25914 - DNA, 122 bp, Homo sapiens
  misc_feature (61)..(62): /note="This region represents a CpG dinucleotide"
  misc_feature (61)..(61): /note="Nucleotide may be methylated to form 5-methylcytosine"
cagcagggaggagaaagggtgttcactctgcagtcagaggtggtatgataattttcacagcgtagctttaccaacttgagagcctggtaagttctcaattaacacatgttgaggtacctagt

SEQ ID NO: 25915 - DNA, 122 bp, Homo sapiens
  misc_feature (61)..(62): /note="This region represents a CpG dinucleotide"
  misc_feature (61)..(61): /note="Nucleotide may be methylated to form 5-methylcytosine"
tccatgtggtatgatttcaagacaataaaaatcctacacactgacaagattcattgccttcggcctctctatatgttctgggttttgttcgtgccagatctgaggacagagagagtgtgaaa

SEQ ID NO: 25916 - DNA, 122 bp, Homo sapiens
  misc_feature (61)..(62): /note="This region represents a CpG dinucleotide"
  misc_feature (61)..(61): /note="Nucleotide may be methylated to form 5-methylcytosine"
gctgtgcaggggctcttgggcgtggcttggctcggcttggcataacatggctcaacatggcgctggtgcccagagaacgagagagcgagccaaagctgtccgtcttgaaggcgggcaggggg

SEQ ID NO: 25917 - DNA, 122 bp, Homo sapiens
  misc_feature (61)..(62): /note="This region represents a CpG dinucleotide"
  misc_feature (61)..(61): /note="Nucleotide may be methylated to form 5-methylcytosine"
aaaaaggaaaaggtcaagttaatcattaatctctctcttatctactgatgtctccatttacgccatattttctatgtcctacatagcagtcatcacagagggcaataaacacttctaatgac

SEQ ID NO: 25918 - DNA, 122 bp, Homo sapiens
  misc_feature (61)..(62): /note="This region represents a CpG dinucleotide"
  misc_feature (61)..(61): /note="Nucleotide may be methylated to form 5-methylcytosine"
cacagtaatctttactaacagctattctagtgattgttctgcatactggggtttaagaaccgtgttttcaatccaacaaagatcaaaaagacaaagaagggcattacataatggtaaaggga

SEQ ID NO: 25919 - DNA, 122 bp, Homo sapiens
  misc_feature (61)..(62): /note="This region represents a CpG dinucleotide"
  misc_feature (61)..(61): /note="Nucleotide may be methylated to form 5-methylcytosine"
gagggcagaggaccaaggacagagccatcagcatgaggaaagcctgtccctgggaacgggcgcctttgccaagccctccctccctgacatcaggacatccaccctacaggctacagggggct

SEQ ID NO: 25920 - DNA, 122 bp, Homo sapiens
  misc_feature (61)..(62): /note="This region represents a CpG dinucleotide"
  misc_feature (61)..(61): /note="Nucleotide may be methylated to form 5-methylcytosine"
gcttgttttcttcttaatcttcttgtgttcatctagcctcacattgcatttgtcacacttcgttgaaaacctactgtttgtcaaagtgtctttctagtaatccagatatctcttcccccatg

SEQ ID NO: 25921 - DNA, 122 bp, Homo sapiens
  misc_feature (61)..(62): /note="This region represents a CpG dinucleotide"
  misc_feature (61)..(61): /note="Nucleotide may be methylated to form 5-methylcytosine"
tgaacacagatattcatcgcgattctgtctgcaatagcaagactggagaggtgagtccttcggagactgggattatggaatcttcctaccacggaacccatgaaacggctaaaaatagcgag

SEQ ID NO: 25922 - DNA, 122 bp, Homo sapiens
  misc_feature (61)..(62): /note="This region represents a CpG dinucleotide"
  misc_feature (61)..(61): /note="Nucleotide may be methylated to form 5-methylcytosine"
taatgcctacttcacagggtttgtgaagaattaaatgatctactttatggaaatgactaacggttccagatacataatgagtatttgataaatgctagctatcattggattcattttgttct

SEQ ID NO: 25923 - DNA, 122 bp, Homo sapiens
  misc_feature (61)..(62): /note="This region represents a CpG dinucleotide"
  misc_feature (61)..(61): /note="Nucleotide may be methylated to form 5-methylcytosine"
aagtggagacatagtaggaggcagtgtttatgtgagtcatgcccaagtaagcacagtggacgctcacagagcccagagaggatctgtgaaggaatccacgcttgtcgcaccaggcagggcac

SEQ ID NO: 25924 - DNA, 122 bp, Homo sapiens
  misc_feature (61)..(62): /note="This region represents a CpG dinucleotide"
  misc_feature (61)..(61): /note="Nucleotide may be methylated to form 5-methylcytosine"
cagagacactgtcacattcagggagggcaagactcagaagtcactcattgtatacactcacgcacacatgccccagcctggcaaagatgtggtccttgaccttcagacaggcagaatgcagt

SEQ ID NO: 25925 - DNA, 122 bp, Homo sapiens
  misc_feature (61)..(62): /note="This region represents a CpG dinucleotide"
  misc_feature (61)..(61): /note="Nucleotide may be methylated to form 5-methylcytosine"
tcatgtcacagaagcaatgctgcagatggaattgagttaccaataaaagtctacagtctgcgtttgtattgtattgttcatgatgattttgccatagatacagtcagtctctttgattaaag

SEQ ID NO: 25926 - DNA, 122 bp, Homo sapiens
  misc_feature (61)..(62): /note="This region represents a CpG dinucleotide"
  misc_feature (61)..(61): /note="Nucleotide may be methylated to form 5-methylcytosine"
aaggattttggtgtgggtgtctgaccagacgttcaggtttaaagtctcatggtgaatatgcgtggtgtagtaagcagagctgaagaggccattgacaggatcaatcaaaggttttttaaaaa

SEQ ID NO: 25927 - DNA, 122 bp, Homo sapiens
  misc_feature (61)..(62): /note="This region represents a CpG dinucleotide"
  misc_feature (61)..(61): /note="Nucleotide may be methylated to form 5-methylcytosine"
agctgggggtagggtgtaaggaagaagagaaaggctgaggagagaagactgaacaacagacgtctgagagaacagggaggttttgagcatgcacatttacaaataatctttctctagtacaa

SEQ ID NO: 25928 - DNA, 122 bp, Homo sapiens
  misc_feature (61)..(62): /note="This region represents a CpG dinucleotide"
  misc_feature (61)..(61): /note="Nucleotide may be methylated to form 5-methylcytosine"
gcaaagggattaaatgtgcagcttggctcactcttgctcctggggatctgctgtgatgagcgtgtgctctctttataacaggagctactgtcccttgatactcggtccagtgcgcacacgtg

SEQ ID NO: 25929 - DNA, 122 bp, Homo sapiens
  misc_feature (61)..(62): /note="This region represents a CpG dinucleotide"
  misc_feature (61)..(61): /note="Nucleotide may be methylated to form 5-methylcytosine"
gtgaggtaggcaaaactggaggaggaaaccggggaggaggagtgagtctctaactccccacgctgtgtggcctaataagccttgatctgtgttctacagactctgagctctgtgctcctctc

SEQ ID NO: 25930 - DNA, 122 bp, Homo sapiens
  misc_feature (61)..(62): /note="This region represents a CpG dinucleotide"
  misc_feature (61)..(61): /note="Nucleotide may be methylated to form 5-methylcytosine"
ctgcctcaagaaaaagttgcttaacatattgtaaaggatgtgtgccttctgctccttgaccgtgagaccagacaggagaactcaggcatgtgggacagagggaaaacagattttaggttcat

SEQ ID NO: 25931 - DNA, 122 bp, Homo sapiens
  misc_feature (61)..(62): /note="This region represents a CpG dinucleotide"
  misc_feature (61)..(61): /note="Nucleotide may be methylated to form 5-methylcytosine"
gcctcctatctcccgcatgttcccagaggcaaagcagctgctctgctgacggtgctcaggcgttgaccactcctttgatgtacaggcctgtgggtttgaagggctgtttgctttcacgtcct

SEQ ID NO: 25932 - DNA, 122 bp, Homo sapiens
  misc_feature (61)..(62): /note="This region represents a CpG dinucleotide"
  misc_feature (61)..(61): /note="Nucleotide may be methylated to form 5-methylcytosine"
gttgaatttgaggtgtccttcttgtctctaggatcacatgagagtcgttggtaaccctgtcgtgtccagaaagccagtgctgggcctttagctctagtccatcagggtaatgccaaaccccg

SEQ ID NO: 25933 - DNA, 122 bp, Homo sapiens
  misc_feature (61)..(62): /note="This region represents a CpG dinucleotide"
  misc_feature (61)..(61): /note="Nucleotide may be methylated to form 5-methylcytosine"
ccaaggggtggagctgggaacattcctcataaagcgagtcgtcaaggagttgcaggtaagcgacacgcagggagccccggtcacgcttggcttccgtgtggtcaggtcagcgaacctcgtgg

SEQ ID NO: 25934 - DNA, 122 bp, Homo sapiens
  misc_feature (61)..(62): /note="This region represents a CpG dinucleotide"
  misc_feature (61)..(61): /note="Nucleotide may be methylated to form 5-methylcytosine"
tttcttcacatcctccttccgatcaaggagatcaatcttggactcctagaagtcatagaacggaagaggacctcttgtggttgaaaatgagaatatgctcaactaatataagttaaattttg

SEQ ID NO: 25935 - DNA, 122 bp, Homo sapiens
  misc_feature (61)..(62): /note="This region represents a CpG dinucleotide"
  misc_feature (61)..(61): /note="Nucleotide may be methylated to form 5-methylcytosine"
ctagagacgacagagaaaccagaagagccacaactcaaaataaaaaagatgagttatatacgcctacatatgaatgaggaagatttttggaattaatgcttagccagaaaaaccgaaaaaga

SEQ ID NO: 25936 - DNA, 122 bp, Homo sapiens
  misc_feature (61)..(62): /note="This region represents a CpG dinucleotide"
  misc_feature (61)..(61): /note="Nucleotide may be methylated to form 5-methylcytosine"
ctatgtcttcccttctcttgagccatgagttgccacatccacgagcatgcccctgggacacgtgcacaaagagcctgtgcatctgaagctttcacagtgttttgcagagtaggcagttgagc

SEQ ID NO: 25937 - DNA, 122 bp, Homo sapiens
  misc_feature (61)..(62): /note="This region represents a CpG dinucleotide"
  misc_feature (61)..(61): /note="Nucleotide may be methylated to form 5-methylcytosine"
ggagcagtaagccacagattggctggactggagaggctgacaatgagtgtgggtacaggacggaccggtaggattactaaaagcccccagcatgggaggagaccggcccttcctgctgtgaa

SEQ ID NO: 25938 - DNA, 122 bp, Homo sapiens
  misc_feature (61)..(62): /note="This region represents a CpG dinucleotide"
  misc_feature (61)..(61): /note="Nucleotide may be methylated to form 5-methylcytosine"
ttcaatgccagtcttgtataagctcctgtttggccagtgggtccagtcagaggctaaacacgcccacactctctctcagtcttgtccatacagttaatggcactccctccttcctctgtgca

SEQ ID NO: 25939 - DNA, 122 bp, Homo sapiens
  misc_feature (61)..(62): /note="This region represents a CpG dinucleotide"
  misc_feature (61)..(61): /note="Nucleotide may be methylated to form 5-methylcytosine"
acaaaaatgtgtgatcactgtgtgcaaaagcccgtggaccaatggacaggtgccagagcacgtgtgatgggaagaatgcgggaagggagtgcgtgtgtgtatcctcaccctcatcgcagcac

SEQ ID NO: 25940 - DNA, 122 bp, Homo sapiens
  misc_feature (61)..(62): /note="This region represents a CpG dinucleotide"
  misc_feature (61)..(61): /note="Nucleotide may be methylated to form 5-methylcytosine"
agcacccgtgccctcgatcacatcgccagttcacaaacacacatgcgcacacgcacacgccgcccgcccaccaggcagacacccacacacctgtgcacgcacgcgcacgccaagccagcggg

SEQ ID NO: 25941 - DNA, 122 bp, Homo sapiens
  misc_feature (61)..(62): /note="This region represents a CpG dinucleotide"
  misc_feature (61)..(61): /note="Nucleotide may be methylated to form 5-methylcytosine"
gaggtcattcttgtgctgttggaggaatgacctatgctcaggccaggtagtcacagatgccgtctgtctgctcgagtttcattcttttgtagtaagccttgggaagttgttcctctgggttg

SEQ ID NO: 25942 - DNA, 122 bp, Homo sapiens
  misc_feature (61)..(62): /note="This region represents a CpG dinucleotide"
  misc_feature (61)..(61): /note="Nucleotide may be methylated to form 5-methylcytosine"
cgtaatgaccatagtaagaccccatgtacgtggctaatgaggcagtgacccgacgtggctcggaagccctgctggggagatcccgccccgtcaccccagaggcgctctccgacctgcagccc

SEQ ID NO: 25943 - DNA, 122 bp, Homo sapiens
  misc_feature (61)..(62): /note="This region represents a CpG dinucleotide"
  misc_feature (61)..(61): /note="Nucleotide may be methylated to form 5-methylcytosine"
ggaaaccccaggggcaggggtggagtgcggagcatagtcccccgcacgctccaacccacccggcatttgtttaaattagcaaattcttcgttgggggggatgcaaacattcctggtggcagc

SEQ ID NO: 25944 - DNA, 122 bp, Homo sapiens
  misc_feature (61)..(62): /note="This region represents a CpG dinucleotide"
  misc_feature (61)..(61): /note="Nucleotide may be methylated to form 5-methylcytosine"
cacttggttcccatcttctccctctttcctgcactatatctaaacaaaccttttgacaaccggtaaactgggaattttgactgtaggatccacagttctaagatatttaaaatcttcccctt

SEQ ID NO: 25945 - DNA, 122 bp, Homo sapiens
  misc_feature (61)..(62): /note="This region represents a CpG dinucleotide"
  misc_feature (61)..(61): /note="Nucleotide may be methylated to form 5-methylcytosine"
gtcaatagcctggaaattgtcctaggctggcttaggcacctctcatgagagcctgcagaacgttcaataatcttgtcattaatctgaggtacagggtttaagatatcttagttgacaaacaa

SEQ ID NO: 25946 - DNA, 122 bp, Homo sapiens
  misc_feature (61)..(62): /note="This region represents a CpG dinucleotide"
  misc_feature (61)..(61): /note="Nucleotide may be methylated to form 5-methylcytosine"
aaaggagtaattttgtctcaaccatcaaacctgcaacacattgccctgtagatgtcataacgagtttgcatgtctagaaatttggaccccatccctagctgctgcagggctgactttaagct

SEQ ID NO: 25947 - DNA, 122 bp, Homo sapiens
  misc_feature (61)..(62): /note="This region represents a CpG dinucleotide"
  misc_feature (61)..(61): /note="Nucleotide may be methylated to form 5-methylcytosine"
ttaacttttaaaaaaatctagtcaccccatgctctcagtttttctgactcaaagcttcctcggaatttggggctatcatgaactgtccaagataaagattatagtcctacattggcatgcct

SEQ ID NO: 25948 - DNA, 122 bp, Homo sapiens
  misc_feature (61)..(62): /note="This region represents a CpG dinucleotide"
  misc_feature (61)..(61): /note="Nucleotide may be methylated to form 5-methylcytosine"
tcagcaaagcattttaactaatggaccattatttatgatctagaaacaattttgtgaaagcgatttcttagtgatgctgtttactgtgatcacatttgcccttagtataacaatacctaagt

SEQ ID NO: 25949 - DNA, 122 bp, Homo sapiens
  misc_feature (61)..(62): /note="This region represents a CpG dinucleotide"
  misc_feature (61)..(61): /note="Nucleotide may be methylated to form 5-methylcytosine"
tttagctctaggtggagccttaaacccaggttcacctcagctcttagtaaactatcagaacgctgctcttcctgaatgggggaggtccccaggggattttcttggcagggtgggaaggctgg

SEQ ID NO: 25950 - DNA, 122 bp, Homo sapiens
  misc_feature (61)..(62): /note="This region represents a CpG dinucleotide"
  misc_feature (61)..(61): /note="Nucleotide may be methylated to form 5-methylcytosine"
cacttcctaactccccgtatgggaccagcactaccctgaaatcaaaaccagacaagaaaacgagaggacagtgttcccaatgggcagacacacaaaatcctaaacaaaacgttagcaaatta

SEQ ID NO: 25951 - DNA, 122 bp, Homo sapiens
  misc_feature (61)..(62): /note="This region represents a CpG dinucleotide"
  misc_feature (61)..(61): /note="Nucleotide may be methylated to form 5-methylcytosine"
caatggaaaatttattaatagaagcacagagatgtcttagaaaagcttatgagaaagaggcggggcaactggcaggaaagaaactagatgttgttaacacccatcccacatatttccaacca

SEQ ID NO: 25952 - DNA, 122 bp, Homo sapiens
  misc_feature (61)..(62): /note="This region represents a CpG dinucleotide"
  misc_feature (61)..(61): /note="Nucleotide may be methylated to form 5-methylcytosine"
gttctctgtcaggagcctgtagtggcctgctgtagaactgtgatatgcttggctccgtcccgttcaatgtttttgatgaatggcttagctgaggacattaatatgttatttacatttggaga

SEQ ID NO: 25953 - DNA, 122 bp, Homo sapiens
  misc_feature (61)..(62): /note="This region represents a CpG dinucleotide"
  misc_feature (61)..(61): /note="Nucleotide may be methylated to form 5-methylcytosine"
agtattaggaaccattctgtttacagcaattaactggacccaaagccctgtcagcagttccggttgtgtggcccttctttgtgtctgttctttaatattcaaaacttgttcaaatagtgtga

SEQ ID NO: 25954 - DNA, 122 bp, Homo sapiens
  misc_feature (61)..(62): /note="This region represents a CpG dinucleotide"
  misc_feature (61)..(61): /note="Nucleotide may be methylated to form 5-methylcytosine"
aaactgcagtcttgcatatgtgaagccaaaggtctgagctgtgagcaaacctatcatcaccgctattgagtgacagcagtcactcggcctttcacattccaacttaaaaagcagatgcatat

SEQ ID NO: 25955 - DNA, 122 bp, Homo sapiens
  misc_feature (61)..(62): /note="This region represents a CpG dinucleotide"
  misc_feature (61)..(61): /note="Nucleotide may be methylated to form 5-methylcytosine"
cctaatctgatttcctcctctttacataaagatctcttggtggccaggcgtggtggctcacgcctgtaatcctagcactttgggaagccgaggcgggtggatcacttgaggtcaggaattcg

SEQ ID NO: 25956 - DNA, 122 bp, Homo sapiens
  misc_feature (61)..(62): /note="This region represents a CpG dinucleotide"
  misc_feature (61)..(61): /note="Nucleotide may be methylated to form 5-methylcytosine"
tcctgagcaggcagggctggcctgagtcatccccagcattaacggcagggcctggcaccccggcaagaaaaacataatggactctggcaccggatggtcctggttcaaatcccagttctact

SEQ ID NO: 25957 - DNA, 122 bp, Homo sapiens
  misc_feature (61)..(62): /note="This region represents a CpG dinucleotide"
  misc_feature (61)..(61): /note="Nucleotide may be methylated to form 5-methylcytosine"
tgcgggataatctcagagtacttaaccttaatctcatttgcacagtcccctttgctatgtcgtaacatattcaaagattctggggattaggtcatggatatatttggaggggttattattct

SEQ ID NO: 25958 - DNA, 122 bp, Homo sapiens
  misc_feature (61)..(62): /note="This region represents a CpG dinucleotide"
  misc_feature (61)..(61): /note="Nucleotide may be methylated to form 5-methylcytosine"
acacccatttcacaaaggaaaattgccagctgccagcaagtcaaatctcctttgtgggaacggatcagctccccacagtggattctggcctctgatctgaccccaggatgtttgccagatat

SEQ ID NO: 25959 - DNA, 122 bp, Homo sapiens
  misc_feature (61)..(62): /note="This region represents a CpG dinucleotide"
  misc_feature (61)..(61): /note="Nucleotide may be methylated to form 5-methylcytosine"
tggcatttgtaccctgtgttccatctgtgctgttatttactcagtatttttaagttgactcgcttctctaactgaaatttatttagaaaggttacaagtggaaaattagcatgacttcgtac

SEQ ID NO: 25960 - DNA, 122 bp, Homo sapiens
  misc_feature (61)..(62): /note="This region represents a CpG dinucleotide"
  misc_feature (61)..(61): /note="Nucleotide may be methylated to form 5-methylcytosine"
acctcccaaagtgctgagtttacaggtgtgagccatagggcctggccaagtttctaattacgtaagagaatttaagatctctgattggaacagactttaaaggcatctagttgaattattta

SEQ ID NO: 25961 - DNA, 122 bp, Homo sapiens
  misc_feature (61)..(62): /note="This region represents a CpG dinucleotide"
  misc_feature (61)..(61): /note="Nucleotide may be methylated to form 5-methylcytosine"
gataactttaagactgagaaagacaacaaatgtagaatgcttgggatgctttagaaaaagcgggggttggggggtcactaatcaaatattattttgagacttcaagtctccatttgtcctta

SEQ ID NO: 25962 - DNA, 122 bp, Homo sapiens
  misc_feature (61)..(62): /note="This region represents a CpG dinucleotide"
  misc_feature (61)..(61): /note="Nucleotide may be methylated to form 5-methylcytosine"
gatatggccctctcaccaatcacatgggatgcatgctgctagaaaacttctccagctgggcgtacctgaaccaccaccacccccaacccccttcctttttctactgtaaaacttttccaccc

SEQ ID NO: 25963 - DNA, 122 bp, Homo sapiens
  misc_feature (61)..(62): /note="This region represents a CpG dinucleotide"
  misc_feature (61)..(61): /note="Nucleotide may be methylated to form 5-methylcytosine"
atttggataatttccaatattatgtctttgatttgtgttgaccaaggctaaattactctccgttggtttatgtctgctggcaggaaaattaattagaaaaccatagtcatggccatcccagt

SEQ ID NO: 25964 - DNA, 122 bp, Homo sapiens
  misc_feature (61)..(62): /note="This region represents a CpG dinucleotide"
  misc_feature (61)..(61): /note="Nucleotide may be methylated to form 5-methylcytosine"
ttgtgtaacgaactgtccccagttggctcatttatttgcttatgtatctgcagtttggggcgggttcagcaggaacaacacccccctgcttcatgattggggccccaactgggaagacttga

SEQ ID NO: 25965 - DNA, 122 bp, Homo sapiens
  misc_feature (61)..(62): /note="This region represents a CpG dinucleotide"
  misc_feature (61)..(61): /note="Nucleotide may be methylated to form 5-methylcytosine"
ctgcccacgtggacaagactctcatttctcttctgctttctggtcctacagggttttatccgtactccctctcactgtgaaacaccagagataaaatctccaaagataagtgcttaagaggt

SEQ ID NO: 25966 - DNA, 122 bp, Homo sapiens
  misc_feature (61)..(62): /note="This region represents a CpG dinucleotide"
  misc_feature (61)..(61): /note="Nucleotide may be methylated to form 5-methylcytosine"
tgaggtgggggaggtgggagaggcataatctgggtcttgaggacgtttcagccctcagcccggggtggctgagatatggccctgggtaggctctgtcctccagaggtggaaagaaggacaaa

SEQ ID NO: 25967 - DNA, 122 bp, Homo sapiens
  misc_feature (61)..(62): /note="This region represents a CpG dinucleotide"
  misc_feature (61)..(61): /note="Nucleotide may be methylated to form 5-methylcytosine"
caagcagggaagtatcttcaaggaagcagtaggagccagaatgagaagctataaaagcggcggaaccatccatcaaacagacaagcagctccaggagagctgcccagagggcaaattctcac

SEQ ID NO: 25968 - DNA, 122 bp, Homo sapiens
  misc_feature (61)..(62): /note="This region represents a CpG dinucleotide"
  misc_feature (61)..(61): /note="Nucleotide may be methylated to form 5-methylcytosine"
gggcaggaggaagggaaagaaagagggcttttcagggctctacaaccaataaaatcgtgccgctttgaggacatacttgagctccccaaaagacaggcagctgaagggcaaacagtgtctaa

SEQ ID NO: 25969 - DNA, 122 bp, Homo sapiens
  misc_feature (61)..(62): /note="This region represents a CpG dinucleotide"
  misc_feature (61)..(61): /note="Nucleotide may be methylated to form 5-methylcytosine"
tgtggctccttctccaggagcggggtcagtttatcttccctgccttgttacttctttcagcgtctgagtctacctttagcacatcttttccctgaggcacgcactgagttcatgccatctgc

SEQ ID NO: 25970 - DNA, 122 bp, Homo sapiens
  misc_feature (61)..(62): /note="This region represents a CpG dinucleotide"
  misc_feature (61)..(61): /note="Nucleotide may be methylated to form 5-methylcytosine"
ctgtcttctcccagaattgcaggaatagaaataaaaacctcctaggagtgtccggagggacgactgcactttccagttcagatgagctgaacaggagaaacaggcaggcttttaatcacatt

SEQ ID NO: 25971 - DNA, 122 bp, Homo sapiens
  misc_feature (61)..(62): /note="This region represents a CpG dinucleotide"
  misc_feature (61)..(61): /note="Nucleotide may be methylated to form 5-methylcytosine"
catcggacgctgtggatgctataattacataacagttctcctttgaccagtgctcatccacgtacgtcacgtacacaccaatggatccttgtactgcagatcagacagcttcgtctgcaaat

SEQ ID NO: 25972 - DNA, 122 bp, Homo sapiens
  misc_feature (61)..(62): /note="This region represents a CpG dinucleotide"
  misc_feature (61)..(61): /note="Nucleotide may be methylated to form 5-methylcytosine"
tgttggttaagctggtcttgatccacctgcctcagcctcccaaagtgctgagattataggcgtaagccactgtgcctggtgtaatcttaactgctttttaggaaatggtgtaagaaaaggct

SEQ ID NO: 25973 - DNA, 122 bp, Homo sapiens
  misc_feature (61)..(62): /note="This region represents a CpG dinucleotide"
  misc_feature (61)..(61): /note="Nucleotide may be methylated to form 5-methylcytosine"
aaagaaggaaagccaggacagtgcatgtgacattttccctcatcatttggtttctgtcagcgagaaatatgctttagtaatttggaaataaactcactgcagggggtgaataacaggtttga

SEQ ID NO: 25974 - DNA, 122 bp, Homo sapiens
  misc_feature (61)..(62): /note="This region represents a CpG dinucleotide"
  misc_feature (61)..(61): /note="Nucleotide may be methylated to form 5-methylcytosine"
cagcccctgaccaagcacagtgtccccaaggcctggtccaggcaatggagatggcactaccgtccacaagtgtcagcatatagtgccaaggtgtgtgttctcagacttgtcactctcccaag

SEQ ID NO: 25975 - DNA, 122 bp, Homo sapiens
  misc_feature (61)..(62): /note="This region represents a CpG dinucleotide"
  misc_feature (61)..(61): /note="Nucleotide may be methylated to form 5-methylcytosine"
agaggaagcaacacaggatgggatctctatctggttctaggtctcaggctttctccagcccgttttgccaacttacaagcaactaaccaccactaaacttcctctccctggagaaggaaaaa

SEQ ID NO: 25976 - DNA, 122 bp, Homo sapiens
  misc_feature (61)..(62): /note="This region represents a CpG dinucleotide"
  misc_feature (61)..(61): /note="Nucleotide may be methylated to form 5-methylcytosine"
ttgatgaaaacatcagaattacctccaaggaccatgccagcctgacagcactttctaaggcgacatgctgggcagttttttctgcggattttatcaacgatgcagtcatttcttccagcaca

SEQ ID NO: 25977 - DNA, 122 bp, Homo sapiens
  misc_feature (61)..(62): /note="This region represents a CpG dinucleotide"
  misc_feature (61)..(61): /note="Nucleotide may be methylated to form 5-methylcytosine"
gttgcagtgagaggctgctttagggccctgaaaatctgaaaggatctcccagcatagtgtcgagaagaacaggaaagtgctgtttgcagagcaacttcactaagatgatgttccagatgaat

SEQ ID NO: 25978 - DNA, 122 bp, Homo sapiens
  misc_feature (61)..(62): /note="This region represents a CpG dinucleotide"
  misc_feature (61)..(61): /note="Nucleotide may be methylated to form 5-methylcytosine"
cagctttcctttgccacttcataccctatactcagtgtcttccactttctgcagtctctgcgaaggttgggaagaacctgtgcttcctgattgttgtaattgccttgtcatttatctagcac

SEQ ID NO: 25979 - DNA, 122 bp, Homo sapiens
  misc_feature (61)..(62): /note="This region represents a CpG dinucleotide"
  misc_feature (61)..(61): /note="Nucleotide may be methylated to form 5-methylcytosine"
cacgtcagcggcgggattcgattctcccaggagcgcaaacgctactgagaactgcgcctgcgagggggtccgggctgcgggctccttagaagttaatcctggtgatcccaggtggaacggtt

SEQ ID NO: 25980 - DNA, 122 bp, Homo sapiens
  misc_feature (61)..(62): /note="This region represents a CpG dinucleotide"
  misc_feature (61)..(61): /note="Nucleotide may be methylated to form 5-methylcytosine"
aaagcagcccagaatcagggcatcaagccttacactgaggcactcttgggctttgtcaagcggccccatggacagtgactctgcccatggctagaggacagtgactcaccccaggcttcaag

SEQ ID NO: 25981 - DNA, 122 bp, Homo sapiens
  misc_feature (61)..(62): /note="This region represents a CpG dinucleotide"
  misc_feature (61)..(61): /note="Nucleotide may be methylated to form 5-methylcytosine"
tcctggtcaaacaaccggtcatccttactaccttcggagtttccttgtggtgctgaaaaccgtacttgagaatgaagatgatatgttgctctttgatgagcaggagaagggaattgtaacta

SEQ ID NO: 25982 - DNA, 122 bp, Homo sapiens
  misc_feature (61)..(62): /note="This region represents a CpG dinucleotide"
  misc_feature (61)..(61): /note="Nucleotide may be methylated to form 5-methylcytosine"
ccgcctgcctcggcctgccaaagtgctgggattgcaaagtgtgagccaccacaatcagcgcgatttcagagattattaagggcaggggaaggaatcccttctaagagaagtttggaggaagt

SEQ ID NO: 25983 - DNA, 122 bp, Homo sapiens
  misc_feature (61)..(62): /note="This region represents a CpG dinucleotide"
  misc_feature (61)..(61): /note="Nucleotide may be methylated to form 5-methylcytosine"
cacggatggagaggccgtcacctccgggggatgccccagggccgcatacccgtgcagtggcgctggagtggcagtgggcgcctgccccacactaatgcacacacacatcagtgcacacccac

SEQ ID NO: 25984 - DNA, 122 bp, Homo sapiens
  misc_feature (61)..(62): /note="This region represents a CpG dinucleotide"
  misc_feature (61)..(61): /note="Nucleotide may be methylated to form 5-methylcytosine"
ctaaattgaataaatacaactcccagtggtctgctttgggatgtctacatttgtttgtttcgtgtgtgtgtgtgtgtgtgcgtgtgtgtgtgtgtgtgtgtgtgtgtgtgtgtgtgtgtagt

SEQ ID NO: 25985 - DNA, 122 bp, Homo sapiens
  misc_feature (61)..(62): /note="This region represents a CpG dinucleotide"
  misc_feature (61)..(61): /note="Nucleotide may be methylated to form 5-methylcytosine"
cagctgtagaaaggagagaataaatccataccatgacactgttataagacagaagggaagcgatgcaggccataatgcatggtgtctggcacttgataagcccacacatggtggctgccatt

SEQ ID NO: 25986 - DNA, 122 bp, Homo sapiens
  misc_feature (61)..(62): /note="This region represents a CpG dinucleotide"
  misc_feature (61)..(61): /note="Nucleotide may be methylated to form 5-methylcytosine"
gattcagagggtgacactacacacgcagccggtttgctgcggaggaacacggggctggggcgtctgctgcttttagagcaggcctgccctttgtccaggagggaggtatcgctgtatcctcc

SEQ ID NO: 25987 - DNA, 122 bp, Homo sapiens
  misc_feature (61)..(62): /note="This region represents a CpG dinucleotide"
  misc_feature (61)..(61): /note="Nucleotide may be methylated to form 5-methylcytosine"
tatgggcaaaaatgtgatttcttcatctgggctttaagagctataaataaaacacatggccgggtgcatgcctatagtcctagctatttgggaagctaaggcagtaggattccttgacccca

SEQ ID NO: 25988 - DNA, 122 bp, Homo sapiens
  misc_feature (61)..(62): /note="This region represents a CpG dinucleotide"
  misc_feature (61)..(61): /note="Nucleotide may be methylated to form 5-methylcytosine"
taatcatgagaatccaccagacagacccaaattgagggggattctacaaaatacacgacccgcactcttctaaggtgtcaaggtcatgaaaaacaagactggaaaaccaacacagactggag

SEQ ID NO: 25989 - DNA, 122 bp, Homo sapiens
  misc_feature (61)..(62): /note="This region represents a CpG dinucleotide"
  misc_feature (61)..(61): /note="Nucleotide may be methylated to form 5-methylcytosine"
ttctctaaggccttggcgatgaccctggctgcttccacgcccactgtgttgccttccagacgcagagcctccaagctgtcaaagtcttcaatctctttaatcacatctttagctgccaggga

SEQ ID NO: 25990 - DNA, 122 bp, Homo sapiens
  misc_feature (61)..(62): /note="This region represents a CpG dinucleotide"
  misc_feature (61)..(61): /note="Nucleotide may be methylated to form 5-methylcytosine"
atttatatttagtcacatatattatcgtactacctactaatcattccatgtgtttttttacgagctgtaagttctgaaggcaaccatgccttgtacagtgtccacttagggttctgaataat

SEQ ID NO: 25991 - DNA, 122 bp, Homo sapiens
  misc_feature (61)..(62): /note="This region represents a CpG dinucleotide"
  misc_feature (61)..(61): /note="Nucleotide may be methylated to form 5-methylcytosine"
tctcttctgtctgggtgagtattgctatctacttccagcaagaaggaaactaaagcacagcgacaccaggtgatttgcctaaagtcacacagccatctgggtagtgacaggattagaaacca

SEQ ID NO: 25992 - DNA, 122 bp, Homo sapiens
  misc_feature (61)..(62): /note="This region represents a CpG dinucleotide"
  misc_feature (61)..(61): /note="Nucleotide may be methylated to form 5-methylcytosine"
ttgccctgtggagtctcctacattctagattttttgctgattgtgtctcctttgtattagcgtgtttcctgtcacatatttctcatagactggtagttcagtttagaggtttgatcactttc

SEQ ID NO: 25993 - DNA, 122 bp, Homo sapiens
  misc_feature (61)..(62): /note="This region represents a CpG dinucleotide"
  misc_feature (61)..(61): /note="Nucleotide may be methylated to form 5-methylcytosine"
acaacaacagcctgacctagaaacttcctgatgatttttaacctcaagagccagctgaaccgagactcatctgtccatggccctgctgcaggtaccaccacctccagcccttgtctttgctc

SEQ ID NO: 25994 - DNA, 122 bp, Homo sapiens
  misc_feature (61)..(62): /note="This region represents a CpG dinucleotide"
  misc_feature (61)..(61): /note="Nucleotide may be methylated to form 5-methylcytosine"
ataccaaacaaacacactaaaaaaatgtaagcaactgggaataactggtaagcaacacaacgtatattcaggcacaaatttctcctaagaatagcaaaagaaatgtgaccagaaatatcttc

SEQ ID NO: 25995 - DNA, 122 bp, Homo sapiens
  misc_feature (61)..(62): /note="This region represents a CpG dinucleotide"
  misc_feature (61)..(61): /note="Nucleotide may be methylated to form 5-methylcytosine"
tctctctctctctcttctgctcccatgtaaggcctgccttgcttcccctttgccttccaccgtaattttaagtttcctgaggcctcctagctaggcttcctgttaagcctacagaactgtga

SEQ ID NO: 25996 - DNA, 122 bp, Homo sapiens
  misc_feature (61)..(62): /note="This region represents a CpG dinucleotide"
  misc_feature (61)..(61): /note="Nucleotide may be methylated to form 5-methylcytosine"
tctctttctacaatcactgggctgccccagtaaccacgaacataaactgggattagacggcgcatttgactggtggtgacgccaaccccaggctgaaatctgtgtttcaccactgccctgct

SEQ ID NO: 25997 - DNA, 122 bp, Homo sapiens
  misc_feature (61)..(62): /note="This region represents a CpG dinucleotide"
  misc_feature (61)..(61): /note="Nucleotide may be methylated to form 5-methylcytosine"
taagtggaaaaggggggagatgaacatgaacagaccaaccagccaacaaactggggatgtcgtcattcttctcagatcctgcgaaggctgtagcctctgctcagcactgctgcccgtcctgc

SEQ ID NO: 25998 - DNA, 122 bp, Homo sapiens
  misc_feature (61)..(62): /note="This region represents a CpG dinucleotide"
  misc_feature (61)..(61): /note="Nucleotide may be methylated to form 5-methylcytosine"
cggaggtggcggcagctccacgagggccggcgcaggcggcggtggcggccctgcgggcggcgacctggcggccaacacgttccccatggtctctggcagaggcgcctgctcccggcctgggc

SEQ ID NO: 25999 - DNA, 122 bp, Homo sapiens
  misc_feature (61)..(62): /note="This region represents a CpG dinucleotide"
  misc_feature (61)..(61): /note="Nucleotide may be methylated to form 5-methylcytosine"
attcatcatgcaatcctggagaaaagtaagcaatgaacatactgtacaaattaattctttcgaccagcctatgtttgtgtaagaagtttgttttttgaatggaaaccactgctactagctgt

SEQ ID NO: 26000 - DNA, 122 bp, Homo sapiens
  misc_feature (61)..(62): /note="This region represents a CpG dinucleotide"
  misc_feature (61)..(61): /note="Nucleotide may be methylated to form 5-methylcytosine"
tttctaccaagcctttgtgaacattgctcttcattttggcctgtacttctccctcagggacgtagaacaatggaatgtcagtcagtctctgtagttaaaactttttctttaaaattcaatta

SEQ ID NO: 26001 - DNA, 122 bp, Homo sapiens
  misc_feature (61)..(62): /note="This region represents a CpG dinucleotide"
  misc_feature (61)..(61): /note="Nucleotide may be methylated to form 5-methylcytosine"
ttccattgttcatgtagttatgccttgaagaacatatgttgggaaagagaggctgtgttacgccacactgcctgtccactgaggccagaaaggatacctgaggacacaggaaatgtcacact

SEQ ID NO: 26002 - DNA, 122 bp, Homo sapiens
  misc_feature (61)..(62): /note="This region represents a CpG dinucleotide"
  misc_feature (61)..(61): /note="Nucleotide may be methylated to form 5-methylcytosine"
accgtctgggaagtgaggagcgcctctggacggcccccgcaccgtctgggaagtgaggagcgcttctggacggctcccagcaaccccccaggtgtgaagtgacagccctgtgtgtgatcttt

SEQ ID NO: 26003 - DNA, 122 bp, Homo sapiens
  misc_feature (61)..(62): /note="This region represents a CpG dinucleotide"
  misc_feature (61)..(61): /note="Nucleotide may be methylated to form 5-methylcytosine"
tcattatgtctgtcccaacaattgccaataggcaggttacacacctccatagtgggagtgcgttagaacctcaatgggagggagagagagagtgatgtgagttttttttttttttttttgag

SEQ ID NO: 26004 - DNA, 122 bp, Homo sapiens
  misc_feature (61)..(62): /note="This region represents a CpG dinucleotide"
  misc_feature (61)..(61): /note="Nucleotide may be methylated to form 5-methylcytosine"
gttaagaactccagaattctagaatcacacagatctgggttcaaatactaaatccaacaccgtgtgactgtatgacctctccatgcctcggatttctcatgaggctcttttaggatgagatg

SEQ ID NO: 26005 - DNA, 122 bp, Homo sapiens
  misc_feature (61)..(62): /note="This region represents a CpG dinucleotide"
  misc_feature (61)..(61): /note="Nucleotide may be methylated to form 5-methylcytosine"
tgccctgccccctttcttttctggatgctgggtgtgaagacagagcccgcaggccaagaccgcaggaaaaaggcacgcagccgctgttgtatcttcagagtccacgcctctggcctctgggg

SEQ ID NO: 26006 - DNA, 122 bp, Homo sapiens
  misc_feature (61)..(62): /note="This region represents a CpG dinucleotide"
  misc_feature (61)..(61): /note="Nucleotide may be methylated to form 5-methylcytosine"
gtaatttacaatctagttggggaatcaagaataatgaaatgattgaataataattcaagacggcatattactaaagttgtaagatgaatcatgtaaatactaatcactgtgtcagagttcta

SEQ ID NO: 26007 - DNA, 122 bp, Homo sapiens
  misc_feature (61)..(62): /note="This region represents a CpG dinucleotide"
  misc_feature (61)..(61): /note="Nucleotide may be methylated to form 5-methylcytosine"
gggtggctggctgctgcttttgagggattgcagtggaccgggcagggagctggctggccacgtgcttccaggttctgggagccccagtggccggaagggacaaagggagacaagcagggtgc

SEQ ID NO: 26008 - DNA, 122 bp, Homo sapiens
  misc_feature (61)..(62): /note="This region represents a CpG dinucleotide"
  misc_feature (61)..(61): /note="Nucleotide may be methylated to form 5-methylcytosine"
agaggcggggcagaggcggcacttacggggcctgcgtgcgtgtggtgaactccttgaactcgctgtcatggatggtgaagtagggacggaagtcgcagcagaacctgaggggctgcaggcag

SEQ ID NO: 26009 - DNA, 122 bp, Homo sapiens
  misc_feature (61)..(62): /note="This region represents a CpG dinucleotide"
  misc_feature (61)..(61): /note="Nucleotide may be methylated to form 5-methylcytosine"
tgtattagaaaagcaggaaccttcaaggcatagcattatgcaaaggcatgatggattacacgagcaaagctgcagtttattctaataattaattagacaaaagggggaaaaatactgaccct

SEQ ID NO: 26010 - DNA, 122 bp, Homo sapiens
  misc_feature (61)..(62): /note="This region represents a CpG dinucleotide"
  misc_feature (61)..(61): /note="Nucleotide may be methylated to form 5-methylcytosine"
cttttatcctcacttgatactgccttgttgagtgactcattcattcctgtgactttattacgcacatcctgagggctctcaaatacatacttcagaccagcccggtctcctcatttatagtc

SEQ ID NO: 26011 - DNA, 122 bp, Homo sapiens
  misc_feature (61)..(62): /note="This region represents a CpG dinucleotide"
  misc_feature (61)..(61): /note="Nucleotide may be methylated to form 5-methylcytosine"
tgcctgttccttttattacaactttcaaaaagagttctctgtcccttttgatccatcccacgtactgctgcctgcctatctttctgaagcatggctgtattttgtcctttttttcctcaaaa

SEQ ID NO: 26012 - DNA, 122 bp, Homo sapiens
  misc_feature (61)..(62): /note="This region represents a CpG dinucleotide"
  misc_feature (61)..(61): /note="Nucleotide may be methylated to form 5-methylcytosine"
tggagtttgagctgcccattaggcatcaatgatgagtaagcagttgggaaaagttaagggcggaggttggagttgaaaataaaactttgggcatcatcaccatataactggtatttaaagcc

SEQ ID NO: 26013 - DNA, 122 bp, Homo sapiens
  misc_feature (61)..(62): /note="This region represents a CpG dinucleotide"
  misc_feature (61)..(61): /note="Nucleotide may be methylated to form 5-methylcytosine"
ctctattctgttacgtcattaacagtgccttactgtgcaaggcaccaaaggacataaatacgtacttgcaaagattccagatgagctgttcatgtgggccccttgctgactatattccagcc

SEQ ID NO: 26014 - DNA, 122 bp, Homo sapiens
  misc_feature (61)..(62): /note="This region represents a CpG dinucleotide"
  misc_feature (61)..(61): /note="Nucleotide may be methylated to form 5-methylcytosine"
taccaggccattgttgtcctggggctggagctctaagcctcgaacaatgtaaatcctaaccgtgcattcctgtgggacgctgtcaggtaattcccgaaactgtctgggaggggctggcacgc

SEQ ID NO: 26015 - DNA, 122 bp, Homo sapiens
  misc_feature (61)..(62): /note="This region represents a CpG dinucleotide"
  misc_feature (61)..(61): /note="Nucleotide may be methylated to form 5-methylcytosine"
agtggtgagccagacagacaacattcctatgctagtttctcctactagggacaggctgaccgcaaacaaatgaacaatggccacagattgagctaaatgacatgaaggcagtaaacagggtg

SEQ ID NO: 26016 - DNA, 122 bp, Homo sapiens
  misc_feature (61)..(62): /note="This region represents a CpG dinucleotide"
  misc_feature (61)..(61): /note="Nucleotide may be methylated to form 5-methylcytosine"
ttcatgtgagcttgttccttcagagctcttggctacaggattgcaaacaacatcctaaaacgtggagctgcaaaccttggtgatttaaatgctcgctgccaggcaaattgcggtgacataaa

SEQ ID NO: 26017 - DNA, 122 bp, Homo sapiens
  misc_feature (61)..(62): /note="This region represents a CpG dinucleotide"
  misc_feature (61)..(61): /note="Nucleotide may be methylated to form 5-methylcytosine"
cagtgagtcgtagatgattcctccagatcttgacgaggcccacaggcccttgtttaagaacgtcgcttgctgctttgctgcttctatggggcacattctggtgataaaggccagctgttttt

SEQ ID NO: 26018 - DNA, 122 bp, Homo sapiens
  misc_feature (61)..(62): /note="This region represents a CpG dinucleotide"
  misc_feature (61)..(61): /note="Nucleotide may be methylated to form 5-methylcytosine"
caagggatgaaagtagactccacctctttgggggagaaggaccgcaaactcacagaggaacgggtgtgagaccattcatatcatcagtccaccatagacctgtgtgagttgtcttttatttg

SEQ ID NO: 26019 - DNA, 122 bp, Homo sapiens
  misc_feature (61)..(62): /note="This region represents a CpG dinucleotide"
  misc_feature (61)..(61): /note="Nucleotide may be methylated to form 5-methylcytosine"
atccccggaagaacatgagctccaatgagggcagagacttctgtctgttgggttcactgccgcattcctgggacccgagcggtgcctggcacgcaggaagcacttggaaattatttgctgag

SEQ ID NO: 26020 - DNA, 122 bp, Homo sapiens
  misc_feature (61)..(62): /note="This region represents a CpG dinucleotide"
  misc_feature (61)..(61): /note="Nucleotide may be methylated to form 5-methylcytosine"
tgaggaaggtctgctggaacagaaaaaaccaaagcccagaaaaaattaaaaccaaccagacgaatgagaaaccctgttacaagtctgcctgcagcaacataaggtcagggccctagaggtac

SEQ ID NO: 26021 - DNA, 122 bp, Homo sapiens
  misc_feature (61)..(62): /note="This region represents a CpG dinucleotide"
  misc_feature (61)..(61): /note="Nucleotide may be methylated to form 5-methylcytosine"
ctcctgataaatcttacttcactttatgatccatcttattcacagctgttgagtcaggcacgactaaggttaaatcttagttctgcccttattggctatatgaccttggataaatagaaggt

SEQ ID NO: 26022 - DNA, 122 bp, Homo sapiens
  misc_feature (61)..(62): /note="This region represents a CpG dinucleotide"
  misc_feature (61)..(61): /note="Nucleotide may be methylated to form 5-methylcytosine"
aagagttttaagttagcatccacatgaagacaggagaggaagtttggggtagggttggaacggagagctttatataaagctgatatctttgaaactcaccaccttcaatgaagaggaaacaa

SEQ ID NO: 26023 - DNA, 122 bp, Homo sapiens
  misc_feature (61)..(62): /note="This region represents a CpG dinucleotide"
  misc_feature (61)..(61): /note="Nucleotide may be methylated to form 5-methylcytosine"
caggtctcttcctgcttgaccagcactctgcttatgctggcacaggagctgccctgaatacgttcagagtgactgtgggcattctttcctctggggtgcatgtctaaggtcatactcgcatt

SEQ ID NO: 26024 - DNA, 122 bp, Homo sapiens
  misc_feature (61)..(62): /note="This region represents a CpG dinucleotide"
  misc_feature (61)..(61): /note="Nucleotide may be methylated to form 5-methylcytosine"
aagggctggatggtaacagatcacagccaaagaaataacctgaaccaaggcagagacatccgggatggagagaagtggcagaaggcttatgagatatggaagttgaatggacaggatgtgtg

SEQ ID NO: 26025 - DNA, 122 bp, Homo sapiens
  misc_feature (61)..(62): /note="This region represents a CpG dinucleotide"
  misc_feature (61)..(61): /note="Nucleotide may be methylated to form 5-methylcytosine"
attggccaggctgctcccttgtggaccaggaactctgtgttctgagaatgttgtcagcagcgggaactgggtacacaacatgcccacaacccgggatgccccagcacaagcagagagggtgg

SEQ ID NO: 26026 - DNA, 122 bp, Homo sapiens
  misc_feature (61)..(62): /note="This region represents a CpG dinucleotide"
  misc_feature (61)..(61): /note="Nucleotide may be methylated to form 5-methylcytosine"
agcctgtgcaaactccaggtccctgtccggtggatcccacctctgagggcccgagggtgacgcggtgaggacaccacgggttctggtccttcccacgcgcgcgtccgctagcccaggcccgg

SEQ ID NO: 26027 - DNA, 122 bp, Homo sapiens
  misc_feature (61)..(62): /note="This region represents a CpG dinucleotide"
  misc_feature (61)..(61): /note="Nucleotide may be methylated to form 5-methylcytosine"
agcagccacaggcgcacacgctgaccacgctgagcagcgagccgggccagtcccagcgaacgcacatcaagacggagcagctgagccccagccactacagcgagcagcagcagcactcgccc

SEQ ID NO: 26028 - DNA, 122 bp, Homo sapiens
  misc_feature (61)..(62): /note="This region represents a CpG dinucleotide"
  misc_feature (61)..(61): /note="Nucleotide may be methylated to form 5-methylcytosine"
ctgcaaggtggtgataactgtcgatgactcggcaggtttttcggagaaatgtacaggaagcgaaacccactgcgtgtctaacgggtccagtatgtcattgtgcaacgtcccacaggccttca

SEQ ID NO: 26029 - DNA, 122 bp, Homo sapiens
  misc_feature (61)..(62): /note="This region represents a CpG dinucleotide"
  misc_feature (61)..(61): /note="Nucleotide may be methylated to form 5-methylcytosine"
ttgaatgtcattggaacttcacagaggagccaacggaagagcgtgggagaggggatgcaccgtgtctgggtctcagcaggctcatgtgttggccctggctccagcaccagccccttcagcag

SEQ ID NO: 26030 - DNA, 122 bp, Homo sapiens
  misc_feature (61)..(62): /note="This region represents a CpG dinucleotide"
  misc_feature (61)..(61): /note="Nucleotide may be methylated to form 5-methylcytosine"
aaagagaagagataagatattttgaaagacaagagataatatatttttaagaaagcaattcgagtaagattgtgaaatgtatacattactgattacagtgaagccagaaaaatttggcagag

SEQ ID NO: 26031 - DNA, 122 bp, Homo sapiens
  misc_feature (61)..(62): /note="This region represents a CpG dinucleotide"
  misc_feature (61)..(61): /note="Nucleotide may be methylated to form 5-methylcytosine"
taaaggaggatcactcttttcctcctctccattttccaaattgtatcctgatggtggttacgttactgctctaattgaggggatataaaggtgactaagaaagccaccacaggccgggtgtg

SEQ ID NO: 26032 - DNA, 122 bp, Homo sapiens
  misc_feature (61)..(62): /note="This region represents a CpG dinucleotide"
  misc_feature (61)..(61): /note="Nucleotide may be methylated to form 5-methylcytosine"
tactttcttttctcctaagagagaacacccttgtgagctaggcagggcaagtggagcaatcgcaatttgcagatgagttaattgatgctcaagcaatgagatgacttctcagggcccttggc

SEQ ID NO: 26033 - DNA, 122 bp, Homo sapiens
  misc_feature (61)..(62): /note="This region represents a CpG dinucleotide"
  misc_feature (61)..(61): /note="Nucleotide may be methylated to form 5-methylcytosine"
gcctttaaggagcccttatgttcgtcaccctggtgcagaaattggcatgcctcatttaggcgccatcctccacaaagtcactcatatcccaaccgggagccagctctgacatctagtcatcg

SEQ ID NO: 26034 - DNA, 122 bp, Homo sapiens
  misc_feature (61)..(62): /note="This region represents a CpG dinucleotide"
  misc_feature (61)..(61): /note="Nucleotide may be methylated to form 5-methylcytosine"
ccaacaagttaacagcttataataggaaagcactctccagacttctgcccatctccatcacgccgcggaaacttgtctgaaaggagaatttggatgcaacagggcaacggagcgacgtttct

SEQ ID NO: 26035 - DNA, 122 bp, Homo sapiens
  misc_feature (61)..(62): /note="This region represents a CpG dinucleotide"
  misc_feature (61)..(61): /note="Nucleotide may be methylated to form 5-methylcytosine"
cttgcttggtttctgtaatgaggaagttctccgcagctcagtttcctttccctcactgagcgcctgaaacaggaagtcagtcagttaagctggtggcagcagccgaggccaccaagaggcaa

SEQ ID NO: 26036 - DNA, 122 bp, Homo sapiens
  misc_feature (61)..(62): /note="This region represents a CpG dinucleotide"
  misc_feature (61)..(61): /note="Nucleotide may be methylated to form 5-methylcytosine"
tccagaggaatcctttttcttccgtctgagttcagcaaacttcctgcttcctctacccagcgcagcgagcccctctctgtactgatcagcaagggtgacagggcttggcagccatggtggca

SEQ ID NO: 26037 - DNA, 122 bp, Homo sapiens
  misc_feature (61)..(62): /note="This region represents a CpG dinucleotide"
  misc_feature (61)..(61): /note="Nucleotide may be methylated to form 5-methylcytosine"
ggttctctgcctcagtggctattcatacccatcctgaagaagaccaggtctcccagttgacgggagttactgactcacagtctagatgaggatttgtattgggcagagctgactcggtaatt

SEQ ID NO: 26038 - DNA, 122 bp, Homo sapiens
  misc_feature (61)..(62): /note="This region represents a CpG dinucleotide"
  misc_feature (61)..(61): /note="Nucleotide may be methylated to form 5-methylcytosine"
attcccttaaagtggtcaagtctgggttaagggcttttagggcacattaactcactatgtcgtcttgagcaactctgcaaggggtgggagcagagggggccccctttggcccagctctctac

SEQ ID NO: 26039 - DNA, 122 bp, Homo sapiens
  misc_feature (61)..(62): /note="This region represents a CpG dinucleotide"
  misc_feature (61)..(61): /note="Nucleotide may be methylated to form 5-methylcytosine"
cagggtgcctggattcaaatctgatgcctgcctgttacagctgtgtggcttttggcaggccgtttagtctctttaagcctcagcttcctcagtctgtaaattagagatgatggaatgcttgc

SEQ ID NO: 26040 - DNA, 122 bp, Homo sapiens
  misc_feature (61)..(62): /note="This region represents a CpG dinucleotide"
  misc_feature (61)..(61): /note="Nucleotide may be methylated to form 5-methylcytosine"
atctgcctgatgctgaggtctgttcaactccaaagcctggtccaaatggatgacaggggccgtgtcttggaactttgggtaaccagatttggccacatatcacctctcctcttcccagaagc

SEQ ID NO: 26041 - DNA, 122 bp, Homo sapiens
  misc_feature (61)..(62): /note="This region represents a CpG dinucleotide"
  misc_feature (61)..(61): /note="Nucleotide may be methylated to form 5-methylcytosine"
aattcctccacttaacagtcactgcttggggttaaggctctgcctctgtagaaatcttcccgtacaagctaactacaagtggtaggctcttcttatcctaagctcttaatcagtcattaact

SEQ ID NO: 26042 - DNA, 122 bp, Homo sapiens
  misc_feature (61)..(62): /note="This region represents a CpG dinucleotide"
  misc_feature (61)..(61): /note="Nucleotide may be methylated to form 5-methylcytosine"
tgacactccctctgccttcaaaataaaagtcctaactccttaaggcatggtttaaaataccgttcataatttggctccatccatctttccagattcatcaactgccactctaccccaagtac

SEQ ID NO: 26043 - DNA, 122 bp, Homo sapiens
  misc_feature (61)..(62): /note="This region represents a CpG dinucleotide"
  misc_feature (61)..(61): /note="Nucleotide may be methylated to form 5-methylcytosine"
caggccccagctggccctggagcaagagcactgccccctcctgtgcacttggcctcaaaccgacccaggacaggctacactgggctaatctgacccctgaagtgggtcctctgcctgggtgt

SEQ ID NO: 26044 - DNA, 122 bp, Homo sapiens
  misc_feature (61)..(62): /note="This region represents a CpG dinucleotide"
  misc_feature (61)..(61): /note="Nucleotide may be methylated to form 5-methylcytosine"
caactctgtgctacgtttctgtgtggctttcttgaaactacttctctttatttttgttggcgtggctatttattgttatctgtaacgacgcaatatgctgccgaagtctgggaaggagaggg

SEQ ID NO: 26045 - DNA, 122 bp, Homo sapiens
  misc_feature (61)..(62): /note="This region represents a CpG dinucleotide"
  misc_feature (61)..(61): /note="Nucleotide may be methylated to form 5-methylcytosine"
cacttactaatacaatggtcacaatcctgtctctgggcctcagttaccaaacctgtgaaacgagagggttggttggggccatctctaagaccatttccagtgagtcaatccatgatgtactg

SEQ ID NO: 26046 - DNA, 122 bp, Homo sapiens
  misc_feature (61)..(62): /note="This region represents a CpG dinucleotide"
  misc_feature (61)..(61): /note="Nucleotide may be methylated to form 5-methylcytosine"
aaaagtttgccaacacttatcactatacaaaaccacaaaaccaaagataaataataaaagcggaagaaagaaacaaaggctatacaaaacaaccacaaagcaaatgacaagagtaagtccta

SEQ ID NO: 26047 - DNA, 122 bp, Homo sapiens
  misc_feature (61)..(62): /note="This region represents a CpG dinucleotide"
  misc_feature (61)..(61): /note="Nucleotide may be methylated to form 5-methylcytosine"
gctgcttttcacgttcaaggcccacagatattcactgaatgggatttgagcctttgctgccgtctcctcccttcgcctccaaatgttcacttccttgttccttcccctcctctctccagggc

SEQ ID NO: 26048 - DNA, 122 bp, Homo sapiens
  misc_feature (61)..(62): /note="This region represents a CpG dinucleotide"
  misc_feature (61)..(61): /note="Nucleotide may be methylated to form 5-methylcytosine"
tgttactcatgtggttttcccgacatccctcctctctcaggtaatgattcattggtgtggcgcaagacaagtcaaagcaccagtgtttcaactaagaaagaagatgagacaatcacaaggcc

SEQ ID NO: 26049 - DNA, 122 bp, Homo sapiens
  misc_feature (61)..(62): /note="This region represents a CpG dinucleotide"
  misc_feature (61)..(61): /note="Nucleotide may be methylated to form 5-methylcytosine"
acatacctgcatgagaaaggttagtcagctgtgcctgacaaaatctccaagtctcttccccgccctctgccagaggagatgccctcttccgcatgccagccactcaccctccagagaggact

SEQ ID NO: 26050 - DNA, 122 bp, Homo sapiens
  misc_feature (61)..(62): /note="This region represents a CpG dinucleotide"
  misc_feature (61)..(61): /note="Nucleotide may be methylated to form 5-methylcytosine"
gtatgcactatgcctttagtttccagtgcttcaccaaagtatatttacatttcatttatacgataatggggcatgagatatacaaacacgtatcattttgtgtgttcaaaaatatttttctg

SEQ ID NO: 26051 - DNA, 122 bp, Homo sapiens
  misc_feature (61)..(62): /note="This region represents a CpG dinucleotide"
  misc_feature (61)..(61): /note="Nucleotide may be methylated to form 5-methylcytosine"
cagcacagacctgggagccagcaagtccacacagtctggcatttacaagtgaaacaggtgcgacctgcagctactgccgttgggacaccaggcaaggggttagaatggagattgggaaaggg

SEQ ID NO: 26052 - DNA, 122 bp, Homo sapiens
  misc_feature (61)..(62): /note="This region represents a CpG dinucleotide"
  misc_feature (61)..(61): /note="Nucleotide may be methylated to form 5-methylcytosine"
ggctatgagtatatgtgactaatacactactgtcaatctcatctgcccagaatcaaatgtcgtgtgtttggccatctctgtaaacctaggatgggaatccctccctcaccaatggagtgaat

SEQ ID NO: 26053 - DNA, 122 bp, Homo sapiens
  misc_feature (61)..(62): /note="This region represents a CpG dinucleotide"
  misc_feature (61)..(61): /note="Nucleotide may be methylated to form 5-methylcytosine"
acagttaatacaaactagaaaagcagaattcgtgatggcctagagacatacccacggctgcgtaacagaaggggaattgcacagacagctttactgataagagaagtgactcaaactgctag

SEQ ID NO: 26054 - DNA, 122 bp, Homo sapiens
  misc_feature (61)..(62): /note="This region represents a CpG dinucleotide"
  misc_feature (61)..(61): /note="Nucleotide may be methylated to form 5-methylcytosine"
aaatggtctacattcaaatggtaagtttgatccccgcatcatcaatcatcctttcagtttcgtttgatcaaatgttgggcatttatacagctcattttacaaaccatacaaatcagaaggta

SEQ ID NO: 26055 - DNA, 122 bp, Homo sapiens
  misc_feature (61)..(62): /note="This region represents a CpG dinucleotide"
  misc_feature (61)..(61): /note="Nucleotide may be methylated to form 5-methylcytosine"
tgcattttgcctttggaagcctttcctagctccccaggcagaattagtcagtctcttccacgtgctccctcaaaactctgttttcgtccattacagcatttctccaggtatatgtacacgtg

SEQ ID NO: 26056 - DNA, 122 bp, Homo sapiens
  misc_feature (61)..(62): /note="This region represents a CpG dinucleotide"
  misc_feature (61)..(61): /note="Nucleotide may be methylated to form 5-methylcytosine"
ctcgtcctcctggtcttataaccacgtatgaagtgtcttcctgcctggattttgttctaacgtgggcatggattctactctacaaccttccttgttttagcaaaccacaatggtttatacaa

SEQ ID NO: 26057 - DNA, 122 bp, Homo sapiens
  misc_feature (61)..(62): /note="This region represents a CpG dinucleotide"
  misc_feature (61)..(61): /note="Nucleotide may be methylated to form 5-methylcytosine"
gtttctatttaacagagaatctcaatggaagagattgatttgaaaagttgaaggaaaaatcgtgcatacatgtttcaaaactgtggtcttacagtaaccacagagttaattcttggttgact

SEQ ID NO: 26058 - DNA, 122 bp, Homo sapiens
  misc_feature (61)..(62): /note="This region represents a CpG dinucleotide"
  misc_feature (61)..(61): /note="Nucleotide may be methylated to form 5-methylcytosine"
gtggatgtgtggttgtatctcattgtgctatccagtttatttttaactcttgtcttctttcgtttccttgccctacttacatttcagtcttgccaaaacaagctatttacatatacattaat

SEQ ID NO: 26059 - DNA, 122 bp, Homo sapiens
  misc_feature (61)..(62): /note="This region represents a CpG dinucleotide"
  misc_feature (61)..(61): /note="Nucleotide may be methylated to form 5-methylcytosine"
taaagttaaactataaactaaattttccccgaagttagctttgcccatgcccaggaatgacgaaggacaacttggaggttagaagcaagggtcagatatctcttactgtcacagttttgcaa

SEQ ID NO: 26060 - DNA, 122 bp, Homo sapiens
  misc_feature (61)..(62): /note="This region represents a CpG dinucleotide"
  misc_feature (61)..(61): /note="Nucleotide may be methylated to form 5-methylcytosine"
gtgggcgtgcttgcgggtccaggagggcccctctcccgcgaccgccgaccacgatgagagcgtgaagaccctctcgaaaggaagggctctgctctacacactggtgtctcctgcggaagggc

SEQ ID NO: 26061 - DNA, 122 bp, Homo sapiens
  misc_feature (61)..(62): /note="This region represents a CpG dinucleotide"
  misc_feature (61)..(61): /note="Nucleotide may be methylated to form 5-methylcytosine"
cacctcttctgatgttactcaacgtgcatgcatttgctggaaatggcaaaaacctgaggccgggcatggtggctcacgcctatgatcccagcactttgggaggcccgggcggagagatcact

SEQ ID NO: 26062 - DNA, 122 bp, Homo sapiens
  misc_feature (61)..(62): /note="This region represents a CpG dinucleotide"
  misc_feature (61)..(61): /note="Nucleotide may be methylated to form 5-methylcytosine"
tcttgccgcgtcctcacatggcagaaagggaaagggcacacaggcaccgagctcattcctcgcccttttctaaagcactgatcccacccaggagggcggagcccccacggcctcatcgcctt

SEQ ID NO: 26063 - DNA, 122 bp, Homo sapiens
  misc_feature (61)..(62): /note="This region represents a CpG dinucleotide"
  misc_feature (61)..(61): /note="Nucleotide may be methylated to form 5-methylcytosine"
ccctcactcccctgcaggcaggaatccgtgggggtggggatagacaccagagtgtgcctgcgataataggaacccaaaccagcatttgtagaggcttcactgtgtgctaggcactgtgcaaa

SEQ ID NO: 26064 - DNA, 122 bp, Homo sapiens
  misc_feature (61)..(62): /note="This region represents a CpG dinucleotide"
  misc_feature (61)..(61): /note="Nucleotide may be methylated to form 5-methylcytosine"
tctagccatagtccactgccatacaaataagaggctaactttaagaaattcaattaaagccgggtgcggtctctcatgcttgtaatcccagcactttgggaggctgaggcaggcagatcacc

SEQ ID NO: 26065 - DNA, 122 bp, Homo sapiens
  misc_feature (61)..(62): /note="This region represents a CpG dinucleotide"
  misc_feature (61)..(61): /note="Nucleotide may be methylated to form 5-methylcytosine"
gtaaggcagggcatgggcctccctgcccccctcatttcctgctctttgggcagctgtgggcgagaaaggctgcagggactatttttagttggtcagtcccctggcaggagggacgtgcagaa

SEQ ID NO: 26066 - DNA, 122 bp, Homo sapiens
  misc_feature (61)..(62): /note="This region represents a CpG dinucleotide"
  misc_feature (61)..(61): /note="Nucleotide may be methylated to form 5-methylcytosine"
cagattcccccatccttctggtataaaacattcttgaaataccttgtctatgatttctaacgtcagtgtctttagatggagaacttaaaatgcttggtaaacaatctgagtctggaattctt

SEQ ID NO: 26067 - DNA, 122 bp, Homo sapiens
  misc_feature (61)..(62): /note="This region represents a CpG dinucleotide"
  misc_feature (61)..(61): /note="Nucleotide may be methylated to form 5-methylcytosine"
agaaaataccttttggagggttagaagatcaggggacatggttgttcacatttgctgccacggaacaccgccagtcttcacttggaaacagaatcacgccttgtgaagagatcatccctaag

SEQ ID NO: 26068 - DNA, 122 bp, Homo sapiens
  misc_feature (61)..(62): /note="This region represents a CpG dinucleotide"
  misc_feature (61)..(61): /note="Nucleotide may be methylated to form 5-methylcytosine"
ttgcccatctacagcttcctgttggggatttgaacttgacttccaaggtctctgactcaccgatccaaccaaatccactttaatcatttccgattccctctcacatgtccttgggactggat

SEQ ID NO: 26069 - DNA, 122 bp, Homo sapiens
  misc_feature (61)..(62): /note="This region represents a CpG dinucleotide"
  misc_feature (61)..(61): /note="Nucleotide may be methylated to form 5-methylcytosine"
gagatggtacatcaggataactgctcgtatcaggtaaaatttaaagcctgattctgaggccggcatcctttgggagaggaggccttcctcttccaaagcagcaggttgcctctttccggata

SEQ ID NO: 26070 - DNA, 122 bp, Homo sapiens
  misc_feature (61)..(62): /note="This region represents a CpG dinucleotide"
  misc_feature (61)..(61): /note="Nucleotide may be methylated to form 5-methylcytosine"
acatttagaaaatgcaagaaataaaatttagaaaattaaaattccccttattctacataccgggacatgacttgaatttttattatccccaacaaagggaagagagcatttttttgggacga

SEQ ID NO: 26071 - DNA, 122 bp, Homo sapiens
  misc_feature (61)..(62): /note="This region represents a CpG dinucleotide"
  misc_feature (61)..(61): /note="Nucleotide may be methylated to form 5-methylcytosine"
cactgaaagaaaagtaaacaaataaaaaataaaatagtacactctatctcacaaggcttacgtgctaatatagtcatgcatcacttaatgatgagattacattcaggtaaatgcatccttag

SEQ ID NO: 26072 - DNA, 122 bp, Homo sapiens
  misc_feature (61)..(62): /note="This region represents a CpG dinucleotide"
  misc_feature (61)..(61): /note="Nucleotide may be methylated to form 5-methylcytosine"
aggacaggcctggtgccattgcttcaaggtcaactggctgacgggctgttgacccaggaacgggagacagttgccaaacaggactggccttgtgttagctgaatgtttgctccatgaacttg

SEQ ID NO: 26073 - DNA, 122 bp, Homo sapiens
  misc_feature (61)..(62): /note="This region represents a CpG dinucleotide"
  misc_feature (61)..(61): /note="Nucleotide may be methylated to form 5-methylcytosine"
accatggaagagtcagcaaaggtgtggaaggctgtgctccagcctccagagtcccacacgcggcctcacacacccagcccaaggctgcacctggtactttgggacacttgcagcccttcctc

SEQ ID NO: 26074 - DNA, 122 bp, Homo sapiens
  misc_feature (61)..(62): /note="This region represents a CpG dinucleotide"
  misc_feature (61)..(61): /note="Nucleotide may be methylated to form 5-methylcytosine"
tacaatctatattatctcatatatagatttcttcctcactttatttgctcacttctgtcacgcatttaaaatgtcacagagaccaaaatagagtggctttctggtggaactcatggcagtca

SEQ ID NO: 26075 - DNA, 122 bp, Homo sapiens
  misc_feature (61)..(62): /note="This region represents a CpG dinucleotide"
  misc_feature (61)..(61): /note="Nucleotide may be methylated to form 5-methylcytosine"
ctcatctcatgacctctgcagcaagaagtcgagaacttcaaaaaggtcaatatgatcagccgggagcagtttgacacactgacccctgagccccctgtggatcccaaccaggaagttcctcc

SEQ ID NO: 26076 - DNA, 122 bp, Homo sapiens
  misc_feature (61)..(62): /note="This region represents a CpG dinucleotide"
  misc_feature (61)..(61): /note="Nucleotide may be methylated to form 5-methylcytosine"
agtgtgtggcttacatgcatgcttgctgtgtgcatctgagtttgatgtggggggcttgtgcgcatgttcatgtgggtgtttgtgtgttcgtgtgtgtttcggtttatgtgcatgtggggttt

SEQ ID NO: 26077 - DNA, 122 bp, Homo sapiens
  misc_feature (61)..(62): /note="This region represents a CpG dinucleotide"
  misc_feature (61)..(61): /note="Nucleotide may be methylated to form 5-methylcytosine"
attttaacttgttcttgtttttcctgttgtgcaaggcgagctgcaacttcttcaggtggtcgctcccttatagaagatgaggatgcttcttcttgcagcaaaagtaaataagaggaaatcaa

SEQ ID NO: 26078 - DNA, 122 bp, Homo sapiens
  misc_feature (61)..(62): /note="This region represents a CpG dinucleotide"
  misc_feature (61)..(61): /note="Nucleotide may be methylated to form 5-methylcytosine"
agcgtgaccgcagaaggctgtggtgctcctgctggagtaggcttgtggtgggtgacagtgcgggcacaggggaaggtgtgtgggcacaggggagggtatgtggacactggtctggaagggaa

SEQ ID NO: 26079 - DNA, 122 bp, Homo sapiens
  misc_feature (61)..(62): /note="This region represents a CpG dinucleotide"
  misc_feature (61)..(61): /note="Nucleotide may be methylated to form 5-methylcytosine"
gtgtggatttgtgtgtctgggcatgtgtgtgttcctgtatacctgcgtgttgctcgtgcacgtgcctgcatgagtgtgtatctgtgcctgtgtgtgaatttccacgtgtgtgaatgtgcctg

SEQ ID NO: 26080 - DNA, 122 bp, Homo sapiens
  misc_feature (61)..(62): /note="This region represents a CpG dinucleotide"
  misc_feature (61)..(61): /note="Nucleotide may be methylated to form 5-methylcytosine"
gaatattccataagttttagttcctttataactcatgaacatatgtgtaaggacttgtttcgtatataccatctattctttgtttaccatatgtttgtaagcaaattgacaagagagtaagt

SEQ ID NO: 26081 - DNA, 122 bp, Homo sapiens
  misc_feature (61)..(62): /note="This region represents a CpG dinucleotide"
  misc_feature (61)..(61): /note="Nucleotide may be methylated to form 5-methylcytosine"
agatgtttctaaagtgacacccccgtcagcacagtttatattcaacctgatgattactagcgaagcaataaaaaaatatttaacaacctcataggcttgtggcaatgagccaatggtaactg

SEQ ID NO: 26082 - DNA, 122 bp, Homo sapiens
  misc_feature (61)..(62): /note="This region represents a CpG dinucleotide"
  misc_feature (61)..(61): /note="Nucleotide may be methylated to form 5-methylcytosine"
tatttagtgtgtttcatttgcctttcttaaatacagggcacccctgaaacaggctttgttcgcagctctgctctgtcctcggatttaggttatcgaacaggcttcctccctcccctgcacaa

SEQ ID NO: 26083 - DNA, 122 bp, Homo sapiens
  misc_feature (61)..(62): /note="This region represents a CpG dinucleotide"
  misc_feature (61)..(61): /note="Nucleotide may be methylated to form 5-methylcytosine"
tgaatatgataatccaggcaacattgttagcacagaaccctacacatgttgttagctattcgttaagaataaatgtatacagatcaggcatttgattgcaaccatcaaagcaccagtattca

SEQ ID NO: 26084 - DNA, 122 bp, Homo sapiens
  misc_feature (61)..(62): /note="This region represents a CpG dinucleotide"
  misc_feature (61)..(61): /note="Nucleotide may be methylated to form 5-methylcytosine"
tacccgcaagagacgccccaaccttcaggctgctttatgtctccaaagctctgcaggtgccgctcttccccagaggacaccccttccctgccagtcaaccccaccagccgcaggcagacatt

SEQ ID NO: 26085 - DNA, 122 bp, Homo sapiens
  misc_feature (61)..(62): /note="This region represents a CpG dinucleotide"
  misc_feature (61)..(61): /note="Nucleotide may be methylated to form 5-methylcytosine"
tgtccattacacacaaatttcattaaaaaatatatgacaacactgtaattagactatgttcggccttggattgacacaagttgtaaatgaggactaaaaacccacctaatcatcctcccaat

SEQ ID NO: 26086 - DNA, 122 bp, Homo sapiens
  misc_feature (61)..(62): /note="This region represents a CpG dinucleotide"
  misc_feature (61)..(61): /note="Nucleotide may be methylated to form 5-methylcytosine"
tcttactcatagcacggagtgaggatagaatatattatcaatagctacagctatttctatcgatgatgaagtttccagacctcagtgcacaagatactgatctacgtcatccactgactcat

SEQ ID NO: 26087 - DNA, 122 bp, Homo sapiens
  misc_feature (61)..(62): /note="This region represents a CpG dinucleotide"
  misc_feature (61)..(61): /note="Nucleotide may be methylated to form 5-methylcytosine"
cactgctgcacttgctgggggagtgtttacggagtgcgcctgtgtgtgagtgcgagcccacgtgcgtgtgtgtgagcctgtgtgtgtgcacgcactcaagtgagcaggggcgggcgctagga

SEQ ID NO: 26088 - DNA, 122 bp, Homo sapiens
  misc_feature (61)..(62): /note="This region represents a CpG dinucleotide"
  misc_feature (61)..(61): /note="Nucleotide may be methylated to form 5-methylcytosine"
tcctctttaacatcagctcatctctttcagccctgtgtgactcatggaaaacaggagtgacggtcaagcagagaggaatgtgaacttagtgggtaatgccataaacctttggccaggacata

SEQ ID NO: 26089 - DNA, 122 bp, Homo sapiens
  misc_feature (61)..(62): /note="This region represents a CpG dinucleotide"
  misc_feature (61)..(61): /note="Nucleotide may be methylated to form 5-methylcytosine"
gacaggaagaaggcagccagggcaggggtgggggtcctcacagccagggcagccccagcgcgttggctccaggagcccgggtgggggccgaccgttggggtgcccctccctgtcctcggcct

SEQ ID NO: 26090 - DNA, 122 bp, Homo sapiens
  misc_feature (61)..(62): /note="This region represents a CpG dinucleotide"
  misc_feature (61)..(61): /note="Nucleotide may be methylated to form 5-methylcytosine"
gctgtaaaaccggatgcctctcctaagccgactctagtggaacagcaactacagatgccacgtaatcatagagtaacaaggctagaagttaccacctcaaggataaacacaacctcttcatc

SEQ ID NO: 26091 - DNA, 122 bp, Homo sapiens
  misc_feature (61)..(62): /note="This region represents a CpG dinucleotide"
  misc_feature (61)..(61): /note="Nucleotide may be methylated to form 5-methylcytosine"
tcctctttgcagtttcacaactatgggaagtttcagagaaatgtgcattcagagaatttgcgtctttgaaaagctaaattaagatgcattataacactgtagtaattgcataatcaacattt

SEQ ID NO: 26092 - DNA, 122 bp, Homo sapiens
  misc_feature (61)..(62): /note="This region represents a CpG dinucleotide"
  misc_feature (61)..(61): /note="Nucleotide may be methylated to form 5-methylcytosine"
tgatttgtagtgtttgctgatccctgtggtgtaaatactcctgctatggatgatttcaagcgactcatgtgagtcattgaacacagagccgggaagagactcacagtgcactgtgatttagt

SEQ ID NO: 26093 - DNA, 122 bp, Homo sapiens
  misc_feature (61)..(62): /note="This region represents a CpG dinucleotide"
  misc_feature (61)..(61): /note="Nucleotide may be methylated to form 5-methylcytosine"
aggaagaggctaagtcacaggaggcagctctatgggtgataactgacctactgccaggcacgttaatgccttctatcagctaatcctgtaagacaaatggggtaacatagatcttttctcta

SEQ ID NO: 26094 - DNA, 122 bp, Homo sapiens
  misc_feature (61)..(62): /note="This region represents a CpG dinucleotide"
  misc_feature (61)..(61): /note="Nucleotide may be methylated to form 5-methylcytosine"
gcccacactgaccagtcatcggaagtgggctatccctggggacacgcgaaccttagcctacggcagtacccagggagtgactcagccatgagccatcagcaggcaacacccgcaaccactga

SEQ ID NO: 26095 - DNA, 122 bp, Homo sapiens
  misc_feature (61)..(62): /note="This region represents a CpG dinucleotide"
  misc_feature (61)..(61): /note="Nucleotide may be methylated to form 5-methylcytosine"
accttgaagcgtttcttgatggtgattcggtgtcgagagtatttgtcatctggggagaaccgagcaggatgggctgagcaggtctgttgtcccatcgggtcaaatttctgctccaggaacac

SEQ ID NO: 26096 - DNA, 122 bp, Homo sapiens
  misc_feature (61)..(62): /note="This region represents a CpG dinucleotide"
  misc_feature (61)..(61): /note="Nucleotide may be methylated to form 5-methylcytosine"
gggtaagacaaggagcaaacatatatttgtttctgatgccaaccacctgaagcatcaaatcgtctccactttttagatttcaccccggcacatcaacatcgctctaaagagaaattcagctg

SEQ ID NO: 26097 - DNA, 122 bp, Homo sapiens
  misc_feature (61)..(62): /note="This region represents a CpG dinucleotide"
  misc_feature (61)..(61): /note="Nucleotide may be methylated to form 5-methylcytosine"
aacaaaaggaccagtgttgcccaaggcctctgcagaggtctgtgcatgcatctcagagagcgaactaaccatgggagttcagcactgatcctattgtgtccttccactggctttttgtctga

SEQ ID NO: 26098 - DNA, 122 bp, Homo sapiens
  misc_feature (61)..(62): /note="This region represents a CpG dinucleotide"
  misc_feature (61)..(61): /note="Nucleotide may be methylated to form 5-methylcytosine"
ctcccaggttcaagtgattctcctgcttcagcctctcgagtacttgtgattacaggcatgcgccaccacgcccggctaattttgtatgtttttttagtacagacgggatttcaccatgttag

SEQ ID NO: 26099 - DNA, 122 bp, Homo sapiens
  misc_feature (61)..(62): /note="This region represents a CpG dinucleotide"
  misc_feature (61)..(61): /note="Nucleotide may be methylated to form 5-methylcytosine"
tcttgcactcaaaggctgtgagtggatgtggcccagccaccgtctgcttgggtgtgctgccgccagctggcttccagccttctgctctgtttcatcaccttgcagtctccaccccctcacca

SEQ ID NO: 26100 - DNA, 122 bp, Homo sapiens
  misc_feature (61)..(62): /note="This region represents a CpG dinucleotide"
  misc_feature (61)..(61): /note="Nucleotide may be methylated to form 5-methylcytosine"
atgttcattgcttccggttttgaggacaggatattgtagggaacttgatatgatcaataacgcttgtctgccttacacagaccttagccagggatcagcctaatcttgaagaatcattcaaa

SEQ ID NO: 26101 - DNA, 122 bp, Homo sapiens
  misc_feature (61)..(62): /note="This region represents a CpG dinucleotide"
  misc_feature (61)..(61): /note="Nucleotide may be methylated to form 5-methylcytosine"
ctctctcattttatagcatgaataagagctagtattaaagataaaatgctacatgactcacgtacaagtcagacacctaatcagtggtagatgctaagaataacacactgtagtgactaaga

SEQ ID NO: 26102 - DNA, 122 bp, Homo sapiens
  misc_feature (61)..(62): /note="This region represents a CpG dinucleotide"
  misc_feature (61)..(61): /note="Nucleotide may be methylated to form 5-methylcytosine"
aaaaaaaggagcaaatcttcctttatcctgggtggcggcctgcctgtccatgaatcagtccgtgggcaggcagtggtgtcaaggctgtagaaattccagatgtacggaggtcacggtcccag

SEQ ID NO: 26103 - DNA, 122 bp, Homo sapiens
  misc_feature (61)..(62): /note="This region represents a CpG dinucleotide"
  misc_feature (61)..(61): /note="Nucleotide may be methylated to form 5-methylcytosine"
gggcctggctgtgctgctggtactgaacccctgacagcttgattccaacatcaaagggggcgttgaactaggaggcagggcagggaggacccaggagatgtcagaggtcatgcccatcccca

SEQ ID NO: 26104 - DNA, 122 bp, Homo sapiens
  misc_feature (61)..(62): /note="This region represents a CpG dinucleotide"
  misc_feature (61)..(61): /note="Nucleotide may be methylated to form 5-methylcytosine"
caccaaaagtgcagaaccaggaaggagccactgaactctgcccaatctccagaaagaacacgcactggatactgcagctacataacaggaaggcactgacaggccttcattaggatcttact

SEQ ID NO: 26105 - DNA, 122 bp, Homo sapiens
  misc_feature (61)..(62): /note="This region represents a CpG dinucleotide"
  misc_feature (61)..(61): /note="Nucleotide may be methylated to form 5-methylcytosine"
ctgtcatgtctgtgccttcttataattacatgtgttggggtgtgctcagagcagggggcccgaagaatgcctcctctgtttacaacacacccaataggaatctggggtcattgtgacaaggg

SEQ ID NO: 26106 - DNA, 122 bp, Homo sapiens
  misc_feature (61)..(62): /note="This region represents a CpG dinucleotide"
  misc_feature (61)..(61): /note="Nucleotide may be methylated to form 5-methylcytosine"
tgatcataggggacacagaatgagcaaaacagttctgctgcactagcaaaaacgtgtgaacgtcaaacacaacaacaatcattctagatagtcatagctgctatttattgagttcctatcat

SEQ ID NO: 26107 - DNA, 122 bp, Homo sapiens
  misc_feature (61)..(62): /note="This region represents a CpG dinucleotide"
  misc_feature (61)..(61): /note="Nucleotide may be methylated to form 5-methylcytosine"
gtaataggtcctgtcacctctggccagggagatgtgcttctgaggtgcacacatggctgccgtgacccacacttgtggtgtgggaaggcagttttcaggacaatgggatgacccatgggctg

SEQ ID NO: 26108 - DNA, 122 bp, Homo sapiens
  misc_feature (61)..(62): /note="This region represents a CpG dinucleotide"
  misc_feature (61)..(61): /note="Nucleotide may be methylated to form 5-methylcytosine"
agataatgctcaataacattatcagccccaatccatataaaccagatatggctgtagagacgtagtttaatgttttattttttcctattccttagtttctcacttattcaggactatatatg

SEQ ID NO: 26109 - DNA, 122 bp, Homo sapiens
  misc_feature (61)..(62): /note="This region represents a CpG dinucleotide"
  misc_feature (61)..(61): /note="Nucleotide may be methylated to form 5-methylcytosine"
tagcccctgccttcctctctgacattacctgctacctgctactgctctccttgcttttttcgctccatccatatgacttcctctttctcaaacaccctgagctccttctgcctcagagactt

SEQ ID NO: 26110 - DNA, 122 bp, Homo sapiens
  misc_feature (61)..(62): /note="This region represents a CpG dinucleotide"
  misc_feature (61)..(61): /note="Nucleotide may be methylated to form 5-methylcytosine"
ccttcttcatttactcagatctcaacaaattctgacctttggtctgtgacagtattttcacgtgctcccgctgctctgtctacttctcctacaagtcttttgtaagcatgatgtcattccaa

SEQ ID NO: 26111 - DNA, 122 bp, Homo sapiens
  misc_feature (61)..(62): /note="This region represents a CpG dinucleotide"
  misc_feature (61)..(61): /note="Nucleotide may be methylated to form 5-methylcytosine"
agcagacaatggctccaagtagacgtctctaggtagatggtgtcttcaggtagatggtatcggaattaaactggagcacgcccagccggcgtcggctgcaaaactgactaatctgttgttgg

SEQ ID NO: 26112 - DNA, 122 bp, Homo sapiens
  misc_feature (61)..(62): /note="This region represents a CpG dinucleotide"
  misc_feature (61)..(61): /note="Nucleotide may be methylated to form 5-methylcytosine"
atttttcgctgaagcccctgccctggggctggtgttcttctctatgattctaccaatcgtcggcatttttttcctcccttctttctttttaggaaggcgctggggtgtgcggcggcaacggc

SEQ ID NO: 26113 - DNA, 122 bp, Homo sapiens
  misc_feature (61)..(62): /note="This region represents a CpG dinucleotide"
  misc_feature (61)..(61): /note="Nucleotide may be methylated to form 5-methylcytosine"
cttgaagtttgtgtttattattatcaaataaatggaagactataggtacccaaagaggcacgatggctggtagattcttcaacagaagtagctgttttaccgatcaagctgcaacactcttg

SEQ ID NO: 26114 - DNA, 122 bp, Homo sapiens
  misc_feature (61)..(62): /note="This region represents a CpG dinucleotide"
  misc_feature (61)..(61): /note="Nucleotide may be methylated to form 5-methylcytosine"
caggaacaatatacagatgctcccactgatcacagagagaatgtagttcttagatggagacgtcattacttgcatggcaagatcagagaagccatctgctggggccacctagaatgacacaa

SEQ ID NO: 26115 - DNA, 122 bp, Homo sapiens
  misc_feature (61)..(62): /note="This region represents a CpG dinucleotide"
  misc_feature (61)..(61): /note="Nucleotide may be methylated to form 5-methylcytosine"
ttgtttctgtttgctcacaaaaggggaaataataggagaattagagcaacctctcatgagcgggattatttaaaaagccgacatcttttcgtgtaatgggaaagagactcggcagaaaaaat

SEQ ID NO: 26116 - DNA, 122 bp, Homo sapiens
  misc_feature (61)..(62): /note="This region represents a CpG dinucleotide"
  misc_feature (61)..(61): /note="Nucleotide may be methylated to form 5-methylcytosine"
tgtttgtgttagccttaccctgtccctgccccaccttggttccccttgtctatggagccccgccttgtgagccaggaagcagcgtctcatcaggacagaaggtaggatgaagacatggggta

SEQ ID NO: 26117 - DNA, 122 bp, Homo sapiens
  misc_feature (61)..(62): /note="This region represents a CpG dinucleotide"
  misc_feature (61)..(61): /note="Nucleotide may be methylated to form 5-methylcytosine"
aggcatttgctctttgttttcatttcctctgagttccatgcacttctggaatcactcccacgtaatacaatgtgacctctcaccctaaatctgactccttatccagtggctactatgttgca

SEQ ID NO: 26118 - DNA, 122 bp, Homo sapiens
  misc_feature (61)..(62): /note="This region represents a CpG dinucleotide"
  misc_feature (61)..(61): /note="Nucleotide may be methylated to form 5-methylcytosine"
atctctcacttaagtgatctaactttacttgtaaacttcctgtgtgaggaattcagtagacgagacccagaaatgtttctgtttgagaatatttagagttaagtgccgtatttgaaatattc

SEQ ID NO: 26119 - DNA, 122 bp, Homo sapiens
  misc_feature (61)..(62): /note="This region represents a CpG dinucleotide"
  misc_feature (61)..(61): /note="Nucleotide may be methylated to form 5-methylcytosine"
gacagcaacagcaaaaccttcctttggccctcattcacaatacagtgttctgggaggaggcggctgaccagctgactgcagtgatgaagaaaggagtgtcccacaggactctgattcagcag

SEQ ID NO: 26120 - DNA, 122 bp, Homo sapiens
  misc_feature (61)..(62): /note="This region represents a CpG dinucleotide"
  misc_feature (61)..(61): /note="Nucleotide may be methylated to form 5-methylcytosine"
agcagataaatgcatgtaagatgctggtgcactggaggcttataatatcaggatgacatacggtattctactatttttgttatctaattacaatactaaagataagatatacccaacattcc

SEQ ID NO: 26121 - DNA, 122 bp, Homo sapiens
  misc_feature (61)..(62): /note="This region represents a CpG dinucleotide"
  misc_feature (61)..(61): /note="Nucleotide may be methylated to form 5-methylcytosine"
actgaatgatttatgtaaagagaacagctcagctgtgtaactagaaactaggtcaagaaacgtaagattgctaggactccaggagctcctgttgtgtccacttgaaatcattgtcccctcac

SEQ ID NO: 26122 - DNA, 122 bp, Homo sapiens
  misc_feature (61)..(62): /note="This region represents a CpG dinucleotide"
  misc_feature (61)..(61): /note="Nucleotide may be methylated to form 5-methylcytosine"
atagctagtaaacagtagagccagagccataattataactgttctttctgttacatgttacgcagcagtttagtccagaaaagcatttacccctaggccaagaaatagggaaggtaagtgta

SEQ ID NO: 26123 - DNA, 122 bp, Homo sapiens
  misc_feature (61)..(62): /note="This region represents a CpG dinucleotide"
  misc_feature (61)..(61): /note="Nucleotide may be methylated to form 5-methylcytosine"
caattctcttacaatcctgtataatcctgtgcctctaggcctacagtcagctccaagcaacggcacagacacctcctcctccggatgaccaggattgcctctgggtttgtcacaagctggaa

SEQ ID NO: 26124 - DNA, 122 bp, Homo sapiens
  misc_feature (61)..(62): /note="This region represents a CpG dinucleotide"
  misc_feature (61)..(61): /note="Nucleotide may be methylated to form 5-methylcytosine"
tcaagggctgtgttaggcactggtgatacaacgtcaacatgggagacatgctcctgtcctcgaagaactgacaatccaatgtagatacaaagacccaggcaattatgatacagggcagcttg

SEQ ID NO: 26125 - DNA, 122 bp, Homo sapiens
  misc_feature (61)..(62): /note="This region represents a CpG dinucleotide"
  misc_feature (61)..(61): /note="Nucleotide may be methylated to form 5-methylcytosine"
ctcagatattttcccctttggagagcattttcctggtcatattattatcttgttgtctttcgttgcactcattgctctctgagatcattttgttaatgaatttgcttattatactttcctcc

SEQ ID NO: 26126 - DNA, 122 bp, Homo sapiens
  misc_feature (61)..(62): /note="This region represents a CpG dinucleotide"
  misc_feature (61)..(61): /note="Nucleotide may be methylated to form 5-methylcytosine"
tgcagtgccctgtgctgggagtgcccacaggtagcactttgtgaagatcaacaccccagacgccgcctggtggcggtcaaggcccttcaggggctggttcccatggagcttctcagccacac

SEQ ID NO: 26127 - DNA, 122 bp, Homo sapiens
  misc_feature (61)..(62): /note="This region represents a CpG dinucleotide"
  misc_feature (61)..(61): /note="Nucleotide may be methylated to form 5-methylcytosine"
gacacaggggaagcaccagtggtcagagagactacagcagctggggatgggtgggaggggcgtattgccctaatctggagggtaagacctagaaaagggcctggaaaggccattctccctca

SEQ ID NO: 26128 - DNA, 122 bp, Homo sapiens
  misc_feature (61)..(62): /note="This region represents a CpG dinucleotide"
  misc_feature (61)..(61): /note="Nucleotide may be methylated to form 5-methylcytosine"
cacaacaaaaacatggcactctgagtcatgcattgttcttttgcactgctccaaatgctgcgtagccacattggttctggccctgatgagtgctgacagcaggatgagcacaagccaggcct

SEQ ID NO: 26129 - DNA, 122 bp, Homo sapiens
  misc_feature (61)..(62): /note="This region represents a CpG dinucleotide"
  misc_feature (61)..(61): /note="Nucleotide may be methylated to form 5-methylcytosine"
gttttgttgctggtgagcaggtacggattcttgacttcaccgcacaaaagaacttgagagcgagcctaaagtaagagtaagcaaagtttatttattgcaaagcaaaagtacactctgagagg

SEQ ID NO: 26130 - DNA, 122 bp, Homo sapiens
  misc_feature (61)..(62): /note="This region represents a CpG dinucleotide"
  misc_feature (61)..(61): /note="Nucleotide may be methylated to form 5-methylcytosine"
gcgtgagccaccacgctcagcctgctgggtggctttttctttttttctgacatagggtctcgctctgttgcccaggctggagtacagatctccatttactgccgccttgacttgctaggttc

SEQ ID NO: 26131 - DNA, 122 bp, Homo sapiens
  misc_feature (61)..(62): /note="This region represents a CpG dinucleotide"
  misc_feature (61)..(61): /note="Nucleotide may be methylated to form 5-methylcytosine"
acgtggtctgacttaacttttgacagtgtcattctgactgctctggcaactgcagtcatccgtgtgaagcatgatgtatttatattttttcaagtttctatcttttcaaaatcaataatgaa

SEQ ID NO: 26132 - DNA, 122 bp, Homo sapiens
  misc_feature (61)..(62): /note="This region represents a CpG dinucleotide"
  misc_feature (61)..(61): /note="Nucleotide may be methylated to form 5-methylcytosine"
cagcgcgcctcttgcgcgggtgcgggcccttattacactttagcagcgagggagggtccccggagggtgcctaagactagggcgtctgcacagcccttgttgattttctcgtgcttgttctt

SEQ ID NO: 26133 - DNA, 122 bp, Homo sapiens
  misc_feature (61)..(62): /note="This region represents a CpG dinucleotide"
  misc_feature (61)..(61): /note="Nucleotide may be methylated to form 5-methylcytosine"
tcatgtaatcttgaacaagcccaggtactctggctttaattgccttgtgagtaaaatagacgatggtactaagtgattatttaaaatcctttccaattgtagaagtccaaggttgtgtgaaa

SEQ ID NO: 26134 - DNA, 122 bp, Homo sapiens
  misc_feature (61)..(62): /note="This region represents a CpG dinucleotide"
  misc_feature (61)..(61): /note="Nucleotide may be methylated to form 5-methylcytosine"
atttatttttcttttttttttcctctttctttttttaaactccatcctggtagtaggtggcgctgtaggtttttgtgtgccttactgaacattacctagatctagggcttaagcggcagatt

SEQ ID NO: 26135 - DNA, 122 bp, Homo sapiens
  misc_feature (61)..(62): /note="This region represents a CpG dinucleotide"
  misc_feature (61)..(61): /note="Nucleotide may be methylated to form 5-methylcytosine"
gaggcaggaggattgcttaagcctaggagttcacgaccagcctaagcaacaattgagactcgcctcccaagccttcccaccccgttctctatttaaaataataatagtcatcttaatgggtg

SEQ ID NO: 26136 - DNA, 122 bp, Homo sapiens
  misc_feature (61)..(62): /note="This region represents a CpG dinucleotide"
  misc_feature (61)..(61): /note="Nucleotide may be methylated to form 5-methylcytosine"
aaatacacccaaagtccctaatcaacattcactgcatgtgtttgtaagtaaaagcatttgcgtttcaattatggaagagtctttactgtaatatggagactatctgagcttacttttgttat

SEQ ID NO: 26137 - DNA, 122 bp, Homo sapiens
  misc_feature (61)..(62): /note="This region represents a CpG dinucleotide"
  misc_feature (61)..(61): /note="Nucleotide may be methylated to form 5-methylcytosine"
caccagcaaattcagtgtctggtgaggtcatgcttcctggttcacagatggctttctcaccgtgtcctcacatggcccaagagacaaaggaactctcctccccattgtctctctctggtctt

SEQ ID NO: 26138 - DNA, 122 bp, Homo sapiens
  misc_feature (61)..(62): /note="This region represents a CpG dinucleotide"
  misc_feature (61)..(61): /note="Nucleotide may be methylated to form 5-methylcytosine"
taaaatgactcagccccatggactccaattgcctctgtttaccataaatagaaatagtcacgtaaagtaaaaggtcaacattctagatctccatgaatcattcactgaagtcatggagaaaa

SEQ ID NO: 26139 - DNA, 122 bp, Homo sapiens
  misc_feature (61)..(62): /note="This region represents a CpG dinucleotide"
  misc_feature (61)..(61): /note="Nucleotide may be methylated to form 5-methylcytosine"
aggcggcgggaggggcggtcagctgctgctgtcactcttcccccctcggatcctgagtgacggctcggcctgccacctcctcagccgcctgctcggaagtacacagcttcccgtcagagcgc

SEQ ID NO: 26140 - DNA, 122 bp, Homo sapiens
  misc_feature (61)..(62): /note="This region represents a CpG dinucleotide"
  misc_feature (61)..(61): /note="Nucleotide may be methylated to form 5-methylcytosine"
aattagctctgcttttcaaggagcagtaccattcagtaaaagattactgtctagtattaccggctcacccttgaattctttcctgggcaaagccaagaaccttcccagggtaagccccaatt

SEQ ID NO: 26141 - DNA, 122 bp, Homo sapiens
  misc_feature (61)..(62): /note="This region represents a CpG dinucleotide"
  misc_feature (61)..(61): /note="Nucleotide may be methylated to form 5-methylcytosine"
tttgggcagacagggggctgcgggcttcttgccctggaggctgtgggagagccctttccccggggggaggcatgactgggatgccagggacttcaaggagaggtctgaagatggtgatagac

SEQ ID NO: 26142 - DNA, 122 bp, Homo sapiens
  misc_feature (61)..(62): /note="This region represents a CpG dinucleotide"
  misc_feature (61)..(61): /note="Nucleotide may be methylated to form 5-methylcytosine"
gtatctgcggctttaggtaccagattcaaacacagaatggtggcagaacagggactaggacggagagaaaacctgaagatggatcaaccaggaagcaatgcattctcacagaggcacaaaaa

SEQ ID NO: 26143 - DNA, 122 bp, Homo sapiens
  misc_feature (61)..(62): /note="This region represents a CpG dinucleotide"
  misc_feature (61)..(61): /note="Nucleotide may be methylated to form 5-methylcytosine"
cccaatggcagttcaaaacccctcctgactctcagaacggtcaggccctcaacctttctacgcaagtcttaatgactaatgctaggcaggtaacattccagatgtctcaccacctagtcccc

SEQ ID NO: 26144 - DNA, 122 bp, Homo sapiens
  misc_feature (61)..(62): /note="This region represents a CpG dinucleotide"
  misc_feature (61)..(61): /note="Nucleotide may be methylated to form 5-methylcytosine"
gaaactaatgtgctagcacaggcaagatgctggtggtatggaccttgatgacacttagttcggagaagacaagttgttaatttttgaaaaaatattaccaatcaaataaaaccaaaaccaat

SEQ ID NO: 26145 - DNA, 122 bp, Homo sapiens
  misc_feature (61)..(62): /note="This region represents a CpG dinucleotide"
  misc_feature (61)..(61): /note="Nucleotide may be methylated to form 5-methylcytosine"
accccacatgcccctggtgctgtgttaaataatcgtccttctcgcctcgggtctgtctcacggtattagttctggggcatcaatcagccagtttgtgctctgcaatctgagaacaatcattt

SEQ ID NO: 26146 - DNA, 122 bp, Homo sapiens
  misc_feature (61)..(62): /note="This region represents a CpG dinucleotide"
  misc_feature (61)..(61): /note="Nucleotide may be methylated to form 5-methylcytosine"
taattgaaggagacttttgctacctgtggctctgctggagtccacccgcgccgcggcgggcgctgcgtcttaattcaatgttccggcttcagagcagccgtggaagccgggccctgaagtgt

SEQ ID NO: 26147 - DNA, 122 bp, Homo sapiens
  misc_feature (61)..(62): /note="This region represents a CpG dinucleotide"
  misc_feature (61)..(61): /note="Nucleotide may be methylated to form 5-methylcytosine"
ctggctgggcccaggggatacacccgcccagaatgggtggagacctgcctctgcgcctggcgccatggcccctgggccccgtctttatctgtggaatgcgcacaaagcttgctgttccgccc

SEQ ID NO: 26148 - DNA, 122 bp, Homo sapiens
  misc_feature (61)..(62): /note="This region represents a CpG dinucleotide"
  misc_feature (61)..(61): /note="Nucleotide may be methylated to form 5-methylcytosine"
cacaccactggagaaaccatagaccttcttaactgggattaccaacaccttctcttagtacgtattcacatggccttggatgttaggtgactgcctgttcagagaaagtggggagggtgaaa

SEQ ID NO: 26149 - DNA, 122 bp, Homo sapiens
  misc_feature (61)..(62): /note="This region represents a CpG dinucleotide"
  misc_feature (61)..(61): /note="Nucleotide may be methylated to form 5-methylcytosine"
ttggtcatcaaaaagtaatggctggcaggaagccagaaaaagagacggactatttccatgcgatcccgcagttcctgggggagccccaccgcatatctggtgaacagggacacttcaggcac

SEQ ID NO: 26150 - DNA, 122 bp, Homo sapiens
  misc_feature (61)..(62): /note="This region represents a CpG dinucleotide"
  misc_feature (61)..(61): /note="Nucleotide may be methylated to form 5-methylcytosine"
tatagtttggaattaacagtcctgtgtgcctgcctgtttatccagtatcactaatgtcagcgcaaccaggagacatctaagggcacctggcttgcgacaagaggcagggcggaggcaagcag

SEQ ID NO: 26151 - DNA, 122 bp, Homo sapiens
  misc_feature (61)..(62): /note="This region represents a CpG dinucleotide"
  misc_feature (61)..(61): /note="Nucleotide may be methylated to form 5-methylcytosine"
agtttcgcaacctaccagtaggcccggcaggtcccatctctcctttctggccaggggcaccgtcaaacccaggaatacctggaggtccaggtatacccaccaatcctgtaacacctgaggca

SEQ ID NO: 26152 - DNA, 122 bp, Homo sapiens
  misc_feature (61)..(62): /note="This region represents a CpG dinucleotide"
  misc_feature (61)..(61): /note="Nucleotide may be methylated to form 5-methylcytosine"
tctggcaatgatgaacaagcttatccaggctatttctgccatgtcaaagtgagtcatcaccgtagaatatctctatctgattatgggaattatacattgctccatctctggcttgttctgcc

SEQ ID NO: 26153 - DNA, 122 bp, Homo sapiens
  misc_feature (61)..(62): /note="This region represents a CpG dinucleotide"
  misc_feature (61)..(61): /note="Nucleotide may be methylated to form 5-methylcytosine"
ccccttccctccaaataagttcactagctccccaacaatggttcttaaacagctggaggccgggcatggtggctcatgtctgtaatcccagcactttgggaggccaaggcgggtggatcatg

SEQ ID NO: 26154 - DNA, 122 bp, Homo sapiens
  misc_feature (61)..(62): /note="This region represents a CpG dinucleotide"
  misc_feature (61)..(61): /note="Nucleotide may be methylated to form 5-methylcytosine"
aacagcacttggtaatctggttcaagtcctaggtctaggggcatcaggcaattcgagccacgtgctttaaggcccaggatggcctcagggctgttggaccacacctggggaccaagcctttt

SEQ ID NO: 26155 - DNA, 122 bp, Homo sapiens
  misc_feature (61)..(62): /note="This region represents a CpG dinucleotide"
  misc_feature (61)..(61): /note="Nucleotide may be methylated to form 5-methylcytosine"
gtggggacagacacgcacagaaatcagcatagcctcgagataaatgcagttgtttctcttcgtggacaaaggcgttcgattttccagaggaggccaagaatgggagccgtgggtccgtagct

SEQ ID NO: 26156 - DNA, 122 bp, Homo sapiens
  misc_feature (61)..(62): /note="This region represents a CpG dinucleotide"
  misc_feature (61)..(61): /note="Nucleotide may be methylated to form 5-methylcytosine"
taaaatgcttgcttacagccctacgacaaagaaggctcccagaaacaggaactgtaatttcgacacccaactccctacacccatggccctcacccaggccttcatctctctctcacgggtcc

SEQ ID NO: 26157 - DNA, 122 bp, Homo sapiens
  misc_feature (61)..(62): /note="This region represents a CpG dinucleotide"
  misc_feature (61)..(61): /note="Nucleotide may be methylated to form 5-methylcytosine"
gccctttctctcatgtcaagctatcaggctgtgccaggctggcagggcagctctcttctacgaggtcattcattggaatcatcttggtgaatagtcttctgccaaggcccagggtgcggccc

SEQ ID NO: 26158 - DNA, 122 bp, Homo sapiens
  misc_feature (61)..(62): /note="This region represents a CpG dinucleotide"
  misc_feature (61)..(61): /note="Nucleotide may be methylated to form 5-methylcytosine"
ttgcaacagatgtctgatctgatctgagaacagtttgtgggagtgagccctttagcttttcggatctgagctgaatccaggtagacagcatcataaccgaatttttaattgcaggtggccca

SEQ ID NO: 26159 - DNA, 122 bp, Homo sapiens
  misc_feature (61)..(62): /note="This region represents a CpG dinucleotide"
  misc_feature (61)..(61): /note="Nucleotide may be methylated to form 5-methylcytosine"
tcctttgcagcacctgctaatgatctgtcagtgacgctgtgaccaaggctcatcaccctgcgggccgtgggccccagagggcggcacagcttctataggagcacagggcccagggaggtgcc

SEQ ID NO: 26160 - DNA, 122 bp, Homo sapiens
  misc_feature (61)..(62): /note="This region represents a CpG dinucleotide"
  misc_feature (61)..(61): /note="Nucleotide may be methylated to form 5-methylcytosine"
ttgcgcagcagaccgatttgcgagccgttgagggccatgtagtcgcagtcggtgacgacccgcactcgcaccccacgctggtgcagcaactgcacggcgcggcccagctgcgggctggagaa

SEQ ID NO: 26161 - DNA, 122 bp, Homo sapiens
  misc_feature (61)..(62): /note="This region represents a CpG dinucleotide"
  misc_feature (61)..(61): /note="Nucleotide may be methylated to form 5-methylcytosine"
cactaggccaacaaggatgagctcaagaggaaacgcaaggggcttctgactaaagatacacgcaccaggaattcctgcatgctttgatgggtgtgcctgagagtcattctccctcccgctgc

SEQ ID NO: 26162 - DNA, 122 bp, Homo sapiens
  misc_feature (61)..(62): /note="This region represents a CpG dinucleotide"
  misc_feature (61)..(61): /note="Nucleotide may be methylated to form 5-methylcytosine"
ttgtaggatgagtgaaaaccgtaaatgctgtgcaggccttaagaggcagacactgggtaccgctggctttatatcaagggcctccccttctctttcaccccagacacaggaagctccagtgc

SEQ ID NO: 26163 - DNA, 122 bp, Homo sapiens
  misc_feature (61)..(62): /note="This region represents a CpG dinucleotide"
  misc_feature (61)..(61): /note="Nucleotide may be methylated to form 5-methylcytosine"
cagctagataaaaagacctaccaggtgtcctatctggctagatatctgataagaatgaagcgacagctcagctgaagtcaatatagaaggggatgaacacctgggaatcaaactgaattgca

SEQ ID NO: 26164 - DNA, 122 bp, Homo sapiens
  misc_feature (61)..(62): /note="This region represents a CpG dinucleotide"
  misc_feature (61)..(61): /note="Nucleotide may be methylated to form 5-methylcytosine"
cccaaacacctctcactaggccctacctcagcattagggatcacatttcaacaggagattcggaggagacacacaccatcttaaccatttctaagtgtacagttttgtaatattaattacat

SEQ ID NO: 26165 - DNA, 122 bp, Homo sapiens
  misc_feature (61)..(62): /note="This region represents a CpG dinucleotide"
  misc_feature (61)..(61): /note="Nucleotide may be methylated to form 5-methylcytosine"
attgaggtaataaatgcagagtactactggaaagtgcctacaggctttcatagccatcttcgtgtcattctaacatcagaatgaaacttactaaaaatctcttccatataatctagataatg

SEQ ID NO: 26166 - DNA, 122 bp, Homo sapiens
  misc_feature (61)..(62): /note="This region represents a CpG dinucleotide"
  misc_feature (61)..(61): /note="Nucleotide may be methylated to form 5-methylcytosine"
aatgcctggtacataaaagatggccagcattcttgaaataatcaccaagtgggccgggcgcggtggctcacacctgtaatcccagcactttgggaggccaaggcgggcagaacacgaggtca

SEQ ID NO: 26167 - DNA, 122 bp, Homo sapiens
  misc_feature (61)..(62): /note="This region represents a CpG dinucleotide"
  misc_feature (61)..(61): /note="Nucleotide may be methylated to form 5-methylcytosine"
gaatccatgctgcagctgcccctcaccctaccccatcccaccacatccattaggactaagcgtagaagatcacttaatatagctcagaccaatcctcttgtgagtggtaagtgatgggttca

SEQ ID NO: 26168 - DNA, 122 bp, Homo sapiens
  misc_feature (61)..(62): /note="This region represents a CpG dinucleotide"
  misc_feature (61)..(61): /note="Nucleotide may be methylated to form 5-methylcytosine"
caggaactaagctgatactattgtgcaggacacaacttcctcagccagttacagcagactcgtctggacttactcaaccgagttctcttctggtgacgacatttctctaccacgctggccag

SEQ ID NO: 26169 - DNA, 122 bp, Homo sapiens
  misc_feature (61)..(62): /note="This region represents a CpG dinucleotide"
  misc_feature (61)..(61): /note="Nucleotide may be methylated to form 5-methylcytosine"
gaatagggagcttggaatgactcaaatggacagaacattttgcagtatttggatttctatcgctccacgatagttttgtctccttgattttcacgttagtagaagcatgcaataggttgtct

SEQ ID NO: 26170 - DNA, 122 bp, Homo sapiens
  misc_feature (61)..(62): /note="This region represents a CpG dinucleotide"
  misc_feature (61)..(61): /note="Nucleotide may be methylated to form 5-methylcytosine"
gacctgagtatgggtatttggttttagctttttattcttttctctttctccttcctttcccgctccccctctcctcctctctctcttccttcttctccttcccgtactggctttgttgtggt

SEQ ID NO: 26171 - DNA, 122 bp, Homo sapiens
  misc_feature (61)..(62): /note="This region represents a CpG dinucleotide"
  misc_feature (61)..(61): /note="Nucleotide may be methylated to form 5-methylcytosine"
taatcgaatggctgatcctaaaagccaaatgggaaaataaacaagaatggccaggaagaccggggaagagaaaaagagtaatgaagaaggactagccctactagatatctatgaaaacatat

SEQ ID NO: 26172 - DNA, 122 bp, Homo sapiens
  misc_feature (61)..(62): /note="This region represents a CpG dinucleotide"
  misc_feature (61)..(61): /note="Nucleotide may be methylated to form 5-methylcytosine"
tgaggccagtttcctgaaccaagattcagagctagccagtgaacctagcagatgggccagcgttcaatttccactgaagtctggcgttctcaattcctgtaaccgcccaaggggttcacctt

SEQ ID NO: 26173 - DNA, 122 bp, Homo sapiens
  misc_feature (61)..(62): /note="This region represents a CpG dinucleotide"
  misc_feature (61)..(61): /note="Nucleotide may be methylated to form 5-methylcytosine"
gattgttgttgatgagaattctgtcttatcttcatttctctgttttttttggcaatttctcgcgtagtttttaagattttctgtttatccatattttccagttgtattttagtgtatccagg

SEQ ID NO: 26174 - DNA, 122 bp, Homo sapiens
  misc_feature (61)..(62): /note="This region represents a CpG dinucleotide"
  misc_feature (61)..(61): /note="Nucleotide may be methylated to form 5-methylcytosine"
ccacgttgtgcacttgtaattgcctagacttccattgcttaaggaggcagctgctagccacgtgaggctaaagttaattaaaactaggctgggtgtggtggctcatgcctgtaatcccagca

SEQ ID NO: 26175 - DNA, 122 bp, Homo sapiens
  misc_feature (61)..(62): /note="This region represents a CpG dinucleotide"
  misc_feature (61)..(61): /note="Nucleotide may be methylated to form 5-methylcytosine"
cacagagtcgagaattttgagactagtggtaacttctttcgccagtccctaatgacatcacgttagagggtgtgggacagtgtgattaactctaagtgtttaaggtcttttgcaataggcat

SEQ ID NO: 26176 - DNA, 122 bp, Homo sapiens
  misc_feature (61)..(62): /note="This region represents a CpG dinucleotide"
  misc_feature (61)..(61): /note="Nucleotide may be methylated to form 5-methylcytosine"
actgcacccggcctgtagagctttaaacaaagcacaggctgcttctgagcacagggccctcgtcacatggctatgaagccagccctgcctggacccagaaccctggtgtgggcactttatag

SEQ ID NO: 26177 - DNA, 122 bp, Homo sapiens
  misc_feature (61)..(62): /note="This region represents a CpG dinucleotide"
  misc_feature (61)..(61): /note="Nucleotide may be methylated to form 5-methylcytosine"
gagaattcagtctgtgccagggattgtgttagggactgggggttcgaccgtgttaagacacggtctctgtctttagagagtatctaactgggggaatatgacacataagaaacagatatttt

SEQ ID NO: 26178 - DNA, 122 bp, Homo sapiens
  misc_feature (61)..(62): /note="This region represents a CpG dinucleotide"
  misc_feature (61)..(61): /note="Nucleotide may be methylated to form 5-methylcytosine"
tttcctcgacactgtgaagggtatgatgtcatcgttcacaggtgcagtcctggatgtacacgcagtttccacggaaatgctgtcatttggcagtgttgccttcgacagcctaattacctgat

SEQ ID NO: 26179 - DNA, 122 bp, Homo sapiens
  misc_feature (61)..(62): /note="This region represents a CpG dinucleotide"
  misc_feature (61)..(61): /note="Nucleotide may be methylated to form 5-methylcytosine"
cttgctttttctgaaagctttattaaagttgcttgagagtgctgttgcagtcatctttaacgttatcagaaagtgttgaatactaagataggatactgataatacccactcactgaagaaaa

SEQ ID NO: 26180 - DNA, 122 bp, Homo sapiens
  misc_feature (61)..(62): /note="This region represents a CpG dinucleotide"
  misc_feature (61)..(61): /note="Nucleotide may be methylated to form 5-methylcytosine"
aatggcacttttatgagaactctagaaatagaacttttcatccggcaccatcttatggtacgctttggagcagtgatgtcaccaaggagacagaaactagggaattcatcctcttgggccgg

SEQ ID NO: 26181 - DNA, 122 bp, Homo sapiens
  misc_feature (61)..(62): /note="This region represents a CpG dinucleotide"
  misc_feature (61)..(61): /note="Nucleotide may be methylated to form 5-methylcytosine"
cttcagctagtttttgacaccttagatttcttagatgtgagtcagacagtgagtatatcacggggttccccagtcctttgaggacatgcatgaaacttgtcaatggtctcactgaagccaca

SEQ ID NO: 26182 - DNA, 122 bp, Homo sapiens
  misc_feature (61)..(62): /note="This region represents a CpG dinucleotide"
  misc_feature (61)..(61): /note="Nucleotide may be methylated to form 5-methylcytosine"
actgaagaactcggtaaatatgattagcatgcacgcaccaacacatcactgtgatgaaaacgcaaatcacagtatgtgagtcactactctcaacattgccatgcccctgccttaaacctgcc

SEQ ID NO: 26183 - DNA, 122 bp, Homo sapiens
  misc_feature (61)..(62): /note="This region represents a CpG dinucleotide"
  misc_feature (61)..(61): /note="Nucleotide may be methylated to form 5-methylcytosine"
gatatttcctcctattaaaaaaaaatgtttggttttatctagggtaaggtatgctaggtacgcagaggaaaattccagagctgtacgccaggaaccgaagtcactagctacatggtaaacag

SEQ ID NO: 26184 - DNA, 122 bp, Homo sapiens
  misc_feature (61)..(62): /note="This region represents a CpG dinucleotide"
  misc_feature (61)..(61): /note="Nucleotide may be methylated to form 5-methylcytosine"
gggaggagtctcaggttatttgtggatatatttgaaaaccaccacagtatctactgtgatcgtcagaagtttaagacagctggccgtaattgaataaagagcgtactgatacagaaggtgga

SEQ ID NO: 26185 - DNA, 122 bp, Homo sapiens
  misc_feature (61)..(62): /note="This region represents a CpG dinucleotide"
  misc_feature (61)..(61): /note="Nucleotide may be methylated to form 5-methylcytosine"
tcactggggacccctcccctaggcccctacggcgccaacatggaagacagcgtctgctgccgtgattacgtccgttaccgtctgcccctgcgcgtggtgaaacacttctactggacctcaga

SEQ ID NO: 26186 - DNA, 122 bp, Homo sapiens
  misc_feature (61)..(62): /note="This region represents a CpG dinucleotide"
  misc_feature (61)..(61): /note="Nucleotide may be methylated to form 5-methylcytosine"
acttctcctggacttgaatgtcaccatagaccttgaatccttgaatgtgaaatggcttcacgctaattgctgtaattgcttgaagatgtgcaggcaggtgaaacctgatccccgtggccatt

SEQ ID NO: 26187 - DNA, 122 bp, Homo sapiens
  misc_feature (61)..(62): /note="This region represents a CpG dinucleotide"
  misc_feature (61)..(61): /note="Nucleotide may be methylated to form 5-methylcytosine"
ggtgatccacctgccttggcctcccaaagtgctggaattacaggggtgagccaccgcacccggcataggatagatttttatattgtttatggaggttactattctagccattttatgacaat

SEQ ID NO: 26188 - DNA, 122 bp, Homo sapiens
  misc_feature (61)..(62): /note="This region represents a CpG dinucleotide"
  misc_feature (61)..(61): /note="Nucleotide may be methylated to form 5-methylcytosine"
tgacctcgtgattcacccaccttggcctcccaaaatgctgggattacaggtgtgagccaccgtgcctggccttggtgaaatttttaactctgtgcccagaggcattggaaaggctggtatga

SEQ ID NO: 26189 - DNA, 122 bp, Homo sapiens
  misc_feature (61)..(62): /note="This region represents a CpG dinucleotide"
  misc_feature (61)..(61): /note="Nucleotide may be methylated to form 5-methylcytosine"
ccttttgactagaggtgtgtggcttgtgggattctgccaccctgtgtgcagcccttgagacgtggctcgtgcagcaaggccaagtccctgattgttctctcgttttaggctttgccattggg

SEQ ID NO: 26190 - DNA, 122 bp, Homo sapiens
  misc_feature (61)..(62): /note="This region represents a CpG dinucleotide"
  misc_feature (61)..(61): /note="Nucleotide may be methylated to form 5-methylcytosine"
ggtagtggaactgctgacgcagatggtttcttaaattttattttgtcaaattaagtacaacgaagagctaaacggtttttggaaatagatatcatgacttgaatcaggagatggcagaagcc

SEQ ID NO: 26191 - DNA, 122 bp, Homo sapiens
  misc_feature (61)..(62): /note="This region represents a CpG dinucleotide"
  misc_feature (61)..(61): /note="Nucleotide may be methylated to form 5-methylcytosine"
ctcatgtctcccatgcccagactttaacttttccagaaagcttcagaatggggctgactccgtctgctgctcttccctgtctcttgggatctcccttaatagaggaccctggggctcagtcc

SEQ ID NO: 26192 - DNA, 122 bp, Homo sapiens
  misc_feature (61)..(62): /note="This region represents a CpG dinucleotide"
  misc_feature (61)..(61): /note="Nucleotide may be methylated to form 5-methylcytosine"
tgtggctctgctccttccacaagcacttggggccaggcccatccacctgccatcaggctccgcttcctgaggttacaaatcagagccacccaggctctgaaatgaaatgtgcatttagggcc

SEQ ID NO: 26193 - DNA, 122 bp, Homo sapiens
  misc_feature (61)..(62): /note="This region represents a CpG dinucleotide"
  misc_feature (61)..(61): /note="Nucleotide may be methylated to form 5-methylcytosine"
aaatcaaagtaaaaaaactttgattgcttttgacaaactcaaagggcagcttctccctgccggaagggatgaagaaagcccaattctcttaagaacaacaaatgattgtctacagtgaccga

SEQ ID NO: 26194 - DNA, 122 bp, Homo sapiens
  misc_feature (61)..(62): /note="This region represents a CpG dinucleotide"
  misc_feature (61)..(61): /note="Nucleotide may be methylated to form 5-methylcytosine"
ttcttcttccttgaattatgactaagaggaattttttccccatgaggttctttcactgctcgtgacttaggtaagaaagtggtcatcatctacgtgcatccttgaagaacatgggtgtgggt

SEQ ID NO: 26195 - DNA, 122 bp, Homo sapiens
  misc_feature (61)..(62): /note="This region represents a CpG dinucleotide"
  misc_feature (61)..(61): /note="Nucleotide may be methylated to form 5-methylcytosine"
gttgagacagtagaggtgggttgaagcacttttaatcacaaacaaacaatagtataagaccgtgaacagctcacccagtggctgttgccctcctccagccctcagctcaccctcttcccatg

SEQ ID NO: 26196 - DNA, 122 bp, Homo sapiens
  misc_feature (61)..(62): /note="This region represents a CpG dinucleotide"
  misc_feature (61)..(61): /note="Nucleotide may be methylated to form 5-methylcytosine"
gaagagggagtggccgcctgcctctaaacactaaaaatctaagttccctctagtcaccaacgcccacctggcacggaaaggccttgttttggtgcctttgaccccatttacactccagcaac

SEQ ID NO: 26197 - DNA, 122 bp, Homo sapiens
  misc_feature (61)..(62): /note="This region represents a CpG dinucleotide"
  misc_feature (61)..(61): /note="Nucleotide may be methylated to form 5-methylcytosine"
gatgagaccctctaaagagtgacagcctttaggggagggagacatctacaagccctgtcacgagccctgtcatcacctcgggaggaaaaggaaagcttgttactcattgataacaatcgctg

SEQ ID NO: 26198 - DNA, 122 bp, Homo sapiens
  misc_feature (61)..(62): /note="This region represents a CpG dinucleotide"
  misc_feature (61)..(61): /note="Nucleotide may be methylated to form 5-methylcytosine"
ccatttcctgttggctgagcaatgagcatgccacagggccaatcagctctaaatgcaaggcggtgcatggccagaggaaagttcctgctgtctctccttcaccctgacagccatggccccaa

SEQ ID NO: 26199 - DNA, 122 bp, Homo sapiens
  misc_feature (61)..(62): /note="This region represents a CpG dinucleotide"
  misc_feature (61)..(61): /note="Nucleotide may be methylated to form 5-methylcytosine"
ctaaaggttaccacaattatgactaagaatttcaaataccagattgaatatctcattctccggattatagaaaaaaaggtatgggaaaggatcttcatcatccacattctatccatatgtag

SEQ ID NO: 26200 - DNA, 122 bp, Homo sapiens
  misc_feature (61)..(62): /note="This region represents a CpG dinucleotide"
  misc_feature (61)..(61): /note="Nucleotide may be methylated to form 5-methylcytosine"
tagtttccttctttgttcttcctttttcttccttctcttctcttttcttttttctcttttcgcagccaaagccagcctccgactttcttcccttaactgttaaagatcaataaagcagaaat

SEQ ID NO: 26201 - DNA, 122 bp, Homo sapiens
  misc_feature (61)..(62): /note="This region represents a CpG dinucleotide"
  misc_feature (61)..(61): /note="Nucleotide may be methylated to form 5-methylcytosine"
tgtagatcagcccttggcccattacccagattctacataacaaaggacaggaccaggaaccgtctcttgtagggctgggcaaggagattgcaagttctcacattgtctgacattatatcctg

SEQ ID NO: 26202 - DNA, 122 bp, Homo sapiens
  misc_feature (61)..(62): /note="This region represents a CpG dinucleotide"
  misc_feature (61)..(61): /note="Nucleotide may be methylated to form 5-methylcytosine"
agccagctaatctcagagtcggctgctcactgctccactgagctggagaaagcctgtttacgctagcctgagccctcgatgtgagagctttttaaggaccttgtaatttttctggaattaaa

SEQ ID NO: 26203 - DNA, 122 bp, Homo sapiens
  misc_feature (61)..(62): /note="This region represents a CpG dinucleotide"
  misc_feature (61)..(61): /note="Nucleotide may be methylated to form 5-methylcytosine"
tttgcgatgctgagtttactgttttaaatggacttcaagcatagccctgaagtgttgtcccgttgttcccacctcctagagggcctgacagaagaggtacatatgctatgtaagtttccctc

SEQ ID NO: 26204 - DNA, 122 bp, Homo sapiens
  misc_feature (61)..(62): /note="This region represents a CpG dinucleotide"
  misc_feature (61)..(61): /note="Nucleotide may be methylated to form 5-methylcytosine"
attggctttgatggaactttgtttcatagaaggaatctgagataagactttttaatgccacgcccagccatggatttgtatcatcaagtacctatcagttgggtgaatacctctcctcttga

SEQ ID NO: 26205 - DNA, 122 bp, Homo sapiens
  misc_feature (61)..(62): /note="This region represents a CpG dinucleotide"
  misc_feature (61)..(61): /note="Nucleotide may be methylated to form 5-methylcytosine"
gggctccgcggcgcccccacccgcttcccctccaggccgttcctcccactgcggccgcagcgtccagccaggctccttcctggccctgaacacacggtgacattcctgcccacacgtccacc

SEQ ID NO: 26206 - DNA, 122 bp, Homo sapiens
  misc_feature (61)..(62): /note="This region represents a CpG dinucleotide"
  misc_feature (61)..(61): /note="Nucleotide may be methylated to form 5-methylcytosine"
attggttagcagtctctccctctctgttgtgagtttgtacagctcagttagaatgtctttcgtgggagtctgcttgaaaaatatgtcgcctggatgttcgtccggctcctggctgaggctga

SEQ ID NO: 26207 - DNA, 122 bp, Homo sapiens
  misc_feature (61)..(62): /note="This region represents a CpG dinucleotide"
  misc_feature (61)..(61): /note="Nucleotide may be methylated to form 5-methylcytosine"
caaggcaacaaaggatggcagtaatgcgataatgccagagtgcaacgggtgttaagaacccgttgcatttatgtattgtatttagtaaataatcaggctcatccaaattgtgatctcaccac

SEQ ID NO: 26208 - DNA, 122 bp, Homo sapiens
  misc_feature (61)..(62): /note="This region represents a CpG dinucleotide"
  misc_feature (61)..(61): /note="Nucleotide may be methylated to form 5-methylcytosine"
cccaaagatcattagattcagaatgacttggcaaaccaaaatcttaagagagtgcagtcgcgtggcccagtcactattccacaagtcctcggttgtgagtcacagtcagagtacttcacaga

SEQ ID NO: 26209 - DNA, 122 bp, Homo sapiens
  misc_feature (61)..(62): /note="This region represents a CpG dinucleotide"
  misc_feature (61)..(61): /note="Nucleotide may be methylated to form 5-methylcytosine"
attgtacacaggagaaagataagaacttttctctcaacttccttcatgtacttcggcatgcgttcacacaaacctcacctcgacgttttgagaaggaaatgtatttgtggttcttcagttga

SEQ ID NO: 26210 - DNA, 122 bp, Homo sapiens
  misc_feature (61)..(62): /note="This region represents a CpG dinucleotide"
  misc_feature (61)..(61): /note="Nucleotide may be methylated to form 5-methylcytosine"
attgaatgatcatcgtccatctgtatcacataatgtctcaaagaaaaatcaggaagtaggcgcaaaaggggtaaggaaaagtagacttaacggaatttccacaatttataggagataagcat

SEQ ID NO: 26211 - DNA, 122 bp, Homo sapiens
  misc_feature (61)..(62): /note="This region represents a CpG dinucleotide"
  misc_feature (61)..(61): /note="Nucleotide may be methylated to form 5-methylcytosine"
tactgcggacagaggcccattgggctggtgctcgtggtggcaaacactaaaaccccggcacgggtaacacacgaagctgaaatcagacatgtcaatggaacagggaaatgtggggtgacctc

SEQ ID NO: 26212 - DNA, 122 bp, Homo sapiens
  misc_feature (61)..(62): /note="This region represents a CpG dinucleotide"
  misc_feature (61)..(61): /note="Nucleotide may be methylated to form 5-methylcytosine"
tatgctgaagtcctaaattcactggagttctgaatcaactcaccctgggattgactgttacgtgaaatagtaaatgtcattttgcttaagtcatttttagttgtgttttcagttacttgtag

SEQ ID NO: 26213 - DNA, 122 bp, Homo sapiens
  misc_feature (61)..(62): /note="This region represents a CpG dinucleotide"
  misc_feature (61)..(61): /note="Nucleotide may be methylated to form 5-methylcytosine"
gctctcagcagtgtcactttgtggaccagcccagctctggaccagcttgctgaggggagacggcacagtgcagagagaggaaactgcctgatctccgttccagatgtaacccagttcttagg

SEQ ID NO: 26214 - DNA, 122 bp, Homo sapiens
  misc_feature (61)..(62): /note="This region represents a CpG dinucleotide"
  misc_feature (61)..(61): /note="Nucleotide may be methylated to form 5-methylcytosine"
ttcaattctcttacactgctatgctgaacttcttcagcacagactgtgggaagtgagccacggagccactgaattaattgccattgctcccagcacgcctggtagtctggcagcagacaaaa

SEQ ID NO: 26215 - DNA, 122 bp, Homo sapiens
  misc_feature (61)..(62): /note="This region represents a CpG dinucleotide"
  misc_feature (61)..(61): /note="Nucleotide may be methylated to form 5-methylcytosine"
tcatgctggcttgggacagtggcttggagaccagacttcaatgacagaagcactaggcagcggcactcatggcaatgtgtgcacccacagaaatgtaacccacacctcgggttcaggagccg

SEQ ID NO: 26216 - DNA, 122 bp, Homo sapiens
  misc_feature (61)..(62): /note="This region represents a CpG dinucleotide"
  misc_feature (61)..(61): /note="Nucleotide may be methylated to form 5-methylcytosine"
cagggcaaaatacaaatgtgtgatgcttgttagtagagtaacctcagaatcaaaatggaacggttttacagtgatatcattatatttcatttggcagaatcattacatcattggttacactg

SEQ ID NO: 26217 - DNA, 122 bp, Homo sapiens
  misc_feature (61)..(62): /note="This region represents a CpG dinucleotide"
  misc_feature (61)..(61): /note="Nucleotide may be methylated to form 5-methylcytosine"
gttctgccgggctagccttccctgggctgaaagagagccagcatgagccaccccttcgaccggccccagctctgcccgatggcttcagaggctgctcccaaaggggctcagtgaagggaaac

SEQ ID NO: 26218 - DNA, 122 bp, Homo sapiens
  misc_feature (61)..(62): /note="This region represents a CpG dinucleotide"
  misc_feature (61)..(61): /note="Nucleotide may be methylated to form 5-methylcytosine"
ccagcagggtaaaagtgtttccttttaaccacatccatgcccacatctattgttttttgacgttataattatgtcttaggctgtattttaaatcagggctctctgagcttgatctcatgtca

SEQ ID NO: 26219 - DNA, 122 bp, Homo sapiens
  misc_feature (61)..(62): /note="This region represents a CpG dinucleotide"
  misc_feature (61)..(61): /note="Nucleotide may be methylated to form 5-methylcytosine"
cagccaggcagggttgtgagagtttgggcacttgctgagttaactgaccctcccggcgaacgtgtaactggttccttatccttatctgagctgaggtatcataccacttggcctctgcagca

SEQ ID NO: 26220 - DNA, 122 bp, Homo sapiens
  misc_feature (61)..(62): /note="This region represents a CpG dinucleotide"
  misc_feature (61)..(61): /note="Nucleotide may be methylated to form 5-methylcytosine"
gaattctgcaaaacaagaaaaaaatagatctgtgtgctacactgaaaactgaacaaggcacgtcgtaagtcagtcacacagaaggcgcagctcagggcgataccaactagaaaagtaacttt

SEQ ID NO: 26221 - DNA, 122 bp, Homo sapiens
  misc_feature (61)..(62): /note="This region represents a CpG dinucleotide"
  misc_feature (61)..(61): /note="Nucleotide may be methylated to form 5-methylcytosine"
atgcattgggctctttaatgcatattatctcatctattgctcacaatagccctttaaggtcggtattatttccagttttacagaagagtaaatgcccagatgattgctcaatattacacagg

SEQ ID NO: 26222 - DNA, 122 bp, Homo sapiens
  misc_feature (61)..(62): /note="This region represents a CpG dinucleotide"
  misc_feature (61)..(61): /note="Nucleotide may be methylated to form 5-methylcytosine"
ttccttcagttatttcaaatgtcgcctctttctactcagctgttgaagtcaaaaatctggcgtcattcttgacctcttcttttacctcaagtctcaaattcagtccattgccaaattctgtg

SEQ ID NO: 26223 - DNA, 122 bp, Homo sapiens
  misc_feature (61)..(62): /note="This region represents a CpG dinucleotide"
  misc_feature (61)..(61): /note="Nucleotide may be methylated to form 5-methylcytosine"
tggatgagggatgcagaagccgggctgctcagggaaccctctgtgttaacccttcctgggcgagcgcggggaggtggcggcggggacagtgccccgagcgggagtgggaccagcggccggga

SEQ ID NO: 26224 - DNA, 122 bp, Homo sapiens
  misc_feature (61)..(62): /note="This region represents a CpG dinucleotide"
  misc_feature (61)..(61): /note="Nucleotide may be methylated to form 5-methylcytosine"
gagtatctggagtatacagaagacagatgcactgtttactcagggcatggtgtgccaagccgtgtgctaacagcaggttataggctctgggtgacttattctttgggctaactcaacaatgg

SEQ ID NO: 26225 - DNA, 122 bp, Homo sapiens
  misc_feature (61)..(62): /note="This region represents a CpG dinucleotide"
  misc_feature (61)..(61): /note="Nucleotide may be methylated to form 5-methylcytosine"
actgccagactactttgtggcgctgggaagcctgtttcaaagtgctgggcacatgggccacgcctgtctgcgactgctcagtaaactgacttccagggcagagtgccctctttgaactttgg

SEQ ID NO: 26226 - DNA, 122 bp, Homo sapiens
  misc_feature (61)..(62): /note="This region represents a CpG dinucleotide"
  misc_feature (61)..(61): /note="Nucleotide may be methylated to form 5-methylcytosine"
gaaaaaagaaagcagaataagctgatttttgtataagcaattagtagaaatgaaagaatacgaagaaaacaaactcgtaaaatgctggaagacattgataacatcaataagaatagtttctg

SEQ ID NO: 26227 - DNA, 122 bp, Homo sapiens
  misc_feature (61)..(62): /note="This region represents a CpG dinucleotide"
  misc_feature (61)..(61): /note="Nucleotide may be methylated to form 5-methylcytosine"
cttaacaaaatgtggtgtcacatgggctggggagccacagcctcctcccagctgatgatgcgaagggaaggaagggattttttttttaattgtttttttctttaaaagcccgcggtaaaaat

SEQ ID NO: 26228 - DNA, 122 bp, Homo sapiens
  misc_feature (61)..(62): /note="This region represents a CpG dinucleotide"
  misc_feature (61)..(61): /note="Nucleotide may be methylated to form 5-methylcytosine"
cctgtcaccaattaaataagctgccttaatctcctctcagttggcctaacttacctgaaccgtactattggtcttgaaggtggcactgtcatcccattagcaggcagcaggccctgcgagcc

SEQ ID NO: 26229 - DNA, 122 bp, Homo sapiens
  misc_feature (61)..(62): /note="This region represents a CpG dinucleotide"
  misc_feature (61)..(61): /note="Nucleotide may be methylated to form 5-methylcytosine"
ggcctccctgtaagacagtgagttgtctgcgagctctgctctgagccctggcacatggagcgactcagttacacttaatcagctcttagaggcactggctgggcatggtggctcaacgcctg

SEQ ID NO: 26230 - DNA, 122 bp, Homo sapiens
  misc_feature (61)..(62): /note="This region represents a CpG dinucleotide"
  misc_feature (61)..(61): /note="Nucleotide may be methylated to form 5-methylcytosine"
taactctgtggtttgcagatgcctttaaggttccaatcataagactggtttgtatattagcgtctaggctctcagcagggacactggtaatcaagcttgtgttcccagtcagaaatccaaag

SEQ ID NO: 26231 - DNA, 122 bp, Homo sapiens
  misc_feature (61)..(62): /note="This region represents a CpG dinucleotide"
  misc_feature (61)..(61): /note="Nucleotide may be methylated to form 5-methylcytosine"
gggggacaaatgactcatccaaggctacactcagcgctgagtggtgactgggagccagtgcgctctgctgactgctccactttcagaaatacttgcagatctcaattatctaattgcaattg

SEQ ID NO: 26232 - DNA, 122 bp, Homo sapiens
  misc_feature (61)..(62): /note="This region represents a CpG dinucleotide"
  misc_feature (61)..(61): /note="Nucleotide may be methylated to form 5-methylcytosine"
tccctgtcctcaaaacaaacaacattcctcagagagcactctgttaccaggacagagagacgtattagagctagaatactgcaaagggaaatgtggtcatctcattttttttcacagttctt

SEQ ID NO: 26233 - DNA, 122 bp, Homo sapiens
  misc_feature (61)..(62): /note="This region represents a CpG dinucleotide"
  misc_feature (61)..(61): /note="Nucleotide may be methylated to form 5-methylcytosine"
tgtgtctctattacagaaactcccagaacagtccattgttttattcccctccctgtgatgcggtgaatactgtgagaacaagaacagtgccttacacaccttcccaaccctcaggcctagca

SEQ ID NO: 26234 - DNA, 122 bp, Homo sapiens
  misc_feature (61)..(62): /note="This region represents a CpG dinucleotide"
  misc_feature (61)..(61): /note="Nucleotide may be methylated to form 5-methylcytosine"
tatgaagcaataggaaacacagagccgtcagagcgggaaagccctggaggcacgagtcagcgatgacaccacagggtattcaaggagcaccaatggcctgcaggtggcagaaacaatggagg

SEQ ID NO: 26235 - DNA, 122 bp, Homo sapiens
  misc_feature (61)..(62): /note="This region represents a CpG dinucleotide"
  misc_feature (61)..(61): /note="Nucleotide may be methylated to form 5-methylcytosine"
tgtagtcttttctgtctggcttccttctcttggcataatgttttcaagatgcacctgtgtcgtgccaggtgtcaggacctcattcttctttatggctgagtcatattccatcatatggatca

SEQ ID NO: 26236 - DNA, 122 bp, Homo sapiens
  misc_feature (61)..(62): /note="This region represents a CpG dinucleotide"
  misc_feature (61)..(61): /note="Nucleotide may be methylated to form 5-methylcytosine"
cagggcaattgccatattttttttcactttgagtgttttatcttttgcctctaggtggatcggatcattttctgtgtcttcttagaagttgacttcaaaatctacaaaaagaaaatgaatga

SEQ ID NO: 26237 - DNA, 122 bp, Homo sapiens
  misc_feature (61)..(62): /note="This region represents a CpG dinucleotide"
  misc_feature (61)..(61): /note="Nucleotide may be methylated to form 5-methylcytosine"
cccacagtgagtctggtttctgagttgtcccggtctagccactttcgtttcccctggggccgggtggaggctggggcagaaagcggaactgagcccgcgtgttctgaggccagggcagggct

SEQ ID NO: 26238 - DNA, 122 bp, Homo sapiens
  misc_feature (61)..(62): /note="This region represents a CpG dinucleotide"
  misc_feature (61)..(61): /note="Nucleotide may be methylated to form 5-methylcytosine"
tgggactgtggtgacttctgctgctggccccgcccctgcccccagagcgtccttggctgccgtctggccgggctctcatggtacttcctctgtgaactgtgtgtgaatctgcttttcctctg

SEQ ID NO: 26239 - DNA, 122 bp, Homo sapiens
  misc_feature (61)..(62): /note="This region represents a CpG dinucleotide"
  misc_feature (61)..(61): /note="Nucleotide may be methylated to form 5-methylcytosine"
gggtggtgtggccggttgtcagtagttttcctggcggttccactttaggtttgtgaaggccggttcgacctggggagctgcgttggtcccacagggattgaaacctccccatcctgagcgtc

SEQ ID NO: 26240 - DNA, 122 bp, Homo sapiens
  misc_feature (61)..(62): /note="This region represents a CpG dinucleotide"
  misc_feature (61)..(61): /note="Nucleotide may be methylated to form 5-methylcytosine"
gtgatttagaacaagagttcatccacaactacagcccttgggccaaatctagcctcagcccgtatttgtaaataaagtgttactggaacacaaccgtgcccatttctttagtcattgcctgt

SEQ ID NO: 26241 - DNA, 122 bp, Homo sapiens
  misc_feature (61)..(62): /note="This region represents a CpG dinucleotide"
  misc_feature (61)..(61): /note="Nucleotide may be methylated to form 5-methylcytosine"
caggatatgaaatctcttttaagtatgatttgtgtccaactagtataaacatgaaataaacgcctcaagcacaggttaaagagagaggataagactgaataattagacatgacagttttctc

SEQ ID NO: 26242 - DNA, 122 bp, Homo sapiens
  misc_feature (61)..(62): /note="This region represents a CpG dinucleotide"
  misc_feature (61)..(61): /note="Nucleotide may be methylated to form 5-methylcytosine"
gactaataatatgcaataggcactatctagggtaaatgttcaatcagcttacactagaaacgggaaaaaatgagaaatagcaagagtgaaacattgtactattgtcaccccatgcttgttta

SEQ ID NO: 26243 - DNA, 122 bp, Homo sapiens
  misc_feature (61)..(62): /note="This region represents a CpG dinucleotide"
  misc_feature (61)..(61): /note="Nucleotide may be methylated to form 5-methylcytosine"
cgggacgcgcggggaggcggagctggagctgcagctgcggcccgcgcggggcgaggtcagcgcggggagcgaggggagctagggcagcggggaccccgggcccaggcccgggccgagctggg

SEQ ID NO: 26244 - DNA, 122 bp, Homo sapiens
  misc_feature (61)..(62): /note="This region represents a CpG dinucleotide"
  misc_feature (61)..(61): /note="Nucleotide may be methylated to form 5-methylcytosine"
aatgctttgtatacttaagaattttctacaagtcataggctaattcataatatctgcatacgtatctcctccaacaaagctgtcaattatatcaactccaaatatgctactaaaatgtatat

SEQ ID NO: 26245 - DNA, 122 bp, Homo sapiens
  misc_feature (61)..(62): /note="This region represents a CpG dinucleotide"
  misc_feature (61)..(61): /note="Nucleotide may be methylated to form 5-methylcytosine"
acagcccccggggaaggtcttcatacagacttgagggtgtgcgtgctggtccctgccctccgccgcagcggggctgggactcagcagtcgggtcccggagctgcctttggtgcgcacgggcg

SEQ ID NO: 26246 - DNA, 122 bp, Homo sapiens
  misc_feature (61)..(62): /note="This region represents a CpG dinucleotide"
  misc_feature (61)..(61): /note="Nucleotide may be methylated to form 5-methylcytosine"
agcttgtgccatatattgccattttctccaaggggtgttaaataatttcccacctctgcacgttattatgactctcagtactcacatcgctctggaggtcataggcctgccgagcatggatg

SEQ ID NO: 26247 - DNA, 122 bp, Homo sapiens
  misc_feature (61)..(62): /note="This region represents a CpG dinucleotide"
  misc_feature (61)..(61): /note="Nucleotide may be methylated to form 5-methylcytosine"
cctagactccctttgctgctttgcaatttctttctgtgtgtggaggtctgataagccagacgagatgaagggatgttaatccttgggcccagtctcaatggcaaacttccaattaaagaaga

SEQ ID NO: 26248 - DNA, 122 bp, Homo sapiens
  misc_feature (61)..(62): /note="This region represents a CpG dinucleotide"
  misc_feature (61)..(61): /note="Nucleotide may be methylated to form 5-methylcytosine"
gaccaatttttagacccacccagctcttgtccttccagggctgtttcctggactattcttcgcatcttttccccaatctttttcaggaaatcaaattctggaattagagatcatatctcggt

SEQ ID NO: 26249 - DNA, 122 bp, Homo sapiens
  misc_feature (61)..(62): /note="This region represents a CpG dinucleotide"
  misc_feature (61)..(61): /note="Nucleotide may be methylated to form 5-methylcytosine"
aaacagttcactctgtcattggagtctcttgccagcaagggctctgagccctctgagcagcgtgctcacctgaaaccccgccagacttacagatgtttcgtttggctccagtgtgaagaacc

SEQ ID NO: 26250 - DNA, 122 bp, Homo sapiens
  misc_feature (61)..(62): /note="This region represents a CpG dinucleotide"
  misc_feature (61)..(61): /note="Nucleotide may be methylated to form 5-methylcytosine"
gttcagcaagtactggcagcacttaacacgtgcagtaaagcagtgaggctgttttgccaccgtgacaatgcagttgagttttgcctaacgtgaaaatactaagtttctgtgtattctctgct

SEQ ID NO: 26251 - DNA, 122 bp, Homo sapiens
  misc_feature (61)..(62): /note="This region represents a CpG dinucleotide"
  misc_feature (61)..(61): /note="Nucleotide may be methylated to form 5-methylcytosine"
tccattgcctttaatattaacaactctagaaagtagatatttttatctccattttacaagcgaggctctgggtgactaatagttgaacaaggtgacatggatgtaagtcatagaaccagaac

SEQ ID NO: 26252 - DNA, 122 bp, Homo sapiens
  misc_feature (61)..(62): /note="This region represents a CpG dinucleotide"
  misc_feature (61)..(61): /note="Nucleotide may be methylated to form 5-methylcytosine"
agaaaaggaagatggcaaatgtcaacatttcttacaacacatttagttatgaatgacacacgacagatcctgggagacagtgcaggggttcaccagagaatttaacagaattgtattctgag

SEQ ID NO: 26253 - DNA, 122 bp, Homo sapiens
  misc_feature (61)..(62): /note="This region represents a CpG dinucleotide"
  misc_feature (61)..(61): /note="Nucleotide may be methylated to form 5-methylcytosine"
agaagacttataaagtgtgctgaagcttaccatttcagatctagacagagatgtgacatgcgctaggttgttgataaaactggtatctttccaaaagaggcatgcaagcatgtactaaaaga

SEQ ID NO: 26254 - DNA, 122 bp, Homo sapiens
  misc_feature (61)..(62): /note="This region represents a CpG dinucleotide"
  misc_feature (61)..(61): /note="Nucleotide may be methylated to form 5-methylcytosine"
agggtggtgctggcccagagtctcagtgtccccagggatttgccatgatgattgaacgaccgtaatgggattgagcggcagggttctagtggacgcaatgaagcggattgcaaagaggaagc

SEQ ID NO: 26255 - DNA, 122 bp, Homo sapiens
  misc_feature (61)..(62): /note="This region represents a CpG dinucleotide"
  misc_feature (61)..(61): /note="Nucleotide may be methylated to form 5-methylcytosine"
aagattagtatgtcacctggctgtcgtgaattaaataagttagttcacgttaagtccttacgatagtgtctagcacatagtaagtgcttataaacgttagttcccatctctaatcttccaaa

SEQ ID NO: 26256 - DNA, 122 bp, Homo sapiens
  misc_feature (61)..(62): /note="This region represents a CpG dinucleotide"
  misc_feature (61)..(61): /note="Nucleotide may be methylated to form 5-methylcytosine"
cctggctttcacatgagcaagtctgtaaaattatccagcatgctgtgttcatcccaaaaccgccctcagaggtccctgagcctctcacaaacccccttttaagaaacttcttctcttctatg

SEQ ID NO: 26257 - DNA, 122 bp, Homo sapiens
  misc_feature (61)..(62): /note="This region represents a CpG dinucleotide"
  misc_feature (61)..(61): /note="Nucleotide may be methylated to form 5-methylcytosine"
caaaacagtgtatgatgaaatcacctcctaattccatgttcattaattcactcattcatgcgttcaagcactccatgtttgtggagtgcttactatgtgccagccacttgactagtcgtgga

SEQ ID NO: 26258 - DNA, 122 bp, Homo sapiens
  misc_feature (61)..(62): /note="This region represents a CpG dinucleotide"
  misc_feature (61)..(61): /note="Nucleotide may be methylated to form 5-methylcytosine"
gttttcctaatcacagcgtgctttcttgtctgctatttcatttgacttttttcaaccagccgctgaggtggggattattagcacgccctttgcagatgaggaaactgaagcccagggagctt

SEQ ID NO: 26259 - DNA, 122 bp, Homo sapiens
  misc_feature (61)..(62): /note="This region represents a CpG dinucleotide"
  misc_feature (61)..(61): /note="Nucleotide may be methylated to form 5-methylcytosine"
ctgggaagcaagtaatttttttgcggtgcgttgtcttgtgcttaaggggaagacgcagagcgtttccttgagggcagggatcgttgtcacactcttgtttgtgtcttctatcagcagggcct

SEQ ID NO: 26260 - DNA, 122 bp, Homo sapiens
  misc_feature (61)..(62): /note="This region represents a CpG dinucleotide"
  misc_feature (61)..(61): /note="Nucleotide may be methylated to form 5-methylcytosine"
tttgttggtcaaatccgatctgccatatcctgtgtaatgacaagtgagttgcattctcaccgtcactcctggggtctctccgcttcccctgagctggctcagcagtctgctccatgtgtttt

SEQ ID NO: 26261 - DNA, 122 bp, Homo sapiens
  misc_feature (61)..(62): /note="This region represents a CpG dinucleotide"
  misc_feature (61)..(61): /note="Nucleotide may be methylated to form 5-methylcytosine"
agagtgagtaatattctgaatgaggctacagtgacattatcatgtttgcaacatagctttcgttactaggaaaatttgtgaggcaaatccagactttaccaaaaaataccagtttggaacct

SEQ ID NO: 26262 - DNA, 122 bp, Homo sapiens
  misc_feature (61)..(62): /note="This region represents a CpG dinucleotide"
  misc_feature (61)..(61): /note="Nucleotide may be methylated to form 5-methylcytosine"
ttgttttaaacacgggttgatagatggacagaacatgatacagcaagtataggaaaatggcgatggtagacacgtgggtgtttactgtagaattctttcaacttttctgtatgtttgaaaat

SEQ ID NO: 26263 - DNA, 122 bp, Homo sapiens
  misc_feature (61)..(62): /note="This region represents a CpG dinucleotide"
  misc_feature (61)..(61): /note="Nucleotide may be methylated to form 5-methylcytosine"
ctcttgaggatggtagcagtgcagctgatgtgagtgctttctgccctctggtggtgaccgcgccggagtcaccagccctgccatagccctgatggggcagagggttctgagtacggtggatg

SEQ ID NO: 26264 - DNA, 122 bp, Homo sapiens
  misc_feature (61)..(62): /note="This region represents a CpG dinucleotide"
  misc_feature (61)..(61): /note="Nucleotide may be methylated to form 5-methylcytosine"
cccgcgggaaggaggcccgccccctcatgaatagcaagcagcctcagctctcgtagtgcccgcctccctcatgaatattgtagatcttcccagaagccctagcgggaaggaggttccccccc

SEQ ID NO: 26265 - DNA, 122 bp, Homo sapiens
  misc_feature (61)..(62): /note="This region represents a CpG dinucleotide"
  misc_feature (61)..(61): /note="Nucleotide may be methylated to form 5-methylcytosine"
agttaaattcaggaaatatttttgagcacctaatgtgtatcactattgtgctttgacttacggatacacaacagtgactaagacccagtccttgctcatgttgtggttgggacattgacgta

SEQ ID NO: 26266 - DNA, 122 bp, Homo sapiens
  misc_feature (61)..(62): /note="This region represents a CpG dinucleotide"
  misc_feature (61)..(61): /note="Nucleotide may be methylated to form 5-methylcytosine"
ggtcttgaggaagtccaaagggatttggacaaatgcaacttcatggggtaaagaatatggcgctcttggtgcaaactcttgggcatctgctaggatgtgagaacggtagtaatagcaggaag

SEQ ID NO: 26267 - DNA, 122 bp, Homo sapiens
  misc_feature (61)..(62): /note="This region represents a CpG dinucleotide"
  misc_feature (61)..(61): /note="Nucleotide may be methylated to form 5-methylcytosine"
gtcctcgtccaagtctgggccaagagcagcggcccagggggcggggccggccagagggagcggggagaggctgaggggcggtgccagcgccggaccctgccattggctggagattacaggag

SEQ ID NO: 26268 - DNA, 122 bp, Homo sapiens
  misc_feature (61)..(62): /note="This region represents a CpG dinucleotide"
  misc_feature (61)..(61): /note="Nucleotide may be methylated to form 5-methylcytosine"
gagacaacctgagtccattgtcctatacttcagccagtgctgtgaaacaggctgatggaacggtatgctatgaacagacattagactaagactttgaactttaatggtgttactttattctt

SEQ ID NO: 26269 - DNA, 122 bp, Homo sapiens
  misc_feature (61)..(62): /note="This region represents a CpG dinucleotide"
  misc_feature (61)..(61): /note="Nucleotide may be methylated to form 5-methylcytosine"
gggaaacatgtgacacacggttaaaaccatcaggaaatgcctctttaataaagatgacaccgtaaagataagaaacagccaactaagccaaggaagaagggagcatgccaggcaaaaggaaa

SEQ ID NO: 26270 - DNA, 122 bp, Homo sapiens
  misc_feature (61)..(62): /note="This region represents a CpG dinucleotide"
  misc_feature (61)..(61): /note="Nucleotide may be methylated to form 5-methylcytosine"
caaaacttgtgaggcagtagcgcgcctgagcctcagggcttagcagcaggttgtacagggcgatccacacttgcccgtccaacttgctcagcttttgctgctctgagggggccacagtatgc

SEQ ID NO: 26271 - DNA, 122 bp, Homo sapiens
  misc_feature (61)..(62): /note="This region represents a CpG dinucleotide"
  misc_feature (61)..(61): /note="Nucleotide may be methylated to form 5-methylcytosine"
agcatggtgtaaggttaaatgcacagactttggtgtatctcctggctctaccacagaactcgctggttgactttggacaagtcacttaatttccttctttctctgggtgactttagacaagt

SEQ ID NO: 26272 - DNA, 122 bp, Homo sapiens
  misc_feature (61)..(62): /note="This region represents a CpG dinucleotide"
  misc_feature (61)..(61): /note="Nucleotide may be methylated to form 5-methylcytosine"
gaatctacttctatctgcaggttttttataccttatgttcacctttggttgtatggaagtcgttctcttactgtttaatccaacctccagtgacagaagtagaattaactaaaacacaagtt

SEQ ID NO: 26273 - DNA, 122 bp, Homo sapiens
  misc_feature (61)..(62): /note="This region represents a CpG dinucleotide"
  misc_feature (61)..(61): /note="Nucleotide may be methylated to form 5-methylcytosine"
ggtgattcatggattaacagattacactcatgacccaattacatcttaaaggccccatcacgctaccacactggagatgaagtttcaacatgagttttggagaggacaaatattaagccata

SEQ ID NO: 26274 - DNA, 122 bp, Homo sapiens
  misc_feature (61)..(62): /note="This region represents a CpG dinucleotide"
  misc_feature (61)..(61): /note="Nucleotide may be methylated to form 5-methylcytosine"
gggctcgattgtgaatatgtgtcccaccatgggggtagaagggaagggacaaaggacaagcgggctgtagggctgtaaccctccagtgtgtcacaccagacccggcttagttaagcatttcc

SEQ ID NO: 26275 - DNA, 122 bp, Homo sapiens
  misc_feature (61)..(62): /note="This region represents a CpG dinucleotide"
  misc_feature (61)..(61): /note="Nucleotide may be methylated to form 5-methylcytosine"
cccttcttctacaaggacgtcttcagagatctggaggaggaaagggccttgccctgagttcgctgagccagaacaataggacttcttctgtagttgtgaaacttgtcagttgttgaagtcag

SEQ ID NO: 26276 - DNA, 122 bp, Homo sapiens
  misc_feature (61)..(62): /note="This region represents a CpG dinucleotide"
  misc_feature (61)..(61): /note="Nucleotide may be methylated to form 5-methylcytosine"
tcctttttcttttttaaactcacacctgggcacgcatctgcgtactgccctggcgactgacgtgagcatgaagggagctttagtcagccgctcggcccgcgggaaggaagaggcgagcagga

SEQ ID NO: 26277 - DNA, 122 bp, Homo sapiens
  misc_feature (61)..(62): /note="This region represents a CpG dinucleotide"
  misc_feature (61)..(61): /note="Nucleotide may be methylated to form 5-methylcytosine"
tgaggccaccacccagagcctcttcctagaggagccggaagcatcgggagccgcggtacccgcccatcttccggccaggatgtgtggtcctggtgagcgattgtcctgtggcgtccgggacc

SEQ ID NO: 26278 - DNA, 122 bp, Homo sapiens
  misc_feature (61)..(62): /note="This region represents a CpG dinucleotide"
  misc_feature (61)..(61): /note="Nucleotide may be methylated to form 5-methylcytosine"
gagccgggattagaactcgggcagattgacccaggacctattctatttactactgtactacgagtaagtcctaatttcatgaatgcatgtcttgaaagcacaacgcaaatcttttttttttt

SEQ ID NO: 26279 - DNA, 122 bp, Homo sapiens
  misc_feature (61)..(62): /note="This region represents a CpG dinucleotide"
  misc_feature (61)..(61): /note="Nucleotide may be methylated to form 5-methylcytosine"
attaccaaattatggcatattaaacaatcagacaatgcttttaggcaatatatttaaccacgacaaattttgaaacaacattttaatttcaggcgattacattgcatacttagtaattcctt

SEQ ID NO: 26280 - DNA, 122 bp, Homo sapiens
  misc_feature (61)..(62): /note="This region represents a CpG dinucleotide"
  misc_feature (61)..(61): /note="Nucleotide may be methylated to form 5-methylcytosine"
ttagggctggaagggatgtgacagacgatcttgccaagcccggcccttcttctacaaggacgtcttcagagatctggaggaggaaagggccttgccctgagttcgctgagccagaacaatag

SEQ ID NO: 26281 - DNA, 122 bp, Homo sapiens
  misc_feature (61)..(62): /note="This region represents a CpG dinucleotide"
  misc_feature (61)..(61): /note="Nucleotide may be methylated to form 5-methylcytosine"
gcgatccacctacctaagcctcccaaagtgttgtaattacatgcctgagccactgcaccccggctcattatcccatttcactgagggtgcaagaggtcaagtcagttgcccaagctcacaca

SEQ ID NO: 26282 - DNA, 122 bp, Homo sapiens
  misc_feature (61)..(62): /note="This region represents a CpG dinucleotide"
  misc_feature (61)..(61): /note="Nucleotide may be methylated to form 5-methylcytosine"
tgtgctctgatcacgaatccagtaggccttaagtagtaggcattcaatggatgtttgttgcggctctgctttgcaggtgaacaggatttgttttttaaccagagagttaagggattttccgg

SEQ ID NO: 26283 - DNA, 122 bp, Homo sapiens
  misc_feature (61)..(62): /note="This region represents a CpG dinucleotide"
  misc_feature (61)..(61): /note="Nucleotide may be methylated to form 5-methylcytosine"
ctgtcccattaaagctgaagatgtggcttgtggaacagggggcagttagtcagcataaggcgtaagttgcaattgtttagtgttgctgatcttgaggtcagtgcttgtttagatgctagaga

SEQ ID NO: 26284 - DNA, 122 bp, Homo sapiens
  misc_feature (61)..(62): /note="This region represents a CpG dinucleotide"
  misc_feature (61)..(61): /note="Nucleotide may be methylated to form 5-methylcytosine"
accacaggatcacaccaccacagggcttcccctcccacgcctgtccctcccaatggctgacgggtgtcaggcatttccagacattccgtacaacatggttgagttcaggagagccctcccgc

SEQ ID NO: 26285 - DNA, 122 bp, Homo sapiens
  misc_feature (61)..(62): /note="This region represents a CpG dinucleotide"
  misc_feature (61)..(61): /note="Nucleotide may be methylated to form 5-methylcytosine"
cccaggtggagggaggaaaccacagacacagagaaaaattcttcttaattaaaaataaaacgaaaactaagacggaggcatgatgctgggtcaaggtaccaccacactgctaaaaccagatg

SEQ ID NO: 26286 - DNA, 122 bp, Homo sapiens
  misc_feature (61)..(62): /note="This region represents a CpG dinucleotide"
  misc_feature (61)..(61): /note="Nucleotide may be methylated to form 5-methylcytosine"
tgcaggggtgagccaccacacccagccatgtggcatccttttgaggaacaacaaaagttacgtccctacattggcttaggcaaggatttggtgaccaagaacccaaaagcaaatgcaataaa

SEQ ID NO: 26287 - DNA, 122 bp, Homo sapiens
  misc_feature (61)..(62): /note="This region represents a CpG dinucleotide"
  misc_feature (61)..(61): /note="Nucleotide may be methylated to form 5-methylcytosine"
cttcttatagagtgcaaactgcaggggtggggaggagggacaggggctgaaatagagggacggagacccaaagccctgaggctcacccaagttaggctgatgcaagactctctgtaacccac

SEQ ID NO: 26288 - DNA, 122 bp, Homo sapiens
  misc_feature (61)..(62): /note="This region represents a CpG dinucleotide"
  misc_feature (61)..(61): /note="Nucleotide may be methylated to form 5-methylcytosine"
gcatgacaactgccctcctgtcccacagcttgggatgggatgaggtcacagggtggggtccgccccaagatgctggcctggcctggctcagatgagagccctttgggtgtttctcagtttcc

SEQ ID NO: 26289 - DNA, 122 bp, Homo sapiens
  misc_feature (61)..(62): /note="This region represents a CpG dinucleotide"
  misc_feature (61)..(61): /note="Nucleotide may be methylated to form 5-methylcytosine"
aaccaggctgtgcgctcttcatggcaggtgctggctattactgagaccagccatctggttcgttccttccacaaacaagtggaacaagtttgttgttgttgtttttgaggcagagtctcact

SEQ ID NO: 26290 - DNA, 122 bp, Homo sapiens
  misc_feature (61)..(62): /note="This region represents a CpG dinucleotide"
  misc_feature (61)..(61): /note="Nucleotide may be methylated to form 5-methylcytosine"
tggaagaccttgctgccctccggagcgcccctcactgcccgaccgtcccgcctgaggccccggttctactgatagggagctccagcctggggtttggcgataaaggcccttgccctgtgcgg

SEQ ID NO: 26291 - DNA, 122 bp, Homo sapiens
  misc_feature (61)..(62): /note="This region represents a CpG dinucleotide"
  misc_feature (61)..(61): /note="Nucleotide may be methylated to form 5-methylcytosine"
ccaagctcatgagcaacagtgctgactcagtcctgcagcatcagttcagtcttggggtgtcgtcattctccaggacatcccaacgagggatatccagcagccttccttgagggtcccaccct

SEQ ID NO: 26292 - DNA, 122 bp, Homo sapiens
  misc_feature (61)..(62): /note="This region represents a CpG dinucleotide"
  misc_feature (61)..(61): /note="Nucleotide may be methylated to form 5-methylcytosine"
cctccttccggccagtcagaagtcagtggtgaggcacgccccagtttctctggtcaaagacgtaattcttagttcatgatgggtagctccagtaaattaaaaagaataaaaagaagatactg

SEQ ID NO: 26293 - DNA, 122 bp, Homo sapiens
  misc_feature (61)..(62): /note="This region represents a CpG dinucleotide"
  misc_feature (61)..(61): /note="Nucleotide may be methylated to form 5-methylcytosine"
tctctcctcccctccctattcttaatctctcattgcaaacagaagtcaaatagcaaacagcgtcacagcaactgaacttactacgaactgtttttatgaggatttatcaacagagttattta

SEQ ID NO: 26294 - DNA, 122 bp, Homo sapiens
  misc_feature (61)..(62): /note="This region represents a CpG dinucleotide"
  misc_feature (61)..(61): /note="Nucleotide may be methylated to form 5-methylcytosine"
tcctagtcccagcccagaggatttatctaaacatcaccccattgctgtgtcatatgtgtccgtgtgcaaaaacaggggaaagagatggtgtcaaactctcactcagcagctctgaggcaaca

SEQ ID NO: 26295 - DNA, 122 bp, Homo sapiens
  misc_feature (61)..(62): /note="This region represents a CpG dinucleotide"
  misc_feature (61)..(61): /note="Nucleotide may be methylated to form 5-methylcytosine"
acggggacaaatcccagtgagcagctggccagctggcacagaccacaaggacggaagtgccgtgttaagggggcgacatgatccaacccgcttcaccctcacacagcccgatttgggggtgt

SEQ ID NO: 26296 - DNA, 122 bp, Homo sapiens
  misc_feature (61)..(62): /note="This region represents a CpG dinucleotide"
  misc_feature (61)..(61): /note="Nucleotide may be methylated to form 5-methylcytosine"
caccacacagacactcacatactcacagacacattctattggttctactggtctggagaacgctgactcatacattgactaataggatccatggaactattgaacaaccaaaccattgaaag

SEQ ID NO: 26297 - DNA, 122 bp, Homo sapiens
  misc_feature (61)..(62): /note="This region represents a CpG dinucleotide"
  misc_feature (61)..(61): /note="Nucleotide may be methylated to form 5-methylcytosine"
gtacaggtttacaaagtacagaaacacattttggtttcttcttgatatgttttctaggaacgtgcaatatcaacattatataaatgcaggtgccattaagaaatctgagatccttcccactg

SEQ ID NO: 26298 - DNA, 122 bp, Homo sapiens
  misc_feature (61)..(62): /note="This region represents a CpG dinucleotide"
  misc_feature (61)..(61): /note="Nucleotide may be methylated to form 5-methylcytosine"
gcacagccactgcttttcacttccaggcctttgctagtattgttttctatgcctacaggccgccaccaccccacccacttttcctgtgtttgccttcccctgccgacacccaagcttgaaga

SEQ ID NO: 26299 - DNA, 122 bp, Homo sapiens
  misc_feature (61)..(62): /note="This region represents a CpG dinucleotide"
  misc_feature (61)..(61): /note="Nucleotide may be methylated to form 5-methylcytosine"
aggacacagggcatggaggggattggagagagaaagtagccagagggatctagggttccacgcagggagaaaacaagggcagtaatgaagtaacttgtcttcttgtgactctcagcctctcc

SEQ ID NO: 26300 - DNA, 122 bp, Homo sapiens
  misc_feature (61)..(62): /note="This region represents a CpG dinucleotide"
  misc_feature (61)..(61): /note="Nucleotide may be methylated to form 5-methylcytosine"
tccactgagccagagaggatcgaacagtgcctgccactgctgggggacccactgggattgcggtgtggggtgccccagttggactagggggcctgttttccagggaagattcagagcaggag

SEQ ID NO: 26301 - DNA, 122 bp, Homo sapiens
  misc_feature (61)..(62): /note="This region represents a CpG dinucleotide"
  misc_feature (61)..(61): /note="Nucleotide may be methylated to form 5-methylcytosine"
acaaagttattaggactccaggtacacttgtctcataaactgaagtcatccgtggtttgccgtgaggtctcctgagtttattggagcctttattgcgtctatgacagagagagagaaagtgc

SEQ ID NO: 26302 - DNA, 122 bp, Homo sapiens
  misc_feature (61)..(62): /note="This region represents a CpG dinucleotide"
  misc_feature (61)..(61): /note="Nucleotide may be methylated to form 5-methylcytosine"
attgtgtagcctactatgctcctagggtattgctcataggctgcaaatctgtacagcatgcgattgaactgaattttgtaggtagttgtaacaaaatggtatttgtgtgtatctacacatag

SEQ ID NO: 26303 - DNA, 122 bp, Homo sapiens
  misc_feature (61)..(62): /note="This region represents a CpG dinucleotide"
  misc_feature (61)..(61): /note="Nucleotide may be methylated to form 5-methylcytosine"
actccttattcaatacatacagttttctccagcaaacaaagcaattcttctattgtagcacgcctcctttactatcattttcctatgtcaccatatctactcctgaacctttaatcactcaa

SEQ ID NO: 26304 - DNA, 122 bp, Homo sapiens
  misc_feature (61)..(62): /note="This region represents a CpG dinucleotide"
  misc_feature (61)..(61): /note="Nucleotide may be methylated to form 5-methylcytosine"
ataccttctgtcatcagaaagtcacacgccccttagtggagaggtcaggttacctcttaacgacacaaaagacatctgtgatccggtgaaaccccgtctctactaaaaatacaaaaacttag

SEQ ID NO: 26305 - DNA, 122 bp, Homo sapiens
  misc_feature (61)..(62): /note="This region represents a CpG dinucleotide"
  misc_feature (61)..(61): /note="Nucleotide may be methylated to form 5-methylcytosine"
ggacttctagctcttcctggatccttatatgcccatttgctattgtaaatagctatatgacgttgtgatactattccaaaccctagtcatagcaaccacatacctaatagccaagggataac

SEQ ID NO: 26306 - DNA, 122 bp, Homo sapiens
  misc_feature (61)..(62): /note="This region represents a CpG dinucleotide"
  misc_feature (61)..(61): /note="Nucleotide may be methylated to form 5-methylcytosine"
gtccaattagttgtggcaccttatgttccaacctgcagcacagctgctaggaccttggttcgtttcctgtcttacttagaaatgaaagtagaggaacaacgacttttgaaacaatgaacagg

SEQ ID NO: 26307 - DNA, 122 bp, Homo sapiens
  misc_feature (61)..(62): /note="This region represents a CpG dinucleotide"
  misc_feature (61)..(61): /note="Nucleotide may be methylated to form 5-methylcytosine"
ttgtttgtttctgcttttattgtctgtgcttttgtgtcacctccaaaaaaacctgaacaacgtgattaagaaatgggcaaaggatctttgcattagctcattttcacgctgctgataaagac

SEQ ID NO: 26308 - DNA, 122 bp, Homo sapiens
  misc_feature (61)..(62): /note="This region represents a CpG dinucleotide"
  misc_feature (61)..(61): /note="Nucleotide may be methylated to form 5-methylcytosine"
cttctagtgtggcaccccttttcatttgggtatgtagagccatggttactgttcaacagacgttgaaccagatgtgcctgctattacagaagtgaaatctgacagctgttacctaaactctt

SEQ ID NO: 26309 - DNA, 122 bp, Homo sapiens
  misc_feature (61)..(62): /note="This region represents a CpG dinucleotide"
  misc_feature (61)..(61): /note="Nucleotide may be methylated to form 5-methylcytosine"
tgagtaggttcttgggtggggacaacaagaccagatgagccagttcaccagtctaggtggcgccagctgatccatcggaatgtacttcctaagaaataccacaaacaccaagcttaggtttt

SEQ ID NO: 26310 - DNA, 122 bp, Homo sapiens
  misc_feature (61)..(62): /note="This region represents a CpG dinucleotide"
  misc_feature (61)..(61): /note="Nucleotide may be methylated to form 5-methylcytosine"
ttttgcccagtttttactgcagaagtgaaataacctgacacaatctttgggagctacaggcgagcagacatccaccaggattaggaccagagagaagaactctaccaactccaaaaggaaac

SEQ ID NO: 26311 - DNA, 122 bp, Homo sapiens
  misc_feature (61)..(62): /note="This region represents a CpG dinucleotide"
  misc_feature (61)..(61): /note="Nucleotide may be methylated to form 5-methylcytosine"
ggactctcagaagcgaagagagaactgaaagttagagcaatgcttttcagcctacctatgcgatccagggctactggcccaggataatggagctagaaattggaagctgggttttcaagccc

SEQ ID NO: 26312 - DNA, 122 bp, Homo sapiens
  misc_feature (61)..(62): /note="This region represents a CpG dinucleotide"
  misc_feature (61)..(61): /note="Nucleotide may be methylated to form 5-methylcytosine"
atagacagaacgaagttctggaggaggcttttaaaaggaaggaaggttttaatgaggaagcgctgtctgagctcaggtctaaatgatgagaaggaaccagccatataaagagccaggataag

SEQ ID NO: 26313 - DNA, 122 bp, Homo sapiens
  misc_feature (61)..(62): /note="This region represents a CpG dinucleotide"
  misc_feature (61)..(61): /note="Nucleotide may be methylated to form 5-methylcytosine"
tgtgcatgactccagtggaatctgcatgcaatgctcagggcagggtttggcgctgcctcacgaagccattacatttctagacaaagaattaacagtttgtagtgagtgggttatctgttatt

SEQ ID NO: 26314 - DNA, 122 bp, Homo sapiens
  misc_feature (61)..(62): /note="This region represents a CpG dinucleotide"
  misc_feature (61)..(61): /note="Nucleotide may be methylated to form 5-methylcytosine"
caatatgaaattactagacattctgtcctttataaacacaaatacattaattctgcataccgtaatatgtgaaccggttttggagactggagagtagtaacataaatgccatacaggagctt

SEQ ID NO: 26315 - DNA, 122 bp, Homo sapiens
  misc_feature (61)..(62): /note="This region represents a CpG dinucleotide"
  misc_feature (61)..(61): /note="Nucleotide may be methylated to form 5-methylcytosine"
aaaccacgtagactcactgtggcttcccttaatgtgatgtagctaacattcagcaaagtacgtaccagcaagaccatgcattaagggtagtgtgtgtgtgtgtgtgtgtgtgtgtgtgtgtg

SEQ ID NO: 26316 - DNA, 122 bp, Homo sapiens
  misc_feature (61)..(62): /note="This region represents a CpG dinucleotide"
  misc_feature (61)..(61): /note="Nucleotide may be methylated to form 5-methylcytosine"
agatggcatcctcttccaatataaagctgtttcatccacgttaaaaaatctattgttggccgggcacgttggctcacgcctgtaatcccaggactttgggaggccgaggcaggcggatcaca

SEQ ID NO: 26317 - DNA, 122 bp, Homo sapiens
  misc_feature (61)..(62): /note="This region represents a CpG dinucleotide"
  misc_feature (61)..(61): /note="Nucleotide may be methylated to form 5-methylcytosine"
cctggtgagaaacgtttctgcctcgccttgaccttcccttgctccagacttgtaatcaaccgcacggattcctttgtaatagggactggtatttggaaatcaagatctggttgccaggtttg

SEQ ID NO: 26318 - DNA, 122 bp, Homo sapiens
  misc_feature (61)..(62): /note="This region represents a CpG dinucleotide"
  misc_feature (61)..(61): /note="Nucleotide may be methylated to form 5-methylcytosine"
aattatttaaacagctgttaatattgcaatctctgcccagttctttctcatgcaaatccacgtgagtcctggttcaaggcaagctcagcttatcgtgcaaatcatcctctgtgactcagaag

SEQ ID NO: 26319 - DNA, 122 bp, Homo sapiens
  misc_feature (61)..(62): /note="This region represents a CpG dinucleotide"
  misc_feature (61)..(61): /note="Nucleotide may be methylated to form 5-methylcytosine"
ccaagctgcatggcacttcccagcagttgcaggaaaattaaatgtggttttcctcatcatcgtgaacaacaggggtacaggaaaactgggggataatgtccccattagcctgttttcttagc

SEQ ID NO: 26320 - DNA, 122 bp, Homo sapiens
  misc_feature (61)..(62): /note="This region represents a CpG dinucleotide"
  misc_feature (61)..(61): /note="Nucleotide may be methylated to form 5-methylcytosine"
taataggtttaatgatttcataacatttgtctccctccctgtgagatttccttgttacaccgtcttgaacagtttgcaaagcttgctatgatgttcttctagtttatattaaaatattgagg

SEQ ID NO: 26321 - DNA, 122 bp, Homo sapiens
  misc_feature (61)..(62): /note="This region represents a CpG dinucleotide"
  misc_feature (61)..(61): /note="Nucleotide may be methylated to form 5-methylcytosine"
aggaagagaactgctcaacacaaaagtggacagaaaaagatcagtcttagagagtcttggcggggttagaatttatcctgttgcatgctcgatgtgatatcactaaaggatctaagcaggat

SEQ ID NO: 26322 - DNA, 122 bp, Homo sapiens
  misc_feature (61)..(62): /note="This region represents a CpG dinucleotide"
  misc_feature (61)..(61): /note="Nucleotide may be methylated to form 5-methylcytosine"
acccagttgcaagtaacaaccaaaatttccgagcccgaaaccagatggagtcatgagctgcgaaataagcgatccaggctccacaaagttccgatgagcatgggaggtttcaagccccatgt

SEQ ID NO: 26323 - DNA, 122 bp, Homo sapiens
  misc_feature (61)..(62): /note="This region represents a CpG dinucleotide"
  misc_feature (61)..(61): /note="Nucleotide may be methylated to form 5-methylcytosine"
tatctcccagccctgaagagatgtctttaaaatgacttcccacgggtgtcaacacatgtacgcaggcagatagaggagaacgtatcttagtcctgacttaggatcattaaaattcctgaacc

SEQ ID NO: 26324 - DNA, 122 bp, Homo sapiens
  misc_feature (61)..(62): /note="This region represents a CpG dinucleotide"
  misc_feature (61)..(61): /note="Nucleotide may be methylated to form 5-methylcytosine"
aactacctagagcgctgccgctactgcaacgtcctctgcggggagcgtgaggaggaggcacgggcttgccacgccacccacaaccgtgcctgccgctgccgcaccggcttcttcgcgcacgc

SEQ ID NO: 26325 - DNA, 122 bp, Homo sapiens
  misc_feature (61)..(62): /note="This region represents a CpG dinucleotide"
  misc_feature (61)..(61): /note="Nucleotide may be methylated to form 5-methylcytosine"
tttgattccgctattgaggtagaggcgggacgggggaagcagctttcagtaagacccgcccgctcttgccctgtcagtttaccattgccatggcaacacccggaagttgccgccccctttcc

SEQ ID NO: 26326 - DNA, 122 bp, Homo sapiens
  misc_feature (61)..(62): /note="This region represents a CpG dinucleotide"
  misc_feature (61)..(61): /note="Nucleotide may be methylated to form 5-methylcytosine"
tgcctagtttggcttccaaaggcccttcacaaatcatacgtggggacttgtagcctaggacgtgaacctgtcaggtcaggctagactggcctgcttttgaaagtgagcccagtgtgtgtgca

SEQ ID NO: 26327 - DNA, 122 bp, Homo sapiens
  misc_feature (61)..(62): /note="This region represents a CpG dinucleotide"
  misc_feature (61)..(61): /note="Nucleotide may be methylated to form 5-methylcytosine"
aaacaatcccgtcactcagtgaccatagtacctgataggtgttaatagtttttcaacactcgcctctccccagccctttcctctaattgtctccagtgtttattgttctcatctttatgtcc

SEQ ID NO: 26328 - DNA, 122 bp, Homo sapiens
  misc_feature (61)..(62): /note="This region represents a CpG dinucleotide"
  misc_feature (61)..(61): /note="Nucleotide may be methylated to form 5-methylcytosine"
gcctagtcaccatctaggcagggacggctgcctctgggtctggacggcgctgggagttggcgctcgtggagcctggaggtggccccgggatctggagtgaggccagggccttggggaggcca

SEQ ID NO: 26329 - DNA, 122 bp, Homo sapiens
  misc_feature (61)..(62): /note="This region represents a CpG dinucleotide"
  misc_feature (61)..(61): /note="Nucleotide may be methylated to form 5-methylcytosine"
actccagacaagacccccgagggtcatgctacaaagctgctctcctgacttcctcagaaacgcccaaggacaggaaagacaaagaaagctgaggacttgtccagattcaagaagcccaagga

SEQ ID NO: 26330 - DNA, 122 bp, Homo sapiens
  misc_feature (61)..(62): /note="This region represents a CpG dinucleotide"
  misc_feature (61)..(61): /note="Nucleotide may be methylated to form 5-methylcytosine"
agatggttgggtcttcctgtccccagaactcccggcagcgctcactgtcttgccggtgcacgtccgtcattggtcctagagcctggatgtctgggggacatctcctcacttgtgtcctaaca

SEQ ID NO: 26331 - DNA, 122 bp, Homo sapiens
  misc_feature (61)..(62): /note="This region represents a CpG dinucleotide"
  misc_feature (61)..(61): /note="Nucleotide may be methylated to form 5-methylcytosine"
aagagcctggagagtaagaggtgttatcttcataactctcacagggcccacctcagcacccggcacaaaacaggtattcagccagtgtttgtagaaatgatgacctaagctgaagaaccggg

SEQ ID NO: 26332 - DNA, 122 bp, Homo sapiens
  misc_feature (61)..(62): /note="This region represents a CpG dinucleotide"
  misc_feature (61)..(61): /note="Nucleotide may be methylated to form 5-methylcytosine"
aaaacgtgatacttgcaagagtttaaaacaacttgtaacaactggcagtgaggcggggcgcgtggagagagcaggataccaaaaaagctgtgtgtggcaatgcggggtggaggctgacctag

SEQ ID NO: 26333 - DNA, 122 bp, Homo sapiens
  misc_feature (61)..(62): /note="This region represents a CpG dinucleotide"
  misc_feature (61)..(61): /note="Nucleotide may be methylated to form 5-methylcytosine"
aagtgtcaagttcacagtcagaatacataatctgaagactctaagctgtttctgcaactacgttaaaacagtttaaatagtaaaatagagtctagattagtattcaataaaataatttaaaa

SEQ ID NO: 26334 - DNA, 122 bp, Homo sapiens
  misc_feature (61)..(62): /note="This region represents a CpG dinucleotide"
  misc_feature (61)..(61): /note="Nucleotide may be methylated to form 5-methylcytosine"
tccacactaagtctgggaagaagctcgcagagtcagcaggatcttcaaccctgtcaaggtcgggtgagtttcttgccttgagcagatctgtcagttctgtcacattgctgagatgcaattaa

SEQ ID NO: 26335 - DNA, 122 bp, Homo sapiens
  misc_feature (61)..(62): /note="This region represents a CpG dinucleotide"
  misc_feature (61)..(61): /note="Nucleotide may be methylated to form 5-methylcytosine"
gctacaacatggataaacctttaggatgctatgctcagtgaaaacaggctggtcacaaaacgacaaatgtattaattccactgagatgaggtatgtagaatagtaaaattaataaaaacaga

SEQ ID NO: 26336 - DNA, 122 bp, Homo sapiens
  misc_feature (61)..(62): /note="This region represents a CpG dinucleotide"
  misc_feature (61)..(61): /note="Nucleotide may be methylated to form 5-methylcytosine"
gggcccttggctgggggctggctgctgctgaggaggccaacttgcggttttccattttcacggtgaaccgcattgtctcagcgttcgctggtattcacaaaatcagaaagaaaggaaggtgg

SEQ ID NO: 26337 - DNA, 122 bp, Homo sapiens
  misc_feature (61)..(62): /note="This region represents a CpG dinucleotide"
  misc_feature (61)..(61): /note="Nucleotide may be methylated to form 5-methylcytosine"
ctcttgtcaccacagagtgctcaccagagtttatcctaagcctaactactgcagattacacgttcatgtggggtttgctaacacattgttctaattcatctgaaatgattgggttttctcaa

SEQ ID NO: 26338 - DNA, 122 bp, Homo sapiens
  misc_feature (61)..(62): /note="This region represents a CpG dinucleotide"
  misc_feature (61)..(61): /note="Nucleotide may be methylated to form 5-methylcytosine"
gaatttgctcatgcaagagctatctctatctccagcttatcaaaagactcagatataaatcgctccagaaagttgggaatgttgccacctcagttgctaagctcttgtgtaatgttgttcta

SEQ ID NO: 26339 - DNA, 122 bp, Homo sapiens
  misc_feature (61)..(62): /note="This region represents a CpG dinucleotide"
  misc_feature (61)..(61): /note="Nucleotide may be methylated to form 5-methylcytosine"
agggccactctcagaaaactacacgctagttgtagtaattagctccaggcatgcccttcccgccccctgttattaaacagcatgatgtggcagatcaagcactaaactagcaggtagcaaat

SEQ ID NO: 26340 - DNA, 122 bp, Homo sapiens
  misc_feature (61)..(62): /note="This region represents a CpG dinucleotide"
  misc_feature (61)..(61): /note="Nucleotide may be methylated to form 5-methylcytosine"
taggagaggagtgccgccgaggcggggcggggcggggcgtggagctgggctggcagtgggcgtggcggtgctgcccaggtgagccaccgctgcttctgcccagacacggtcgcctccacatc

SEQ ID NO: 26341 - DNA, 122 bp, Homo sapiens
  misc_feature (61)..(62): /note="This region represents a CpG dinucleotide"
  misc_feature (61)..(61): /note="Nucleotide may be methylated to form 5-methylcytosine"
tttctgtctctcaggaatatataatttcatttttcattgtcatagtgctaaaatcttttccgttcctgttccccaaaatgtcttaaagtgtatatgattacataatttacatatttttggat

SEQ ID NO: 26342 - DNA, 122 bp, Homo sapiens
  misc_feature (61)..(62): /note="This region represents a CpG dinucleotide"
  misc_feature (61)..(61): /note="Nucleotide may be methylated to form 5-methylcytosine"
agcaaagaacactgattacagaacacagaatagcagagtctattatctaaacctaatgcccgatggagataaaatatttcacattataatgcaagtcaatgggaaaaatagttgcgtgttta

SEQ ID NO: 26343 - DNA, 122 bp, Homo sapiens
  misc_feature (61)..(62): /note="This region represents a CpG dinucleotide"
  misc_feature (61)..(61): /note="Nucleotide may be methylated to form 5-methylcytosine"
taaatgggagaagcagatgagtcaaatgacttatactagattctccatgagtcagaggtacgactgttccaatgagtcattacctatcagttctaaagtaattgtcaggagaatcatttaaa

SEQ ID NO: 26344 - DNA, 122 bp, Homo sapiens
  misc_feature (61)..(62): /note="This region represents a CpG dinucleotide"
  misc_feature (61)..(61): /note="Nucleotide may be methylated to form 5-methylcytosine"
actttgctaagtactccatgcagattaccttatttaaccctcacatgtagtacctaagaacgtcggctccaaagccaggttgagtttgaatgctgactcctccgtgtcttagctgtgtgatc

SEQ ID NO: 26345 - DNA, 122 bp, Homo sapiens
  misc_feature (61)..(62): /note="This region represents a CpG dinucleotide"
  misc_feature (61)..(61): /note="Nucleotide may be methylated to form 5-methylcytosine"
ctgggaccgagggagggggcaggcctggactctgctgaacacctaatgagcatcagggagcgccactgcaggacgagcagcagagccaagattagagcccctgctgtcctcactacagccac

SEQ ID NO: 26346 - DNA, 122 bp, Homo sapiens
  misc_feature (61)..(62): /note="This region represents a CpG dinucleotide"
  misc_feature (61)..(61): /note="Nucleotide may be methylated to form 5-methylcytosine"
taaagtctttttgttggatcttgatatgttaacattgtttttattaccactgtcaccacacgtcacaacttgtttttcttttctttttacgttaacatatcttactagccgtctacttagta

SEQ ID NO: 26347 - DNA, 122 bp, Homo sapiens
  misc_feature (61)..(62): /note="This region represents a CpG dinucleotide"
  misc_feature (61)..(61): /note="Nucleotide may be methylated to form 5-methylcytosine"
aaataagtagttttggaaaccacgaagtgctgtgccagtgatagttaccagctcctagtacgctgtctgccagccctggctggggctgaatgaatgaatgtgaataaccttccttctaaaat

SEQ ID NO: 26348 - DNA, 122 bp, Homo sapiens
  misc_feature (61)..(62): /note="This region represents a CpG dinucleotide"
  misc_feature (61)..(61): /note="Nucleotide may be methylated to form 5-methylcytosine"
tgaaagtctgtctaccagggaagctcaatggagactcagtgcctcgggcttttcctgggacgtggtcatgcaggcaccttttgcctcatacatactgaaattccagactctcagaaagaaag

SEQ ID NO: 26349 - DNA, 122 bp, Homo sapiens
  misc_feature (61)..(62): /note="This region represents a CpG dinucleotide"
  misc_feature (61)..(61): /note="Nucleotide may be methylated to form 5-methylcytosine"
ttggtaaatggtgcaggtacacttgaaaagaatgtttattcttctgttgttggatgaagtcgtctgtaaatgtcaattagatcaagttggatgatacttctgtttaaaggttgtatatccat

SEQ ID NO: 26350 - DNA, 122 bp, Homo sapiens
  misc_feature (61)..(62): /note="This region represents a CpG dinucleotide"
  misc_feature (61)..(61): /note="Nucleotide may be methylated to form 5-methylcytosine"
agtgaaatactgcacaggatcccccaaggcacgaagctggctggagggagctggagggagcgccccacctgccgcgggaaactcacgaggaaagtgcagaccttcggtggcgctggcacccg

SEQ ID NO: 26351 - DNA, 122 bp, Homo sapiens
  misc_feature (61)..(62): /note="This region represents a CpG dinucleotide"
  misc_feature (61)..(61): /note="Nucleotide may be methylated to form 5-methylcytosine"
agcatacaacttcctcttagattttaagtgccacattctttacatgcttttgaatccattcgttccattcaattaatatttggtaagcatctattatgtgacaagccctgttttagacgcat

SEQ ID NO: 26352 - DNA, 122 bp, Homo sapiens
  misc_feature (61)..(62): /note="This region represents a CpG dinucleotide"
  misc_feature (61)..(61): /note="Nucleotide may be methylated to form 5-methylcytosine"
tggctctggtgagctgaccagagcttcacatggacttcttccaggtctttctctatttcacgtcagactgcctgctttccttggcattcctctgagacttcctcgcattctcctttttttct

SEQ ID NO: 26353 - DNA, 122 bp, Homo sapiens
  misc_feature (61)..(62): /note="This region represents a CpG dinucleotide"
  misc_feature (61)..(61): /note="Nucleotide may be methylated to form 5-methylcytosine"
gtgagaagtaattagagaatttaccattctgtaattattcagttaatacttgcgtacttgcgttaagttttaggatttagtaaatgccccataagtgttaggattgacatctcagctccacc

SEQ ID NO: 26354 - DNA, 122 bp, Homo sapiens
  misc_feature (61)..(62): /note="This region represents a CpG dinucleotide"
  misc_feature (61)..(61): /note="Nucleotide may be methylated to form 5-methylcytosine"
ttcagcaagacacatgctctctgagcctgttcagacagggacaatattcactttgcagaccggctctgaggactgaaggaagcatgttggctgggcctgcagtgtccaactcatattagatg

SEQ ID NO: 26355 - DNA, 122 bp, Homo sapiens
  misc_feature (61)..(62): /note="This region represents a CpG dinucleotide"
  misc_feature (61)..(61): /note="Nucleotide may be methylated to form 5-methylcytosine"
ccactctcagtgactatgtaactgtgtcagggtgagttggtgcagtcttttgtcttatcacgtgcctccatctcctggaggcagggtgcccaaggagggcagggaggggttcttgtgctcct

SEQ ID NO: 26356 - DNA, 122 bp, Homo sapiens
  misc_feature (61)..(62): /note="This region represents a CpG dinucleotide"
  misc_feature (61)..(61): /note="Nucleotide may be methylated to form 5-methylcytosine"
gccccgcatcagctaccgagaggtatccatccttacccccgactgcccatggtgcctacgcggcaacctcacaaccggtctgctgagctgggtggaggagaggttccacccaccccagaagg

SEQ ID NO: 26357 - DNA, 122 bp, Homo sapiens
  misc_feature (61)..(62): /note="This region represents a CpG dinucleotide"
  misc_feature (61)..(61): /note="Nucleotide may be methylated to form 5-methylcytosine"
tccttatgctctacatagaggtgtgtgcacacgtgtgtgcctttcccctgtaaatacagtcgtttgcattttgcagaactgcattgtgagttgagtttgttttaatctccccaatcccttct

SEQ ID NO: 26358 - DNA, 122 bp, Homo sapiens
  misc_feature (61)..(62): /note="This region represents a CpG dinucleotide"
  misc_feature (61)..(61): /note="Nucleotide may be methylated to form 5-methylcytosine"
ataaggtcacattttgaggtatagaggattagaacatcaacataaatgttaggagggacacgatgcaaccataacagtggtgaaggctcaggaatggacagctgtagacttggccacaccca

SEQ ID NO: 26359 - DNA, 122 bp, Homo sapiens
  misc_feature (61)..(62): /note="This region represents a CpG dinucleotide"
  misc_feature (61)..(61): /note="Nucleotide may be methylated to form 5-methylcytosine"
tctagtccttcaaacaacactgtagtgtagatcttgttggttctttcagagaaggggaaacggaaactcacagaagcaactagaggagtgagtagaagcccaggtatgctctagacaggcct

SEQ ID NO: 26360 - DNA, 122 bp, Homo sapiens
  misc_feature (61)..(62): /note="This region represents a CpG dinucleotide"
  misc_feature (61)..(61): /note="Nucleotide may be methylated to form 5-methylcytosine"
tgagggtacgtgagctatgttgatttacagtcgctatgtcacaggcaaaatgagtcatcacgagccctgtgagccacactgcactatgggctgaaatgcattctttgttattatctatgatg

SEQ ID NO: 26361 - DNA, 122 bp, Homo sapiens
  misc_feature (61)..(62): /note="This region represents a CpG dinucleotide"
  misc_feature (61)..(61): /note="Nucleotide may be methylated to form 5-methylcytosine"
aaaataaactgtatttctcctgaggcataagtatttctaaaaaggaggctacaggagttacgggctcagtaataacaggaagtggtatctgtgcaaaggcttaaaactgttgagccccacca

SEQ ID NO: 26362 - DNA, 122 bp, Homo sapiens
  misc_feature (61)..(62): /note="This region represents a CpG dinucleotide"
  misc_feature (61)..(61): /note="Nucleotide may be methylated to form 5-methylcytosine"
atgtgcacaagttgggggctgagagcatagggcagggtgttgctcatctgcagcatgtgacgtgaacagaggcctatggaaaggagtggtatgtcaggtggtggcaagagggtgttccacct

SEQ ID NO: 26363 - DNA, 122 bp, Homo sapiens
  misc_feature (61)..(62): /note="This region represents a CpG dinucleotide"
  misc_feature (61)..(61): /note="Nucleotide may be methylated to form 5-methylcytosine"
tagggaaacaccatcatggaattaaccttcagaggagggtggtcagcctcactgagaccacgtcacccaacctgtccattgcacagacaaaggggaagtgtgtgtttgtgttcccatgatga

SEQ ID NO: 26364 - DNA, 122 bp, Homo sapiens
  misc_feature (61)..(62): /note="This region represents a CpG dinucleotide"
  misc_feature (61)..(61): /note="Nucleotide may be methylated to form 5-methylcytosine"
ttctaatacaggactcaagctaaacgttacatcacatgacatgatttctaagggacactacgtcacatttaggtgtcaggtcaggctcttggtgacacaccattgaactagattgcacaagg

SEQ ID NO: 26365 - DNA, 122 bp, Homo sapiens
  misc_feature (61)..(62): /note="This region represents a CpG dinucleotide"
  misc_feature (61)..(61): /note="Nucleotide may be methylated to form 5-methylcytosine"
cacatctagagtgcccctccagcaacaggcttcagctctgaggagcacacacagtgactacgaaaccctgcggaacacgcatctgggtagcagcagctctaatgactgttgggctcctctcc

SEQ ID NO: 26366 - DNA, 122 bp, Homo sapiens
  misc_feature (61)..(62): /note="This region represents a CpG dinucleotide"
  misc_feature (61)..(61): /note="Nucleotide may be methylated to form 5-methylcytosine"
cccaccctcacccgccctgtttgccaggctcacacagcctttcttggagaggccctctggcggggagtttactctcaaaggctctatatctagctgacctgggattgccacccagctccgcc

SEQ ID NO: 26367 - DNA, 122 bp, Homo sapiens
  misc_feature (61)..(62): /note="This region represents a CpG dinucleotide"
  misc_feature (61)..(61): /note="Nucleotide may be methylated to form 5-methylcytosine"
aaaggaaatgtaaagaatgcagagaataaagatttcaattgttggtaataacagataccacgaagtgggaaaccactgtaagtataataccaactttcattggtaaaaaggcattttgagct

SEQ ID NO: 26368 - DNA, 122 bp, Homo sapiens
  misc_feature (61)..(62): /note="This region represents a CpG dinucleotide"
  misc_feature (61)..(61): /note="Nucleotide may be methylated to form 5-methylcytosine"
ggctttaaaacttaaattagtttcccatgaataaaaccaatcaatcattttaaagaccttcggcattcaacatttcatgctgcctgtccagcctcatttctgcaactccctcaaacataccc

SEQ ID NO: 26369 - DNA, 122 bp, Homo sapiens
  misc_feature (61)..(62): /note="This region represents a CpG dinucleotide"
  misc_feature (61)..(61): /note="Nucleotide may be methylated to form 5-methylcytosine"
taaatagcaactgtagtcagagggagagaggcccagggaggaacaataatctaactaagacgcttgacattggaaactcctggagggcagggcagagatcatgcaggagatttaacagcacc

SEQ ID NO: 26370 - DNA, 122 bp, Homo sapiens
  misc_feature (61)..(62): /note="This region represents a CpG dinucleotide"
  misc_feature (61)..(61): /note="Nucleotide may be methylated to form 5-methylcytosine"
ggagtcgaggagcgtttttgtcattcataagccatggtgacaaatccttgacatcattcgcggttcctatcgatcagctccgtccgcggcaccagaggacaaatagaaatcatttgtctgtc

SEQ ID NO: 26371 - DNA, 122 bp, Homo sapiens
  misc_feature (61)..(62): /note="This region represents a CpG dinucleotide"
  misc_feature (61)..(61): /note="Nucleotide may be methylated to form 5-methylcytosine"
ggcacatggtctggtgcgcacacatactcaacaaatgctttgagcaccaaatgacatcaccggtcagcgaccctcagcttagcacaagtttgtggtcgtggccaggcagtgaatgaaccagg

SEQ ID NO: 26372 - DNA, 122 bp, Homo sapiens
  misc_feature (61)..(62): /note="This region represents a CpG dinucleotide"
  misc_feature (61)..(61): /note="Nucleotide may be methylated to form 5-methylcytosine"
tattgagtccatctctgactcattattagccaacactttgtgtctggctggcagcttttccgtaagtggtaaggtcagcctcatacagtattgcacagcctttcccattccttttgcgtcag

SEQ ID NO: 26373 - DNA, 122 bp, Homo sapiens
  misc_feature (61)..(62): /note="This region represents a CpG dinucleotide"
  misc_feature (61)..(61): /note="Nucleotide may be methylated to form 5-methylcytosine"
tgctgtgctggggagtgtcataaagtcctcgttagctgaaaggcactcaggggttctgaccgtacccctgcatcctctgcagagcttccttgggtcttcctgactctgcagaagttactcag

SEQ ID NO: 26374 - DNA, 122 bp, Homo sapiens
  misc_feature (61)..(62): /note="This region represents a CpG dinucleotide"
  misc_feature (61)..(61): /note="Nucleotide may be methylated to form 5-methylcytosine"
ctactattattttcaaacaaacaacaaagtttttctgaataaccaaattacaatactacacgttgaatatcccttatccaaaatgcttgggatcagaagtttcaaattttagattttagaat

SEQ ID NO: 26375 - DNA, 122 bp, Homo sapiens
  misc_feature (61)..(62): /note="This region represents a CpG dinucleotide"
  misc_feature (61)..(61): /note="Nucleotide may be methylated to form 5-methylcytosine"
tggcaacatactaagcaaagaggggggcttaggaaaaggtagccggggggactctggccacgccctacccactggacagggactcactgggccgccagcttaatgaacttcctgagcagctg

SEQ ID NO: 26376 - DNA, 122 bp, Homo sapiens
  misc_feature (61)..(62): /note="This region represents a CpG dinucleotide"
  misc_feature (61)..(61): /note="Nucleotide may be methylated to form 5-methylcytosine"
caacctgcagaacccccaggaggcagggattctacatcaaactggccttcccagtggccacgaaggtatacttgtcaagatcagctgataggacatattgtacttaattgtttgttagcttg

SEQ ID NO: 26377 - DNA, 122 bp, Homo sapiens
  misc_feature (61)..(62): /note="This region represents a CpG dinucleotide"
  misc_feature (61)..(61): /note="Nucleotide may be methylated to form 5-methylcytosine"
gacaaaagctctgggcaaatagaagggttatgcaactatctgagctatttctctggctgtcgccccaaagaggaacagcccagaaccttatctgcctgccctagctctcccaagctccctga

SEQ ID NO: 26378 - DNA, 122 bp, Homo sapiens
  misc_feature (61)..(62): /note="This region represents a CpG dinucleotide"
  misc_feature (61)..(61): /note="Nucleotide may be methylated to form 5-methylcytosine"
gagtggatgatctgttcctgttgggaggacctgggccatggttgtttgtttctccgtaagcgccttcaattactgttccactactcatcaagcacataagttactcattgagaacctctgat

SEQ ID NO: 26379 - DNA, 122 bp, Homo sapiens
  misc_feature (61)..(62): /note="This region represents a CpG dinucleotide"
  misc_feature (61)..(61): /note="Nucleotide may be methylated to form 5-methylcytosine"
aaaagaaaaaaagagagagagggcagaaggatgcttcaaagatgagggggtgtctggtaacgatgataatgatagcatgattcagggcactgtgcaaccaatctggagaagggtggtagggg

SEQ ID NO: 26380 - DNA, 122 bp, Homo sapiens
  misc_feature (61)..(62): /note="This region represents a CpG dinucleotide"
  misc_feature (61)..(61): /note="Nucleotide may be methylated to form 5-methylcytosine"
cagagcataataaatgctatgaaggaaagaaagtggggtaaagggaaagagggtgacttacggaggcacgagaagaagggcctctctggagaggtgacatttgaatgaattgaaggagccag

SEQ ID NO: 26381 - DNA, 122 bp, Homo sapiens
  misc_feature (61)..(62): /note="This region represents a CpG dinucleotide"
  misc_feature (61)..(61): /note="Nucleotide may be methylated to form 5-methylcytosine"
ggatttctgggcgggagtgggattaggccttgtggggaagatacaaggagtcagtgagggcgatgacttcatacagagcacacagcatgagtgagtatgaggcatgtttgagtcacagcaag

SEQ ID NO: 26382 - DNA, 122 bp, Homo sapiens
  misc_feature (61)..(62): /note="This region represents a CpG dinucleotide"
  misc_feature (61)..(61): /note="Nucleotide may be methylated to form 5-methylcytosine"
ggggtgggatccaggcttggtgatgtgcacaatttcttttgtccacttgacacatctctgcgtcctgattctgctcagggacggacccaagaacaaagcagccatttaccgcctccggaggg

SEQ ID NO: 26383 - DNA, 122 bp, Homo sapiens
  misc_feature (61)..(62): /note="This region represents a CpG dinucleotide"
  misc_feature (61)..(61): /note="Nucleotide may be methylated to form 5-methylcytosine"
tgttcttttgccaccacaggtattaaagcaccacatggtgacaagtgaatcacaaacacacgcgtacaggcacacccaagcacacagtgcctagaaacagctttttgttgtaaagtgtccac

SEQ ID NO: 26384 - DNA, 122 bp, Homo sapiens
  misc_feature (61)..(62): /note="This region represents a CpG dinucleotide"
  misc_feature (61)..(61): /note="Nucleotide may be methylated to form 5-methylcytosine"
aatatgtgagcatacacaacattatagatgattctcacaaacaatgttgagtagaaaaagcgaggtccaaggaataaagttcatattaagttccaaaacaggccaaattaacctatgctgtc

SEQ ID NO: 26385 - DNA, 122 bp, Homo sapiens
  misc_feature (61)..(62): /note="This region represents a CpG dinucleotide"
  misc_feature (61)..(61): /note="Nucleotide may be methylated to form 5-methylcytosine"
ctcattcttcaagcagggttttaactattagtacaaaagcaatactatctttttactaatcgccaaattgattagttagcaaatcacctcatcttccaatgaggtgaccctgtgtacccaca

SEQ ID NO: 26386 - DNA, 122 bp, Homo sapiens
  misc_feature (61)..(62): /note="This region represents a CpG dinucleotide"
  misc_feature (61)..(61): /note="Nucleotide may be methylated to form 5-methylcytosine"
atgaggatcaaatggtaagttctcagtaattttcctacctcaagagtcaacctgaagtttcgcaacaaaagtgaaagagtcaagattctctgatataattctggcagtaaataaagacttag

SEQ ID NO: 26387 - DNA, 122 bp, Homo sapiens
  misc_feature (61)..(62): /note="This region represents a CpG dinucleotide"
  misc_feature (61)..(61): /note="Nucleotide may be methylated to form 5-methylcytosine"
ggccgggctggggtgcgtgtcggggctccagctgcagtagcagatgctttgcggcggaagcggggagtcacgggttgacctggggagggagggacccacatatgagcataggtgggtgaagg

SEQ ID NO: 26388 - DNA, 122 bp, Homo sapiens
  misc_feature (61)..(62): /note="This region represents a CpG dinucleotide"
  misc_feature (61)..(61): /note="Nucleotide may be methylated to form 5-methylcytosine"
caggagatcccctcgtgggcccatgctaccagggttttgggtctgaagcactgagctgtgcggactcccagcagctgctcaggcatgcatggagacacaggagtttttgcatactccagccc

SEQ ID NO: 26389 - DNA, 122 bp, Homo sapiens
  misc_feature (61)..(62): /note="This region represents a CpG dinucleotide"
  misc_feature (61)..(61): /note="Nucleotide may be methylated to form 5-methylcytosine"
tatccacttgttgaccccatggaaagagctatcagcttgctcaggtttcaatctccgacacgtcattttgagttatattggctaccgggagccaaaagtaacaagaaaggaagaaaactggc

SEQ ID NO: 26390 - DNA, 122 bp, Homo sapiens
  misc_feature (61)..(62): /note="This region represents a CpG dinucleotide"
  misc_feature (61)..(61): /note="Nucleotide may be methylated to form 5-methylcytosine"
tcatcctaccagaatgtggcagagccaggattagaacctaggtctgtcccagaggacatccgattctctctgaggcaacctgagatgtaatccagaagcttctctgatggcagagccctgac

SEQ ID NO: 26391 - DNA, 122 bp, Homo sapiens
  misc_feature (61)..(62): /note="This region represents a CpG dinucleotide"
  misc_feature (61)..(61): /note="Nucleotide may be methylated to form 5-methylcytosine"
gtgaactggccccgggagcagccctcagccaatgataactaggactccttagataaactccgcagctttctcaccctttgggcaggaaaaccttgagatatatttggcaccatcacccagag

SEQ ID NO: 26392 - DNA, 122 bp, Homo sapiens
  misc_feature (61)..(62): /note="This region represents a CpG dinucleotide"
  misc_feature (61)..(61): /note="Nucleotide may be methylated to form 5-methylcytosine"
ggcaatccacctgcctcagcctcccaaagtgctaggattataggagtgagccaccgtgcccggcagcaagtattcttaatcaagaggttgagtgcagtggctcatgcctgtaatcccagcac

SEQ ID NO: 26393 - DNA, 122 bp, Homo sapiens
  misc_feature (61)..(62): /note="This region represents a CpG dinucleotide"
  misc_feature (61)..(61): /note="Nucleotide may be methylated to form 5-methylcytosine"
agccatcttctggctatgattgccacgtgtctgaaaatactaacaaggtttctaacaagacgagtcattttcgtgcctttgaactgagtcaggtatagttacctgtgaatgagtaacaccca

SEQ ID NO: 26394 - DNA, 122 bp, Homo sapiens
  misc_feature (61)..(62): /note="This region represents a CpG dinucleotide"
  misc_feature (61)..(61): /note="Nucleotide may be methylated to form 5-methylcytosine"
acagagccaggatcccatcccgttgacacagctgggctccagtgtcccagagatgctaaacgatggtccctcacagccccacggggcttcagagagagccatgtgaatttgaattatgctca

SEQ ID NO: 26395 - DNA, 122 bp, Homo sapiens
  misc_feature (61)..(62): /note="This region represents a CpG dinucleotide"
  misc_feature (61)..(61): /note="Nucleotide may be methylated to form 5-methylcytosine"
agctgggatttacctggcctcgtcactagactaatgggattgtggcacaggtgaacatcccgtcattggagaagaaaggctggattgaaggccaggtgggggaggggtgctaggctgtgggg

SEQ ID NO: 26396 - DNA, 122 bp, Homo sapiens
  misc_feature (61)..(62): /note="This region represents a CpG dinucleotide"
  misc_feature (61)..(61): /note="Nucleotide may be methylated to form 5-methylcytosine"
gcagtgcatagagcacttctccagctctgtttaaatacaccattgacttgttgcctatgacgccatcaagagtgttcctacagacacagccagacagctaagtcaggcagagcccaaaatag

SEQ ID NO: 26397 - DNA, 122 bp, Homo sapiens
  misc_feature (61)..(62): /note="This region represents a CpG dinucleotide"
  misc_feature (61)..(61): /note="Nucleotide may be methylated to form 5-methylcytosine"
tttattataagcgccccgagggctgtgtccacatctccttaatgttctggaagcttcgcccgctctccgcagaccagtgcagggcggtacatattgattggtgcgggcgtgcttgttctatt

SEQ ID NO: 26398 - DNA, 122 bp, Homo sapiens
  misc_feature (61)..(62): /note="This region represents a CpG dinucleotide"
  misc_feature (61)..(61): /note="Nucleotide may be methylated to form 5-methylcytosine"
aacactggcagcacctattgaggccatgtttcaggatcagaccatgctggtttgagcagacgcagcaagagtgagaaccccggccgaattttcatgggtggctctagtagagctgctggtga

SEQ ID NO: 26399 - DNA, 122 bp, Homo sapiens
  misc_feature (61)..(62): /note="This region represents a CpG dinucleotide"
  misc_feature (61)..(61): /note="Nucleotide may be methylated to form 5-methylcytosine"
tgcatgcctggacttacgtaattctcacagtgatcgtgagacttggtaacatcatcatcccgtcttccagatgagaaaccagacagggcgaagggtgtgcctgaggttgccccactaggagg

SEQ ID NO: 26400 - DNA, 122 bp, Homo sapiens
  misc_feature (61)..(62): /note="This region represents a CpG dinucleotide"
  misc_feature (61)..(61): /note="Nucleotide may be methylated to form 5-methylcytosine"
gttgaagtggtgcaaatccaaactgctttcttttttgctcataagtagtgcttttcaaagcgtttggcatccctgccatatggatgtgtcactgtgtgagatgacaacaggatttgctggaa

SEQ ID NO: 26401 - DNA, 122 bp, Homo sapiens
  misc_feature (61)..(62): /note="This region represents a CpG dinucleotide"
  misc_feature (61)..(61): /note="Nucleotide may be methylated to form 5-methylcytosine"
gctatttggcgacggtggaattttcccgggacaggcccctccctcctgggctgggattctcggttcttccccctcctcccagagctgggctaccccgggagctgagggtcagatgtggaagg

SEQ ID NO: 26402 - DNA, 122 bp, Homo sapiens
  misc_feature (61)..(62): /note="This region represents a CpG dinucleotide"
  misc_feature (61)..(61): /note="Nucleotide may be methylated to form 5-methylcytosine"
gctttggcaccgaaacccttcccaagtttctgactttctgtattctgcaactgatgagaacgcaatggtcacatcaggtggagttctcagtcaggtcctcagagtgagccaggtatgagggt

SEQ ID NO: 26403 - DNA, 122 bp, Homo sapiens
  misc_feature (61)..(62): /note="This region represents a CpG dinucleotide"
  misc_feature (61)..(61): /note="Nucleotide may be methylated to form 5-methylcytosine"
tctgcttctctgcatctctgctgatcccaccttaatgcaagctggtttgatcttgagctgcgttatgtcatgagacagtgatgtggaacctgcaacctttcatgttgctcttaaagtccaac

SEQ ID NO: 26404 - DNA, 122 bp, Homo sapiens
  misc_feature (61)..(62): /note="This region represents a CpG dinucleotide"
  misc_feature (61)..(61): /note="Nucleotide may be methylated to form 5-methylcytosine"
tgaccttgtgatccgcccaccttgacctcctaaagtgctgggattacaggtgtgagccaccgtgcccagccataagtgctttttttatgctgcctctctgtgtagcacagagataaagacac

SEQ ID NO: 26405 - DNA, 122 bp, Homo sapiens
  misc_feature (61)..(62): /note="This region represents a CpG dinucleotide"
  misc_feature (61)..(61): /note="Nucleotide may be methylated to form 5-methylcytosine"
agtaaataatcttgggtttccttgtgtctctccagcgtcccatcttgtagcccagtattacgtgaggcacttaatcaaagcataaaagcaattataaaacgcccctgaaattacattcatat

SEQ ID NO: 26406 - DNA, 122 bp, Homo sapiens
  misc_feature (61)..(62): /note="This region represents a CpG dinucleotide"
  misc_feature (61)..(61): /note="Nucleotide may be methylated to form 5-methylcytosine"
ctctggtgatctgcctgcctcagcctcccaaagtgctgggattataggtgtgagccactgcgtccggcatgtgtcagatttttaaatggcactttttatgtagcaatataaatttttttaaa

SEQ ID NO: 26407 - DNA, 122 bp, Homo sapiens
  misc_feature (61)..(62): /note="This region represents a CpG dinucleotide"
  misc_feature (61)..(61): /note="Nucleotide may be methylated to form 5-methylcytosine"
agaagcctggaggacagggctggctttggggatagcagcagggcgagattctggacaattcgggggtttggtttggcttggcctacagggtcagtcatgccgcaggctctgggtgcttctgg

SEQ ID NO: 26408 - DNA, 122 bp, Homo sapiens
  misc_feature (61)..(62): /note="This region represents a CpG dinucleotide"
  misc_feature (61)..(61): /note="Nucleotide may be methylated to form 5-methylcytosine"
tagttggcaatgccctgcgcattttccgcactccgatacactttacactgaacaccaattcggaagttgtgtggaccgtgctccagattggaaggcctgccactgtgctggtgtcatttctc

SEQ ID NO: 26409 - DNA, 122 bp, Homo sapiens
  misc_feature (61)..(62): /note="This region represents a CpG dinucleotide"
  misc_feature (61)..(61): /note="Nucleotide may be methylated to form 5-methylcytosine"
aacccttccagccgtgatgactgtgcctcagcctgccctttgtcctcgcagctgctgtcacgcgtgtgacacaagagaacactgatgcagccctggccatcaatgggcatcaagccaggcac

SEQ ID NO: 26410 - DNA, 122 bp, Homo sapiens
  misc_feature (61)..(62): /note="This region represents a CpG dinucleotide"
  misc_feature (61)..(61): /note="Nucleotide may be methylated to form 5-methylcytosine"
caaaggagtaacaccacagcattgttcaggaaaggcaattatacagggacccaaaaaatgcgggcctagcaattagctcttgagcttgccccagaggtaaaatttggagtgaatggattgca

SEQ ID NO: 26411 - DNA, 122 bp, Homo sapiens
  misc_feature (61)..(62): /note="This region represents a CpG dinucleotide"
  misc_feature (61)..(61): /note="Nucleotide may be methylated to form 5-methylcytosine"
agtcttggggaaaaaaagaaactgcacttgatgagatctgcagctttgcagctttttgtccgaggacacccacaatccacatggtgtgggcagcagaagccacagacttactggctagaggt

SEQ ID NO: 26412 - DNA, 122 bp, Homo sapiens
  misc_feature (61)..(62): /note="This region represents a CpG dinucleotide"
  misc_feature (61)..(61): /note="Nucleotide may be methylated to form 5-methylcytosine"
gaatgaaacatcacacgcatttaacataggttaatcatgcagagagtattttgtaaactgcgaagtgcaggactttcgggaagcttattgtagcgcgtctaggtcggagtaacagtcccaaa

SEQ ID NO: 26413 - DNA, 122 bp, Homo sapiens
  misc_feature (61)..(62): /note="This region represents a CpG dinucleotide"
  misc_feature (61)..(61): /note="Nucleotide may be methylated to form 5-methylcytosine"
cccccaacttcgaataagggagctgaatggagggcaggaaccatctcccatgttgttatacggagggacattactcattattatgaggcttaaggaaaggaaccatctcccatgttgttata

SEQ ID NO: 26414 - DNA, 122 bp, Homo sapiens
  misc_feature (61)..(62): /note="This region represents a CpG dinucleotide"
  misc_feature (61)..(61): /note="Nucleotide may be methylated to form 5-methylcytosine"
ggtgattcagacaacagtaatgcagtgatccagggcccagggcaagctggctgtaaggaacgggtgcggggcctcacaggtgctgccggcctggacagggaagacaagggcctgggatcagc

SEQ ID NO: 26415 - DNA, 122 bp, Homo sapiens
  misc_feature (61)..(62): /note="This region represents a CpG dinucleotide"
  misc_feature (61)..(61): /note="Nucleotide may be methylated to form 5-methylcytosine"
aggaactgggttaaagatggcctctgctgaacacatatgtcaaaatcagctaagctaaaccgaatagggcccagttaacctcaacgatgttcaccacaacagagcaggctggaagattcccc

SEQ ID NO: 26416 - DNA, 122 bp, Homo sapiens
  misc_feature (61)..(62): /note="This region represents a CpG dinucleotide"
  misc_feature (61)..(61): /note="Nucleotide may be methylated to form 5-methylcytosine"
tgccccttgacagggtgtcagaatcgattgtactaagtcacgcacctttggcagttcaaccgtgttcctaatagttaaaaccataacccattcgggaggtgtccacaccgtcccttcccatc

SEQ ID NO: 26417 - DNA, 122 bp, Homo sapiens
  misc_feature (61)..(62): /note="This region represents a CpG dinucleotide"
  misc_feature (61)..(61): /note="Nucleotide may be methylated to form 5-methylcytosine"
cctcggaaacctggagacttgccatgctaaaaaagtttgtgggagccagcaaaatctgctcgactacccctgaggtgaggtttttcaaagggaacgctatctaaagcaaatctttcatttct

SEQ ID NO: 26418 - DNA, 122 bp, Homo sapiens
  misc_feature (61)..(62): /note="This region represents a CpG dinucleotide"
  misc_feature (61)..(61): /note="Nucleotide may be methylated to form 5-methylcytosine"
atagttgcagaaacttctaaacaggccagttctcagaaacttcattctcctatggaggaacgtcagctggtttgcagtgacagttgtcacagactacacccaggggaaaacgtgtcacacca

SEQ ID NO: 26419 - DNA, 122 bp, Homo sapiens
  misc_feature (61)..(62): /note="This region represents a CpG dinucleotide"
  misc_feature (61)..(61): /note="Nucleotide may be methylated to form 5-methylcytosine"
gtcagcgttgagtaaggcagggagggaggctgctgggcactgtcatgacgctgagagactcgtcacttagccatgaggacgtctcgcttctactgaggctgtggctctgctgaaagccacat

SEQ ID NO: 26420 - DNA, 122 bp, Homo sapiens
  misc_feature (61)..(62): /note="This region represents a CpG dinucleotide"
  misc_feature (61)..(61): /note="Nucleotide may be methylated to form 5-methylcytosine"
ctttgaatgagagtccttatggctattgtcttgtctctgttccaccactgaatactggtacgtagaaggaaggtaacttgacttttcagatcagcagttgacaaactattggccactggcca

SEQ ID NO: 26421 - DNA, 122 bp, Homo sapiens
  misc_feature (61)..(62): /note="This region represents a CpG dinucleotide"
  misc_feature (61)..(61): /note="Nucleotide may be methylated to form 5-methylcytosine"
gatgaaaaagcaggaggtgtttgggcagctacaggtgattcagtatggccgtggggggtgcgttgggtgggcagtgctgagagataaagccgcagggacatgtgggggccagattccaggaa

SEQ ID NO: 26422 - DNA, 122 bp, Homo sapiens
  misc_feature (61)..(62): /note="This region represents a CpG dinucleotide"
  misc_feature (61)..(61): /note="Nucleotide may be methylated to form 5-methylcytosine"
acatgtagatggcgtagtataactacaagccaactgccaactatgatctcagcaagatgacgacacctaacacatcactaattctgatttgaacaaaccatggtaaaacattacatcctgca

SEQ ID NO: 26423 - DNA, 122 bp, Homo sapiens
  misc_feature (61)..(62): /note="This region represents a CpG dinucleotide"
  misc_feature (61)..(61): /note="Nucleotide may be methylated to form 5-methylcytosine"
cccgcctcagcctcccaaaatgatgggattacaggcatgagccactgcgcccagcctaaccgagtcattattaaaaattaaattataggctgggcaaggtggctcacgcccgtaatcccagt

SEQ ID NO: 26424 - DNA, 122 bp, Homo sapiens
  misc_feature (61)..(62): /note="This region represents a CpG dinucleotide"
  misc_feature (61)..(61): /note="Nucleotide may be methylated to form 5-methylcytosine"
ccctaaaaacaaaaacaacaacaacaaaactctgctaccagatggtgtctctcctttcttcgtgcatttgctgtcttttaaataatgtatgttgtattgttaattaatgtgaatatcaaatt

SEQ ID NO: 26425 - DNA, 122 bp, Homo sapiens
  misc_feature (61)..(62): /note="This region represents a CpG dinucleotide"
  misc_feature (61)..(61): /note="Nucleotide may be methylated to form 5-methylcytosine"
tttgagggaaaacattgctcatttgggtatctgatttgtggtgtgttaaaacaagtttcacgtcttatagcagtccctgaatgaaaacatcataagatggtatctagaatggtgtgagaaaa

SEQ ID NO: 26426 - DNA, 122 bp, Homo sapiens
  misc_feature (61)..(62): /note="This region represents a CpG dinucleotide"
  misc_feature (61)..(61): /note="Nucleotide may be methylated to form 5-methylcytosine"
ataggtccctctctgcctccgcgtgtggatttgtgactcaacggcttatcaagggctacgcggcagcgcggcttagtaacattaaaagattccagcactgccctgtgttccgcctccggtcc

SEQ ID NO: 26427 - DNA, 122 bp, Homo sapiens
  misc_feature (61)..(62): /note="This region represents a CpG dinucleotide"
  misc_feature (61)..(61): /note="Nucleotide may be methylated to form 5-methylcytosine"
tgcagaggaggctaacatggtttcgaggagatacttaggagctggtcacaatgggtgagtcgtaaagagaatgttggagctgggggatcctggagaaagatgataagatggttgattcacag

SEQ ID NO: 26428 - DNA, 122 bp, Homo sapiens
  misc_feature (61)..(62): /note="This region represents a CpG dinucleotide"
  misc_feature (61)..(61): /note="Nucleotide may be methylated to form 5-methylcytosine"
ctgcccattcaggatatgaaggggcagatggtggttggcatgtgttttccctgccagtgccgtcctaaatcagttccagctagtgaccatttgtgccagtggtgccacaggcacggggaaga

SEQ ID NO: 26429 - DNA, 122 bp, Homo sapiens
  misc_feature (61)..(62): /note="This region represents a CpG dinucleotide"
  misc_feature (61)..(61): /note="Nucleotide may be methylated to form 5-methylcytosine"
gtgtgactcaggggtgagctggcatgcgtgatgaaggcggctcaagccccagacaagcagcgtgggttccagctcaagctccaggccctgcaggaagagggacaagggtaagagccagatct

SEQ ID NO: 26430 - DNA, 122 bp, Homo sapiens
  misc_feature (61)..(62): /note="This region represents a CpG dinucleotide"
  misc_feature (61)..(61): /note="Nucleotide may be methylated to form 5-methylcytosine"
ttctgctcggggtggggttgagagcaactccgcccagggggcctgatgactgctttgctgcgtgtgcctggggagggaggcgctgccctgcagcctcagcttggggtgagatgacacttcca

SEQ ID NO: 26431 - DNA, 122 bp, Homo sapiens
  misc_feature (61)..(62): /note="This region represents a CpG dinucleotide"
  misc_feature (61)..(61): /note="Nucleotide may be methylated to form 5-methylcytosine"
acaaagctaagatgaggaagttctgtacagtttaggaaatagaggctttcaaagataattcgcagtgatgtgaaactggcctcccaagccctgataagtaagttaaataagagtaggagcca

SEQ ID NO: 26432 - DNA, 122 bp, Homo sapiens
  misc_feature (61)..(62): /note="This region represents a CpG dinucleotide"
  misc_feature (61)..(61): /note="Nucleotide may be methylated to form 5-methylcytosine"
gaaagaaagaagaaaggaaaagaaaagaaagaaagatgacagcagggtctaacaagttcacgtgccacctggaggcagtggtagtcatccatgccttctcggtgaggcactgtacgccagag

SEQ ID NO: 26433 - DNA, 122 bp, Homo sapiens
  misc_feature (61)..(62): /note="This region represents a CpG dinucleotide"
  misc_feature (61)..(61): /note="Nucleotide may be methylated to form 5-methylcytosine"
tgtaccccttacttacctggtggcatctgagttccacttgccatctctttctacaaatgacgagaaagcacagcaagcctagctggctctgcagctttccatgggaactttgtcttcctcca

SEQ ID NO: 26434 - DNA, 122 bp, Homo sapiens
  misc_feature (61)..(62): /note="This region represents a CpG dinucleotide"
  misc_feature (61)..(61): /note="Nucleotide may be methylated to form 5-methylcytosine"
gctagagtgggctcaggtcccaggcacccagggcttaagccttgatgttggagaggttctcggagggaggcttgggccacctggagggactgggcactctgagtagtaccctctgggaggct

SEQ ID NO: 26435 - DNA, 122 bp, Homo sapiens
  misc_feature (61)..(62): /note="This region represents a CpG dinucleotide"
  misc_feature (61)..(61): /note="Nucleotide may be methylated to form 5-methylcytosine"
tctttggtgtttcttggcttataggagcatcatcctgatctctgcctcatctttgtatagcgttttccctgtttgcatgtttgttaccaaatttcccctttaataaggacctcagttgtatg

SEQ ID NO: 26436 - DNA, 122 bp, Homo sapiens
  misc_feature (61)..(62): /note="This region represents a CpG dinucleotide"
  misc_feature (61)..(61): /note="Nucleotide may be methylated to form 5-methylcytosine"
aatcaccatctaagtcatcccacagaactaaccctaaaaataagcatctaccttgcttctcgcaatatcttggaacactaatttttcaacacttcctccgtggttatccatgaggaggctca

SEQ ID NO: 26437 - DNA, 122 bp, Homo sapiens
  misc_feature (61)..(62): /note="This region represents a CpG dinucleotide"
  misc_feature (61)..(61): /note="Nucleotide may be methylated to form 5-methylcytosine"
ctctgatgacaaggcagctgggtgaggctgggtgccacgtgggttggtgagccgacctcacgccttgttgcagaatgccttctggttctgcctggcatggtgcaccttcttcctgatcccca

SEQ ID NO: 26438 - DNA, 122 bp, Homo sapiens
  misc_feature (61)..(62): /note="This region represents a CpG dinucleotide"
  misc_feature (61)..(61): /note="Nucleotide may be methylated to form 5-methylcytosine"
gctctgtgtactccacactgcacgtagtggtgtctgtaaccccggggtttgtgaatggcacgtcccattttaaaacttaaaatgaactgccgattctgtgcatgttgtatagcttgtttttg

SEQ ID NO: 26439 - DNA, 122 bp, Homo sapiens
  misc_feature (61)..(62): /note="This region represents a CpG dinucleotide"
  misc_feature (61)..(61): /note="Nucleotide may be methylated to form 5-methylcytosine"
gtgatgagagatagattgggaattaatagcaaatcaggaaagaagcaattaagtaaatgacgagaattgaggctggttagagtaggtctgagaagcagagtagatacttttctcattttaat

SEQ ID NO: 26440 - DNA, 122 bp, Homo sapiens
  misc_feature (61)..(62): /note="This region represents a CpG dinucleotide"
  misc_feature (61)..(61): /note="Nucleotide may be methylated to form 5-methylcytosine"
tgtgtggcagggctggctttcagggatgtggccccacccttggttgcccagtttggcccccgccgcctcccccttctcccctggccaccccctttccccacctcggctcccctacacctggc

SEQ ID NO: 26441 - DNA, 122 bp, Homo sapiens
  misc_feature (61)..(62): /note="This region represents a CpG dinucleotide"
  misc_feature (61)..(61): /note="Nucleotide may be methylated to form 5-methylcytosine"
tcctttatgtgagacacaaagttctgttctgtttgagcaactattttattatgtgatttgcggatgaaccaagccctaagtaatacaggtactgaactggaaataatagtatttggattcta

SEQ ID NO: 26442 - DNA, 122 bp, Homo sapiens
  misc_feature (61)..(62): /note="This region represents a CpG dinucleotide"
  misc_feature (61)..(61): /note="Nucleotide may be methylated to form 5-methylcytosine"
tgcagctgtatccaagaaagccagcccagaggctgccagcactcccagggaccctattgacgttgacctggtgagatgggtttgaggtctgaaggggtggtggtggggcccagcaggtcagg

SEQ ID NO: 26443 - DNA, 122 bp, Homo sapiens
  misc_feature (61)..(62): /note="This region represents a CpG dinucleotide"
  misc_feature (61)..(61): /note="Nucleotide may be methylated to form 5-methylcytosine"
taacttagaggaatctaggggatcatatacttcaaccttctcattttccactagtgaaaacggagaaccaaagtggtaatttttgtccatgcttaaggtcacagaggtagaggttgcccaaa

SEQ ID NO: 26444 - DNA, 122 bp, Homo sapiens
  misc_feature (61)..(62): /note="This region represents a CpG dinucleotide"
  misc_feature (61)..(61): /note="Nucleotide may be methylated to form 5-methylcytosine"
ggctctggagtcagagtgcctaagttccagtactggctttgccacctattagctcatgaccgtgtacaatttatttaatttcactgagacacaatttcctcatccttgaaatggggctaaga

SEQ ID NO: 26445 - DNA, 122 bp, Homo sapiens
  misc_feature (61)..(62): /note="This region represents a CpG dinucleotide"
  misc_feature (61)..(61): /note="Nucleotide may be methylated to form 5-methylcytosine"
agtgaaattattttaaagggcaactttgctactgtaaatggaaaaaaccgtgtttcttggcgtaagtagaagctaattataaaatataaagacagactccaaagaaaaagaagatatgtgta

SEQ ID NO: 26446 - DNA, 122 bp, Homo sapiens
  misc_feature (61)..(62): /note="This region represents a CpG dinucleotide"
  misc_feature (61)..(61): /note="Nucleotide may be methylated to form 5-methylcytosine"
gcttccacctcctgggaaggaggcccagctgagagcctgccggaagccacagcttcctctcgcactttcgccaggcaggcagcaggtgtgggcctggccccggctgggctgggccggaacct

SEQ ID NO: 26447 - DNA, 122 bp, Homo sapiens
  misc_feature (61)..(62): /note="This region represents a CpG dinucleotide"
  misc_feature (61)..(61): /note="Nucleotide may be methylated to form 5-methylcytosine"
ctcagaagaaatcatgcgacacatgactgtgtttctcattcctagaaaggaggcacatgacgagatgattatatcatacagcctaggtgtgttgtaggctataccatctaggtttgtgtaag

SEQ ID NO: 26448 - DNA, 122 bp, Homo sapiens
  misc_feature (61)..(62): /note="This region represents a CpG dinucleotide"
  misc_feature (61)..(61): /note="Nucleotide may be methylated to form 5-methylcytosine"
aatgacagccaagtcttccagtccaggaattaccaggagccttatcagaaccagaaattgcgtctttagacaacgtttatagcctcatagaagataccaggcttcactttgtcaagctctac

SEQ ID NO: 26449 - DNA, 122 bp, Homo sapiens
  misc_feature (61)..(62): /note="This region represents a CpG dinucleotide"
  misc_feature (61)..(61): /note="Nucleotide may be methylated to form 5-methylcytosine"
tgtgggtcttgacagatcccggtacttctgtacactggggctgtagaatgtgagcagttgcgcaagactcaggatggagtgtgttgtctcggccgggctgagacaaacatgtctgtgatcta

SEQ ID NO: 26450 - DNA, 122 bp, Homo sapiens
  misc_feature (61)..(62): /note="This region represents a CpG dinucleotide"
  misc_feature (61)..(61): /note="Nucleotide may be methylated to form 5-methylcytosine"
caaacagcatcatgcaatactgacttgtcaagtacaactggaggtgagaaaacagagcagcgtatggcaaaatagtctaagaacaagtagtaaaagcatcagcatcaaaaactccaggctat

SEQ ID NO: 26451 - DNA, 122 bp, Homo sapiens
  misc_feature (61)..(62): /note="This region represents a CpG dinucleotide"
  misc_feature (61)..(61): /note="Nucleotide may be methylated to form 5-methylcytosine"
agccctcggcctcggcttttatgctagggaggtcctcccaccctgctcctcagtgactcacggcttctccctctcaccccgcccccactcgggattgcacaaagcctgggaaagtgggaagg

SEQ ID NO: 26452 - DNA, 122 bp, Homo sapiens
  misc_feature (61)..(62): /note="This region represents a CpG dinucleotide"
  misc_feature (61)..(61): /note="Nucleotide may be methylated to form 5-methylcytosine"
ctgacacaattgatgcattttatcatgtactttcatcaaatgctcactgctcctttcttacgtcatgcaattcagcttgagcctggaacaccactgctcaataaaatgggaaaagtctcaat

SEQ ID NO: 26453 - DNA, 122 bp, Homo sapiens
  misc_feature (61)..(62): /note="This region represents a CpG dinucleotide"
  misc_feature (61)..(61): /note="Nucleotide may be methylated to form 5-methylcytosine"
ctcttgggctccttctacagggcttattcccaaacgctggagtgctgggtcaaagggctccggaggttttattggtctcaggaaattctgagaccgtgctgacttgtacgcttttagagagt

SEQ ID NO: 26454 - DNA, 122 bp, Homo sapiens
  misc_feature (61)..(62): /note="This region represents a CpG dinucleotide"
  misc_feature (61)..(61): /note="Nucleotide may be methylated to form 5-methylcytosine"
gttcatgagctcatggggcttatagtcgagggaaggaagtagatattaggcacatgattacggaaatacaggtaactgtgtaattatgttttggggtaagtgctatgaaagaacagtgaaga

SEQ ID NO: 26455 - DNA, 122 bp, Homo sapiens
  misc_feature (61)..(62): /note="This region represents a CpG dinucleotide"
  misc_feature (61)..(61): /note="Nucleotide may be methylated to form 5-methylcytosine"
tgcttccaagtcagagactcttcaccaagccttttttctccttggagaccaatggagcagcgttaatctggcacagatgagcactcccataatgctcaacatctctttccaagagtggagag

SEQ ID NO: 26456 - DNA, 122 bp, Homo sapiens
  misc_feature (61)..(62): /note="This region represents a CpG dinucleotide"
  misc_feature (61)..(61): /note="Nucleotide may be methylated to form 5-methylcytosine"
tcagctccacctttactgacgtccctgcccccagccttccctcccagccacagcttggcccgtcccatccagctgtcagtgtggccagtgcagccagtcgagccacagcctcagtgttttcc

SEQ ID NO: 26457 - DNA, 122 bp, Homo sapiens
  misc_feature (61)..(62): /note="This region represents a CpG dinucleotide"
  misc_feature (61)..(61): /note="Nucleotide may be methylated to form 5-methylcytosine"
ggtccagggacgttaagcaacgtcgccaggaaactgtgagttcagctccctttgcattcacgttgccagattgagcaagtcaatcttcaagatgcctagttaagtttgaatttcagataaag

SEQ ID NO: 26458 - DNA, 122 bp, Homo sapiens
  misc_feature (61)..(62): /note="This region represents a CpG dinucleotide"
  misc_feature (61)..(61): /note="Nucleotide may be methylated to form 5-methylcytosine"
cgagggcgggaaccgcttggcggcgcggggcagggcggggctgactggggtggggcggggcgaggagggacggggcggggcgaggcgagccgcgcggccagggggcggtggcggttgtgcgg

SEQ ID NO: 26459 - DNA, 122 bp, Homo sapiens
  misc_feature (61)..(62): /note="This region represents a CpG dinucleotide"
  misc_feature (61)..(61): /note="Nucleotide may be methylated to form 5-methylcytosine"
actgaacatcttttcatatgtttaacgcccttttttacctttttttgtggactgtctattcgtatttttgtctatattcaaataatttttagtaatatcttcctcctctttgtatttttttg

SEQ ID NO: 26460 - DNA, 122 bp, Homo sapiens
  misc_feature (61)..(62): /note="This region represents a CpG dinucleotide"
  misc_feature (61)..(61): /note="Nucleotide may be methylated to form 5-methylcytosine"
atttggcattatccagcctctattcaagatggaatcactctggttagcatgcatctgacacgttgttttaacataacaacaaggaaagacacactgaagagggtagggaagacaatttggca

SEQ ID NO: 26461 - DNA, 122 bp, Homo sapiens
  misc_feature (61)..(62): /note="This region represents a CpG dinucleotide"
  misc_feature (61)..(61): /note="Nucleotide may be methylated to form 5-methylcytosine"
cataccactagagacagatagagggcaagacaactggtgtgtttgaatatttgcttgcaacgcttctgaatgtcacaatttgtaatacaaaagctgaaagtatcactaaatttgccccacat

SEQ ID NO: 26462 - DNA, 122 bp, Homo sapiens
  misc_feature (61)..(62): /note="This region represents a CpG dinucleotide"
  misc_feature (61)..(61): /note="Nucleotide may be methylated to form 5-methylcytosine"
tctcatgaatgatttaggaccaacctttggtgctgcactcctgatagtgatgacagtgagcgccttctctcaagatctgggcatttaaaagtgtgtggcacctcctcccaactctctcctgc

SEQ ID NO: 26463 - DNA, 122 bp, Homo sapiens
  misc_feature (61)..(62): /note="This region represents a CpG dinucleotide"
  misc_feature (61)..(61): /note="Nucleotide may be methylated to form 5-methylcytosine"
acaaaggggccctgtgtgagctcggtgtgggaacgcggggccccgccacgggcgtgaaatcggcagcggcccctggcgagggccaggcggtgcgggcgccccggcaggcacagtgaggctgg

SEQ ID NO: 26464 - DNA, 122 bp, Homo sapiens
  misc_feature (61)..(62): /note="This region represents a CpG dinucleotide"
  misc_feature (61)..(61): /note="Nucleotide may be methylated to form 5-methylcytosine"
caactaagaattctaaaaatcacttcactttcatgaaaatgaaaaggctacatatggaggcggagtcaactcaaaaagggaagtcattgaaagagctgaggttccatttcatactcatgttt

SEQ ID NO: 26465 - DNA, 122 bp, Homo sapiens
  misc_feature (61)..(62): /note="This region represents a CpG dinucleotide"
  misc_feature (61)..(61): /note="Nucleotide may be methylated to form 5-methylcytosine"
ttccatttactgagctagtgactctgctgcagctgctttgggtgttggctcctgaaggcccgcaaatgcctctacttctgaggaaattgccctgtgctaataggggagacacctcacccagg

SEQ ID NO: 26466 - DNA, 122 bp, Homo sapiens
  misc_feature (61)..(62): /note="This region represents a CpG dinucleotide"
  misc_feature (61)..(61): /note="Nucleotide may be methylated to form 5-methylcytosine"
tttaatatggagcatttgtcacaatttaaatctggtttgagaaacatccaacttcagaagcggcatatttcaggagtctgtaataagccaaatgactgtagaggtggaaagtgctctcatga

SEQ ID NO: 26467 - DNA, 122 bp, Homo sapiens
  misc_feature (61)..(62): /note="This region represents a CpG dinucleotide"
  misc_feature (61)..(61): /note="Nucleotide may be methylated to form 5-methylcytosine"
gctaactcttgagtataaaaatgtgttcagtgttgaggatcccaatatgagtaatatgtacgccctgtcatcatgatgggaactgacaattgaatagaagaggataagaaacagacaagaaa

SEQ ID NO: 26468 - DNA, 122 bp, Homo sapiens
  misc_feature (61)..(62): /note="This region represents a CpG dinucleotide"
  misc_feature (61)..(61): /note="Nucleotide may be methylated to form 5-methylcytosine"
aatttagcttttggagggggagggagaagataaatcattttgcattttctgtgttctgaacgcatacagtatgctgctgtaagtcttagtattatttaggtcagtatcctaaggatagcttt

SEQ ID NO: 26469 - DNA, 122 bp, Homo sapiens
  misc_feature (61)..(62): /note="This region represents a CpG dinucleotide"
  misc_feature (61)..(61): /note="Nucleotide may be methylated to form 5-methylcytosine"
agtagaaatatctatgcatgagataaagcatcttactgccctgagccctgagcctgccatcgtgtgaatgctccttaaggattaggttcattcactgaatgaacgtttctttgtgtttacta

SEQ ID NO: 26470 - DNA, 122 bp, Homo sapiens
  misc_feature (61)..(62): /note="This region represents a CpG dinucleotide"
  misc_feature (61)..(61): /note="Nucleotide may be methylated to form 5-methylcytosine"
tcctcctgtctcagcctcccaaagtgctagggttccaggcatgagccactgcgccctgcccggagccttatgttaacatgtctattacaggacctgacatgaagaagagacttaataaaagg

SEQ ID NO: 26471 - DNA, 122 bp, Homo sapiens
  misc_feature (61)..(62): /note="This region represents a CpG dinucleotide"
  misc_feature (61)..(61): /note="Nucleotide may be methylated to form 5-methylcytosine"
aaagactttgttgtagcagcagttgttcactcttcaccagtggacacatttccaggccatcgggcatgtgctcacctagattaggagcctgaggtgcccctcccttcctgtgcacagatctt

SEQ ID NO: 26472 - DNA, 122 bp, Homo sapiens
  misc_feature (61)..(62): /note="This region represents a CpG dinucleotide"
  misc_feature (61)..(61): /note="Nucleotide may be methylated to form 5-methylcytosine"
ctcggggttgggggacagccctgcccgctagttgctcacagtccaggagggagacttgcacgtacactcacacagccaatgtagagtattaatgggcaccaggacagaaaagaaaggggagg

SEQ ID NO: 26473 - DNA, 122 bp, Homo sapiens
  misc_feature (61)..(62): /note="This region represents a CpG dinucleotide"
  misc_feature (61)..(61): /note="Nucleotide may be methylated to form 5-methylcytosine"
tacagagcgggctcccaggaaccagccggaaatggccctgcaaggttgctggaacttggccgtgagctgctcaacttcccagctctggggagcctttctggtgggagtggtaggtggttttc

SEQ ID NO: 26474 - DNA, 122 bp, Homo sapiens
  misc_feature (61)..(62): /note="This region represents a CpG dinucleotide"
  misc_feature (61)..(61): /note="Nucleotide may be methylated to form 5-methylcytosine"
gcagcaggtttctgcccataccattgagataacaatcacaggtacttcatacagggtagtcgtgaaggtgaaaacagaatgcttgctctttccagggcgaccctaccaatgagaaaacaggc

SEQ ID NO: 26475 - DNA, 122 bp, Homo sapiens
  misc_feature (61)..(62): /note="This region represents a CpG dinucleotide"
  misc_feature (61)..(61): /note="Nucleotide may be methylated to form 5-methylcytosine"
atcctctagtggagagcaaatgaacaaaaggggaaagagagacgcgatgaattgcacgtgcgctattatatttgcaagcgggttacattgtccttggataagaattttatattccccgtgag

SEQ ID NO: 26476 - DNA, 122 bp, Homo sapiens
  misc_feature (61)..(62): /note="This region represents a CpG dinucleotide"
  misc_feature (61)..(61): /note="Nucleotide may be methylated to form 5-methylcytosine"
agtttagtattaattttggtgctactgtaaagataagaaataaggcaaattttaaatgatcgtgtccatgttcacacagaaagctcatgactgcagactctcaagctcatattgaatgacac

SEQ ID NO: 26477 - DNA, 122 bp, Homo sapiens
  misc_feature (61)..(62): /note="This region represents a CpG dinucleotide"
  misc_feature (61)..(61): /note="Nucleotide may be methylated to form 5-methylcytosine"
tccggtccttcctgggccctgtgccattctcattcccagttctcctgactcacacatggccgctgaaaaagacctcctgtgttgagcgggaaggccttggctgcagctggtccaggtcctgg

SEQ ID NO: 26478 - DNA, 122 bp, Homo sapiens
  misc_feature (61)..(62): /note="This region represents a CpG dinucleotide"
  misc_feature (61)..(61): /note="Nucleotide may be methylated to form 5-methylcytosine"
gggcagctcccgcaggtgaagcctctagcatgtcctttccggtattcagtgcacgttggacggcagagcttactagtcattagggccccagagcctgtgctacctagaaacaagcccgtaaa

SEQ ID NO: 26479 - DNA, 122 bp, Homo sapiens
  misc_feature (61)..(62): /note="This region represents a CpG dinucleotide"
  misc_feature (61)..(61): /note="Nucleotide may be methylated to form 5-methylcytosine"
ctaacatcattatttcagtaacagaaataaaatctggttctttttaaagaaaaggaagcacggggttataaacctaccatctacatattctgtgataataactatgatttataaaatacatc

SEQ ID NO: 26480 - DNA, 122 bp, Homo sapiens
  misc_feature (61)..(62): /note="This region represents a CpG dinucleotide"
  misc_feature (61)..(61): /note="Nucleotide may be methylated to form 5-methylcytosine"
gcctgacattcaaggctagactgagactgcccaacccatttccctaacctacccttgcttcgtatcattctactgcctcccgttcttcttgtcgtatcatcctactgcctcccgttcttctt

SEQ ID NO: 26481 - DNA, 122 bp, Homo sapiens
  misc_feature (61)..(62): /note="This region represents a CpG dinucleotide"
  misc_feature (61)..(61): /note="Nucleotide may be methylated to form 5-methylcytosine"
ttgagtttatgctaatgaggtgactcaaggtagtgcctcagatagttcaggaggaggtctcgtcactggaaagaccaaacacctgattagagggttaagactttcagcctcatacctgacct

SEQ ID NO: 26482 - DNA, 122 bp, Homo sapiens
  misc_feature (61)..(62): /note="This region represents a CpG dinucleotide"
  misc_feature (61)..(61): /note="Nucleotide may be methylated to form 5-methylcytosine"
ctaaatggatcagcatattagcctcctgaaaagatattacactgcttagcctgaaacttccgcctcatagctcaagtatctcacaatgggattcacttaaggcatagggtttcttatagggt

SEQ ID NO: 26483 - DNA, 122 bp, Homo sapiens
  misc_feature (61)..(62): /note="This region represents a CpG dinucleotide"
  misc_feature (61)..(61): /note="Nucleotide may be methylated to form 5-methylcytosine"
gtagtccttaagattataaagaacctgaaaaattcctatcacccaatgatgtcgtaaccacggtaagttgtagtgcactgcattactcacatatttttggtgatgctggagaaaaacaaacc

SEQ ID NO: 26484 - DNA, 122 bp, Homo sapiens
  misc_feature (61)..(62): /note="This region represents a CpG dinucleotide"
  misc_feature (61)..(61): /note="Nucleotide may be methylated to form 5-methylcytosine"
ctgcctggccctagtgaaacaaactgggcaatcagaccctttcataactctttcaaaatacggtagttttgaccaacagctttccagcttaataacgcagttatcattggtactctttagcc

SEQ ID NO: 26485 - DNA, 122 bp, Homo sapiens
  misc_feature (61)..(62): /note="This region represents a CpG dinucleotide"
  misc_feature (61)..(61): /note="Nucleotide may be methylated to form 5-methylcytosine"
tgtgtctgcccgtctctcatggcatattgtaattgtctctatggcaagccaagccaaggacgtgacacatcagagttcttaggccagcccaggagctgagctcataccttttgaaggtccct

SEQ ID NO: 26486 - DNA, 122 bp, Homo sapiens
  misc_feature (61)..(62): /note="This region represents a CpG dinucleotide"
  misc_feature (61)..(61): /note="Nucleotide may be methylated to form 5-methylcytosine"
gtgaggaatgacccctcctgcccctactctgatcccaggaactctgtgcggctggtgatccgaaaggtgcagttcgccccggagaaacccggcccccagccttcagccgaaaccacacgcca

SEQ ID NO: 26487 - DNA, 122 bp, Homo sapiens
  misc_feature (61)..(62): /note="This region represents a CpG dinucleotide"
  misc_feature (61)..(61): /note="Nucleotide may be methylated to form 5-methylcytosine"
taggtggtgagaaggcacctgctttgaaatgctggtgccttgtctgtggtcctgtctgcccgccttctccttggcttcttagacttgctaaaccttgttacactctggcaggaagctctgag

SEQ ID NO: 26488 - DNA, 122 bp, Homo sapiens
  misc_feature (61)..(62): /note="This region represents a CpG dinucleotide"
  misc_feature (61)..(61): /note="Nucleotide may be methylated to form 5-methylcytosine"
gtgggtgtgctccatgggattgaccacacatgaaggcattggtgtggggacgctgtgggtcgacacccgggtgcttgcattgatgagcagactgcgactaatggggctggggttggcgatct

SEQ ID NO: 26489 - DNA, 122 bp, Homo sapiens
  misc_feature (61)..(62): /note="This region represents a CpG dinucleotide"
  misc_feature (61)..(61): /note="Nucleotide may be methylated to form 5-methylcytosine"
tcctagagaaagagaccctttgttcctgggcctgtttcctaaaacaaagtacctcagagccgggaacagactgatgtgattagatagtgacttcctggtattggaaatggtgccagttactg

SEQ ID NO: 26490 - DNA, 122 bp, Homo sapiens
  misc_feature (61)..(62): /note="This region represents a CpG dinucleotide"
  misc_feature (61)..(61): /note="Nucleotide may be methylated to form 5-methylcytosine"
cacatggcactgaagaaacaaagtaaaaaattctcttttaattctgagctgcatgcccagcgccacatgcactgtctgttacatgtcgcttcttatgaggttcatgctgggaagtttctttt

SEQ ID NO: 26491 - DNA, 122 bp, Homo sapiens
  misc_feature (61)..(62): /note="This region represents a CpG dinucleotide"
  misc_feature (61)..(61): /note="Nucleotide may be methylated to form 5-methylcytosine"
aagctatgcgctttggaaaaagaagaggttggtttgaaatgagatttttgtcagtctggccgtccttagtgaaacactgaggctgttctgaagagctgtcagaatctcagttgctggcatcc

SEQ ID NO: 26492 - DNA, 122 bp, Homo sapiens
  misc_feature (61)..(62): /note="This region represents a CpG dinucleotide"
  misc_feature (61)..(61): /note="Nucleotide may be methylated to form 5-methylcytosine"
ttaggtaacatgagtcacagccagtccagattcaatgagggaggtgactgcacaaacacacgagaactgcgaggtgtacctcattgtgagccatctctgcagaacagtcctaacaccttctc

SEQ ID NO: 26493 - DNA, 122 bp, Homo sapiens
  misc_feature (61)..(62): /note="This region represents a CpG dinucleotide"
  misc_feature (61)..(61): /note="Nucleotide may be methylated to form 5-methylcytosine"
cggctcctcctgacctctttcttcttcttggcttcttctaggttgctgagcagtgtcttgcgctcttcgtttgttttttctatgagagtctttatctgtttcaccccgttgacagcattttg

SEQ ID NO: 26494 - DNA, 122 bp, Homo sapiens
  misc_feature (61)..(62): /note="This region represents a CpG dinucleotide"
  misc_feature (61)..(61): /note="Nucleotide may be methylated to form 5-methylcytosine"
tctgtgaattcattgattttgaggttttatttctgtagaacaccagaacaattttccagacgttgtttttctaattgtattactttttctcagattttattactcagataaaggaaactaga

SEQ ID NO: 26495 - DNA, 122 bp, Homo sapiens
  misc_feature (61)..(62): /note="This region represents a CpG dinucleotide"
  misc_feature (61)..(61): /note="Nucleotide may be methylated to form 5-methylcytosine"
gaaatcaaagaactcacgtaatgcatatgaatacacattgatttatttactatacaaattcggagttttatataaagtgctggatttccttaaacagcatgagttgaggaaactcttttaat

SEQ ID NO: 26496 - DNA, 122 bp, Homo sapiens
  misc_feature (61)..(62): /note="This region represents a CpG dinucleotide"
  misc_feature (61)..(61): /note="Nucleotide may be methylated to form 5-methylcytosine"
caaagctctttattggaagttattcacaaatcttcatgatggtttttggacgactagtcacgtgtggtgttgccctatttcaaatgagtcagagaaattgtgctttatatgaattcatgcat

SEQ ID NO: 26497 - DNA, 122 bp, Homo sapiens
  misc_feature (61)..(62): /note="This region represents a CpG dinucleotide"
  misc_feature (61)..(61): /note="Nucleotide may be methylated to form 5-methylcytosine"
tgaaaagtgagaagagcgaactttgcctcctcggccccttctctgtgcctgtggcttatgcgtgtgcccctctcctctttgtcactgcttcccttgccctggatgtggttggtgcactgggg

SEQ ID NO: 26498 - DNA, 122 bp, Homo sapiens
  misc_feature (61)..(62): /note="This region represents a CpG dinucleotide"
  misc_feature (61)..(61): /note="Nucleotide may be methylated to form 5-methylcytosine"
ctgcagaggtatgaggtgtggcttgggatttcatcatcatgtctcagaccaaagagtaagcgaaaggtagaaccatggcagagtcagtgctccagcaaatgatgggcagttgttttttgctc

SEQ ID NO: 26499 - DNA, 122 bp, Homo sapiens
  misc_feature (61)..(62): /note="This region represents a CpG dinucleotide"
  misc_feature (61)..(61): /note="Nucleotide may be methylated to form 5-methylcytosine"
gagtcaactggagccacataattgctgggaatgtaacctgtctctccagttgtcaaggagcgggcttcccaccaatctccttccctgtaaataaaaaagaaaagtaaatatgttgaccattt

SEQ ID NO: 26500 - DNA, 122 bp, Homo sapiens
  misc_feature (61)..(62): /note="This region represents a CpG dinucleotide"
  misc_feature (61)..(61): /note="Nucleotide may be methylated to form 5-methylcytosine"
tcaacccctttcaaaatagaaaaaaaaaaaacttaggtatatacctaagattttgggtgacgataatgtgtcattgtaggttcattaaatgtaacaagtgttatactctggtggaggatttt

SEQ ID NO: 26501 - DNA, 122 bp, Homo sapiens
  misc_feature (61)..(62): /note="This region represents a CpG dinucleotide"
  misc_feature (61)..(61): /note="Nucleotide may be methylated to form 5-methylcytosine"
agaaagataaagagatgggaaatgagtcagaattcctctcctgcccttctggagaagagccgtgagctggatcatgtcccgcaggcagatatggatggaagaacagacactgagctggagga

SEQ ID NO: 26502 - DNA, 122 bp, Homo sapiens
  misc_feature (61)..(62): /note="This region represents a CpG dinucleotide"
  misc_feature (61)..(61): /note="Nucleotide may be methylated to form 5-methylcytosine"
tatttccttgagccaagtgagctgcaaaatccattatgttcccttcccacctccacctaacgcctgactctgagtcactatgtgatgctcccaccagtagagtgggagttatttttctggaa

SEQ ID NO: 26503 - DNA, 122 bp, Homo sapiens
  misc_feature (61)..(62): /note="This region represents a CpG dinucleotide"
  misc_feature (61)..(61): /note="Nucleotide may be methylated to form 5-methylcytosine"
ggcactacggaccacagtgaacgacctggcatgctctgataagaaaacgctttataatctcgccaactaccttaactgccgtacactcccaacacgctcccgccaaagattaaagtgtggaa

SEQ ID NO: 26504 - DNA, 122 bp, Homo sapiens
  misc_feature (61)..(62): /note="This region represents a CpG dinucleotide"
  misc_feature (61)..(61): /note="Nucleotide may be methylated to form 5-methylcytosine"
taattcatatgtaattaccagtatagtcatcaaagttgactcttcctctcattgtgttcacgacagactctggctgctcaaatatttccttctgcataaatgaactgaagttgcctatagta

SEQ ID NO: 26505 - DNA, 122 bp, Homo sapiens
  misc_feature (61)..(62): /note="This region represents a CpG dinucleotide"
  misc_feature (61)..(61): /note="Nucleotide may be methylated to form 5-methylcytosine"
ggtgaccagtacctgtttgttgttccggaacttatttcctggtgctgctagatggtatgccggcaaccacgtccaactcatgccaatgacttttaaaaatgtcatctcaaatgccacatgtt

SEQ ID NO: 26506 - DNA, 122 bp, Homo sapiens
  misc_feature (61)..(62): /note="This region represents a CpG dinucleotide"
  misc_feature (61)..(61): /note="Nucleotide may be methylated to form 5-methylcytosine"
gtctagaacaccctttgggctatctccacctttcattgtctttgagctattttataactccgtaagatataaaatacagatagtgatacaaatgattcttatctgcagaaatgcaaattgtg

SEQ ID NO: 26507 - DNA, 122 bp, Homo sapiens
  misc_feature (61)..(62): /note="This region represents a CpG dinucleotide"
  misc_feature (61)..(61): /note="Nucleotide may be methylated to form 5-methylcytosine"
attttaaaggatgtagggaagctgtcctgggtccaaaggcatggagacagtgacctggggcgatttatataagaggctggaaagattcaggggcaaggtcatcttcatcactgcctccatgg

SEQ ID NO: 26508 - DNA, 122 bp, Homo sapiens
  misc_feature (61)..(62): /note="This region represents a CpG dinucleotide"
  misc_feature (61)..(61): /note="Nucleotide may be methylated to form 5-methylcytosine"
gaaggattactcttattacttaatcagtggcatgttcctgatgctgaaaaaccatcctgacgcacatgccatgcatgatgagtgttaggtgtccccactgctggatgaacacgtccactgtt

SEQ ID NO: 26509 - DNA, 122 bp, Homo sapiens
  misc_feature (61)..(62): /note="This region represents a CpG dinucleotide"
  misc_feature (61)..(61): /note="Nucleotide may be methylated to form 5-methylcytosine"
gtttctttttttatttatagttctgcaaaatgcaatgtcagataaaatctggaagaaaagcgactaagaacgagaaaatcaaatgtattaagaatctggggctgggtgtggtggctcatgcc

SEQ ID NO: 26510 - DNA, 122 bp, Homo sapiens
  misc_feature (61)..(62): /note="This region represents a CpG dinucleotide"
  misc_feature (61)..(61): /note="Nucleotide may be methylated to form 5-methylcytosine"
ggtgatacgcctgccttagcctcccaaagtgctgggattagaggtgtgaatgaccgcacccggcctagatgccattatgtttcaaattcttaagacacctgtattaagaatgaatagacagc

SEQ ID NO: 26511 - DNA, 122 bp, Homo sapiens
  misc_feature (61)..(62): /note="This region represents a CpG dinucleotide"
  misc_feature (61)..(61): /note="Nucleotide may be methylated to form 5-methylcytosine"
agtgtgtcactttattgccaaaagaagacacaaacgatggagtacaatggtaggagtctccggctgggttctcagggattttctcaggaattatgttttgctccaagtcgtttcagttgacg

SEQ ID NO: 26512 - DNA, 122 bp, Homo sapiens
  misc_feature (61)..(62): /note="This region represents a CpG dinucleotide"
  misc_feature (61)..(61): /note="Nucleotide may be methylated to form 5-methylcytosine"
cttcagtgggctgcctcctgaggctgccttttgctgggtaataccttaggatgtgagagccgcttgcctttaaatatggaaccagctgctacgtgctcttgaccacggcaaagctggcagga

SEQ ID NO: 26513 - DNA, 122 bp, Homo sapiens
  misc_feature (61)..(62): /note="This region represents a CpG dinucleotide"
  misc_feature (61)..(61): /note="Nucleotide may be methylated to form 5-methylcytosine"
aaatgaattatgaagaattaaatactcaatggaacctaaagtccctcagtgaatctcagccgttggccatgcatattggagctcactgccagaagagtgtgaagctctgagaggcttaatgt

SEQ ID NO: 26514 - DNA, 122 bp, Homo sapiens
  misc_feature (61)..(62): /note="This region represents a CpG dinucleotide"
  misc_feature (61)..(61): /note="Nucleotide may be methylated to form 5-methylcytosine"
atagacgtgagccactgcactccgtcagtcttgtgccctgcccagtctccggagcccagccgttagttggtcttaatcaacatggactgagaggaaggaaggcttgtgaaatgtagtgacac

SEQ ID NO: 26515 - DNA, 122 bp, Homo sapiens
  misc_feature (61)..(62): /note="This region represents a CpG dinucleotide"
  misc_feature (61)..(61): /note="Nucleotide may be methylated to form 5-methylcytosine"
agccttagaggctgcccacattccttggctcatggcctcttctccactgaaagccagcagcgttggctctctctgtgcctttcttctagagtcacatttctttctgactacttgactgtctt

SEQ ID NO: 26516 - DNA, 122 bp, Homo sapiens
  misc_feature (61)..(62): /note="This region represents a CpG dinucleotide"
  misc_feature (61)..(61): /note="Nucleotide may be methylated to form 5-methylcytosine"
gaacactagctagacttctaaggtttttcactctagttcctgactcctggatagcaccaccggacccacccagtgcctgggagacctggctgccctgaagtgagagacacaggcctggctgg

SEQ ID NO: 26517 - DNA, 122 bp, Homo sapiens
  misc_feature (61)..(62): /note="This region represents a CpG dinucleotide"
  misc_feature (61)..(61): /note="Nucleotide may be methylated to form 5-methylcytosine"
cacataatattgttgaaaagccaagtctgcattgctcttaaacccagccttatggatgaacgcggaggagtgcaaaaggcagaatgagctcatttgggagaggcagctggtcagagagtcct

SEQ ID NO: 26518 - DNA, 122 bp, Homo sapiens
  misc_feature (61)..(62): /note="This region represents a CpG dinucleotide"
  misc_feature (61)..(61): /note="Nucleotide may be methylated to form 5-methylcytosine"
tggtgtgcatatgttgggggcagggcaagggtaataaataccagggacacttttgcaatgcgtgcctgtcagctgagtgctggacaaacatttttaccactggctatttccctgaggcttct

SEQ ID NO: 26519 - DNA, 122 bp, Homo sapiens
  misc_feature (61)..(62): /note="This region represents a CpG dinucleotide"
  misc_feature (61)..(61): /note="Nucleotide may be methylated to form 5-methylcytosine"
aagatttggaagacagcattgacgaatgaagtatctgtggcataaaaccactctctcctgcgccctcagtccaaggctgttatcagaagtaggtgacactgcacaggcacggggtgacgagg

SEQ ID NO: 26520 - DNA, 122 bp, Homo sapiens
  misc_feature (61)..(62): /note="This region represents a CpG dinucleotide"
  misc_feature (61)..(61): /note="Nucleotide may be methylated to form 5-methylcytosine"
gtttccatctggtaagcaatggagttggagttcaagctcagaatccaagctctgagtcagcgattttgccagctgctgtggctcatcgtgttgtcattaaattcgatgagtctaccattggc

SEQ ID NO: 26521 - DNA, 122 bp, Homo sapiens
  misc_feature (61)..(62): /note="This region represents a CpG dinucleotide"
  misc_feature (61)..(61): /note="Nucleotide may be methylated to form 5-methylcytosine"
tctggacctctcgtttagaccttctctcctgactgccagatggcatgtcccactgtcctccggtgtacatctccaaattgtcccacaggcatttatctcagatgaagtttcaggttggactc

SEQ ID NO: 26522 - DNA, 122 bp, Homo sapiens
  misc_feature (61)..(62): /note="This region represents a CpG dinucleotide"
  misc_feature (61)..(61): /note="Nucleotide may be methylated to form 5-methylcytosine"
tcaagttgggagtgtccagggaattacgttatgataaatctgtttcgaattcaacgcctgcgttcaaattttagctttttttttttttttttttttttttttttttaagggaaaatgatttt

SEQ ID NO: 26523 - DNA, 122 bp, Homo sapiens
  misc_feature (61)..(62): /note="This region represents a CpG dinucleotide"
  misc_feature (61)..(61): /note="Nucleotide may be methylated to form 5-methylcytosine"
gaaaagaggagggatttgaggtctgagccttgggcattccaaagttaagaagtgaggttacgaagaagaaccaggaatggaaaatgaaaaggaaaagccagtgaagtcaaaggtaaaccagg

SEQ ID NO: 26524 - DNA, 122 bp, Homo sapiens
  misc_feature (61)..(62): /note="This region represents a CpG dinucleotide"
  misc_feature (61)..(61): /note="Nucleotide may be methylated to form 5-methylcytosine"
tgccatgaagatgaaggactgtacgaggaggagcctcccaccggggtgagcttaaatttgcggaaatatagaaagtcccgccccacccaactctgaccctggggcctcttgcagcagtatca

SEQ ID NO: 26525 - DNA, 122 bp, Homo sapiens
  misc_feature (61)..(62): /note="This region represents a CpG dinucleotide"
  misc_feature (61)..(61): /note="Nucleotide may be methylated to form 5-methylcytosine"
cctctgaataccaaagacacttggtctggtgttctcttccttccccaactctctctcacccgcagagctccccatccaccaggtgtgggcatgaaggagaggggagtgggagagaaagagac

SEQ ID NO: 26526 - DNA, 122 bp, Homo sapiens
  misc_feature (61)..(62): /note="This region represents a CpG dinucleotide"
  misc_feature (61)..(61): /note="Nucleotide may be methylated to form 5-methylcytosine"
ttacttgtggaattcttcaatgacagttgacactcccatatataagctccaggcagagaccgtgtctatattctcacctttgcacaacatctagctcagagccacaaaaagtaggcactcat

SEQ ID NO: 26527 - DNA, 122 bp, Homo sapiens
  misc_feature (61)..(62): /note="This region represents a CpG dinucleotide"
  misc_feature (61)..(61): /note="Nucleotide may be methylated to form 5-methylcytosine"
acttacagcatgacacataaaggcctctgaggccaagtatacaccagctacatttcctgccgcactcatatttcatattttgccaccacatctttgttatacttctttgcctgaaaaagcct

SEQ ID NO: 26528 - DNA, 122 bp, Homo sapiens
  misc_feature (61)..(62): /note="This region represents a CpG dinucleotide"
  misc_feature (61)..(61): /note="Nucleotide may be methylated to form 5-methylcytosine"
aggccattgctcagggaggagctctgttgagatggaatgttccggcagccgggagtgagccgtccactcatgcatcagtgatttcaatcccccaggtggtggcctgtggtgggtgtgggctc

SEQ ID NO: 26529 - DNA, 122 bp, Homo sapiens
  misc_feature (61)..(62): /note="This region represents a CpG dinucleotide"
  misc_feature (61)..(61): /note="Nucleotide may be methylated to form 5-methylcytosine"
attctccccatgtttcctcacataaccttcctctgtgcatatctttgtgtcaaaaaatttcgtctttttataaggacagcagtcatattggattaaggcccaccctaatggcctcatttgaa

SEQ ID NO: 26530 - DNA, 122 bp, Homo sapiens
  misc_feature (61)..(62): /note="This region represents a CpG dinucleotide"
  misc_feature (61)..(61): /note="Nucleotide may be methylated to form 5-methylcytosine"
atctttaaaaggtggatgaaatattatttacagcatgaagccttctataaatagggtggacggccttaccacataaaaacccaggacacacagctgaatttgaatttcagataaacagtgct

SEQ ID NO: 26531 - DNA, 122 bp, Homo sapiens
  misc_feature (61)..(62): /note="This region represents a CpG dinucleotide"
  misc_feature (61)..(61): /note="Nucleotide may be methylated to form 5-methylcytosine"
ctgtcttagagacacagagagcagtgaccgaatgcacccgctgactcatcactgtgtcaccgcccaggctgaacctgttacacagagccgccttcaattctgctagataatctaggcctttc

SEQ ID NO: 26532 - DNA, 122 bp, Homo sapiens
  misc_feature (61)..(62): /note="This region represents a CpG dinucleotide"
  misc_feature (61)..(61): /note="Nucleotide may be methylated to form 5-methylcytosine"
tgctttgtaaactatttattaaaaataagagacacgaagagaacttattattatatgcttcgcttaccctgtatatcaagagctgcaaacatcctgtgcgagtcccaaagtgaaaggtaaaa

SEQ ID NO: 26533 - DNA, 122 bp, Homo sapiens
  misc_feature (61)..(62): /note="This region represents a CpG dinucleotide"
  misc_feature (61)..(61): /note="Nucleotide may be methylated to form 5-methylcytosine"
aaccctttcagaatggcttgagctggcaacaaagcacgaagccatggctcagcagtgccacgctgggggaaagagtccctttaccaccttgttttctacatagaggtagtgtaactgactgt

SEQ ID NO: 26534 - DNA, 122 bp, Homo sapiens
  misc_feature (61)..(62): /note="This region represents a CpG dinucleotide"
  misc_feature (61)..(61): /note="Nucleotide may be methylated to form 5-methylcytosine"
atttctaaccaggaaggtaagggttacaaacaaccttaccttgtcatctcattttatagacgagataccgatcctcagagaatctaagtgatttgctcaggttcacagttagtaagtggtaa

SEQ ID NO: 26535 - DNA, 122 bp, Homo sapiens
  misc_feature (61)..(62): /note="This region represents a CpG dinucleotide"
  misc_feature (61)..(61): /note="Nucleotide may be methylated to form 5-methylcytosine"
gggacggtttttagtgtgttttccattcctggctctttaatctttgtaggcatacttctccgccttcccaccacccggattcatagtgtgaattcctgcccggccctgagtcatacccaggc

SEQ ID NO: 26536 - DNA, 122 bp, Homo sapiens
  misc_feature (61)..(62): /note="This region represents a CpG dinucleotide"
  misc_feature (61)..(61): /note="Nucleotide may be methylated to form 5-methylcytosine"
gccagcaataaaggactcctgaattagtctcagagtgtggcattctctctatgacttgctcggttacgacatttggaagccccagagagattcgccaccgggtgaagacctgactcattccg

SEQ ID NO: 26537 - DNA, 122 bp, Homo sapiens
  misc_feature (61)..(62): /note="This region represents a CpG dinucleotide"
  misc_feature (61)..(61): /note="Nucleotide may be methylated to form 5-methylcytosine"
gtaaatagttccctggttaagcacctgatttaaaaatcagcacagcccagccattgaccacgacctgtccatggttctgaaaggcacgtcgagtctatggactcaccaactggcaacggaga

SEQ ID NO: 26538 - DNA, 122 bp, Homo sapiens
  misc_feature (61)..(62): /note="This region represents a CpG dinucleotide"
  misc_feature (61)..(61): /note="Nucleotide may be methylated to form 5-methylcytosine"
tttaagaatgactcattctcaacccaagtacgtctgccatgtcgggttaggcaggttgtgcgctgcacaagggcacccacccgaggaaatggagggtttcaaatccaggctgcaatccgctt

SEQ ID NO: 26539 - DNA, 122 bp, Homo sapiens
  misc_feature (61)..(62): /note="This region represents a CpG dinucleotide"
  misc_feature (61)..(61): /note="Nucleotide may be methylated to form 5-methylcytosine"
ccatgttgtgaagatactcaagcagccctatggagaggcccacacactggggaggcactgcggctttctgccgacagccttgtgaatgagacaccttgaaagaggatcctccagccccagcc

SEQ ID NO: 26540 - DNA, 122 bp, Homo sapiens
  misc_feature (61)..(62): /note="This region represents a CpG dinucleotide"
  misc_feature (61)..(61): /note="Nucleotide may be methylated to form 5-methylcytosine"
tgtagccttctgtgactagcttctttcacttagcatcaggtttctcaggttccttcatgtcgtgatatgacttaactttatcttatgaccgaatagtattccattgtatggatataccacat

SEQ ID NO: 26541 - DNA, 122 bp, Homo sapiens
  misc_feature (61)..(62): /note="This region represents a CpG dinucleotide"
  misc_feature (61)..(61): /note="Nucleotide may be methylated to form 5-methylcytosine"
aatcacagccctcccagggagatgcccctccaggcccacctgtccggagaggatcagcctcgctctaacactgaatgccctaaggccactgtgagccctgccccttaagtcagaggagcagg

SEQ ID NO: 26542 - DNA, 122 bp, Homo sapiens
  misc_feature (61)..(62): /note="This region represents a CpG dinucleotide"
  misc_feature (61)..(61): /note="Nucleotide may be methylated to form 5-methylcytosine"
gtgttctcacagccctctgggggcctctattcttgtactgaaatggtccatttctgtggccgtctcctccatttctctgcaagcttttcaaagacaggagctgtattcccagggcactcatg

SEQ ID NO: 26543 - DNA, 122 bp, Homo sapiens
  misc_feature (61)..(62): /note="This region represents a CpG dinucleotide"
  misc_feature (61)..(61): /note="Nucleotide may be methylated to form 5-methylcytosine"
ctgcatgtctcacacagatcccagcctcaccctggcccacatctgcaactgagtgctggacgccttcccttgggcacaccccagcacagacttgtctcatgtgggttatccccatggtcccc

SEQ ID NO: 26544 - DNA, 122 bp, Homo sapiens
  misc_feature (61)..(62): /note="This region represents a CpG dinucleotide"
  misc_feature (61)..(61): /note="Nucleotide may be methylated to form 5-methylcytosine"
ggagagatgaggagggagctaccagtggcgtaatagaagcacctggctcctggctgaatgcgcagagcaggaagcaactcaaggtaatgtggggttttcaccaggtgcctgagaacttgatc

SEQ ID NO: 26545 - DNA, 122 bp, Homo sapiens
  misc_feature (61)..(62): /note="This region represents a CpG dinucleotide"
  misc_feature (61)..(61): /note="Nucleotide may be methylated to form 5-methylcytosine"
ggctctgctccaagcaacttctttcagttttggatatccaatatcctaatcggtaaaacacggataataatttttgcttagtctatttttcaaagttttggtacaaatggcaaataatgtgc

SEQ ID NO: 26546 - DNA, 122 bp, Homo sapiens
  misc_feature (61)..(62): /note="This region represents a CpG dinucleotide"
  misc_feature (61)..(61): /note="Nucleotide may be methylated to form 5-methylcytosine"
tactttctaataagcctccaaaggacaatggtgattagtatttcctgggtttctctaccccgcagctgaagacctgcagatggatccagcacaaaagggacctgccatgcacactctctgga

SEQ ID NO: 26547 - DNA, 122 bp, Homo sapiens
  misc_feature (61)..(62): /note="This region represents a CpG dinucleotide"
  misc_feature (61)..(61): /note="Nucleotide may be methylated to form 5-methylcytosine"
tctacctgttctgagtcaacagttccaggatgaacctcgcctaaaagtcttccaggggagcgagagtggaatgtctggcttaaggatgcagtctgaccccacagctcacagtggcaggaaag

SEQ ID NO: 26548 - DNA, 122 bp, Homo sapiens
  misc_feature (61)..(62): /note="This region represents a CpG dinucleotide"
  misc_feature (61)..(61): /note="Nucleotide may be methylated to form 5-methylcytosine"
gttatgtatgtatgtatattgatttgatttttcgtgtgtggcatgtgtgtaggaggtgaacgagaggagagtgggaagggcaaagttttctctgaatcatccaaacttgcccagcctagtgg

SEQ ID NO: 26549 - DNA, 122 bp, Homo sapiens
  misc_feature (61)..(62): /note="This region represents a CpG dinucleotide"
  misc_feature (61)..(61): /note="Nucleotide may be methylated to form 5-methylcytosine"
aggaaagaggcttaattgactcacggttccgcatggctggagaggccctcaggaaacttacgatcatggagaaagtcaaagaggaagcaggcaccttcttcacaaagtggaaggtaggagaa

SEQ ID NO: 26550 - DNA, 122 bp, Homo sapiens
  misc_feature (61)..(62): /note="This region represents a CpG dinucleotide"
  misc_feature (61)..(61): /note="Nucleotide may be methylated to form 5-methylcytosine"
cagatgaacacaacagatgaagctattaatgcagctttaccttactgacccagagcccttcgagtctgagtttcctctggaccaagtggttatcttctctatacagactggggattctatct

SEQ ID NO: 26551 - DNA, 122 bp, Homo sapiens
  misc_feature (61)..(62): /note="This region represents a CpG dinucleotide"
  misc_feature (61)..(61): /note="Nucleotide may be methylated to form 5-methylcytosine"
tgactcactcactatgaagtgagtaccttcattattccatcttacagatgaggagactgacgctcagtgaagtgacagtcatagacaactagaagtgatggaactaagattcaaattcgggc

SEQ ID NO: 26552 - DNA, 122 bp, Homo sapiens
  misc_feature (61)..(62): /note="This region represents a CpG dinucleotide"
  misc_feature (61)..(61): /note="Nucleotide may be methylated to form 5-methylcytosine"
ctgccatctgtcactcgtagagctcctattatttgaataaatcctagctagttagctcaccgaagttccaattccacagtgcatgcctgagtcttgatgttatctaaatagcaaggagctta

SEQ ID NO: 26553 - DNA, 122 bp, Homo sapiens
  misc_feature (61)..(62): /note="This region represents a CpG dinucleotide"
  misc_feature (61)..(61): /note="Nucleotide may be methylated to form 5-methylcytosine"
ctttctcggagccccacattccctttaaccactcagatgtggtggtatctgatcaagtcccgcccatgctacaagccccgcctcttactcagagccctgccttccctttacccactcagatg

SEQ ID NO: 26554 - DNA, 122 bp, Homo sapiens
  misc_feature (61)..(62): /note="This region represents a CpG dinucleotide"
  misc_feature (61)..(61): /note="Nucleotide may be methylated to form 5-methylcytosine"
tgtctatgtgtttgtgcctgtgtgtacagtacctgtgtcactgtgagtgaacatgcacatcgttctgcctgagggtctgtatggatgtccttgcctgtgtagctcagggtgtccccatgctt

SEQ ID NO: 26555 - DNA, 122 bp, Homo sapiens
  misc_feature (61)..(62): /note="This region represents a CpG dinucleotide"
  misc_feature (61)..(61): /note="Nucleotide may be methylated to form 5-methylcytosine"
tgctgttgttggctagggtggtaggttgtgtcaattgtcaccatcaaattctcccctccacgtgaatgtgtgttgctcctatgactttctttttttgtttgtgttgtttgttttgagatgga

SEQ ID NO: 26556 - DNA, 122 bp, Homo sapiens
  misc_feature (61)..(62): /note="This region represents a CpG dinucleotide"
  misc_feature (61)..(61): /note="Nucleotide may be methylated to form 5-methylcytosine"
aacaatatctctcacgaacacagatgcagaacttctagacaaaacgtttccaaattgaagcgaagaccatattaaaaggacaaaagcacctcagtggttgcttggggactgggggaggggct

SEQ ID NO: 26557 - DNA, 122 bp, Homo sapiens
  misc_feature (61)..(62): /note="This region represents a CpG dinucleotide"
  misc_feature (61)..(61): /note="Nucleotide may be methylated to form 5-methylcytosine"
tttgaaacagatctttttagaaaggttgtttcataatttctgaccgaagtatttgttacacgtaaaataagtaagaacggactgaggccagaaagctgtggatgacagaagggattggtgca

SEQ ID NO: 26558 - DNA, 122 bp, Homo sapiens
  misc_feature (61)..(62): /note="This region represents a CpG dinucleotide"
  misc_feature (61)..(61): /note="Nucleotide may be methylated to form 5-methylcytosine"
cctaaaagatttacttgctctggccgggctcctaattgcatgggctgagcatcagctagacgcctgaaatcgaacacctcgacaccttttaactaacctgggaacatatttctgacttggtg

SEQ ID NO: 26559 - DNA, 122 bp, Homo sapiens
  misc_feature (61)..(62): /note="This region represents a CpG dinucleotide"
  misc_feature (61)..(61): /note="Nucleotide may be methylated to form 5-methylcytosine"
atgataaacaggtgtgatattcctgagtccctaggtagctataaggccagttagcctgggcggcttcagcctcctgctggtgacttcacctcgctgcctttcagtttcatcctctctaaaac

SEQ ID NO: 26560 - DNA, 122 bp, Homo sapiens
  misc_feature (61)..(62): /note="This region represents a CpG dinucleotide"
  misc_feature (61)..(61): /note="Nucleotide may be methylated to form 5-methylcytosine"
actgcactccagccatggtgacaaagtaagaaagaccctgtctcaaaagaaaaaaaaaaacggaaaagaaaaaaagaaagtaattgacttgccaccacacaaccttctcacaccatctttat

SEQ ID NO: 26561 - DNA, 122 bp, Homo sapiens
  misc_feature (61)..(62): /note="This region represents a CpG dinucleotide"
  misc_feature (61)..(61): /note="Nucleotide may be methylated to form 5-methylcytosine"
cctttaaacaggaaaatggtggagggagcgggaggagagttgagtgctaacagaagcacacgcactcaggcaggcatgaaaatgtgtgccattgtgtagccacagctgccccctcgcccagg

SEQ ID NO: 26562 - DNA, 122 bp, Homo sapiens
  misc_feature (61)..(62): /note="This region represents a CpG dinucleotide"
  misc_feature (61)..(61): /note="Nucleotide may be methylated to form 5-methylcytosine"
gatttctccaagacttttcagtatttgtttgaaaaaaaaaaagcatgtgaaaccttggcacgcattagaataatttgattaatgtatacaatgagttgattgctatcaataatcactctatt

SEQ ID NO: 26563 - DNA, 122 bp, Homo sapiens
  misc_feature (61)..(62): /note="This region represents a CpG dinucleotide"
  misc_feature (61)..(61): /note="Nucleotide may be methylated to form 5-methylcytosine"
gcttcctggtctcttagccaaattttctcccctcactcagctgtcactcagctctgcttacgagaatacatgatactccaggtcctgacgaggtaaatgggtgtactctgagaagacgtaga

SEQ ID NO: 26564 - DNA, 122 bp, Homo sapiens
  misc_feature (61)..(62): /note="This region represents a CpG dinucleotide"
  misc_feature (61)..(61): /note="Nucleotide may be methylated to form 5-methylcytosine"
tggtgggaaagggaagggaggcaagtgggtaagtctatatagaccagaaaatctcaatggcgagagtgttcaagacttcgttaagggaggttctcagaaatgcagattttagtttagagatc

SEQ ID NO: 26565 - DNA, 122 bp, Homo sapiens
  misc_feature (61)..(62): /note="This region represents a CpG dinucleotide"
  misc_feature (61)..(61): /note="Nucleotide may be methylated to form 5-methylcytosine"
tcttcagacctctgtgggctctgtgtggcaggtctctgcttgcaaggaggggaggagcagcgcttcaggcagggctttggagtcacatgccaaggtccaacttccagcttaactgtgtgact

SEQ ID NO: 26566 - DNA, 122 bp, Homo sapiens
  misc_feature (61)..(62): /note="This region represents a CpG dinucleotide"
  misc_feature (61)..(61): /note="Nucleotide may be methylated to form 5-methylcytosine"
tgagagcttcaggtgaggaggctgagggaacagtgagagcccaaaggacatcctaggtcacgcgaaggagtctacactttatctgaagtgccaacgtaagtctttgaagaattccaagcaag

SEQ ID NO: 26567 - DNA, 122 bp, Homo sapiens
  misc_feature (61)..(62): /note="This region represents a CpG dinucleotide"
  misc_feature (61)..(61): /note="Nucleotide may be methylated to form 5-methylcytosine"
gactccatcttaaaaaaaaaaaaaaaagaatgtcacataatgaatcatatggcatataaccgtttgagactcagggtaattctcatgagactcatccagcttgttggtgcatcaacagttta

SEQ ID NO: 26568 - DNA, 122 bp, Homo sapiens
  misc_feature (61)..(62): /note="This region represents a CpG dinucleotide"
  misc_feature (61)..(61): /note="Nucleotide may be methylated to form 5-methylcytosine"
cggggaggcggattaatgtgtttgatttctcaaaagtctatttactgtccaatttatcttcgtccttggacatgctagcaagtaattattcttatggctggtaaaatgactgctaaacattt

SEQ ID NO: 26569 - DNA, 122 bp, Homo sapiens
  misc_feature (61)..(62): /note="This region represents a CpG dinucleotide"
  misc_feature (61)..(61): /note="Nucleotide may be methylated to form 5-methylcytosine"
cccttctcccttcctctgagtcacaagagccccgtgctgttttgctctggtgagatgagccgcacagccacaggcctgtgtgtggagtgggcgggagccaggccaccttcctctggatgcag

SEQ ID NO: 26570 - DNA, 122 bp, Homo sapiens
  misc_feature (61)..(62): /note="This region represents a CpG dinucleotide"
  misc_feature (61)..(61): /note="Nucleotide may be methylated to form 5-methylcytosine"
tgccaccaaagtcatgagtcctttcagagctgcaggcccgtgtgtgtgcatgtatgtgtccgtgtgtatgtgtgtgcacatgcataggccttttgtgtgtgtgtcccggtgtgtagtgtgta

SEQ ID NO: 26571 - DNA, 122 bp, Homo sapiens
  misc_feature (61)..(62): /note="This region represents a CpG dinucleotide"
  misc_feature (61)..(61): /note="Nucleotide may be methylated to form 5-methylcytosine"
tcaccgttcccatgtgtggctgataagggccaggagattccacagttcaggtagttcccccgcctccctggcattttgtggtcaccattaatcatttcctctgtgtatttaagagctctttt

SEQ ID NO: 26572 - DNA, 122 bp, Homo sapiens
  misc_feature (61)..(62): /note="This region represents a CpG dinucleotide"
  misc_feature (61)..(61): /note="Nucleotide may be methylated to form 5-methylcytosine"
tctcttccaggttctcgcttatgtaaattctaattcacagtgccctggccccacatgtctcgtaaaccaggcctgatattgtaaaccttcgccattcacagagggttttagctttgcctttg

SEQ ID NO: 26573 - DNA, 122 bp, Homo sapiens
  misc_feature (61)..(62): /note="This region represents a CpG dinucleotide"
  misc_feature (61)..(61): /note="Nucleotide may be methylated to form 5-methylcytosine"
atctttccctaagcccttgttctgtagccacactgggatccagcatggggcactgtgggccgttgtttggcccctgtcataagtgccaagtactaagaaagaacctggtcctttgcactagt

SEQ ID NO: 26574 - DNA, 122 bp, Homo sapiens
  misc_feature (61)..(62): /note="This region represents a CpG dinucleotide"
  misc_feature (61)..(61): /note="Nucleotide may be methylated to form 5-methylcytosine"
tctgattttctcctcccctttgtgtacccgacgggtgttgctctgagatcaggaccatcccggcgggctgcggatgggatcatcgtgtgtgtatggccacagccctccgccccgctcgctcg

SEQ ID NO: 26575 - DNA, 122 bp, Homo sapiens
  misc_feature (61)..(62): /note="This region represents a CpG dinucleotide"
  misc_feature (61)..(61): /note="Nucleotide may be methylated to form 5-methylcytosine"
agtgccctggaaggaagttgctcaatctaagtggaaaccaaaccctagctttggtttcctcgggaaattttgcagtaactacttctctataattagtgagcgtgggtttgaccaagccctta

SEQ ID NO: 26576 - DNA, 122 bp, Homo sapiens
  misc_feature (61)..(62): /note="This region represents a CpG dinucleotide"
  misc_feature (61)..(61): /note="Nucleotide may be methylated to form 5-methylcytosine"
acatagtgtggtactttgtcttgaggagatgtcctggactcacacggaaacttagggctacggaatgaaggtaaatttaaaataaaacaagcgggagtcacagatacactgtctgggaaagt

SEQ ID NO: 26577 - DNA, 122 bp, Homo sapiens
  misc_feature (61)..(62): /note="This region represents a CpG dinucleotide"
  misc_feature (61)..(61): /note="Nucleotide may be methylated to form 5-methylcytosine"
tcctgaatagttatacctctggctagaccagagtgaatatggtgtgatggtgaagagaaccgctatgtgttggctctgtcagctgagtgagtcactcccactaatcctcagtgttctcacct

SEQ ID NO: 26578 - DNA, 122 bp, Homo sapiens
  misc_feature (61)..(62): /note="This region represents a CpG dinucleotide"
  misc_feature (61)..(61): /note="Nucleotide may be methylated to form 5-methylcytosine"
acaatgctttctgatatgctattgtagagtggatcgattgtgatttaatatatgtcacatcgttgtgtttcttcactcaggaaagatggcatattgcctggattaactgttacacagggaac

SEQ ID NO: 26579 - DNA, 122 bp, Homo sapiens
  misc_feature (61)..(62): /note="This region represents a CpG dinucleotide"
  misc_feature (61)..(61): /note="Nucleotide may be methylated to form 5-methylcytosine"
tctcccagtcctggttaggatctgtgcctgaggccttttgtggggagttggggtgggggccggagaacatctcaatctgatctcaggagagataaagacacaggagtgagaactgccagttc

SEQ ID NO: 26580 - DNA, 122 bp, Homo sapiens
  misc_feature (61)..(62): /note="This region represents a CpG dinucleotide"
  misc_feature (61)..(61): /note="Nucleotide may be methylated to form 5-methylcytosine"
ggcacaggcaatgcagcagggctacttcagcccagggctcaggaaccacggggtgcagcgcggcctgcagcaaaccagacacatcagaagccaaggtcccactttaacattcagtgacatcg

SEQ ID NO: 26581 - DNA, 122 bp, Homo sapiens
  misc_feature (61)..(62): /note="This region represents a CpG dinucleotide"
  misc_feature (61)..(61): /note="Nucleotide may be methylated to form 5-methylcytosine"
gatgacaaaataccaagtaaatatctaggccgatgtagtcaaatgccaaaccgtaaatcgcgtgttcaggcacctcctccaggttcatgagtgtaatcctggctggaagcaaagtcactttc

SEQ ID NO: 26582 - DNA, 122 bp, Homo sapiens
  misc_feature (61)..(62): /note="This region represents a CpG dinucleotide"
  misc_feature (61)..(61): /note="Nucleotide may be methylated to form 5-methylcytosine"
ttaagaaacctgggttacatcatcacggttctgccatttagtggcaacttaaattgaggacggctaagtcaacttaattgaggactgagaatttagcaactcagaggttagcagtaactttg

SEQ ID NO: 26583 - DNA, 122 bp, Homo sapiens
  misc_feature (61)..(62): /note="This region represents a CpG dinucleotide"
  misc_feature (61)..(61): /note="Nucleotide may be methylated to form 5-methylcytosine"
tctgatttgggttgtgatatctacacagaccgtgtaaacacagaccgtgtaaacacagaccgtgagatttgctttctttgtttggagaaaagatttcctgagttccttgtcccaggctaatt

SEQ ID NO: 26584 - DNA, 122 bp, Homo sapiens
  misc_feature (61)..(62): /note="This region represents a CpG dinucleotide"
  misc_feature (61)..(61): /note="Nucleotide may be methylated to form 5-methylcytosine"
agaaactaaggtctttgccatttgactctactcatgctacggcagcagactgcatcttctcgctctttagtggtaatccacattgctgggtccctcccacttttcttaataaccactggcgg

SEQ ID NO: 26585 - DNA, 122 bp, Homo sapiens
  misc_feature (61)..(62): /note="This region represents a CpG dinucleotide"
  misc_feature (61)..(61): /note="Nucleotide may be methylated to form 5-methylcytosine"
ttgcattagcagcaaatccccagggttgctcagggtgggagactgtgagaagcctagcagcgtggccgtctgtgtgtgtgtgtgtgttggggggtcgggggggtccctattcacaagggaga

SEQ ID NO: 26586 - DNA, 122 bp, Homo sapiens
  misc_feature (61)..(62): /note="This region represents a CpG dinucleotide"
  misc_feature (61)..(61): /note="Nucleotide may be methylated to form 5-methylcytosine"
tgaatggcaccctagccccactgtcttctgggtggcttcaggatccttgaggaggttggccgtgtaggttcccctcaggtaggacctaggtgagctggggagtcttaactcacccagggcag

SEQ ID NO: 26587 - DNA, 122 bp, Homo sapiens
  misc_feature (61)..(62): /note="This region represents a CpG dinucleotide"
  misc_feature (61)..(61): /note="Nucleotide may be methylated to form 5-methylcytosine"
ttaccatagttctgagtctggtgtctgtcatatctgagtaaatcacccagctatgaatctcgtgaactcattgtactgagtaatcttcttggtaatctctttttttgttttttttgagatgg

SEQ ID NO: 26588 - DNA, 122 bp, Homo sapiens
  misc_feature (61)..(62): /note="This region represents a CpG dinucleotide"
  misc_feature (61)..(61): /note="Nucleotide may be methylated to form 5-methylcytosine"
tggtcaagaggtggatccatgtgaacgccactgggaaatgagagacctcgttcccaatcacggtcagtgcaactcgaaagcctaaaatcagtttaaaacaaaggtatctacctttatcttat

SEQ ID NO: 26589 - DNA, 122 bp, Homo sapiens
  misc_feature (61)..(62): /note="This region represents a CpG dinucleotide"
  misc_feature (61)..(61): /note="Nucleotide may be methylated to form 5-methylcytosine"
tctgcagttggggctgtgcttacctgggcagttcttctgctggtctcacctggagttactcgtgagtttgaagtcatctggcgaattgactggagcagaatgatctaagatgacctcactaa

SEQ ID NO: 26590 - DNA, 122 bp, Homo sapiens
  misc_feature (61)..(62): /note="This region represents a CpG dinucleotide"
  misc_feature (61)..(61): /note="Nucleotide may be methylated to form 5-methylcytosine"
caaaaagtttcagtctagtgagagagatagacctctacaccaaaaattatagtcatggtgcgcttagagtgttacggtgacacagaggagggacatttaaatcagactggtaggtaggaagg

SEQ ID NO: 26591 - DNA, 122 bp, Homo sapiens
  misc_feature (61)..(62): /note="This region represents a CpG dinucleotide"
  misc_feature (61)..(61): /note="Nucleotide may be methylated to form 5-methylcytosine"
cttgcttttagcgactgattctaaaccaagccaacagttcacattctaagcatagtgctgcgtgtctttcatgtatttaagatatcttttaaaaatatacaagtctaagatatttagatcag

SEQ ID NO: 26592 - DNA, 122 bp, Homo sapiens
  misc_feature (61)..(62): /note="This region represents a CpG dinucleotide"
  misc_feature (61)..(61): /note="Nucleotide may be methylated to form 5-methylcytosine"
taccacctaggggtgcagctgctgacctgatgtctgattggatgcagggggtgctgtgggcgtctctatggacaacactgacccccatccctgtataggtacgccaccccactaatcaacaa

SEQ ID NO: 26593 - DNA, 122 bp, Homo sapiens
  misc_feature (61)..(62): /note="This region represents a CpG dinucleotide"
  misc_feature (61)..(61): /note="Nucleotide may be methylated to form 5-methylcytosine"
accggagccgcggggtaggcggggcagtgccgggggccgtcctggagccagtggctcgagcgccatctgtgcgcagcctcagcctcagcctggctgactcgggccacctgccggacgtgcat

SEQ ID NO: 26594 - DNA, 122 bp, Homo sapiens
  misc_feature (61)..(62): /note="This region represents a CpG dinucleotide"
  misc_feature (61)..(61): /note="Nucleotide may be methylated to form 5-methylcytosine"
catcttttcatgtgcttgttggaaatttttatatcttctttgatgaagtctctatttaaacgttgcccatttaaaacaagttgggtttgtcttattattgagttgtaagccctcctgatata

SEQ ID NO: 26595 - DNA, 122 bp, Homo sapiens
  misc_feature (61)..(62): /note="This region represents a CpG dinucleotide"
  misc_feature (61)..(61): /note="Nucleotide may be methylated to form 5-methylcytosine"
ccccatgacacagtttgactcatcactgcccttcttaaagtaggtagtgtgggaaaaatacgtggaaaggaatgtaggatttatagtcaaagtcttattcctaagtctggatattcatcttt

SEQ ID NO: 26596 - DNA, 122 bp, Homo sapiens
  misc_feature (61)..(62): /note="This region represents a CpG dinucleotide"
  misc_feature (61)..(61): /note="Nucleotide may be methylated to form 5-methylcytosine"
actggcataagtcattatctgtggtggaaaaggctgcctggcatgtagctgttaactcagcggttgcccaagtgtggagattcagcattacctaggaatgtataagaagaactctgggcttc

SEQ ID NO: 26597 - DNA, 122 bp, Homo sapiens
  misc_feature (61)..(62): /note="This region represents a CpG dinucleotide"
  misc_feature (61)..(61): /note="Nucleotide may be methylated to form 5-methylcytosine"
actatgaaaatatagggacaaatgatgctactgataaaagtctgtctcaagaggcagtagcgagtacaagcccaagctttagacttggataaactggaatcaaaaggagctgtcagctaaaa

SEQ ID NO: 26598 - DNA, 122 bp, Homo sapiens
  misc_feature (61)..(62): /note="This region represents a CpG dinucleotide"
  misc_feature (61)..(61): /note="Nucleotide may be methylated to form 5-methylcytosine"
cctctccaaagcagtctgaacccagccttggggagtggcttccgagtgtgtccttccttgcgtatttttcttcagccttagggcacttattgagttttctttacatctttatagttactctc

SEQ ID NO: 26599 - DNA, 122 bp, Homo sapiens
  misc_feature (61)..(62): /note="This region represents a CpG dinucleotide"
  misc_feature (61)..(61): /note="Nucleotide may be methylated to form 5-methylcytosine"
gcctgatttaagataggaggaaactgaggcaaaggaggataagcaatgtgtccaagcctacgcctctgatgagtataggtctgggatttgaactcaagcagtccggccccagaggccttagt

SEQ ID NO: 26600 - DNA, 122 bp, Homo sapiens
  misc_feature (61)..(62): /note="This region represents a CpG dinucleotide"
  misc_feature (61)..(61): /note="Nucleotide may be methylated to form 5-methylcytosine"
gtcccagcaactagggaggatgaagtgggaggattgcttgagcctgggaggtcgaggctgcggtgagctgtgatagcaccattgcacaatctaaactgggccacagagcaagacctcgtctc

SEQ ID NO: 26601 - DNA, 122 bp, Homo sapiens
  misc_feature (61)..(62): /note="This region represents a CpG dinucleotide"
  misc_feature (61)..(61): /note="Nucleotide may be methylated to form 5-methylcytosine"
ttgacccaaccccgccttgcaagcaagccccagaggagggaaagaatggactcgatctctcgactccttttatgtagccatgtgcacaagatgaatggccagggagctgtcaggaggaaggc

SEQ ID NO: 26602 - DNA, 122 bp, Homo sapiens
  misc_feature (61)..(62): /note="This region represents a CpG dinucleotide"
  misc_feature (61)..(61): /note="Nucleotide may be methylated to form 5-methylcytosine"
tctcgggccgctcactccggctggcagtggcgggaggcagtgtgtgctgctcgcaccctgcgtttccagttttaggagactgaagcatcccagacagctgttgacaatcaggaagaccctac

SEQ ID NO: 26603 - DNA, 122 bp, Homo sapiens
  misc_feature (61)..(62): /note="This region represents a CpG dinucleotide"
  misc_feature (61)..(61): /note="Nucleotide may be methylated to form 5-methylcytosine"
acagctactgggaggaatgatgagcacatcaatcggtgactactcataggggcttgggaccgtgttgcctggcacatgggacgcgctccacaactttgtctcctggatgaaatggggacatt

SEQ ID NO: 26604 - DNA, 122 bp, Homo sapiens
  misc_feature (61)..(62): /note="This region represents a CpG dinucleotide"
  misc_feature (61)..(61): /note="Nucleotide may be methylated to form 5-methylcytosine"
acatctctgaaggttatgccggtttacattccttcagcagtccgaccagtccccagcagccgcaccctcgctaaccccagggcaagttacatacagagtggcctgctgtgccaaaggagcta

SEQ ID NO: 26605 - DNA, 122 bp, Homo sapiens
  misc_feature (61)..(62): /note="This region represents a CpG dinucleotide"
  misc_feature (61)..(61): /note="Nucleotide may be methylated to form 5-methylcytosine"
ttgcttagttcagatggtggacataagcacaggctactctagattccctcaaacactccccgactaataatactgaagaatttctcgggaagcagcaggcctgtcaaggaaggactatgttc

SEQ ID NO: 26606 - DNA, 122 bp, Homo sapiens
  misc_feature (61)..(62): /note="This region represents a CpG dinucleotide"
  misc_feature (61)..(61): /note="Nucleotide may be methylated to form 5-methylcytosine"
gccagcatggctgtaattatcactgggctttggctgagactcaggcagcccagccatctacgcagcaggtggagggatgctggcaggtcaaacaagcactgcctgactgatctggatgggac

SEQ ID NO: 26607 - DNA, 122 bp, Homo sapiens
  misc_feature (61)..(62): /note="This region represents a CpG dinucleotide"
  misc_feature (61)..(61): /note="Nucleotide may be methylated to form 5-methylcytosine"
cttttggttgtacccagcactgcccagaatggcttacagagtttatacccatggaggtttcgtaaaggtgacattaacttcgcagtaaagtcactgaccccgaacctgtgtcacttcaggct

SEQ ID NO: 26608 - DNA, 122 bp, Homo sapiens
  misc_feature (61)..(62): /note="This region represents a CpG dinucleotide"
  misc_feature (61)..(61): /note="Nucleotide may be methylated to form 5-methylcytosine"
tcatcagaagcagtagcacccccactgagaaaaacagtacattcaactctgatggtattacgggcataagtgacctcaccaaataggtgctttatctagataggtctatgtgatactcccta

SEQ ID NO: 26609 - DNA, 122 bp, Homo sapiens
  misc_feature (61)..(62): /note="This region represents a CpG dinucleotide"
  misc_feature (61)..(61): /note="Nucleotide may be methylated to form 5-methylcytosine"
ttctagcaatgccctttttaagtaatacagcctcagggcaatcccttaattaatattttccgctgtttgaagtaggtatttttatctccatcttataaatgaatgaaatggacctgagcatg

SEQ ID NO: 26610 - DNA, 122 bp, Homo sapiens
  misc_feature (61)..(62): /note="This region represents a CpG dinucleotide"
  misc_feature (61)..(61): /note="Nucleotide may be methylated to form 5-methylcytosine"
gtttgccatgtgagaaatggaagaaaggcaggcaaaaaaagaacaagccaagagtcccagcggagacttggccaagtgtcctgggctgctggaacattcccctttgaaggtacaagccatct

SEQ ID NO: 26611 - DNA, 122 bp, Homo sapiens
  misc_feature (61)..(62): /note="This region represents a CpG dinucleotide"
  misc_feature (61)..(61): /note="Nucleotide may be methylated to form 5-methylcytosine"
tctgaagcccaaagcaagccaagctgagttgcatgagacacaggacttgagtgaggagcccgggctgggccagagcctgatgccagttccaggtccagggaaacagcaagtcaaggtgagag

SEQ ID NO: 26612 - DNA, 122 bp, Homo sapiens
  misc_feature (61)..(62): /note="This region represents a CpG dinucleotide"
  misc_feature (61)..(61): /note="Nucleotide may be methylated to form 5-methylcytosine"
taaaaagggcaagttcagtgtatctaagtagaaggcacacccatgccctctcagggagagcgtgtgtatgcaatgcaaacacacaggcaggtacacacacacatgctccttacacgtgctca

SEQ ID NO: 26613 - DNA, 122 bp, Homo sapiens
  misc_feature (61)..(62): /note="This region represents a CpG dinucleotide"
  misc_feature (61)..(61): /note="Nucleotide may be methylated to form 5-methylcytosine"
tgtcatgatagaacactgctatagggacaccctatagaggtcaaagcccttaagttctctcgctcccatgcctggcctggaaggctgaggcaagctgccaagacagccactgcagggtgata

SEQ ID NO: 26614 - DNA, 122 bp, Homo sapiens
  misc_feature (61)..(62): /note="This region represents a CpG dinucleotide"
  misc_feature (61)..(61): /note="Nucleotide may be methylated to form 5-methylcytosine"
ttacccagtctgtggtattctgctacagcaacacaaaatagtttgtcaccaaatagtaaacgggacacaaaggacataatcacaaagaagtcaaaatggggacattattgatttaattcttt

SEQ ID NO: 26615 - DNA, 122 bp, Homo sapiens
  misc_feature (61)..(62): /note="This region represents a CpG dinucleotide"
  misc_feature (61)..(61): /note="Nucleotide may be methylated to form 5-methylcytosine"
aggcaaccacagtactggggtgaggtcacagaagctgagtccagcccttgcttggggagacgggtacaggaagtagcaggggcagggagggaaggggtagatggagagttgtcatcagcacc

SEQ ID NO: 26616 - DNA, 122 bp, Homo sapiens
  misc_feature (61)..(62): /note="This region represents a CpG dinucleotide"
  misc_feature (61)..(61): /note="Nucleotide may be methylated to form 5-methylcytosine"
atcaccctcccttctctgttcactgcaataatgtttaattaatataatgagcctcctgcacgttgggaaaaaatacttatttttataacccagcctggatttttcatttcatttccactcct

SEQ ID NO: 26617 - DNA, 122 bp, Homo sapiens
  misc_feature (61)..(62): /note="This region represents a CpG dinucleotide"
  misc_feature (61)..(61): /note="Nucleotide may be methylated to form 5-methylcytosine"
ctgctggtataatcctttagaggctcaagagtttctttttaggaagggtttgggatggagcgcaacctagatagaaggaaatagaggacctgaattgaaagtgtgtttgtagagcaaacata

SEQ ID NO: 26618 - DNA, 122 bp, Homo sapiens
  misc_feature (61)..(62): /note="This region represents a CpG dinucleotide"
  misc_feature (61)..(61): /note="Nucleotide may be methylated to form 5-methylcytosine"
gcatggttaataaacctctgaaaagagattcaaaatatgtattttgtaaagcagggtcgtcgcagtaaacaaggtaaaatacacatctgaaaagagattgagatatatttgaaaaaaagaga

SEQ ID NO: 26619 - DNA, 122 bp, Homo sapiens
  misc_feature (61)..(62): /note="This region represents a CpG dinucleotide"
  misc_feature (61)..(61): /note="Nucleotide may be methylated to form 5-methylcytosine"
aagcaagatagagaaatgagcaagggaggtaatggcactgcgcccatggagaggggccgacggaaaatgactcataagcatggttgggactgtccttgggaagaagttgggagactctaaga

SEQ ID NO: 26620 - DNA, 122 bp, Homo sapiens
  misc_feature (61)..(62): /note="This region represents a CpG dinucleotide"
  misc_feature (61)..(61): /note="Nucleotide may be methylated to form 5-methylcytosine"
ttccctgttctctcagaggctagattgctgaacctgatcggtaagaggcagtctgtgtgacggcacaggactaggatggccactgagtcatcctgagcaagttatctgacctctctgggcct

SEQ ID NO: 26621 - DNA, 122 bp, Homo sapiens
  misc_feature (61)..(62): /note="This region represents a CpG dinucleotide"
  misc_feature (61)..(61): /note="Nucleotide may be methylated to form 5-methylcytosine"
cggggggctcaggagctgcatgcacaggtgtgactttgcacatgggtgcccaaacaggtgcgtcctcccaggtgtgcacccacagatgtgtcctcacgggcgtgtgcctgcaggtgtgtcct

SEQ ID NO: 26622 - DNA, 122 bp, Homo sapiens
  misc_feature (61)..(62): /note="This region represents a CpG dinucleotide"
  misc_feature (61)..(61): /note="Nucleotide may be methylated to form 5-methylcytosine"
tcagtttgctgagtttgtaatgtcctctctaagggagaagaaaagacattacaaactcaacgggaatgttcagcaggtatgtcatgaacttatctgctggtttcaacagatcttcccttcca

SEQ ID NO: 26623 - DNA, 122 bp, Homo sapiens
  misc_feature (61)..(62): /note="This region represents a CpG dinucleotide"
  misc_feature (61)..(61): /note="Nucleotide may be methylated to form 5-methylcytosine"
agtgttttccagcagagggcatccttatgcaacgaatttctctaccctcagaattatttgcggatattgaagtgcattagggaacagattttgcttttaaaggctttgcagttcagtttgtt

SEQ ID NO: 26624 - DNA, 122 bp, Homo sapiens
  misc_feature (61)..(62): /note="This region represents a CpG dinucleotide"
  misc_feature (61)..(61): /note="Nucleotide may be methylated to form 5-methylcytosine"
aagtgaggtttaaagcagagaaggtagcccctaggggcagccccatggggtcaaggacagcggcaagatgacccagaggggcccttggtggacccaggggacctgaccaccacctggaaact

SEQ ID NO: 26625 - DNA, 122 bp, Homo sapiens
  misc_feature (61)..(62): /note="This region represents a CpG dinucleotide"
  misc_feature (61)..(61): /note="Nucleotide may be methylated to form 5-methylcytosine"
actcacttttaggacattcttatttgctgttccaggctctcggagaggcagcccaagaggcgctgctgctaaaatgactctgggcacggtagagatggggagatacggaaatgaatagcagc

SEQ ID NO: 26626 - DNA, 122 bp, Homo sapiens
  misc_feature (61)..(62): /note="This region represents a CpG dinucleotide"
  misc_feature (61)..(61): /note="Nucleotide may be methylated to form 5-methylcytosine"
catcctccttccttctgtagtactgggtgaagcccgcggatttgtgataagcagttgccacgactcagaaggtggtccgcgtctccacgctggagcaatggccatgctagaaagtgcagttt

SEQ ID NO: 26627 - DNA, 122 bp, Homo sapiens
  misc_feature (61)..(62): /note="This region represents a CpG dinucleotide"
  misc_feature (61)..(61): /note="Nucleotide may be methylated to form 5-methylcytosine"
caccattgctgggaactgtgggtacccccagagtgaagcaataccatggctcagctgactcggcttctcccagtaaaggaagaatgggctggctgagcccggtgccaggactctgtagatgc

SEQ ID NO: 26628 - DNA, 122 bp, Homo sapiens
  misc_feature (61)..(62): /note="This region represents a CpG dinucleotide"
  misc_feature (61)..(61): /note="Nucleotide may be methylated to form 5-methylcytosine"
ctgggccttcacctgctgctccaggtcccacaacttcctcgtcatgaaggccatcagctccgagtcatgggatgcagggactgccaagcacacaaagtctttagagcccagacctagagccg

SEQ ID NO: 26629 - DNA, 122 bp, Homo sapiens
  misc_feature (61)..(62): /note="This region represents a CpG dinucleotide"
  misc_feature (61)..(61): /note="Nucleotide may be methylated to form 5-methylcytosine"
aacttgcgaggagggcggggccgcagaccggtcctttaaaggttggaagtggccccgaggcgccggcagccctgggcggtcccgggaatcgcacaggacccggctcccctcgcctaagctgc

SEQ ID NO: 26630 - DNA, 122 bp, Homo sapiens
  misc_feature (61)..(62): /note="This region represents a CpG dinucleotide"
  misc_feature (61)..(61): /note="Nucleotide may be methylated to form 5-methylcytosine"
gagattttataatacatttccttttctctcctctttttctaggttctttcctgctggatgcgaaacactcaattatcacttcctcatgtgtgtagtctccctcactgagtcagctctcactg

SEQ ID NO: 26631 - DNA, 122 bp, Homo sapiens
  misc_feature (61)..(62): /note="This region represents a CpG dinucleotide"
  misc_feature (61)..(61): /note="Nucleotide may be methylated to form 5-methylcytosine"
tgttgagaacataaggaactggtaatctaggtttacagctgccaaatctaatctaagtatcggtgctctagtttttaatgattttatgtcagactgaataagatcctcattaagctaagggc

SEQ ID NO: 26632 - DNA, 122 bp, Homo sapiens
  misc_feature (61)..(62): /note="This region represents a CpG dinucleotide"
  misc_feature (61)..(61): /note="Nucleotide may be methylated to form 5-methylcytosine"
aatgtgttaacatgttgtgagtctgatacagcatatttagatgttggaattagactacatcgtgaaatttctagaaggccggcaaaaaccgtatgtctatctatgaggtaaacatacactga

SEQ ID NO: 26633 - DNA, 122 bp, Homo sapiens
  misc_feature (61)..(62): /note="This region represents a CpG dinucleotide"
  misc_feature (61)..(61): /note="Nucleotide may be methylated to form 5-methylcytosine"
ctgcaatattggctacacatagctgacttaataaatagtcccttgactggtataagctgacgttacaaaaactggtaattccgaaaccactcatactggacttattaaataatccctcaact

SEQ ID NO: 26634 - DNA, 122 bp, Homo sapiens
  misc_feature (61)..(62): /note="This region represents a CpG dinucleotide"
  misc_feature (61)..(61): /note="Nucleotide may be methylated to form 5-methylcytosine"
attagtctttacacaatccactgacatggacagctataaaagttacacttgctgctctagcgctgactagacaaatttgtagtgattagcacattacctgaactatcattccaagtttgtct

SEQ ID NO: 26635 - DNA, 122 bp, Homo sapiens
  misc_feature (61)..(62): /note="This region represents a CpG dinucleotide"
  misc_feature (61)..(61): /note="Nucleotide may be methylated to form 5-methylcytosine"
ttccactcttcagcagagtgatgcgtctgttcttggtcatcctcccaagtaattatgtgccgtgcttaagctttgagctttgcacttggactgaactggtttgaatccagctccactagata

SEQ ID NO: 26636 - DNA, 122 bp, Homo sapiens
  misc_feature (61)..(62): /note="This region represents a CpG dinucleotide"
  misc_feature (61)..(61): /note="Nucleotide may be methylated to form 5-methylcytosine"
caagagaggcttcagcgatttcgagaacagtgatgcaatgtggagagacgcggcaggcagcggcagaatctaattgcatttgagaagcatctccacaatttgtagtggccttctcacaggga

SEQ ID NO: 26637 - DNA, 122 bp, Homo sapiens
  misc_feature (61)..(62): /note="This region represents a CpG dinucleotide"
  misc_feature (61)..(61): /note="Nucleotide may be methylated to form 5-methylcytosine"
tgtcacctctatcactgggtttttccacacgtattactgctattgttatttcaaaatgttcggggccagaagtttctgccaactcctgtaccaaaaaggctcctgtccttccctagtgacag

SEQ ID NO: 26638 - DNA, 122 bp, Homo sapiens
  misc_feature (61)..(62): /note="This region represents a CpG dinucleotide"
  misc_feature (61)..(61): /note="Nucleotide may be methylated to form 5-methylcytosine"
ctctgccctaatcctctcttacccagtactatggggtttgtttacaggaaacccttgccacgagaagttttctgctagttttcaaccgtattttggcatcatcaactcaggcatatggaaac

SEQ ID NO: 26639 - DNA, 122 bp, Homo sapiens
  misc_feature (61)..(62): /note="This region represents a CpG dinucleotide"
  misc_feature (61)..(61): /note="Nucleotide may be methylated to form 5-methylcytosine"
ggggcagcccaacggaaggatgccttgaagatggcaggcagggcagaacacaggctcccacgcctcttgcctgaatcactgcattgttagaaaatataagttaaatgatcctggctgtgcct

SEQ ID NO: 26640 - DNA, 122 bp, Homo sapiens
  misc_feature (61)..(62): /note="This region represents a CpG dinucleotide"
  misc_feature (61)..(61): /note="Nucleotide may be methylated to form 5-methylcytosine"
accattttaatgaaaatgactaactggttatttccctgcaaatacagcaatgctctttatcgccccatcaactcctgccaccctgtaagtacaatggcaataacactagtcttggagttgga

SEQ ID NO: 26641 - DNA, 122 bp, Homo sapiens
  misc_feature (61)..(62): /note="This region represents a CpG dinucleotide"
  misc_feature (61)..(61): /note="Nucleotide may be methylated to form 5-methylcytosine"
tgcagggccttgtgtgactgtgttcacgtcggcccctctcacctctgagctcctccccaccgcgcttgtgagtggagcagcccaggagactgtatgtggggttttccaaccacaaagcatgg

SEQ ID NO: 26642 - DNA, 122 bp, Homo sapiens
  misc_feature (61)..(62): /note="This region represents a CpG dinucleotide"
  misc_feature (61)..(61): /note="Nucleotide may be methylated to form 5-methylcytosine"
taacagcagacaatcctaagaaatgctttgttttaggactgtcatttgtcacaggattctcgttaagaatcaagagatttttaccactctcattttacaggtccaagaaacatgaagctatg

SEQ ID NO: 26643 - DNA, 122 bp, Homo sapiens
  misc_feature (61)..(62): /note="This region represents a CpG dinucleotide"
  misc_feature (61)..(61): /note="Nucleotide may be methylated to form 5-methylcytosine"
aaataaagggatgggtctggctagttatcagcagcaggagcaagcccttaaggcacagatcgctcatgctattgtctgtggttcaggaacgcctttaagcggttttccaccctgggtgggcc

SEQ ID NO: 26644 - DNA, 122 bp, Homo sapiens
  misc_feature (61)..(62): /note="This region represents a CpG dinucleotide"
  misc_feature (61)..(61): /note="Nucleotide may be methylated to form 5-methylcytosine"
gaagaactagaagtggatgccttgtgacatcgccagcttgtttccctgggcaactgactccgaggggtgagcaaatccctcagagaaatgctcctgacacagttatgtaagtctgtaattgg

SEQ ID NO: 26645 - DNA, 122 bp, Homo sapiens
  misc_feature (61)..(62): /note="This region represents a CpG dinucleotide"
  misc_feature (61)..(61): /note="Nucleotide may be methylated to form 5-methylcytosine"
ttgagaagggagttaaacacaggaaaacctcactagggaggtggcctattgtatcaaccacgaaaggatgagtctttcagaaaggaaaagtcttttggaaacaagaacacctgggttttagc

SEQ ID NO: 26646 - DNA, 122 bp, Homo sapiens
  misc_feature (61)..(62): /note="This region represents a CpG dinucleotide"
  misc_feature (61)..(61): /note="Nucleotide may be methylated to form 5-methylcytosine"
agccaacccaagtaacaggacgaggctcggcattcagatgttaatccgcataagcccaagcgctgataaccatgacgttttggaaaccagacaccatagatcattagacaacaatgccaagc

SEQ ID NO: 26647 - DNA, 122 bp, Homo sapiens
  misc_feature (61)..(62): /note="This region represents a CpG dinucleotide"
  misc_feature (61)..(61): /note="Nucleotide may be methylated to form 5-methylcytosine"
gagtcgctgcccggctgccttgggttttccttgtgaatcagcacttgctgcatgtgacctcgccaagcaggggtttctgtcaacccgccctctagggataagaggtcatggacttttccctt

SEQ ID NO: 26648 - DNA, 122 bp, Homo sapiens
  misc_feature (61)..(62): /note="This region represents a CpG dinucleotide"
  misc_feature (61)..(61): /note="Nucleotide may be methylated to form 5-methylcytosine"
tgcagcagctggtgagagctgtaggggcattcccagacacatttctcatgacatccttggcgctggtagcatggccagcaccaggccaggatctaaggacctggagggtcagagggccactg

SEQ ID NO: 26649 - DNA, 122 bp, Homo sapiens
  misc_feature (61)..(62): /note="This region represents a CpG dinucleotide"
  misc_feature (61)..(61): /note="Nucleotide may be methylated to form 5-methylcytosine"
acccgaaaagcacttattaagtgctttcataatcattatcttaaacaaggaattaggagacgtcagtgctagtccagttccaattctcggtgattactttgagaaagtcactctctctgttg

SEQ ID NO: 26650 - DNA, 122 bp, Homo sapiens
  misc_feature (61)..(62): /note="This region represents a CpG dinucleotide"
  misc_feature (61)..(61): /note="Nucleotide may be methylated to form 5-methylcytosine"
atcaagcaagtgtgatctgtgatacatgctaggggaaaaaagccatcctctgccaagaaacgcatgaatagttcattaatctgctgatccatttgggagcattatggaattcaaagcccaga

SEQ ID NO: 26651 - DNA, 122 bp, Homo sapiens
  misc_feature (61)..(62): /note="This region represents a CpG dinucleotide"
  misc_feature (61)..(61): /note="Nucleotide may be methylated to form 5-methylcytosine"
tcagaaaaaggaggggcgacaaaggaaaataattaggctgtagcctcaattgtgcattcccgtgcaaggtgccctgactcgccacagcggtaacagttgacttcacttgtcttgctgcagtt

SEQ ID NO: 26652 - DNA, 122 bp, Homo sapiens
  misc_feature (61)..(62): /note="This region represents a CpG dinucleotide"
  misc_feature (61)..(61): /note="Nucleotide may be methylated to form 5-methylcytosine"
ggaagcactgatgtggcactaaatattcctgcagcttcagccttctcccttgggggcccacgtcatcgctgtgagcctggtttctggaatgtttttgatatgaagcatccaggcaggtgagg

SEQ ID NO: 26653 - DNA, 122 bp, Homo sapiens
  misc_feature (61)..(62): /note="This region represents a CpG dinucleotide"
  misc_feature (61)..(61): /note="Nucleotide may be methylated to form 5-methylcytosine"
tggtattctatggtgtagaaatcaaattttgactttaataaactcatcacatggcaactacgcgagggcttaacagcctgtaagaataagaatgcaagtactcagacaaagaaatgtctggg

SEQ ID NO: 26654 - DNA, 122 bp, Homo sapiens
  misc_feature (61)..(62): /note="This region represents a CpG dinucleotide"
  misc_feature (61)..(61): /note="Nucleotide may be methylated to form 5-methylcytosine"
tgccacttcctccagtgttggcaactctgcggctttctctactcaggaagcacttggagccgccagctgcaggcgctcctgtctccgggcaccgggctctgctggagctgcagcttagcctg

SEQ ID NO: 26655 - DNA, 122 bp, Homo sapiens
  misc_feature (61)..(62): /note="This region represents a CpG dinucleotide"
  misc_feature (61)..(61): /note="Nucleotide may be methylated to form 5-methylcytosine"
acacacacacccttgccagccacacgctatcagctggaagtggggagggcgcggggagggcgtgggggagccagcagcccgcccgccctcccgcccccagacgaggactccccagcaccggg

SEQ ID NO: 26656 - DNA, 122 bp, Homo sapiens
  misc_feature (61)..(62): /note="This region represents a CpG dinucleotide"
  misc_feature (61)..(61): /note="Nucleotide may be methylated to form 5-methylcytosine"
tcgatttcatacttgaatttaggctgatttaatctcgcctctacagcccctactcccccccgccattggtttacctgtcctgcatgcccgtttgggacacactcaaactgtaactcaaaaat

SEQ ID NO: 26657 - DNA, 122 bp, Homo sapiens
  misc_feature (61)..(62): /note="This region represents a CpG dinucleotide"
  misc_feature (61)..(61): /note="Nucleotide may be methylated to form 5-methylcytosine"
gtgcgcacattcctagatgctagccctgtggcggcgcacctcacgctcattcacagtacacggacatgctcacctgcccaccatgggtggtcaacccttggacacccacactcttctcacac

SEQ ID NO: 26658 - DNA, 122 bp, Homo sapiens
  misc_feature (61)..(62): /note="This region represents a CpG dinucleotide"
  misc_feature (61)..(61): /note="Nucleotide may be methylated to form 5-methylcytosine"
ttcctgcaccctccccttaagtggcttccagtaagctaccaaaccctggtggcgcctgcacgccccagggcaagccagcctgaccttctcctcagagcctgagtcagggctttccccatctc

SEQ ID NO: 26659 - DNA, 122 bp, Homo sapiens
  misc_feature (61)..(62): /note="This region represents a CpG dinucleotide"
  misc_feature (61)..(61): /note="Nucleotide may be methylated to form 5-methylcytosine"
cctttgatccttctggatgagggtggctcccaggctgcagggcaccctcaggtgggtgagcgctcacactcccgtcccacttggccaggactcctttccatggctctgcagcttgttcccac

SEQ ID NO: 26660 - DNA, 122 bp, Homo sapiens
  misc_feature (61)..(62): /note="This region represents a CpG dinucleotide"
  misc_feature (61)..(61): /note="Nucleotide may be methylated to form 5-methylcytosine"
ggcgggggaggcggggctgagggcagcaaagacatcaacattcttctttaaacattctagcgtttttggttgcactaaggatattaaggatcatgtttgatcagtgtgccctagaggagtaa

SEQ ID NO: 26661 - DNA, 122 bp, Homo sapiens
  misc_feature (61)..(62): /note="This region represents a CpG dinucleotide"
  misc_feature (61)..(61): /note="Nucleotide may be methylated to form 5-methylcytosine"
agtcccgtctgggagtgacaggagacagtgacagataatcaggcattagactctcataagcgcacaccctagatccctcagatgcacagttcacaatagggtttgagctcctatgagaagct

SEQ ID NO: 26662 - DNA, 122 bp, Homo sapiens
  misc_feature (61)..(62): /note="This region represents a CpG dinucleotide"
  misc_feature (61)..(61): /note="Nucleotide may be methylated to form 5-methylcytosine"
tggctaagctctaaaatctgggggctaccatttattttgctgatgacttgagtccctccccgctcccctttatttttccaagaaaggctgctctttaaagattgacctgatcaagtttcagg

SEQ ID NO: 26663 - DNA, 122 bp, Homo sapiens
  misc_feature (61)..(62): /note="This region represents a CpG dinucleotide"
  misc_feature (61)..(61): /note="Nucleotide may be methylated to form 5-methylcytosine"
cgggctccccgtggcagtaccctcttttgaagactttctttccttgctctgatggcgtgacgtggtgctcaaagagacttggcagagtccctgctttaccttttacgagtgcctttggaggt

SEQ ID NO: 26664 - DNA, 122 bp, Homo sapiens
  misc_feature (61)..(62): /note="This region represents a CpG dinucleotide"
  misc_feature (61)..(61): /note="Nucleotide may be methylated to form 5-methylcytosine"
ccgcgtcgccaagggcagtcattggcggccgcagacggaggaggacggcgttggccgggacgcggacagcgcagggcagcggcgggggcgcgggccggggccacgggcgcaggggccggagc

SEQ ID NO: 26665 - DNA, 122 bp, Homo sapiens
  misc_feature (61)..(62): /note="This region represents a CpG dinucleotide"
  misc_feature (61)..(61): /note="Nucleotide may be methylated to form 5-methylcytosine"
actgacatcaacccatagaaccccacacacaagtttacaggattcctggttggggagttccgttttgactgtcaagtttactctgcaactgagccaggtctcctgtaccaataagcaacggg

SEQ ID NO: 26666 - DNA, 122 bp, Homo sapiens
  misc_feature (61)..(62): /note="This region represents a CpG dinucleotide"
  misc_feature (61)..(61): /note="Nucleotide may be methylated to form 5-methylcytosine"
tgattctgggtgaaggtcacagcatgactcacagtatcttacacaccttggatgtatatacgcacttcttatgtcgtaagtaatccagagggaggagtttgctagagctagtccagagttca

SEQ ID NO: 26667 - DNA, 122 bp, Homo sapiens
  misc_feature (61)..(62): /note="This region represents a CpG dinucleotide"
  misc_feature (61)..(61): /note="Nucleotide may be methylated to form 5-methylcytosine"
ttgttttgagaattaaaccacacagtcttggcaaagtaccttgcaggatgtgcccttcttcgtcaacaggtttagaggcaggaggtttgaaagagtgaacactaatctaaaaataggacacc

SEQ ID NO: 26668 - DNA, 122 bp, Homo sapiens
  misc_feature (61)..(62): /note="This region represents a CpG dinucleotide"
  misc_feature (61)..(61): /note="Nucleotide may be methylated to form 5-methylcytosine"
caaatagtttcacttctttccttcaagtctggatgccttcatttccttttcttgcctaatcgcttggcttcttttaactccttttatttttgacaatgtgagaaccaggcctggccggctgg

SEQ ID NO: 26669 - DNA, 122 bp, Homo sapiens
  misc_feature (61)..(62): /note="This region represents a CpG dinucleotide"
  misc_feature (61)..(61): /note="Nucleotide may be methylated to form 5-methylcytosine"
gagttctctgcaggaataaataagcctcagcattcatgaaaatccactactccagacagacggctttggaatccaccagctacatccagctccctgaggcaggtaatccatgatgttttaca

SEQ ID NO: 26670 - DNA, 122 bp, Homo sapiens
  misc_feature (61)..(62): /note="This region represents a CpG dinucleotide"
  misc_feature (61)..(61): /note="Nucleotide may be methylated to form 5-methylcytosine"
agaaaggaatgccacaaccatgacacaattttttcaaacaaaattctttacctcatttctcgttcttcatgttgagcgataaggttgctataaaaattctccagtgtcactttggtcattgt

SEQ ID NO: 26671 - DNA, 122 bp, Homo sapiens
  misc_feature (61)..(62): /note="This region represents a CpG dinucleotide"
  misc_feature (61)..(61): /note="Nucleotide may be methylated to form 5-methylcytosine"
tgctcaacttgcagcagcctctgcctcaccccttaaaggagctgattatagattcccttacgctgcctctctaattgtctcatgattgcattcttgagggctatggaccgagggaaaaggat

SEQ ID NO: 26672 - DNA, 122 bp, Homo sapiens
  misc_feature (61)..(62): /note="This region represents a CpG dinucleotide"
  misc_feature (61)..(61): /note="Nucleotide may be methylated to form 5-methylcytosine"
aaaagaaaaaaaattatgattcagggctgtgtgatttgtgccctgctctctgacaagccccgtagatgatagtgcgttcagtgccaggaatttcaggtgtctgttagacatgtcattttgcc

SEQ ID NO: 26673 - DNA, 122 bp, Homo sapiens
  misc_feature (61)..(62): /note="This region represents a CpG dinucleotide"
  misc_feature (61)..(61): /note="Nucleotide may be methylated to form 5-methylcytosine"
tggggcagcctcagcgcagcttctcgggtggggcggggcgctcggggcctaaggcgcagtcgcaggctggggagggggctcggctcgccggggacgcgcccaggagagaaagcggcggcagg

SEQ ID NO: 26674 - DNA, 122 bp, Homo sapiens
  misc_feature (61)..(62): /note="This region represents a CpG dinucleotide"
  misc_feature (61)..(61): /note="Nucleotide may be methylated to form 5-methylcytosine"
gcaacggcccaactgaactcaagataggtaacatctatcactctctgcaatctgcaagctcgtcactctgcctgggaagattagattagtaagcacccggtcatcggaaaaatccagctcca

SEQ ID NO: 26675 - DNA, 122 bp, Homo sapiens
  misc_feature (61)..(62): /note="This region represents a CpG dinucleotide"
  misc_feature (61)..(61): /note="Nucleotide may be methylated to form 5-methylcytosine"
tggctggcagcatcgtattatagcctgagatagttgtattcattcctgaaaccctcccaacgcccccatggggtctatccacagcaggcgtcttccttaggggaaaaaaagggaagaaaggt

SEQ ID NO: 26676 - DNA, 122 bp, Homo sapiens
  misc_feature (61)..(62): /note="This region represents a CpG dinucleotide"
  misc_feature (61)..(61): /note="Nucleotide may be methylated to form 5-methylcytosine"
gtccattaatttagcagattgataacaggctacttggttctcatgtgaattctgtggcaacgtgaacaggtccaaggctgttcaatggagatgcagaatggagattcagttctttgtgatcc

SEQ ID NO: 26677 - DNA, 122 bp, Homo sapiens
  misc_feature (61)..(62): /note="This region represents a CpG dinucleotide"
  misc_feature (61)..(61): /note="Nucleotide may be methylated to form 5-methylcytosine"
taggacaagagaatggtaatgtggcattctagtgagaggaaatggcataagaaaaggcaacgctgtgtgggaaaaggcgacattctgaaggttaaaagaaatgaacaatttgggccgggcgc

SEQ ID NO: 26678 - DNA, 122 bp, Homo sapiens
  misc_feature (61)..(62): /note="This region represents a CpG dinucleotide"
  misc_feature (61)..(61): /note="Nucleotide may be methylated to form 5-methylcytosine"
gggaactataactttgaatttcctggctctggggctgtgaaaatcacaacctgaaccttccgttgatgtgggtttctcgattaatttcctgtttgattgtttactttagagagcggaaaatg

SEQ ID NO: 26679 - DNA, 122 bp, Homo sapiens
  misc_feature (61)..(62): /note="This region represents a CpG dinucleotide"
  misc_feature (61)..(61): /note="Nucleotide may be methylated to form 5-methylcytosine"
gtaaaggtaggaactagcatctttattgaatttacaatgcccttcccatatacattatttcgggccatcttctaaacagcaagtatgagttaggtggaagcaacgtgtatttgttcttggta

SEQ ID NO: 26680 - DNA, 122 bp, Homo sapiens
  misc_feature (61)..(62): /note="This region represents a CpG dinucleotide"
  misc_feature (61)..(61): /note="Nucleotide may be methylated to form 5-methylcytosine"
ccccgcaactacacacaccagacctccaaattactgctcttcgattaggaataatatactcgctgaacctacagcccaaagcagaaaggctgggccagcccagtagtcctgaatcagctgca

SEQ ID NO: 26681 - DNA, 122 bp, Homo sapiens
  misc_feature (61)..(62): /note="This region represents a CpG dinucleotide"
  misc_feature (61)..(61): /note="Nucleotide may be methylated to form 5-methylcytosine"
ctgcttttcagtattccttgaagagctacctgcttgggaagcataatggaagctgcgaggcgcttttcaagaaagttgagtattctgagatttgatgaggaacacatgactatgttattaaa

SEQ ID NO: 26682 - DNA, 122 bp, Homo sapiens
  misc_feature (61)..(62): /note="This region represents a CpG dinucleotide"
  misc_feature (61)..(61): /note="Nucleotide may be methylated to form 5-methylcytosine"
cgggctgcagtgggggctactgtgggcatcaggggccgtgggcagggcctggggtggggacgcatcagggagacaggggaagaggaagtgcctttggtcctggggaaggttggcttgtcttg

SEQ ID NO: 26683 - DNA, 122 bp, Homo sapiens
  misc_feature (61)..(62): /note="This region represents a CpG dinucleotide"
  misc_feature (61)..(61): /note="Nucleotide may be methylated to form 5-methylcytosine"
aacatattttttctgtctcaattgcttcgatgcctcctgcaatcagtgtgcagtagatgacgtatgtctcactgatccctgcttcattcatggatatagtttatgctggcattagtcatctc

SEQ ID NO: 26684 - DNA, 122 bp, Homo sapiens
  misc_feature (61)..(62): /note="This region represents a CpG dinucleotide"
  misc_feature (61)..(61): /note="Nucleotide may be methylated to form 5-methylcytosine"
gcctatttttaaaaatgtaagtccttcctttgaggccccccggaactggcagcaggccgacgggcaatcgttcctctggccgcacactttcaagtgaccgaatgtacccaaactgtttgata

SEQ ID NO: 26685 - DNA, 122 bp, Homo sapiens
  misc_feature (61)..(62): /note="This region represents a CpG dinucleotide"
  misc_feature (61)..(61): /note="Nucleotide may be methylated to form 5-methylcytosine"
acttcgtgatccacccgctttggccttccaaagtgctgggattacaggcctgagccactgcgccaggctgctcatagtttaatctccattgtacagccatgacaagagagaattaggaagac

SEQ ID NO: 26686 - DNA, 122 bp, Homo sapiens
  misc_feature (61)..(62): /note="This region represents a CpG dinucleotide"
  misc_feature (61)..(61): /note="Nucleotide may be methylated to form 5-methylcytosine"
ccccctcccggaaggctacctgaacacataaatgagcgggcttaattgttcatgagcaaccggtgttgtcaggcaagtccctctggcctcttcagaatcccagtaagtttaagactaaatag

SEQ ID NO: 26687 - DNA, 122 bp, Homo sapiens
  misc_feature (61)..(62): /note="This region represents a CpG dinucleotide"
  misc_feature (61)..(61): /note="Nucleotide may be methylated to form 5-methylcytosine"
gcactctgccagaatcatgtgaatttcagaggaaaatactcgttcacacatctcaaggaacgcacaggctcgtgagggagcattcttgccaatgcacatggtaaatgcccaatcgatgttcg

SEQ ID NO: 26688 - DNA, 122 bp, Homo sapiens
  misc_feature (61)..(62): /note="This region represents a CpG dinucleotide"
  misc_feature (61)..(61): /note="Nucleotide may be methylated to form 5-methylcytosine"
attcaatatggccattcactttctgctgtggttttgatttatcttcatcctctttgatctcgatttagcctctgcctttgctggctctttcttgaagccctttttctctcttggttttcatg

SEQ ID NO: 26689 - DNA, 122 bp, Homo sapiens
  misc_feature (61)..(62): /note="This region represents a CpG dinucleotide"
  misc_feature (61)..(61): /note="Nucleotide may be methylated to form 5-methylcytosine"
catccactcctctcgactttgctccatcggcttcagccgctggccccttgctgtttctgacgcacccctggcaggctcctggctctgggctgtcagatctaactgctccctttgcctgggaa

SEQ ID NO: 26690 - DNA, 122 bp, Homo sapiens
  misc_feature (61)..(62): /note="This region represents a CpG dinucleotide"
  misc_feature (61)..(61): /note="Nucleotide may be methylated to form 5-methylcytosine"
aaagaggcagagcagctttgccaccggcttatggagcatggcatcatccagcatggtgagcgtattgggcagcttttgctgcaggaacaaacagccagccccaaatcttgtgtcttacaaca

SEQ ID NO: 26691 - DNA, 122 bp, Homo sapiens
  misc_feature (61)..(62): /note="This region represents a CpG dinucleotide"
  misc_feature (61)..(61): /note="Nucleotide may be methylated to form 5-methylcytosine"
ctgtctaaaatatgaataatattgtctccttctcagggtttttatgaagatttaattttacgagacagagtatgccaagcacttagcacaatggctagcatatagaaaatagccaataaatt

SEQ ID NO: 26692 - DNA, 122 bp, Homo sapiens
  misc_feature (61)..(62): /note="This region represents a CpG dinucleotide"
  misc_feature (61)..(61): /note="Nucleotide may be methylated to form 5-methylcytosine"
aggcatcttccacatggtgattcagggcttcaggctgctgccaccttgtgtctgccatgccgtagagcatggagtcttttgcttccaggcagcagatcactaaggacatggaggattaccca

SEQ ID NO: 26693 - DNA, 122 bp, Homo sapiens
  misc_feature (61)..(62): /note="This region represents a CpG dinucleotide"
  misc_feature (61)..(61): /note="Nucleotide may be methylated to form 5-methylcytosine"
accaaagcagcagcaggaagtccagtccttccccagggcagcctagcagcagaggaggctcgggccagcagagggaggaggcgcagacagtgagagaacacttcccctccagcagagcagtc

SEQ ID NO: 26694 - DNA, 122 bp, Homo sapiens
  misc_feature (61)..(62): /note="This region represents a CpG dinucleotide"
  misc_feature (61)..(61): /note="Nucleotide may be methylated to form 5-methylcytosine"
tacagatatatttatttgctttctctcttgtcatttcctcagatgtatctaagcttaaaccgtcactgcctttcagtggtggatggagccccctttttaagctgtgggtgctagcctacact

SEQ ID NO: 26695 - DNA, 122 bp, Homo sapiens
  misc_feature (61)..(62): /note="This region represents a CpG dinucleotide"
  misc_feature (61)..(61): /note="Nucleotide may be methylated to form 5-methylcytosine"
ttccagcgcttggtgagtgacttcattaaatatgcaatggctgttgggtggcttctcagacgatggttcagttccttgtggaattgcattattactagaggtgtaaaaccaggcagacaagc

SEQ ID NO: 26696 - DNA, 122 bp, Homo sapiens
  misc_feature (61)..(62): /note="This region represents a CpG dinucleotide"
  misc_feature (61)..(61): /note="Nucleotide may be methylated to form 5-methylcytosine"
ggagtgtttggacgttgttcaggcattccctgctcgcctcacatagtcatgactgatagacggtgactgttgttcttgcacacctgtgtcaccaaagcagctgaatgagcagtgggaaatga

SEQ ID NO: 26697 - DNA, 122 bp, Homo sapiens
  misc_feature (61)..(62): /note="This region represents a CpG dinucleotide"
  misc_feature (61)..(61): /note="Nucleotide may be methylated to form 5-methylcytosine"
cattaaggatcaggtaggttgaaaaacttgcctgaggtcacatagcaattggcaaagtcacggtttgtaccctggcagtctgactccggtgccatgcacttcaccactgggtgttagattct

SEQ ID NO: 26698 - DNA, 122 bp, Homo sapiens
  misc_feature (61)..(62): /note="This region represents a CpG dinucleotide"
  misc_feature (61)..(61): /note="Nucleotide may be methylated to form 5-methylcytosine"
gacactgctgaccttacagccttgcaaatgatgtcatcaccatacgttcttcactcatgacgtggcatggatttgaccaaaggcgtgatcatgtttaaaataaaaaccctttatgagagttc

SEQ ID NO: 26699 - DNA, 122 bp, Homo sapiens
  misc_feature (61)..(62): /note="This region represents a CpG dinucleotide"
  misc_feature (61)..(61): /note="Nucleotide may be methylated to form 5-methylcytosine"
gcttctcttatctctttccatctcctccaggcaggcctctctgtgctgctgaaggcagatcgcttgttccacaccagctaccactcccaggcagtgcatatccgccctgtttgcagagtaag

SEQ ID NO: 26700 - DNA, 122 bp, Homo sapiens
  misc_feature (61)..(62): /note="This region represents a CpG dinucleotide"
  misc_feature (61)..(61): /note="Nucleotide may be methylated to form 5-methylcytosine"
tgaagagagtggctaggaattatcccctctgatacactcacccacatacaaaatgacctacgttcaaggtgacggtgacattttgagacaaaagactgaaaacaaattaaatgcacaatggt

SEQ ID NO: 26701 - DNA, 122 bp, Homo sapiens
  misc_feature (61)..(62): /note="This region represents a CpG dinucleotide"
  misc_feature (61)..(61): /note="Nucleotide may be methylated to form 5-methylcytosine"
gatcagtgcctgccatactgtcagcactagtcgttactattttcactggttgaacagacacgtgagttcacacatgacaccatctattgggatgagtcacgttgcttgctcaacaactttaa

SEQ ID NO: 26702 - DNA, 122 bp, Homo sapiens
  misc_feature (61)..(62): /note="This region represents a CpG dinucleotide"
  misc_feature (61)..(61): /note="Nucleotide may be methylated to form 5-methylcytosine"
agtgatgtgctcagggttgtactttgggaagatcactaggctctgactgtgtgcctgttgcgcccacaggcaactgcatgctccttgaggctgagaacttctgattcatcccagaatctccc

SEQ ID NO: 26703 - DNA, 122 bp, Homo sapiens
  misc_feature (61)..(62): /note="This region represents a CpG dinucleotide"
  misc_feature (61)..(61): /note="Nucleotide may be methylated to form 5-methylcytosine"
ccgtccctccccgttacaccatggtgaccgagctgtctgtcagggggagcttggggtcgtcgagcacgcgtggtgccctccaggctccgcgaagagggaaaggcatgagtgtggagagggag

SEQ ID NO: 26704 - DNA, 122 bp, Homo sapiens
  misc_feature (61)..(62): /note="This region represents a CpG dinucleotide"
  misc_feature (61)..(61): /note="Nucleotide may be methylated to form 5-methylcytosine"
ctcatgaaatccttatgaaataccatctgaagcaggttctgcctggaacgtgcttctcctcgtcttcatgtggctggtttgttcccaccattcatgcatcagctcaattatttcttctaacg

SEQ ID NO: 26705 - DNA, 122 bp, Homo sapiens
  misc_feature (61)..(62): /note="This region represents a CpG dinucleotide"
  misc_feature (61)..(61): /note="Nucleotide may be methylated to form 5-methylcytosine"
atttttccttgggaatctcccctttcctagtcacacccgtccatacaggtagacaactgtcgacccatgaaaaggaaacacactcctctttgttctccctgaccttagctgtcctcaggata

SEQ ID NO: 26706 - DNA, 122 bp, Homo sapiens
  misc_feature (61)..(62): /note="This region represents a CpG dinucleotide"
  misc_feature (61)..(61): /note="Nucleotide may be methylated to form 5-methylcytosine"
acagccatgcctgtgcccaggactggggcttttccactgatatcctcaggtgagaagcagcgtgtagagcgagccagctccactccctgtaagtgaagcacaaagcagagtgatctacttat

SEQ ID NO: 26707 - DNA, 122 bp, Homo sapiens
  misc_feature (61)..(62): /note="This region represents a CpG dinucleotide"
  misc_feature (61)..(61): /note="Nucleotide may be methylated to form 5-methylcytosine"
gcggagtataatacagtgaaccccatgtgtccatacccaccacaacaaactactgacgcacgcaacaaagtgaatggaagtaacaacctccgggaccgtgtctcccgccccaccccaatctc

SEQ ID NO: 26708 - DNA, 122 bp, Homo sapiens
  misc_feature (61)..(62): /note="This region represents a CpG dinucleotide"
  misc_feature (61)..(61): /note="Nucleotide may be methylated to form 5-methylcytosine"
tggggcatattgaattagaggttaaaggtggagggggtggggtgtggagaaagggaaagacggagaaagaaaagaagggctgctcagtggcagacttttagtgaaatggtgaatgcagcctt

SEQ ID NO: 26709 - DNA, 122 bp, Homo sapiens
  misc_feature (61)..(62): /note="This region represents a CpG dinucleotide"
  misc_feature (61)..(61): /note="Nucleotide may be methylated to form 5-methylcytosine"
acatattggcttcattctagtccaatttgttttcttttatgcctacacaccaagggtgttcgcttgaaaacaagtcttccttcacctcctgctttttctcctcacctgctctttaaaaaata

SEQ ID NO: 26710 - DNA, 122 bp, Homo sapiens
  misc_feature (61)..(62): /note="This region represents a CpG dinucleotide"
  misc_feature (61)..(61): /note="Nucleotide may be methylated to form 5-methylcytosine"
ttttgtttttcctttaacaaggtccaaagaaagatgcaaaaggagatcacacccttgccccgctgagccccgtgataacaagtcactccagactaacctgtgtgccagacatttgtgcattg

SEQ ID NO: 26711 - DNA, 122 bp, Homo sapiens
  misc_feature (61)..(62): /note="This region represents a CpG dinucleotide"
  misc_feature (61)..(61): /note="Nucleotide may be methylated to form 5-methylcytosine"
taaaaaaagtgatgtgcccccttttgcagcttgtgagctctcctctgattaatacaatcccgttagaacctacaaggcatagagggaaggatagtacaaagaagttttgatgaagggaaatg

SEQ ID NO: 26712 - DNA, 122 bp, Homo sapiens
  misc_feature (61)..(62): /note="This region represents a CpG dinucleotide"
  misc_feature (61)..(61): /note="Nucleotide may be methylated to form 5-methylcytosine"
ggcgattccatctgttttaatttaagattcaccccagccatgcctctgtagcaggtgacacgtgcacacacacacacacccccacacccacacactgtttccttatgtaacatacatgatgt

SEQ ID NO: 26713 - DNA, 122 bp, Homo sapiens
  misc_feature (61)..(62): /note="This region represents a CpG dinucleotide"
  misc_feature (61)..(61): /note="Nucleotide may be methylated to form 5-methylcytosine"
ctgggaggggaccaggcagccttcctggaagaggtggcagctcaggttggccctgaagggcgggcaggagttcgccaggcagaaggcatttggaggtgaggaggtgggcgtgtttttagatt

SEQ ID NO: 26714 - DNA, 122 bp, Homo sapiens
  misc_feature (61)..(62): /note="This region represents a CpG dinucleotide"
  misc_feature (61)..(61): /note="Nucleotide may be methylated to form 5-methylcytosine"
ctattaataatgttaaagggggttacagccgtgactcactccaggaagtcaaccatcattcgcttcctcaatctcaccaaccagtccccatgtacaaaatcagcgacttctgcaaatgagtt

SEQ ID NO: 26715 - DNA, 122 bp, Homo sapiens
  misc_feature (61)..(62): /note="This region represents a CpG dinucleotide"
  misc_feature (61)..(61): /note="Nucleotide may be methylated to form 5-methylcytosine"
agcttgatgtttctgacttggctaatggagtgagagggcacgggttctgtctgcgggtaacgcaaatcagtgccgccaccatcattcagtgggtgtcagagctggccagtgcagtccccgaa

SEQ ID NO: 26716 - DNA, 122 bp, Homo sapiens
  misc_feature (61)..(62): /note="This region represents a CpG dinucleotide"
  misc_feature (61)..(61): /note="Nucleotide may be methylated to form 5-methylcytosine"
gcccaaagtcacacagccaacaggcagggaagctaggaggaagctcagaactgattccagcgccacatcataaccacaatgcggcctcccgagtgtagccacgtcataaccacaatgcgggg

SEQ ID NO: 26717 - DNA, 122 bp, Homo sapiens
  misc_feature (61)..(62): /note="This region represents a CpG dinucleotide"
  misc_feature (61)..(61): /note="Nucleotide may be methylated to form 5-methylcytosine"
tgcagatatcaggtgatcactgcagatatcatgtgatcgctgcggccttggagccagaggcgtccctgtttctgcttccccaagaggacattctcctcccatggggaaggcccccactcact

SEQ ID NO: 26718 - DNA, 122 bp, Homo sapiens
  misc_feature (61)..(62): /note="This region represents a CpG dinucleotide"
  misc_feature (61)..(61): /note="Nucleotide may be methylated to form 5-methylcytosine"
ctactgtacagataatgaaactaagtgggagagaagccaggtcacttgtccaaggccacacgagtgataagcagctagcacaccaggactgcttgacttcagaactctgcggtctggcctcc

SEQ ID NO: 26719 - DNA, 122 bp, Homo sapiens
  misc_feature (61)..(62): /note="This region represents a CpG dinucleotide"
  misc_feature (61)..(61): /note="Nucleotide may be methylated to form 5-methylcytosine"
aaatcacttaaatctgagaggtggaggttgcagtgggccgagatcaatcacaccactgcacgctagcctgatgaaggaaggagaaacagtgattcatttgttttgataaaatctggccttca

SEQ ID NO: 26720 - DNA, 122 bp, Homo sapiens
  misc_feature (61)..(62): /note="This region represents a CpG dinucleotide"
  misc_feature (61)..(61): /note="Nucleotide may be methylated to form 5-methylcytosine"
ggcatgatctgacttctgtttaccggagatcactctggccgctgataaaacctcaaggagcgcagtggggcacgatcaccccgggaagacaagcagcagctgggaagggctggggtagtagc

SEQ ID NO: 26721 - DNA, 122 bp, Homo sapiens
  misc_feature (61)..(62): /note="This region represents a CpG dinucleotide"
  misc_feature (61)..(61): /note="Nucleotide may be methylated to form 5-methylcytosine"
atacatttaatgacaatggtagaagaatgattatgaatatgtttaagtcacctttgcacacgtgtcaaaacctttctgagtttatgagtaagggatagaaaagagattaccattcctaccgt

SEQ ID NO: 26722 - DNA, 122 bp, Homo sapiens
  misc_feature (61)..(62): /note="This region represents a CpG dinucleotide"
  misc_feature (61)..(61): /note="Nucleotide may be methylated to form 5-methylcytosine"
gaggtcaaggagattaaagataacctgatcaaaatacagccagtgaagaccagccagtcccgtagctccagtctacccagtgtctgcacattgcctggatttcttcccttggatcataaggg

SEQ ID NO: 26723 - DNA, 122 bp, Homo sapiens
  misc_feature (61)..(62): /note="This region represents a CpG dinucleotide"
  misc_feature (61)..(61): /note="Nucleotide may be methylated to form 5-methylcytosine"
gtggttgagcatgacatgctctttggtttatgcaggccgcacagcagccatctagacacacgcaaagcagcacagctgagctttaggacatcatgtgcttctgcagtgacaactgaaaaaaa

SEQ ID NO: 26724 - DNA, 122 bp, Homo sapiens
  misc_feature (61)..(62): /note="This region represents a CpG dinucleotide"
  misc_feature (61)..(61): /note="Nucleotide may be methylated to form 5-methylcytosine"
tatatatatataaattcatatatttactgcttcaacaaacatacatatacatatatttgtcgaaagaataaataaataaataaatgtataaaagaagggacttactcctaccttatacatat

SEQ ID NO: 26725 - DNA, 122 bp, Homo sapiens
  misc_feature (61)..(62): /note="This region represents a CpG dinucleotide"
  misc_feature (61)..(61): /note="Nucleotide may be methylated to form 5-methylcytosine"
cacgtccatagccggctgtcccaaagacagctgtgcattgaaaagcaatctacaaaagaacgactataatctactgactgactgttactagttcagcacatctatgatctacatcgcatgtt

SEQ ID NO: 26726 - DNA, 122 bp, Homo sapiens
  misc_feature (61)..(62): /note="This region represents a CpG dinucleotide"
  misc_feature (61)..(61): /note="Nucleotide may be methylated to form 5-methylcytosine"
gaaatcatgtgtggtagatagtttgcataactttgggattttccagagagaggatgaaaacggtggccctccttgtaatgtctaggcacatgggacatccagtggaactgttgagggaggag

SEQ ID NO: 26727 - DNA, 122 bp, Homo sapiens
  misc_feature (61)..(62): /note="This region represents a CpG dinucleotide"
  misc_feature (61)..(61): /note="Nucleotide may be methylated to form 5-methylcytosine"
ccttgtagcctgagcccccagagagagacagaagctcttcaaagctgagccggtgagaggcgcatctggggccctggcctcccacagctctgctggccaggcccctgcacccccactcacca

SEQ ID NO: 26728 - DNA, 122 bp, Homo sapiens
  misc_feature (61)..(62): /note="This region represents a CpG dinucleotide"
  misc_feature (61)..(61): /note="Nucleotide may be methylated to form 5-methylcytosine"
gccctgggaagaagaaagcagtgcttccacgagcccctcctcagatgcagcctcagcttgcgtcaggggaacgcctggtttccaggggccccatgttgccctctcacttttgcacagcctgc

SEQ ID NO: 26729 - DNA, 122 bp, Homo sapiens
  misc_feature (61)..(62): /note="This region represents a CpG dinucleotide"
  misc_feature (61)..(61): /note="Nucleotide may be methylated to form 5-methylcytosine"
caatgggtcaggattcaagtaaaggagacttgaattcaattactaaacaaaagatatgaccggaaaccaagaacaaacttcctgatttagaaatgctgtgcttgtagggtaactacagtcaa

SEQ ID NO: 26730 - DNA, 122 bp, Homo sapiens
  misc_feature (61)..(62): /note="This region represents a CpG dinucleotide"
  misc_feature (61)..(61): /note="Nucleotide may be methylated to form 5-methylcytosine"
acagtgcagaggggaggcaggcaggcttccaaactgggcgcgaggtgggctcctgctgagcgaggaggatgggaatctgtccctagatccaggcaaaagattgagtctcaataaatctggca

SEQ ID NO: 26731 - DNA, 122 bp, Homo sapiens
  misc_feature (61)..(62): /note="This region represents a CpG dinucleotide"
  misc_feature (61)..(61): /note="Nucleotide may be methylated to form 5-methylcytosine"
tacataaagcgtaagatttatcttttgtttgtttttacttttaaagaaatgtaaacagatcgcacagagtaaagaagatgatgatgtaatagtgaataaacctcatgtttcggatgaagagg

SEQ ID NO: 26732 - DNA, 122 bp, Homo sapiens
  misc_feature (61)..(62): /note="This region represents a CpG dinucleotide"
  misc_feature (61)..(61): /note="Nucleotide may be methylated to form 5-methylcytosine"
aaaaaaaaaaaaaaaagaaaatagagataaagacaggaagtgaatgcataaaaaacaaagcgcatgattaagcaatcacagtcacatggcaagaaggcgtgggaatcatcatgtcccctgtt

SEQ ID NO: 26733 - DNA, 122 bp, Homo sapiens
  misc_feature (61)..(62): /note="This region represents a CpG dinucleotide"
  misc_feature (61)..(61): /note="Nucleotide may be methylated to form 5-methylcytosine"
tgttctttaatttcgtcatctttaaaatgggataattacaatcctatctcatagcttaaccgagacagtgtgtgtgtctgtgtgtgtgtaattttatctggtacataagaaatcccatagaa

SEQ ID NO: 26734 - DNA, 122 bp, Homo sapiens
  misc_feature (61)..(62): /note="This region represents a CpG dinucleotide"
  misc_feature (61)..(61): /note="Nucleotide may be methylated to form 5-methylcytosine"
atgaggaggaagaaaatgtaggtgataaggttctcatattgggccttttgacttctgttacgaaagctgttcattattatacatggctattgtatatgtctaattgagattacagataagcg

SEQ ID NO: 26735 - DNA, 122 bp, Homo sapiens
  misc_feature (61)..(62): /note="This region represents a CpG dinucleotide"
  misc_feature (61)..(61): /note="Nucleotide may be methylated to form 5-methylcytosine"
taaaaaagttctttgaaaaaaatgaaaacagagacacaacataccaaaacctctgggatacggcaaaagcagtgttaagaggaaagtttagaatgctaaatgcctacatcaagaaaatggat

SEQ ID NO: 26736 - DNA, 122 bp, Homo sapiens
  misc_feature (61)..(62): /note="This region represents a CpG dinucleotide"
  misc_feature (61)..(61): /note="Nucleotide may be methylated to form 5-methylcytosine"
taagttttcgtgttcattgaaacatcactatttcaggggcctcaatgtttcaaccctgaccgttggctttttttttggagacggagttttgctcttgttgcccatgtggctgtattaggtat

SEQ ID NO: 26737 - DNA, 122 bp, Homo sapiens
  misc_feature (61)..(62): /note="This region represents a CpG dinucleotide"
  misc_feature (61)..(61): /note="Nucleotide may be methylated to form 5-methylcytosine"
acagtaaacttgagctcaatgaagatacgctcagcctctcctcggtacacccagttggtgcggagccagttgtcctggtcgccagacatcacgttgcacacggagtacatgtagatcggcat

SEQ ID NO: 26738 - DNA, 122 bp, Homo sapiens
  misc_feature (61)..(62): /note="This region represents a CpG dinucleotide"
  misc_feature (61)..(61): /note="Nucleotide may be methylated to form 5-methylcytosine"
gcatttgtgtacattagaatgcaaactaagttcttttcaaagggcacaacagttcaacttcgtctcctcccagccctgctcttctggtttattttttgttgcttgaacaaaagacaaacttt

SEQ ID NO: 26739 - DNA, 122 bp, Homo sapiens
  misc_feature (61)..(62): /note="This region represents a CpG dinucleotide"
  misc_feature (61)..(61): /note="Nucleotide may be methylated to form 5-methylcytosine"
aatttgattttgtaaccctgaatttgatcctgtctttcctcttgaagtaatcatcatcgtcgtcatgatcatcatcaccattacctcttacaaaatgtttactatgtgtcagacctatgctg

SEQ ID NO: 26740 - DNA, 122 bp, Homo sapiens
  misc_feature (61)..(62): /note="This region represents a CpG dinucleotide"
  misc_feature (61)..(61): /note="Nucleotide may be methylated to form 5-methylcytosine"
tttaaccccaaattcatgctttattttgatcctccacctgactcttgtctagttttgtgacgtatatcacttgttctcatgttttctaaatccgcaattcagacctattccaaaatgcgttt

SEQ ID NO: 26741 - DNA, 122 bp, Homo sapiens
  misc_feature (61)..(62): /note="This region represents a CpG dinucleotide"
  misc_feature (61)..(61): /note="Nucleotide may be methylated to form 5-methylcytosine"
tgtgactgccgtgtgtgcttagacccgtagtttcctcagtggatagcactcaatttattccgtagtgatattgtaacaatactgccattcccttctactgcactgcccaaggtgtgtgtagc

SEQ ID NO: 26742 - DNA, 122 bp, Homo sapiens
  misc_feature (61)..(62): /note="This region represents a CpG dinucleotide"
  misc_feature (61)..(61): /note="Nucleotide may be methylated to form 5-methylcytosine"
taatacagtgcctgaagcttagacagggcttactaaacacatctgactaattctcagcagcgtgttggaagagccctcattagtattaatagcagagctgggttttgaccccagacttatag

SEQ ID NO: 26743 - DNA, 122 bp, Homo sapiens
  misc_feature (61)..(62): /note="This region represents a CpG dinucleotide"
  misc_feature (61)..(61): /note="Nucleotide may be methylated to form 5-methylcytosine"
cccaaactcacacaccagcaaagcatactagactaggtgacctcctgctctccgactgtacgcaccctggcctagcataggaagcagaagttacatttaaaacgaaacagtcaccatgcgtt

SEQ ID NO: 26744 - DNA, 122 bp, Homo sapiens
  misc_feature (61)..(62): /note="This region represents a CpG dinucleotide"
  misc_feature (61)..(61): /note="Nucleotide may be methylated to form 5-methylcytosine"
tagtctttgtaccaacatagcattggcaggtcttaggcattcaataaaacatctgttgaccggttggttgactaaatggattaaaaatacacaggttaagaaggaagggtaaattttattac

SEQ ID NO: 26745 - DNA, 122 bp, Homo sapiens
  misc_feature (61)..(62): /note="This region represents a CpG dinucleotide"
  misc_feature (61)..(61): /note="Nucleotide may be methylated to form 5-methylcytosine"
tctgcttctcacacccccaggtggcagaggagggagggatggaacagaactcagttgtgacgtaaggagacacaaagtttgggacaacagaatggttcctacaaaagtaaagtactaactga

SEQ ID NO: 26746 - DNA, 122 bp, Homo sapiens
  misc_feature (61)..(62): /note="This region represents a CpG dinucleotide"
  misc_feature (61)..(61): /note="Nucleotide may be methylated to form 5-methylcytosine"
ggacagaaaccttatatcccaggcaaagccttagcaatgctgctgatgtcatatgctcatcgttgtcaagaattgaaaattaagatagtgatgaggtggtggcaggacaaatttcttctttt

SEQ ID NO: 26747 - DNA, 122 bp, Homo sapiens
  misc_feature (61)..(62): /note="This region represents a CpG dinucleotide"
  misc_feature (61)..(61): /note="Nucleotide may be methylated to form 5-methylcytosine"
ttttggctactttacaactgctgctacagcactatcagcaaaacactctatcactttgaacgaaggcatccaaatggcaaataaaagctttactcacttatctgattaaaatgtttaataaa

SEQ ID NO: 26748 - DNA, 122 bp, Homo sapiens
  misc_feature (61)..(62): /note="This region represents a CpG dinucleotide"
  misc_feature (61)..(61): /note="Nucleotide may be methylated to form 5-methylcytosine"
ggcgtcttctatcagaaggggccgaggggcctggacacggctgctctcgcttctgctcctcgcagcctgggaggtggggagcggccagctccgctactccgtccccgaggaggccaaacacg

SEQ ID NO: 26749 - DNA, 122 bp, Homo sapiens
  misc_feature (61)..(62): /note="This region represents a CpG dinucleotide"
  misc_feature (61)..(61): /note="Nucleotide may be methylated to form 5-methylcytosine"
aagaaaaaagctaatagcatctggtggctaaaaacattctgcttaatctcctcatggactcgttatctcctttgcctaacagctgctggtaataattgactagaattttttggcaaatacag

SEQ ID NO: 26750 - DNA, 122 bp, Homo sapiens
  misc_feature (61)..(62): /note="This region represents a CpG dinucleotide"
  misc_feature (61)..(61): /note="Nucleotide may be methylated to form 5-methylcytosine"
gcctaaatttcaagcttgtgaaatgatgagtctccttaattgctcctaagttcattaagacgtaaaacattcagcattttgcaccttatgaagagataaacagaaaataaaagtcaaattac

SEQ ID NO: 26751 - DNA, 122 bp, Homo sapiens
  misc_feature (61)..(62): /note="This region represents a CpG dinucleotide"
  misc_feature (61)..(61): /note="Nucleotide may be methylated to form 5-methylcytosine"
gacttttctctattttcatctttataataattagtaaaagttcttttttctctattctcacgttgcttaaattctttagtgtctttgatgcaaatccaacgtatttcttgccagagatgacc

SEQ ID NO: 26752 - DNA, 122 bp, Homo sapiens
  misc_feature (61)..(62): /note="This region represents a CpG dinucleotide"
  misc_feature (61)..(61): /note="Nucleotide may be methylated to form 5-methylcytosine"
ttaagatcaatgtgttttaggctcaagggctgtcataacagttaatcctatttccccagccgtctattgcaatgtatttatgaaaagtcgattttatcagttaattagctggtccttaggaa

SEQ ID NO: 26753 - DNA, 122 bp, Homo sapiens
  misc_feature (61)..(62): /note="This region represents a CpG dinucleotide"
  misc_feature (61)..(61): /note="Nucleotide may be methylated to form 5-methylcytosine"
acaaacggacatccaccccatcagacagaaaccacagatgcactgtcacagacagacccacgcaggcatgcacgcatcttggatttagacacaaactgtcagagataagagtcccacactca

SEQ ID NO: 26754 - DNA, 122 bp, Homo sapiens
  misc_feature (61)..(62): /note="This region represents a CpG dinucleotide"
  misc_feature (61)..(61): /note="Nucleotide may be methylated to form 5-methylcytosine"
ggggccttttgagcttctctcttcattccccagttgacaccctctccactccagaggtgacggtctgtggcacacaagttttgaaatacagttcccaggcctgtgaagacctggtcagggac

SEQ ID NO: 26755 - DNA, 122 bp, Homo sapiens
  misc_feature (61)..(62): /note="This region represents a CpG dinucleotide"
  misc_feature (61)..(61): /note="Nucleotide may be methylated to form 5-methylcytosine"
gtcatctaagcgaattggaaatgctgagcttccataagtcagctgagttttaaaggtaaacgttatggctgaaatagtaaagcacctgaccacaaaacctcttgtaaaaacagccctgagta

SEQ ID NO: 26756 - DNA, 122 bp, Homo sapiens
  misc_feature (61)..(62): /note="This region represents a CpG dinucleotide"
  misc_feature (61)..(61): /note="Nucleotide may be methylated to form 5-methylcytosine"
ctctagttctgtgctgcccctcacctccatgtttgatgaagatgaacatgccctcaagatcgcctcactcttcacaaagtgccctgatgagtcatgcagaaggagggtgttctagaggcctt

SEQ ID NO: 26757 - DNA, 122 bp, Homo sapiens
  misc_feature (61)..(62): /note="This region represents a CpG dinucleotide"
  misc_feature (61)..(61): /note="Nucleotide may be methylated to form 5-methylcytosine"
ctcaggtgacccgcccgcctcggcctcccaaagtgctgggattagaggcataagccaccacgcccagccaatcgctttttaattctgggatattttaacaaaaagctcagcaagactttttt

SEQ ID NO: 26758 - DNA, 122 bp, Homo sapiens
  misc_feature (61)..(62): /note="This region represents a CpG dinucleotide"
  misc_feature (61)..(61): /note="Nucleotide may be methylated to form 5-methylcytosine"
atggagctaacagaatgaaagaggacgcaaacaaaacaagaaataagtaaaataattaggcgatcacaaataagggaatggacactgaaataagaaaataaaaagacctttagggtagtaag

SEQ ID NO: 26759 - DNA, 122 bp, Homo sapiens
  misc_feature (61)..(62): /note="This region represents a CpG dinucleotide"
  misc_feature (61)..(61): /note="Nucleotide may be methylated to form 5-methylcytosine"
actgtaggctcatcatgtatctggttattcctatccagactcctggagcctggcagtggccgtgtcatgtgtagggtgtcccatgagtggcaggaagggctgttcagggagcagggggagaa

SEQ ID NO: 26760 - DNA, 122 bp, Homo sapiens
  misc_feature (61)..(62): /note="This region represents a CpG dinucleotide"
  misc_feature (61)..(61): /note="Nucleotide may be methylated to form 5-methylcytosine"
aaaagaggttgagtcttcctgtcctatctctgtaatactgaggctcctctcagcagccaccggcctcatgcctgcccgccttggccctggattgtcaccttgcagggcagcagtttgttatt

SEQ ID NO: 26761 - DNA, 122 bp, Homo sapiens
  misc_feature (61)..(62): /note="This region represents a CpG dinucleotide"
  misc_feature (61)..(61): /note="Nucleotide may be methylated to form 5-methylcytosine"
gggctaacagtagcaatataagcaactttgtggagcacagaaaggcaggccttgatttcacggaaattattagtcaaaagtgagaaacaacaaggagaaaacaagtttaccaaaattctaaa

SEQ ID NO: 26762 - DNA, 122 bp, Homo sapiens
  misc_feature (61)..(62): /note="This region represents a CpG dinucleotide"
  misc_feature (61)..(61): /note="Nucleotide may be methylated to form 5-methylcytosine"
gtctccaggattttctcctgtaaaagttctgttgaagggtcttggacagtttcccagccccgtagatagatctctgtaggtccagtcctctagcaagtggtccagaccttgaaatgaaccag

SEQ ID NO: 26763 - DNA, 122 bp, Homo sapiens
  misc_feature (61)..(62): /note="This region represents a CpG dinucleotide"
  misc_feature (61)..(61): /note="Nucleotide may be methylated to form 5-methylcytosine"
ctgaagcctggaagagaggtcagggctggacacagactcagagctaaacagggccaccaacgccacaggtgaggaggcaatcatcaaagcttgagcaagaggagacagccatgtgataacag

SEQ ID NO: 26764 - DNA, 122 bp, Homo sapiens
  misc_feature (61)..(62): /note="This region represents a CpG dinucleotide"
  misc_feature (61)..(61): /note="Nucleotide may be methylated to form 5-methylcytosine"
catgaactcctgcctcatgaacccctatctgagataaaatctttaaccctggacaccacacgataagaaaaatgatgtctaagcagactactctgtgagagagagagagagacagaaaaggc

SEQ ID NO: 26765 - DNA, 122 bp, Homo sapiens
  misc_feature (61)..(62): /note="This region represents a CpG dinucleotide"
  misc_feature (61)..(61): /note="Nucleotide may be methylated to form 5-methylcytosine"
gctcccgccccccgaagcaaggagggcatgtgctgattatctgagtgtgcagcctgctcacggggcatcctgggctctaagaatgccagggggttagaaactggggaggggtgggggaatta

SEQ ID NO: 26766 - DNA, 122 bp, Homo sapiens
  misc_feature (61)..(62): /note="This region represents a CpG dinucleotide"
  misc_feature (61)..(61): /note="Nucleotide may be methylated to form 5-methylcytosine"
tgtggccccatggtaagggtctggacggggaaggtcagtgttaaccctttgaagggcccccggggagtggatcaggttcagagcccaaggctttcacacataggtgtgttctaaagctggta

SEQ ID NO: 26767 - DNA, 122 bp, Homo sapiens
  misc_feature (61)..(62): /note="This region represents a CpG dinucleotide"
  misc_feature (61)..(61): /note="Nucleotide may be methylated to form 5-methylcytosine"
cccagttgtgtttctaattcactttgcctggactccctgtaagtcttctctaagaagaaccgtccagccttttctcagggacagcattagtccaatattgtaatcgtccaatgttacaacat

SEQ ID NO: 26768 - DNA, 122 bp, Homo sapiens
  misc_feature (61)..(62): /note="This region represents a CpG dinucleotide"
  misc_feature (61)..(61): /note="Nucleotide may be methylated to form 5-methylcytosine"
cgttttaatctataaaagggaagataacatctggtagggatgttgtctgtcacatgtaagcgctccaagaactattactgagggtaggggaacaggaaaagcaactggattatcaggcattg

SEQ ID NO: 26769 - DNA, 122 bp, Homo sapiens
  misc_feature (61)..(62): /note="This region represents a CpG dinucleotide"
  misc_feature (61)..(61): /note="Nucleotide may be methylated to form 5-methylcytosine"
acagcctgctggccagttggtaacccctgcctctctaggagctactggcagggcactggacgctgctgccaaaactgaaactctgctcagtgtttgacccacacctgggctcttaaagggcc

SEQ ID NO: 26770 - DNA, 122 bp, Homo sapiens
  misc_feature (61)..(62): /note="This region represents a CpG dinucleotide"
  misc_feature (61)..(61): /note="Nucleotide may be methylated to form 5-methylcytosine"
tagaggtgctagagcccctgtgagctatgggatgtaatgtttctctttcggtttagctcccgcctgtgttcagttctgatgcactcagagtactctctgacacctgaaggcctgggcccttc

SEQ ID NO: 26771 - DNA, 122 bp, Homo sapiens
  misc_feature (61)..(62): /note="This region represents a CpG dinucleotide"
  misc_feature (61)..(61): /note="Nucleotide may be methylated to form 5-methylcytosine"
gaccaatgtagtagtaaaaattggaaaagattttcaataaatattatgacaatgaatgcacgtgtgtttacgtgtatatgtacaagttaaagttaccaaagatgattataggtcagcaatga

SEQ ID NO: 26772 - DNA, 122 bp, Homo sapiens
  misc_feature (61)..(62): /note="This region represents a CpG dinucleotide"
  misc_feature (61)..(61): /note="Nucleotide may be methylated to form 5-methylcytosine"
catttgttatttagcattcattaggagccaatgagatagtccttataactctaaattctacgcagaacttatcaattcccagtggacaatgttgctttcttctctacattctttcctctgat

SEQ ID NO: 26773 - DNA, 122 bp, Homo sapiens
  misc_feature (61)..(62): /note="This region represents a CpG dinucleotide"
  misc_feature (61)..(61): /note="Nucleotide may be methylated to form 5-methylcytosine"
tcccaaggatatttagcacatggagaggaatccccagtgagaaaacacactctttcttgccgccgctggtaatttctgttttggttgatgattagctttgtttaatgaaaagagattatata

SEQ ID NO: 26774 - DNA, 122 bp, Homo sapiens
  misc_feature (61)..(62): /note="This region represents a CpG dinucleotide"
  misc_feature (61)..(61): /note="Nucleotide may be methylated to form 5-methylcytosine"
tgctgtaagcacccctttccctcctccattctcttcaccctttcctccacattctcttgacggagagctggtcacaactggtcacatcaccgcagcaagggactgactaatgtcagccaggg

SEQ ID NO: 26775 - DNA, 122 bp, Homo sapiens
  misc_feature (61)..(62): /note="This region represents a CpG dinucleotide"
  misc_feature (61)..(61): /note="Nucleotide may be methylated to form 5-methylcytosine"
gcacttggatctcttgataaactcttaccatcacactttcctttctgacagttaaatagccggaatgttaaataaatagaactgcaaaacttactagatagcattgcttgatcaatttttaa

SEQ ID NO: 26776 - DNA, 122 bp, Homo sapiens
  misc_feature (61)..(62): /note="This region represents a CpG dinucleotide"
  misc_feature (61)..(61): /note="Nucleotide may be methylated to form 5-methylcytosine"
tttcttcagccactccaggctggggtcctgggggtctgaggctcccagtgacgaaggacacgacgagcaccggctccttggcccaggcattcttgaagaaggtgcggagtctcgcggccatc

SEQ ID NO: 26777 - DNA, 122 bp, Homo sapiens
  misc_feature (61)..(62): /note="This region represents a CpG dinucleotide"
  misc_feature (61)..(61): /note="Nucleotide may be methylated to form 5-methylcytosine"
cttagacaggccatctgtcaattattaagcgacatcagtgggcccagcaattccattctgcgtagtgcaaaggtcctccacacattccaggtctataccatcaaagtggctatttttctcaa

SEQ ID NO: 26778 - DNA, 122 bp, Homo sapiens
  misc_feature (61)..(62): /note="This region represents a CpG dinucleotide"
  misc_feature (61)..(61): /note="Nucleotide may be methylated to form 5-methylcytosine"
ctgttacatcacctcatgtgttgcatcactgtggctggctccacagttggaattctgtgtcggggaaaggacagggaatttggggctctgcccaggtgagcagggattctccacagttcagt

SEQ ID NO: 26779 - DNA, 122 bp, Homo sapiens
  misc_feature (61)..(62): /note="This region represents a CpG dinucleotide"
  misc_feature (61)..(61): /note="Nucleotide may be methylated to form 5-methylcytosine"
tcagcggcagattccggccagtggctcagctcccaagccgaggccgctggttgtcgccagcgtacccaggagagcggtgccctagaaaatgctaggtctctttcagtgcccacagcctcagt

SEQ ID NO: 26780 - DNA, 122 bp, Homo sapiens
  misc_feature (61)..(62): /note="This region represents a CpG dinucleotide"
  misc_feature (61)..(61): /note="Nucleotide may be methylated to form 5-methylcytosine"
tcgatgctattccagcctttcagatggcctgttgtgtgacgctggctgtgtctcaatttccggtttgatcaatggttttacattacttcagccacaaaatctttcatgtgcttgcaacaaat

SEQ ID NO: 26781 - DNA, 122 bp, Homo sapiens
  misc_feature (61)..(62): /note="This region represents a CpG dinucleotide"
  misc_feature (61)..(61): /note="Nucleotide may be methylated to form 5-methylcytosine"
actgctggtaaagatttgttacagcagtgaagaatgatcactaacttagcaaaactgtaacgagcagatataatgctttactgcctggggccgtttagtgcaggggcaaacagctcaatgga

SEQ ID NO: 26782 - DNA, 122 bp, Homo sapiens
  misc_feature (61)..(62): /note="This region represents a CpG dinucleotide"
  misc_feature (61)..(61): /note="Nucleotide may be methylated to form 5-methylcytosine"
tcccaattgggggtggagggtggcctgggcaacgggcagcagctcctgcccctggggccccggccacacggaagtggctgttgaagaggaagctaccaggaccctggcaagaaattgtgtcc

SEQ ID NO: 26783 - DNA, 122 bp, Homo sapiens
  misc_feature (61)..(62): /note="This region represents a CpG dinucleotide"
  misc_feature (61)..(61): /note="Nucleotide may be methylated to form 5-methylcytosine"
ccctttcaaatgctctttaatggctacgctttgaagtcatcgtggagcaccctcagaaagcgagagcagcatgtttcacagatttctgttgctgtaaaccactatgagaggctgaacaaacg

SEQ ID NO: 26784 - DNA, 122 bp, Homo sapiens
  misc_feature (61)..(62): /note="This region represents a CpG dinucleotide"
  misc_feature (61)..(61): /note="Nucleotide may be methylated to form 5-methylcytosine"
gattatgtcagcaacctgaaggagcttggaagtggattcctcccctgagcctccaggtgacggcccagccattgcacaacatggttgcagcctcatgacacgctgagcagagccaagccagc

SEQ ID NO: 26785 - DNA, 122 bp, Homo sapiens
  misc_feature (61)..(62): /note="This region represents a CpG dinucleotide"
  misc_feature (61)..(61): /note="Nucleotide may be methylated to form 5-methylcytosine"
cttcagaggcatggcctattgaagagcaattaccatctccctgtgttggaactaaaggcacggaatgtcactcgggccatgtgtttgcgattcagagaatctttagtttcatatgattaggc

SEQ ID NO: 26786 - DNA, 122 bp, Homo sapiens
  misc_feature (61)..(62): /note="This region represents a CpG dinucleotide"
  misc_feature (61)..(61): /note="Nucleotide may be methylated to form 5-methylcytosine"
aaacagaagcaggacagtcttgctctgcagccttgggcgggatagcacaaaggccaggagcgtggagctccgtggctctagatcctgcctgtcacctgtcatgtgtgtgacttgggcaggtt

SEQ ID NO: 26787 - DNA, 122 bp, Homo sapiens
  misc_feature (61)..(62): /note="This region represents a CpG dinucleotide"
  misc_feature (61)..(61): /note="Nucleotide may be methylated to form 5-methylcytosine"
cttacagtttcattcgagccctgagtatgtgccctgctgttactctctttggtagttgaacgttgaattcaagtcttttgttttaagaagtactaagcaaacaagcaataaaaaggggaatg

SEQ ID NO: 26788 - DNA, 122 bp, Homo sapiens
  misc_feature (61)..(62): /note="This region represents a CpG dinucleotide"
  misc_feature (61)..(61): /note="Nucleotide may be methylated to form 5-methylcytosine"
atcctatcatctatactttaaggaacaaggatatgaaagaggctctgaggaaacttctctcgggaaaattgtgattcctatggacatgatttgcaaggaattcattataagccaggtagctt

SEQ ID NO: 26789 - DNA, 122 bp, Homo sapiens
  misc_feature (61)..(62): /note="This region represents a CpG dinucleotide"
  misc_feature (61)..(61): /note="Nucleotide may be methylated to form 5-methylcytosine"
agtagcaaccgtgtaaatccaattactcctaagtgaattaagcttaccctagcctgacagcgtttgtcagtgcttgagcacactgcacagtatatgagaaacagcttgtaaataatattcct

SEQ ID NO: 26790 - DNA, 122 bp, Homo sapiens
  misc_feature (61)..(62): /note="This region represents a CpG dinucleotide"
  misc_feature (61)..(61): /note="Nucleotide may be methylated to form 5-methylcytosine"
catagtctgttttatatttcctgtagattataaacatgccaagttttaagtacaaagatgcgtcacctagtggctgacaagccaggttaccatttacataacgaatgccaatattaatgtta

SEQ ID NO: 26791 - DNA, 122 bp, Homo sapiens
  misc_feature (61)..(62): /note="This region represents a CpG dinucleotide"
  misc_feature (61)..(61): /note="Nucleotide may be methylated to form 5-methylcytosine"
gagtcagggttctaggcagtccatcccattgccagatcacgatctgatctggaaagaacacgtggtcactcccctcagagttcatagatttcaaacccacgtgctgctcctctcactccagc

SEQ ID NO: 26792 - DNA, 122 bp, Homo sapiens
  misc_feature (61)..(62): /note="This region represents a CpG dinucleotide"
  misc_feature (61)..(61): /note="Nucleotide may be methylated to form 5-methylcytosine"
gggagcagagtgctattggagaggcagtgacaccaggaagatgagaaaaagcttctctgacgaagtactgtttagctgacacctcacaaatgagtagctggctaggtaaaaagggataggaa

SEQ ID NO: 26793 - DNA, 122 bp, Homo sapiens
  misc_feature (61)..(62): /note="This region represents a CpG dinucleotide"
  misc_feature (61)..(61): /note="Nucleotide may be methylated to form 5-methylcytosine"
ttaaattatgcatgttgttttgcacacatttgcatgttcaattcacatgcctgagttattcgtctacaagataaaaccaagcatagtaattcaagtaacctgtgtctgatttctcttcaccc

SEQ ID NO: 26794 - DNA, 122 bp, Homo sapiens
  misc_feature (61)..(62): /note="This region represents a CpG dinucleotide"
  misc_feature (61)..(61): /note="Nucleotide may be methylated to form 5-methylcytosine"
gtctgtatcaactaaaatctcatgaaaatcctccctgataaaatagaaggcatggatttacgttctcccagtatacaaccagctgagcactgactttactacctcctggccactaaaagtat

SEQ ID NO: 26795 - DNA, 122 bp, Homo sapiens
  misc_feature (61)..(62): /note="This region represents a CpG dinucleotide"
  misc_feature (61)..(61): /note="Nucleotide may be methylated to form 5-methylcytosine"
acccagtctagaggttgctgtgaaggtgtttttcaggatgtggttaacacttaagtcagtcgacttgagtaaagcagttaccctgcacaatgtgggtcagcctcatccaatcagtggaaggc

SEQ ID NO: 26796 - DNA, 122 bp, Homo sapiens
  misc_feature (61)..(62): /note="This region represents a CpG dinucleotide"
  misc_feature (61)..(61): /note="Nucleotide may be methylated to form 5-methylcytosine"
gggagtccagtagaattcttgatgtctctcagaagcctgcattggaatgccttcattcaccgagcatatgttgggtgctcacaaggtgtgaagccttgctctaggtgagtagctgcatggtg

SEQ ID NO: 26797 - DNA, 122 bp, Homo sapiens
  misc_feature (61)..(62): /note="This region represents a CpG dinucleotide"
  misc_feature (61)..(61): /note="Nucleotide may be methylated to form 5-methylcytosine"
actgtggctgactcaatactgccacagcaaccagacttgcccaaggttccaaatgtcaagcgctacttaaaaatacccagcactcatcacttctggctgcactgatctacccaaaatgacca

SEQ ID NO: 26798 - DNA, 122 bp, Homo sapiens
  misc_feature (61)..(62): /note="This region represents a CpG dinucleotide"
  misc_feature (61)..(61): /note="Nucleotide may be methylated to form 5-methylcytosine"
cttggactaagacagggcttgtcttttatacatgcatgggccatctagtggcgcaaagctcgtggtgcaagtaagcaggctcacagaagcagaacagaggcagttaatcaaacagtgacagg

SEQ ID NO: 26799 - DNA, 122 bp, Homo sapiens
  misc_feature (61)..(62): /note="This region represents a CpG dinucleotide"
  misc_feature (61)..(61): /note="Nucleotide may be methylated to form 5-methylcytosine"
agaattatgaggggaattacgtcatcaggggaaatccaggtttcacctgggatgaggcggcggcgcatgtatttaaagaacagattgcaaatttctgagctccttggcagcagagcagggtt

SEQ ID NO: 26800 - DNA, 122 bp, Homo sapiens
  misc_feature (61)..(62): /note="This region represents a CpG dinucleotide"
  misc_feature (61)..(61): /note="Nucleotide may be methylated to form 5-methylcytosine"
tctttgactatgagttcttgcctcctttagtctggttcttccagtcttgattgtaactcacgtcatacctttaaccccccacctttaagtttaaaaaaatccttattttctgctctccaaaa

SEQ ID NO: 26801 - DNA, 122 bp, Homo sapiens
  misc_feature (61)..(62): /note="This region represents a CpG dinucleotide"
  misc_feature (61)..(61): /note="Nucleotide may be methylated to form 5-methylcytosine"
aggttaggcaggggaggagggacaaagagaggcggaaaaaagagaaaaaaatttacaagacgagaaaagaggagaggtggtaacatgcttccagacagctcagctgcctttctgtgcatcag

SEQ ID NO: 26802 - DNA, 122 bp, Homo sapiens
  misc_feature (61)..(62): /note="This region represents a CpG dinucleotide"
  misc_feature (61)..(61): /note="Nucleotide may be methylated to form 5-methylcytosine"
tttttgccttggcctcagcagtgctctcccacttcgtcttccctcctttctagtgcttctcgcctgaaagcttttccacgtgcgtgccgtgttcagtgagaactctgattcatgctcttcag

SEQ ID NO: 26803 - DNA, 122 bp, Homo sapiens
  misc_feature (61)..(62): /note="This region represents a CpG dinucleotide"
  misc_feature (61)..(61): /note="Nucleotide may be methylated to form 5-methylcytosine"
acttgagtaggttattgctgtttcctgccatcctcaagtgccaaataagcagaagtcttccgagcttcttatctctttcactttcttctcgagatctctgtcgctttaatccggcgtgtctg

SEQ ID NO: 26804 - DNA, 122 bp, Homo sapiens
  misc_feature (61)..(62): /note="This region represents a CpG dinucleotide"
  misc_feature (61)..(61): /note="Nucleotide may be methylated to form 5-methylcytosine"
gaaccaaaatagcatgttctttccaggctgtcaggaccctacttagtcatagacataatacgcttacctttacacttgctttgagtattgctcaacttagttgcatcatgggcctaccacat

SEQ ID NO: 26805 - DNA, 122 bp, Homo sapiens
  misc_feature (61)..(62): /note="This region represents a CpG dinucleotide"
  misc_feature (61)..(61): /note="Nucleotide may be methylated to form 5-methylcytosine"
agagaaaactagagggcttatggaatgatgctaaaaacttagtaacacacatttttaaaacgcagaatcctaattgagagtcacagaattttacatatgaccattttttaataaatccataa

SEQ ID NO: 26806 - DNA, 122 bp, Homo sapiens
  misc_feature (61)..(62): /note="This region represents a CpG dinucleotide"
  misc_feature (61)..(61): /note="Nucleotide may be methylated to form 5-methylcytosine"
gactgcctgctgggtgggccacccatgccctgaatgaccccatcttctctcagatgcctacgacatggctaagctcctgtgtgacaagtattacatggcctcacctgacctggagatccagg

SEQ ID NO: 26807 - DNA, 122 bp, Homo sapiens
  misc_feature (61)..(62): /note="This region represents a CpG dinucleotide"
  misc_feature (61)..(61): /note="Nucleotide may be methylated to form 5-methylcytosine"
cttcttacagttgttccaagcagaatccaaaacaagtccctacgttgcatttgggtgatacgtcactttagtctttccccaccctcttgcctctttttttttttttctgagacaagatctgg

SEQ ID NO: 26808 - DNA, 122 bp, Homo sapiens
  misc_feature (61)..(62): /note="This region represents a CpG dinucleotide"
  misc_feature (61)..(61): /note="Nucleotide may be methylated to form 5-methylcytosine"
gcggcaggagacctggggctgtccatcatcaactctgctttcttctggtcctcctgaaggcgatctgggtaatgtacttctgtggctgccacagccctccttagtaagagatatttaagtta

SEQ ID NO: 26809 - DNA, 122 bp, Homo sapiens
  misc_feature (61)..(62): /note="This region represents a CpG dinucleotide"
  misc_feature (61)..(61): /note="Nucleotide may be methylated to form 5-methylcytosine"
ttaaggcaggagctgtttcacttctgtggttttttagctggctcctgcaggccatctggacgtatatatgcaggttacgggggttacaatggctgagcttcggctcagaggcctgacaatat

SEQ ID NO: 26810 - DNA, 122 bp, Homo sapiens
  misc_feature (61)..(62): /note="This region represents a CpG dinucleotide"
  misc_feature (61)..(61): /note="Nucleotide may be methylated to form 5-methylcytosine"
aagtaataaaatgcacacaaaacaatggatagaatatgaaaatgtcttggaaatacgacccgtcaggactaggtaggtctcgcccaactgcgacagagcggtcgcccaggacgtggacctgc

SEQ ID NO: 26811 - DNA, 122 bp, Homo sapiens
  misc_feature (61)..(62): /note="This region represents a CpG dinucleotide"
  misc_feature (61)..(61): /note="Nucleotide may be methylated to form 5-methylcytosine"
gcatcccccaagtgttgcccttggctcttttccaataccattgtttcttttttatgttctcgctttcctgtgggtgacagattatggagttgtgggttgaattttgtctgccaaggacatat

SEQ ID NO: 26812 - DNA, 122 bp, Homo sapiens
  misc_feature (61)..(62): /note="This region represents a CpG dinucleotide"
  misc_feature (61)..(61): /note="Nucleotide may be methylated to form 5-methylcytosine"
tgtcagtatcatattcatgaagttcctgtaggaactgaaaagaccagagaaagaattgaacgggtaggaaagtagtgaatcatgtactgaatcatgtaccaaaaatgtagttttgttaaaac

SEQ ID NO: 26813 - DNA, 122 bp, Homo sapiens
  misc_feature (61)..(62): /note="This region represents a CpG dinucleotide"
  misc_feature (61)..(61): /note="Nucleotide may be methylated to form 5-methylcytosine"
accaccatggaaacacggtcaggttcttagaaacctaacccatattgggaaataacagtgcggcgagaggtggaggcagcaggaaaattctaggctaacatcctagctggccaccagggtgc

SEQ ID NO: 26814 - DNA, 122 bp, Homo sapiens
  misc_feature (61)..(62): /note="This region represents a CpG dinucleotide"
  misc_feature (61)..(61): /note="Nucleotide may be methylated to form 5-methylcytosine"
attctccttcctcagcttcccaagtagctgagtgagaatataggcatgtgccaccacccccgcctaatttttgcattttcagtacagacagggtttcgccatgttggccaggctgatctcga

SEQ ID NO: 26815 - DNA, 122 bp, Homo sapiens
  misc_feature (61)..(62): /note="This region represents a CpG dinucleotide"
  misc_feature (61)..(61): /note="Nucleotide may be methylated to form 5-methylcytosine"
tgcccccagggaatgtacagcaagcctgggagacagactcacagtcaggcccgtgcataacgcattccagggaagacaggagaagcctgccaactacgattcaaagtccagggagtttcctt

SEQ ID NO: 26816 - DNA, 122 bp, Homo sapiens
  misc_feature (61)..(62): /note="This region represents a CpG dinucleotide"
  misc_feature (61)..(61): /note="Nucleotide may be methylated to form 5-methylcytosine"
aggatggatgtatcttggaccaagatgacatccgtgttgcccatgacctgctgcttattacgtcagcttcctgggcactgcaagctggtgaagccttaccagctaagcctaagacactgcta

SEQ ID NO: 26817 - DNA, 122 bp, Homo sapiens
  misc_feature (61)..(62): /note="This region represents a CpG dinucleotide"
  misc_feature (61)..(61): /note="Nucleotide may be methylated to form 5-methylcytosine"
ttcctaactatatttgcaaatgttggctggaaaccatgggggcctggccagaaatcgccacgtgagccatctcaggtccagataagtcaaaatgttgtaacagaggaatagcgccaaagggt

SEQ ID NO: 26818 - DNA, 122 bp, Homo sapiens
  misc_feature (61)..(62): /note="This region represents a CpG dinucleotide"
  misc_feature (61)..(61): /note="Nucleotide may be methylated to form 5-methylcytosine"
ctttatctaaactgaagttaaagactgtttggacatccttttatcctctgccttacttagcgcagagccttagatttgtaactgatgaacatttggtaatagagatgaggttgctattacca

SEQ ID NO: 26819 - DNA, 122 bp, Homo sapiens
  misc_feature (61)..(62): /note="This region represents a CpG dinucleotide"
  misc_feature (61)..(61): /note="Nucleotide may be methylated to form 5-methylcytosine"
agctctggtctgatctaggtcaccattgggcttcctgtgctgtcatctgctgcctcttgccgcagattcctggtggtatgtctcagcctttgcatgaaacacaaccatgaaacactaagtgc

SEQ ID NO: 26820 - DNA, 122 bp, Homo sapiens
  misc_feature (61)..(62): /note="This region represents a CpG dinucleotide"
  misc_feature (61)..(61): /note="Nucleotide may be methylated to form 5-methylcytosine"
atttgctttgtaccacttcctctacctcaagagcaagccttgatcctagcacggctaacacgaggtgagattcgtgagacctaactcccgggctgactctgaactgtcgttttagagggagt

SEQ ID NO: 26821 - DNA, 122 bp, Homo sapiens
  misc_feature (61)..(62): /note="This region represents a CpG dinucleotide"
  misc_feature (61)..(61): /note="Nucleotide may be methylated to form 5-methylcytosine"
acagtctaagtctctgcctctgtgctatatccccaaaggaattagcaagtaaccacaaaacggaagtgaaacaggaaaccttgagtatttcacatagcatatttgatatagggggcttaacc

SEQ ID NO: 26822 - DNA, 122 bp, Homo sapiens
  misc_feature (61)..(62): /note="This region represents a CpG dinucleotide"
  misc_feature (61)..(61): /note="Nucleotide may be methylated to form 5-methylcytosine"
accttgtctcaaaaaaaagagtactagttctagacttgacacatttgaccttttagtactcgttagtactaacacacaaatcatcacctatataaaattggtctcactgcagttgagtcaaa

SEQ ID NO: 26823 - DNA, 122 bp, Homo sapiens
  misc_feature (61)..(62): /note="This region represents a CpG dinucleotide"
  misc_feature (61)..(61): /note="Nucleotide may be methylated to form 5-methylcytosine"
tgaccccgcatggcatgtggtgacctccctccctgtgagcagttgtgactaataaactgccgccaatttcatctgtccagtgtgtcatgccatgtgtctagttatctcctactatttaatgg

SEQ ID NO: 26824 - DNA, 122 bp, Homo sapiens
  misc_feature (61)..(62): /note="This region represents a CpG dinucleotide"
  misc_feature (61)..(61): /note="Nucleotide may be methylated to form 5-methylcytosine"
agcagaagacacagctctctaagtgtgacaggaagtatttgtcatacagttgtactgtcacggatgggagccaccagcagctgttgtgtgctgtttgcacattaaccacacaatcgtggaga

SEQ ID NO: 26825 - DNA, 122 bp, Homo sapiens
  misc_feature (61)..(62): /note="This region represents a CpG dinucleotide"
  misc_feature (61)..(61): /note="Nucleotide may be methylated to form 5-methylcytosine"
gcaagcagcctggatggaagcggcagagcaggggctgcagaagagggagggctgtgaagacggcaccgagaattcctgagggagtcacagtttcaacaggatatttatcagaaggagattct

SEQ ID NO: 26826 - DNA, 122 bp, Homo sapiens
  misc_feature (61)..(62): /note="This region represents a CpG dinucleotide"
  misc_feature (61)..(61): /note="Nucleotide may be methylated to form 5-methylcytosine"
gtctttacaacctaccatggcatgaccacagcacatatttagtatatcatcacggcataccgatatgatgagtcagcatgatagagcaaactagcctgttgtatgtcagacaaacaacatct

SEQ ID NO: 26827 - DNA, 122 bp, Homo sapiens
  misc_feature (61)..(62): /note="This region represents a CpG dinucleotide"
  misc_feature (61)..(61): /note="Nucleotide may be methylated to form 5-methylcytosine"
ctcatgcaggccatctgcaggaactaaggcattcccaagcagtgagcctgctcttggcggcgcatcttggagagttatgaggcagctcaggcctaggcccaccctgccccagggtccaggtg

SEQ ID NO: 26828 - DNA, 122 bp, Homo sapiens
  misc_feature (61)..(62): /note="This region represents a CpG dinucleotide"
  misc_feature (61)..(61): /note="Nucleotide may be methylated to form 5-methylcytosine"
actttaatagtataaccctatgttggcaaatgtgtggcacttaccatgattacctctcctcgtgcatgggagacatcagatcatgtatagctctttcctactaagcctcagaattcttttca

SEQ ID NO: 26829 - DNA, 122 bp, Homo sapiens
  misc_feature (61)..(62): /note="This region represents a CpG dinucleotide"
  misc_feature (61)..(61): /note="Nucleotide may be methylated to form 5-methylcytosine"
agcagacagcttgtgggctgatgctttgagaaacatgtccagagcagtgcttttcaaatgcgagctgctacccatgagagggctgagaaaccagcttaatgtgtcacagccagtgtgtttcc

SEQ ID NO: 26830 - DNA, 122 bp, Homo sapiens
  misc_feature (61)..(62): /note="This region represents a CpG dinucleotide"
  misc_feature (61)..(61): /note="Nucleotide may be methylated to form 5-methylcytosine"
cctctttctttccaaatcaaattgacccacagttcagcagccctctgttgccaggactgacgtgatggtagcttatctttgtcagtgaaaagaaagtttgctgcatgccttcatgccactcc

SEQ ID NO: 26831 - DNA, 122 bp, Homo sapiens
  misc_feature (61)..(62): /note="This region represents a CpG dinucleotide"
  misc_feature (61)..(61): /note="Nucleotide may be methylated to form 5-methylcytosine"
ttgaatgttagagttgagaaacttaaggcaggaccattcactgtattgcataattccttgcgcagcctgtgaggtggtttccaggcatgtattcataatgtgaacaatgttccctggctttg

SEQ ID NO: 26832 - DNA, 122 bp, Homo sapiens
  misc_feature (61)..(62): /note="This region represents a CpG dinucleotide"
  misc_feature (61)..(61): /note="Nucleotide may be methylated to form 5-methylcytosine"
cctcacttctggattagggacagcactttccaatctcttttcctacctttagtctgatttcgcttcaacacatcttacgaaagacctagagtaatttcataatcacattcatgctccaaagc

SEQ ID NO: 26833 - DNA, 122 bp, Homo sapiens
  misc_feature (61)..(62): /note="This region represents a CpG dinucleotide"
  misc_feature (61)..(61): /note="Nucleotide may be methylated to form 5-methylcytosine"
tctgcccattcctgccccccaccccaaggaattactaaaaccctacatttgaacatgaaacgaactgtaaacaacttttaaagtcagtaaaacagaggggtaggaaagagtagctctccaga

SEQ ID NO: 26834 - DNA, 122 bp, Homo sapiens
  misc_feature (61)..(62): /note="This region represents a CpG dinucleotide"
  misc_feature (61)..(61): /note="Nucleotide may be methylated to form 5-methylcytosine"
aacagaaccatattacattcatcaacagatacacactttcaatttcatatactgaaataccgaatttaatacagatcggtttctaagttctaatttttaagccttgtcccagaaattacaat

SEQ ID NO: 26835 - DNA, 122 bp, Homo sapiens
  misc_feature (61)..(62): /note="This region represents a CpG dinucleotide"
  misc_feature (61)..(61): /note="Nucleotide may be methylated to form 5-methylcytosine"
cagccagtcctcctcaaggttcaggaaagctgcctggagcagaaggagtctcaaaattcacgggcaccacttgcactgcagctgaggatccccagacagcagcatccccacccccaggtggt

SEQ ID NO: 26836 - DNA, 122 bp, Homo sapiens
  misc_feature (61)..(62): /note="This region represents a CpG dinucleotide"
  misc_feature (61)..(61): /note="Nucleotide may be methylated to form 5-methylcytosine"
aaatgtcccattagcattttcagatcttttgatgtgcactaatgccattattggtaatgccgttattggtgaatacagcatagttaaataaactgttacagtaaatctacacttggatttgc

SEQ ID NO: 26837 - DNA, 122 bp, Homo sapiens
  misc_feature (61)..(62): /note="This region represents a CpG dinucleotide"
  misc_feature (61)..(61): /note="Nucleotide may be methylated to form 5-methylcytosine"
tgtcccggatataaaaacctcaaacaaaacaacgctcagaaatcctggggaagctgagaacgtgaatgactctaatgactggacaacagagcctctcacaagtcaagggctcccaatttttt

SEQ ID NO: 26838 - DNA, 122 bp, Homo sapiens
  misc_feature (61)..(62): /note="This region represents a CpG dinucleotide"
  misc_feature (61)..(61): /note="Nucleotide may be methylated to form 5-methylcytosine"
gcattttgtttttaagtttttccttgcctttaccttttctttcttttgccactttactttcgcttaggtagctgatccttgttgatatgcatggccgatttaagactttttcataaagcaag

SEQ ID NO: 26839 - DNA, 122 bp, Homo sapiens
  misc_feature (61)..(62): /note="This region represents a CpG dinucleotide"
  misc_feature (61)..(61): /note="Nucleotide may be methylated to form 5-methylcytosine"
atttcccaatgtacttcatgatctggttaagcgctttcatcaggtgctgaaagactaacacgggctttaatctccaaggcttgaagtcaccagaatggccagtcacaggcagtgaggaagcc

SEQ ID NO: 26840 - DNA, 122 bp, Homo sapiens
  misc_feature (61)..(62): /note="This region represents a CpG dinucleotide"
  misc_feature (61)..(61): /note="Nucleotide may be methylated to form 5-methylcytosine"
ggtccactgcctagaaacacaagccattgtgaatcattacaccagatattcagcactctacgcagctaatccccacacacggcactcccacatccctcttctctcagcccatccagccagga

SEQ ID NO: 26841 - DNA, 122 bp, Homo sapiens
  misc_feature (61)..(62): /note="This region represents a CpG dinucleotide"
  misc_feature (61)..(61): /note="Nucleotide may be methylated to form 5-methylcytosine"
aaagaggccaggttgtgtaacttggcaggttggcttacaggccagcacggtgttttgtttcgttatggcctatgaatgcctaccagtgctttaaactgactcaccctggctggatggcagtt

SEQ ID NO: 26842 - DNA, 122 bp, Homo sapiens
  misc_feature (61)..(62): /note="This region represents a CpG dinucleotide"
  misc_feature (61)..(61): /note="Nucleotide may be methylated to form 5-methylcytosine"
ataatacgtggaaacattaggcatgtcgcacacttagcagatggtgcttggctccctctgcgtttccaccagtctgtggcctacagttcaaatggtgggaagaaggctgtgagatctgaggc

SEQ ID NO: 26843 - DNA, 122 bp, Homo sapiens
  misc_feature (61)..(62): /note="This region represents a CpG dinucleotide"
  misc_feature (61)..(61): /note="Nucleotide may be methylated to form 5-methylcytosine"
tagtactgaataatgtatgtaccacttttgttgttccattcatctgttgatgggcacttacgttgcttccacatcttaactattatgaacagtactgcaacaaacacagagctgcagatata

SEQ ID NO: 26844 - DNA, 122 bp, Homo sapiens
  misc_feature (61)..(62): /note="This region represents a CpG dinucleotide"
  misc_feature (61)..(61): /note="Nucleotide may be methylated to form 5-methylcytosine"
tccagctgatacagtttgactgtgtccccatctaaattgcatctggtattgtaatcctttcgatttaggctattgcgccacagagcctgcttgcaggaattgtaatcctatttgtaatcccc

SEQ ID NO: 26845 - DNA, 122 bp, Homo sapiens
  misc_feature (61)..(62): /note="This region represents a CpG dinucleotide"
  misc_feature (61)..(61): /note="Nucleotide may be methylated to form 5-methylcytosine"
accactgtgcccggtgtttctccacaggcagggcccaccccggtgggattcccattaccacgttagtcacagaaaacatcccagcccagaaccgggaacacacaccacggagcctgctcctg

SEQ ID NO: 26846 - DNA, 122 bp, Homo sapiens
  misc_feature (61)..(62): /note="This region represents a CpG dinucleotide"
  misc_feature (61)..(61): /note="Nucleotide may be methylated to form 5-methylcytosine"
tcatctgactgccttgtgatgtgatgtagctacatgaacatgtccacatctaatttgtggcgcagaagttagacatctgtgatgcaggaagtgtcagcaaatttttattttaaatctgttag

SEQ ID NO: 26847 - DNA, 122 bp, Homo sapiens
  misc_feature (61)..(62): /note="This region represents a CpG dinucleotide"
  misc_feature (61)..(61): /note="Nucleotide may be methylated to form 5-methylcytosine"
catctacggtagagtcttccgtagccctcacgtggctctccgaggtgtgggtttcttccccgtcgtccgcacacggggaagtggtgtggatgccgctttcagtgggttgcggtgggggccgg

SEQ ID NO: 26848 - DNA, 122 bp, Homo sapiens
  misc_feature (61)..(62): /note="This region represents a CpG dinucleotide"
  misc_feature (61)..(61): /note="Nucleotide may be methylated to form 5-methylcytosine"
aggtactcagtcttttctttccttctaataagtaggtgagtattttccttggtttgcacacgaggaaatggaggctcagagagcttaggtagcttactcaaagccacacagctgggttaaat

SEQ ID NO: 26849 - DNA, 122 bp, Homo sapiens
  misc_feature (61)..(62): /note="This region represents a CpG dinucleotide"
  misc_feature (61)..(61): /note="Nucleotide may be methylated to form 5-methylcytosine"
atgttttcttttatgtgtggcttctttggttcagtattattttgtgaagttcatccatgtcgctgcatgtcatgtgttgcagcagtttgttcatttttacttctagataatattccactgtg

SEQ ID NO: 26850 - DNA, 122 bp, Homo sapiens
  misc_feature (61)..(62): /note="This region represents a CpG dinucleotide"
  misc_feature (61)..(61): /note="Nucleotide may be methylated to form 5-methylcytosine"
cagaaagactgggtttcttccttataactcaaggtctacaggagctgattagatccctggcgccagtgactgagcatttctcagccttgtcctcagaacccagaagcatctcccagggacgt

SEQ ID NO: 26851 - DNA, 122 bp, Homo sapiens
  misc_feature (61)..(62): /note="This region represents a CpG dinucleotide"
  misc_feature (61)..(61): /note="Nucleotide may be methylated to form 5-methylcytosine"
gctagactctggctgctctggtggcagttgcttagctcaggcttgggcacgtccacctggcgcatctgaaacattagccagcagggcgcagactcgtcagtgagagcattcctgagcccagc

SEQ ID NO: 26852 - DNA, 122 bp, Homo sapiens
  misc_feature (61)..(62): /note="This region represents a CpG dinucleotide"
  misc_feature (61)..(61): /note="Nucleotide may be methylated to form 5-methylcytosine"
atcttgtgcaaattaagcccagaaaacacagctgggactccatccctcacctcatccaggcgcagatatcaccagcaggaaacagaaagccagaggcttttgtgcagccactttccttacta

SEQ ID NO: 26853 - DNA, 122 bp, Homo sapiens
  misc_feature (61)..(62): /note="This region represents a CpG dinucleotide"
  misc_feature (61)..(61): /note="Nucleotide may be methylated to form 5-methylcytosine"
ctccctattttatgggtgtagaaactgaggctcagcagtttaagtagcagagctgggaatcggggaagctgtgctgcttgctttgtagtcaagccctgtcaccaccaggtgatgtcttcctt

SEQ ID NO: 26854 - DNA, 122 bp, Homo sapiens
  misc_feature (61)..(62): /note="This region represents a CpG dinucleotide"
  misc_feature (61)..(61): /note="Nucleotide may be methylated to form 5-methylcytosine"
aacatttgaagggatctgtcagttactggtgggacagatcactgatgggtcaagcttgcacgtcatcaaatacagcacatcctgactcacaaaattcccccgacatcatctgggagcacact

SEQ ID NO: 26855 - DNA, 122 bp, Homo sapiens
  misc_feature (61)..(62): /note="This region represents a CpG dinucleotide"
  misc_feature (61)..(61): /note="Nucleotide may be methylated to form 5-methylcytosine"
gggaaaaacatttttccatacttttccacataaaagttactacattgctcagggctgaggcgtagttttcttctctataaaagacacaaagtcaacaaaagcatttaaaatgacagttcaat

SEQ ID NO: 26856 - DNA, 122 bp, Homo sapiens
  misc_feature (61)..(62): /note="This region represents a CpG dinucleotide"
  misc_feature (61)..(61): /note="Nucleotide may be methylated to form 5-methylcytosine"
tgtgtttgtgggtgagtatgtgcatgtgttgtgtatgcagggggtggggaggggcgagagcggtcaaataggaagtgccttggtatttatgttgaagtgcacactggtttaaattacccact

SEQ ID NO: 26857 - DNA, 122 bp, Homo sapiens
  misc_feature (61)..(62): /note="This region represents a CpG dinucleotide"
  misc_feature (61)..(61): /note="Nucleotide may be methylated to form 5-methylcytosine"
cctcagaggagtggcagcttaattattcaccaactcgggatgtcagaatgtgatctggggcgtaaccagatccggcagggaaggcatcctgtgccgggcaggctcgtgtgacctgcccttca

SEQ ID NO: 26858 - DNA, 122 bp, Homo sapiens
  misc_feature (61)..(62): /note="This region represents a CpG dinucleotide"
  misc_feature (61)..(61): /note="Nucleotide may be methylated to form 5-methylcytosine"
gggctttaagacttgcccatggccccacacagggtggggattcccacctgctttgccaaccgctaagcccatgctccaagcactgcaccccgtccacaaggtcagacgggccactcctcggg

SEQ ID NO: 26859 - DNA, 122 bp, Homo sapiens
  misc_feature (61)..(62): /note="This region represents a CpG dinucleotide"
  misc_feature (61)..(61): /note="Nucleotide may be methylated to form 5-methylcytosine"
ggccctgctagcaccttgactttggacttctgacctccagaactgtgaggggacaagccacgcgggttgtggtatttgcacagcagcctgggaccctaacccatcacctcaactcacgccct

SEQ ID NO: 26860 - DNA, 122 bp, Homo sapiens
  misc_feature (61)..(62): /note="This region represents a CpG dinucleotide"
  misc_feature (61)..(61): /note="Nucleotide may be methylated to form 5-methylcytosine"
gattgataagaccacaaggaaggaaagaaatggaaagacaggaagaaacaaagaaagacacgcagaaagaaagaaacatagaaagtaagaaaaggaaataaagtcagaggtagttaagtact

SEQ ID NO: 26861 - DNA, 122 bp, Homo sapiens
  misc_feature (61)..(62): /note="This region represents a CpG dinucleotide"
  misc_feature (61)..(61): /note="Nucleotide may be methylated to form 5-methylcytosine"
tatcgttgttatcttagtaaataatgactaatgtggtttttggttgttatcagttggttacggattggagttaacatttcatcagatctgagcaataacctatgtggtaaagtcctagtgtg

SEQ ID NO: 26862 - DNA, 122 bp, Homo sapiens
  misc_feature (61)..(62): /note="This region represents a CpG dinucleotide"
  misc_feature (61)..(61): /note="Nucleotide may be methylated to form 5-methylcytosine"
tggctcataactttcttctgagcccatgaagttacttccccagacaagctctgtcatctgcgtgagatgacttatccattagcaaggatgaataatgcctaaacacatcactggatcttccc

SEQ ID NO: 26863 - DNA, 122 bp, Homo sapiens
  misc_feature (61)..(62): /note="This region represents a CpG dinucleotide"
  misc_feature (61)..(61): /note="Nucleotide may be methylated to form 5-methylcytosine"
tggctgggaaaaggatgatggaatcgttgagcaggctggttcctggaaagtcaactttaacgacagtctgaggaatgaatccctacattcagatgatttcgagaagctgtggaccgggcgca

SEQ ID NO: 26864 - DNA, 122 bp, Homo sapiens
  misc_feature (61)..(62): /note="This region represents a CpG dinucleotide"
  misc_feature (61)..(61): /note="Nucleotide may be methylated to form 5-methylcytosine"
ttctaggttgatctggatgtgtgctagaactgtcctttctccatatgacaagtggaataacgacagaagctgccattctctagctgttaaaggctataccgtgtatgggaaatactacagta

SEQ ID NO: 26865 - DNA, 122 bp, Homo sapiens
  misc_feature (61)..(62): /note="This region represents a CpG dinucleotide"
  misc_feature (61)..(61): /note="Nucleotide may be methylated to form 5-methylcytosine"
gttagttaaaaaaaaaaaaaaaaaaaaaaaaaggaagaagaaggcactgtgtaattgtgccggggatcttcagaaattgtaatgatgaaagagtgcaagctctcacttccccttcctgtaca

SEQ ID NO: 26866 - DNA, 122 bp, Homo sapiens
  misc_feature (61)..(62): /note="This region represents a CpG dinucleotide"
  misc_feature (61)..(61): /note="Nucleotide may be methylated to form 5-methylcytosine"
ggaaataagcattgccatcgacctctatctgaatcaaatcctacagcaggcatcacagaacggtggctcatgggcccagaaacagtctgcaatctaatttgatatgaacctgtggtgcttaa

SEQ ID NO: 26867 - DNA, 122 bp, Homo sapiens
  misc_feature (61)..(62): /note="This region represents a CpG dinucleotide"
  misc_feature (61)..(61): /note="Nucleotide may be methylated to form 5-methylcytosine"
gaatcaccaaattgttttccacagtggttacacccatgttacatttccaccagcaatgcacgagggttctaatttctccacatcctcaccatcacttgttattatctgttttcttttttaat

SEQ ID NO: 26868 - DNA, 122 bp, Homo sapiens
  misc_feature (61)..(62): /note="This region represents a CpG dinucleotide"
  misc_feature (61)..(61): /note="Nucleotide may be methylated to form 5-methylcytosine"
tttacaactaattgctaaatgcctgttatacctacagggaagtctcgtttgtccttttttcgtggtaactgtggtgcttgtgctgatccttctgtattttcactcatcagttttgaaatacc

SEQ ID NO: 26869 - DNA, 122 bp, Homo sapiens
  misc_feature (61)..(62): /note="This region represents a CpG dinucleotide"
  misc_feature (61)..(61): /note="Nucleotide may be methylated to form 5-methylcytosine"
gaaatgtttcacagcgtattttatgacattttaaaagaagtaattaggttttcgcaaatacgtttttagtgtttaattttagaggtggtgattaggacttacgaattgtttaccacatgctt

SEQ ID NO: 26870 - DNA, 122 bp, Homo sapiens
  misc_feature (61)..(62): /note="This region represents a CpG dinucleotide"
  misc_feature (61)..(61): /note="Nucleotide may be methylated to form 5-methylcytosine"
cttcatagtcttcccaggaggtctatgcttaatttcatttagcctggggccatgtagcagcgggcatttggacaaatgcaagcagaaactcccctaaggacttagtaatttacaacttgctt

SEQ ID NO: 26871 - DNA, 122 bp, Homo sapiens
  misc_feature (61)..(62): /note="This region represents a CpG dinucleotide"
  misc_feature (61)..(61): /note="Nucleotide may be methylated to form 5-methylcytosine"
agacattgtgtttgacaattttataggttatctgaatgatcatttgctgtagaggatggacggcttagccactcctgtgttaggcagatagaatgcagttagatcaccttaatcacaaaact

SEQ ID NO: 26872 - DNA, 122 bp, Homo sapiens
  misc_feature (61)..(62): /note="This region represents a CpG dinucleotide"
  misc_feature (61)..(61): /note="Nucleotide may be methylated to form 5-methylcytosine"
ttcgttctctttcctgtggttcagtgtagctggcagtcagggagaactctctgcagctggcgccggccctgtatttgttaggcttgtttctcctgggctcggctgctgggcaaggccttttg

SEQ ID NO: 26873 - DNA, 122 bp, Homo sapiens
  misc_feature (61)..(62): /note="This region represents a CpG dinucleotide"
  misc_feature (61)..(61): /note="Nucleotide may be methylated to form 5-methylcytosine"
cactcgggggtggcggggcccggcaacctctgtattaacaagccctgcaggtgatcgtgacgcactctgaagtttgagaagcactgttctagaagagctgctagatgtatatatggtgatct

SEQ ID NO: 26874 - DNA, 122 bp, Homo sapiens
  misc_feature (61)..(62): /note="This region represents a CpG dinucleotide"
  misc_feature (61)..(61): /note="Nucleotide may be methylated to form 5-methylcytosine"
aatgacaagagaaaaagctgcttgaaccactgagtcaccttatggaggccaagggcctagcggagtcaccctgcccacactagacgttgcttagagttcagcttgaagccatgtgatgtggg

SEQ ID NO: 26875 - DNA, 122 bp, Homo sapiens
  misc_feature (61)..(62): /note="This region represents a CpG dinucleotide"
  misc_feature (61)..(61): /note="Nucleotide may be methylated to form 5-methylcytosine"
ttgagcaagtgttgatcagaataaattatttatgtgagcactgggagctgcctccctatgcgcaaggcaatctgttaaagatttgctatcatgctagtgaatggggggaatggagtagtaca

SEQ ID NO: 26876 - DNA, 122 bp, Homo sapiens
  misc_feature (61)..(62): /note="This region represents a CpG dinucleotide"
  misc_feature (61)..(61): /note="Nucleotide may be methylated to form 5-methylcytosine"
ccatttgtgcacaaccttccctttaagcccaagcctctagggctgagcagatctggcaggcggctccgctgaaaaccacctggcagtcctcaaatgggctgccaagagtgctgtccttggct

SEQ ID NO: 26877 - DNA, 122 bp, Homo sapiens
  misc_feature (61)..(62): /note="This region represents a CpG dinucleotide"
  misc_feature (61)..(61): /note="Nucleotide may be methylated to form 5-methylcytosine"
ttagggtaaccgtaagtcaaatagcgtaggttgtgctcacattactaatttctcacccctcgctccgctttcaccccctactcttccaagccttcgatgcctattattccactgtttatgtc

SEQ ID NO: 26878 - DNA, 122 bp, Homo sapiens
  misc_feature (61)..(62): /note="This region represents a CpG dinucleotide"
  misc_feature (61)..(61): /note="Nucleotide may be methylated to form 5-methylcytosine"
aagaaacagaaatgcagccctatgtgtgataaacctatgtaatatttgcaaccccaactgcgatatctgatgaaagaatgccaaacccactgcaagtcaaacaggaaggcagggaggagctg

SEQ ID NO: 26879 - DNA, 122 bp, Homo sapiens
  misc_feature (61)..(62): /note="This region represents a CpG dinucleotide"
  misc_feature (61)..(61): /note="Nucleotide may be methylated to form 5-methylcytosine"
tgacttttgtcaaagttgtgtcccagtaaaatgccttcaagataccacaaactggcctggcgcagtggctcacgcctgtaatcccagcactttgggaggcctaggcgggtggattacctgag

SEQ ID NO: 26880 - DNA, 122 bp, Homo sapiens
  misc_feature (61)..(62): /note="This region represents a CpG dinucleotide"
  misc_feature (61)..(61): /note="Nucleotide may be methylated to form 5-methylcytosine"
gaaagaaagaaagaaagaaagaaagaaagaaaacaaagagaaaatattgactttatatctcgttgtctacctggcttgcgctgtctgacactggcctctaatttaatgcttgtctcactatc

SEQ ID NO: 26881 - DNA, 122 bp, Homo sapiens
  misc_feature (61)..(62): /note="This region represents a CpG dinucleotide"
  misc_feature (61)..(61): /note="Nucleotide may be methylated to form 5-methylcytosine"
gaagaactcagtggagaattctaaagcatggggtccacctgaagagtcccagactgatgccgtctcttctacagccactggtgtcattgttaatcttgtccagtcacatgtcaatgtaactc

SEQ ID NO: 26882 - DNA, 122 bp, Homo sapiens
  misc_feature (61)..(62): /note="This region represents a CpG dinucleotide"
  misc_feature (61)..(61): /note="Nucleotide may be methylated to form 5-methylcytosine"
aatggcaaggcttgtattcaaaccaggctcttggcatctgaggtagtctgagagctcctgcgctgtgctgcctgctattgcaaaacagttctcttctttgttgtcttcttttttcttgatga

SEQ ID NO: 26883 - DNA, 122 bp, Homo sapiens
  misc_feature (61)..(62): /note="This region represents a CpG dinucleotide"
  misc_feature (61)..(61): /note="Nucleotide may be methylated to form 5-methylcytosine"
cggaagacacagaagtaccttgtgtgcagccttcatggacagaactgcagaaccactctgcggtcagtggtcacttatcaggaaggaatgccttgtcagttgtcgtgtggaaactgcaggag

SEQ ID NO: 26884 - DNA, 122 bp, Homo sapiens
  misc_feature (61)..(62): /note="This region represents a CpG dinucleotide"
  misc_feature (61)..(61): /note="Nucleotide may be methylated to form 5-methylcytosine"
aggtcccagtttcttgcctggaaactgtgtgctggggctgagtgtttgctagccagagcacgtgctggccaattctcaggaggctgatcctgtgtctgacacttgctcctggtccccgctgc

SEQ ID NO: 26885 - DNA, 122 bp, Homo sapiens
  misc_feature (61)..(62): /note="This region represents a CpG dinucleotide"
  misc_feature (61)..(61): /note="Nucleotide may be methylated to form 5-methylcytosine"
gtattttgaaactgcttggctgtcctcaacaataaatgtcaaatccatgttttacattgccgtgtccagggtgttttgctttgcaactaagaccgtgacttcctgtttgatggtttgtcact

SEQ ID NO: 26886 - DNA, 122 bp, Homo sapiens
  misc_feature (61)..(62): /note="This region represents a CpG dinucleotide"
  misc_feature (61)..(61): /note="Nucleotide may be methylated to form 5-methylcytosine"
gctcagcgggagtatacaaaagccaaatctccctgagccgcagcaggccatgaataggtacggcctaaaaccagtgcacagagaggtagcagtacagtataagcaaatcccttggaaatatg

SEQ ID NO: 26887 - DNA, 122 bp, Homo sapiens
  misc_feature (61)..(62): /note="This region represents a CpG dinucleotide"
  misc_feature (61)..(61): /note="Nucleotide may be methylated to form 5-methylcytosine"
tctcatgggaaatgaaggaaagcaggggcagataacaaatgtgagagggtctacaaatgacggtcatctcaggtacagccttcagaaatggaatttattagccagaggaagtgctggtgaag

SEQ ID NO: 26888 - DNA, 122 bp, Homo sapiens
  misc_feature (61)..(62): /note="This region represents a CpG dinucleotide"
  misc_feature (61)..(61): /note="Nucleotide may be methylated to form 5-methylcytosine"
ttgaggaaaaaatttaaaggtatttaagaaaatagtttcatcctctcaagcccaaaaaaacgctgtgatctgaaaaaagcaaaagtattctatgagtctagctgaggggcttttctttatct

SEQ ID NO: 26889 - DNA, 122 bp, Homo sapiens
  misc_feature (61)..(62): /note="This region represents a CpG dinucleotide"
  misc_feature (61)..(61): /note="Nucleotide may be methylated to form 5-methylcytosine"
tttaactggggcagccagcccagccgagccctcctctggggcctccgggctccacagcagcgtgttctcaccagcacaggatgccccacccatggccaccatccagggtgcacatcaggccc

SEQ ID NO: 26890 - DNA, 122 bp, Homo sapiens
  misc_feature (61)..(62): /note="This region represents a CpG dinucleotide"
  misc_feature (61)..(61): /note="Nucleotide may be methylated to form 5-methylcytosine"
tcagtgccaggcactggactaaatgctatataggaatttcctcatttgttcatcccagtgcgtggatgaggcaaggactattgttaggtgctaacatcaccctggcaggacagccaactgta

SEQ ID NO: 26891 - DNA, 122 bp, Homo sapiens
  misc_feature (61)..(62): /note="This region represents a CpG dinucleotide"
  misc_feature (61)..(61): /note="Nucleotide may be methylated to form 5-methylcytosine"
tggctgattcaagaagaacacgtgcaaagcggggcttattcacaggagtctggtgttggccgttaggtttgatcgtggtcagcagctgtgtgatgtgtgggttctgggtcagtgcgatgaag

SEQ ID NO: 26892 - DNA, 122 bp, Homo sapiens
  misc_feature (61)..(62): /note="This region represents a CpG dinucleotide"
  misc_feature (61)..(61): /note="Nucleotide may be methylated to form 5-methylcytosine"
gaaatagaacaagaaagacctctagccacagtggcaggcaccatagcagcagccgggccacgctcagccaacccaccagagcgttttcgtgcaaaatgttatcgatgtgctgcacatcttca

SEQ ID NO: 26893 - DNA, 122 bp, Homo sapiens
  misc_feature (61)..(62): /note="This region represents a CpG dinucleotide"
  misc_feature (61)..(61): /note="Nucleotide may be methylated to form 5-methylcytosine"
ctctgcctgtcttccttctactgtgattctctaatctctgagacttagctctcttagcctcgatccttggtgtggaaacaatcatatttatgctgtaggggaatttaaggagtacttggctg

SEQ ID NO: 26894 - DNA, 122 bp, Homo sapiens
  misc_feature (61)..(62): /note="This region represents a CpG dinucleotide"
  misc_feature (61)..(61): /note="Nucleotide may be methylated to form 5-methylcytosine"
ggctccatctccaatacaatcacattggggattacgactttgatgatgaattggggtgggcggcaaacatttagtctgtagcacttattaatacaaaggcttttgaatattttcaccaagtc

SEQ ID NO: 26895 - DNA, 122 bp, Homo sapiens
  misc_feature (61)..(62): /note="This region represents a CpG dinucleotide"
  misc_feature (61)..(61): /note="Nucleotide may be methylated to form 5-methylcytosine"
agttctgagttctatcaccattgattcagatggctgattcattcttgatctacatataaacggaatcttacagcatatactctttttgtctggcttctctgcttaacataatgttctgaaga

SEQ ID NO: 26896 - DNA, 122 bp, Homo sapiens
  misc_feature (61)..(62): /note="This region represents a CpG dinucleotide"
  misc_feature (61)..(61): /note="Nucleotide may be methylated to form 5-methylcytosine"
tgccatttctgcagcagcacagggattgagtaaacttcctgttcttaggcatgtgccatccgctataaccaccaaatgttctagccacagcacctggttaaatgtttctcctcaagtctctg

SEQ ID NO: 26897 - DNA, 122 bp, Homo sapiens
  misc_feature (61)..(62): /note="This region represents a CpG dinucleotide"
  misc_feature (61)..(61): /note="Nucleotide may be methylated to form 5-methylcytosine"
ctatccacctgtcggcccctcccacaaggctgtgcacgcccaggagcaggcactctgacacgtccagtgtgagcatcattaagagcccaattgctagccaagcctggctgtgcacctcacct

SEQ ID NO: 26898 - DNA, 122 bp, Homo sapiens
  misc_feature (61)..(62): /note="This region represents a CpG dinucleotide"
  misc_feature (61)..(61): /note="Nucleotide may be methylated to form 5-methylcytosine"
tcaagagcttcgggactacaatcctagcatgccccaggctcgggagcctggtgaagttctcggggggaggagcgaagcggcgcgcgcctggccaggcacgctggaaacggtagctcttaacg

SEQ ID NO: 26899 - DNA, 122 bp, Homo sapiens
  misc_feature (61)..(62): /note="This region represents a CpG dinucleotide"
  misc_feature (61)..(61): /note="Nucleotide may be methylated to form 5-methylcytosine"
gccttctcactccattctatttccctcctcagggctttgtgcttaggaagctctgttaatcgtttttgttggctggctaactttgtgccatggggccaagaggaaaagaaagcattttttat

SEQ ID NO: 26900 - DNA, 122 bp, Homo sapiens
  misc_feature (61)..(62): /note="This region represents a CpG dinucleotide"
  misc_feature (61)..(61): /note="Nucleotide may be methylated to form 5-methylcytosine"
tctcaattctgttctctgcccattagttcaacaatcctgagtagggcttgctctgctgcccggacatttagaaaggccaggcgaggctgaggcaggcagatcacctgaggtcaggagtttga

SEQ ID NO: 26901 - DNA, 122 bp, Homo sapiens
  misc_feature (61)..(62): /note="This region represents a CpG dinucleotide"
  misc_feature (61)..(61): /note="Nucleotide may be methylated to form 5-methylcytosine"
aaccagagcttctcagactttgctgtacatctgaaccactagggggacttttaaggatcccgattccagctgggtgcagtgactcacgtctgtaatcccagtgctttgggaatctgcagcgg

SEQ ID NO: 26902 - DNA, 122 bp, Homo sapiens
  misc_feature (61)..(62): /note="This region represents a CpG dinucleotide"
  misc_feature (61)..(61): /note="Nucleotide may be methylated to form 5-methylcytosine"
atgtgcacaaagttgttgtggtattcccttactatccttttaatgcaagcttgtccaacccgctgtccgtgggccacatgtggctccggacagcttggaatgcagcccaacacaaattcgta

SEQ ID NO: 26903 - DNA, 122 bp, Homo sapiens
  misc_feature (61)..(62): /note="This region represents a CpG dinucleotide"
  misc_feature (61)..(61): /note="Nucleotide may be methylated to form 5-methylcytosine"
agggtgtgctctggagcctggcctgggttctgtcccggctgagcaggtgacgataattcacgaatcggcagagctctgtgtgggcagtgctgtcacctgagccagtggttgggctgggagtc

SEQ ID NO: 26904 - DNA, 122 bp, Homo sapiens
  misc_feature (61)..(62): /note="This region represents a CpG dinucleotide"
  misc_feature (61)..(61): /note="Nucleotide may be methylated to form 5-methylcytosine"
cgcggggcggggaggaggtcccaggagccggttcgaaagctccctccgtgatgaagtaggcgagaagggaggaggtgaaggagggcgagctgagcacacgcgcttcatgccacaggagggtg

SEQ ID NO: 26905 - DNA, 122 bp, Homo sapiens
  misc_feature (61)..(62): /note="This region represents a CpG dinucleotide"
  misc_feature (61)..(61): /note="Nucleotide may be methylated to form 5-methylcytosine"
cagcctatcccaatcacatgcaaatgcaaacagacatctcccctctggagtggattctagcggatcctctagttgcctgaattacaaagttggtcccttggttaaagcattccttcactggc

SEQ ID NO: 26906 - DNA, 122 bp, Homo sapiens
  misc_feature (61)..(62): /note="This region represents a CpG dinucleotide"
  misc_feature (61)..(61): /note="Nucleotide may be methylated to form 5-methylcytosine"
aaaaaatcatggctgggtgtgatggctcatgcccgtaatcccagcactctgggagcctgacgccagaggactgcttgaggccagagagttcaaaatcagccctgacaacatagagagagaaa

SEQ ID NO: 26907 - DNA, 122 bp, Homo sapiens
  misc_feature (61)..(62): /note="This region represents a CpG dinucleotide"
  misc_feature (61)..(61): /note="Nucleotide may be methylated to form 5-methylcytosine"
tgtaaatgttgaaccttttcggcctggtttgttggcaaaggccctggcctatggtgacatcgagagactcatcctaatgtaggggttggtggacctgctccagcagctgctgctgcatcaac

SEQ ID NO: 26908 - DNA, 122 bp, Homo sapiens
  misc_feature (61)..(62): /note="This region represents a CpG dinucleotide"
  misc_feature (61)..(61): /note="Nucleotide may be methylated to form 5-methylcytosine"
gcttgcctgttcaaatctgttgcctatttttccattatagcatttatcttcttactgatacgtgtttttagtgatcttttgttgatcataattaccaacttttttcttcacttgtcatttgg

SEQ ID NO: 26909 - DNA, 122 bp, Homo sapiens
  misc_feature (61)..(62): /note="This region represents a CpG dinucleotide"
  misc_feature (61)..(61): /note="Nucleotide may be methylated to form 5-methylcytosine"
tctgctctttttcttagctgtgtaaacttggcctgtttgcttttcctcctttatttagttcgttctttcctctgtaaaatgtagacaccagggaaacaagaacctgaaatttcgccattatt

SEQ ID NO: 26910 - DNA, 122 bp, Homo sapiens
  misc_feature (61)..(62): /note="This region represents a CpG dinucleotide"
  misc_feature (61)..(61): /note="Nucleotide may be methylated to form 5-methylcytosine"
ccaatatgcagttgagccagtacttgtggtcaaagaggagatgttctagacacatggatacgtagcctaagaagtcaagccaacaagatttctgaacaaaatgatttctgacatagctgagc

SEQ ID NO: 26911 - DNA, 122 bp, Homo sapiens
  misc_feature (61)..(62): /note="This region represents a CpG dinucleotide"
  misc_feature (61)..(61): /note="Nucleotide may be methylated to form 5-methylcytosine"
tacaaagacagtactatattcacaggctggatattgtagatttgcatatttgccaacttgcggcagatggcagtaaagtatcttgttctaataaaatcaagacttagaaggtagaaggaact

SEQ ID NO: 26912 - DNA, 122 bp, Homo sapiens
  misc_feature (61)..(62): /note="This region represents a CpG dinucleotide"
  misc_feature (61)..(61): /note="Nucleotide may be methylated to form 5-methylcytosine"
tctttgtgcacagaatttagagcctcaagaaagcattggatgtatgagctcagtgactcacgaatgtctcatttctgggaacacagacaactgatgggctatattcgttttcctctgtagca

SEQ ID NO: 26913 - DNA, 122 bp, Homo sapiens
  misc_feature (61)..(62): /note="This region represents a CpG dinucleotide"
  misc_feature (61)..(61): /note="Nucleotide may be methylated to form 5-methylcytosine"
cgcttcatgacgtcactcccctcattaggcagctcaaagggattatcaaatgactgccggcgcctgcggttcctgtgccaggtcagagctgcaactctgtgctacgtttctgtgtggctttc

SEQ ID NO: 26914 - DNA, 122 bp, Homo sapiens
  misc_feature (61)..(62): /note="This region represents a CpG dinucleotide"
  misc_feature (61)..(61): /note="Nucleotide may be methylated to form 5-methylcytosine"
gccgtgtattcagtgtcctggtactgacagaggatgggaacaagcttgcagataaagccacgctgggcacatgactctccaggctactggccacttgggcttatccagacagtctggacagg

SEQ ID NO: 26915 - DNA, 122 bp, Homo sapiens
  misc_feature (61)..(62): /note="This region represents a CpG dinucleotide"
  misc_feature (61)..(61): /note="Nucleotide may be methylated to form 5-methylcytosine"
ttgaagggggtggaagatcatcagggagagagtaggttttcctatttgagaagtgaaaggcggtatagacggctgtcctccatgccttggattgtaggtggcatttactgctcaaggagaag

SEQ ID NO: 26916 - DNA, 122 bp, Homo sapiens
  misc_feature (61)..(62): /note="This region represents a CpG dinucleotide"
  misc_feature (61)..(61): /note="Nucleotide may be methylated to form 5-methylcytosine"
attagtcatcagggaaatacaaatcaaaaccacaatgagatgttacttcatacccaccagcgtagctataatcaaagatggacaataacaaatgttagtgaggatgtagagaaatcaaaact

SEQ ID NO: 26917 - DNA, 122 bp, Homo sapiens
  misc_feature (61)..(62): /note="This region represents a CpG dinucleotide"
  misc_feature (61)..(61): /note="Nucleotide may be methylated to form 5-methylcytosine"
tttactcagtccctactcaagatgaagtcactctggtttgaacatctctgataatagaaccgctcagcaccccagctccattttccaaatcatccaatcaagccccagatcctaacacctcc

SEQ ID NO: 26918 - DNA, 122 bp, Homo sapiens
  misc_feature (61)..(62): /note="This region represents a CpG dinucleotide"
  misc_feature (61)..(61): /note="Nucleotide may be methylated to form 5-methylcytosine"
tgaacattaatctaaatatctgttcactgtggggaaacatttgagaggaaccatcattgacggagatgaaactagaaattgtgtgaagaggcctgagtctgaccaggtgtgattttagaaag

SEQ ID NO: 26919 - DNA, 122 bp, Homo sapiens
  misc_feature (61)..(62): /note="This region represents a CpG dinucleotide"
  misc_feature (61)..(61): /note="Nucleotide may be methylated to form 5-methylcytosine"
taactttcattccatttggctcaggtgtcagggatctatatttaacttgtgttaggcatgcgtccgaagagctggaaggctgaggatgtcaatggctttcagatgtcaggataaccttaagg

SEQ ID NO: 26920 - DNA, 122 bp, Homo sapiens
  misc_feature (61)..(62): /note="This region represents a CpG dinucleotide"
  misc_feature (61)..(61): /note="Nucleotide may be methylated to form 5-methylcytosine"
tgaagttgtgacttgtgcggccacagttcacactcatgcgtgtgtccctgtcggggctgacggggcctgagtcccctgggcactgctgggcggggcccatgtcgtacgggttggggtgacgc

SEQ ID NO: 26921 - DNA, 122 bp, Homo sapiens
  misc_feature (61)..(62): /note="This region represents a CpG dinucleotide"
  misc_feature (61)..(61): /note="Nucleotide may be methylated to form 5-methylcytosine"
gatgtccccacaaaccctcagttccttgcccttatttactgataaaaacaaacacacactcgctctctcacacacactaacagccgaggaatcacatctttaaacacacctggcctctggca

SEQ ID NO: 26922 - DNA, 122 bp, Homo sapiens
  misc_feature (61)..(62): /note="This region represents a CpG dinucleotide"
  misc_feature (61)..(61): /note="Nucleotide may be methylated to form 5-methylcytosine"
ctcgccctagctcctctgtctctacctgtctgcctatgaaacagttcaaaactaatatggcgcaatggatggtattatagacttcccacctccctggccagacttcttgggttcaaagtttg

SEQ ID NO: 26923 - DNA, 122 bp, Homo sapiens
  misc_feature (61)..(62): /note="This region represents a CpG dinucleotide"
  misc_feature (61)..(61): /note="Nucleotide may be methylated to form 5-methylcytosine"
gggttttcctttccaaatggctctaggaagtcagtgtgaaacggccttaggttccctgctcgcagaccctgttctcctgcctaactactagagtacagtgtgcacttcctaaaaacggaagc

SEQ ID NO: 26924 - DNA, 122 bp, Homo sapiens
  misc_feature (61)..(62): /note="This region represents a CpG dinucleotide"
  misc_feature (61)..(61): /note="Nucleotide may be methylated to form 5-methylcytosine"
aacaggaatggaactgatgaacacatgaaagaaacagactgcaaaaaatgcaacccctttcgccaataaacactagatcatttaagggaagtccctcaagagttactgcttcctgattgatg

SEQ ID NO: 26925 - DNA, 122 bp, Homo sapiens
  misc_feature (61)..(62): /note="This region represents a CpG dinucleotide"
  misc_feature (61)..(61): /note="Nucleotide may be methylated to form 5-methylcytosine"
actaatgagtatgttcgaagagtagttgtgatcaatgacctctgtttacggggagcaagacgccaatcagaacaggcaacaacacagggaagctgagtgccaactactaggacatcactttg

SEQ ID NO: 26926 - DNA, 122 bp, Homo sapiens
  misc_feature (61)..(62): /note="This region represents a CpG dinucleotide"
  misc_feature (61)..(61): /note="Nucleotide may be methylated to form 5-methylcytosine"
gtctagaatactttgtcaccccaagtggaaatgccatcatccccattatcggtcgctccccgttaccccacactcgtcaccacccgtgcacctgcctccctgctgggttccctcatgataac

SEQ ID NO: 26927 - DNA, 122 bp, Homo sapiens
  misc_feature (61)..(62): /note="This region represents a CpG dinucleotide"
  misc_feature (61)..(61): /note="Nucleotide may be methylated to form 5-methylcytosine"
caggtagcacaggacactgggaacagggggatgtactggagggaaccaagagggaaaaatcggagttgcagggctatgtgtttttctcagcagcctttacagccccagatgacagcctctgc

SEQ ID NO: 26928 - DNA, 122 bp, Homo sapiens
  misc_feature (61)..(62): /note="This region represents a CpG dinucleotide"
  misc_feature (61)..(61): /note="Nucleotide may be methylated to form 5-methylcytosine"
aataaaaggcgcttctgagaaaccttggcagagatggtcagagaggcacatttagtatgacgcagtacaagttagtgttgaagggtttaattcctcggagctctactttcctcatctgtaaa

SEQ ID NO: 26929 - DNA, 122 bp, Homo sapiens
  misc_feature (61)..(62): /note="This region represents a CpG dinucleotide"
  misc_feature (61)..(61): /note="Nucleotide may be methylated to form 5-methylcytosine"
acgtgaaactagtatttactgagaacatactatgaaccgggcattcgagctaggtcgctgcgtttatggctgaatgttcacaacactcgagaaattatttgcctagccgttcaaacccggac

SEQ ID NO: 26930 - DNA, 122 bp, Homo sapiens
  misc_feature (61)..(62): /note="This region represents a CpG dinucleotide"
  misc_feature (61)..(61): /note="Nucleotide may be methylated to form 5-methylcytosine"
cagtctgtccagcttggggacctgcttttcctcctcctaccaggatttggccaagcatgtcgtggacacttctatggctgatgtgagtaactgctcccacccatccctaccattcctttacc

SEQ ID NO: 26931 - DNA, 122 bp, Homo sapiens
  misc_feature (61)..(62): /note="This region represents a CpG dinucleotide"
  misc_feature (61)..(61): /note="Nucleotide may be methylated to form 5-methylcytosine"
aactcaaggctgcaggaataatgatgacaatgataataattaacctttattagatgtttgcggtgtagcaggcacagtgctaaatgctctgcatgggtaatctcactaatggctttgtctca

SEQ ID NO: 26932 - DNA, 122 bp, Homo sapiens
  misc_feature (61)..(62): /note="This region represents a CpG dinucleotide"
  misc_feature (61)..(61): /note="Nucleotide may be methylated to form 5-methylcytosine"
tgtcctccttaaatgcagcaccaactctgtaaacacacagcaggagctctagatacaccacgtttgtacacatttactgagtctacatttccatgtcaccttcaggaagagtggattggctt

SEQ ID NO: 26933 - DNA, 122 bp, Homo sapiens
  misc_feature (61)..(62): /note="This region represents a CpG dinucleotide"
  misc_feature (61)..(61): /note="Nucleotide may be methylated to form 5-methylcytosine"
tggaaggcaactggtgctggcctaattccctgtggtacaacctgggctttggggccatcacgtctttataatcatttcgcctcatggccctttgccaagtttccttttaagcaatagtttgg

SEQ ID NO: 26934 - DNA, 122 bp, Homo sapiens
  misc_feature (61)..(62): /note="This region represents a CpG dinucleotide"
  misc_feature (61)..(61): /note="Nucleotide may be methylated to form 5-methylcytosine"
aattaaatgagaaatcataatccaaaatcccatgtgttccatgattacaaattatctatacgaacagatgaagactaaaaggaaatagcaacaaagatgacacaaatgcctggatgatttag

SEQ ID NO: 26935 - DNA, 122 bp, Homo sapiens
  misc_feature (61)..(62): /note="This region represents a CpG dinucleotide"
  misc_feature (61)..(61): /note="Nucleotide may be methylated to form 5-methylcytosine"
ggatgaagagaaggattacaaagattatttccttccctcaagcataacaaactggtgggacgcattaaggttggatcaaggaaattaggaaatgtttttctgggccctgaaggaggaaatga

SEQ ID NO: 26936 - DNA, 122 bp, Homo sapiens
  misc_feature (61)..(62): /note="This region represents a CpG dinucleotide"
  misc_feature (61)..(61): /note="Nucleotide may be methylated to form 5-methylcytosine"
ctgacttctatcaccttggattagcgttgcctgttccagaactacatggaaatggaaccacgcagctgtgctcttctgctttttggcctgaatactcactgtcagggctgatgcaagaggag

SEQ ID NO: 26937 - DNA, 122 bp, Homo sapiens
  misc_feature (61)..(62): /note="This region represents a CpG dinucleotide"
  misc_feature (61)..(61): /note="Nucleotide may be methylated to form 5-methylcytosine"
acagccggctctaccgctctgctcgcaggtttgggctagtctggggcggggacttgggagcgcctaaaacttgcgaggagggcggggccgcagaccggtcctttaaaggttggaagtggccc

SEQ ID NO: 26938 - DNA, 122 bp, Homo sapiens
  misc_feature (61)..(62): /note="This region represents a CpG dinucleotide"
  misc_feature (61)..(61): /note="Nucleotide may be methylated to form 5-methylcytosine"
ggtgtaaagccgagtagtggggcaggcagcatggcctaacaggagcccggagtggggactcgggacctggggtgagccctggttttggcactgcctcactgcaagggcagctcggaaacttt

SEQ ID NO: 26939 - DNA, 122 bp, Homo sapiens
  misc_feature (61)..(62): /note="This region represents a CpG dinucleotide"
  misc_feature (61)..(61): /note="Nucleotide may be methylated to form 5-methylcytosine"
tcttccttgttttggtggcaggcaagtgtctgtggtcaggagccatggagactcgtgccacggactgcgaagccacccagccatctggcccaagctcctgtgaccggaagagcttgttttgc

SEQ ID NO: 26940 - DNA, 122 bp, Homo sapiens
  misc_feature (61)..(62): /note="This region represents a CpG dinucleotide"
  misc_feature (61)..(61): /note="Nucleotide may be methylated to form 5-methylcytosine"
tctgtccctttatcctgccttgactgaggatgtgacgcctggaatggtgatgcctggtgccgtgatgcagtcaccatataatcttgaggtgacaggcatgaggccagaacgtcaacactgag

SEQ ID NO: 26941 - DNA, 122 bp, Homo sapiens
  misc_feature (61)..(62): /note="This region represents a CpG dinucleotide"
  misc_feature (61)..(61): /note="Nucleotide may be methylated to form 5-methylcytosine"
gtaatatcagatgtaacctcttgagagagttgtaattgagaagatgtgttgttagtgacacgtcacggaaaatgactcaactgtggcaaaggtgagtctcaagacatgatgcaaacaaaagg

SEQ ID NO: 26942 - DNA, 122 bp, Homo sapiens
  misc_feature (61)..(62): /note="This region represents a CpG dinucleotide"
  misc_feature (61)..(61): /note="Nucleotide may be methylated to form 5-methylcytosine"
gctccataaaggggacaaggctaaggcaacatccactactagattcaaaaatgaatataacgaggctttatattcaggtaacccagaggttcattatacagactggtattaaacaaacaact

SEQ ID NO: 26943 - DNA, 122 bp, Homo sapiens
  misc_feature (61)..(62): /note="This region represents a CpG dinucleotide"
  misc_feature (61)..(61): /note="Nucleotide may be methylated to form 5-methylcytosine"
ggccttactcctcactgtgacataatcccagaacgcatctctgctccttggtcagtgaagcgatgagggtggacacaaggactagacaagagcagacagtgagctggcacctgacccaccct

SEQ ID NO: 26944 - DNA, 122 bp, Homo sapiens
  misc_feature (61)..(62): /note="This region represents a CpG dinucleotide"
  misc_feature (61)..(61): /note="Nucleotide may be methylated to form 5-methylcytosine"
cctgccctggtcaccctagggctaggtacaagacaattagggacagcccctacctcctagcgccgtctgtaatgattcagactagctacttatcctaatcctgctcatcctgctgcaccttc

SEQ ID NO: 26945 - DNA, 122 bp, Homo sapiens
  misc_feature (61)..(62): /note="This region represents a CpG dinucleotide"
  misc_feature (61)..(61): /note="Nucleotide may be methylated to form 5-methylcytosine"
ctctagactagcagagtcttggtatttttccttgggaatctcccctttcctagtcacacccgtccatacaggtagacaactgtcgacccatgaaaaggaaacacactcctctttgttctccc

SEQ ID NO: 26946 - DNA, 122 bp, Homo sapiens
  misc_feature (61)..(62): /note="This region represents a CpG dinucleotide"
  misc_feature (61)..(61): /note="Nucleotide may be methylated to form 5-methylcytosine"
agaactaatgtaaaaatcctagccacctttaagatctaagcttaaagcaaaactcagattcgtccccttctctctatgagtaactccaggcttagtcttcagatcaaatgcaacatcgacat

SEQ ID NO: 26947 - DNA, 122 bp, Homo sapiens
  misc_feature (61)..(62): /note="This region represents a CpG dinucleotide"
  misc_feature (61)..(61): /note="Nucleotide may be methylated to form 5-methylcytosine"
tgtttctctgtatatgtctgtcactgcttagctgatacatgatctaacaccctattaagccgtcttcaaatgtcagactcccatttctaacaatactacacaattgtatgttattttaaacc

SEQ ID NO: 26948 - DNA, 122 bp, Homo sapiens
  misc_feature (61)..(62): /note="This region represents a CpG dinucleotide"
  misc_feature (61)..(61): /note="Nucleotide may be methylated to form 5-methylcytosine"
ccaccctcatcgtttcaagggcccccttatgcaaatacacgctcggttcttccgaggaggcggggcctgcatgtaaatgagggggcttgaggtggggctcacaccaagaggaaaccggttct

SEQ ID NO: 26949 - DNA, 122 bp, Homo sapiens
  misc_feature (61)..(62): /note="This region represents a CpG dinucleotide"
  misc_feature (61)..(61): /note="Nucleotide may be methylated to form 5-methylcytosine"
ccagtcctttgaagcgtgacaccaggtcacttctttgctcagcactttccattaatttctcgtttcacgcagcataaaagctccatttgatctacccccagccacatttcctcctgttctca

SEQ ID NO: 26950 - DNA, 122 bp, Homo sapiens
  misc_feature (61)..(62): /note="This region represents a CpG dinucleotide"
  misc_feature (61)..(61): /note="Nucleotide may be methylated to form 5-methylcytosine"
tggactttaccctaagcagccagtgaagcctgggtgaggcctgagcagctgctgctggctcgtgtacagcagacaggcccttcaaccgaaatatccttagagaaattcttttatactggccc

SEQ ID NO: 26951 - DNA, 122 bp, Homo sapiens
  misc_feature (61)..(62): /note="This region represents a CpG dinucleotide"
  misc_feature (61)..(61): /note="Nucleotide may be methylated to form 5-methylcytosine"
aagaggagggaactcattttatgagatcgatattatctggataccaaagctgaacaaagacgccataagggaactacagattatagtgagtatcccctattggaaatgcttggaaccagaag

SEQ ID NO: 26952 - DNA, 122 bp, Homo sapiens
  misc_feature (61)..(62): /note="This region represents a CpG dinucleotide"
  misc_feature (61)..(61): /note="Nucleotide may be methylated to form 5-methylcytosine"
atagggacattgccttagataacgccaataataatacacaggggaaaatccaaatgcctgcgtgcaagtactttagcccttgtaccatttacagatgctgaaggtgcagcggtggggatggc

SEQ ID NO: 26953 - DNA, 122 bp, Homo sapiens
  misc_feature (61)..(62): /note="This region represents a CpG dinucleotide"
  misc_feature (61)..(61): /note="Nucleotide may be methylated to form 5-methylcytosine"
ccagtttcatttcaataatgatcatcttcctgtagcttcccaatcatgcatttgtcataacgcagtaattttctagctacaaacagatcctcgtaatgaggcagtttttcacattagcaaca

SEQ ID NO: 26954 - DNA, 122 bp, Homo sapiens
  misc_feature (61)..(62): /note="This region represents a CpG dinucleotide"
  misc_feature (61)..(61): /note="Nucleotide may be methylated to form 5-methylcytosine"
atcttcgtatctttatttgcaagtagagcatttgctttacacatagttacaaagtcaacacgtgcagaaggtagagcaaacctgtttaccatcctgctctggggctcccaattgcctgtgcc

SEQ ID NO: 26955 - DNA, 122 bp, Homo sapiens
  misc_feature (61)..(62): /note="This region represents a CpG dinucleotide"
  misc_feature (61)..(61): /note="Nucleotide may be methylated to form 5-methylcytosine"
gtaaataatatactattagcttaaacccatcccagctgtcaagagcctgagtagaggttacgaagataagaaatgaaagtattctagactctaggggtacatttgtcaggcatgcatatatc

SEQ ID NO: 26956 - DNA, 122 bp, Homo sapiens
  misc_feature (61)..(62): /note="This region represents a CpG dinucleotide"
  misc_feature (61)..(61): /note="Nucleotide may be methylated to form 5-methylcytosine"
ctaaaatgtatgtcataaaataaacttagttaagcactgtaatacctttcaacttcctaccgaaataagctgccatggtagaggcagagaattattttagctgatggtgctttttgtgattt

SEQ ID NO: 26957 - DNA, 122 bp, Homo sapiens
  misc_feature (61)..(62): /note="This region represents a CpG dinucleotide"
  misc_feature (61)..(61): /note="Nucleotide may be methylated to form 5-methylcytosine"
aatggggaggggggagcctcccagggcatccaggctgcctaaccaaggatgaaagtccaacgccaggcagtaattcagtcttgttattcttgttgagcaggccatgacatgtgctctggatt

SEQ ID NO: 26958 - DNA, 122 bp, Homo sapiens
  misc_feature (61)..(62): /note="This region represents a CpG dinucleotide"
  misc_feature (61)..(61): /note="Nucleotide may be methylated to form 5-methylcytosine"
ccgcaccctgtctctgtcataactcatggcatcgctgtctgttttgcagagccaggcagccgcagagaagtcaaggcagattccagagttctcaaaaaatgcctacttagtgataagaagga

SEQ ID NO: 26959 - DNA, 122 bp, Homo sapiens
  misc_feature (61)..(62): /note="This region represents a CpG dinucleotide"
  misc_feature (61)..(61): /note="Nucleotide may be methylated to form 5-methylcytosine"
tggtcaggataacctagttttcttactgtcaggcctgagtctccgctggcttaatgatgacgtttaaatttccttttctgtcctttcagttgcagggtataagtgtttatctcagaatgtcc

SEQ ID NO: 26960 - DNA, 122 bp, Homo sapiens
  misc_feature (61)..(62): /note="This region represents a CpG dinucleotide"
  misc_feature (61)..(61): /note="Nucleotide may be methylated to form 5-methylcytosine"
tcagttcaggaagcagaggcagggtgctttccccatgcatctgaatctgtgaatggagaccgctccccagctcatggttggcatgggaacaggaccggtgcatgctggagaggtcctatggc

SEQ ID NO: 26961 - DNA, 122 bp, Homo sapiens
  misc_feature (61)..(62): /note="This region represents a CpG dinucleotide"
  misc_feature (61)..(61): /note="Nucleotide may be methylated to form 5-methylcytosine"
atgatgcagactcctatccgcgagatacctgctgtaatttcgctgtggttcgtgaggacgcgtcctgggctgccctgagaagcctacgtctccccttcgaggcccgggaagacctccaaccc

SEQ ID NO: 26962 - DNA, 122 bp, Homo sapiens
  misc_feature (61)..(62): /note="This region represents a CpG dinucleotide"
  misc_feature (61)..(61): /note="Nucleotide may be methylated to form 5-methylcytosine"
gactatgtctaagcacctgtgacacacctggagcaacacccaggaaggcagaggggagggcgagaacctggtattgactgccaagtgcatggcacaatggaccaggaggaggacggtgggga

SEQ ID NO: 26963 - DNA, 122 bp, Homo sapiens
  misc_feature (61)..(62): /note="This region represents a CpG dinucleotide"
  misc_feature (61)..(61): /note="Nucleotide may be methylated to form 5-methylcytosine"
gttggcaggacccgttttggagaaagattattttctgtggctggggagagctggactaaacgtggatgagactcaggcttaaagcctgtgacatcatcggaagatactaagggagacatcat

SEQ ID NO: 26964 - DNA, 122 bp, Homo sapiens
  misc_feature (61)..(62): /note="This region represents a CpG dinucleotide"
  misc_feature (61)..(61): /note="Nucleotide may be methylated to form 5-methylcytosine"
agccagctcagccctggtgtcttccctagaggacaacatgctgctccccagccctgagcacgccagtcttcaggtcctgccaggtacaggacagcttgtagtcccacacggcagtcggtcgg

SEQ ID NO: 26965 - DNA, 122 bp, Homo sapiens
  misc_feature (61)..(62): /note="This region represents a CpG dinucleotide"
  misc_feature (61)..(61): /note="Nucleotide may be methylated to form 5-methylcytosine"
gaagaaaaaaattatttaaaaggtaggggagccaagaatccacagtaaaacatcccttttcggtcatttagctggaaagcagaaacagaacaaaaaaagaagaattaagaaagcctatgggt

SEQ ID NO: 26966 - DNA, 122 bp, Homo sapiens
  misc_feature (61)..(62): /note="This region represents a CpG dinucleotide"
  misc_feature (61)..(61): /note="Nucleotide may be methylated to form 5-methylcytosine"
gccatatgcttacttcctttatcctcccatcagctctgtgaagcacccaccactttagtgcggaggaagccgagccttagagaggtcaaggcctttatttcagcctcccagccagcaggcag

SEQ ID NO: 26967 - DNA, 122 bp, Homo sapiens
  misc_feature (61)..(62): /note="This region represents a CpG dinucleotide"
  misc_feature (61)..(61): /note="Nucleotide may be methylated to form 5-methylcytosine"
atgcatgaataatggtagcatttacccaggcccgtgtatttcagaaaatgggtaggaaatcgttcctatagcaacaagaggctggcagttcaagtcagtcacttctgctggatcatagaatg

SEQ ID NO: 26968 - DNA, 122 bp, Homo sapiens
  misc_feature (61)..(62): /note="This region represents a CpG dinucleotide"
  misc_feature (61)..(61): /note="Nucleotide may be methylated to form 5-methylcytosine"
agtagttcagcaggtttaaagtcagaaagacctggaattgagtcccagttccgccatttacgagctgtgtgaccttgtgaccttgaatagggtactcacctctctgtacttcagttatttca

SEQ ID NO: 26969 - DNA, 122 bp, Homo sapiens
  misc_feature (61)..(62): /note="This region represents a CpG dinucleotide"
  misc_feature (61)..(61): /note="Nucleotide may be methylated to form 5-methylcytosine"
agctcgccagctcgggagcttcttgagagcagggtccatggcaggctttgctcaccattgcgtggctccaggctcagtgagtattagttaaatgaacaaaaatgaatgcatgaccatccatg

SEQ ID NO: 26970 - DNA, 122 bp, Homo sapiens
  misc_feature (61)..(62): /note="This region represents a CpG dinucleotide"
  misc_feature (61)..(61): /note="Nucleotide may be methylated to form 5-methylcytosine"
cgagccagaattgcaggacctgctaccttgcgctctgctgtgcatacaaagctattaagtcgtcataaaatcagtctgctgttttaccagttagtgggatgtggcagaaagggagaaagtgc

SEQ ID NO: 26971 - DNA, 122 bp, Homo sapiens
  misc_feature (61)..(62): /note="This region represents a CpG dinucleotide"
  misc_feature (61)..(61): /note="Nucleotide may be methylated to form 5-methylcytosine"
ctgggtgacagagcgaaactctgtctcaaaaaaaaaaaaaaaaagaaacttgcccaaggtcgcccatccaggaagcagctgaggcagggctgaaacccaggtctggctctaaaatccattaa

SEQ ID NO: 26972 - DNA, 122 bp, Homo sapiens
  misc_feature (61)..(62): /note="This region represents a CpG dinucleotide"
  misc_feature (61)..(61): /note="Nucleotide may be methylated to form 5-methylcytosine"
ctaacgaatgacccagtagtgcattctatatgatgctactgtctctctatttaactactccgtatgcctgagttctgattgcttaattaatttactaactgtgaaagaaagaataactttca

SEQ ID NO: 26973 - DNA, 122 bp, Homo sapiens
  misc_feature (61)..(62): /note="This region represents a CpG dinucleotide"
  misc_feature (61)..(61): /note="Nucleotide may be methylated to form 5-methylcytosine"
ccagtcctaccactagagggcgcggataacttaaactggccggggacttccctcccgccgcgcctggttaccttcagccaatcatcaaatatttacccaaagcgcagttcaaagccaaagta

SEQ ID NO: 26974 - DNA, 122 bp, Homo sapiens
  misc_feature (61)..(62): /note="This region represents a CpG dinucleotide"
  misc_feature (61)..(61): /note="Nucleotide may be methylated to form 5-methylcytosine"
caagataagcatttcaatttaataacaaaattaaatctagcaccttgaaataaatattgacgacagctttataagtatgaaagtatcatttcaataggaggaaaaaatccagttcaccaaca

SEQ ID NO: 26975 - DNA, 122 bp, Homo sapiens
  misc_feature (61)..(62): /note="This region represents a CpG dinucleotide"
  misc_feature (61)..(61): /note="Nucleotide may be methylated to form 5-methylcytosine"
aaattcggataacgttaattgtgccactgtggtggcagtgcaagaaattcctgttcatcccgctgcaatgatgattaaggtaacaaacacccagtcgggaagtcaggctccggccctggaga

SEQ ID NO: 26976 - DNA, 122 bp, Homo sapiens
  misc_feature (61)..(62): /note="This region represents a CpG dinucleotide"
  misc_feature (61)..(61): /note="Nucleotide may be methylated to form 5-methylcytosine"
agtgttttcacctattttatattccttttgagctttgtctagagagattacatgtgctaccgactggtataagaggtggtgtgaagcaatgtatgccttttaacaacagttttgccaaaagg

SEQ ID NO: 26977 - DNA, 122 bp, Homo sapiens
  misc_feature (61)..(62): /note="This region represents a CpG dinucleotide"
  misc_feature (61)..(61): /note="Nucleotide may be methylated to form 5-methylcytosine"
catacttttactgtgcgttttctatgtgtagatacacaaataccactgtgctacacctgtcgtacagtccagtaaccttctgtagaggcttatagcctagaagcaacaagctagaccatatg

SEQ ID NO: 26978 - DNA, 122 bp, Homo sapiens
  misc_feature (61)..(62): /note="This region represents a CpG dinucleotide"
  misc_feature (61)..(61): /note="Nucleotide may be methylated to form 5-methylcytosine"
gagaggggtggattactgcatcagacctgaacttcctcaagttgaaaagtttgcaggctccggacctcagctggattcctaactgtgggccaatgcttcctgcttctgcaggccaagaggga

SEQ ID NO: 26979 - DNA, 122 bp, Homo sapiens
  misc_feature (61)..(62): /note="This region represents a CpG dinucleotide"
  misc_feature (61)..(61): /note="Nucleotide may be methylated to form 5-methylcytosine"
actctctgaggcttctccatccatagtgaagaaggggcccactccttccttggtgcatgccgagtcacatttggatgtcaagtaaggccttagaaaccgcagcccaaggaattctgcactga

SEQ ID NO: 26980 - DNA, 122 bp, Homo sapiens
  misc_feature (61)..(62): /note="This region represents a CpG dinucleotide"
  misc_feature (61)..(61): /note="Nucleotide may be methylated to form 5-methylcytosine"
aggcatgagccaccgcgcccagtctatttcctgttttcttaatgtatgagttaataagtacgttacagccacatttcttaacgcttttccgggatttcttttgcagagactgaattcccttc

SEQ ID NO: 26981 - DNA, 122 bp, Homo sapiens
  misc_feature (61)..(62): /note="This region represents a CpG dinucleotide"
  misc_feature (61)..(61): /note="Nucleotide may be methylated to form 5-methylcytosine"
ggctaccaacttgcttgagttgggtggaacagaaaaacccccccaatcaaataagctacacgcaccagatgtattacttacagataggcagcaagggacagcgtagcctaggactcagccag

SEQ ID NO: 26982 - DNA, 122 bp, Homo sapiens
  misc_feature (61)..(62): /note="This region represents a CpG dinucleotide"
  misc_feature (61)..(61): /note="Nucleotide may be methylated to form 5-methylcytosine"
gccgctattccttgatattggaatttaaaataattaaagtctcagtcacaagtgctaagacgagatcctctaggtcacagcagccacagtctgacccaaagggcttagcataaaaagtggtg

SEQ ID NO: 26983 - DNA, 122 bp, Homo sapiens
  misc_feature (61)..(62): /note="This region represents a CpG dinucleotide"
  misc_feature (61)..(61): /note="Nucleotide may be methylated to form 5-methylcytosine"
cttaggtgattcgcccgccttgccctaccaaagtgctgggattacaggcgtgagccactgcgcccagcctgctaatccgtgttctaatccgggatacagagggacattcatggttctggggc

SEQ ID NO: 26984 - DNA, 122 bp, Homo sapiens
  misc_feature (61)..(62): /note="This region represents a CpG dinucleotide"
  misc_feature (61)..(61): /note="Nucleotide may be methylated to form 5-methylcytosine"
taacaaaatgaagtaagttcctttgtcagcaaatattgcaggaagagtcagagaaaaccacgctgaaggatggaagcaactagtattagactgaattacatgggagatttgctatggaatta

SEQ ID NO: 26985 - DNA, 122 bp, Homo sapiens
  misc_feature (61)..(62): /note="This region represents a CpG dinucleotide"
  misc_feature (61)..(61): /note="Nucleotide may be methylated to form 5-methylcytosine"
ttttaatagctgtctggtgaacaaagacatcttccttggcgtcattcctgtggatgaatccgtaaccattccggacgttgaaccatttgacagtgcccaggactcggagtgccagcagcacc

SEQ ID NO: 26986 - DNA, 122 bp, Homo sapiens
  misc_feature (61)..(62): /note="This region represents a CpG dinucleotide"
  misc_feature (61)..(61): /note="Nucleotide may be methylated to form 5-methylcytosine"
cttcccctggcttcagggcgctgcccaggctcttgccctcagctgcctccccgccgtgcccgttggtggtcttggcatccttgccgtcagccttggtgccattctccaggctgccactgggg

SEQ ID NO: 26987 - DNA, 122 bp, Homo sapiens
  misc_feature (61)..(62): /note="This region represents a CpG dinucleotide"
  misc_feature (61)..(61): /note="Nucleotide may be methylated to form 5-methylcytosine"
agcaaatgtgaaatgcatgtaaacacccagcactgcacctggcacttaggatgcccttgacgaggggcatgagacattgctatggggctacttgctgttgctatcacctcaatgtctactca

SEQ ID NO: 26988 - DNA, 122 bp, Homo sapiens
  misc_feature (61)..(62): /note="This region represents a CpG dinucleotide"
  misc_feature (61)..(61): /note="Nucleotide may be methylated to form 5-methylcytosine"
gttatcagatagacatgaaaaacctacttcctaactgaaggggaattctgcagataactacggcatctgagaatagggattgaggatgtctgcatgaagtccaaaaacatgtattcatttac

SEQ ID NO: 26989 - DNA, 122 bp, Homo sapiens
  misc_feature (61)..(62): /note="This region represents a CpG dinucleotide"
  misc_feature (61)..(61): /note="Nucleotide may be methylated to form 5-methylcytosine"
caggatccacctgccttggcctcccaaagtgctaggattataggcttgaggcactgtgcccggcctatatattgtattttaaagttatgcattctgtgggagtcagctgaatttttgtgttg

SEQ ID NO: 26990 - DNA, 122 bp, Homo sapiens
  misc_feature (61)..(62): /note="This region represents a CpG dinucleotide"
  misc_feature (61)..(61): /note="Nucleotide may be methylated to form 5-methylcytosine"
aaatttggggactgctgaatgacagaaagtacagtcaacttctttattgcaggatttctccgagcctttgatatacagttgtgctttccggattgtcaagactgggatgcagggtacagctc

SEQ ID NO: 26991 - DNA, 122 bp, Homo sapiens
  misc_feature (61)..(62): /note="This region represents a CpG dinucleotide"
  misc_feature (61)..(61): /note="Nucleotide may be methylated to form 5-methylcytosine"
gcacattaaacaaaaatagctgctgtataaacatgcaggggtgaaactgcagataggactcgtcattcatacagtcaacagcaattctgttgttaattacccactgggaaggtatgttatgt

SEQ ID NO: 26992 - DNA, 122 bp, Homo sapiens
  misc_feature (61)..(62): /note="This region represents a CpG dinucleotide"
  misc_feature (61)..(61): /note="Nucleotide may be methylated to form 5-methylcytosine"
gtgggaggacacgtgcctagcatttttacaatatgccttttcttttagccctgaatctaccgtgtcgagggcattcttttgtgtatctggtggctcttaggagtttgggatctaatagtacc

SEQ ID NO: 26993 - DNA, 122 bp, Homo sapiens
  misc_feature (61)..(62): /note="This region represents a CpG dinucleotide"
  misc_feature (61)..(61): /note="Nucleotide may be methylated to form 5-methylcytosine"
atttcccatcctcagaggtgactgtatcattctgttctcttatcaaatctgcaaatccttcgcctccactcaaagtttctggcttcacttgatatttctttgagaaaattaaaataattgga

SEQ ID NO: 26994 - DNA, 122 bp, Homo sapiens
  misc_feature (61)..(62): /note="This region represents a CpG dinucleotide"
  misc_feature (61)..(61): /note="Nucleotide may be methylated to form 5-methylcytosine"
tgagcacagccctacagtgccaaagagctcatcccacccatacccagtccctaatcaccacgatacctgggagacctacagggagccagggaaaaatctcagaaccacaggggttttagggt

SEQ ID NO: 26995 - DNA, 122 bp, Homo sapiens
  misc_feature (61)..(62): /note="This region represents a CpG dinucleotide"
  misc_feature (61)..(61): /note="Nucleotide may be methylated to form 5-methylcytosine"
ggttgcagtaagctgagatctcaccactgcattccagactgggtgacaagagcgaaacttcgactctagctgggcatagtgccacatgcctgtagtcccagctacttaggaggctgaagtgg

SEQ ID NO: 26996 - DNA, 122 bp, Homo sapiens
  misc_feature (61)..(62): /note="This region represents a CpG dinucleotide"
  misc_feature (61)..(61): /note="Nucleotide may be methylated to form 5-methylcytosine"
ccttttatcatttactgaacttagcctcctcaagactttttttcccatctgcccaaattgcgaagctgagccaaaaaaatttttttttaagtattgattttcttacctgttaaagataatgc

SEQ ID NO: 26997 - DNA, 122 bp, Homo sapiens
  misc_feature (61)..(62): /note="This region represents a CpG dinucleotide"
  misc_feature (61)..(61): /note="Nucleotide may be methylated to form 5-methylcytosine"
agagtctccagcgagactcagtctaaaaaaaaatatatatattttgagacagtctccctccgtcatccagcctggagccaactgctgcgatcttggctcactgcaacctctgcctcccagat

SEQ ID NO: 26998 - DNA, 122 bp, Homo sapiens
  misc_feature (61)..(62): /note="This region represents a CpG dinucleotide"
  misc_feature (61)..(61): /note="Nucleotide may be methylated to form 5-methylcytosine"
cacacctctttactggatattgccaaattgctcttcaaaacagttacatcaggcctggtgcggtggctcatgcctgtaatcccaggactttgaaaggtcaaggtgggcggatcacttgaggt

SEQ ID NO: 26999 - DNA, 122 bp, Homo sapiens
  misc_feature (61)..(62): /note="This region represents a CpG dinucleotide"
  misc_feature (61)..(61): /note="Nucleotide may be methylated to form 5-methylcytosine"
ccatttccacccactctcttggaactctgctcagctaccatgaaggcaggccctggccaacgtgctgaatgagaagagacatgtaactcagtcactaccctccctcatcacagccaacagct

SEQ ID NO: 27000 - DNA, 122 bp, Homo sapiens
  misc_feature (61)..(62): /note="This region represents a CpG dinucleotide"
  misc_feature (61)..(61): /note="Nucleotide may be methylated to form 5-methylcytosine"
ttcattctgctcatgtccatttccacacccctgaagaggaagtgtactcacttaagccaacggatgcttaccagtcatgacacacaccatatctgagcagaagctttaattgttgtgcatgc

SEQ ID NO: 27001 - DNA, 122 bp, Homo sapiens
  misc_feature (61)..(62): /note="This region represents a CpG dinucleotide"
  misc_feature (61)..(61): /note="Nucleotide may be methylated to form 5-methylcytosine"
tccattagtattcagattttgtgatgtgattttagtcgtttgtgtgttcctcggtttccccgcttgtgaaacattttcattatgaccgtctgttaataacatgccacatgtttccaagaaag

SEQ ID NO: 27002 - DNA, 122 bp, Homo sapiens
  misc_feature (61)..(62): /note="This region represents a CpG dinucleotide"
  misc_feature (61)..(61): /note="Nucleotide may be methylated to form 5-methylcytosine"
tgtgtgctgtttctggatagaaaggcttaagttcttctgggacaaaaaatgtcaaagaaccgagacatttttagaaagaaaataaggaagacagcttggtatctttgtagatgaaatgatat

SEQ ID NO: 27003 - DNA, 122 bp, Homo sapiens
  misc_feature (61)..(62): /note="This region represents a CpG dinucleotide"
  misc_feature (61)..(61): /note="Nucleotide may be methylated to form 5-methylcytosine"
ccaggcactctacatacatcatctttaatcctcttggccactccctgcagatattactaacgcaaaaaggttaggaacttgccaaggtcagaaagctggtaaatggtacagctcagacataa

SEQ ID NO: 27004 - DNA, 122 bp, Homo sapiens
  misc_feature (61)..(62): /note="This region represents a CpG dinucleotide"
  misc_feature (61)..(61): /note="Nucleotide may be methylated to form 5-methylcytosine"
cagtaagtttgttatatcactgggccaaaatctactttcctggtggggcccggtggctcacgcctgtgatcccaggactttgggaggctgagtagggtggatcacctaaggtcaggagccag

SEQ ID NO: 27005 - DNA, 122 bp, Homo sapiens
  misc_feature (61)..(62): /note="This region represents a CpG dinucleotide"
  misc_feature (61)..(61): /note="Nucleotide may be methylated to form 5-methylcytosine"
catacaatgagatattatctgaccataaaaaatgaagacctacagatccacagtaatgcacggaccagccttgaaaccaccctgggtgaaagaagtcaatcacaaaaggtcacacgccatct

SEQ ID NO: 27006 - DNA, 122 bp, Homo sapiens
  misc_feature (61)..(62): /note="This region represents a CpG dinucleotide"
  misc_feature (61)..(61): /note="Nucleotide may be methylated to form 5-methylcytosine"
atttgctggtttaaatattaccaatctaaaaaatatatttaaaaaaaatttcagttaacacgagatttatagagaaagttactaggtcttgaaggcaaggcagttggttcctatgccataga

SEQ ID NO: 27007 - DNA, 122 bp, Homo sapiens
  misc_feature (61)..(62): /note="This region represents a CpG dinucleotide"
  misc_feature (61)..(61): /note="Nucleotide may be methylated to form 5-methylcytosine"
gtagaagtcttccatgtcaaaatgctgcaggattaagttccaactgcttagatcagcatacgaagtctatctcaatctctctagtctagtgattcataaagttggaggcaggttatttcacc

SEQ ID NO: 27008 - DNA, 122 bp, Homo sapiens
  misc_feature (61)..(62): /note="This region represents a CpG dinucleotide"
  misc_feature (61)..(61): /note="Nucleotide may be methylated to form 5-methylcytosine"
actgagggagtgggtcagcttggatcaacgccagcactctggatgtcagcagtggccaagcgtcttccttctgactctgtaaagctggagcaatcctcttattgcacaggtactggcactgt

SEQ ID NO: 27009 - DNA, 122 bp, Homo sapiens
  misc_feature (61)..(62): /note="This region represents a CpG dinucleotide"
  misc_feature (61)..(61): /note="Nucleotide may be methylated to form 5-methylcytosine"
cccctccaccccctgggcccggccccccccccccccccccgtaaatctatgtatttaatgcgagctagtcttaactctgaggttgtagctcctggggcacccccagcctccaggcccctgac

SEQ ID NO: 27010 - DNA, 122 bp, Homo sapiens
  misc_feature (61)..(62): /note="This region represents a CpG dinucleotide"
  misc_feature (61)..(61): /note="Nucleotide may be methylated to form 5-methylcytosine"
ttgtatgctatcatatggatgaatcatgaggaaactatgttacatgaaataagccagtcacggaaagagaaataccacatgatttcacttatacaaggtatttaatgtagtcaaactcataa

SEQ ID NO: 27011 - DNA, 122 bp, Homo sapiens
  misc_feature (61)..(62): /note="This region represents a CpG dinucleotide"
  misc_feature (61)..(61): /note="Nucleotide may be methylated to form 5-methylcytosine"
tgagaatgtatctcgggcagtgtagtaggaaaggcccctcacgttttgcgcctcctccaccggcattcctgggacagcactgatgactaagggagagtaacttccagggaaagtaacttcca

SEQ ID NO: 27012 - DNA, 122 bp, Homo sapiens
  misc_feature (61)..(62): /note="This region represents a CpG dinucleotide"
  misc_feature (61)..(61): /note="Nucleotide may be methylated to form 5-methylcytosine"
cccgcctcggctggggccgcgggcggcccggagctataaaaggcctgggtggggcgggcgcggcggcaggacagccgagttcaggtgagcggttgctcgtcgtcggggcggccggcagcggc

SEQ ID NO: 27013 - DNA, 122 bp, Homo sapiens
  misc_feature (61)..(62): /note="This region represents a CpG dinucleotide"
  misc_feature (61)..(61): /note="Nucleotide may be methylated to form 5-methylcytosine"
atgacagtctttaaaaagataaccttagattgtcagagcaagatttggtgatattcaatacgttgtgcttacattctgcttggcaatgagaccacttaaccatcccttcacaacttgtatag

SEQ ID NO: 27014 - DNA, 122 bp, Homo sapiens
  misc_feature (61)..(62): /note="This region represents a CpG dinucleotide"
  misc_feature (61)..(61): /note="Nucleotide may be methylated to form 5-methylcytosine"
gtggtccagatactgctggatactggcagctcctgtggttgggccagtttgtacacttggcgttaggcttgatcagtgatgttgctgaccctcgcccatgctgggtaagtgtccaggtggaa

SEQ ID NO: 27015 - DNA, 122 bp, Homo sapiens
  misc_feature (61)..(62): /note="This region represents a CpG dinucleotide"
  misc_feature (61)..(61): /note="Nucleotide may be methylated to form 5-methylcytosine"
actcttattcggctcggagccttatttctgctgctgggttttgctggctgttgctgtcctcgctgtctattttttctccccactagagcgcaggcgagggaagacaaaagacggagaacgac

SEQ ID NO: 27016 - DNA, 122 bp, Homo sapiens
  misc_feature (61)..(62): /note="This region represents a CpG dinucleotide"
  misc_feature (61)..(61): /note="Nucleotide may be methylated to form 5-methylcytosine"
gacctgccagggttgtatttccacaagccattatcctatgatgtgaataaactcacaacacgaaaatcagtgattacgtgtttctctgcagctctacctgtgtcttcaaaagcatcccactc

SEQ ID NO: 27017 - DNA, 122 bp, Homo sapiens
  misc_feature (61)..(62): /note="This region represents a CpG dinucleotide"
  misc_feature (61)..(61): /note="Nucleotide may be methylated to form 5-methylcytosine"
tggaaaggcttcataaatctcacagggaattcctttcaacaaggactgtcagcaaaaatccgtaaataaccttctgccagcctctagcaatcacctccaccacgttctttttccttcctgct

SEQ ID NO: 27018 - DNA, 122 bp, Homo sapiens
  misc_feature (61)..(62): /note="This region represents a CpG dinucleotide"
  misc_feature (61)..(61): /note="Nucleotide may be methylated to form 5-methylcytosine"
ctcacacctcccggttacttctcctcttcccagggacccagacggggagagggtgctgggcgccggcaagccacagcgtctgctctcatgatctcgcccccacccgccttgggcccccagag

SEQ ID NO: 27019 - DNA, 122 bp, Homo sapiens
  misc_feature (61)..(62): /note="This region represents a CpG dinucleotide"
  misc_feature (61)..(61): /note="Nucleotide may be methylated to form 5-methylcytosine"
tgctaactcagcaagcgcgattacagtgctccaacttaataagttgataaaaagctgtcccgtggccagttcacaatggaactaaatagtttcgttccgagatgcctggggagtttctctgg

SEQ ID NO: 27020 - DNA, 122 bp, Homo sapiens
  misc_feature (61)..(62): /note="This region represents a CpG dinucleotide"
  misc_feature (61)..(61): /note="Nucleotide may be methylated to form 5-methylcytosine"
tcatcaagttcgtggtagaagtacaggatgcagcagggccgcatcagctaccttatgcagcgctgttgggtcatggatgacttcttagagaaagtgacagctaagaaagaggcttaagggag

SEQ ID NO: 27021 - DNA, 122 bp, Homo sapiens
  misc_feature (61)..(62): /note="This region represents a CpG dinucleotide"
  misc_feature (61)..(61): /note="Nucleotide may be methylated to form 5-methylcytosine"
caaatcaatacactagttgtttctacccctggctgctgtggtgtctttgttggtggacgtcgctgtgtgtactgaggtgcagactcgtgggcatgcgcgcgcgtacacacacacacacacac

SEQ ID NO: 27022 - DNA, 122 bp, Homo sapiens
  misc_feature (61)..(62): /note="This region represents a CpG dinucleotide"
  misc_feature (61)..(61): /note="Nucleotide may be methylated to form 5-methylcytosine"
gcaattcacaagaaaataaatatttgctagtctctgttttccaagagctaacattctaatcggggactcaaacatctataatagatagagaacatacatgaaaatcaaaggaataagtgtaa

SEQ ID NO: 27023 - DNA, 122 bp, Homo sapiens
  misc_feature (61)..(62): /note="This region represents a CpG dinucleotide"
  misc_feature (61)..(61): /note="Nucleotide may be methylated to form 5-methylcytosine"
tgtggtgcctgactgacttatgaaagaatgcatcaggcatgagctggacctcaagctctccgcattcctcctgggtggtcgccttagtctgcagctgtctccaccagggaggaaggtatgca

SEQ ID NO: 27024 - DNA, 122 bp, Homo sapiens
  misc_feature (61)..(62): /note="This region represents a CpG dinucleotide"
  misc_feature (61)..(61): /note="Nucleotide may be methylated to form 5-methylcytosine"
cctgggatatgcaccagatcacattcacaagagaacctaccatgggtgtgtccagcgtcacgcacaattctcagtgaaacagcttaatctccacacttttctgtctcacaagcaaattagga

SEQ ID NO: 27025 - DNA, 122 bp, Homo sapiens
  misc_feature (61)..(62): /note="This region represents a CpG dinucleotide"
  misc_feature (61)..(61): /note="Nucleotide may be methylated to form 5-methylcytosine"
gtagagcccagagcactgcctgactcataatcagccctcaataagtttagatattattagcgttagtcatacatgcctcttccattttcatatttttgattgcttttgttgttctgccaaat

SEQ ID NO: 27026 - DNA, 122 bp, Homo sapiens
  misc_feature (61)..(62): /note="This region represents a CpG dinucleotide"
  misc_feature (61)..(61): /note="Nucleotide may be methylated to form 5-methylcytosine"
tgctgtggcaacctgccctccagtgaattattatatgcattgtcatttcatgcatgtccgcgtgtatctgtaggacagattcctaaacgtgagattgctacatcagcaggtatgtgcatttg

SEQ ID NO: 27027 - DNA, 122 bp, Homo sapiens
  misc_feature (61)..(62): /note="This region represents a CpG dinucleotide"
  misc_feature (61)..(61): /note="Nucleotide may be methylated to form 5-methylcytosine"
agggtgtatgaggaaataacagtttccattccagacttcatcttggtttatgagggaatacggagtttccatttttgttatctcataccgcagcatctctttagcttaagtaagaattaagg

SEQ ID NO: 27028 - DNA, 122 bp, Homo sapiens
  misc_feature (61)..(62): /note="This region represents a CpG dinucleotide"
  misc_feature (61)..(61): /note="Nucleotide may be methylated to form 5-methylcytosine"
gctaatcgtcctgctgtgttaggaacccatgagacaatgctgtaacatttagctttctgacgtccaaagcatctagatcagtccccaattaaacaggtattaatcacaaagactctaaaagc

SEQ ID NO: 27029 - DNA, 122 bp, Homo sapiens
  misc_feature (61)..(62): /note="This region represents a CpG dinucleotide"
  misc_feature (61)..(61): /note="Nucleotide may be methylated to form 5-methylcytosine"
ttgtttagttaaggtaacagaaacttcaactggtgtttcaattggaggaaatttaatacacggtatagttacaaaagggtcagaaagcctagaatagccaaaagagaaaagtaaacttcctt

SEQ ID NO: 27030 - DNA, 122 bp, Homo sapiens
  misc_feature (61)..(62): /note="This region represents a CpG dinucleotide"
  misc_feature (61)..(61): /note="Nucleotide may be methylated to form 5-methylcytosine"
cccaaactgtggggtggacttttcgttctcagtaaatccttgcttttgctttccttgcttcgtttgtgtgttttctccaagatgccaagtacctggacaccttctactggtaacagctggag

SEQ ID NO: 27031 - DNA, 122 bp, Homo sapiens
  misc_feature (61)..(62): /note="This region represents a CpG dinucleotide"
  misc_feature (61)..(61): /note="Nucleotide may be methylated to form 5-methylcytosine"
actcctgacctcaagtgatccacccgccttggcctcccaaagtgctgggattacaggcctcgtgagtcgctgtgccaggcctaattttaaatattctgtgcatcagatatttcactaaacca

SEQ ID NO: 27032 - DNA, 122 bp, Homo sapiens
  misc_feature (61)..(62): /note="This region represents a CpG dinucleotide"
  misc_feature (61)..(61): /note="Nucleotide may be methylated to form 5-methylcytosine"
aatgccactccactctgtaatgcactgcatgttaacaagatttatatacattactggtgccgttaaggaaacttaaatgacttgcagtttctctagatgagattttaaaaaatcttaaaaag

SEQ ID NO: 27033 - DNA, 122 bp, Homo sapiens
  misc_feature (61)..(62): /note="This region represents a CpG dinucleotide"
  misc_feature (61)..(61): /note="Nucleotide may be methylated to form 5-methylcytosine"
tacttttggcttttggggccatatggtcactgtcctaactactgaacactccactgtagacggaaggcagccacagacaatttgcaaatgaaaagatgttggctatgttccaataaaatttt

SEQ ID NO: 27034 - DNA, 122 bp, Homo sapiens
  misc_feature (61)..(62): /note="This region represents a CpG dinucleotide"
  misc_feature (61)..(61): /note="Nucleotide may be methylated to form 5-methylcytosine"
acacactgtttcttttttggcaggcagggctagccgtcctcctaggtgttgctgtgtatccgttagggatgtaaagctgggggcccctttctgtattggtgttagtggccgtggatgaccat

SEQ ID NO: 27035 - DNA, 122 bp, Homo sapiens
  misc_feature (61)..(62): /note="This region represents a CpG dinucleotide"
  misc_feature (61)..(61): /note="Nucleotide may be methylated to form 5-methylcytosine"
atgtggaaggccccagcggagaaggccacggagaagacgcccagcgccccgctgagcccccgctgacgcagcccacaagggacccacccagtgccaagtggtgcagaagcaccactcaatcc

SEQ ID NO: 27036 - DNA, 122 bp, Homo sapiens
  misc_feature (61)..(62): /note="This region represents a CpG dinucleotide"
  misc_feature (61)..(61): /note="Nucleotide may be methylated to form 5-methylcytosine"
ccatttctggtattctctctttactgtgtatcctgggggtgatgggaagaagaggagagacgagaaggacttactagtaacagaaaggaaaataatgaattgggaagaggagcaaaggggat

SEQ ID NO: 27037 - DNA, 122 bp, Homo sapiens
  misc_feature (61)..(62): /note="This region represents a CpG dinucleotide"
  misc_feature (61)..(61): /note="Nucleotide may be methylated to form 5-methylcytosine"
ggtgtgggctaggcgcgctccgggtcctccgtgaattcccagtttccaggcagctgcgcccgggcccgcctccccgagtcggcccccacctctgcacgcagagacctctcctcacctcccgc

SEQ ID NO: 27038 - DNA, 122 bp, Homo sapiens
  misc_feature (61)..(62): /note="This region represents a CpG dinucleotide"
  misc_feature (61)..(61): /note="Nucleotide may be methylated to form 5-methylcytosine"
cttgaattttattatcaagtagctaaatggaaaatcagtctcccaggattcttagaggggcgtaggagagacctctgaacgtattctatctcattacagagctggctcagaagcccaagacc

SEQ ID NO: 27039 - DNA, 122 bp, Homo sapiens
  misc_feature (61)..(62): /note="This region represents a CpG dinucleotide"
  misc_feature (61)..(61): /note="Nucleotide may be methylated to form 5-methylcytosine"
ctcaacatgggagattcagcaaacaaacacagctggcattgggcaagatactactgtgggcgaggcacagagagagtataattagtgatgtgctccagtggactgtggggtaggtttaaaca

SEQ ID NO: 27040 - DNA, 122 bp, Homo sapiens
  misc_feature (61)..(62): /note="This region represents a CpG dinucleotide"
  misc_feature (61)..(61): /note="Nucleotide may be methylated to form 5-methylcytosine"
gtaaagctactcactgaaactgaaatcctttgtcataataacaactgcaggcttctttggcgcaataataattgtaaaattttaatgtatgattgaagcagaactatcagacaaggaaaaga

SEQ ID NO: 27041 - DNA, 122 bp, Homo sapiens
  misc_feature (61)..(62): /note="This region represents a CpG dinucleotide"
  misc_feature (61)..(61): /note="Nucleotide may be methylated to form 5-methylcytosine"
cttcaagttttaaccaatgagtgttttagaggttaaagtttaaactctgacttggaagcacgctgggtaggactcctctgctcactcagactcaagttggatcatcagaatctctcttgtgt

SEQ ID NO: 27042 - DNA, 122 bp, Homo sapiens
  misc_feature (61)..(62): /note="This region represents a CpG dinucleotide"
  misc_feature (61)..(61): /note="Nucleotide may be methylated to form 5-methylcytosine"
atataggatagcaattctcgagctccccaacaacatcccaaagctttgggatggttctaacgacaaagaatttacatttctctttctttagtctgatttggaagctccaatctagaatttaa

SEQ ID NO: 27043 - DNA, 122 bp, Homo sapiens
  misc_feature (61)..(62): /note="This region represents a CpG dinucleotide"
  misc_feature (61)..(61): /note="Nucleotide may be methylated to form 5-methylcytosine"
cctaacctccttaaccaagatgctttgtgttgcccattggatccccacagtttcaccttacgaagttctcctagctcactcttcatccactcattcaataaaaatgtccttgctcaccaagc

SEQ ID NO: 27044 - DNA, 122 bp, Homo sapiens
  misc_feature (61)..(62): /note="This region represents a CpG dinucleotide"
  misc_feature (61)..(61): /note="Nucleotide may be methylated to form 5-methylcytosine"
ggaattccagtaatgcgttatctttcattcaatccatatttacttggtggctggctctaacgcttcagtgcagagtcccttgactctccttttgcctctaatttcctccctcacctaagatt

SEQ ID NO: 27045 - DNA, 122 bp, Homo sapiens
  misc_feature (61)..(62): /note="This region represents a CpG dinucleotide"
  misc_feature (61)..(61): /note="Nucleotide may be methylated to form 5-methylcytosine"
atccacccacctcaacctcccaaagtgctgggattacaggcgtgagtcacagcacccggtcgcaagaagttatcttaagatgattcgaaataaatggaaaaaactttaagaggcagtgtgat

SEQ ID NO: 27046 - DNA, 122 bp, Homo sapiens
  misc_feature (61)..(62): /note="This region represents a CpG dinucleotide"
  misc_feature (61)..(61): /note="Nucleotide may be methylated to form 5-methylcytosine"
taaaccccaggacacaggcagtgaccctagacgagcagggcaggtccaggtgacgggaggcgtgccacgtttctccatcccgaagttcttcttggtttttatcctaagtactgatgtcagga

SEQ ID NO: 27047 - DNA, 122 bp, Homo sapiens
  misc_feature (61)..(62): /note="This region represents a CpG dinucleotide"
  misc_feature (61)..(61): /note="Nucleotide may be methylated to form 5-methylcytosine"
ggggaattgtaattccaatttgtgtcaatccaaattgtgtctgtgtgtcatatgaggggacggcaggcaataatgagtgagggaggttattctgagcctaagtaatattgacagaataggac

SEQ ID NO: 27048 - DNA, 122 bp, Homo sapiens
  misc_feature (61)..(62): /note="This region represents a CpG dinucleotide"
  misc_feature (61)..(61): /note="Nucleotide may be methylated to form 5-methylcytosine"
gcaggctccctgctcagccccactcttgggcgtgcgtccttcctgtgtcactgcctgatacgtgatagcatctgactccatgttagggcccgaattgtgtccatcccgccaaatccgtatgt

SEQ ID NO: 27049 - DNA, 122 bp, Homo sapiens
  misc_feature (61)..(62): /note="This region represents a CpG dinucleotide"
  misc_feature (61)..(61): /note="Nucleotide may be methylated to form 5-methylcytosine"
aataaacagccacactaacaggcagtataacaaaggaaaggcaacataatattcctcaaacggagttaagatagaccagatcttagaataactcagccatgactaaaattgggctcacaatg

SEQ ID NO: 27050 - DNA, 122 bp, Homo sapiens
  misc_feature (61)..(62): /note="This region represents a CpG dinucleotide"
  misc_feature (61)..(61): /note="Nucleotide may be methylated to form 5-methylcytosine"
tttaaagccatgttccttgaaatactggagttttcttgaattactactggtctcaagatacgttcaggaaaaaatatttcatggctaagtaagtttgagggaagatgttttatactgtgttt

SEQ ID NO: 27051 - DNA, 122 bp, Homo sapiens
  misc_feature (61)..(62): /note="This region represents a CpG dinucleotide"
  misc_feature (61)..(61): /note="Nucleotide may be methylated to form 5-methylcytosine"
ctatggctgctcctgcaggaggtaccaaatgcttcaacatgagtcaacagagagccacaccggggatgctgtggccactgcggatgacatcaggtctgattttcattgtgtaatgaaaatat

SEQ ID NO: 27052 - DNA, 122 bp, Homo sapiens
  misc_feature (61)..(62): /note="This region represents a CpG dinucleotide"
  misc_feature (61)..(61): /note="Nucleotide may be methylated to form 5-methylcytosine"
agtgagaaaataaatttctgttgttttaagccacctggtcagtgatattttttatgacagcgagagctgactaatgcagcgtgcatgccctttattggttcttaacctttttatgcctagta

SEQ ID NO: 27053 - DNA, 122 bp, Homo sapiens
  misc_feature (61)..(62): /note="This region represents a CpG dinucleotide"
  misc_feature (61)..(61): /note="Nucleotide may be methylated to form 5-methylcytosine"
cagtggctcagcctcaaggaaagggagagttgggactacgtcatttcataggaggggaggcgtgccatgaattatacaccctggcttctctgggattagagggcaagtcccatatgcttaaa

SEQ ID NO: 27054 - DNA, 122 bp, Homo sapiens
  misc_feature (61)..(62): /note="This region represents a CpG dinucleotide"
  misc_feature (61)..(61): /note="Nucleotide may be methylated to form 5-methylcytosine"
tagttgagaaagtggtcaagaggtggatccatgtgaacgccactgggaaatgagagacctcgttcccaatcacggtcagtgcaactcgaaagcctaaaatcagtttaaaacaaaggtatcta

SEQ ID NO: 27055 - DNA, 122 bp, Homo sapiens
  misc_feature (61)..(62): /note="This region represents a CpG dinucleotide"
  misc_feature (61)..(61): /note="Nucleotide may be methylated to form 5-methylcytosine"
tgagtcattctcaaatcatttagttttaacattttcagagatagcatttttttaaatatgcgcttttattttggttggacagtcagttcactttttgcagggatacttttatacaatgttgt

SEQ ID NO: 27056 - DNA, 122 bp, Homo sapiens
  misc_feature (61)..(62): /note="This region represents a CpG dinucleotide"
  misc_feature (61)..(61): /note="Nucleotide may be methylated to form 5-methylcytosine"
ttatatttcacatgttgtacatgaatgggggtggatatgggacgtaaaagccaagggagacggggccacagcatctactcccattttggatagtaagagaccatttaataacatacagtagg

SEQ ID NO: 27057 - DNA, 122 bp, Homo sapiens
  misc_feature (61)..(62): /note="This region represents a CpG dinucleotide"
  misc_feature (61)..(61): /note="Nucleotide may be methylated to form 5-methylcytosine"
tcagatgtacaaaaacaggcattcatcatgaatcgcactgttagcatgaatcatctggcacggcccaaggccccaggtataccaaggcacttgggccgaatgttccaagggattaaatgtca

SEQ ID NO: 27058 - DNA, 122 bp, Homo sapiens
  misc_feature (61)..(62): /note="This region represents a CpG dinucleotide"
  misc_feature (61)..(61): /note="Nucleotide may be methylated to form 5-methylcytosine"
cagactaaccattgtccttttttacccctcctgtgacggggctactacaggttacaaaatcgcgctcttcctcctagctactgtgttactctgagatatctgacatcgcagagctaatgttg

SEQ ID NO: 27059 - DNA, 122 bp, Homo sapiens
  misc_feature (61)..(62): /note="This region represents a CpG dinucleotide"
  misc_feature (61)..(61): /note="Nucleotide may be methylated to form 5-methylcytosine"
tgatgaggcccattcccacagggctggtaaacagcaatctaggacaattgagggagacagcggtagcactgcaaacacaggtgtcagagttttaatcccagctctgtgcctaatttgctatt

SEQ ID NO: 27060 - DNA, 122 bp, Homo sapiens
  misc_feature (61)..(62): /note="This region represents a CpG dinucleotide"
  misc_feature (61)..(61): /note="Nucleotide may be methylated to form 5-methylcytosine"
aataaacaaaagcagctaccacttctagaatgctccatgtgcgatgagaactattctaagcggctgtgagtagtaactgacacaatgcataagcagccagcaattccattctgctgggctgg

SEQ ID NO: 27061 - DNA, 122 bp, Homo sapiens
  misc_feature (61)..(62): /note="This region represents a CpG dinucleotide"
  misc_feature (61)..(61): /note="Nucleotide may be methylated to form 5-methylcytosine"
caaacctgtagacatgtccctcggctcagaattcattaaagagcagtggttctgctgacacgggccgccccccgggatgcagcggccagtctcagaatgagagggatggctccgtctccacc

SEQ ID NO: 27062 - DNA, 122 bp, Homo sapiens
  misc_feature (61)..(62): /note="This region represents a CpG dinucleotide"
  misc_feature (61)..(61): /note="Nucleotide may be methylated to form 5-methylcytosine"
gcgcctcacgttttgaaccatttagaacacttcaaaacatgaattgctgctgtatcccctcggagtcaatgaagggggatcgatctgggggtacctgcgggtgaataaagactggatgactg

SEQ ID NO: 27063 - DNA, 122 bp, Homo sapiens
  misc_feature (61)..(62): /note="This region represents a CpG dinucleotide"
  misc_feature (61)..(61): /note="Nucleotide may be methylated to form 5-methylcytosine"
tcatgactgtgcatcctgagagcacttcagccttccttccccctgtccagtcagcactggcggggctgccagaagttctcaagactcagtgagccccagaggagctcacaagtccccagggg

SEQ ID NO: 27064 - DNA, 122 bp, Homo sapiens
  misc_feature (61)..(62): /note="This region represents a CpG dinucleotide"
  misc_feature (61)..(61): /note="Nucleotide may be methylated to form 5-methylcytosine"
tccaccacctcaccagcacttcttgttatttgcctttctgattctagccatcctagcaggcgtgaagtggtgtctcctggttaaggatttgaactgtgggctttctgcccggacagactgtg

SEQ ID NO: 27065 - DNA, 122 bp, Homo sapiens
  misc_feature (61)..(62): /note="This region represents a CpG dinucleotide"
  misc_feature (61)..(61): /note="Nucleotide may be methylated to form 5-methylcytosine"
agatgccgctccctcccaacgggagccgggcgcgggttcgtggccgacagatggcgcctgcgcgttccattcgcctccaagtcgccgaagagcgaacaccccaaacaatcccgaagcgccac

SEQ ID NO: 27066 - DNA, 122 bp, Homo sapiens
  misc_feature (61)..(62): /note="This region represents a CpG dinucleotide"
  misc_feature (61)..(61): /note="Nucleotide may be methylated to form 5-methylcytosine"
cctcctgcctgtccgatagattggatttcttgcagtgttggcatcatcccagtcacacctcgttttaccaggtattttatagaacctcccagatgagaattaagataatgagtatgaaagat

SEQ ID NO: 27067 - DNA, 122 bp, Homo sapiens
  misc_feature (61)..(62): /note="This region represents a CpG dinucleotide"
  misc_feature (61)..(61): /note="Nucleotide may be methylated to form 5-methylcytosine"
actggaacagaggaggaactggttacagtaatcatcattcccctgtgaacaaaggtctcacgcagtcatttctcctcagtgtgttttcggcttcacagaatgactgtgagacaatgttgatc

SEQ ID NO: 27068 - DNA, 122 bp, Homo sapiens
  misc_feature (61)..(62): /note="This region represents a CpG dinucleotide"
  misc_feature (61)..(61): /note="Nucleotide may be methylated to form 5-methylcytosine"
atgttaattttgtcctgaaaccagtttgtctttgcaaatgggaagtcagtcacagaaatacggcatttgccaaatgagaaatttggagtagagcccctagagaagcaaagggcttctgtttc

SEQ ID NO: 27069 - DNA, 122 bp, Homo sapiens
  misc_feature (61)..(62): /note="This region represents a CpG dinucleotide"
  misc_feature (61)..(61): /note="Nucleotide may be methylated to form 5-methylcytosine"
cacaatgaatgcccagcctcatgcagttcctgttggtctgtagcaaatcagtttctgtatcgttcggtacaatgcaaacagaagcctcttccttgtggcctttgcaggaaatgattgttgtc

SEQ ID NO: 27070 - DNA, 122 bp, Homo sapiens
  misc_feature (61)..(62): /note="This region represents a CpG dinucleotide"
  misc_feature (61)..(61): /note="Nucleotide may be methylated to form 5-methylcytosine"
aagcctgctcaccacagtgaagagaaatcctgcattgtgatatggccttgctgaggaaagcgaaagttcctgaggaaaaggaaagcacagaagaggagagccgaggccacgagctggagaag

SEQ ID NO: 27071 - DNA, 122 bp, Homo sapiens
  misc_feature (61)..(62): /note="This region represents a CpG dinucleotide"
  misc_feature (61)..(61): /note="Nucleotide may be methylated to form 5-methylcytosine"
ccagctgggtcacactggtggctgggaaagaccaagaagaggcagaggaagaggtggcaccgatgataaaaatccattcaagaatttagctgtgacacatctacagcaggttcaaatctctc

SEQ ID NO: 27072 - DNA, 122 bp, Homo sapiens
  misc_feature (61)..(62): /note="This region represents a CpG dinucleotide"
  misc_feature (61)..(61): /note="Nucleotide may be methylated to form 5-methylcytosine"
ccttccccgccctccgcgaggctgcagcccaggctgagcgccgcctcccaggcccagggccgcccctccaagccccaaccccgggtttcatccctggcaagggcgctgctcctccccgaccc

SEQ ID NO: 27073 - DNA, 122 bp, Homo sapiens
  misc_feature (61)..(62): /note="This region represents a CpG dinucleotide"
  misc_feature (61)..(61): /note="Nucleotide may be methylated to form 5-methylcytosine"
ctactgtaatgcaacccatggcatattcaggcaccccaaggggtttctctgtcactctcacgggactttggagagtgggtatggggaagcaacagatacaaaccaacatgaaattgtggttc

SEQ ID NO: 27074 - DNA, 122 bp, Homo sapiens
  misc_feature (61)..(62): /note="This region represents a CpG dinucleotide"
  misc_feature (61)..(61): /note="Nucleotide may be methylated to form 5-methylcytosine"
ttgtgcttatgtaacccagttcaggatctgatggttagtctctcgatacatgctgaaacacgagggaatttttacttgccaggatgcctgcttcatggaaaatattgtgtctatgttgaagc

SEQ ID NO: 27075 - DNA, 122 bp, Homo sapiens
  misc_feature (61)..(62): /note="This region represents a CpG dinucleotide"
  misc_feature (61)..(61): /note="Nucleotide may be methylated to form 5-methylcytosine"
caaccaggtgccattttctctttagatcctttaatcccccgagggacatcagccgtgaaacgactcacaccactgcagcagcaggggtaaggcagtgatcgttctagaacaggctgaaggct

SEQ ID NO: 27076 - DNA, 122 bp, Homo sapiens
  misc_feature (61)..(62): /note="This region represents a CpG dinucleotide"
  misc_feature (61)..(61): /note="Nucleotide may be methylated to form 5-methylcytosine"
caccccgtagcctttcctcaggctccacgagttctcccggtgatgtgatgaccgacatggcgtctgggctctgaacacagactttactccttccccccggccccgaaacatggggaaaccac

SEQ ID NO: 27077 - DNA, 122 bp, Homo sapiens
  misc_feature (61)..(62): /note="This region represents a CpG dinucleotide"
  misc_feature (61)..(61): /note="Nucleotide may be methylated to form 5-methylcytosine"
tgtcctgtggctttctgttttgccatggaaataccttcaaggacaagaaggcccttgtcacgcctaactcgaagacaacttgctcttggtacctctcacccattttctttttgtgaaaacag

SEQ ID NO: 27078 - DNA, 122 bp, Homo sapiens
  misc_feature (61)..(62): /note="This region represents a CpG dinucleotide"
  misc_feature (61)..(61): /note="Nucleotide may be methylated to form 5-methylcytosine"
atgcctgctcaaaactcaagaagccaccaccctgatactcatcaaaccccggagaaatttcgtttttagagtgtcagaaggccccatgaataaccttccagtcactgagggaggtccctact

SEQ ID NO: 27079 - DNA, 122 bp, Homo sapiens
  misc_feature (61)..(62): /note="This region represents a CpG dinucleotide"
  misc_feature (61)..(61): /note="Nucleotide may be methylated to form 5-methylcytosine"
acctggcccagttcctgaatggaatgctgcaaagtcctaagttctcctgcatggcactgacgaaagggatttattaaatgaaggtaaaaactctcaatgaaaaactgtcttcaatctaagga

SEQ ID NO: 27080 - DNA, 122 bp, Homo sapiens
  misc_feature (61)..(62): /note="This region represents a CpG dinucleotide"
  misc_feature (61)..(61): /note="Nucleotide may be methylated to form 5-methylcytosine"
agtgaaactccatcttaaaaaaaaaaaaaaaaaagaagaagtttccaggaagagaatttccgttcaagttgtaagtcaagtccagaacctcaagagctggcagagagcagaagcctcgtggc

SEQ ID NO: 27081 - DNA, 122 bp, Homo sapiens
  misc_feature (61)..(62): /note="This region represents a CpG dinucleotide"
  misc_feature (61)..(61): /note="Nucleotide may be methylated to form 5-methylcytosine"
tttgtctggattactttgtgattatttactacataaactattcggttcactattctgcctcgttgctgcaatgtaaagagttggtgaatgaagaggtgaggtgggcaggggagctgtggaag

SEQ ID NO: 27082 - DNA, 122 bp, Homo sapiens
  misc_feature (61)..(62): /note="This region represents a CpG dinucleotide"
  misc_feature (61)..(61): /note="Nucleotide may be methylated to form 5-methylcytosine"
tgatactgtcacatgaagacctaattagtcactaatgattcatcagtttcataatggaaacggtttggaatatatggaactgaaatacagaagttattaaggacacttggtgcattttcaat

SEQ ID NO: 27083 - DNA, 122 bp, Homo sapiens
  misc_feature (61)..(62): /note="This region represents a CpG dinucleotide"
  misc_feature (61)..(61): /note="Nucleotide may be methylated to form 5-methylcytosine"
tgggaagactgtacttaggccctgcagcaggcaggagaaaggaatgactaaggaactgaacggttaatgtggtgtgaacctatagagcaaaacaacaaggaaatatgggccagatgtcgctg

SEQ ID NO: 27084 - DNA, 122 bp, Homo sapiens
  misc_feature (61)..(62): /note="This region represents a CpG dinucleotide"
  misc_feature (61)..(61): /note="Nucleotide may be methylated to form 5-methylcytosine"
ctcctgctcccttcagttcaggcagcctcatttgttatgtctctgctaaaattaactccacgttaatttctggaggctttggagtttattgctgggaaaaaaaaaaggttatttgctggcag

SEQ ID NO: 27085 - DNA, 122 bp, Homo sapiens
  misc_feature (61)..(62): /note="This region represents a CpG dinucleotide"
  misc_feature (61)..(61): /note="Nucleotide may be methylated to form 5-methylcytosine"
atattttctctcattcaactaataattattgccagggaacgcaatgttttgagctgcagacggtggtagccatataaaaacgtataaaacatactgccataccttgaaggcctcttatagct

SEQ ID NO: 27086 - DNA, 122 bp, Homo sapiens
  misc_feature (61)..(62): /note="This region represents a CpG dinucleotide"
  misc_feature (61)..(61): /note="Nucleotide may be methylated to form 5-methylcytosine"
actatttgtttagtttttccttcccaaatttgtggctgctgtgttcttgtgactttttgtcgggggtgtttttttcttgcttgcagtgttacccacaatgcatctattttgtgtgtattaaa

SEQ ID NO: 27087 - DNA, 122 bp, Homo sapiens
  misc_feature (61)..(62): /note="This region represents a CpG dinucleotide"
  misc_feature (61)..(61): /note="Nucleotide may be methylated to form 5-methylcytosine"
agttccaattctaaataaagctgtatctgtgagatgtagggggacagaagacccaataaacgggaaggttttatcaaaaagagttaagatggtcactggcagcctacgatgccaaaggacag

SEQ ID NO: 27088 - DNA, 122 bp, Homo sapiens
  misc_feature (61)..(62): /note="This region represents a CpG dinucleotide"
  misc_feature (61)..(61): /note="Nucleotide may be methylated to form 5-methylcytosine"
ctatgaaaagagcatgtttattctccctcagaggtttcagaaatccagttgttttattatcgggacagagggaaatgtatggaataccgtgttcgaagtgattagtaaaggtaatttaagtt

SEQ ID NO: 27089 - DNA, 122 bp, Homo sapiens
  misc_feature (61)..(62): /note="This region represents a CpG dinucleotide"
  misc_feature (61)..(61): /note="Nucleotide may be methylated to form 5-methylcytosine"
taagggtgccctaaggtcagggctggccctgagacaaattatgaaattatacaatatggccgggtgcagtgactcacgcctgtaatcccagcactttgggaggccgaggcgggtggatcaca

SEQ ID NO: 27090 - DNA, 122 bp, Homo sapiens
  misc_feature (61)..(62): /note="This region represents a CpG dinucleotide"
  misc_feature (61)..(61): /note="Nucleotide may be methylated to form 5-methylcytosine"
tttattttcttggagtctttccagatacaacaaaactaataccattcgttcaagataccacgtaagatagtaaaataaagtacatctaggcattgacttaggatctctgagtgtgggagaaa

SEQ ID NO: 27091 - DNA, 122 bp, Homo sapiens
  misc_feature (61)..(62): /note="This region represents a CpG dinucleotide"
  misc_feature (61)..(61): /note="Nucleotide may be methylated to form 5-methylcytosine"
agttactcagcaagaagtatgtgcctatactgcagtttccccagcgcccctgctgctgatcgtggcagccctgagtcctgtgaggtcaaatgcttgttgatgtgagaactgctttctattgt

SEQ ID NO: 27092 - DNA, 122 bp, Homo sapiens
  misc_feature (61)..(62): /note="This region represents a CpG dinucleotide"
  misc_feature (61)..(61): /note="Nucleotide may be methylated to form 5-methylcytosine"
acgaaaccccagagagagcagccagctaagtgacaaagctggtttctgaacacacgggcccgtgtatttgttcattgcattacgtggtggcccagggggatggatttccaacctgggtgtgc

SEQ ID NO: 27093 - DNA, 122 bp, Homo sapiens
  misc_feature (61)..(62): /note="This region represents a CpG dinucleotide"
  misc_feature (61)..(61): /note="Nucleotide may be methylated to form 5-methylcytosine"
attggaatgcaattctacattccagggagttgcattttacaattcctgtcatcgaggcaccgtcatgatgtagttgtcattgctgaggtatgtacagcattggtcacacctgttcataggaa

SEQ ID NO: 27094 - DNA, 122 bp, Homo sapiens
  misc_feature (61)..(62): /note="This region represents a CpG dinucleotide"
  misc_feature (61)..(61): /note="Nucleotide may be methylated to form 5-methylcytosine"
caactgatccattttctaaggagtcctagttcctaaatgggtgttattactattttatctcggtttaagtgttttacagtgggagaggttggaggtctctagtacagggtattgctggaaat

SEQ ID NO: 27095 - DNA, 122 bp, Homo sapiens
  misc_feature (61)..(62): /note="This region represents a CpG dinucleotide"
  misc_feature (61)..(61): /note="Nucleotide may be methylated to form 5-methylcytosine"
gctgatgtctgaatttgctaatttctgctgattcagttagagggcaatgcactcagctaacgagggatctatccaggtatgtgaattaaggcttgaaaagaaagtgtaggttgtaatcagtg

SEQ ID NO: 27096 - DNA, 122 bp, Homo sapiens
  misc_feature (61)..(62): /note="This region represents a CpG dinucleotide"
  misc_feature (61)..(61): /note="Nucleotide may be methylated to form 5-methylcytosine"
ctctatggtgttggcacaatgatgaaatcacccaatgacacttttctcagaatgtgtgcccgtcaagtgactcatgactgtagttggatgcaaagctgggaaggaaaggtattccacatagc

SEQ ID NO: 27097 - DNA, 122 bp, Homo sapiens
  misc_feature (61)..(62): /note="This region represents a CpG dinucleotide"
  misc_feature (61)..(61): /note="Nucleotide may be methylated to form 5-methylcytosine"
aagaggcccagcttctacacctggctctgctattagctcacactgtgactttggacaagtcgctccacctgctttggcctcaactttctgatctataaaattaaaggattagaaaagatgat

SEQ ID NO: 27098 - DNA, 122 bp, Homo sapiens
  misc_feature (61)..(62): /note="This region represents a CpG dinucleotide"
  misc_feature (61)..(61): /note="Nucleotide may be methylated to form 5-methylcytosine"
ttgaagagcaaaagagagtctgtgaggcgtgggagatgtgactcacttatttatgaaaggcgtggcttacacttaaggcatactgaactctaagggaccacaaaagaggagcctatgcatct

SEQ ID NO: 27099 - DNA, 122 bp, Homo sapiens
  misc_feature (61)..(62): /note="This region represents a CpG dinucleotide"
  misc_feature (61)..(61): /note="Nucleotide may be methylated to form 5-methylcytosine"
aattcatagacctttgttgctgcatataaacttgaggataaacttgttgaatttgttcaacgtaagcagctgaaattctgcgtggggtggtgatgaacggctctagcactcggtaaaaggta

SEQ ID NO: 27100 - DNA, 122 bp, Homo sapiens
  misc_feature (61)..(62): /note="This region represents a CpG dinucleotide"
  misc_feature (61)..(61): /note="Nucleotide may be methylated to form 5-methylcytosine"
tttacttccgctggctgagctgttgttcctgaggtcagaccccagccagtcttttgtgtacgtgcaggaccatggtggctttagtttctaccccacccttcctaggaactctacttgtggca

SEQ ID NO: 27101 - DNA, 122 bp, Homo sapiens
  misc_feature (61)..(62): /note="This region represents a CpG dinucleotide"
  misc_feature (61)..(61): /note="Nucleotide may be methylated to form 5-methylcytosine"
ccctgtgctgagagggcagtggtttgcctgcatttcccatttctcaaagggaaggccccacggccgccattgctcagccctggactggagcccctcaattgtctggagtggcagtggcggcc

SEQ ID NO: 27102 - DNA, 122 bp, Homo sapiens
  misc_feature (61)..(62): /note="This region represents a CpG dinucleotide"
  misc_feature (61)..(61): /note="Nucleotide may be methylated to form 5-methylcytosine"
ctttagttaatgatatatcaatatcagttcatcagttgtaacaaatgtaccacctcaatgcgttatgttaataataatagaggaaactgtggttagggggcaggagtgagagtgtatgggaa

SEQ ID NO: 27103 - DNA, 122 bp, Homo sapiens
  misc_feature (61)..(62): /note="This region represents a CpG dinucleotide"
  misc_feature (61)..(61): /note="Nucleotide may be methylated to form 5-methylcytosine"
ggatttttggagcttagaactaattttaaattaacatcaacctttttttccagctgacctcgtacatcttaagggtgtgtactgtacatactgtcacataatgagaaaataaatacatattt

SEQ ID NO: 27104 - DNA, 122 bp, Homo sapiens
  misc_feature (61)..(62): /note="This region represents a CpG dinucleotide"
  misc_feature (61)..(61): /note="Nucleotide may be methylated to form 5-methylcytosine"
cctcccccggccctttcctgggccagtcttagggccctgagtacagacagcctggctacccgttaaccattctcagcgtgtggctgctttttacacacatgtgtacatatgcacggacacac

SEQ ID NO: 27105 - DNA, 122 bp, Homo sapiens
  misc_feature (61)..(62): /note="This region represents a CpG dinucleotide"
  misc_feature (61)..(61): /note="Nucleotide may be methylated to form 5-methylcytosine"
gtcgtcatattcctcccggtcccgagtgtcagagcagactactgaccgagacactactttcggcatggtttccaggagcaacctgaaaaactctacgcaaagaagagggtcgcgccgaaatg

SEQ ID NO: 27106 - DNA, 122 bp, Homo sapiens
  misc_feature (61)..(62): /note="This region represents a CpG dinucleotide"
  misc_feature (61)..(61): /note="Nucleotide may be methylated to form 5-methylcytosine"
agtatataactcatacaaaaaatatgtgttgactgtctgtttatgtcatctatatgcttccggtgaacagtaagctattagttttttgggagtcaaaaattctatgtggatttttgactgtg

SEQ ID NO: 27107 - DNA, 122 bp, Homo sapiens
  misc_feature (61)..(62): /note="This region represents a CpG dinucleotide"
  misc_feature (61)..(61): /note="Nucleotide may be methylated to form 5-methylcytosine"
ctgctccatttacgggagtggccactacatcacctttgatgggaagtactacgactttgacggacactgctcctacgtggctgttcaggtgtggtcacgggcactgcctggtcgggctgctt

SEQ ID NO: 27108 - DNA, 122 bp, Homo sapiens
  misc_feature (61)..(62): /note="This region represents a CpG dinucleotide"
  misc_feature (61)..(61): /note="Nucleotide may be methylated to form 5-methylcytosine"
tgctgctttcagtttatagctattacagaaaaggttctgaatattcccgtgtgtgtctctcggagcacatgtgtacttttcatttggttacatagctaggagtggcattgttggctcatagt

SEQ ID NO: 27109 - DNA, 122 bp, Homo sapiens
  misc_feature (61)..(62): /note="This region represents a CpG dinucleotide"
  misc_feature (61)..(61): /note="Nucleotide may be methylated to form 5-methylcytosine"
tccttgtgtttactcatttggttgcttatttccccaactagaccttgagcttgccttgggcgtgggctgtgtctgtttgcttgacacaggcagttatgtaaggacttaataaatgtttatgg

SEQ ID NO: 27110 - DNA, 122 bp, Homo sapiens
  misc_feature (61)..(62): /note="This region represents a CpG dinucleotide"
  misc_feature (61)..(61): /note="Nucleotide may be methylated to form 5-methylcytosine"
ccattcccttcctggaagtcctgactttaaaacctcgtcagtctgcagtggaagtggcagcgactcccattttgtgaatgcctttggtgtcgggttttgtgtcatttccttccgtgctttgc

SEQ ID NO: 27111 - DNA, 122 bp, Homo sapiens
  misc_feature (61)..(62): /note="This region represents a CpG dinucleotide"
  misc_feature (61)..(61): /note="Nucleotide may be methylated to form 5-methylcytosine"
agcattacctggtccccgccagtgtgccagctccgagcggcaggcgcagcccacgctgggcgaccagctgtctgcgaatgtggcgtgtggatcacagctcagagccaggggatctcttagga

SEQ ID NO: 27112 - DNA, 122 bp, Homo sapiens
  misc_feature (61)..(62): /note="This region represents a CpG dinucleotide"
  misc_feature (61)..(61): /note="Nucleotide may be methylated to form 5-methylcytosine"
ttagaaaaactagggacaaccttagttaccaatctgcatctggagcattaatgttgcacacgatgaaataattcttatttagttagacttttactaaagagagctttaaaatagtaatgatc

SEQ ID NO: 27113 - DNA, 122 bp, Homo sapiens
  misc_feature (61)..(62): /note="This region represents a CpG dinucleotide"
  misc_feature (61)..(61): /note="Nucleotide may be methylated to form 5-methylcytosine"
atgcaaatttataaaggactatggcaattcactggcatagaaaagatgttccctcagtatcgtaagttatgcaaagagaagaaggcaagcacttttaaaaaacctgttagtaagtttatttt

SEQ ID NO: 27114 - DNA, 122 bp, Homo sapiens
  misc_feature (61)..(62): /note="This region represents a CpG dinucleotide"
  misc_feature (61)..(61): /note="Nucleotide may be methylated to form 5-methylcytosine"
aaaaagaccaccagtctgttctgcacacttggtaaacgtgggaggcgtctgcatcacagccgtggaggcaggagggagcagggacgcgcaggaggccctgccaggcggccgaggaggagatg

SEQ ID NO: 27115 - DNA, 122 bp, Homo sapiens
  misc_feature (61)..(62): /note="This region represents a CpG dinucleotide"
  misc_feature (61)..(61): /note="Nucleotide may be methylated to form 5-methylcytosine"
tcaggtgattaaggaggatccttttcttcctccctttttatatggagcaggatcccagcccgtttgtaaaaaaatagaaggacacagaagggaaaacttgaaaatgaaaactgaaaaacaag

SEQ ID NO: 27116 - DNA, 122 bp, Homo sapiens
  misc_feature (61)..(62): /note="This region represents a CpG dinucleotide"
  misc_feature (61)..(61): /note="Nucleotide may be methylated to form 5-methylcytosine"
tgtagcacagtgttcccaacagggtacagtacatgcctaagtgcttgttgaatgaacaaacgacgaaatctgcctcctagttccatagctgtggtttacacataaaagcaaatttcagacag

SEQ ID NO: 27117 - DNA, 122 bp, Homo sapiens
  misc_feature (61)..(62): /note="This region represents a CpG dinucleotide"
  misc_feature (61)..(61): /note="Nucleotide may be methylated to form 5-methylcytosine"
ctgggtggttctcctgttacatatgaaatcagcttaaatagctgcatttagctgctatctcgtaggtggtctggaagacccaagaaatttcactcacgtgtttagcacctcattgcttctcc

SEQ ID NO: 27118 - DNA, 122 bp, Homo sapiens
  misc_feature (61)..(62): /note="This region represents a CpG dinucleotide"
  misc_feature (61)..(61): /note="Nucleotide may be methylated to form 5-methylcytosine"
aagtgtccctcgatagtgactcgttgcttaaccataatgtcagtaattgaatttttattgcgtgcagtcactgtgctgaatgtaagcacatgttacatcgatgaggaattcatcacgctgga

SEQ ID NO: 27119 - DNA, 122 bp, Homo sapiens
  misc_feature (61)..(62): /note="This region represents a CpG dinucleotide"
  misc_feature (61)..(61): /note="Nucleotide may be methylated to form 5-methylcytosine"
ctcttgcttttgatttggtgttactggattcctttgagtcactaacatctttatgttgatcgcataacaggcagattagtaccactataacttcatgagtaacaacctcaaatgggtacttt

SEQ ID NO: 27120 - DNA, 122 bp, Homo sapiens
  misc_feature (61)..(62): /note="This region represents a CpG dinucleotide"
  misc_feature (61)..(61): /note="Nucleotide may be methylated to form 5-methylcytosine"
caactctctcctggggccagaactgctccgaaacgggaacagctgtgtatattctttgatcgttagcaggaaacgatgtgtcgtgtctcaaagcaccttttcatgctgctttcttattaact

SEQ ID NO: 27121 - DNA, 122 bp, Homo sapiens
  misc_feature (61)..(62): /note="This region represents a CpG dinucleotide"
  misc_feature (61)..(61): /note="Nucleotide may be methylated to form 5-methylcytosine"
tttccaaataaggaaggggcgtaggctgtaagccaggaaatgcctgggcatgttcagatacgtctgagcaggttataggccagaataaataacttggttgaagtacaaggacatagaatgta

SEQ ID NO: 27122 - DNA, 122 bp, Homo sapiens
  misc_feature (61)..(62): /note="This region represents a CpG dinucleotide"
  misc_feature (61)..(61): /note="Nucleotide may be methylated to form 5-methylcytosine"
ttcacgtgtcctagaatcttagaattctgagttggaataagcctatcaaaatgcagaccacgcatcggacggttgggcgggtcggggaggggaggtccacaggcctgggctcaaatcctgac

SEQ ID NO: 27123 - DNA, 122 bp, Homo sapiens
  misc_feature (61)..(62): /note="This region represents a CpG dinucleotide"
  misc_feature (61)..(61): /note="Nucleotide may be methylated to form 5-methylcytosine"
gtgtttcccaaacaaaacgtttaccttatttgaatgatcagataaagggcagtaaaattacgtgatatatgtgaaagtgctttgtaaaccatgacaattgattaatggaatcagatatgtac

SEQ ID NO: 27124 - DNA, 122 bp, Homo sapiens
  misc_feature (61)..(62): /note="This region represents a CpG dinucleotide"
  misc_feature (61)..(61): /note="Nucleotide may be methylated to form 5-methylcytosine"
tgaaaaagttattttaaagggctctatcatcaccaagttatgtgggccccatctaacctacgccaatttcaaaaatgacacatggataggagataatttactctttcaagtcacacaagatt

SEQ ID NO: 27125 - DNA, 122 bp, Homo sapiens
  misc_feature (61)..(62): /note="This region represents a CpG dinucleotide"
  misc_feature (61)..(61): /note="Nucleotide may be methylated to form 5-methylcytosine"
taccccaaaatatatttctttgacatattttgaaatagttgacatatttctaaatattgacgtatttagaaagccagccagtagagctaatgcaaagctgtccttggtgcggaagatttgca

SEQ ID NO: 27126 - DNA, 122 bp, Homo sapiens
  misc_feature (61)..(62): /note="This region represents a CpG dinucleotide"
  misc_feature (61)..(61): /note="Nucleotide may be methylated to form 5-methylcytosine"
gagcatctctctgtgtcagacactgggctccatcccaggatttaaaactaaatagctgggcgtggtggctcatgcctgtaatcccagcactttgggaggccaaagtgggtggatcacctgag

SEQ ID NO: 27127 - DNA, 122 bp, Homo sapiens
  misc_feature (61)..(62): /note="This region represents a CpG dinucleotide"
  misc_feature (61)..(61): /note="Nucleotide may be methylated to form 5-methylcytosine"
gctcacagccaatcctctcactgaagtgaaacaccaattctccaggcatacacacacatacgcacatcttattttcactgctctacacagggacctgagaatccttaattttaaagttggga

SEQ ID NO: 27128 - DNA, 122 bp, Homo sapiens
  misc_feature (61)..(62): /note="This region represents a CpG dinucleotide"
  misc_feature (61)..(61): /note="Nucleotide may be methylated to form 5-methylcytosine"
ggctgtgtttagcgcacagcctagtacacgagcatttgttaagtggatgcaagaccatgacgttcatttccttctgaaacaagtgagcaatcatgagtgaggcaatctcatcttttccctca

SEQ ID NO: 27129 - DNA, 122 bp, Homo sapiens
  misc_feature (61)..(62): /note="This region represents a CpG dinucleotide"
  misc_feature (61)..(61): /note="Nucleotide may be methylated to form 5-methylcytosine"
ctcaggaatctgttgaaagagatgcgccctgaaaaaggaggataaaaccaagaaagaagacgacacgggatccaggaaataagagatttagcacagaaagaaaaagtaaaataaccctgtcg

SEQ ID NO: 27130 - DNA, 122 bp, Homo sapiens
  misc_feature (61)..(62): /note="This region represents a CpG dinucleotide"
  misc_feature (61)..(61): /note="Nucleotide may be methylated to form 5-methylcytosine"
aaaaaatctggagtggagaacggaagcaaaacacaccaacgtacttttcaaaactgaggacgtgctgctctcttgtggaaatctgtattgccaacttgtaaagcctgggctgagttgcttat

SEQ ID NO: 27131 - DNA, 122 bp, Homo sapiens
  misc_feature (61)..(62): /note="This region represents a CpG dinucleotide"
  misc_feature (61)..(61): /note="Nucleotide may be methylated to form 5-methylcytosine"
atgagctgtgtggtcctgggaaagccttggtgtcctcttttacctgcacagtgagggtgacggtcgtgttacctcctgaggccacctttcagctttgccattctgtcatttgacaaagactg

SEQ ID NO: 27132 - DNA, 122 bp, Homo sapiens
  misc_feature (61)..(62): /note="This region represents a CpG dinucleotide"
  misc_feature (61)..(61): /note="Nucleotide may be methylated to form 5-methylcytosine"
gtactctactggtttagaggtcctagtacccaagaggagaatgcttcctctaggagaacacggcaatagtcccattgagttaagtgagactgccacctggcttctggggctccttatagcat

SEQ ID NO: 27133 - DNA, 122 bp, Homo sapiens
  misc_feature (61)..(62): /note="This region represents a CpG dinucleotide"
  misc_feature (61)..(61): /note="Nucleotide may be methylated to form 5-methylcytosine"
caacatggtgaaacaccgtttctactaaaaatacaaaaattagctgggcatgttggcgcacgcctgtaatcctggctactcatgtggctgaggcacaagaattgcttgaacccgggaggcag

SEQ ID NO: 27134 - DNA, 122 bp, Homo sapiens
  misc_feature (61)..(62): /note="This region represents a CpG dinucleotide"
  misc_feature (61)..(61): /note="Nucleotide may be methylated to form 5-methylcytosine"
gctgcggaggaaactgcaaatgctgagcctctgaaatacatgattccaaataaaaggtaacgacaccagcagttctgctgatgtaaaggaaacaagaaagacatatgcacgatgctcctaat

SEQ ID NO: 27135 - DNA, 122 bp, Homo sapiens
  misc_feature (61)..(62): /note="This region represents a CpG dinucleotide"
  misc_feature (61)..(61): /note="Nucleotide may be methylated to form 5-methylcytosine"
acactgcctggggtgataaatactttactcaattataaactaagcaagcagacaggttgacggaaaaaaaaacttaccctgctaagtcctcagcttccttccttctctctttcctccaagtg

SEQ ID NO: 27136 - DNA, 122 bp, Homo sapiens
  misc_feature (61)..(62): /note="This region represents a CpG dinucleotide"
  misc_feature (61)..(61): /note="Nucleotide may be methylated to form 5-methylcytosine"
caggtcatccacttttgactgtcatccatggaagagctcttattaaaagcctcagactttcgggacctatgattctttggcacaaccttttggaaaattcttaagcagggatgaagcaaact

SEQ ID NO: 27137 - DNA, 122 bp, Homo sapiens
  misc_feature (61)..(62): /note="This region represents a CpG dinucleotide"
  misc_feature (61)..(61): /note="Nucleotide may be methylated to form 5-methylcytosine"
ccatctccatcacctattctaagtaaatcattgtgtctttcacccctgtgtaaaccaatacgtagacttccagaatcatgcattcagtgaaagaagctggaccaattgcattttgtgaagag

SEQ ID NO: 27138 - DNA, 122 bp, Homo sapiens
  misc_feature (61)..(62): /note="This region represents a CpG dinucleotide"
  misc_feature (61)..(61): /note="Nucleotide may be methylated to form 5-methylcytosine"
ctccctctctgtaacccttctccccctccctgcccccactcccacctgctctgtggcctccgtccccatctctggctacacaggtttctgaggtatagccacagggggtagaagttaaacta

SEQ ID NO: 27139 - DNA, 122 bp, Homo sapiens
  misc_feature (61)..(62): /note="This region represents a CpG dinucleotide"
  misc_feature (61)..(61): /note="Nucleotide may be methylated to form 5-methylcytosine"
gtcctgccctggggttccatgatttaatgattctgcacctgcaccatctgataaggtagccgcatatgactgttgagcacttgaaatgtgtgggaacccactaggagccccagagttggcat

SEQ ID NO: 27140 - DNA, 122 bp, Homo sapiens
  misc_feature (61)..(62): /note="This region represents a CpG dinucleotide"
  misc_feature (61)..(61): /note="Nucleotide may be methylated to form 5-methylcytosine"
ttgctgcactagagaaggtcactcactgcaaggggtgcaaacaccttggggcccagccagcgtgaagtgagtgggagggagggatgagagggcccacgcccaccctgtggatgtccctgctg

SEQ ID NO: 27141 - DNA, 122 bp, Homo sapiens
  misc_feature (61)..(62): /note="This region represents a CpG dinucleotide"
  misc_feature (61)..(61): /note="Nucleotide may be methylated to form 5-methylcytosine"
attgaatacttaagcaaggataaatcgtaatgtaataatgccatgagtgaatcgcctaggcgagtcaggctcctttcagttagtgggaaatggagaaagattatgtagttaaggtcatgaat

SEQ ID NO: 27142 - DNA, 122 bp, Homo sapiens
  misc_feature (61)..(62): /note="This region represents a CpG dinucleotide"
  misc_feature (61)..(61): /note="Nucleotide may be methylated to form 5-methylcytosine"
ccctgaagtggtgttttatgggcctgggcactctggcacaagccctttctgggcacaaggcgaagttgatgagactcatgcttactgccagcttgctccaggccactttcagccaccagcac

SEQ ID NO: 27143 - DNA, 122 bp, Homo sapiens
  misc_feature (61)..(62): /note="This region represents a CpG dinucleotide"
  misc_feature (61)..(61): /note="Nucleotide may be methylated to form 5-methylcytosine"
ttttgtcttaacctcatataatactttagcttaaccctgataatgtgcagatattactgacgtgacaaaagcaagcacttggcctgttgattgtttacatagaggctgtgatataatcagac

SEQ ID NO: 27144 - DNA, 122 bp, Homo sapiens
  misc_feature (61)..(62): /note="This region represents a CpG dinucleotide"
  misc_feature (61)..(61): /note="Nucleotide may be methylated to form 5-methylcytosine"
tctagtgcccattcagcttcttagcctgagttactccatgttgtttatcttttcctgctgcgcatgtgtaaaaaaggtgggggaggggtggggaagggggcgcgggggcgccggggcgccag

SEQ ID NO: 27145 - DNA, 122 bp, Homo sapiens
  misc_feature (61)..(62): /note="This region represents a CpG dinucleotide"
  misc_feature (61)..(61): /note="Nucleotide may be methylated to form 5-methylcytosine"
agttaagtggtttaattgcaagaaaaatatcaattactctgtgctggtgagtaattacctcggccactcaatggaatgagagaacccttacaggtcacctgagtccccgtgaggttccagcc

SEQ ID NO: 27146 - DNA, 122 bp, Homo sapiens
  misc_feature (61)..(62): /note="This region represents a CpG dinucleotide"
  misc_feature (61)..(61): /note="Nucleotide may be methylated to form 5-methylcytosine"
aacacggaggcgagagggagcaggcgatggcgacgccgacggtaactggagaccgaggcgcgctgcgtacttgctgcgttttctgtttcatcctcacagccgtagaagaaaccgaggcacag

SEQ ID NO: 27147 - DNA, 122 bp, Homo sapiens
  misc_feature (61)..(62): /note="This region represents a CpG dinucleotide"
  misc_feature (61)..(61): /note="Nucleotide may be methylated to form 5-methylcytosine"
tagtgtcagttcttcattaggtatttccagtatgactttcactttctgtgatagttttatcgttcttttctacttatttcctgaggtctaaaaacctagtttttgtttcctttcatgactta

SEQ ID NO: 27148 - DNA, 122 bp, Homo sapiens
  misc_feature (61)..(62): /note="This region represents a CpG dinucleotide"
  misc_feature (61)..(61): /note="Nucleotide may be methylated to form 5-methylcytosine"
ttgagtgtatctgcacaagacttctctagcttcattaccaaaccttgagtcacctgaatccgaacaggccaactgatgttttaagtggaacaaaattccctgcctaccttttctttttccat

SEQ ID NO: 27149 - DNA, 122 bp, Homo sapiens
  misc_feature (61)..(62): /note="This region represents a CpG dinucleotide"
  misc_feature (61)..(61): /note="Nucleotide may be methylated to form 5-methylcytosine"
aactttagagaattctaattctcctgtgccagagtttagccatgggattggtattagtaacgctgactcacagtctacttgtgatgcagaaagaggaaactcagagcaggcggaaatgagag

SEQ ID NO: 27150 - DNA, 122 bp, Homo sapiens
  misc_feature (61)..(62): /note="This region represents a CpG dinucleotide"
  misc_feature (61)..(61): /note="Nucleotide may be methylated to form 5-methylcytosine"
tgtacgggagtgtctgaggcccagtgtgttttttagggttaccccatgtaaagcacttaccgctgtgcttggaattcagcagctgtcaaaggtgcaatttcaggggcagggaacctttgagg

SEQ ID NO: 27151 - DNA, 122 bp, Homo sapiens
  misc_feature (61)..(62): /note="This region represents a CpG dinucleotide"
  misc_feature (61)..(61): /note="Nucleotide may be methylated to form 5-methylcytosine"
tggcagcctgttcatgaggcaaactttccgagtttcagcctcttcgtttttgaaattgtacgtgtttttgccacagtattgacatgattgcatgaagaggtattacgtgtatgtgaaaatat

SEQ ID NO: 27152 - DNA, 122 bp, Homo sapiens
  misc_feature (61)..(62): /note="This region represents a CpG dinucleotide"
  misc_feature (61)..(61): /note="Nucleotide may be methylated to form 5-methylcytosine"
cagcatccactccactcaacatctgttttctgggtgtttgcgatatgtcaggagctctgacgcacatgagccagtgtatcaggacacaatggggtgatactcccagggggcggggatgccac

SEQ ID NO: 27153 - DNA, 122 bp, Homo sapiens
  misc_feature (61)..(62): /note="This region represents a CpG dinucleotide"
  misc_feature (61)..(61): /note="Nucleotide may be methylated to form 5-methylcytosine"
agagtgagttagttcccagtgtggcctcgtgtgtgcttttggccgcatcgtttccagtttcgccatccccaaagaggatcatctcccaggaagcttactggtccaaggaggatgagacaccc

SEQ ID NO: 27154 - DNA, 122 bp, Homo sapiens
  misc_feature (61)..(62): /note="This region represents a CpG dinucleotide"
  misc_feature (61)..(61): /note="Nucleotide may be methylated to form 5-methylcytosine"
aatttctagccacttcttgttgctgttttggtgagctttactgttgcaggtatctgcttacgacaacgtgtgatgtgaatcatctcagcatgagcagttcaactctccagtaaattgtatat

SEQ ID NO: 27155 - DNA, 122 bp, Homo sapiens
  misc_feature (61)..(62): /note="This region represents a CpG dinucleotide"
  misc_feature (61)..(61): /note="Nucleotide may be methylated to form 5-methylcytosine"
tgttcctcctggggttttcttagagctggcaaaatgccaaagcccttaggcatttagcagcgagcaggagattttcaatcttaagattcttgagcatgcccatgtacataacctcttgtctc

SEQ ID NO: 27156 - DNA, 122 bp, Homo sapiens
  misc_feature (61)..(62): /note="This region represents a CpG dinucleotide"
  misc_feature (61)..(61): /note="Nucleotide may be methylated to form 5-methylcytosine"
tgatgtaggcagtgcatctacgctggttgaaactagtgggcggtgtaggcggtgcgtctacgctggttgagctagtgcacaaagcaggcactgtaacactggttgagcccctagttcatgat

SEQ ID NO: 27157 - DNA, 122 bp, Homo sapiens
  misc_feature (61)..(62): /note="This region represents a CpG dinucleotide"
  misc_feature (61)..(61): /note="Nucleotide may be methylated to form 5-methylcytosine"
tcccttatgccaagccagcgcagtacctggcatgtgagtaggcaatagtacctacatgcccgctaaaggaggaaaggaccaaacggacagacaagctctgaacaccaagcagctgtctgtca

SEQ ID NO: 27158 - DNA, 122 bp, Homo sapiens
  misc_feature (61)..(62): /note="This region represents a CpG dinucleotide"
  misc_feature (61)..(61): /note="Nucleotide may be methylated to form 5-methylcytosine"
gccccagaggccccagaggccgaggcaggctttgttctctgctgctgggactcagccctgcgggagcacagggaggacagctggaagcccagcccctctgtggctctgtccacagctgggga

SEQ ID NO: 27159 - DNA, 122 bp, Homo sapiens
  misc_feature (61)..(62): /note="This region represents a CpG dinucleotide"
  misc_feature (61)..(61): /note="Nucleotide may be methylated to form 5-methylcytosine"
aggcccccacttcgcaggtcagatgtgtggttcacctcctgtccagccttcccaggcctgcgcaggagcctaccacctgctcactggtttgtaagtcattcaggggctgggcgcttatagag

SEQ ID NO: 27160 - DNA, 122 bp, Homo sapiens
  misc_feature (61)..(62): /note="This region represents a CpG dinucleotide"
  misc_feature (61)..(61): /note="Nucleotide may be methylated to form 5-methylcytosine"
gcttcacaccaacaatctccaggtgttgaaagaagattatgtgaatgggaatgctgtgtgcgtgtgtgtatgcacgcacacatgcaattcaacaattactgaattcttcccatttgcatatt

SEQ ID NO: 27161 - DNA, 122 bp, Homo sapiens
  misc_feature (61)..(62): /note="This region represents a CpG dinucleotide"
  misc_feature (61)..(61): /note="Nucleotide may be methylated to form 5-methylcytosine"
caaaaccttagtcatcccactgagattccacactcaaagccaatttctctcacagggcatcgaatgctagttaaagatataaaatcacgcttatcacaattaactcccttgcctttatgatg

SEQ ID NO: 27162 - DNA, 122 bp, Homo sapiens
  misc_feature (61)..(62): /note="This region represents a CpG dinucleotide"
  misc_feature (61)..(61): /note="Nucleotide may be methylated to form 5-methylcytosine"
gcacatcactcaacctcactggtttcagttttgttgcccatatttggtgctgatgttatccgacatccctttcaaacattctattaaaaacctcaagctacacgagtgcacgtggtttaaag

SEQ ID NO: 27163 - DNA, 122 bp, Homo sapiens
  misc_feature (61)..(62): /note="This region represents a CpG dinucleotide"
  misc_feature (61)..(61): /note="Nucleotide may be methylated to form 5-methylcytosine"
ttgtttgttttactgtgggtcttagcaacacctgtattatatcgacatacacatcttcatcgttccttatactcatttaaccacagaaccattttggtgtatgtggtgaaactagattttgc

SEQ ID NO: 27164 - DNA, 122 bp, Homo sapiens
  misc_feature (61)..(62): /note="This region represents a CpG dinucleotide"
  misc_feature (61)..(61): /note="Nucleotide may be methylated to form 5-methylcytosine"
actaagtaataatatgctttcagctggagtgaagttgaagtgaatcagataggcgagttacggtacaatgataaatgctaagtattaatagagacaatgaggaaatgaagagaatatttaat

SEQ ID NO: 27165 - DNA, 122 bp, Homo sapiens
  misc_feature (61)..(62): /note="This region represents a CpG dinucleotide"
  misc_feature (61)..(61): /note="Nucleotide may be methylated to form 5-methylcytosine"
aaggcggggaaggacctcgaagaaacggagggcgccgggctggcagttcaggctcagggccgctggggggagtttgcgcaaggctgggagccccgaggccccgggggaggtggggaggcaga

SEQ ID NO: 27166 - DNA, 122 bp, Homo sapiens
  misc_feature (61)..(62): /note="This region represents a CpG dinucleotide"
  misc_feature (61)..(61): /note="Nucleotide may be methylated to form 5-methylcytosine"
gccgtcgctggaatgggtgtgggccccgaggttgcaagggtaggcgcgggtgtgtgtcctcgctctctctgctcccagctcagctctggccgcgcgccgcaggttgaacccactccttgctg

SEQ ID NO: 27167 - DNA, 122 bp, Homo sapiens
  misc_feature (61)..(62): /note="This region represents a CpG dinucleotide"
  misc_feature (61)..(61): /note="Nucleotide may be methylated to form 5-methylcytosine"
atcgacctactaagtatgaagctgggcacagaagaatgggtgacatggctcctggcttggcggaggccagtaaaagcttccaggtaaaacacccttgaggagcatgggctcaagggtgccag

SEQ ID NO: 27168 - DNA, 122 bp, Homo sapiens
  misc_feature (61)..(62): /note="This region represents a CpG dinucleotide"
  misc_feature (61)..(61): /note="Nucleotide may be methylated to form 5-methylcytosine"
aaacaagccacaggatgtgaagctctggtgcttttactctctgtggcaccaggaattttccgagcagaaagaggcttccccctcctgttcccagcaggaaagagagaggaaatagaggaaaa

SEQ ID NO: 27169 - DNA, 122 bp, Homo sapiens
  misc_feature (61)..(62): /note="This region represents a CpG dinucleotide"
  misc_feature (61)..(61): /note="Nucleotide may be methylated to form 5-methylcytosine"
gttcttcttcttatggaacctaaatccaccttcaatcttcctgacaatggtaattgtttgcgtgacaggatgagtgacagcatcggatacacagaggtggagggatcctgggagtggtgacg

SEQ ID NO: 27170 - DNA, 122 bp, Homo sapiens
  misc_feature (61)..(62): /note="This region represents a CpG dinucleotide"
  misc_feature (61)..(61): /note="Nucleotide may be methylated to form 5-methylcytosine"
caaattctaaaaaagctgtaacactgacaggttcgtcttttagtctttctactgcagatacgagcagtttacataccaaaattacagtgttataatattctgtgcttttctgtgtacttact

SEQ ID NO: 27171 - DNA, 122 bp, Homo sapiens
  misc_feature (61)..(62): /note="This region represents a CpG dinucleotide"
  misc_feature (61)..(61): /note="Nucleotide may be methylated to form 5-methylcytosine"
aaccccatcccaaggacagactgcacagcgtcagaagggacacgccctggggcttgggtgcgtgtatgtctgtgaatgtttgcatgtattttcagcgtttgcttcctcccctcaccactacc

SEQ ID NO: 27172 - DNA, 122 bp, Homo sapiens
  misc_feature (61)..(62): /note="This region represents a CpG dinucleotide"
  misc_feature (61)..(61): /note="Nucleotide may be methylated to form 5-methylcytosine"
gcctcccagacttggctggatgggtgaacctggcctgaaaatcaaccacaagccccttttcgttgtgtttggagaggagctgaagctgtgtgaataggagttgagcatgcggctggcagagc

SEQ ID NO: 27173 - DNA, 122 bp, Homo sapiens
  misc_feature (61)..(62): /note="This region represents a CpG dinucleotide"
  misc_feature (61)..(61): /note="Nucleotide may be methylated to form 5-methylcytosine"
taacagtattgacgctgtaagagcatcaggttggttcccattgtatcttctttactaatacgttcgcgtttttgacctagatttctttcttctaagataaatactgataaattaacagggtc

SEQ ID NO: 27174 - DNA, 122 bp, Homo sapiens
  misc_feature (61)..(62): /note="This region represents a CpG dinucleotide"
  misc_feature (61)..(61): /note="Nucleotide may be methylated to form 5-methylcytosine"
gatggtaaatgctgtaggactctgggaataagcagatgtgtgaaggcaggatgaggcatgcgggtcacagattgcaggtggcatcactactcgctcagtctctgagcaaacatttgtcgaga

SEQ ID NO: 27175 - DNA, 122 bp, Homo sapiens
  misc_feature (61)..(62): /note="This region represents a CpG dinucleotide"
  misc_feature (61)..(61): /note="Nucleotide may be methylated to form 5-methylcytosine"
aattgtgggttgaccttgccagggaatttttaagcagaactgactgcagccagtggtcagcgagggccacttcttcctagactttgcataactccaaacagccacaagccaaggacagtcat

SEQ ID NO: 27176 - DNA, 122 bp, Homo sapiens
  misc_feature (61)..(62): /note="This region represents a CpG dinucleotide"
  misc_feature (61)..(61): /note="Nucleotide may be methylated to form 5-methylcytosine"
caatgatttctgaatattcttagaaggtgttgccctggtgagaatggttatagccaaaagcggagaaaaaaattcttgggctcgaaatctttgaacattcatccagcatcccatcctttacc

SEQ ID NO: 27177 - DNA, 122 bp, Homo sapiens
  misc_feature (61)..(62): /note="This region represents a CpG dinucleotide"
  misc_feature (61)..(61): /note="Nucleotide may be methylated to form 5-methylcytosine"
tttgaccatcatgtgtttgtctgactaccaagttggactgccaaccttcactaaaaactccggcacctttatctacctcctgtcagatcaccgcctgtcagagagggaggcctaaaaaggct

SEQ ID NO: 27178 - DNA, 122 bp, Homo sapiens
  misc_feature (61)..(62): /note="This region represents a CpG dinucleotide"
  misc_feature (61)..(61): /note="Nucleotide may be methylated to form 5-methylcytosine"
ccttgtcccagtttcttggtgccagttattctaatctcccaagtttcttaggcttgaaaacgcgagcccatctgactccccactttctcttattccttctatccagttagtatctgatattt

SEQ ID NO: 27179 - DNA, 122 bp, Homo sapiens
  misc_feature (61)..(62): /note="This region represents a CpG dinucleotide"
  misc_feature (61)..(61): /note="Nucleotide may be methylated to form 5-methylcytosine"
acaggaacagcagcagtgtaggtttccctacctagagggtggtatgcagtgattctcaggcgctggttggaaggcacagctgagggacacaaactgccaggaagtaatgtggtaactagcca

SEQ ID NO: 27180 - DNA, 122 bp, Homo sapiens
  misc_feature (61)..(62): /note="This region represents a CpG dinucleotide"
  misc_feature (61)..(61): /note="Nucleotide may be methylated to form 5-methylcytosine"
ccagagagaaatccaggtgggtactggccaaggtggaggtgtgagaaggagggctgaggacggctggggtcacacagcaccaagttgtaccagcccaggcacagttaaccattcattttaag

SEQ ID NO: 27181 - DNA, 122 bp, Homo sapiens
  misc_feature (61)..(62): /note="This region represents a CpG dinucleotide"
  misc_feature (61)..(61): /note="Nucleotide may be methylated to form 5-methylcytosine"
ttccctttactgggtattgaagttagtcattcgtgacctttcccattggggttctgatttcgcaaacatgcattgggctctttaatgcatattatctcatctattgctcacaatagcccttt

SEQ ID NO: 27182 - DNA, 122 bp, Homo sapiens
  misc_feature (61)..(62): /note="This region represents a CpG dinucleotide"
  misc_feature (61)..(61): /note="Nucleotide may be methylated to form 5-methylcytosine"
ccacatggccttttatgacttaacctcagaaatcaagctgggtgcggtgactgctggatgcggtggctcaagcctgtaatcccagccctttgagaggctgagttgggcggatcatttgagac

SEQ ID NO: 27183 - DNA, 122 bp, Homo sapiens
  misc_feature (61)..(62): /note="This region represents a CpG dinucleotide"
  misc_feature (61)..(61): /note="Nucleotide may be methylated to form 5-methylcytosine"
tcaggttttcttcatgagcagtaatgagtgagtcagagaggaaatggcatcatctaaatacggtggcattgttgcatgcagaatgtttcactttcaaacgcttggactaaatgtgctcagtc

SEQ ID NO: 27184 - DNA, 122 bp, Homo sapiens
  misc_feature (61)..(62): /note="This region represents a CpG dinucleotide"
  misc_feature (61)..(61): /note="Nucleotide may be methylated to form 5-methylcytosine"
ttatgcttcacaggtttgttgtggcctgttcagcctggaaatcctgtcccgagactgatgcggaaaagctagttcagctgactttttgtgcttttcatgatatgatacagctgatgaactct

SEQ ID NO: 27185 - DNA, 122 bp, Homo sapiens
  misc_feature (61)..(62): /note="This region represents a CpG dinucleotide"
  misc_feature (61)..(61): /note="Nucleotide may be methylated to form 5-methylcytosine"
aaacaggggacaagatgacatatatttgaaaacatgtattacactactgtcttcttcgagcgcctcttgatctatttttccacgagatttttgtcttgtttaatgtctaatgtagcctgggg

SEQ ID NO: 27186 - DNA, 122 bp, Homo sapiens
  misc_feature (61)..(62): /note="This region represents a CpG dinucleotide"
  misc_feature (61)..(61): /note="Nucleotide may be methylated to form 5-methylcytosine"
acacacatgcaaacaaaccagagacagacacacaaccccacagtgacatacacctggacacgcaggcatgcagaaaaacagagaaagacatgcacagcacacgtggatatttgcggtgcaac

SEQ ID NO: 27187 - DNA, 122 bp, Homo sapiens
  misc_feature (61)..(62): /note="This region represents a CpG dinucleotide"
  misc_feature (61)..(61): /note="Nucleotide may be methylated to form 5-methylcytosine"
ggccaaatcctgtccctggaagagccacaaagtaggaagcctgggtacaggcctggcaagcgagaacaatgtgtcactgcaggactttggagctctcagctttggagtcagttaagaccagt

SEQ ID NO: 27188 - DNA, 122 bp, Homo sapiens
  misc_feature (61)..(62): /note="This region represents a CpG dinucleotide"
  misc_feature (61)..(61): /note="Nucleotide may be methylated to form 5-methylcytosine"
acagcctgaatctgtgtgtccctcccaaaattcatatactgaaattctaactcctaatgtcgttgcattaggaggtggcatctttgggaggtaatcggggttagagaccatgagggtggtgc

SEQ ID NO: 27189 - DNA, 122 bp, Homo sapiens
  misc_feature (61)..(62): /note="This region represents a CpG dinucleotide"
  misc_feature (61)..(61): /note="Nucleotide may be methylated to form 5-methylcytosine"
ttctatagaaaaaatgaaagccaaaggtttacattccaagactggaagactcctaatttacggtatgttcagaacaaaggctgatgtctttatagggaatagaagtaggattagtacagcaa

SEQ ID NO: 27190 - DNA, 122 bp, Homo sapiens
  misc_feature (61)..(62): /note="This region represents a CpG dinucleotide"
  misc_feature (61)..(61): /note="Nucleotide may be methylated to form 5-methylcytosine"
atgggaagttggttcctgatattcatacatttattgagcaaacatttattgattactgtgcgtcaggcatgtgtgagcctgaatacatatcactcctttcttctctcaggttcaggatcagt

SEQ ID NO: 27191 - DNA, 122 bp, Homo sapiens
  misc_feature (61)..(62): /note="This region represents a CpG dinucleotide"
  misc_feature (61)..(61): /note="Nucleotide may be methylated to form 5-methylcytosine"
tgattacaaaaggtttgatattattccccctattgtctttatctaatatggaagtataaacgtcagtcaacattatataaggtgacagttcagtgccaaagcattacagtgtgttttgcctg

SEQ ID NO: 27192 - DNA, 122 bp, Homo sapiens
  misc_feature (61)..(62): /note="This region represents a CpG dinucleotide"
  misc_feature (61)..(61): /note="Nucleotide may be methylated to form 5-methylcytosine"
aacaggcagaacctgccgctgggggactgtccctgctctggcagccgcatgaagacacaccgagcgagacacactgctgagcgtatctgcgtatttcagcatttgtcagctaaccgtgtctc

SEQ ID NO: 27193 - DNA, 122 bp, Homo sapiens
  misc_feature (61)..(62): /note="This region represents a CpG dinucleotide"
  misc_feature (61)..(61): /note="Nucleotide may be methylated to form 5-methylcytosine"
gtacaactgaaagtacctcttctacccccagtttctgtgaaagcaggactcgcccaagtgcgactggctagcttgacttgaagtgctcctttgcacaaagaaataaagctccttctcgctaa

SEQ ID NO: 27194 - DNA, 122 bp, Homo sapiens
  misc_feature (61)..(62): /note="This region represents a CpG dinucleotide"
  misc_feature (61)..(61): /note="Nucleotide may be methylated to form 5-methylcytosine"
aacccgtctattcatgccgcttctctcctgtgtagccattagggttaaactgcaaaagaacggctcagatgggccagatggcagcacaacaaacagctcctccctcccccactgccacgtgc

SEQ ID NO: 27195 - DNA, 122 bp, Homo sapiens
  misc_feature (61)..(62): /note="This region represents a CpG dinucleotide"
  misc_feature (61)..(61): /note="Nucleotide may be methylated to form 5-methylcytosine"
tctaggtaccagataataattaaacacaacagacatgggttcccataccagggctccatccgcaacgtaagcaggaaaagattccaagccatgcacatgattcacaaatgacccttggacat

SEQ ID NO: 27196 - DNA, 122 bp, Homo sapiens
  misc_feature (61)..(62): /note="This region represents a CpG dinucleotide"
  misc_feature (61)..(61): /note="Nucleotide may be methylated to form 5-methylcytosine"
acacagatacttatccaattagcagttgatctgtagtacgaaggagaagtacacatagtacgaaggaaacgtacaggctatgacagaataaaacaagagaagctaacctgagcttgggagtc

SEQ ID NO: 27197 - DNA, 122 bp, Homo sapiens
  misc_feature (61)..(62): /note="This region represents a CpG dinucleotide"
  misc_feature (61)..(61): /note="Nucleotide may be methylated to form 5-methylcytosine"
tcagcactattgactttttgaggccagatgatccttcattatgggggctgccctgtgtaccgtaagctgtttagctgcattcctggcttccacccatagatgccagcagcatccccactccc

SEQ ID NO: 27198 - DNA, 122 bp, Homo sapiens
  misc_feature (61)..(62): /note="This region represents a CpG dinucleotide"
  misc_feature (61)..(61): /note="Nucleotide may be methylated to form 5-methylcytosine"
atgaacattttccttttgtgtgtcatgcatattcaacataatcccactcaaagtcccaggcgttgctttagtatacattgcctcatacatccctactgttgttgccagaaaatttaattcaa

SEQ ID NO: 27199 - DNA, 122 bp, Homo sapiens
  misc_feature (61)..(62): /note="This region represents a CpG dinucleotide"
  misc_feature (61)..(61): /note="Nucleotide may be methylated to form 5-methylcytosine"
ctccttccatctccacagcactgtgtgagggatcagtgataagagacggtgaaagacatgcgcaaatggataaataataagcaggatatgtagaatgacacaacaattgatgagtaatttag

SEQ ID NO: 27200 - DNA, 122 bp, Homo sapiens
  misc_feature (61)..(62): /note="This region represents a CpG dinucleotide"
  misc_feature (61)..(61): /note="Nucleotide may be methylated to form 5-methylcytosine"
aaaaaaaaaaaacttcatgcaaacagtattgtttcacatctttgcaaatttcttaacatccggttttacagaagacagattttcatatttgcttctgcatttaatttgttgcagttgaccag

SEQ ID NO: 27201 - DNA, 122 bp, Homo sapiens
  misc_feature (61)..(62): /note="This region represents a CpG dinucleotide"
  misc_feature (61)..(61): /note="Nucleotide may be methylated to form 5-methylcytosine"
tactgtaatgtgtgtcacctggaattatggagctcaattaacagattatgggtttgtctccgcagcaaggctgggagctccaggaccacaggaagcaggtcttactcatttcctaactcagg

SEQ ID NO: 27202 - DNA, 122 bp, Homo sapiens
  misc_feature (61)..(62): /note="This region represents a CpG dinucleotide"
  misc_feature (61)..(61): /note="Nucleotide may be methylated to form 5-methylcytosine"
accagcacacaaggaagggagtgaccacacaggctgacgtaattgaccctgatcataaggcgataaggctgtgtaatgctgtgagggcagagaagaatttcaaattcatgtaatccactgag

SEQ ID NO: 27203 - DNA, 122 bp, Homo sapiens
  misc_feature (61)..(62): /note="This region represents a CpG dinucleotide"
  misc_feature (61)..(61): /note="Nucleotide may be methylated to form 5-methylcytosine"
cagtgtgtgcagccagcttggtaattcaggtccagtggttaattagtaactggaaggccccgaagccagcttccagcaggcagggctgggaggttgaacttgagccggtttgggagccagga

SEQ ID NO: 27204 - DNA, 122 bp, Homo sapiens
  misc_feature (61)..(62): /note="This region represents a CpG dinucleotide"
  misc_feature (61)..(61): /note="Nucleotide may be methylated to form 5-methylcytosine"
gggaaagagaatgaatggtggccccagtactggctcggtaggtgccaagcctacgtggcacgtggcacctttgcacacacttcattgtcttattgctctccagagcaagtccttggccatgc

SEQ ID NO: 27205 - DNA, 122 bp, Homo sapiens
  misc_feature (61)..(62): /note="This region represents a CpG dinucleotide"
  misc_feature (61)..(61): /note="Nucleotide may be methylated to form 5-methylcytosine"
gcagaatgagaatgctaaatttctcttgttcttacatcctgtatttgcacagcactttcacgttatcacgtgtgacagaaggaagacagcctcagcctcccggctcagccactgggtctagt

SEQ ID NO: 27206 - DNA, 122 bp, Homo sapiens
  misc_feature (61)..(62): /note="This region represents a CpG dinucleotide"
  misc_feature (61)..(61): /note="Nucleotide may be methylated to form 5-methylcytosine"
gatcattatgagaagtcagtcagcaagttctcagatagtaaatggttaaggagttactggcggtggttaaaaccacagattggtgggttttagaaatgtctgacatgtaataccagatctga

SEQ ID NO: 27207 - DNA, 122 bp, Homo sapiens
  misc_feature (61)..(62): /note="This region represents a CpG dinucleotide"
  misc_feature (61)..(61): /note="Nucleotide may be methylated to form 5-methylcytosine"
ctataaaaaattactattcatctatgtttaattagtagatcagctgatattacaaccccccgaatatgcatatttatgaggaagagtagtacaataaaaaagggtactgtttctttttttta

SEQ ID NO: 27208 - DNA, 122 bp, Homo sapiens
  misc_feature (61)..(62): /note="This region represents a CpG dinucleotide"
  misc_feature (61)..(61): /note="Nucleotide may be methylated to form 5-methylcytosine"
tagacttgttttccagtcctgatgtttcattgactgtgtttacattgaccattcgacttgcgagcctaaacaaagagacattaacacgcttgaggaaatgcaaacagaaaatagtgtcattg

SEQ ID NO: 27209 - DNA, 122 bp, Homo sapiens
  misc_feature (61)..(62): /note="This region represents a CpG dinucleotide"
  misc_feature (61)..(61): /note="Nucleotide may be methylated to form 5-methylcytosine"
gaaaagaaacctatgaaaggtcttcaacttgttttgtttcttacatctcgggcttcttcccgttaacagcacttcctgaaggggaacgtgcctatttgtctgatctaaacgtaagtagccat

SEQ ID NO: 27210 - DNA, 122 bp, Homo sapiens
  misc_feature (61)..(62): /note="This region represents a CpG dinucleotide"
  misc_feature (61)..(61): /note="Nucleotide may be methylated to form 5-methylcytosine"
ccctgtcacatggctagcaagcaggccaggcaggatgagagctcaggccttgtgacttcccgttcagtgctctccactgttcctctcagttgataagtggtcctgagaccacctgtgctcct

SEQ ID NO: 27211 - DNA, 122 bp, Homo sapiens
  misc_feature (61)..(62): /note="This region represents a CpG dinucleotide"
  misc_feature (61)..(61): /note="Nucleotide may be methylated to form 5-methylcytosine"
tgcaccttaccttcctaatttcacaatgcatcctggaaatccctttgagtcaggtagtatcgatctgactcattctgtttaatgactgcccaatattccatggtatgcttccactctactca

SEQ ID NO: 27212 - DNA, 122 bp, Homo sapiens
  misc_feature (61)..(62): /note="This region represents a CpG dinucleotide"
  misc_feature (61)..(61): /note="Nucleotide may be methylated to form 5-methylcytosine"
aaatgatttgtccacagccacattccaataggtggctaagcacaaactcaggttgtttgacgctagaacttaatgctacttgtgaccagtcaatcgccatgctacctcatacagaccctcac

SEQ ID NO: 27213 - DNA, 122 bp, Homo sapiens
  misc_feature (61)..(62): /note="This region represents a CpG dinucleotide"
  misc_feature (61)..(61): /note="Nucleotide may be methylated to form 5-methylcytosine"
tcattgtcttaatgataaaatccaacttaattaaaaacttgcaaggccctcttgcaccctcgtcacctccctagccccaccgcttatgaatccaatgctgtcactccattccagacagaccg

SEQ ID NO: 27214 - DNA, 122 bp, Homo sapiens
  misc_feature (61)..(62): /note="This region represents a CpG dinucleotide"
  misc_feature (61)..(61): /note="Nucleotide may be methylated to form 5-methylcytosine"
gggagggggggtggcagcaagtgaggacaaagctgccaagggctagcagtaaccagtcaacgggtcctaccatctgagttcctatgacaagttccccacctacatggtgaggtgttttagag

SEQ ID NO: 27215 - DNA, 122 bp, Homo sapiens
  misc_feature (61)..(62): /note="This region represents a CpG dinucleotide"
  misc_feature (61)..(61): /note="Nucleotide may be methylated to form 5-methylcytosine"
gcataattagttaatgaatatattcattctttccaccatccctcattgatttgtctactgcgtcccagcagcagggaatgtgatggttgataagaacttgtttctgctctcatggtgatccc

SEQ ID NO: 27216 - DNA, 122 bp, Homo sapiens
  misc_feature (61)..(62): /note="This region represents a CpG dinucleotide"
  misc_feature (61)..(61): /note="Nucleotide may be methylated to form 5-methylcytosine"
ttctttctccaaagaacaggttttggctcctctcttccctcccttgcccacccccaagagcgtgctccaaaaaactgggccaggggctatcccagaaatggcattctatggggccagggcat

SEQ ID NO: 27217 - DNA, 122 bp, Homo sapiens
  misc_feature (61)..(62): /note="This region represents a CpG dinucleotide"
  misc_feature (61)..(61): /note="Nucleotide may be methylated to form 5-methylcytosine"
gccaagtaaggaatttaagttgttccaggttaatagtgccccctggtgacacaaataaaacgatattctttttggaggaatgcaacttcaaaccaggcttcaaagaatttcctcagataaag

SEQ ID NO: 27218 - DNA, 122 bp, Homo sapiens
  misc_feature (61)..(62): /note="This region represents a CpG dinucleotide"
  misc_feature (61)..(61): /note="Nucleotide may be methylated to form 5-methylcytosine"
tgggcgacagagccagactccatctcagaaaaaaaaaaaaaaaaaaaaaggagaaagcagcgaaaccacaaggactttctggatcttggcagtgggaaaagccagggtgttaaaggatgtgg

SEQ ID NO: 27219 - DNA, 122 bp, Homo sapiens
  misc_feature (61)..(62): /note="This region represents a CpG dinucleotide"
  misc_feature (61)..(61): /note="Nucleotide may be methylated to form 5-methylcytosine"
tagccaagcaaagaaaggggaaagtggaaatcagggaaatagaacatcaaatgtaaaagacgagagagaaagcacattacctgagaggaagcctaaagtcagtaagagtggattaaagtatg

SEQ ID NO: 27220 - DNA, 122 bp, Homo sapiens
  misc_feature (61)..(62): /note="This region represents a CpG dinucleotide"
  misc_feature (61)..(61): /note="Nucleotide may be methylated to form 5-methylcytosine"
ggttcataaacctacacttgataatcatccatgcttttgccaccagtattgcaaattctacgttacaattttatgttgtcttacatccttttggcagcatgtcttaaccacatataaaataa

SEQ ID NO: 27221 - DNA, 122 bp, Homo sapiens
  misc_feature (61)..(62): /note="This region represents a CpG dinucleotide"
  misc_feature (61)..(61): /note="Nucleotide may be methylated to form 5-methylcytosine"
tttcctttgattggcttatttcacttaatataatgtcctcaagcttcatcaatgttttagcgtgtgtcagaatttccttcctttttaatggtgaataatatttccttgtatgaatataccat

SEQ ID NO: 27222 - DNA, 122 bp, Homo sapiens
  misc_feature (61)..(62): /note="This region represents a CpG dinucleotide"
  misc_feature (61)..(61): /note="Nucleotide may be methylated to form 5-methylcytosine"
aataatccctcactcccagataacactggatttgactcaagtggccaaggctatccaaggcggtgagagggtcagtttgtccaggtcttcatgaccctgccttagtaatcctctctgagttg

SEQ ID NO: 27223 - DNA, 122 bp, Homo sapiens
  misc_feature (61)..(62): /note="This region represents a CpG dinucleotide"
  misc_feature (61)..(61): /note="Nucleotide may be methylated to form 5-methylcytosine"
catgctattatttgaaaaatccaggaaacaaatggttgaatcctagttagccaataaatacgtggctttgtagtattagtctcttgggcttcagttttatcaccaagaataataatgcagcc

SEQ ID NO: 27224 - DNA, 122 bp, Homo sapiens
  misc_feature (61)..(62): /note="This region represents a CpG dinucleotide"
  misc_feature (61)..(61): /note="Nucleotide may be methylated to form 5-methylcytosine"
atcatcacattgaggattaggtttcaacattcagaccataccctagagcgattcagagtgcgggctttggagccaggcaggttcagtcccaccacttagatataatcctggacacgtttgat

SEQ ID NO: 27225 - DNA, 122 bp, Homo sapiens
  misc_feature (61)..(62): /note="This region represents a CpG dinucleotide"
  misc_feature (61)..(61): /note="Nucleotide may be methylated to form 5-methylcytosine"
tgtagcatcgggctgggaggctctgtgattaggttgcttgagagagaaaattccagttaacgcaaacaaaggaagcaagagtgaggaatataaggaaataccagtaaagaaaacttaggatt

SEQ ID NO: 27226 - DNA, 122 bp, Homo sapiens
  misc_feature (61)..(62): /note="This region represents a CpG dinucleotide"
  misc_feature (61)..(61): /note="Nucleotide may be methylated to form 5-methylcytosine"
aatataagcggacggggaaccgatttttaaccagatcaagttttcaaatatagattaacacgttttaattgtcctataaactattattcttaaagtcactcttaacaaaacccagacttgga

SEQ ID NO: 27227 - DNA, 122 bp, Homo sapiens
  misc_feature (61)..(62): /note="This region represents a CpG dinucleotide"
  misc_feature (61)..(61): /note="Nucleotide may be methylated to form 5-methylcytosine"
catgagaattaaggcagagcccagcggagtgcattgtaaggatccatgagtgtgaaccttcgtttttactactgcatatgaggatcctgccaacaaacctggcggcttcaagcatccttgcc

SEQ ID NO: 27228 - DNA, 122 bp, Homo sapiens
  misc_feature (61)..(62): /note="This region represents a CpG dinucleotide"
  misc_feature (61)..(61): /note="Nucleotide may be methylated to form 5-methylcytosine"
tagattccgcgctgtgctctgtggcttttagctgtctgtcgtgaattgcatgaaggcatgcgtcagcaggcacctgactgcttggtgccgctaaaatatgaatctagccttgcagagaaggc

SEQ ID NO: 27229 - DNA, 122 bp, Homo sapiens
  misc_feature (61)..(62): /note="This region represents a CpG dinucleotide"
  misc_feature (61)..(61): /note="Nucleotide may be methylated to form 5-methylcytosine"
gcttgcacaacctgtaagcgcttttgtaatctgcgggcacggctctcaatgtcagcctgtcgccgcagtaaagctgttatccttgtgtcagaatctaaagcactgaaaagaatggaagacag

SEQ ID NO: 27230 - DNA, 122 bp, Homo sapiens
  misc_feature (61)..(62): /note="This region represents a CpG dinucleotide"
  misc_feature (61)..(61): /note="Nucleotide may be methylated to form 5-methylcytosine"
gggtggccctgtaggcctttctagggatttacagttctgcagacttaaagctgctagggacgggaaaagtgtcagttgacagcaaaatcacaggtggcaaattttgtgcaatactcatactc

SEQ ID NO: 27231 - DNA, 122 bp, Homo sapiens
  misc_feature (61)..(62): /note="This region represents a CpG dinucleotide"
  misc_feature (61)..(61): /note="Nucleotide may be methylated to form 5-methylcytosine"
caaagaaaggactctgcccaagtcacatgttctccttcacatgagagaaggaagcacagacgtgctggccatccctgagaacaggaagtgaaaggtgtaggaccagaaaagagaatgtgggg

SEQ ID NO: 27232 - DNA, 122 bp, Homo sapiens
  misc_feature (61)..(62): /note="This region represents a CpG dinucleotide"
  misc_feature (61)..(61): /note="Nucleotide may be methylated to form 5-methylcytosine"
tcacctcacctctgtcgtccccgtaaacctacagactgcagagctctctagggtggggcacgcgaagctgactcacacaaggaagttaggattaatgaatgcccaggccaccagcctcacag

SEQ ID NO: 27233 - DNA, 122 bp, Homo sapiens
  misc_feature (61)..(62): /note="This region represents a CpG dinucleotide"
  misc_feature (61)..(61): /note="Nucleotide may be methylated to form 5-methylcytosine"
cgatgttcctagctccttgggaggctgattcatgaaagtcgcttgagcctgggaggcagacgttgcagtgagcagtgagcatgcctgcgctccaccctgggtgacagagcgagaccttgtct

SEQ ID NO: 27234 - DNA, 122 bp, Homo sapiens
  misc_feature (61)..(62): /note="This region represents a CpG dinucleotide"
  misc_feature (61)..(61): /note="Nucleotide may be methylated to form 5-methylcytosine"
atacctgcttttccagtacctttctcctaaaagttactggatcctacagatcttagtgggcgtatacttggtgttagaagaatagaaatctttctaattcccttccttttccccattttgca

SEQ ID NO: 27235 - DNA, 122 bp, Homo sapiens
  misc_feature (61)..(62): /note="This region represents a CpG dinucleotide"
  misc_feature (61)..(61): /note="Nucleotide may be methylated to form 5-methylcytosine"
tagtcacacggagagagaagaaaggagattagcagggtgactttcaccctgcaacagtcacgctggagtactctggtgaaggatcaagaatattaccagttttctgatgaagaaaggaatat

SEQ ID NO: 27236 - DNA, 122 bp, Homo sapiens
  misc_feature (61)..(62): /note="This region represents a CpG dinucleotide"
  misc_feature (61)..(61): /note="Nucleotide may be methylated to form 5-methylcytosine"
agctctgccactttccagctacctgaccttaggcaagttatttaatctcttataagggaacgatagtaatatatttttcactaggtgggactcaaagtcaaatggggtaataaaggtaattt

SEQ ID NO: 27237 - DNA, 122 bp, Homo sapiens
  misc_feature (61)..(62): /note="This region represents a CpG dinucleotide"
  misc_feature (61)..(61): /note="Nucleotide may be methylated to form 5-methylcytosine"
gcatggcttttccaggcacggtgctgtcggccgcacagaacaggaccctcccggcagctccggcttgcacagcatccgcctgtctggcccctgtggaagtatctgactcccaacgcccagac

SEQ ID NO: 27238 - DNA, 122 bp, Homo sapiens
  misc_feature (61)..(62): /note="This region represents a CpG dinucleotide"
  misc_feature (61)..(61): /note="Nucleotide may be methylated to form 5-methylcytosine"
gtgagtagaaggcagcaaggcatgagttattgtaactgataaagcaggggtggcgcagtgcggggttggtggggaggtgattgatcaagtgagtcatcatcctgccccagggaacaatggtc

SEQ ID NO: 27239 - DNA, 122 bp, Homo sapiens
  misc_feature (61)..(62): /note="This region represents a CpG dinucleotide"
  misc_feature (61)..(61): /note="Nucleotide may be methylated to form 5-methylcytosine"
aagctacctttataagataaccagttccagagtaaaagagtaaatactgactgcatgatgcgataaaagactagcaatgtggggaaccagtacagcaaaccatatgattaagaggagggatc

SEQ ID NO: 27240 - DNA, 122 bp, Homo sapiens
  misc_feature (61)..(62): /note="This region represents a CpG dinucleotide"
  misc_feature (61)..(61): /note="Nucleotide may be methylated to form 5-methylcytosine"
gctgattagccaccactgtggacctttgcaggtcagggctcttggttgccattgaggcctcgctgcccactgtggtggttccaggcaaccagccatggaagggagccagcctcatgtgattg

SEQ ID NO: 27241 - DNA, 122 bp, Homo sapiens
  misc_feature (61)..(62): /note="This region represents a CpG dinucleotide"
  misc_feature (61)..(61): /note="Nucleotide may be methylated to form 5-methylcytosine"
ctgcatgagatgagaggccaatggagaatgttgagtaaagaactgacctgatctagtttacgttttaaacagtctattctggaatttgtgttgagaaaagctacagagggataaagaggatc

SEQ ID NO: 27242 - DNA, 122 bp, Homo sapiens
  misc_feature (61)..(62): /note="This region represents a CpG dinucleotide"
  misc_feature (61)..(61): /note="Nucleotide may be methylated to form 5-methylcytosine"
tgtagggtgtctggaaggcaggtgcggcctgccacttctaatgcaagctgagaacaaacacggcatactgagcccaaatcggccttctgctgctagagacagaggtagaatttatgttttgc

SEQ ID NO: 27243 - DNA, 122 bp, Homo sapiens
  misc_feature (61)..(62): /note="This region represents a CpG dinucleotide"
  misc_feature (61)..(61): /note="Nucleotide may be methylated to form 5-methylcytosine"
aaagttgcagcgggggagggggaaagtgggagagagtgatgccaaagcaaaagagcgggacggtcagccaggtttccaaacaagctagacacctgctttggaaagacagtgaccaagcctag

SEQ ID NO: 27244 - DNA, 122 bp, Homo sapiens
  misc_feature (61)..(62): /note="This region represents a CpG dinucleotide"
  misc_feature (61)..(61): /note="Nucleotide may be methylated to form 5-methylcytosine"
catctagttcttttgtctcctggagtatgggcagtgacttgtggaaactctgcttcctttcgtactccctaggatgagctgtggtgtgataaagatgactcgggcagcaggcaaacctggtt

SEQ ID NO: 27245 - DNA, 122 bp, Homo sapiens
  misc_feature (61)..(62): /note="This region represents a CpG dinucleotide"
  misc_feature (61)..(61): /note="Nucleotide may be methylated to form 5-methylcytosine"
aactaagcaaaggatctataaagatcataacactaaatgccttttattttcctgggacttcgtttttcttcataagggcttcatagacaggatacagccagccctcctgtcatttgtaagca

SEQ ID NO: 27246 - DNA, 122 bp, Homo sapiens
  misc_feature (61)..(62): /note="This region represents a CpG dinucleotide"
  misc_feature (61)..(61): /note="Nucleotide may be methylated to form 5-methylcytosine"
gaaattggggttatctaatgttaacctaaaagcaactcaagagacacaggctcggccaggcgcagtggctcatgcctgtaatcccagtactttgggaggctgaggcagatggatcacttgag

SEQ ID NO: 27247 - DNA, 122 bp, Homo sapiens
  misc_feature (61)..(62): /note="This region represents a CpG dinucleotide"
  misc_feature (61)..(61): /note="Nucleotide may be methylated to form 5-methylcytosine"
gcttatgccttagggagttctatgtgagcagcaaggttattccccctagttacacacacacgcacatgtgccaatactcctgcaaagacttgctgtttctaaaatccactactcagaaaaac

SEQ ID NO: 27248 - DNA, 122 bp, Homo sapiens
  misc_feature (61)..(62): /note="This region represents a CpG dinucleotide"
  misc_feature (61)..(61): /note="Nucleotide may be methylated to form 5-methylcytosine"
agttgggctctgcctgaccagtgaaggaagacgagggagactccaccctctgaccttatccgctgccttcaacctctgagaacggttattcccagtcctattgtttggtacttcctgatcct

SEQ ID NO: 27249 - DNA, 122 bp, Homo sapiens
  misc_feature (61)..(62): /note="This region represents a CpG dinucleotide"
  misc_feature (61)..(61): /note="Nucleotide may be methylated to form 5-methylcytosine"
tttcccaacgaaactcttctgccaggcggcataaggggcgcggccctccgctcttcagaacggctggtgtctgctttgaaaggtcctgactagaatctgtttatattttgactgcactggca

SEQ ID NO: 27250 - DNA, 122 bp, Homo sapiens
  misc_feature (61)..(62): /note="This region represents a CpG dinucleotide"
  misc_feature (61)..(61): /note="Nucleotide may be methylated to form 5-methylcytosine"
tggtccccgccagaacactcaaccagcctgtggactggcaggatctgaactcaggcctgccgggtcccacctgcagctctctctggcccctgccattgagctacgcaccaccctgtccccac

SEQ ID NO: 27251 - DNA, 122 bp, Homo sapiens
  misc_feature (61)..(62): /note="This region represents a CpG dinucleotide"
  misc_feature (61)..(61): /note="Nucleotide may be methylated to form 5-methylcytosine"
attgtatgacacacatcaattcaggtaaccactgctacaatgaggaggcaaaacttccatcgcccctgaaaaactcctccttactttttatagtaacaccctcctaatcccagcaacctcta

SEQ ID NO: 27252 - DNA, 122 bp, Homo sapiens
  misc_feature (61)..(62): /note="This region represents a CpG dinucleotide"
  misc_feature (61)..(61): /note="Nucleotide may be methylated to form 5-methylcytosine"
ctccgaaggtgcctagaagcctgtgagctcagcgcccaggcaggtctcccttcctcaggccgcggagcctcgctctgcacagtagggggcgggctgttcctttccggcctgaggaggcccgt

SEQ ID NO: 27253 - DNA, 122 bp, Homo sapiens
  misc_feature (61)..(62): /note="This region represents a CpG dinucleotide"
  misc_feature (61)..(61): /note="Nucleotide may be methylated to form 5-methylcytosine"
gtaacacaattcaaggcagacacaggaaagagcacaagtacaatatgggtaaaggaactgcgtatgtttttaagagaaaagcaactcactgataaaaagacatttcatttggttttgaaagt

SEQ ID NO: 27254 - DNA, 122 bp, Homo sapiens
  misc_feature (61)..(62): /note="This region represents a CpG dinucleotide"
  misc_feature (61)..(61): /note="Nucleotide may be methylated to form 5-methylcytosine"
aaacgtcagagacaatgatttggagaacattctacacaaaaaccaagtatgaaacaatgacgatttcatgatggctcattgttctttggtattgtgccttacgtgagctggggactaactct

SEQ ID NO: 27255 - DNA, 122 bp, Homo sapiens
  misc_feature (61)..(62): /note="This region represents a CpG dinucleotide"
  misc_feature (61)..(61): /note="Nucleotide may be methylated to form 5-methylcytosine"
cccaggcttgtcagttattaataattggatgaatacttcaggtagtatttaaacaaatagcgatttcatagcagacatttccccaaccaggagatgcagtaaagtattggtagcaatagatg

SEQ ID NO: 27256 - DNA, 122 bp, Homo sapiens
  misc_feature (61)..(62): /note="This region represents a CpG dinucleotide"
  misc_feature (61)..(61): /note="Nucleotide may be methylated to form 5-methylcytosine"
gccaccatagggtaactcttgcaaatgatttgaggcttcatggtttcccccaatgaagagcgtgagaactggagcctttttctctccagagtaatacctagaacataagagcaaagtcagtt

SEQ ID NO: 27257 - DNA, 122 bp, Homo sapiens
  misc_feature (61)..(62): /note="This region represents a CpG dinucleotide"
  misc_feature (61)..(61): /note="Nucleotide may be methylated to form 5-methylcytosine"
cacgcaccttgcatgcacacacacatgcacatgcactcttccaggatggctttgaagtggcgagggtagaaaggaactcttggtcccaagggctggcctcatgaaggagctccaagatgcaa

SEQ ID NO: 27258 - DNA, 122 bp, Homo sapiens
  misc_feature (61)..(62): /note="This region represents a CpG dinucleotide"
  misc_feature (61)..(61): /note="Nucleotide may be methylated to form 5-methylcytosine"
aaaccaatgctctcgccctttctttaaagtggggaccatggaccagcaacatcagcaacacgtggaggcttattagaaaggtagaatctcaggctccacctgctgagtcagaatctgtattt

SEQ ID NO: 27259 - DNA, 122 bp, Homo sapiens
  misc_feature (61)..(62): /note="This region represents a CpG dinucleotide"
  misc_feature (61)..(61): /note="Nucleotide may be methylated to form 5-methylcytosine"
tcaccttgaactctgcagagggcggctgccaagtttaaagtcagccactgccggtgtggacgctaaggaataattagggtctggcggctcatggtgcccctgcgtcaagtcaagaatgtttt

SEQ ID NO: 27260 - DNA, 122 bp, Homo sapiens
  misc_feature (61)..(62): /note="This region represents a CpG dinucleotide"
  misc_feature (61)..(61): /note="Nucleotide may be methylated to form 5-methylcytosine"
gagtcattccttatttaatgaattcaactttaaaaccagaacatgattcccagaagggagcgagcttcctgtgggaagtctgtttcccctgcagcctggctctactaagaattctgtttgct

SEQ ID NO: 27261 - DNA, 122 bp, Homo sapiens
  misc_feature (61)..(62): /note="This region represents a CpG dinucleotide"
  misc_feature (61)..(61): /note="Nucleotide may be methylated to form 5-methylcytosine"
tagcagcggtcacccaaagatgcaggggtgcttattcgggacacaggcaaaggtcaggaccggaggacatgggctggtgtcacagcccaggaggaaatgggagggtttaatgagccagggca

SEQ ID NO: 27262 - DNA, 122 bp, Homo sapiens
  misc_feature (61)..(62): /note="This region represents a CpG dinucleotide"
  misc_feature (61)..(61): /note="Nucleotide may be methylated to form 5-methylcytosine"
tttcctttggccctggtagtatgcttcttagctttctcatattgcttttgaaattttctacgttcagtttatgggggtgggaggaggaggaataaagcaatttaggaaaaggaagcaagagg

SEQ ID NO: 27263 - DNA, 122 bp, Homo sapiens
  misc_feature (61)..(62): /note="This region represents a CpG dinucleotide"
  misc_feature (61)..(61): /note="Nucleotide may be methylated to form 5-methylcytosine"
attccctggtgatactctggcctgtggggacttcattaggcactgtctccatcctgagaacgacccagcccagtggccccagccttcatggattcacagcatacagcagcagacccaccctc

SEQ ID NO: 27264 - DNA, 122 bp, Homo sapiens
  misc_feature (61)..(62): /note="This region represents a CpG dinucleotide"
  misc_feature (61)..(61): /note="Nucleotide may be methylated to form 5-methylcytosine"
catcccttctttaagaggaacaaaacttctaagtcacacatacaggctgcacaggtatgtcgaacttctgaatatgtaatcacaaactgtgccaaaaccacatatagaaaatgaaaggggaa

SEQ ID NO: 27265 - DNA, 122 bp, Homo sapiens
  misc_feature (61)..(62): /note="This region represents a CpG dinucleotide"
  misc_feature (61)..(61): /note="Nucleotide may be methylated to form 5-methylcytosine"
gggttattcatactcttaatatttctattaagaaagtagaagactgacagaggttaaaagcggctcattaacttagcagagaggcaggcttgaggaggagcctccagtcttctgagccccag

SEQ ID NO: 27266 - DNA, 122 bp, Homo sapiens
  misc_feature (61)..(62): /note="This region represents a CpG dinucleotide"
  misc_feature (61)..(61): /note="Nucleotide may be methylated to form 5-methylcytosine"
cagaccattctgaagagtgagcatgttcaacatgcagtgagaattaacacagtaaaatcacggcaaataactaaagtaagacagtagaggacaggtttagctccacctagtgcctttggagc

SEQ ID NO: 27267 - DNA, 122 bp, Homo sapiens
  misc_feature (61)..(62): /note="This region represents a CpG dinucleotide"
  misc_feature (61)..(61): /note="Nucleotide may be methylated to form 5-methylcytosine"
catgaagcttcctctcatcttttccagcattatagtcatagtgctgtaatcaagagcacacggtccaaggagggagtggtcacagttccatcaaagaggcaacgacttacaagacaaaacat

SEQ ID NO: 27268 - DNA, 122 bp, Homo sapiens
  misc_feature (61)..(62): /note="This region represents a CpG dinucleotide"
  misc_feature (61)..(61): /note="Nucleotide may be methylated to form 5-methylcytosine"
gttttacttccttcccaatgtggatgccttttacttccctttcttgcctaattgttctggcgagaacgtccagtgcactgctgatagaagtgaccagagcaggcatccttgggttgtttctg

SEQ ID NO: 27269 - DNA, 122 bp, Homo sapiens
  misc_feature (61)..(62): /note="This region represents a CpG dinucleotide"
  misc_feature (61)..(61): /note="Nucleotide may be methylated to form 5-methylcytosine"
ttgtttatgtgcatgttttagtctgcccagacagctatgacaaatataccaagactgagtcgtttataaacaaccaaaattttttttcttgcactctgggggctgggaaatgtaagaccaag

SEQ ID NO: 27270 - DNA, 122 bp, Homo sapiens
  misc_feature (61)..(62): /note="This region represents a CpG dinucleotide"
  misc_feature (61)..(61): /note="Nucleotide may be methylated to form 5-methylcytosine"
gggccagggcgcgccgggatccgctgcgccaggaccctgcagacccggccgcggccgggccgagtgcctcccgccggggccttacgcccacggtccacgcttgcaacaccagggctgtacgg

SEQ ID NO: 27271 - DNA, 122 bp, Homo sapiens
  misc_feature (61)..(62): /note="This region represents a CpG dinucleotide"
  misc_feature (61)..(61): /note="Nucleotide may be methylated to form 5-methylcytosine"
ccaccagcttccctcagtttagatggagaggtgcctaccctctgaccagcaaatgtcctccgaggaaacggagaaatgggtcttgagaggctttggaaggggggacaaaatctctagggaga

SEQ ID NO: 27272 - DNA, 122 bp, Homo sapiens
  misc_feature (61)..(62): /note="This region represents a CpG dinucleotide"
  misc_feature (61)..(61): /note="Nucleotide may be methylated to form 5-methylcytosine"
ctcaacactgctggaatgtgttattttgaaatctgacaatgaactacagaatggtaaaagcggaagagcctttgagacaaattagtctagcccagagtagggaagaaaaagagagggaggct

SEQ ID NO: 27273 - DNA, 122 bp, Homo sapiens
  misc_feature (61)..(62): /note="This region represents a CpG dinucleotide"
  misc_feature (61)..(61): /note="Nucleotide may be methylated to form 5-methylcytosine"
tggctgcccagctggactcagtcactgtctcactgtccctagcctgccccacaccacagacggcagggaagcaatggaaaagatcactcaaactgacaaatcaagcaaaagcgactcatgct

SEQ ID NO: 27274 - DNA, 122 bp, Homo sapiens
  misc_feature (61)..(62): /note="This region represents a CpG dinucleotide"
  misc_feature (61)..(61): /note="Nucleotide may be methylated to form 5-methylcytosine"
aagtgcttgggctctcagctagatttttgggttccacttaaattaggcaagtcactgactcgttcagtgcctcagttcctttgtaagaataatgatacctgtttcacaggatgggtaggagg

SEQ ID NO: 27275 - DNA, 122 bp, Homo sapiens
  misc_feature (61)..(62): /note="This region represents a CpG dinucleotide"
  misc_feature (61)..(61): /note="Nucleotide may be methylated to form 5-methylcytosine"
ctgaagaaagagctctttgaatttttcatagaaaagactggtgcccaaaaggccagggctcgagaatgaggctgcctcaagcacagtgcttggcaggacaccagggctgaaaggtacagcaa

SEQ ID NO: 27276 - DNA, 122 bp, Homo sapiens
  misc_feature (61)..(62): /note="This region represents a CpG dinucleotide"
  misc_feature (61)..(61): /note="Nucleotide may be methylated to form 5-methylcytosine"
acgtggagctggggctacagccattactttcggacaggtgcaattcaaagcgtgatcctccgaccaagagcttcgtcatcgccacctgggagcttattagaaatgcaggatctcaggtctcc

SEQ ID NO: 27277 - DNA, 122 bp, Homo sapiens
  misc_feature (61)..(62): /note="This region represents a CpG dinucleotide"
  misc_feature (61)..(61): /note="Nucleotide may be methylated to form 5-methylcytosine"
cagaccagttctctttttctccagccttatttagctctatgggtgcaggcatgacataagcggagttgaatttactaatatggttttaccaagagagtttttcaggagagtagtggaaggga

SEQ ID NO: 27278 - DNA, 122 bp, Homo sapiens
  misc_feature (61)..(62): /note="This region represents a CpG dinucleotide"
  misc_feature (61)..(61): /note="Nucleotide may be methylated to form 5-methylcytosine"
tatgatggatctgtcattttgtcactcagctcaccataaatacatacaactttcatagaccggtcctgccaggcaacagcacttgtattctggagctttctgaattatatatttgctctctt

SEQ ID NO: 27279 - DNA, 122 bp, Homo sapiens
  misc_feature (61)..(62): /note="This region represents a CpG dinucleotide"
  misc_feature (61)..(61): /note="Nucleotide may be methylated to form 5-methylcytosine"
tgaattggctgcctttatctacattctgaaccaaaatttaattctagagtttgtagtcagcgtttttccaaatgtgtaaaactgtaatccttcataaaatgtcatatgtaaaagagtaagca

SEQ ID NO: 27280 - DNA, 122 bp, Homo sapiens
  misc_feature (61)..(62): /note="This region represents a CpG dinucleotide"
  misc_feature (61)..(61): /note="Nucleotide may be methylated to form 5-methylcytosine"
ttctcgaagtgctgtccactcagagaagatctggctgaggaaacagacacacagaggccacgcagccagaaccacagcccaaatcagcccataggaacaaggtggggagaccaccactactg

SEQ ID NO: 27281 - DNA, 122 bp, Homo sapiens
  misc_feature (61)..(62): /note="This region represents a CpG dinucleotide"
  misc_feature (61)..(61): /note="Nucleotide may be methylated to form 5-methylcytosine"
caaaacagggtgtccatgttgcctgtgcttttgactgacaaccttgatttacatgatttacgttgctttgatgtctagcatatgatatcttttcatgatttacaactggggatataaggcac

SEQ ID NO: 27282 - DNA, 122 bp, Homo sapiens
  misc_feature (61)..(62): /note="This region represents a CpG dinucleotide"
  misc_feature (61)..(61): /note="Nucleotide may be methylated to form 5-methylcytosine"
cacagtgaaaggccaaatctgtgatcttttttccaggagtttatacttctgtttctacaccgtaatttatgttcttaccagcagtcagttatatttattccaaaatctatttatgccagttg

SEQ ID NO: 27283 - DNA, 122 bp, Homo sapiens
  misc_feature (61)..(62): /note="This region represents a CpG dinucleotide"
  misc_feature (61)..(61): /note="Nucleotide may be methylated to form 5-methylcytosine"
ttcccacagagaggaaacttattttggcatttgaaaacataaatgggcaaaggacacaggcggctcacataaaaggaagcatggttagtaaacagactgtgaggaaacacagtcaacctggc

SEQ ID NO: 27284 - DNA, 122 bp, Homo sapiens
  misc_feature (61)..(62): /note="This region represents a CpG dinucleotide"
  misc_feature (61)..(61): /note="Nucleotide may be methylated to form 5-methylcytosine"
taatggttagggggggagggggcataatgaggcctgtccaacctcctgttccatcatgtccgggaactccatttttaaggtttctcgggggtcccctaggccaagaggtggtccatttggtc

SEQ ID NO: 27285 - DNA, 122 bp, Homo sapiens
  misc_feature (61)..(62): /note="This region represents a CpG dinucleotide"
  misc_feature (61)..(61): /note="Nucleotide may be methylated to form 5-methylcytosine"
ttacttgctaactcctctacctagggcaagttacttaaacatcgcaagtctcagtttcttcgctgagaaagtggggagagtaacagtgcctactttgtaggattactgtgaagattaaacta

SEQ ID NO: 27286 - DNA, 122 bp, Homo sapiens
  misc_feature (61)..(62): /note="This region represents a CpG dinucleotide"
  misc_feature (61)..(61): /note="Nucleotide may be methylated to form 5-methylcytosine"
tcctctaagcccctcctcattctgtagctcagtgtgggaatggatgttcacagtgattaacgctgcacagtgattaacgctgaatcatgaagaaaagctaagtgatgttcaagactctctgt

SEQ ID NO: 27287 - DNA, 122 bp, Homo sapiens
  misc_feature (61)..(62): /note="This region represents a CpG dinucleotide"
  misc_feature (61)..(61): /note="Nucleotide may be methylated to form 5-methylcytosine"
ccccttcaacaccctccaattgctgaattttttccttaggggcattgtgacatataagtacggacctcaggttaaaaactcttgctctaaaatttggtcaacctaccccatttcttttcagc

SEQ ID NO: 27288 - DNA, 122 bp, Homo sapiens
  misc_feature (61)..(62): /note="This region represents a CpG dinucleotide"
  misc_feature (61)..(61): /note="Nucleotide may be methylated to form 5-methylcytosine"
tgggcaaaccaagatttatcctcagactaactctgcgtgccatgtggtggctgtgtcatccgtggaggctgctaatgaagctctttctataaatttgagagtaaacagattcggacaacttt

SEQ ID NO: 27289 - DNA, 122 bp, Homo sapiens
  misc_feature (61)..(62): /note="This region represents a CpG dinucleotide"
  misc_feature (61)..(61): /note="Nucleotide may be methylated to form 5-methylcytosine"
tgtcttggaagaggggctaagatgtgggacgaacgtgattattcaatgggcatgcgcttccggccacgcatcacacgcacatacaccagcgcggttatccataactctaccatttcaagtga

SEQ ID NO: 27290 - DNA, 122 bp, Homo sapiens
  misc_feature (61)..(62): /note="This region represents a CpG dinucleotide"
  misc_feature (61)..(61): /note="Nucleotide may be methylated to form 5-methylcytosine"
caaatgtttactgagcatccaccaagttgacagcactgtaaatacagacacactttcagacgggggctgcctgcaaagaggcttcccttctagttagaaagccagaagacacattttacaac

SEQ ID NO: 27291 - DNA, 122 bp, Homo sapiens
  misc_feature (61)..(62): /note="This region represents a CpG dinucleotide"
  misc_feature (61)..(61): /note="Nucleotide may be methylated to form 5-methylcytosine"
gcgtgatttttccagcactcttgcacttcgtggggcctgctcctgactgtgaggagagttcgaagggaggggaacaggaagagagggcaggaacacaagagcttgtttttttatttttgaca

SEQ ID NO: 27292 - DNA, 122 bp, Homo sapiens
  misc_feature (61)..(62): /note="This region represents a CpG dinucleotide"
  misc_feature (61)..(61): /note="Nucleotide may be methylated to form 5-methylcytosine"
aagtgcaatagacccaattatacagcactgctgagtcaccagggccacatctgcacagcacgaccaaagcacactttgactagaaagtccaagggtagttcaggaagaatcaaatcagaact

SEQ ID NO: 27293 - DNA, 122 bp, Homo sapiens
  misc_feature (61)..(62): /note="This region represents a CpG dinucleotide"
  misc_feature (61)..(61): /note="Nucleotide may be methylated to form 5-methylcytosine"
acaatcttgtaggcagaaaatcctatggaataatttaaaaaaactgattcgactaataaacgagttctgcaaaactacaagaaacaaataaatatacagtggtggccaggtgtagtcacaga

SEQ ID NO: 27294 - DNA, 122 bp, Homo sapiens
  misc_feature (61)..(62): /note="This region represents a CpG dinucleotide"
  misc_feature (61)..(61): /note="Nucleotide may be methylated to form 5-methylcytosine"
cacagggttgctgtgagggtcagtgacacataaggacatcacccagcacagagccaggctcgctcgtgtcctctttcctcactcctttttttggagaaggcagtgtctgggcaggcccagct

SEQ ID NO: 27295 - DNA, 122 bp, Homo sapiens
  misc_feature (61)..(62): /note="This region represents a CpG dinucleotide"
  misc_feature (61)..(61): /note="Nucleotide may be methylated to form 5-methylcytosine"
gccactttaattgaagacatatcttaggtgattctcaccagtctatggaaagtagcaatacgaaagaatatgagagataagattagcaaatactgagtggaatcctgcaatatctgattatt

SEQ ID NO: 27296 - DNA, 122 bp, Homo sapiens
  misc_feature (61)..(62): /note="This region represents a CpG dinucleotide"
  misc_feature (61)..(61): /note="Nucleotide may be methylated to form 5-methylcytosine"
aatagtttatcctgttcacattatgcagaatttcagtgtcgttaatccacaatgttagtacggtaacagaaacataaaggagaaaaaaggcaggtggggggaggttcatagtgtggcctgac

SEQ ID NO: 27297 - DNA, 122 bp, Homo sapiens
  misc_feature (61)..(62): /note="This region represents a CpG dinucleotide"
  misc_feature (61)..(61): /note="Nucleotide may be methylated to form 5-methylcytosine"
tggtgaaagtaggacacagttgcaccacctgacttgcatcacctcattgccttctagtggcgttataagcttggttccctgctgactgacacctgggaaggggtggtgggcacctcagggca

SEQ ID NO: 27298 - DNA, 122 bp, Homo sapiens
  misc_feature (61)..(62): /note="This region represents a CpG dinucleotide"
  misc_feature (61)..(61): /note="Nucleotide may be methylated to form 5-methylcytosine"
acctaatgtcaatcaaggaaagcataacaaattagagtcagctatccattctcctatgaacgatcagcaaatctcacaggagtcaaggaatagtactgttgtgagtagtgatacattacaga

SEQ ID NO: 27299 - DNA, 122 bp, Homo sapiens
  misc_feature (61)..(62): /note="This region represents a CpG dinucleotide"
  misc_feature (61)..(61): /note="Nucleotide may be methylated to form 5-methylcytosine"
agacctttgggcgaggacagtgaagatgaggacagtaaagctcggcagctttgattcaaacgtagcacttgcagaaagacctgtggttgtaccttaatgtaagtactgaaaaaagcacagta

SEQ ID NO: 27300 - DNA, 122 bp, Homo sapiens
  misc_feature (61)..(62): /note="This region represents a CpG dinucleotide"
  misc_feature (61)..(61): /note="Nucleotide may be methylated to form 5-methylcytosine"
ttggtgtgcatgatgagacttgtcaagtgattggatgtgaaaaagagaaaatagaccttacgagcttgagggcttctattgatggctgtattaagaagctacctgtccatcatttctgcaca

SEQ ID NO: 27301 - DNA, 122 bp, Homo sapiens
  misc_feature (61)..(62): /note="This region represents a CpG dinucleotide"
  misc_feature (61)..(61): /note="Nucleotide may be methylated to form 5-methylcytosine"
cagccagcagtcttcttcacagtcacttggtattccccttgactgccattcatgcaaggacgatagagaacagtgacacattgacacatttaataggtaaaaggcttgccgaaaaactcttt

SEQ ID NO: 27302 - DNA, 122 bp, Homo sapiens
  misc_feature (61)..(62): /note="This region represents a CpG dinucleotide"
  misc_feature (61)..(61): /note="Nucleotide may be methylated to form 5-methylcytosine"
ggcgctggaaagcttgttctataattacttcttgatccgcttctaggcgtgctgtgcatgcgtccgaccatgtgtgtttgcgttagcttgcgccgtcgacaagagccagagaacgtgggtct

SEQ ID NO: 27303 - DNA, 122 bp, Homo sapiens
  misc_feature (61)..(62): /note="This region represents a CpG dinucleotide"
  misc_feature (61)..(61): /note="Nucleotide may be methylated to form 5-methylcytosine"
aatgtagggaaaaggtcaccgatgtgtcagctgctgcctgttctgggatcgctggtgctccgggcggcatccccacctcagggtcgtcttcatacccccatcactctcctcctccccaagtc

SEQ ID NO: 27304 - DNA, 122 bp, Homo sapiens
  misc_feature (61)..(62): /note="This region represents a CpG dinucleotide"
  misc_feature (61)..(61): /note="Nucleotide may be methylated to form 5-methylcytosine"
ttaacaatttgatctgacgacctaaatgctgtatttggaatgagttttacatttgttattcggggagaactactaaaagttcaatagtaaagcacatttacttttaaagctacacaactata

SEQ ID NO: 27305 - DNA, 122 bp, Homo sapiens
  misc_feature (61)..(62): /note="This region represents a CpG dinucleotide"
  misc_feature (61)..(61): /note="Nucleotide may be methylated to form 5-methylcytosine"
tccctgttctgaacatttcatataaatggagtcatacagcaagttgcctttggtagctgacgtggtttacttgacataatgttttcaaggttcatccatgttgttaaatatatcagaacgta

SEQ ID NO: 27306 - DNA, 122 bp, Homo sapiens
  misc_feature (61)..(62): /note="This region represents a CpG dinucleotide"
  misc_feature (61)..(61): /note="Nucleotide may be methylated to form 5-methylcytosine"
gtattgagatttaaaatcaacaaccatttattaagtccctaccgtgagtcagtctacatacgttagatgcctccatgtgcccggcctgaaggtggtggtgagagagtttttttctggactaa

SEQ ID NO: 27307 - DNA, 122 bp, Homo sapiens
  misc_feature (61)..(62): /note="This region represents a CpG dinucleotide"
  misc_feature (61)..(61): /note="Nucleotide may be methylated to form 5-methylcytosine"
taatccagtcttcatcagccatcactcttcctgtattttgttcaagaggcactaattgttcgcatttggcaggtttaacacttcctgacagagaggctattaaggggaagtattctccaata

SEQ ID NO: 27308 - DNA, 122 bp, Homo sapiens
  misc_feature (61)..(62): /note="This region represents a CpG dinucleotide"
  misc_feature (61)..(61): /note="Nucleotide may be methylated to form 5-methylcytosine"
ccctactgaaaatacaaaagttagccaggcgcagtggccatccctacagtgctagctactcgggaggctgaggcaggagaattgcttgaacccgggaggcaaggttgcggtgagctgagatc

SEQ ID NO: 27309 - DNA, 122 bp, Homo sapiens
  misc_feature (61)..(62): /note="This region represents a CpG dinucleotide"
  misc_feature (61)..(61): /note="Nucleotide may be methylated to form 5-methylcytosine"
acatacagaaaaaacaagacatgtcgtctcagaaattgtgtagtttcttgcttaagcactcgagatgttcagtgaacagctaacaattgtaggtaactattcccaattttaagaggctgatt

SEQ ID NO: 27310 - DNA, 122 bp, Homo sapiens
  misc_feature (61)..(62): /note="This region represents a CpG dinucleotide"
  misc_feature (61)..(61): /note="Nucleotide may be methylated to form 5-methylcytosine"
aaacagtagcccggagaggaggctctcttggtaggatcccacggcaaccgaatggatgcacgttgtttatgacgttcttacccatgaaagcgctcaaggatccgcttgcttgcttacatgtg

SEQ ID NO: 27311 - DNA, 122 bp, Homo sapiens
  misc_feature (61)..(62): /note="This region represents a CpG dinucleotide"
  misc_feature (61)..(61): /note="Nucleotide may be methylated to form 5-methylcytosine"
ctaatgacctgccttggctctctctgcatggtttatgcatatcaaataattatcaacaatcgacaaatatttattgagttcctaccacgtcccaggcgctgtgctacgcactggaagttaca

SEQ ID NO: 27312 - DNA, 122 bp, Homo sapiens
  misc_feature (61)..(62): /note="This region represents a CpG dinucleotide"
  misc_feature (61)..(61): /note="Nucleotide may be methylated to form 5-methylcytosine"
gagtgtacagctggtttacttgactcatgagcaagatgcacacgtcacatctggctggcacgtctctgaagcctttttacatctctaggctttccccattcctcttttatccctttgcagtt

SEQ ID NO: 27313 - DNA, 122 bp, Homo sapiens
  misc_feature (61)..(62): /note="This region represents a CpG dinucleotide"
  misc_feature (61)..(61): /note="Nucleotide may be methylated to form 5-methylcytosine"
ttgaatggtggctctaactatttggttaccactgagtttcaagatgtgttccctgggccacgaagaagtcagctacttgtcaaggatcagctatgttatgggtggatcctgctagaaccaaa

SEQ ID NO: 27314 - DNA, 122 bp, Homo sapiens
  misc_feature (61)..(62): /note="This region represents a CpG dinucleotide"
  misc_feature (61)..(61): /note="Nucleotide may be methylated to form 5-methylcytosine"
cacgcactgccaccccagacacaggcatcacaacgattctgcagaaaagctggggcttagcggccccatcactcaatcagccgagcattcgaaaccaggtctgccaggcagcaaaggctaaa

SEQ ID NO: 27315 - DNA, 122 bp, Homo sapiens
  misc_feature (61)..(62): /note="This region represents a CpG dinucleotide"
  misc_feature (61)..(61): /note="Nucleotide may be methylated to form 5-methylcytosine"
ttatatatagaaaaataaaacagatgctctcactacaaaactttcttggctaattcttaccgtaacataggataaaaattttatccaacatttctcaataacgtgttgttttttcagttgta

SEQ ID NO: 27316 - DNA, 122 bp, Homo sapiens
  misc_feature (61)..(62): /note="This region represents a CpG dinucleotide"
  misc_feature (61)..(61): /note="Nucleotide may be methylated to form 5-methylcytosine"
aaaagaaaacaagtgcatgtcggagcaaggcagtcggtggctggagcacagttagagtaacgtgggaggagctgtggagacgcagccacgggtcacgccagggccctgcacaccatgcagag

SEQ ID NO: 27317 - DNA, 122 bp, Homo sapiens
  misc_feature (61)..(62): /note="This region represents a CpG dinucleotide"
  misc_feature (61)..(61): /note="Nucleotide may be methylated to form 5-methylcytosine"
gacttataagactaggtcataaaaggtattgcagctgcctcctcatcctcacacttggatcgcttgcactaggaggagccagctactgtgtcatgaggaactcaagtggccctgtggaaagg

SEQ ID NO: 27318 - DNA, 122 bp, Homo sapiens
  misc_feature (61)..(62): /note="This region represents a CpG dinucleotide"
  misc_feature (61)..(61): /note="Nucleotide may be methylated to form 5-methylcytosine"
agcgctccctgggcacccgctcgcactcaagtgcaggcagcgtggtgacaatgccaactgcgccccctatctctgacaggctccagaggggcagtgggaatacagtagctacatgtggctat

SEQ ID NO: 27319 - DNA, 122 bp, Homo sapiens
  misc_feature (61)..(62): /note="This region represents a CpG dinucleotide"
  misc_feature (61)..(61): /note="Nucleotide may be methylated to form 5-methylcytosine"
aaaaaatgtgataataaaaaatgtaacacaaatgttataggagctcagatgtagggtaaacgaggtgacaaggaaatcggctctgctgaattttctgagaaaaaaattgtcccctatcaatg

SEQ ID NO: 27320 - DNA, 122 bp, Homo sapiens
  misc_feature (61)..(62): /note="This region represents a CpG dinucleotide"
  misc_feature (61)..(61): /note="Nucleotide may be methylated to form 5-methylcytosine"
gaatgcctgtggctgccagggcagtataaacaaattggagctggatcagacaagatttaacgatgatcagtgtgataaattcattatggaaccaagcactttatttactatttactaagtag

SEQ ID NO: 27321 - DNA, 122 bp, Homo sapiens
  misc_feature (61)..(62): /note="This region represents a CpG dinucleotide"
  misc_feature (61)..(61): /note="Nucleotide may be methylated to form 5-methylcytosine"
aagcagttaggcagtagcagagtcaggattcacacctagtgagcatgacttgagagcatacgttcttacccactatctgttactggtctcttagtttcattttccacccaaaccctgtatct

SEQ ID NO: 27322 - DNA, 122 bp, Homo sapiens
  misc_feature (61)..(62): /note="This region represents a CpG dinucleotide"
  misc_feature (61)..(61): /note="Nucleotide may be methylated to form 5-methylcytosine"
tgaaggcgattaggcaaaatattttctttctataaaaatacaactcttcttacgtcaatgcgacttgaagaaaggagacattgtcagttttacaggctacaatagagcctattatctgattc

SEQ ID NO: 27323 - DNA, 122 bp, Homo sapiens
  misc_feature (61)..(62): /note="This region represents a CpG dinucleotide"
  misc_feature (61)..(61): /note="Nucleotide may be methylated to form 5-methylcytosine"
ccactgcgggcgcagcaccatatccattcatctgtcccactgcggaggcaacaccatatccgttcatccatcccgctgcgagagcagcaccctagccagtcattcgtcccactgcgggcgca

SEQ ID NO: 27324 - DNA, 122 bp, Homo sapiens
  misc_feature (61)..(62): /note="This region represents a CpG dinucleotide"
  misc_feature (61)..(61): /note="Nucleotide may be methylated to form 5-methylcytosine"
taggctaacaatttgtgttgttaaaagaaacacagttgtcccttagctgttaaggaaattcgtaattcaaaaatctgtatttttgcaggtcccagtgaaactttggtttgacgcagtgaatg

SEQ ID NO: 27325 - DNA, 122 bp, Homo sapiens
  misc_feature (61)..(62): /note="This region represents a CpG dinucleotide"
  misc_feature (61)..(61): /note="Nucleotide may be methylated to form 5-methylcytosine"
agaccttgtcctttgggtaacaaagcaagcacattctttctagaaataggacagcaaaggcgaaggaagagggaaaacagtaacaaataactaaagccatataaggagcggcccatgttcag

SEQ ID NO: 27326 - DNA, 122 bp, Homo sapiens
  misc_feature (61)..(62): /note="This region represents a CpG dinucleotide"
  misc_feature (61)..(61): /note="Nucleotide may be methylated to form 5-methylcytosine"
agcatgggtagcctgagaaagcttccaccttttgatgacagggcccaaccccagacttcacggcctgtcactctttgaggactctatagagggctccataagaaccagggctgctgagtgag

SEQ ID NO: 27327 - DNA, 122 bp, Homo sapiens
  misc_feature (61)..(62): /note="This region represents a CpG dinucleotide"
  misc_feature (61)..(61): /note="Nucleotide may be methylated to form 5-methylcytosine"
ggctcaggtgcggttgagtcaggggtgacataacttgctgctagtgttggacctgggtgacgggcaccagggtcccctggactattctctttccttcagtttgaaattttccactataaaaa

SEQ ID NO: 27328 - DNA, 122 bp, Homo sapiens
  misc_feature (61)..(62): /note="This region represents a CpG dinucleotide"
  misc_feature (61)..(61): /note="Nucleotide may be methylated to form 5-methylcytosine"
ctcaagggatcctcctgcttcagcctcccaggtagctggcagtataggcgtgcaccactacgcctggctgattttttatttttatttatttatttatttactttttgagacggagtcttgct

SEQ ID NO: 27329 - DNA, 122 bp, Homo sapiens
  misc_feature (61)..(62): /note="This region represents a CpG dinucleotide"
  misc_feature (61)..(61): /note="Nucleotide may be methylated to form 5-methylcytosine"
tcactctctagtcaactgcacttgctactaaactgtgattcactggctgttagtggtatccgcatattcaggatgcaacaccctctctagtcaactgctctttccactaaactgtgattcac

SEQ ID NO: 27330 - DNA, 122 bp, Homo sapiens
  misc_feature (61)..(62): /note="This region represents a CpG dinucleotide"
  misc_feature (61)..(61): /note="Nucleotide may be methylated to form 5-methylcytosine"
atgaggctctgccttgtaaggccaggccttgaaccttttaggagaaaggacatgggaaggcggaagcaggcagaggcttgtctcactggtgctccctaagcctgcaccctgtgccatactga

SEQ ID NO: 27331 - DNA, 122 bp, Homo sapiens
  misc_feature (61)..(62): /note="This region represents a CpG dinucleotide"
  misc_feature (61)..(61): /note="Nucleotide may be methylated to form 5-methylcytosine"
agaacttgctttgacagagctgttccagctcatttgtaataacatgcttagaaccttctgcgttcaagagcatgtcagaagggaatgcctggtcgttgtctccctgggaagcagcgtggagc

SEQ ID NO: 27332 - DNA, 122 bp, Homo sapiens
  misc_feature (61)..(62): /note="This region represents a CpG dinucleotide"
  misc_feature (61)..(61): /note="Nucleotide may be methylated to form 5-methylcytosine"
aaaaaagaatactaacacaagctgcctctaggcctcgtttgatctagacactactcctcccggtcaggtcaggctcaaatcatctctaggtgacctcaaatcttactggcagcaaggtcaga

SEQ ID NO: 27333 - DNA, 122 bp, Homo sapiens
  misc_feature (61)..(62): /note="This region represents a CpG dinucleotide"
  misc_feature (61)..(61): /note="Nucleotide may be methylated to form 5-methylcytosine"
ggggagttatttcaacagccctgggattgcaacattctgcatcagaagtggcgctaagcacgccagactgtcctaggtttccttattcttattctgttattgctgagctaaccagggtggtg

SEQ ID NO: 27334 - DNA, 122 bp, Homo sapiens
  misc_feature (61)..(62): /note="This region represents a CpG dinucleotide"
  misc_feature (61)..(61): /note="Nucleotide may be methylated to form 5-methylcytosine"
gagccccagcaccatatttggctctgcaggcaagattgatagattcttgctgtcaccagccgcactctgatggcagctttccaggcctcctcctcacccctcccccagccccactccacctt

SEQ ID NO: 27335 - DNA, 122 bp, Homo sapiens
  misc_feature (61)..(62): /note="This region represents a CpG dinucleotide"
  misc_feature (61)..(61): /note="Nucleotide may be methylated to form 5-methylcytosine"
aactcaagagtcctcccctgctcctaaaatagttataaaattaatgtgctgtactcaagtcgttactccacgtaaaagagtaaaagactcccatattaagcagagaagtccagcctcctctc

SEQ ID NO: 27336 - DNA, 122 bp, Homo sapiens
  misc_feature (61)..(62): /note="This region represents a CpG dinucleotide"
  misc_feature (61)..(61): /note="Nucleotide may be methylated to form 5-methylcytosine"
tcaataaataacttacagaaaaatgaaagccaggcacagcttatggaggaagtgccataacgagtagagatttacttaaagggtgaataatagctaggcaggcaaagaaaggagttgtcaga

SEQ ID NO: 27337 - DNA, 122 bp, Homo sapiens
  misc_feature (61)..(62): /note="This region represents a CpG dinucleotide"
  misc_feature (61)..(61): /note="Nucleotide may be methylated to form 5-methylcytosine"
aaggaaagaaactggcactttaatagtacctaccatgtaccagggactgcgtagtccccacggcagccctctgaagtcatgtgattggcccattgtgtagatgtagagcttaagactcagag

SEQ ID NO: 27338 - DNA, 122 bp, Homo sapiens
  misc_feature (61)..(62): /note="This region represents a CpG dinucleotide"
  misc_feature (61)..(61): /note="Nucleotide may be methylated to form 5-methylcytosine"
gcactgggaggggctgagcagaagccacagcggggcagaacaaaggcctggagactggagcgagctgcgttcttgggggtggggggtggggcggcagctggagagtgggggcttccccagcg

SEQ ID NO: 27339 - DNA, 122 bp, Homo sapiens
  misc_feature (61)..(62): /note="This region represents a CpG dinucleotide"
  misc_feature (61)..(61): /note="Nucleotide may be methylated to form 5-methylcytosine"
tcaaagccaaagatgttatacaacacctattatatgaaatgataaatacccttattgttacgattatctgccaattcaagtaggggttttctgttacttggtgctaaaagttccccatgata

SEQ ID NO: 27340 - DNA, 122 bp, Homo sapiens
  misc_feature (61)..(62): /note="This region represents a CpG dinucleotide"
  misc_feature (61)..(61): /note="Nucleotide may be methylated to form 5-methylcytosine"
aagtcctcttcccaaaagaactgcagtcaggtttccatgtcattttgtgaaaataccccccgccacacacacaccctcctttaccacacacacatacacacagacacgcaagcatccccttc

SEQ ID NO: 27341 - DNA, 122 bp, Homo sapiens
  misc_feature (61)..(62): /note="This region represents a CpG dinucleotide"
  misc_feature (61)..(61): /note="Nucleotide may be methylated to form 5-methylcytosine"
accgcctcccaggggctgtctgatcaccctgacctgccttccgcaagaattctgtgaggtcggtttagccagaatccctctgacccctgatgtctcctcttagtcattttccatccactgac

SEQ ID NO: 27342 - DNA, 122 bp, Homo sapiens
  misc_feature (61)..(62): /note="This region represents a CpG dinucleotide"
  misc_feature (61)..(61): /note="Nucleotide may be methylated to form 5-methylcytosine"
aagtaagaaatgttcacgtggaatagctgccattaatatgggtgacctcaaggttagtatcgctcagggaatgcctttcattgttctgtattgtttgtttcccttttgtgaaattctgtggc

SEQ ID NO: 27343 - DNA, 122 bp, Homo sapiens
  misc_feature (61)..(62): /note="This region represents a CpG dinucleotide"
  misc_feature (61)..(61): /note="Nucleotide may be methylated to form 5-methylcytosine"
tgctcaatcaactacaaatttggggattcccatgaccctccctgtattagttcatttccacgctgctgataaagacatatcatgctgataaagaacagcatggaaaagaactgagcccctga

SEQ ID NO: 27344 - DNA, 122 bp, Homo sapiens
  misc_feature (61)..(62): /note="This region represents a CpG dinucleotide"
  misc_feature (61)..(61): /note="Nucleotide may be methylated to form 5-methylcytosine"
gtgtaaaatgtttttgttccttgtctgtgaacacatttattttcatcagtctgttttcctcgtaaattggcttatcttggggtggagatttgaagaggcaataaacagtagtacaattaact

SEQ ID NO: 27345 - DNA, 122 bp, Homo sapiens
  misc_feature (61)..(62): /note="This region represents a CpG dinucleotide"
  misc_feature (61)..(61): /note="Nucleotide may be methylated to form 5-methylcytosine"
ttaaaaaacttaggctccaaagcagcagatgagtatgattgcagtagcttttgaaacggtcgtgttgggtgagtgtttatacagagatgtctggggcaggagagagaggcctgggggccacc

SEQ ID NO: 27346 - DNA, 122 bp, Homo sapiens
  misc_feature (61)..(62): /note="This region represents a CpG dinucleotide"
  misc_feature (61)..(61): /note="Nucleotide may be methylated to form 5-methylcytosine"
attctatgcagagcaaagcttccaaaaaggcatgctatgaattctgtcaatgtggaagatcgagcaaaaccagcttctctttgcagcactggcatgcaaccaacctgctcacctgcatcctt

SEQ ID NO: 27347 - DNA, 122 bp, Homo sapiens
  misc_feature (61)..(62): /note="This region represents a CpG dinucleotide"
  misc_feature (61)..(61): /note="Nucleotide may be methylated to form 5-methylcytosine"
caccacactgtcactgcctttgtaatcacttgctaatgggagcagcagcagcgaccgagacgtgcacttagccgctgtgtttacaggaggtccccgtggcccggatgcatgctttcctctgg

SEQ ID NO: 27348 - DNA, 122 bp, Homo sapiens
  misc_feature (61)..(62): /note="This region represents a CpG dinucleotide"
  misc_feature (61)..(61): /note="Nucleotide may be methylated to form 5-methylcytosine"
gatcttaactcacagattcagcacttggacagagctaggatttttgagctaatgtgtagtcggtatgggatttgcatttaaaaactatttacattaaagtgtgacccacatatgagaaaaga

SEQ ID NO: 27349 - DNA, 122 bp, Homo sapiens
  misc_feature (61)..(62): /note="This region represents a CpG dinucleotide"
  misc_feature (61)..(61): /note="Nucleotide may be methylated to form 5-methylcytosine"
agagcctcggcgctgctgcgttttgactggagatctgaacgctgcgttaggcccctttcccgtgagcagcagaagccagttctcctgccttaaccacgggaatcaccgccaggcagcgggcg

SEQ ID NO: 27350 - DNA, 122 bp, Homo sapiens
  misc_feature (61)..(62): /note="This region represents a CpG dinucleotide"
  misc_feature (61)..(61): /note="Nucleotide may be methylated to form 5-methylcytosine"
agcaggtctcagcctcattttacccagcccctattcaagatggagtcgctctggtttgaacgcctctgacggaaaccttccaaatgtcagagacaaggcaaagtagcttgggtcaccaggtg

SEQ ID NO: 27351 - DNA, 122 bp, Homo sapiens
  misc_feature (61)..(62): /note="This region represents a CpG dinucleotide"
  misc_feature (61)..(61): /note="Nucleotide may be methylated to form 5-methylcytosine"
gtcaactctgagtcagccaaacagctgaggtcattctctacttgtcaccaccgatgaggacggagagccaacaccaccagtcagtcacccaagctggaaatttaagcatcatcatttcttct

SEQ ID NO: 27352 - DNA, 122 bp, Homo sapiens
  misc_feature (61)..(62): /note="This region represents a CpG dinucleotide"
  misc_feature (61)..(61): /note="Nucleotide may be methylated to form 5-methylcytosine"
ctctgctgcttggtcccaccccagacccactaaaacaaaaactctgggggtggagccctgcggtctgtatttgaacaacctctccaggtgatttgatgcactccaaagtttgagaaccaagt

SEQ ID NO: 27353 - DNA, 122 bp, Homo sapiens
  misc_feature (61)..(62): /note="This region represents a CpG dinucleotide"
  misc_feature (61)..(61): /note="Nucleotide may be methylated to form 5-methylcytosine"
atctcttctgtttgccccctccaaaaaacaccctaccctctcctccctgccctgtgtccccgagtatagacctcatgcacaggtttcctggctctccagcttccagatgggtctgcccagca

SEQ ID NO: 27354 - DNA, 122 bp, Homo sapiens
  misc_feature (61)..(62): /note="This region represents a CpG dinucleotide"
  misc_feature (61)..(61): /note="Nucleotide may be methylated to form 5-methylcytosine"
tgcatgttggtgaagtgaattactcttcttgccatagagaaaatgggctggctaaagggacgtgtaaagcagagagaagacaagatcagggaaagggcacatttgggatcaaagtgatttga

SEQ ID NO: 27355 - DNA, 122 bp, Homo sapiens
  misc_feature (61)..(62): /note="This region represents a CpG dinucleotide"
  misc_feature (61)..(61): /note="Nucleotide may be methylated to form 5-methylcytosine"
ccagacccgtcctgctgacaaactcaccaggccctggtgtccccaaaaccagttctgtttcgggggttgaggaaaacactggaggcggcggcagttgtcatagaaggtgtaggtccaggcca

SEQ ID NO: 27356 - DNA, 122 bp, Homo sapiens
  misc_feature (61)..(62): /note="This region represents a CpG dinucleotide"
  misc_feature (61)..(61): /note="Nucleotide may be methylated to form 5-methylcytosine"
aaaaacaggtgttacaattttataggttcataaattttgtaatggccacattgttgatcgcggaagtgagattttgtttgattagacatactgttatcttgtagacaacatttgtatttgag

SEQ ID NO: 27357 - DNA, 122 bp, Homo sapiens
  misc_feature (61)..(62): /note="This region represents a CpG dinucleotide"
  misc_feature (61)..(61): /note="Nucleotide may be methylated to form 5-methylcytosine"
acgtggctgtttcctgaggacagagaaggaagctgcatccctgcctgtcctttagagtaacgcaggctgagactccaagtccagccctgtcaccaggaagccacaggaccctgggagagtca

SEQ ID NO: 27358 - DNA, 122 bp, Homo sapiens
  misc_feature (61)..(62): /note="This region represents a CpG dinucleotide"
  misc_feature (61)..(61): /note="Nucleotide may be methylated to form 5-methylcytosine"
cagcctctggaaagagtgctcagagacctccccactgatggctaggactccagggagcctcgaccctagggctgatcctcaagtaccccagtttcacacataccaaaccaaggttctctccc

SEQ ID NO: 27359 - DNA, 122 bp, Homo sapiens
  misc_feature (61)..(62): /note="This region represents a CpG dinucleotide"
  misc_feature (61)..(61): /note="Nucleotide may be methylated to form 5-methylcytosine"
aatgacaagcagggctactgtgctttatcattaaaaagtgcatttcccattacataccctcgccacctcttcaaccacaggcatccctctatcaccaaaaccgaagtgatctcagagagttg

SEQ ID NO: 27360 - DNA, 122 bp, Homo sapiens
  misc_feature (61)..(62): /note="This region represents a CpG dinucleotide"
  misc_feature (61)..(61): /note="Nucleotide may be methylated to form 5-methylcytosine"
ttccagctgtctgactttttatgtcagacaatgtgttaaatatgccctttccttatttaccgcacctctaaaagaataggcagctccattgtgagtgtgtctattattttaggaaattatag

SEQ ID NO: 27361 - DNA, 122 bp, Homo sapiens
  misc_feature (61)..(62): /note="This region represents a CpG dinucleotide"
  misc_feature (61)..(61): /note="Nucleotide may be methylated to form 5-methylcytosine"
ctcatgtagtcctcacagttcccctaacgaggaaggtaccattcttattcccattttacacggaagaaagccaagcccccatggttcaataatttgccagaattcacagagctggccatgga

SEQ ID NO: 27362 - DNA, 122 bp, Homo sapiens
  misc_feature (61)..(62): /note="This region represents a CpG dinucleotide"
  misc_feature (61)..(61): /note="Nucleotide may be methylated to form 5-methylcytosine"
gggatctagtacatcatattgccagcagggctcagcctgtgaccagcaaggtctgggctccgtctggggccagggtcaaggctcattccgtggccttgagcacagcctggtgtgtggctggg

SEQ ID NO: 27363 - DNA, 122 bp, Homo sapiens
  misc_feature (61)..(62): /note="This region represents a CpG dinucleotide"
  misc_feature (61)..(61): /note="Nucleotide may be methylated to form 5-methylcytosine"
ccaggttgacaacataacccaactaataccaacaacataaagtgcctgagttcaccagcccgctcagctcccagctgactgccccggagtcccgccctgttcaggcagaggcagagtttttt

SEQ ID NO: 27364 - DNA, 122 bp, Homo sapiens
  misc_feature (61)..(62): /note="This region represents a CpG dinucleotide"
  misc_feature (61)..(61): /note="Nucleotide may be methylated to form 5-methylcytosine"
ccactgaactacttgctgactgctatgtgacagaatgacatcacaccaggccttaagatacgcttgagatacaagggtaaagaagacacaaggcttgttttcaaggagcttataatcttatg

SEQ ID NO: 27365 - DNA, 122 bp, Homo sapiens
  misc_feature (61)..(62): /note="This region represents a CpG dinucleotide"
  misc_feature (61)..(61): /note="Nucleotide may be methylated to form 5-methylcytosine"
gcaccctgaagacactgggatggtgcccagggagggcacgccctgttcagggtggatttacggtcagttcccagtgaatgtccaggagagccaagtgctggtttttcactcaatgatcatgg

SEQ ID NO: 27366 - DNA, 122 bp, Homo sapiens
  misc_feature (61)..(62): /note="This region represents a CpG dinucleotide"
  misc_feature (61)..(61): /note="Nucleotide may be methylated to form 5-methylcytosine"
gctggctgcagtcattcgggcactgcctcacaccgcaatcctcgccagagtagccgtcctcgcacacacaccgcccatctaggcactggccgcggcctcggcagcccccggggcagctgcgc

SEQ ID NO: 27367 - DNA, 122 bp, Homo sapiens
  misc_feature (61)..(62): /note="This region represents a CpG dinucleotide"
  misc_feature (61)..(61): /note="Nucleotide may be methylated to form 5-methylcytosine"
gctcaggcagctgtaattctccaggacatcagataaaaggtaaaaaacagatgggagacgcgcctagacagggtattgaataccagcccgaggggcttgggtttcatccaaacagcaaggca

SEQ ID NO: 27368 - DNA, 122 bp, Homo sapiens
  misc_feature (61)..(62): /note="This region represents a CpG dinucleotide"
  misc_feature (61)..(61): /note="Nucleotide may be methylated to form 5-methylcytosine"
gctgggttctccaggagcctgtctgcagcctgtgcccacgaggacttgttcctagaagtacgtgaagggatactgtctgctttctcttcgggtcatgcatgcacagaggacatgccgcgccc

SEQ ID NO: 27369 - DNA, 122 bp, Homo sapiens
  misc_feature (61)..(62): /note="This region represents a CpG dinucleotide"
  misc_feature (61)..(61): /note="Nucleotide may be methylated to form 5-methylcytosine"
tcatgtgtctgtggaattgaaccaaagcattgtcccctggtctgaaaaatgcacccatctcgtggcaggagaagccttttcatattactatattcaacttccttcctttttttttcccctgc

SEQ ID NO: 27370 - DNA, 122 bp, Homo sapiens
  misc_feature (61)..(62): /note="This region represents a CpG dinucleotide"
  misc_feature (61)..(61): /note="Nucleotide may be methylated to form 5-methylcytosine"
aacatttgtcaccagaaatccactacttccctaacttgatcgacaacacttactgatgtacggatattgacacagtacaggtttaagtgagaggtaaagccagctggtcttctgggtcggtt

SEQ ID NO: 27371 - DNA, 122 bp, Homo sapiens
  misc_feature (61)..(62): /note="This region represents a CpG dinucleotide"
  misc_feature (61)..(61): /note="Nucleotide may be methylated to form 5-methylcytosine"
aatataagtaaaaataccagagcagaaaacacactgtaagataagcattgtttcatggaacgtctaagtcacacgtgcatgtgagtgtgtgtgctgagtcatgattaaaagtgtatttctca

SEQ ID NO: 27372 - DNA, 122 bp, Homo sapiens
  misc_feature (61)..(62): /note="This region represents a CpG dinucleotide"
  misc_feature (61)..(61): /note="Nucleotide may be methylated to form 5-methylcytosine"
agcaatccaacttttatttattgaacttctcctcatacaaggccttgggctgggtgttgacggatgggaaggttccactttctctactcagagaattcattgcgcccagctctgtgccaatt

SEQ ID NO: 27373 - DNA, 122 bp, Homo sapiens
  misc_feature (61)..(62): /note="This region represents a CpG dinucleotide"
  misc_feature (61)..(61): /note="Nucleotide may be methylated to form 5-methylcytosine"
ctacaatggctgagtcaggtatcccagggatctgtgacgagggagctggggcatgggtgtcggaccaaagacgcctaagtttgaatcccagctgtgagcttgggcaagctcctcaacctctc

SEQ ID NO: 27374 - DNA, 122 bp, Homo sapiens
  misc_feature (61)..(62): /note="This region represents a CpG dinucleotide"
  misc_feature (61)..(61): /note="Nucleotide may be methylated to form 5-methylcytosine"
tgagtatgtctgggaaacacaagagtcccagaagattgagtggcctgcagatacgcattacggggtgtacatttgtattgtggagaagaaaagattttgtgccactctcttcagcctccact

SEQ ID NO: 27375 - DNA, 122 bp, Homo sapiens
  misc_feature (61)..(62): /note="This region represents a CpG dinucleotide"
  misc_feature (61)..(61): /note="Nucleotide may be methylated to form 5-methylcytosine"
tttttttccaatatgaacaaaacacctcactggtgtcagatttaggattataccccaccccgcccccacaaaaaaagaaaaaaaaaaaaaaaaaaaaaaaaaacggggccactgactgtggc

SEQ ID NO: 27376 - DNA, 122 bp, Homo sapiens
  misc_feature (61)..(62): /note="This region represents a CpG dinucleotide"
  misc_feature (61)..(61): /note="Nucleotide may be methylated to form 5-methylcytosine"
acagtatttactttattgttgccctcactactgacaaatgccaaagtaatgtggcaaggacggaggaagagggtattcaatacacagcttcaacaccagtatttacgctgagaatactcacc

SEQ ID NO: 27377 - DNA, 122 bp, Homo sapiens
  misc_feature (61)..(62): /note="This region represents a CpG dinucleotide"
  misc_feature (61)..(61): /note="Nucleotide may be methylated to form 5-methylcytosine"
ctctaaatccctctgctttgccatgctacatctttgcattaaaggattttcactagtagccgtggtgatggtttattttaggcagtttcactaccagctatgctctctcttgtttctatgcc

SEQ ID NO: 27378 - DNA, 122 bp, Homo sapiens
  misc_feature (61)..(62): /note="This region represents a CpG dinucleotide"
  misc_feature (61)..(61): /note="Nucleotide may be methylated to form 5-methylcytosine"
cagtctaatgctgttccctgtttacccagatcagagtccgtggttcctattggaatcattcgctgtattcactccgagctccgacggccatcattctcggttgtattggctgtacaaaatgc

SEQ ID NO: 27379 - DNA, 122 bp, Homo sapiens
  misc_feature (61)..(62): /note="This region represents a CpG dinucleotide"
  misc_feature (61)..(61): /note="Nucleotide may be methylated to form 5-methylcytosine"
acttccacccagtgcttgcaatgcttgttctggggcacacctgagactgccccactgtgacgaagccattccccagctagccctgcccctagccattgagtcatcacagctgaggacaagtc

SEQ ID NO: 27380 - DNA, 122 bp, Homo sapiens
  misc_feature (61)..(62): /note="This region represents a CpG dinucleotide"
  misc_feature (61)..(61): /note="Nucleotide may be methylated to form 5-methylcytosine"
tatacacagtttgattggcactcctattgacactttatttggtttgtgacttgtttgtctcggtgcctttctattaatatattttttctatttaaactaccctctttttttcagtacagcac

SEQ ID NO: 27381 - DNA, 122 bp, Homo sapiens
  misc_feature (61)..(62): /note="This region represents a CpG dinucleotide"
  misc_feature (61)..(61): /note="Nucleotide may be methylated to form 5-methylcytosine"
agctttcccactggcccatgtctgaggccatcatctctgtggccagtgcacaggggaggacgctgcaccagtttaggaactgcactaaccacaaggagagtaagaagcaggagtgaaatggc

SEQ ID NO: 27382 - DNA, 122 bp, Homo sapiens
  misc_feature (61)..(62): /note="This region represents a CpG dinucleotide"
  misc_feature (61)..(61): /note="Nucleotide may be methylated to form 5-methylcytosine"
ggtattcatttctcataaaaggttgcagtatttcctggacacctgaattctatgtcttcacggcaaaaacaattcaaaatgtcccaaaacattatgcaggaaggagtttttaatttttttta

SEQ ID NO: 27383 - DNA, 122 bp, Homo sapiens
  misc_feature (61)..(62): /note="This region represents a CpG dinucleotide"
  misc_feature (61)..(61): /note="Nucleotide may be methylated to form 5-methylcytosine"
ttgtattttctgtagagacgggtttttgccatgttgcctaggttgctcaagcaatctgcccgtcttggcctcccaaggtgctggggtattacagacgtgagccaccgtgcttggcttgctat

SEQ ID NO: 27384 - DNA, 122 bp, Homo sapiens
  misc_feature (61)..(62): /note="This region represents a CpG dinucleotide"
  misc_feature (61)..(61): /note="Nucleotide may be methylated to form 5-methylcytosine"
agaaggaagctgaggtagagaaagtttaagtaacttgtccaaggttgagcatcttgtcaacgtcattttactactggcatgtgaaacaggtgagttatattttttagaatattaattctcat

SEQ ID NO: 27385 - DNA, 122 bp, Homo sapiens
  misc_feature (61)..(62): /note="This region represents a CpG dinucleotide"
  misc_feature (61)..(61): /note="Nucleotide may be methylated to form 5-methylcytosine"
ggagagtcatctgccacagtagaacagacttttctgtcaccctcctcaacagcagatggccgctctgcactcatccgtgtcatacatcattgctgagtgagacaccaccaaccactgtgcaa

SEQ ID NO: 27386 - DNA, 122 bp, Homo sapiens
  misc_feature (61)..(62): /note="This region represents a CpG dinucleotide"
  misc_feature (61)..(61): /note="Nucleotide may be methylated to form 5-methylcytosine"
gcgtcggcactcttcctctgtccacagagctggtaaagacagaattatgaactcttctggcgttgtcccagcccacttcttggagcctttatgagagaagaagtttggcaactcacctccca

SEQ ID NO: 27387 - DNA, 122 bp, Homo sapiens
  misc_feature (61)..(62): /note="This region represents a CpG dinucleotide"
  misc_feature (61)..(61): /note="Nucleotide may be methylated to form 5-methylcytosine"
gaagagaagcaatactattttcatgaaaaccaaacagcattaacaattttacaccattgacgttgtttacatggcaacttacaggaagtggcaatcctcaactgtttctgggtgagcaaaga

SEQ ID NO: 27388 - DNA, 122 bp, Homo sapiens
  misc_feature (61)..(62): /note="This region represents a CpG dinucleotide"
  misc_feature (61)..(61): /note="Nucleotide may be methylated to form 5-methylcytosine"
cgaacacgaagagatcactgggcgttttgaggaaaggaacgtcagagtgggtctctgacacggagtgagctgagtgttgcagcctgtctagtcagcagtaactgcttcccacaccacgtgac

SEQ ID NO: 27389 - DNA, 122 bp, Homo sapiens
  misc_feature (61)..(62): /note="This region represents a CpG dinucleotide"
  misc_feature (61)..(61): /note="Nucleotide may be methylated to form 5-methylcytosine"
ccaattcccggggcaggaaaagcccctcctagccccaggcgtccgggccagcaccctgatcgcactgctcggacagggcaccggggcacccagccccctcgatgcccagagtcctgggccag

SEQ ID NO: 27390 - DNA, 122 bp, Homo sapiens
  misc_feature (61)..(62): /note="This region represents a CpG dinucleotide"
  misc_feature (61)..(61): /note="Nucleotide may be methylated to form 5-methylcytosine"
cctgggcaacagagcgagactctgtctcaaaagaaacaaacaaaagaactggaggtggcccggcccctgcgtctaacagtcctgggccctccacaccagcacaggaactcaagcctgcagtc

SEQ ID NO: 27391 - DNA, 122 bp, Homo sapiens
  misc_feature (61)..(62): /note="This region represents a CpG dinucleotide"
  misc_feature (61)..(61): /note="Nucleotide may be methylated to form 5-methylcytosine"
aggaagccactcagatggccggccctgcacagggcctcatcctcctggcctccccgaggccgtgccctccatgccatgggaagacatggggcccaggacactcaccctaggccagcccagga

SEQ ID NO: 27392 - DNA, 122 bp, Homo sapiens
  misc_feature (61)..(62): /note="This region represents a CpG dinucleotide"
  misc_feature (61)..(61): /note="Nucleotide may be methylated to form 5-methylcytosine"
ttggaaaggaaagctttatttctcagaaagggtggcagcctccctcccgggtggccattccggcaggctaggaaacacagcctcaggccagaagccagaaaactgcactttgaagttcagag

SEQ ID NO: 27393 - DNA, 122 bp, Homo sapiens
  misc_feature (61)..(62): /note="This region represents a CpG dinucleotide"
  misc_feature (61)..(61): /note="Nucleotide may be methylated to form 5-methylcytosine"
taaactctcttctgagtttacaagtcaaatatataccattggattttgccacataaatgacgcactaggaccataaattcagcagagccaaaactggatatgttatttcttgccctggccac

SEQ ID NO: 27394 - DNA, 122 bp, Homo sapiens
  misc_feature (61)..(62): /note="This region represents a CpG dinucleotide"
  misc_feature (61)..(61): /note="Nucleotide may be methylated to form 5-methylcytosine"
ttcagagaaagctcaatgacctattaataacagaattaacatttgcaagtattttatttacgactgaaagtaactaggtgtgggtgcaatgtctcacacccataatcccagcatgttagagg

SEQ ID NO: 27395 - DNA, 122 bp, Homo sapiens
  misc_feature (61)..(62): /note="This region represents a CpG dinucleotide"
  misc_feature (61)..(61): /note="Nucleotide may be methylated to form 5-methylcytosine"
gactaaccctcatgtttgctaggtctgctgcctctccctcttggtggttcattccttctgcgttttgtgatcttttattaagagcttatcttcaatagaggctatttatctatgagaatgtg

SEQ ID NO: 27396 - DNA, 122 bp, Homo sapiens
  misc_feature (61)..(62): /note="This region represents a CpG dinucleotide"
  misc_feature (61)..(61): /note="Nucleotide may be methylated to form 5-methylcytosine"
tttccttttactgtccataaatgttatctgaccatgtggcagtcctggagtctttctgaacgtgttctggttctgggggctgcctgattcatcattgtttgatcagttaaactcttaaattt

SEQ ID NO: 27397 - DNA, 122 bp, Homo sapiens
  misc_feature (61)..(62): /note="This region represents a CpG dinucleotide"
  misc_feature (61)..(61): /note="Nucleotide may be methylated to form 5-methylcytosine"
acctttgagagtcccctctctttcctcttgatttcacttcatacctaggttcagcagaatcgccctgccctgtaacgctctcactcatcccttcctttccagtcccataacgattacctttt

SEQ ID NO: 27398 - DNA, 122 bp, Homo sapiens
  misc_feature (61)..(62): /note="This region represents a CpG dinucleotide"
  misc_feature (61)..(61): /note="Nucleotide may be methylated to form 5-methylcytosine"
gtatcttgtcaaaaagatctttgtgtaactgttttcccgtttgtgaaggcctcacctacacgcacattaagcacagaatgacaggcattgtgagaacctgggtcatttcatatgggttaacc

SEQ ID NO: 27399 - DNA, 122 bp, Homo sapiens
  misc_feature (61)..(62): /note="This region represents a CpG dinucleotide"
  misc_feature (61)..(61): /note="Nucleotide may be methylated to form 5-methylcytosine"
tttcatgtgccatgcccaaatggcagcttatttaaaaaaacagaaaattcttggaattaacggtcaaggatacgtgagagattagaaatcaacatttcacattaattcctgtgtaagaaaat

SEQ ID NO: 27400 - DNA, 122 bp, Homo sapiens
  misc_feature (61)..(62): /note="This region represents a CpG dinucleotide"
  misc_feature (61)..(61): /note="Nucleotide may be methylated to form 5-methylcytosine"
cgggagcctggctccctcccccgccctgggtcctgcggggagagcgtgtgcggggaactgcgctcgttgctatgcaacctccatcccgcgcccgccgcaccgcgcctcccgggacggaagcg

SEQ ID NO: 27401 - DNA, 122 bp, Homo sapiens
  misc_feature (61)..(62): /note="This region represents a CpG dinucleotide"
  misc_feature (61)..(61): /note="Nucleotide may be methylated to form 5-methylcytosine"
cagaacaatagtgacagccttgtcatccggcaacagtcttccctaaaaccattcctaaaacgaaacaaagctacttcagaccaacagcgttgaacaagggaaaagaacagataaaacacagt

SEQ ID NO: 27402 - DNA, 122 bp, Homo sapiens
  misc_feature (61)..(62): /note="This region represents a CpG dinucleotide"
  misc_feature (61)..(61): /note="Nucleotide may be methylated to form 5-methylcytosine"
cagggaagaaggaactcattacctcttaaagtggcctatctcattttctgactattggaacgctgatcttcctgtaacaagcgaatttttttttccttatagttctggctcactgtctgagg

SEQ ID NO: 27403 - DNA, 122 bp, Homo sapiens
  misc_feature (61)..(62): /note="This region represents a CpG dinucleotide"
  misc_feature (61)..(61): /note="Nucleotide may be methylated to form 5-methylcytosine"
ctctaaataagattagcaaaacgataaattaacaggagaaaaatagagagtttattaacacgtgcagcacacatcacacaggagaaacctcagtgatgagtaactcaaagtttcaagagttt

SEQ ID NO: 27404 - DNA, 122 bp, Homo sapiens
  misc_feature (61)..(62): /note="This region represents a CpG dinucleotide"
  misc_feature (61)..(61): /note="Nucleotide may be methylated to form 5-methylcytosine"
tccccataggcaggagaatacagactcatgccagggtacttggcttgtctggcgtgcttacgtagtaatagccagtgcaaatatgcatgtggctgcctggtggctatatctgtgagtgtggt

SEQ ID NO: 27405 - DNA, 122 bp, Homo sapiens
  misc_feature (61)..(62): /note="This region represents a CpG dinucleotide"
  misc_feature (61)..(61): /note="Nucleotide may be methylated to form 5-methylcytosine"
atagattaaatggtataggtctttcagttttctcttcatttctgacaactgaactgctctcgccttgaacctgttttggcagataaacctctcataatgaaggcccccgctgtgcttgcacc

SEQ ID NO: 27406 - DNA, 122 bp, Homo sapiens
  misc_feature (61)..(62): /note="This region represents a CpG dinucleotide"
  misc_feature (61)..(61): /note="Nucleotide may be methylated to form 5-methylcytosine"
ctagggtgtattttctatggctacataacaaattaccccagacagcggcttaaaactacacgtgtttattatgtcatagttctacaggttagaaatctgcaggttcatctggggtccctagc

SEQ ID NO: 27407 - DNA, 122 bp, Homo sapiens
  misc_feature (61)..(62): /note="This region represents a CpG dinucleotide"
  misc_feature (61)..(61): /note="Nucleotide may be methylated to form 5-methylcytosine"
gatcaatcagtgaattgatttttctccctgatttaagtccttcctttatacaacaccaagcgtctccacttctcttctagcattacatctctcttttcttatcagtcttcattttctccttc

SEQ ID NO: 27408 - DNA, 122 bp, Homo sapiens
  misc_feature (61)..(62): /note="This region represents a CpG dinucleotide"
  misc_feature (61)..(61): /note="Nucleotide may be methylated to form 5-methylcytosine"
tatgcaatcccactgcatatgaccatggcagtagaacaagttcaattactacactggatgcgttaagtgtgctttcctagcagaaagcaccagggtggagtcaacagttcacatgctaatac

SEQ ID NO: 27409 - DNA, 122 bp, Homo sapiens
  misc_feature (61)..(62): /note="This region represents a CpG dinucleotide"
  misc_feature (61)..(61): /note="Nucleotide may be methylated to form 5-methylcytosine"
tcgtctaccttacttgatccactgtggtggactggatgcaaatgagtccctgttcctcaccgagtctccctgcacctgtgccacctacagtgaccttgcagctccccacaccccctgaatcg

SEQ ID NO: 27410 - DNA, 122 bp, Homo sapiens
  misc_feature (61)..(62): /note="This region represents a CpG dinucleotide"
  misc_feature (61)..(61): /note="Nucleotide may be methylated to form 5-methylcytosine"
tctcggtaagtctaggtggctgccttagcttgtcagtgacacacgaggcaggcgtgctgacgtaaggctgagacgtattcgattccaccctctgcggctctcttcctcctctccgatgcaga

SEQ ID NO: 27411 - DNA, 122 bp, Homo sapiens
  misc_feature (61)..(62): /note="This region represents a CpG dinucleotide"
  misc_feature (61)..(61): /note="Nucleotide may be methylated to form 5-methylcytosine"
tgtaatagcagttcagactaagacagccccatattactcactctccatctgagagtgagccgagcacatagcattcttggcatcagtagcacaagggtatgaagggaaatgcttgaagataa

SEQ ID NO: 27412 - DNA, 122 bp, Homo sapiens
  misc_feature (61)..(62): /note="This region represents a CpG dinucleotide"
  misc_feature (61)..(61): /note="Nucleotide may be methylated to form 5-methylcytosine"
cctggcttccagtgctggtcttgctagctgccctgccaggtggacggcttcattagtaagcgtgaaaaattgggagtgccaccatcaggccaggctaaagcaatttggatggctgggaaaag

SEQ ID NO: 27413 - DNA, 122 bp, Homo sapiens
  misc_feature (61)..(62): /note="This region represents a CpG dinucleotide"
  misc_feature (61)..(61): /note="Nucleotide may be methylated to form 5-methylcytosine"
ttctcattttcattttgaaattaccaacacaatcacagacttcttgtttacagacactcacgtaacacttgcccaacaatgagcaaccctgtgcttagtcattcagtgattaaactttaaat

SEQ ID NO: 27414 - DNA, 122 bp, Homo sapiens
  misc_feature (61)..(62): /note="This region represents a CpG dinucleotide"
  misc_feature (61)..(61): /note="Nucleotide may be methylated to form 5-methylcytosine"
taacaagaaaaggtcagcctccctcgctcgacccttagcccggtttttagaattcttcctcggaggcaggggctcaactcacactctcacgcatactggccacgggagagaagcgtgggagg

SEQ ID NO: 27415 - DNA, 122 bp, Homo sapiens
  misc_feature (61)..(62): /note="This region represents a CpG dinucleotide"
  misc_feature (61)..(61): /note="Nucleotide may be methylated to form 5-methylcytosine"
gcttaatctgctcaaagccctcagtgatcacttcattaatttattccagctgcttctagccgctgcagacatatgagtttgcaactttggccttctgtgtcagtgcttcttaaacttgaaca

SEQ ID NO: 27416 - DNA, 122 bp, Homo sapiens
  misc_feature (61)..(62): /note="This region represents a CpG dinucleotide"
  misc_feature (61)..(61): /note="Nucleotide may be methylated to form 5-methylcytosine"
gccgtgatcagctcccactgcactccagcctgggccacagagagagacttcctatctccacgccaagtgccttaggtcacgcctataatcccagcagtttggcaggcagagtgggaggatca

SEQ ID NO: 27417 - DNA, 122 bp, Homo sapiens
  misc_feature (61)..(62): /note="This region represents a CpG dinucleotide"
  misc_feature (61)..(61): /note="Nucleotide may be methylated to form 5-methylcytosine"
cctagtaaaaagcctggtacacacatagttgataccccttatgctgccgagtgaataaatcgaaacttgaaaccattacaaatctagttcctctgtggtatgcgcttttagtgtcctggagg

SEQ ID NO: 27418 - DNA, 122 bp, Homo sapiens
  misc_feature (61)..(62): /note="This region represents a CpG dinucleotide"
  misc_feature (61)..(61): /note="Nucleotide may be methylated to form 5-methylcytosine"
caccactagagggtaattgacattttggacttccccagtagaaagcaattaagcaccctccgtagatcaaaggttagtcttaccaccacatgagtaaacaagctagctaggtaacttcccca

SEQ ID NO: 27419 - DNA, 122 bp, Homo sapiens
  misc_feature (61)..(62): /note="This region represents a CpG dinucleotide"
  misc_feature (61)..(61): /note="Nucleotide may be methylated to form 5-methylcytosine"
gagatgggagggtgagagccccaggggcccaggcagagcctggtctgcaggtggggtggccgtgggtgtggaagaaacaaagaaaaacagaaggcagagggctctctctccatgggtgaaat

SEQ ID NO: 27420 - DNA, 122 bp, Homo sapiens
  misc_feature (61)..(62): /note="This region represents a CpG dinucleotide"
  misc_feature (61)..(61): /note="Nucleotide may be methylated to form 5-methylcytosine"
gtaataggtggtgcagccaggatgaatgtctgggcagctgccagggcccacattcttaggcgctacatggaactgcgcagtacatggaggcttggagtggatcaatcagaagggcttcctga

SEQ ID NO: 27421 - DNA, 122 bp, Homo sapiens
  misc_feature (61)..(62): /note="This region represents a CpG dinucleotide"
  misc_feature (61)..(61): /note="Nucleotide may be methylated to form 5-methylcytosine"
gatgccaaagctgaagcaggatactgaatgcaaacaggccctgaggccatctgatgtgctcgttcccatagccccgctgtgtgtgtgtgcgcgtgtgtgtgtgtgtgtgtgtgtgtgtgtgt

SEQ ID NO: 27422 - DNA, 122 bp, Homo sapiens
  misc_feature (61)..(62): /note="This region represents a CpG dinucleotide"
  misc_feature (61)..(61): /note="Nucleotide may be methylated to form 5-methylcytosine"
cagtgtggtgctgcttccactgttgtagggtgggaccccaggtggcttgttctaattaagcgtcaacatgaatgatctgttctgtgctgtggttgagtcagaaagggaaagtcatctggcca

SEQ ID NO: 27423 - DNA, 122 bp, Homo sapiens
  misc_feature (61)..(62): /note="This region represents a CpG dinucleotide"
  misc_feature (61)..(61): /note="Nucleotide may be methylated to form 5-methylcytosine"
tgtagttttcttaacaatattggccaatattattttaaagaacatctctgaatgttttcacgtaagaaaagagactgtcccagaaatcctggacccagttatcctgaagtttcctctgattc

SEQ ID NO: 27424 - DNA, 122 bp, Homo sapiens
  misc_feature (61)..(62): /note="This region represents a CpG dinucleotide"
  misc_feature (61)..(61): /note="Nucleotide may be methylated to form 5-methylcytosine"
aggaggtgatggctgtcggtgacgtcatagagacgggctctgaagggcgtgtccctgctccgttccgagggggcgcgactgtgtcttgcttgacctcgtgagggggcggagcctcaggggcg

SEQ ID NO: 27425 - DNA, 122 bp, Homo sapiens
  misc_feature (61)..(62): /note="This region represents a CpG dinucleotide"
  misc_feature (61)..(61): /note="Nucleotide may be methylated to form 5-methylcytosine"
cctcatcatcttcttcatcgtcatcatcagcatcctattaataacaccaacaggctggggcgcagtggctcacgcctgtaatcccagcactttgggaggccgaggcgggcgaatcacctgag

SEQ ID NO: 27426 - DNA, 122 bp, Homo sapiens
  misc_feature (61)..(62): /note="This region represents a CpG dinucleotide"
  misc_feature (61)..(61): /note="Nucleotide may be methylated to form 5-methylcytosine"
cagttacacatctctttccgccctgccttccccgaggtgctggctttcacttgtcagtgacggtcattctgaggctgagatgtaagagatacgaagtacctgtccttaccccacccctaatg

SEQ ID NO: 27427 - DNA, 122 bp, Homo sapiens
  misc_feature (61)..(62): /note="This region represents a CpG dinucleotide"
  misc_feature (61)..(61): /note="Nucleotide may be methylated to form 5-methylcytosine"
agttattcttaatcaaattagcccttgaaacaatccggaagctcttgagtctgcagctggcgtgctgtccatccacactccccagatctacagggggcaattcacacacagcccttgcagcg

SEQ ID NO: 27428 - DNA, 122 bp, Homo sapiens
  misc_feature (61)..(62): /note="This region represents a CpG dinucleotide"
  misc_feature (61)..(61): /note="Nucleotide may be methylated to form 5-methylcytosine"
agtttaataccagcctggggcaacatggtgaaactccgtgtctacaaaaaattagctaggcgtgatggcgtgcacctatacctcctactcgggaatcatctgagccggggaagtcaaagtca

SEQ ID NO: 27429 - DNA, 122 bp, Homo sapiens
  misc_feature (61)..(62): /note="This region represents a CpG dinucleotide"
  misc_feature (61)..(61): /note="Nucleotide may be methylated to form 5-methylcytosine"
tgcagccaggaatcaagacaacacaaatgagttctggaagtgattcatgctaggactgtacgctaaggcaatggggcagaaagcctgggagtgcagtttttttgtttttgttttttgttttt

SEQ ID NO: 27430 - DNA, 122 bp, Homo sapiens
  misc_feature (61)..(62): /note="This region represents a CpG dinucleotide"
  misc_feature (61)..(61): /note="Nucleotide may be methylated to form 5-methylcytosine"
tcgtagagggaggatgacacgggtccgtacgcccagtcggtgaacttcctggacaggctccggagccgcttctccttgatctcacgactgaggatgtacttcaggatctgggacaggaggag

SEQ ID NO: 27431 - DNA, 122 bp, Homo sapiens
  misc_feature (61)..(62): /note="This region represents a CpG dinucleotide"
  misc_feature (61)..(61): /note="Nucleotide may be methylated to form 5-methylcytosine"
gtgagcccaggctggcccagctggctgtgtgggaagggcagaagctgccctggcctttggcgtcagccacgtgcactttgtcagactgccatctgctgagcacttgttagcaattccctctg

SEQ ID NO: 27432 - DNA, 122 bp, Homo sapiens
  misc_feature (61)..(62): /note="This region represents a CpG dinucleotide"
  misc_feature (61)..(61): /note="Nucleotide may be methylated to form 5-methylcytosine"
ggatttcatctgtgtactacagctcttttcctgaaatgcgtaggtggctcttaaaagagccgttgggttactagaagaaacttctaactgaatttactttttcttgggtgccgctttcttgg

SEQ ID NO: 27433 - DNA, 122 bp, Homo sapiens
  misc_feature (61)..(62): /note="This region represents a CpG dinucleotide"
  misc_feature (61)..(61): /note="Nucleotide may be methylated to form 5-methylcytosine"
gccatgatgaaggcggctttcgggacttgtaattacagagccatgggtggcctctgtcctcgcagccgggaaggtcagcacaggtcctgggtgctgccagccctgagctccactcctgcaaa

SEQ ID NO: 27434 - DNA, 122 bp, Homo sapiens
  misc_feature (61)..(62): /note="This region represents a CpG dinucleotide"
  misc_feature (61)..(61): /note="Nucleotide may be methylated to form 5-methylcytosine"
aatggtggacgctcatgactgtgtatgtgtttttgtatatctgtctgtctgggccggtctcgggggacccctaagggtgaccgtaaggcgaaaaacgtttgaaaaccacggccctgagttaa

SEQ ID NO: 27435 - DNA, 122 bp, Homo sapiens
  misc_feature (61)..(62): /note="This region represents a CpG dinucleotide"
  misc_feature (61)..(61): /note="Nucleotide may be methylated to form 5-methylcytosine"
tcctgacacacacaggattgtacatttcctggagccattcttcctacaacaccacatttacgaaaagcagctaacacatgagtgagcttaagggcttcagctgtgatcctactaatcctgtc

SEQ ID NO: 27436 - DNA, 122 bp, Homo sapiens
  misc_feature (61)..(62): /note="This region represents a CpG dinucleotide"
  misc_feature (61)..(61): /note="Nucleotide may be methylated to form 5-methylcytosine"
gaaggggatcttgacaaacagtggagtcataagtcaggctccttgaaacacttttatgagcgccttaatgagggagatgagctgtcatcaggaactcatcccatccttcctgaccacaggaa

SEQ ID NO: 27437 - DNA, 122 bp, Homo sapiens
  misc_feature (61)..(62): /note="This region represents a CpG dinucleotide"
  misc_feature (61)..(61): /note="Nucleotide may be methylated to form 5-methylcytosine"
taaagaaatgtatctgtaacactaacagcattattatagtatttattatccagagtaaggcggttataggttttatgttaaagataccttttgaaagtaaggcttctggcccttaactttgt

SEQ ID NO: 27438 - DNA, 122 bp, Homo sapiens
  misc_feature (61)..(62): /note="This region represents a CpG dinucleotide"
  misc_feature (61)..(61): /note="Nucleotide may be methylated to form 5-methylcytosine"
ctcacatgaccaagagagggatcatcgctcaacgtctcataaggtcactaatcccattcacgaaggctccaccctcatgacctaataattacctcccaaaggcccttcatccaaatactatc

SEQ ID NO: 27439 - DNA, 122 bp, Homo sapiens
  misc_feature (61)..(62): /note="This region represents a CpG dinucleotide"
  misc_feature (61)..(61): /note="Nucleotide may be methylated to form 5-methylcytosine"
atatgtactgacttccaagatacattagataacatgcagctaagtactttcatgtcatctcgtttaatatacttaataccctgtggaacagagagtattgctgctaatttgcacataacaaa

SEQ ID NO: 27440 - DNA, 122 bp, Homo sapiens
  misc_feature (61)..(62): /note="This region represents a CpG dinucleotide"
  misc_feature (61)..(61): /note="Nucleotide may be methylated to form 5-methylcytosine"
tgcttatatttgaacaaatagcaaaagctagaaagcctcaacatgctgggagaaagtttccgtcccttgggtgctttacatgttatccctgtggcaatgaatcatgctaggatttcaaccaa

SEQ ID NO: 27441 - DNA, 122 bp, Homo sapiens
  misc_feature (61)..(62): /note="This region represents a CpG dinucleotide"
  misc_feature (61)..(61): /note="Nucleotide may be methylated to form 5-methylcytosine"
atgacacattatccataaaaagaaaaacaaacataatccacaacaatgggtgccagaagacgatgcatcagtaagggttcagttgcagaaaacagaactcactgtagctattttaaacagaa

SEQ ID NO: 27442 - DNA, 122 bp, Homo sapiens
  misc_feature (61)..(62): /note="This region represents a CpG dinucleotide"
  misc_feature (61)..(61): /note="Nucleotide may be methylated to form 5-methylcytosine"
aggaggaagctgagtagttctgctttctgttaatattgcagcaagagcccatgagtgggccgatcacttcctgattcttgttcttgttctaatcataccttaaaaggcttttttaatgtcca

SEQ ID NO: 27443 - DNA, 122 bp, Homo sapiens
  misc_feature (61)..(62): /note="This region represents a CpG dinucleotide"
  misc_feature (61)..(61): /note="Nucleotide may be methylated to form 5-methylcytosine"
ccgtgaaagaattatttttgtgtttctaaaactatggttcccaataaaagtgactctcagcgagcctcaatgctcccagtgctattcatgggcagctctctgggctcaggaagagccagtaa

SEQ ID NO: 27444 - DNA, 122 bp, Homo sapiens
  misc_feature (61)..(62): /note="This region represents a CpG dinucleotide"
  misc_feature (61)..(61): /note="Nucleotide may be methylated to form 5-methylcytosine"
ggtgatccgcccacctcggcctcccaaagtgctgggattacaggcgtgagccaccacacccggccaggtctttgttttcttgagtatattataatgttgctttagagtgcctggtaatccca

SEQ ID NO: 27445 - DNA, 122 bp, Homo sapiens
  misc_feature (61)..(62): /note="This region represents a CpG dinucleotide"
  misc_feature (61)..(61): /note="Nucleotide may be methylated to form 5-methylcytosine"
atcatctgtgtgccgtcaaaaaccctgccattgctctcctcgcctgtatgcttttgttcacgtggacctttggctctctgcttgcctgagtcctgccctgttgctccagacctaccctgatt

SEQ ID NO: 27446 - DNA, 122 bp, Homo sapiens
  misc_feature (61)..(62): /note="This region represents a CpG dinucleotide"
  misc_feature (61)..(61): /note="Nucleotide may be methylated to form 5-methylcytosine"
catttctcgacagctggctggatctcatctcgttttaacagggctgggaaatcttatcagcggcaccaggaaagcttagagagttaaaaaataagctctgtgaagccttgactaactgaaaa

SEQ ID NO: 27447 - DNA, 122 bp, Homo sapiens
  misc_feature (61)..(62): /note="This region represents a CpG dinucleotide"
  misc_feature (61)..(61): /note="Nucleotide may be methylated to form 5-methylcytosine"
actgtgcctggcctgtcaatgcttgtctttttagctcctaacagtacctggctcactgcacgtgttcaccaatgtttgttgagctgcacttgtcaaagtgaaggtggtgctatgaagtcagt

SEQ ID NO: 27448 - DNA, 122 bp, Homo sapiens
  misc_feature (61)..(62): /note="This region represents a CpG dinucleotide"
  misc_feature (61)..(61): /note="Nucleotide may be methylated to form 5-methylcytosine"
attgaaaaagcatgactttcacttacgtaaaaggaagctttacaaaattccccccaaatacggcatctttgctgggtttcactgtttacaagagcatcacccagtggcagaaagggcaactg

SEQ ID NO: 27449 - DNA, 122 bp, Homo sapiens
  misc_feature (61)..(62): /note="This region represents a CpG dinucleotide"
  misc_feature (61)..(61): /note="Nucleotide may be methylated to form 5-methylcytosine"
gcaaacaaatctggccatgatgaattactggttgtctctccaatgcaccaggctctcttacgctccttagtatttgcatgtgctgtttcttcctggattgctaccccacccttcatctgctt

SEQ ID NO: 27450 - DNA, 122 bp, Homo sapiens
  misc_feature (61)..(62): /note="This region represents a CpG dinucleotide"
  misc_feature (61)..(61): /note="Nucleotide may be methylated to form 5-methylcytosine"
ggatctgtataaagagcgctgtgggagtcttttgccctccgctctagctctatcttcctccggaccccgaagcttaagaattatccgcctcactctcttttttagaaataggagggaaaggt

SEQ ID NO: 27451 - DNA, 122 bp, Homo sapiens
  misc_feature (61)..(62): /note="This region represents a CpG dinucleotide"
  misc_feature (61)..(61): /note="Nucleotide may be methylated to form 5-methylcytosine"
gaaatgctgggcagaagtgaaagaaacacactgcagctgaggcatgatgctgttgggttacgcctacataaatctggtggctgcagcaatggctaggttcaaaactggactgacaaggtgtg

SEQ ID NO: 27452 - DNA, 122 bp, Homo sapiens
  misc_feature (61)..(62): /note="This region represents a CpG dinucleotide"
  misc_feature (61)..(61): /note="Nucleotide may be methylated to form 5-methylcytosine"
gattacaggcgtgaaccaccgcgcccggccttaacatccttatacatgggttaccagcatcgcgacgaccttctgcaaatatttttatagggtaaataactgaatgaagtcgctgggcgcat

SEQ ID NO: 27453 - DNA, 122 bp, Homo sapiens
  misc_feature (61)..(62): /note="This region represents a CpG dinucleotide"
  misc_feature (61)..(61): /note="Nucleotide may be methylated to form 5-methylcytosine"
aattagagtgttttcagcagccttaagcgttgtcatgaaatcagccaaaaacctgtgatgcgtatggctgggtgtacaactacggatcttgtagtgactatcgtatatgctggcataccaca

SEQ ID NO: 27454 - DNA, 122 bp, Homo sapiens
  misc_feature (61)..(62): /note="This region represents a CpG dinucleotide"
  misc_feature (61)..(61): /note="Nucleotide may be methylated to form 5-methylcytosine"
tctccatctgggctagcatttagtcttcagcagtctacaagaatgatttcagaaaggaaacgacgacatgagaagaaacagaaactgtggatcatgatggctcataaaataggaatgactcg

SEQ ID NO: 27455 - DNA, 122 bp, Homo sapiens
  misc_feature (61)..(62): /note="This region represents a CpG dinucleotide"
  misc_feature (61)..(61): /note="Nucleotide may be methylated to form 5-methylcytosine"
accttttatcatgtccctgtttcctgtccactcactctagttgtttcagtctgaatgtatcgcccatttctgccagggtactaatgaatacatgggtacagaattcagaggagaagctcagg

SEQ ID NO: 27456 - DNA, 122 bp, Homo sapiens
  misc_feature (61)..(62): /note="This region represents a CpG dinucleotide"
  misc_feature (61)..(61): /note="Nucleotide may be methylated to form 5-methylcytosine"
catacggcttttcactgagcagcttcacttctaggaatttcttccacagatatccttacacgtccccaaagtcgactgcactgggacagtaaccaaagcacaatgtgtaggtaacaaaagtc

SEQ ID NO: 27457 - DNA, 122 bp, Homo sapiens
  misc_feature (61)..(62): /note="This region represents a CpG dinucleotide"
  misc_feature (61)..(61): /note="Nucleotide may be methylated to form 5-methylcytosine"
gcaacacattcttgctccttaaccaaacaggtcggcaacttctttcaagaattcagctaacgtttatgagcttccattgtggacaaaatccaattctaggtgtttcagggcttgggaggttg

SEQ ID NO: 27458 - DNA, 122 bp, Homo sapiens
  misc_feature (61)..(62): /note="This region represents a CpG dinucleotide"
  misc_feature (61)..(61): /note="Nucleotide may be methylated to form 5-methylcytosine"
ggcacacagatcatttagttaagaactttggtgtcatttaatagaagacaaaacaaaccacgagaggcatgagaggaatgatctatgcaatgactaagatacctgctagcagatgtttagct

SEQ ID NO: 27459 - DNA, 122 bp, Homo sapiens
  misc_feature (61)..(62): /note="This region represents a CpG dinucleotide"
  misc_feature (61)..(61): /note="Nucleotide may be methylated to form 5-methylcytosine"
caaactcctgacctcaggtggtccacccacctcggcctcccaaagtgctgagattacagacgtgaggcactgcgcctggcacattcctttaattaactgtgaatttaatactttttaaatac

SEQ ID NO: 27460 - DNA, 122 bp, Homo sapiens
  misc_feature (61)..(62): /note="This region represents a CpG dinucleotide"
  misc_feature (61)..(61): /note="Nucleotide may be methylated to form 5-methylcytosine"
tcaatatatacaggtttggagttcagtatgtcttctagaactactggcggcagcttctttcgttgacgtgggctacaatggttgctaaaacctgcgtgccagaagccagaggtggggaggcg

SEQ ID NO: 27461 - DNA, 122 bp, Homo sapiens
  misc_feature (61)..(62): /note="This region represents a CpG dinucleotide"
  misc_feature (61)..(61): /note="Nucleotide may be methylated to form 5-methylcytosine"
ccactccattggcctcaaatctttatctcttccggtatttcttatctcagtgtttgtttacgtcagaaacataaagctcatgctagacatattgcatttcttacttcctgacttaaaacctt

SEQ ID NO: 27462 - DNA, 122 bp, Homo sapiens
  misc_feature (61)..(62): /note="This region represents a CpG dinucleotide"
  misc_feature (61)..(61): /note="Nucleotide may be methylated to form 5-methylcytosine"
ggctttggctagcatggcatccaatgcccccaaggccagttctgcccccacacaggcctacgtacagctagactcctgctgccttgagccacccactgtgccctgggccacctgtgaagctc

SEQ ID NO: 27463 - DNA, 122 bp, Homo sapiens
  misc_feature (61)..(62): /note="This region represents a CpG dinucleotide"
  misc_feature (61)..(61): /note="Nucleotide may be methylated to form 5-methylcytosine"
aaccaggttagaattcaggcctgtttgattttgaaggctgtgcagtttttcctttatccccgattgagtcatcttatttcacattttgtattggaatggagacgagagtctattttctacca

SEQ ID NO: 27464 - DNA, 122 bp, Homo sapiens
  misc_feature (61)..(62): /note="This region represents a CpG dinucleotide"
  misc_feature (61)..(61): /note="Nucleotide may be methylated to form 5-methylcytosine"
acggaaagacaaattctccatgatttcacttctatgtgaaattttaaaatgttggacttacggaagtaacgagtaaaatgatggttatcagccttcctttcatttgtgttcattttgttttt

SEQ ID NO: 27465 - DNA, 122 bp, Homo sapiens
  misc_feature (61)..(62): /note="This region represents a CpG dinucleotide"
  misc_feature (61)..(61): /note="Nucleotide may be methylated to form 5-methylcytosine"
ttatgacacaagtccaacatgagtcttgtgaattgcatgctaaatctaatatttgagcagcgtaacaactttgggcctagagatgttatcagtggagtttctttatgtttcctaactgtccc

SEQ ID NO: 27466 - DNA, 122 bp, Homo sapiens
  misc_feature (61)..(62): /note="This region represents a CpG dinucleotide"
  misc_feature (61)..(61): /note="Nucleotide may be methylated to form 5-methylcytosine"
ataataatacaacctgggcaacatggccaaacctcttctctacaaatacaaaaaattagccgggcgtggtagcgcactcctgtagtcccagctacttgggaggctgaagtgggaggattgct

SEQ ID NO: 27467 - DNA, 122 bp, Homo sapiens
  misc_feature (61)..(62): /note="This region represents a CpG dinucleotide"
  misc_feature (61)..(61): /note="Nucleotide may be methylated to form 5-methylcytosine"
ggataactcagcttgacctgattcacagcttcttaaagcactgtgtataaacacaactttcgtattgatttttctatacatccaaatttccccttgatctttcaaccacagtagttctgaaa

SEQ ID NO: 27468 - DNA, 122 bp, Homo sapiens
  misc_feature (61)..(62): /note="This region represents a CpG dinucleotide"
  misc_feature (61)..(61): /note="Nucleotide may be methylated to form 5-methylcytosine"
tgtgggtgtggcagacattctggcctgtccagttcgaagacaatgacccatgattgaccacggcactcttgcctcagtctctaagtcactgtctcctggggccccctcattcatgccttttc

SEQ ID NO: 27469 - DNA, 122 bp, Homo sapiens
  misc_feature (61)..(62): /note="This region represents a CpG dinucleotide"
  misc_feature (61)..(61): /note="Nucleotide may be methylated to form 5-methylcytosine"
ggtccttcagtgtctggagcactggcctgaggcttcagagacttgcctgatgcctggcctcgctcagaccccgggcacctgggaggtcgtgcctccttgaaatggccactcgccaggctgct

SEQ ID NO: 27470 - DNA, 122 bp, Homo sapiens
  misc_feature (61)..(62): /note="This region represents a CpG dinucleotide"
  misc_feature (61)..(61): /note="Nucleotide may be methylated to form 5-methylcytosine"
tgcttctgagtaggttaccatgaggcatgtgggtgtgcaggagggaagagctcccatctccggggatcttccatgacattctccatgacagcaggccaacaggaagtggcagaaccttcatg

SEQ ID NO: 27471 - DNA, 122 bp, Homo sapiens
  misc_feature (61)..(62): /note="This region represents a CpG dinucleotide"
  misc_feature (61)..(61): /note="Nucleotide may be methylated to form 5-methylcytosine"
ggtaactgtgtgatatcctgggtccactccttcttgttatgttcaaacccaggagaggcacgactggcagagccatccaaaccaggttctccatgtggacagtctgagtatggttatacctt

SEQ ID NO: 27472 - DNA, 122 bp, Homo sapiens
  misc_feature (61)..(62): /note="This region represents a CpG dinucleotide"
  misc_feature (61)..(61): /note="Nucleotide may be methylated to form 5-methylcytosine"
tgtgtgtgtgtgtctctgtgtgtgagagagcgagcgagcgtgtatgttctcattaggggacgatctatgatttgacagcctcactgctgctgctcctgctgctgcttctgcttctgccgcgg

SEQ ID NO: 27473 - DNA, 122 bp, Homo sapiens
  misc_feature (61)..(62): /note="This region represents a CpG dinucleotide"
  misc_feature (61)..(61): /note="Nucleotide may be methylated to form 5-methylcytosine"
ggcttcagctgaaagtgtctctccatccttatctttcatcaacatctaggtcaatggttccgtagcagatgctcttagatggctctgggtaatgatagatgaacaaattgaacaaattaatt

SEQ ID NO: 27474 - DNA, 122 bp, Homo sapiens
  misc_feature (61)..(62): /note="This region represents a CpG dinucleotide"
  misc_feature (61)..(61): /note="Nucleotide may be methylated to form 5-methylcytosine"
ggcctcgtgatccacccgcctcagctcccaaagggctgggattacaggtgtgagccaccacgcctggctgaaactccctcttggtacttgtgtccgaggccccctcagtcaggaccttgagt

SEQ ID NO: 27475 - DNA, 122 bp, Homo sapiens
  misc_feature (61)..(62): /note="This region represents a CpG dinucleotide"
  misc_feature (61)..(61): /note="Nucleotide may be methylated to form 5-methylcytosine"
tgtcttccagagcagggtcaggctggtctctgcagtttcagaaacctgaaggtccttgggcgtgtccaactctgggaggagaacagagagatgaatgctcttcaggctgcaagacagggctg

SEQ ID NO: 27476 - DNA, 122 bp, Homo sapiens
  misc_feature (61)..(62): /note="This region represents a CpG dinucleotide"
  misc_feature (61)..(61): /note="Nucleotide may be methylated to form 5-methylcytosine"
ccatcagatttcacaacccctcatcaaggagtcactttggacccgagaaaagcaagtgcccgcgtcagcagaaaaggaacgaggagcgaggccgccagatcgacgggaaacaggcggagaga

SEQ ID NO: 27477 - DNA, 122 bp, Homo sapiens
  misc_feature (61)..(62): /note="This region represents a CpG dinucleotide"
  misc_feature (61)..(61): /note="Nucleotide may be methylated to form 5-methylcytosine"
aacttttatctatttttagagatgtggtcttgatctgttgcacagtctggagtgcaatgacgcgagcatagctcactgcagcgtccaaactcctggcctcaagcaatcccgccccagccttc

SEQ ID NO: 27478 - DNA, 122 bp, Homo sapiens
  misc_feature (61)..(62): /note="This region represents a CpG dinucleotide"
  misc_feature (61)..(61): /note="Nucleotide may be methylated to form 5-methylcytosine"
aaagtgaaagctagagtgggtgtgttggttgttcactttccctgccgctgcccagcatcacgagagagtatcatactacatatccctatcctggggagaggtccaaattcaaaattcgaact

SEQ ID NO: 27479 - DNA, 122 bp, Homo sapiens
  misc_feature (61)..(62): /note="This region represents a CpG dinucleotide"
  misc_feature (61)..(61): /note="Nucleotide may be methylated to form 5-methylcytosine"
agggtcaggcagagaggaatgctggggtgggtgagcttctattttatatggggtaatctgcggaaattgctcggataagatgccatcagaacagagacctgaaggaagtgaaaagtcatgca

SEQ ID NO: 27480 - DNA, 122 bp, Homo sapiens
  misc_feature (61)..(62): /note="This region represents a CpG dinucleotide"
  misc_feature (61)..(61): /note="Nucleotide may be methylated to form 5-methylcytosine"
aaacttttcaggagcctaagatctaatcaacttgatcaactcttatggacaacaggcagacgtggttcctgttgtcatagggctgctcagctagagagaagacagacaatgagctacccaac

SEQ ID NO: 27481 - DNA, 122 bp, Homo sapiens
  misc_feature (61)..(62): /note="This region represents a CpG dinucleotide"
  misc_feature (61)..(61): /note="Nucleotide may be methylated to form 5-methylcytosine"
gatggcattgtctaccaccccaccaaaacatatgaaacttacatctagtttaatttttcacgttttgtgataatgtgtatgcaaggtactatttgtaacaaaattgacttgtcaatggatgg

SEQ ID NO: 27482 - DNA, 122 bp, Homo sapiens
  misc_feature (61)..(62): /note="This region represents a CpG dinucleotide"
  misc_feature (61)..(61): /note="Nucleotide may be methylated to form 5-methylcytosine"
ggcggctggcaccgggtgggttctagacccaaggtttgtctgcagaaggggaccagtagacggggtggattcgaggtggggacatgggacgcagcggtcggagccgcctggaggggtacccg

SEQ ID NO: 27483 - DNA, 122 bp, Homo sapiens
  misc_feature (61)..(62): /note="This region represents a CpG dinucleotide"
  misc_feature (61)..(61): /note="Nucleotide may be methylated to form 5-methylcytosine"
tgggattacaggtgtgagccaccgcacccagccttaataaggacttatgaacagaagccacgtctccagccatggtggatcccagcaccatcccccagagccagggattacatacagtaggg

SEQ ID NO: 27484 - DNA, 122 bp, Homo sapiens
  misc_feature (61)..(62): /note="This region represents a CpG dinucleotide"
  misc_feature (61)..(61): /note="Nucleotide may be methylated to form 5-methylcytosine"
gtgaccgtggaagctggggtttcatcacagcaatccaccaagtttcatgtttctattttccgttgtcaaagagatttttaaaatatcaatatgcagagacagaaacaaaatagaacaaaaac

SEQ ID NO: 27485 - DNA, 122 bp, Homo sapiens
  misc_feature (61)..(62): /note="This region represents a CpG dinucleotide"
  misc_feature (61)..(61): /note="Nucleotide may be methylated to form 5-methylcytosine"
cgctcagtcagcagaatgtgagcatggacttggccacgttcatgaagctgcggacggatgcggtgctggtatggcgagcgggaggaggggcgtgtggaggaggggcccgtggaggaggggcg

SEQ ID NO: 27486 - DNA, 122 bp, Homo sapiens
  misc_feature (61)..(62): /note="This region represents a CpG dinucleotide"
  misc_feature (61)..(61): /note="Nucleotide may be methylated to form 5-methylcytosine"
cctgcccacccatcaccctttccatctgtctcagctccccctgtctcaagagaggttgtgcgcataaaaacaaaccagaagacaccgaagaaaaggaaagaaaagcattaacaaccttctgc

SEQ ID NO: 27487 - DNA, 122 bp, Homo sapiens
  misc_feature (61)..(62): /note="This region represents a CpG dinucleotide"
  misc_feature (61)..(61): /note="Nucleotide may be methylated to form 5-methylcytosine"
tgggtgcagtggctcatgcctgtaatcccagcacttcgggaggctgaggcaggtggatcacgaggtcaaagatcgagaccatcctgtcccacatggtgaaaccatgtctctactgaaaatac

SEQ ID NO: 27488 - DNA, 122 bp, Homo sapiens
  misc_feature (61)..(62): /note="This region represents a CpG dinucleotide"
  misc_feature (61)..(61): /note="Nucleotide may be methylated to form 5-methylcytosine"
ggacccaggaaacaaagcttgtttccttccccttccagtactgtactgtcaccacccacccgaaaccctgtcttaagagacagtggatttgacttaaaggagaccgtctagagctgcttgtg

SEQ ID NO: 27489 - DNA, 122 bp, Homo sapiens
  misc_feature (61)..(62): /note="This region represents a CpG dinucleotide"
  misc_feature (61)..(61): /note="Nucleotide may be methylated to form 5-methylcytosine"
gcgaaactgtcaaaaagaaaagaaaaaagaaaaaaggatgattaatttctgttatcttctcgaaggacaatactgtcatgtggcacatgtttgaacagttggggctaatgcacagaaaaatt

SEQ ID NO: 27490 - DNA, 122 bp, Homo sapiens
  misc_feature (61)..(62): /note="This region represents a CpG dinucleotide"
  misc_feature (61)..(61): /note="Nucleotide may be methylated to form 5-methylcytosine"
ggccttttatgcagtgactgtgcccaccgaccacacctgctggccacgcctactgctaaacgcagcccaaacagtgactcagcttccaccaatccaatcagcatccgttcctccatgggagg

SEQ ID NO: 27491 - DNA, 122 bp, Homo sapiens
  misc_feature (61)..(62): /note="This region represents a CpG dinucleotide"
  misc_feature (61)..(61): /note="Nucleotide may be methylated to form 5-methylcytosine"
agtcacggaaacacaaatactctatgattccacttatatagtgtatagtcatcacattcacggggacatgaaaacatgggccgcccagtcctgaaaacatggccacacccctctcccccatc

SEQ ID NO: 27492 - DNA, 122 bp, Homo sapiens
  misc_feature (61)..(62): /note="This region represents a CpG dinucleotide"
  misc_feature (61)..(61): /note="Nucleotide may be methylated to form 5-methylcytosine"
ggaagtctgagcgtggtgagctttcaggcgctgatggggccatctgtcctgagcattctccgtcagcttggccagcccaggccgtcccttggatggcagagcctggcccccgccccacccat

SEQ ID NO: 27493 - DNA, 122 bp, Homo sapiens
  misc_feature (61)..(62): /note="This region represents a CpG dinucleotide"
  misc_feature (61)..(61): /note="Nucleotide may be methylated to form 5-methylcytosine"
atgggggcttcaaatatcagcccccagtcagaagctgcaaccccagtgctctgctcagagcggctgtgatccagctccgacacccacggggtgaagtcatggggattaactgacttaactgt

SEQ ID NO: 27494 - DNA, 122 bp, Homo sapiens
  misc_feature (61)..(62): /note="This region represents a CpG dinucleotide"
  misc_feature (61)..(61): /note="Nucleotide may be methylated to form 5-methylcytosine"
cacaggatgcctcctggactgcactttagtaacactagactagggtgtcctcaggacaaccgcggctgctcaccagagctcacgcgcttcctgtcactttcactttggactgtgctgatgag

SEQ ID NO: 27495 - DNA, 122 bp, Homo sapiens
  misc_feature (61)..(62): /note="This region represents a CpG dinucleotide"
  misc_feature (61)..(61): /note="Nucleotide may be methylated to form 5-methylcytosine"
atttgtgaagaagccgtgacatttgacaaggccgccagagtgcctcttcctgagcatccccgcaagggagctgctttgtggccgacacgacgttccggagcccaggctgctgcagaccctgg

SEQ ID NO: 27496 - DNA, 122 bp, Homo sapiens
  misc_feature (61)..(62): /note="This region represents a CpG dinucleotide"
  misc_feature (61)..(61): /note="Nucleotide may be methylated to form 5-methylcytosine"
gtttacagtgatgtaactttcccaaagtttatatgtagccttaaagggtttagtgcagagcggattgcaaatgagtaactgccaagaagaaagaaagagggtgatccatccctcccagttag

SEQ ID NO: 27497 - DNA, 122 bp, Homo sapiens
  misc_feature (61)..(62): /note="This region represents a CpG dinucleotide"
  misc_feature (61)..(61): /note="Nucleotide may be methylated to form 5-methylcytosine"
tgaactgaatcacacagctcggtattgtctgaaacagttaagaacttctagcacaagcatcgcactttcctcagctcatatttcacattttctccattcttctctgaaaggatcctggacct

SEQ ID NO: 27498 - DNA, 122 bp, Homo sapiens
  misc_feature (61)..(62): /note="This region represents a CpG dinucleotide"
  misc_feature (61)..(61): /note="Nucleotide may be methylated to form 5-methylcytosine"
aatatcaatataatagtatggcatagaccttacagtaatagtgccgttacagccaaaactcgcaaatcaattgaggtttattcagtaaaggtgaggaatttcagagaaagatcacaaaagga

SEQ ID NO: 27499 - DNA, 122 bp, Homo sapiens
  misc_feature (61)..(62): /note="This region represents a CpG dinucleotide"
  misc_feature (61)..(61): /note="Nucleotide may be methylated to form 5-methylcytosine"
gtaagtgcactctatgatgttcccacaatggcaaaatcaccgatgacacatttcttagaacgtatccctgtcattaagcgacacataactctctatatatcacactaggatcactgaaagct

SEQ ID NO: 27500 - DNA, 122 bp, Homo sapiens
  misc_feature (61)..(62): /note="This region represents a CpG dinucleotide"
  misc_feature (61)..(61): /note="Nucleotide may be methylated to form 5-methylcytosine"
gttaagtgaatgtctgtttcattaattgttaaacttacataggctgggtgtgggggctcacgcctataatcccagcactttgggaggctgaggtgggcagatcacttgaggccaggatttca

SEQ ID NO: 27501 - DNA, 122 bp, Homo sapiens
  misc_feature (61)..(62): /note="This region represents a CpG dinucleotide"
  misc_feature (61)..(61): /note="Nucleotide may be methylated to form 5-methylcytosine"
catgcttctgggtggtctggcccccgcgcctgcctccggccctcctgttcctcacacccacgcatagttaaggtccattatgcacccgactctgtccaggcagggagctgccagggacagtc

SEQ ID NO: 27502 - DNA, 122 bp, Homo sapiens
  misc_feature (61)..(62): /note="This region represents a CpG dinucleotide"
  misc_feature (61)..(61): /note="Nucleotide may be methylated to form 5-methylcytosine"
gaggccgttttctgggctaagcagcgacggcgctaggcgactccgcttgtccttcgtttccgctgtcagctcagcaggtgacttattcccagtgctgctcttctcacagacacaaaaccaac

SEQ ID NO: 27503 - DNA, 122 bp, Homo sapiens
  misc_feature (61)..(62): /note="This region represents a CpG dinucleotide"
  misc_feature (61)..(61): /note="Nucleotide may be methylated to form 5-methylcytosine"
gtagcaatcctggtatgagtagtcattgcctgatgagtaactttgctctgcatggtcattcggtgagaggttccttctatcttgttgccctgctgtcacgtaggacactgccatcatttact

SEQ ID NO: 27504 - DNA, 122 bp, Homo sapiens
  misc_feature (61)..(62): /note="This region represents a CpG dinucleotide"
  misc_feature (61)..(61): /note="Nucleotide may be methylated to form 5-methylcytosine"
agagccgtaagactcctcacactgtgacctggccacatcctacatacatgtcagcttgcacgccatctacttaactgtcatgcacttgatagcaaatgagcttttgccctttctgctgcctt

SEQ ID NO: 27505 - DNA, 122 bp, Homo sapiens
  misc_feature (61)..(62): /note="This region represents a CpG dinucleotide"
  misc_feature (61)..(61): /note="Nucleotide may be methylated to form 5-methylcytosine"
agcttacctcatggacttgtcattaggcccaaatcagataatataggtgaaagtgctttgcgtaatgtcaagaaccctgccagtgaaaatcatagtgcctccaaggagctacttaagtttct

SEQ ID NO: 27506 - DNA, 122 bp, Homo sapiens
  misc_feature (61)..(62): /note="This region represents a CpG dinucleotide"
  misc_feature (61)..(61): /note="Nucleotide may be methylated to form 5-methylcytosine"
caccaaagaaaaaaaaaacccaaatatcataagttcacttttgatagtcatgataacaaccgtaccactgtacagttgtttttatcttttctcatctcattttatcctctcagctctgggat

SEQ ID NO: 27507 - DNA, 122 bp, Homo sapiens
  misc_feature (61)..(62): /note="This region represents a CpG dinucleotide"
  misc_feature (61)..(61): /note="Nucleotide may be methylated to form 5-methylcytosine"
agttttacctgtatattcggtggaagatttcaggtgagcagaagttctgggaggattaagcgtcgagggagatcttgagaatgaacacagttgaaaatgaaatcagtccagttgtaagtaat

SEQ ID NO: 27508 - DNA, 122 bp, Homo sapiens
  misc_feature (61)..(62): /note="This region represents a CpG dinucleotide"
  misc_feature (61)..(61): /note="Nucleotide may be methylated to form 5-methylcytosine"
actacgtccgagacagcgattttggggagcacacagggaggggacttcatctgggaggaacgcattattaggctgctgtgacaggtgtgtgggcgtggaccatctctgtacctttgtatatg

SEQ ID NO: 27509 - DNA, 122 bp, Homo sapiens
  misc_feature (61)..(62): /note="This region represents a CpG dinucleotide"
  misc_feature (61)..(61): /note="Nucleotide may be methylated to form 5-methylcytosine"
agtaccttgcgtattgcacacctcaataaatatctccagagtaaaggaatgaatgaccctcgtggtcacagcaacgaatcttaaaagaagaaaccaatatattttaaagtcatatttatata

SEQ ID NO: 27510 - DNA, 122 bp, Homo sapiens
  misc_feature (61)..(62): /note="This region represents a CpG dinucleotide"
  misc_feature (61)..(61): /note="Nucleotide may be methylated to form 5-methylcytosine"
tgaatgtgttccccttttatgagaaatgtgcactctagtgctaagtgcttggaagtactgcggaggacactgcaggaaagggtggaggtagacatgaagaacaatttcaatctttcagttgt

SEQ ID NO: 27511 - DNA, 122 bp, Homo sapiens
  misc_feature (61)..(62): /note="This region represents a CpG dinucleotide"
  misc_feature (61)..(61): /note="Nucleotide may be methylated to form 5-methylcytosine"
atgctcctttgtaatgagctcctttgtaatgagctttgtaatgagctcctttgtaatgagcgtggtatcttgagtggaaagtagatggaactttttcatttttgtcattcctctcatcccag

SEQ ID NO: 27512 - DNA, 122 bp, Homo sapiens
  misc_feature (61)..(62): /note="This region represents a CpG dinucleotide"
  misc_feature (61)..(61): /note="Nucleotide may be methylated to form 5-methylcytosine"
tttccatcattcagccttattaaaatacaccccttttaagccagaatcttttgagaatggcgtttgtgtgtggaccagccctacatttgataatctacctgtcattctggtagatatttaca

SEQ ID NO: 27513 - DNA, 122 bp, Homo sapiens
  misc_feature (61)..(62): /note="This region represents a CpG dinucleotide"
  misc_feature (61)..(61): /note="Nucleotide may be methylated to form 5-methylcytosine"
agtcatataattgcttagatagcatttaatgagaaagttagcattgttctcatatatacacgtaatatagtgtatttcatagatttaaatagtcaaggaggaaaaactttctctactctctt

SEQ ID NO: 27514 - DNA, 122 bp, Homo sapiens
  misc_feature (61)..(62): /note="This region represents a CpG dinucleotide"
  misc_feature (61)..(61): /note="Nucleotide may be methylated to form 5-methylcytosine"
tttaagtgtacaaagaacaagccacaaaatgcaaatgtttccacatccctgtgtctctgacggccaggctgaccacgacagcctgtgacccatttctcaggtgaagaaactgaggcacggag

SEQ ID NO: 27515 - DNA, 122 bp, Homo sapiens
  misc_feature (61)..(62): /note="This region represents a CpG dinucleotide"
  misc_feature (61)..(61): /note="Nucleotide may be methylated to form 5-methylcytosine"
cgggaacaccggcccccgggccactgcggagcagaacggatgctcgtcctggcatctccccgtttttgtctcttgccgacttgttcggtatcttggcttcacacactagaaagctcacaata

SEQ ID NO: 27516 - DNA, 122 bp, Homo sapiens
  misc_feature (61)..(62): /note="This region represents a CpG dinucleotide"
  misc_feature (61)..(61): /note="Nucleotide may be methylated to form 5-methylcytosine"
agaaaggttaatttgtgatgagtgatgggtggacagcaggcccggagtcagggagtctggcgaggtagtctgtgtaatttgaaggattgctgggaagggtaaggaattacctcattagcctt

SEQ ID NO: 27517 - DNA, 122 bp, Homo sapiens
  misc_feature (61)..(62): /note="This region represents a CpG dinucleotide"
  misc_feature (61)..(61): /note="Nucleotide may be methylated to form 5-methylcytosine"
cctagatgtggcaatagtttgctggtttctgttcagttcctgtgttgtagtcatcccaaacgtaatgccttcgtatactgaggtacagattgcctcatgggaacataaagtactggaaacta

SEQ ID NO: 27518 - DNA, 122 bp, Homo sapiens
  misc_feature (61)..(62): /note="This region represents a CpG dinucleotide"
  misc_feature (61)..(61): /note="Nucleotide may be methylated to form 5-methylcytosine"
aagagatgtcatgtgtaaaaatttcaggtacccagtgcctcactaaatgttagtagactccgaataatactcaacttatgcaaccctacttagctttcctggtgatgagcagagttaacttc

SEQ ID NO: 27519 - DNA, 122 bp, Homo sapiens
  misc_feature (61)..(62): /note="This region represents a CpG dinucleotide"
  misc_feature (61)..(61): /note="Nucleotide may be methylated to form 5-methylcytosine"
ctgccaaaatctgaatgtatatcctcttgattttccttaaatttatctctgtggatatatcgtagcctgatttgattaattagtcatgtggcttgaccattgttcatatgggcatttctgta

SEQ ID NO: 27520 - DNA, 122 bp, Homo sapiens
  misc_feature (61)..(62): /note="This region represents a CpG dinucleotide"
  misc_feature (61)..(61): /note="Nucleotide may be methylated to form 5-methylcytosine"
tcgtttacacaatatggatcctggtggagctttgagggctttattaataatagcatctgacggtttattgaatatgtggtgcccaattactggatttgacagtaaaaggtatatattaatga

SEQ ID NO: 27521 - DNA, 122 bp, Homo sapiens
  misc_feature (61)..(62): /note="This region represents a CpG dinucleotide"
  misc_feature (61)..(61): /note="Nucleotide may be methylated to form 5-methylcytosine"
atgatcatgttgtagtttaacagaagacatagcaggcgtaatttcctatttaaaaggacacgaagaaggttctatagtatatcacatggcaatgaagttacataaccagggctccttgtgtt

SEQ ID NO: 27522 - DNA, 122 bp, Homo sapiens
  misc_feature (61)..(62): /note="This region represents a CpG dinucleotide"
  misc_feature (61)..(61): /note="Nucleotide may be methylated to form 5-methylcytosine"
agtgcccagcttccctggttctgtcctacacttattagtgattgtacttggggaacagcacgccttagctcagacagcctcataggagagctggccagaagccatatttagacgactcctca

SEQ ID NO: 27523 - DNA, 122 bp, Homo sapiens
  misc_feature (61)..(62): /note="This region represents a CpG dinucleotide"
  misc_feature (61)..(61): /note="Nucleotide may be methylated to form 5-methylcytosine"
tattttcttaggctattgttaaatgaattatagctaagcagtgaaaacaaaacatttattcgggtatggttttatatttaggagtgaatcaagttactagtgactcaactgtaagaattatt

SEQ ID NO: 27524 - DNA, 122 bp, Homo sapiens
  misc_feature (61)..(62): /note="This region represents a CpG dinucleotide"
  misc_feature (61)..(61): /note="Nucleotide may be methylated to form 5-methylcytosine"
tggaatggagcagcctgtatggcaaggacacaccagtgatgagtcagaagccaggggtcacgttacagcgagagccctccagcaatcagctgtggtcagggatcaaagccatggcctcccca

SEQ ID NO: 27525 - DNA, 122 bp, Homo sapiens
  misc_feature (61)..(62): /note="This region represents a CpG dinucleotide"
  misc_feature (61)..(61): /note="Nucleotide may be methylated to form 5-methylcytosine"
aaataatgtatgttcccaaaatagcagtctgtgatcccacagtaatctctgtcttatcaccgaggctggcataactttttagcagctggcctggctgtctttctgttcagttccatcttctc

SEQ ID NO: 27526 - DNA, 122 bp, Homo sapiens
  misc_feature (61)..(62): /note="This region represents a CpG dinucleotide"
  misc_feature (61)..(61): /note="Nucleotide may be methylated to form 5-methylcytosine"
ggggtggtggggggtggaatctataaaggacattatcgggacatcggtgaactttgaatacggactgcacattagagagtgaatttaatcattgtgtaggtcagttaagagaatgctcttgt

SEQ ID NO: 27527 - DNA, 122 bp, Homo sapiens
  misc_feature (61)..(62): /note="This region represents a CpG dinucleotide"
  misc_feature (61)..(61): /note="Nucleotide may be methylated to form 5-methylcytosine"
tgtacaccctaagggaatgcaaggcatggcccagatccttcaggatgaagcatccagttacgtaagcattgttttagttttaaaacatgctgttaattaccatccctctatacttatttata

SEQ ID NO: 27528 - DNA, 122 bp, Homo sapiens
  misc_feature (61)..(62): /note="This region represents a CpG dinucleotide"
  misc_feature (61)..(61): /note="Nucleotide may be methylated to form 5-methylcytosine"
ggaattttgcatagggcactgctaacttgttgggttgatggcaatctctttgacagacagcgtatttttcttgaatagaggccaggcttgttaatgttttcccttagtaaaacagaaggagg

SEQ ID NO: 27529 - DNA, 122 bp, Homo sapiens
  misc_feature (61)..(62): /note="This region represents a CpG dinucleotide"
  misc_feature (61)..(61): /note="Nucleotide may be methylated to form 5-methylcytosine"
gaagcatagccaagccttgggcgtgtgtgtgcactgcacacccacacatgcatatgtacacgtgacagacctgctgggctgaaccactgagccttagagctcagagctatcaggaccttaga

SEQ ID NO: 27530 - DNA, 122 bp, Homo sapiens
  misc_feature (61)..(62): /note="This region represents a CpG dinucleotide"
  misc_feature (61)..(61): /note="Nucleotide may be methylated to form 5-methylcytosine"
ctgaacagttgagggaagctgaactactgcaatgactgggtatcttctaactcttaagaccggtcatgcaacttaggctggagaactccatttcaggggaggtcagtgactcacactgaagc

SEQ ID NO: 27531 - DNA, 122 bp, Homo sapiens
  misc_feature (61)..(62): /note="This region represents a CpG dinucleotide"
  misc_feature (61)..(61): /note="Nucleotide may be methylated to form 5-methylcytosine"
tccccagaaattgtgatttaactggcctcagggtgcatcctgggcatcaagattctagagcgtggtagagtttgaagaccgctagtctaacaagtctgctcccagttgcttgctgattctct

SEQ ID NO: 27532 - DNA, 122 bp, Homo sapiens
  misc_feature (61)..(62): /note="This region represents a CpG dinucleotide"
  misc_feature (61)..(61): /note="Nucleotide may be methylated to form 5-methylcytosine"
accctagctgagtgtgaatgtagacagcaatctgtgatcacatcacaacctttccctgagcgtcttaccatccttgctctggagtgaaagggctaataggaaaggaaaagtctaacaaagaa

SEQ ID NO: 27533 - DNA, 122 bp, Homo sapiens
  misc_feature (61)..(62): /note="This region represents a CpG dinucleotide"
  misc_feature (61)..(61): /note="Nucleotide may be methylated to form 5-methylcytosine"
tccacccaaatactgaaaatcataagcaatgactgccattaaattatggatgactctgcccgccagttgtttgcaagcagagtaaatagaccatcagggacagggtaaagtgaaacttaata

SEQ ID NO: 27534 - DNA, 122 bp, Homo sapiens
  misc_feature (61)..(62): /note="This region represents a CpG dinucleotide"
  misc_feature (61)..(61): /note="Nucleotide may be methylated to form 5-methylcytosine"
ccaacaccattaatcattcggaaagttcaaaataaaaccacaaaatgtagcactgtacaccgattggaacagcttaaattaaaaaatgctgatgacactaagtgctgtgggaatgctgagaa

SEQ ID NO: 27535 - DNA, 122 bp, Homo sapiens
  misc_feature (61)..(62): /note="This region represents a CpG dinucleotide"
  misc_feature (61)..(61): /note="Nucleotide may be methylated to form 5-methylcytosine"
agccagccgtgactctgcccctccctctgaagaagagaactttatagaagggaaatcaggcgacaaagtcaaggaaagaggtgatagatttagaagaccttgaagggaaaatgaatccattg

SEQ ID NO: 27536 - DNA, 122 bp, Homo sapiens
  misc_feature (61)..(62): /note="This region represents a CpG dinucleotide"
  misc_feature (61)..(61): /note="Nucleotide may be methylated to form 5-methylcytosine"
gtgggaggaaaccggtgcccgacccagaggacgaatgctggtgaggctgcaggtttggtgcggggacaggagggctggcttggacaagctggtctgagctgcttgtgagccagatgttgaga

SEQ ID NO: 27537 - DNA, 122 bp, Homo sapiens
  misc_feature (61)..(62): /note="This region represents a CpG dinucleotide"
  misc_feature (61)..(61): /note="Nucleotide may be methylated to form 5-methylcytosine"
gtgaaactgtgttaccagaagcactttcagggcagctgtacttgctgcatatacatgagacgtctatagaatgatataaaacacactgccaaaaatattggttgcctgtggggaggggatct

SEQ ID NO: 27538 - DNA, 122 bp, Homo sapiens
  misc_feature (61)..(62): /note="This region represents a CpG dinucleotide"
  misc_feature (61)..(61): /note="Nucleotide may be methylated to form 5-methylcytosine"
aggacaaggagttttccagagaagaaggaccttcgaggcagaggacacattagatccagacggtcttcaccaactgtgaggatactactctgcccagcccaagatgattgagtcactcctac

SEQ ID NO: 27539 - DNA, 122 bp, Homo sapiens
  misc_feature (61)..(62): /note="This region represents a CpG dinucleotide"
  misc_feature (61)..(61): /note="Nucleotide may be methylated to form 5-methylcytosine"
tcccaacatatatgaccttttgtggttccctcccacattggctctggcttggccatgtgacgcttggtctagtagggcattagcaagtatgacacatgcatttgggatttgcttgcttggaa

SEQ ID NO: 27540 - DNA, 122 bp, Homo sapiens
  misc_feature (61)..(62): /note="This region represents a CpG dinucleotide"
  misc_feature (61)..(61): /note="Nucleotide may be methylated to form 5-methylcytosine"
gcctctggggactctatgccgagaagtttaccttccaacccagccaagagatgaatcagacgcaaagtgactttatgagaaacacctctggctagagggttaactcagggctttgtattaat

SEQ ID NO: 27541 - DNA, 122 bp, Homo sapiens
  misc_feature (61)..(62): /note="This region represents a CpG dinucleotide"
  misc_feature (61)..(61): /note="Nucleotide may be methylated to form 5-methylcytosine"
tacaaagtacagtgcgtgatttatagtaagcaatcagtaaattttcatttcttccctccccgcaaactgatcttaagatgatagtcatcccacaggactctcagatttctgcgggcttcctc

SEQ ID NO: 27542 - DNA, 122 bp, Homo sapiens
  misc_feature (61)..(62): /note="This region represents a CpG dinucleotide"
  misc_feature (61)..(61): /note="Nucleotide may be methylated to form 5-methylcytosine"
gcagggcagcctggtggcggctaggacacttctgcagaggacctggagttgggctgctcccggggctcccatctcttgctgggtctgttttcaggtgcaccctcctcctccaggaggcaggg

SEQ ID NO: 27543 - DNA, 122 bp, Homo sapiens
  misc_feature (61)..(62): /note="This region represents a CpG dinucleotide"
  misc_feature (61)..(61): /note="Nucleotide may be methylated to form 5-methylcytosine"
gcaaaagcaattcagttacctgtcattgattgctgactgtgtgccagaccccggggtaggcgctttcggccccggctgcctttcttcctttgggactaacagctatgtagaagaggcagccc

SEQ ID NO: 27544 - DNA, 122 bp, Homo sapiens
  misc_feature (61)..(62): /note="This region represents a CpG dinucleotide"
  misc_feature (61)..(61): /note="Nucleotide may be methylated to form 5-methylcytosine"
ctctcctcctttagtgcataaatgttttctgtgcttttggacactatttcttggtatcaccgaactatttgtcttgagatcaagccaaatgctgtaaatcaaatgtatgtaaaacttcatcc

SEQ ID NO: 27545 - DNA, 122 bp, Homo sapiens
  misc_feature (61)..(62): /note="This region represents a CpG dinucleotide"
  misc_feature (61)..(61): /note="Nucleotide may be methylated to form 5-methylcytosine"
gcggccggccccgcagcagcagagcgtgagcctgcaggggaggcacccggcgtcagtgtacgagcggcggcggaaccgtcgcgaaaacgcctcgcggaatctgagcaggtctaggttccagt

SEQ ID NO: 27546 - DNA, 122 bp, Homo sapiens
  misc_feature (61)..(62): /note="This region represents a CpG dinucleotide"
  misc_feature (61)..(61): /note="Nucleotide may be methylated to form 5-methylcytosine"
taaagaagactttccccctaacttgtaatgagcttcagactcatcataacctgaagtgaacgctgaggttgtccaaactcataaaactcggttgcatccatgttcatttacaccaagaaggt

SEQ ID NO: 27547 - DNA, 122 bp, Homo sapiens
  misc_feature (61)..(62): /note="This region represents a CpG dinucleotide"
  misc_feature (61)..(61): /note="Nucleotide may be methylated to form 5-methylcytosine"
ttgggaagggcaggtgcctcttcttggggaacatgagtcacctccctttcaaaacccatccgtgtgctggagtcatgggagctcagaacagaaggagagatcctgactgacacccgtagggc

SEQ ID NO: 27548 - DNA, 122 bp, Homo sapiens
  misc_feature (61)..(62): /note="This region represents a CpG dinucleotide"
  misc_feature (61)..(61): /note="Nucleotide may be methylated to form 5-methylcytosine"
ctccggcccgtgtgtggcggttgcccatgtgtggctgtgacatgtggaggcgaacttccacggcagaagtgccatgcttccgtaagctcttccgactggttggtaggcgcttttatcggcac

SEQ ID NO: 27549 - DNA, 122 bp, Homo sapiens
  misc_feature (61)..(62): /note="This region represents a CpG dinucleotide"
  misc_feature (61)..(61): /note="Nucleotide may be methylated to form 5-methylcytosine"
taattgactcacttaaggtcatatgtgacaatcattcgtttaatgcatatttattttctacgtgtgccagacactgtaactaaatgctgggagttaaaggattcacagtctggggaagcaca

SEQ ID NO: 27550 - DNA, 122 bp, Homo sapiens
  misc_feature (61)..(62): /note="This region represents a CpG dinucleotide"
  misc_feature (61)..(61): /note="Nucleotide may be methylated to form 5-methylcytosine"
aagagggatgccctgtgtgcatctgcccgcactgcgagtccttgccactccttagatcaacggagccagagatcttgccaccaacacactggcaaagcagctggtttgtctacactttctgt

SEQ ID NO: 27551 - DNA, 122 bp, Homo sapiens
  misc_feature (61)..(62): /note="This region represents a CpG dinucleotide"
  misc_feature (61)..(61): /note="Nucleotide may be methylated to form 5-methylcytosine"
caccccagccctacccagccctgtccctcaccgcagccttgtagatgtcatccatgctggcggctcacaggacagcttgctggggttgccagccggcccttgacttaaatagccctgccccg

SEQ ID NO: 27552 - DNA, 122 bp, Homo sapiens
  misc_feature (61)..(62): /note="This region represents a CpG dinucleotide"
  misc_feature (61)..(61): /note="Nucleotide may be methylated to form 5-methylcytosine"
ttgaatgaatcacctaagaataaagatggttctggtggaaagagttgatttcctgtgtggcgagagaagactacacgtaacttggtggttagtcatcttaaaataaaatgtctgggccagac

SEQ ID NO: 27553 - DNA, 122 bp, Homo sapiens
  misc_feature (61)..(62): /note="This region represents a CpG dinucleotide"
  misc_feature (61)..(61): /note="Nucleotide may be methylated to form 5-methylcytosine"
ggccagcgggagctgagcgtgcgggacgtgcaggccacacgcgtgggcctcaaggaccagcgcagagggctcttctcggtgtggcaggaggtcttccagctgcctcgagcccagaggtaggc

SEQ ID NO: 27554 - DNA, 122 bp, Homo sapiens
  misc_feature (61)..(62): /note="This region represents a CpG dinucleotide"
  misc_feature (61)..(61): /note="Nucleotide may be methylated to form 5-methylcytosine"
ttactctgtttttaatggatttacaagataacctgatgctgtgcggtttgtttactgtagcggctttatggtgttttgtaccagtaaacgggcttccatcagcagatctgtctggaataaag

SEQ ID NO: 27555 - DNA, 122 bp, Homo sapiens
  misc_feature (61)..(62): /note="This region represents a CpG dinucleotide"
  misc_feature (61)..(61): /note="Nucleotide may be methylated to form 5-methylcytosine"
ataaaatggataaacaaaccatgatctattattcttccaatgggatactacagacttgaccgtactgagaatgaatgagcaacagccacatgtatgaatatggatgaatcaccaaagacata

SEQ ID NO: 27556 - DNA, 122 bp, Homo sapiens
  misc_feature (61)..(62): /note="This region represents a CpG dinucleotide"
  misc_feature (61)..(61): /note="Nucleotide may be methylated to form 5-methylcytosine"
atgggacaggaagagtttgcacttggttttttgtgaaagaatgttagaaatacgtgaaaccgttggtagtattttgactatcacctgaaaggtactaaatgttaaactagtaatttgcaatc

SEQ ID NO: 27557 - DNA, 122 bp, Homo sapiens
  misc_feature (61)..(62): /note="This region represents a CpG dinucleotide"
  misc_feature (61)..(61): /note="Nucleotide may be methylated to form 5-methylcytosine"
ttttttaaacaatactgagaagcaagcagtaagctcttttctcaagccacacctgacttacgtgcattcacatgcccatgcttccaagggaaagccagccccactcctactgtactgaccca

SEQ ID NO: 27558 - DNA, 122 bp, Homo sapiens
  misc_feature (61)..(62): /note="This region represents a CpG dinucleotide"
  misc_feature (61)..(61): /note="Nucleotide may be methylated to form 5-methylcytosine"
ttgaggtgttttctctggagccacatgcgggcagtgaatttttaaagggcctcgcactagcggagaaagtgttgacaactcagttgtgactcaacaggatgttcccactctgtctcgcctgt

SEQ ID NO: 27559 - DNA, 122 bp, Homo sapiens
  misc_feature (61)..(62): /note="This region represents a CpG dinucleotide"
  misc_feature (61)..(61): /note="Nucleotide may be methylated to form 5-methylcytosine"
gctggtggccaaagaccttaactgtcttggtctgtagaggctgctgtaacagagtgccaccgtctggatggcctatcagcaacagaaattggttctcacactcctggaagctggaagtccca

SEQ ID NO: 27560 - DNA, 122 bp, Homo sapiens
  misc_feature (61)..(62): /note="This region represents a CpG dinucleotide"
  misc_feature (61)..(61): /note="Nucleotide may be methylated to form 5-methylcytosine"
tgaacacactgggactagtagatttttctgaacctgtccttaaagctcttctcgaaaccacgtgttgatcctctgtctattttctcatctctctgtttctccctccaccctcattcttcctc

SEQ ID NO: 27561 - DNA, 122 bp, Homo sapiens
  misc_feature (61)..(62): /note="This region represents a CpG dinucleotide"
  misc_feature (61)..(61): /note="Nucleotide may be methylated to form 5-methylcytosine"
gaatgaaaggtccttggtcttttggtttttgttgtgttcatttcacagcagatcagtgagcgtgtccttactgcctggccccagttcaagtcctggtgttagtgcttcggctttgaagtcag

SEQ ID NO: 27562 - DNA, 122 bp, Homo sapiens
  misc_feature (61)..(62): /note="This region represents a CpG dinucleotide"
  misc_feature (61)..(61): /note="Nucleotide may be methylated to form 5-methylcytosine"
caggccagactgccctagaaggaagtcaggggcctcaaggggtggcactcttccttaactcgtaactcttggaggcaagcttggaaggtgctttatttcccgctatgattataccaaccctg

SEQ ID NO: 27563 - DNA, 122 bp, Homo sapiens
  misc_feature (61)..(62): /note="This region represents a CpG dinucleotide"
  misc_feature (61)..(61): /note="Nucleotide may be methylated to form 5-methylcytosine"
tatattctttgatacagcaattcctcatctatgactcaatgctcaggaaatgtacaagaacggatgactgcataatttgtaatagtaaaaacattggctgggcgcagtggctcacgcctgta

SEQ ID NO: 27564 - DNA, 122 bp, Homo sapiens
  misc_feature (61)..(62): /note="This region represents a CpG dinucleotide"
  misc_feature (61)..(61): /note="Nucleotide may be methylated to form 5-methylcytosine"
tcctctgtggttacatgggtcatattgcctgtatatcactctcttctgcagtctaccaagcgttataaacagcatgtgatccatgggtctgctatcaaaacaaatacatttcacgagatgtg

SEQ ID NO: 27565 - DNA, 122 bp, Homo sapiens
  misc_feature (61)..(62): /note="This region represents a CpG dinucleotide"
  misc_feature (61)..(61): /note="Nucleotide may be methylated to form 5-methylcytosine"
attaacacatttctcagtattatttaccaaatgagccatcatttccccattgatctgtaacggcttttgtgtcttataccaaaatctgactcatactagagtttcctagtctgttctactgg

SEQ ID NO: 27566 - DNA, 122 bp, Homo sapiens
  misc_feature (61)..(62): /note="This region represents a CpG dinucleotide"
  misc_feature (61)..(61): /note="Nucleotide may be methylated to form 5-methylcytosine"
gcaaatgcaatagaccatctgtaaaaggaagctgttgatctgacttccagagcatgctggcgacaaggttgaagggacaggacagagctcctactactaaaatgaatggcaatgtcattttc

SEQ ID NO: 27567 - DNA, 122 bp, Homo sapiens
  misc_feature (61)..(62): /note="This region represents a CpG dinucleotide"
  misc_feature (61)..(61): /note="Nucleotide may be methylated to form 5-methylcytosine"
cctccccaaattatttacatatgtatatgtatttaaatcaggatttaatcaaagttctcacgctgcatttagctgtttcgctgcttactctaaaagggcacaggagggaagatgggtgggta

SEQ ID NO: 27568 - DNA, 122 bp, Homo sapiens
  misc_feature (61)..(62): /note="This region represents a CpG dinucleotide"
  misc_feature (61)..(61): /note="Nucleotide may be methylated to form 5-methylcytosine"
tcaccattaaagtcaggcaataggacccttgcctgggttccctttttgagaaaggtgctccgtctctcctttgactgtgccctaaaccacattatgaggaagctgaagggccaaggagatgc

SEQ ID NO: 27569 - DNA, 122 bp, Homo sapiens
  misc_feature (61)..(62): /note="This region represents a CpG dinucleotide"
  misc_feature (61)..(61): /note="Nucleotide may be methylated to form 5-methylcytosine"
ccactgcgctcagccatctctaaatcttaatatgtactacagcaaacatgatagaattaacggctaatatttgattagtaacctctgcaaaaaatcagataggactttaaaagacacctctg

SEQ ID NO: 27570 - DNA, 122 bp, Homo sapiens
  misc_feature (61)..(62): /note="This region represents a CpG dinucleotide"
  misc_feature (61)..(61): /note="Nucleotide may be methylated to form 5-methylcytosine"
ggctgactgaggaacaggctgtgcacacgcagctcaggaccttggtaaatattcctgcttcgttccctcttccacctcaagcccaccctgtgatgcaggctttgaggtgggccttcccatgc

SEQ ID NO: 27571 - DNA, 122 bp, Homo sapiens
  misc_feature (61)..(62): /note="This region represents a CpG dinucleotide"
  misc_feature (61)..(61): /note="Nucleotide may be methylated to form 5-methylcytosine"
tgtttatttggttcaagctacttcacaaggacatgccctgttaattcacagtgcttttcccgaaagcctactagaactaggcctggtgagaggccctgagaaggtgtatccttttgtccaag

SEQ ID NO: 27572 - DNA, 122 bp, Homo sapiens
  misc_feature (61)..(62): /note="This region represents a CpG dinucleotide"
  misc_feature (61)..(61): /note="Nucleotide may be methylated to form 5-methylcytosine"
tgagagcagtcaggaaggagatgcttcagctgggtcacagctcggtgcagccaggggcagcggggtggagtcagcgacagaccagagaaggatcaagtacgaatccagggtttgagtcctga

SEQ ID NO: 27573 - DNA, 122 bp, Homo sapiens
  misc_feature (61)..(62): /note="This region represents a CpG dinucleotide"
  misc_feature (61)..(61): /note="Nucleotide may be methylated to form 5-methylcytosine"
ctgaatcagagcaacaccccttaccttttagggcgtatgatttatttactgctgggtctccggtatctaatatagtgcctggcacttggtaggtgagcaataaatatttgttgactgaaaga

SEQ ID NO: 27574 - DNA, 122 bp, Homo sapiens
  misc_feature (61)..(62): /note="This region represents a CpG dinucleotide"
  misc_feature (61)..(61): /note="Nucleotide may be methylated to form 5-methylcytosine"
caaatccctaccccactgttggtgtgatgttaatgtagtgatctgactcctcttagcccccgttttaccatttgtaaaatgagaatattaatgcctactttatgcaactatggtacgactta

SEQ ID NO: 27575 - DNA, 122 bp, Homo sapiens
  misc_feature (61)..(62): /note="This region represents a CpG dinucleotide"
  misc_feature (61)..(61): /note="Nucleotide may be methylated to form 5-methylcytosine"
ttagtctgttagaatggtggggagtcggctcagatttgagcatggcttaaagtgggagagcgttattagaagccagcctagtggggattgctgagatctcatctgctgaatgacagcaaagt

SEQ ID NO: 27576 - DNA, 122 bp, Homo sapiens
  misc_feature (61)..(62): /note="This region represents a CpG dinucleotide"
  misc_feature (61)..(61): /note="Nucleotide may be methylated to form 5-methylcytosine"
tcatccagcctgattagcacagtatcatcgagctactgaatccatgtgatgttttgtaaacgaagattgcttcagactctgtcatgatggagggcataaaagaacacaacccgggacaacac

SEQ ID NO: 27577 - DNA, 122 bp, Homo sapiens
  misc_feature (61)..(62): /note="This region represents a CpG dinucleotide"
  misc_feature (61)..(61): /note="Nucleotide may be methylated to form 5-methylcytosine"
aaaaggaggaggcatttgtgtgtcttaattactaggatagtgcctgttacttactagcctcggtttagtgaaaagttattaatgaatgccaattcaaataaaaccttcagaagaaaaatgaa

SEQ ID NO: 27578 - DNA, 122 bp, Homo sapiens
  misc_feature (61)..(62): /note="This region represents a CpG dinucleotide"
  misc_feature (61)..(61): /note="Nucleotide may be methylated to form 5-methylcytosine"
cttaggaaacacattttatttcccacattaaagcaagctgagggttgctgggagatgatgcggtacccccaacaaagaaaggatcaggctccatagggttggcagcagcaagctggagctgg

SEQ ID NO: 27579 - DNA, 122 bp, Homo sapiens
  misc_feature (61)..(62): /note="This region represents a CpG dinucleotide"
  misc_feature (61)..(61): /note="Nucleotide may be methylated to form 5-methylcytosine"
ctgctgggaacagctcgtgcttatgtgtccttctcttgaatctccacatagcactttgaacgatgctgtactgacatagccaggaaatgctgatgaaattagtcaatgaatgaatgatgcaa

SEQ ID NO: 27580 - DNA, 122 bp, Homo sapiens
  misc_feature (61)..(62): /note="This region represents a CpG dinucleotide"
  misc_feature (61)..(61): /note="Nucleotide may be methylated to form 5-methylcytosine"
cggggctgctgccacctccggggggcggggctgtgcgtcacttgcactggtccaagttgccgtcaggagtccttgcttggtcggcatccagggacgcctcctcgctgtgccacaggccatag

SEQ ID NO: 27581 - DNA, 122 bp, Homo sapiens
  misc_feature (61)..(62): /note="This region represents a CpG dinucleotide"
  misc_feature (61)..(61): /note="Nucleotide may be methylated to form 5-methylcytosine"
agggtgagtccctgcgtgacctgattctctgtgggcaggccgggcagggtggctgcagggcggcggagcctgtgctgctggcctgcatttctctggctggacagatactgcgcccatatccc

SEQ ID NO: 27582 - DNA, 122 bp, Homo sapiens
  misc_feature (61)..(62): /note="This region represents a CpG dinucleotide"
  misc_feature (61)..(61): /note="Nucleotide may be methylated to form 5-methylcytosine"
aagacatgagaccgaagatctcaagatgagagtctacattctggctcatcacttactagtcgtagaatcttaagcaagtcactcagcttctctgaaccccagtttcctcattttattagaag

SEQ ID NO: 27583 - DNA, 122 bp, Homo sapiens
  misc_feature (61)..(62): /note="This region represents a CpG dinucleotide"
  misc_feature (61)..(61): /note="Nucleotide may be methylated to form 5-methylcytosine"
atgatgctccttatcagcagcacagcaaaagctgtgttaccacgtaaggatcaaccagggcgtggacgatgacgaaagaacacacctgaaagcaacaatgctcataagcacacacgcgtgct

SEQ ID NO: 27584 - DNA, 122 bp, Homo sapiens
  misc_feature (61)..(62): /note="This region represents a CpG dinucleotide"
  misc_feature (61)..(61): /note="Nucleotide may be methylated to form 5-methylcytosine"
tccttccccagactcctttcctcccctatcctttaccctcccctcccctcccctccccaacgcagcaccttcacacctgggagctaccctcagagcctgaagggtctctctcaccctaccca

SEQ ID NO: 27585 - DNA, 122 bp, Homo sapiens
  misc_feature (61)..(62): /note="This region represents a CpG dinucleotide"
  misc_feature (61)..(61): /note="Nucleotide may be methylated to form 5-methylcytosine"
tgagggaactagagagacttgtttggcgagtggtggcaaccagtgttctgtggatgtggacggttcctggtcatcaaagttatggtcagctctggttcctgttcgcctggacccagacttac

SEQ ID NO: 27586 - DNA, 122 bp, Homo sapiens
  misc_feature (61)..(62): /note="This region represents a CpG dinucleotide"
  misc_feature (61)..(61): /note="Nucleotide may be methylated to form 5-methylcytosine"
aaaattttcagtccagttcagcaaacctctgccaggcatctcctggggaagcagacccagcgtgggtaaggaagcatcaactgagaaacagaaatagccctgaaccacaagctgcttaccaa

SEQ ID NO: 27587 - DNA, 122 bp, Homo sapiens
  misc_feature (61)..(62): /note="This region represents a CpG dinucleotide"
  misc_feature (61)..(61): /note="Nucleotide may be methylated to form 5-methylcytosine"
ggaaagaaaggtcatggagtcactgagtcccacctatggctgagcttgacaaacaagaaacgcagagtaaactccatttcttcaactttgaaactgattccctctctgttaatccctgaagt

SEQ ID NO: 27588 - DNA, 122 bp, Homo sapiens
  misc_feature (61)..(62): /note="This region represents a CpG dinucleotide"
  misc_feature (61)..(61): /note="Nucleotide may be methylated to form 5-methylcytosine"
acttgctgtatgatctaggctgggcctcaactgagcctgttttctcatgtgtcgaaggggcgtggtaataccttctttaccactgtcatcccatgtggactttagagccaaactacctgttt

SEQ ID NO: 27589 - DNA, 122 bp, Homo sapiens
  misc_feature (61)..(62): /note="This region represents a CpG dinucleotide"
  misc_feature (61)..(61): /note="Nucleotide may be methylated to form 5-methylcytosine"
ttttgtgaggttagggagggatttcatgaggccaagtgatggttaaagccaggtcacatgcgggcactgtgtgttcatatctgctgcctctgacaaatgcagtaggttcagtctgggatgct

SEQ ID NO: 27590 - DNA, 122 bp, Homo sapiens
  misc_feature (61)..(62): /note="This region represents a CpG dinucleotide"
  misc_feature (61)..(61): /note="Nucleotide may be methylated to form 5-methylcytosine"
gatgggtgttgataaagattggagggtaaatggcctcccaacttaccccttggcacccctcggatgccaggtggtagggtgtgaaaatgaaccagacctgctggttgaagacctgctaatta

SEQ ID NO: 27591 - DNA, 122 bp, Homo sapiens
  misc_feature (61)..(62): /note="This region represents a CpG dinucleotide"
  misc_feature (61)..(61): /note="Nucleotide may be methylated to form 5-methylcytosine"
tcctttattatgccctaaatacacagagtagattaagcacaatcctttgtcatcatacgtcgtcatcattggtccataaatgacctttttctctctctccctgttgctctttcagcatgtac

SEQ ID NO: 27592 - DNA, 122 bp, Homo sapiens
  misc_feature (61)..(62): /note="This region represents a CpG dinucleotide"
  misc_feature (61)..(61): /note="Nucleotide may be methylated to form 5-methylcytosine"
aaggattattccatttgtaagattatttcttgttttcttagtttttctgtgtaagccttgcgtaagtgaatttcttttaaaaatgatttggcaacaaaagtatattcggcatgtagtattta

SEQ ID NO: 27593 - DNA, 122 bp, Homo sapiens
  misc_feature (61)..(62): /note="This region represents a CpG dinucleotide"
  misc_feature (61)..(61): /note="Nucleotide may be methylated to form 5-methylcytosine"
tacaggaagactaatagggccccaaggcctcggggatgaacaaacacgatctttgtggtgcgcctttgttgagtaaccacggcaaactctctctgtgtgtctgtcttccttccttttattcc

SEQ ID NO: 27594 - DNA, 122 bp, Homo sapiens
  misc_feature (61)..(62): /note="This region represents a CpG dinucleotide"
  misc_feature (61)..(61): /note="Nucleotide may be methylated to form 5-methylcytosine"
atcaccttggttgtttggatgactcagcccttccagcctgtaggcactggaaagtccaaacggaacagagcagaggcagttccacaacacagttccccagcacagctgttttgttaaggaat

SEQ ID NO: 27595 - DNA, 122 bp, Homo sapiens
  misc_feature (61)..(62): /note="This region represents a CpG dinucleotide"
  misc_feature (61)..(61): /note="Nucleotide may be methylated to form 5-methylcytosine"
gtatatggacacaggtactgcactaaacacttttcctgccttatcatttaatctgcacagcgtcccctctggggtccacatgtattttctccatttattgataaagaatttaagatttggag

SEQ ID NO: 27596 - DNA, 122 bp, Homo sapiens
  misc_feature (61)..(62): /note="This region represents a CpG dinucleotide"
  misc_feature (61)..(61): /note="Nucleotide may be methylated to form 5-methylcytosine"
ccagtgagacaagactggtggttctcaaagactcatatgtcccttacaggcgcctgcccccgcaaccgattcgaccactccctagatttggtgagactaattccaccccattttctttctcc

SEQ ID NO: 27597 - DNA, 122 bp, Homo sapiens
  misc_feature (61)..(62): /note="This region represents a CpG dinucleotide"
  misc_feature (61)..(61): /note="Nucleotide may be methylated to form 5-methylcytosine"
ttgcactgagcttccaggcttagtctatggaaaaattctagtttgatgcttaatagaactcggacaagttgcctcattccttgttttttaatccaaaacttgtttcaccacaagaaagtttt

SEQ ID NO: 27598 - DNA, 122 bp, Homo sapiens
  misc_feature (61)..(62): /note="This region represents a CpG dinucleotide"
  misc_feature (61)..(61): /note="Nucleotide may be methylated to form 5-methylcytosine"
cccacagatgaatatgctgacagtggtttcagctgctcggtggtgattcagacctggacgcgtggcttcagtagccctggggccacactgcctgcccgcagcctcctgtcttgctctatgct

SEQ ID NO: 27599 - DNA, 122 bp, Homo sapiens
  misc_feature (61)..(62): /note="This region represents a CpG dinucleotide"
  misc_feature (61)..(61): /note="Nucleotide may be methylated to form 5-methylcytosine"
gttctattttcataggaatttaccattatctttgacacaaatgcctgctttgtccacttgcgctagtaccagccccaaaacaaacttttacggctagaaaatggtctatgtaagatagaaaa

SEQ ID NO: 27600 - DNA, 122 bp, Homo sapiens
  misc_feature (61)..(62): /note="This region represents a CpG dinucleotide"
  misc_feature (61)..(61): /note="Nucleotide may be methylated to form 5-methylcytosine"
ggcatcatggttcttagttctcagcaggagaactccacactgtcttcaaacaaatacttacggggaaggttagaggttcactcaaaggtcatttctttggatactagtcagaatgtttacat

SEQ ID NO: 27601 - DNA, 122 bp, Homo sapiens
  misc_feature (61)..(62): /note="This region represents a CpG dinucleotide"
  misc_feature (61)..(61): /note="Nucleotide may be methylated to form 5-methylcytosine"
acccttgaaccacaccacatggcctgcccagaatctgtgaacaggctgactggtgaagggcgttccctgacaaagccagtctgtaaatactggattaagtccctgcttcttcaaagtgcaca

SEQ ID NO: 27602 - DNA, 122 bp, Homo sapiens
  misc_feature (61)..(62): /note="This region represents a CpG dinucleotide"
  misc_feature (61)..(61): /note="Nucleotide may be methylated to form 5-methylcytosine"
taaaatatgcctgcttcagtccaacacttccctttttctgagggtcgaaagttaataaaacgcacttctctgggtgtttattttctgtacaccattatacctgtcatgaattctttgttttt

SEQ ID NO: 27603 - DNA, 122 bp, Homo sapiens
  misc_feature (61)..(62): /note="This region represents a CpG dinucleotide"
  misc_feature (61)..(61): /note="Nucleotide may be methylated to form 5-methylcytosine"
ttgacaatttgtttgtcacatgtttgttctcttgttcctcttcccccacctccccgcccacgcatagcttcgagttagaaaattgtgtgttcagatgccttgatccttcaagagacattttg

SEQ ID NO: 27604 - DNA, 122 bp, Homo sapiens
  misc_feature (61)..(62): /note="This region represents a CpG dinucleotide"
  misc_feature (61)..(61): /note="Nucleotide may be methylated to form 5-methylcytosine"
catggccttttgagtgagcacaggtgtgtgcgaccatgtcacctgtctttctagtgtctccgttgcttcctgtgccttggccttccagccatgtggtacctgctagggagcagtggtcccaa

SEQ ID NO: 27605 - DNA, 122 bp, Homo sapiens
  misc_feature (61)..(62): /note="This region represents a CpG dinucleotide"
  misc_feature (61)..(61): /note="Nucleotide may be methylated to form 5-methylcytosine"
gaggtgacagtggtgcagtggtgactcccttgtggcagctggagtgcccgaggccagagccgctttccctgctgcccgtgccacagcctcagggcctgcccgtctccagtgtccccactcat

SEQ ID NO: 27606 - DNA, 122 bp, Homo sapiens
  misc_feature (61)..(62): /note="This region represents a CpG dinucleotide"
  misc_feature (61)..(61): /note="Nucleotide may be methylated to form 5-methylcytosine"
ccttagtttagcaggtaggctctatcttttgccatttctgtattttatgtgctgtgttcccgtttcactgggtatgaactgtgaaatcgactgaatcctggccactttatgagtttgtttgg

SEQ ID NO: 27607 - DNA, 122 bp, Homo sapiens
  misc_feature (61)..(62): /note="This region represents a CpG dinucleotide"
  misc_feature (61)..(61): /note="Nucleotide may be methylated to form 5-methylcytosine"
cagtctctagagttaagccaggctttggctgacatgaaggaaatggactataggcagtggcgaaagatagctactgaggacctgaagcaaggaggctctctccaggtagagctgacatctcc

SEQ ID NO: 27608 - DNA, 122 bp, Homo sapiens
  misc_feature (61)..(62): /note="This region represents a CpG dinucleotide"
  misc_feature (61)..(61): /note="Nucleotide may be methylated to form 5-methylcytosine"
gtttcctctttcggctgttgctgccctgacacttgcacatttcttttagttggatatacacggaagtggaattgctggatcatagattatgcatatttgtgatttgtttgctttttcattta

SEQ ID NO: 27609 - DNA, 122 bp, Homo sapiens
  misc_feature (61)..(62): /note="This region represents a CpG dinucleotide"
  misc_feature (61)..(61): /note="Nucleotide may be methylated to form 5-methylcytosine"
ccccttggttcacctatttaacagattgaaactccaatcttcacagtgagaggaaggagacgggggaggaatctatctgcttctgtcttagtcaccttgggctgccatagcaaaataccata

SEQ ID NO: 27610 - DNA, 122 bp, Homo sapiens
  misc_feature (61)..(62): /note="This region represents a CpG dinucleotide"
  misc_feature (61)..(61): /note="Nucleotide may be methylated to form 5-methylcytosine"
tgtttcctgactgcaaagtgaatcatccttcttaaagatagtataagtaatgtgcagttacgcaaaattgaaagatttgagacagagccatattgttctcacaggaaaggattaaggggtgg

SEQ ID NO: 27611 - DNA, 122 bp, Homo sapiens
  misc_feature (61)..(62): /note="This region represents a CpG dinucleotide"
  misc_feature (61)..(61): /note="Nucleotide may be methylated to form 5-methylcytosine"
agcagctgcaataatgagccaaccatttatctgagtgtgtggatgacagtcacagctccacgtgcagctgttctttaaagtccactgtcttgtccctccctcgggtctagacaacaaagaca

SEQ ID NO: 27612 - DNA, 122 bp, Homo sapiens
  misc_feature (61)..(62): /note="This region represents a CpG dinucleotide"
  misc_feature (61)..(61): /note="Nucleotide may be methylated to form 5-methylcytosine"
cagcctcagactttctcctagagttgatcttaccggaaatgtggatgttatcaaggaaatcggaaagagaagggagaaaaatctcaggtactaccccctgatttcttaactctcttatcctt

SEQ ID NO: 27613 - DNA, 122 bp, Homo sapiens
  misc_feature (61)..(62): /note="This region represents a CpG dinucleotide"
  misc_feature (61)..(61): /note="Nucleotide may be methylated to form 5-methylcytosine"
tttctaaatcgcctttgtaatcatcacatacatgatggtgattcattcaatacatgttgccgtgttgagaaggctgacatttttcttaccactattgtaatttctccataaagccctggtac

SEQ ID NO: 27614 - DNA, 122 bp, Homo sapiens
  misc_feature (61)..(62): /note="This region represents a CpG dinucleotide"
  misc_feature (61)..(61): /note="Nucleotide may be methylated to form 5-methylcytosine"
aggctcatggtgagagcaggattgagagcaggtgcagatagaagcttgcttggcctgggccgaggactgtggctcttccccagagtggacaccttttatacacctccataggggctggttat

SEQ ID NO: 27615 - DNA, 122 bp, Homo sapiens
  misc_feature (61)..(62): /note="This region represents a CpG dinucleotide"
  misc_feature (61)..(61): /note="Nucleotide may be methylated to form 5-methylcytosine"
ttccacgaaccatttgagactaagtggctgacctgattcccctgaagccctgaatactttcgtgtctgcttcctgaaactagggcactttcttgcatccggaaataccgtcaatcctcaggc

SEQ ID NO: 27616 - DNA, 122 bp, Homo sapiens
  misc_feature (61)..(62): /note="This region represents a CpG dinucleotide"
  misc_feature (61)..(61): /note="Nucleotide may be methylated to form 5-methylcytosine"
ctcagcagccataaaaccttttcctaaaactgccctcaagcataataaacaggagacattcggaactggtgagaaagacaaccccaaaatgatgcacttggccattctcagggttcctgagc

SEQ ID NO: 27617 - DNA, 122 bp, Homo sapiens
  misc_feature (61)..(62): /note="This region represents a CpG dinucleotide"
  misc_feature (61)..(61): /note="Nucleotide may be methylated to form 5-methylcytosine"
atatttttgtaaatactgtttactgtaaatacaatttactgaaatctcaagtttggaaatcggtcacaaatactgctcagtagactcattatagttacagaacaaagtttaaatattacaaa

SEQ ID NO: 27618 - DNA, 122 bp, Homo sapiens
  misc_feature (61)..(62): /note="This region represents a CpG dinucleotide"
  misc_feature (61)..(61): /note="Nucleotide may be methylated to form 5-methylcytosine"
agccactacagccgtgtcaagagctcctgacacactggaggctgtcactggtgatctgggcgttctcctaagtcagcattcctagctaaaaatactgccattctgtattggaaacacagctt

SEQ ID NO: 27619 - DNA, 122 bp, Homo sapiens
  misc_feature (61)..(62): /note="This region represents a CpG dinucleotide"
  misc_feature (61)..(61): /note="Nucleotide may be methylated to form 5-methylcytosine"
gtcttggtctggcagagttgttctgcagctacaacaaatacctttcagacccctgtcagtcgctctgttttctcagaatggtgtctgaacatgtgtaacctcccctagtctctgtaaggcaa

SEQ ID NO: 27620 - DNA, 122 bp, Homo sapiens
  misc_feature (61)..(62): /note="This region represents a CpG dinucleotide"
  misc_feature (61)..(61): /note="Nucleotide may be methylated to form 5-methylcytosine"
cttctgagtttccctttgtttatttttgcagccaacaaagtatgttttcgaggttaacaacgaagcacaggatagtacaagtggaagatcattaacatgactggataggaacctcttttaat

SEQ ID NO: 27621 - DNA, 122 bp, Homo sapiens
  misc_feature (61)..(62): /note="This region represents a CpG dinucleotide"
  misc_feature (61)..(61): /note="Nucleotide may be methylated to form 5-methylcytosine"
accgcctggctgtgcaggagagatgagctgttctcctcctcctgcctgccaccaggatggcgctgtgttgtgtcacttaaggactcacctgctttgtagagaccagttaggtggctgctcca

SEQ ID NO: 27622 - DNA, 122 bp, Homo sapiens
  misc_feature (61)..(62): /note="This region represents a CpG dinucleotide"
  misc_feature (61)..(61): /note="Nucleotide may be methylated to form 5-methylcytosine"
atcatgtgtcatgtgcctatctcccttctttatttttaaatggcacacgagtgtctgactcgcacatggtatttcttgctttttagactggtgccagactcagtgtcttttgtttttaatag

SEQ ID NO: 27623 - DNA, 122 bp, Homo sapiens
  misc_feature (61)..(62): /note="This region represents a CpG dinucleotide"
  misc_feature (61)..(61): /note="Nucleotide may be methylated to form 5-methylcytosine"
gttaagagaacactactgccacatggcagtaacttaatatgtatggaagtccagtgatgacgtaatactctaagcctgattcagagataaaagttaccaaagcttttatacacattaatatt

SEQ ID NO: 27624 - DNA, 122 bp, Homo sapiens
  misc_feature (61)..(62): /note="This region represents a CpG dinucleotide"
  misc_feature (61)..(61): /note="Nucleotide may be methylated to form 5-methylcytosine"
ggcaaaaaccaaacgtcggaaacaagtaggtcccgactttatttcgcacacagtgccactcgctgtcttcctcagctcgagctggataaagaaacatctcatggtttattttccaggttgta

SEQ ID NO: 27625 - DNA, 122 bp, Homo sapiens
  misc_feature (61)..(62): /note="This region represents a CpG dinucleotide"
  misc_feature (61)..(61): /note="Nucleotide may be methylated to form 5-methylcytosine"
attgttatcttcatttcccagatgagaggttatgcaacttgctaagtgtcccacagctggcgcaaggagagccagcctgtaagccaggctacacaacactgcccctccaacttgacttccct

SEQ ID NO: 27626 - DNA, 122 bp, Homo sapiens
  misc_feature (61)..(62): /note="This region represents a CpG dinucleotide"
  misc_feature (61)..(61): /note="Nucleotide may be methylated to form 5-methylcytosine"
aaaataaaaatttaatcaatcaatgagtattttaatttcaaaaaatggatgcttaccctccggtttgtgaagacagaataacattctttcactagcactgttttgatcatgtcgggatctgt

SEQ ID NO: 27627 - DNA, 122 bp, Homo sapiens
  misc_feature (61)..(62): /note="This region represents a CpG dinucleotide"
  misc_feature (61)..(61): /note="Nucleotide may be methylated to form 5-methylcytosine"
caggcacagagattacattcctcgaatgttaatatctacctatctatatatcctatttgccgtcaggttcttttgagggataatgatttgttttagattatattctcaataagtgatgaaat

SEQ ID NO: 27628 - DNA, 122 bp, Homo sapiens
  misc_feature (61)..(62): /note="This region represents a CpG dinucleotide"
  misc_feature (61)..(61): /note="Nucleotide may be methylated to form 5-methylcytosine"
atttgtaattatggaaatagaagctttgattcttacagacatggggacatttaaggtaggcgatcagtgtataggaagcatatggaggcaacaaaaatacctatcgttgaaacatgaatata

SEQ ID NO: 27629 - DNA, 122 bp, Homo sapiens
  misc_feature (61)..(62): /note="This region represents a CpG dinucleotide"
  misc_feature (61)..(61): /note="Nucleotide may be methylated to form 5-methylcytosine"
gggcggggcctgggtctgaccccagggactggtttttgtgttcaggtgtctctgtggtgacgagcagggcttcatccagtgcctctgtccccaccgaggggactatgggagacatggagggt

SEQ ID NO: 27630 - DNA, 122 bp, Homo sapiens
  misc_feature (61)..(62): /note="This region represents a CpG dinucleotide"
  misc_feature (61)..(61): /note="Nucleotide may be methylated to form 5-methylcytosine"
tttcttgaagccaaagaagagtttgctcataagaccctggcaatggatgtgatgaaaccccggagaaatgatcctttgttgactgtccttactcaggacagtatgactgtggaagatgtaga

SEQ ID NO: 27631 - DNA, 122 bp, Homo sapiens
  misc_feature (61)..(62): /note="This region represents a CpG dinucleotide"
  misc_feature (61)..(61): /note="Nucleotide may be methylated to form 5-methylcytosine"
catagccattgggaggtgattcatatgtaaatactgttagtaatgctttaaaaatttgctcgaaaccaaagtcaaatggcgactcattaaaaagaatagtggaaatatttctccctataaaa

SEQ ID NO: 27632 - DNA, 122 bp, Homo sapiens
  misc_feature (61)..(62): /note="This region represents a CpG dinucleotide"
  misc_feature (61)..(61): /note="Nucleotide may be methylated to form 5-methylcytosine"
gtgctcagctggcacagagctgtagttcctgcagacctaccagggaggacagccagggatcgcatggttttgtaaattaaaatgcccaagctcagaggcctgcaaggacttaccttaaagca

SEQ ID NO: 27633 - DNA, 122 bp, Homo sapiens
  misc_feature (61)..(62): /note="This region represents a CpG dinucleotide"
  misc_feature (61)..(61): /note="Nucleotide may be methylated to form 5-methylcytosine"
gagtggtttcgtttcctttttcactgggtttggagaggaaactggcataggtgagagccgcggtgctgcaggtcttgccagaccatccccaagggcttggagcgctccaagcaggaagatgc

SEQ ID NO: 27634 - DNA, 122 bp, Homo sapiens
  misc_feature (61)..(62): /note="This region represents a CpG dinucleotide"
  misc_feature (61)..(61): /note="Nucleotide may be methylated to form 5-methylcytosine"
gttgctgggtctcttgcacaaatctcagcctcagtgtcttcctcaccaaagcaactcactcgactggacaaagacacactgaatcttgcaacattgccaatgcttggaacgatttcttcctg

SEQ ID NO: 27635 - DNA, 122 bp, Homo sapiens
  misc_feature (61)..(62): /note="This region represents a CpG dinucleotide"
  misc_feature (61)..(61): /note="Nucleotide may be methylated to form 5-methylcytosine"
atgccagaaccttgtcctgacaggaagcctctgattagggcccggaaccaacttccttttcgcatctgcagactcatggaggcaaccactcaaggccactctgagaagggttgaacgtgctt

SEQ ID NO: 27636 - DNA, 122 bp, Homo sapiens
  misc_feature (61)..(62): /note="This region represents a CpG dinucleotide"
  misc_feature (61)..(61): /note="Nucleotide may be methylated to form 5-methylcytosine"
gagccttctccacctccgtgatgcctccgggttcgtgcatggccacttgtgctgcgtgagcgtcgtaggtttaggggaacagaagtagagggatttacatgagcttttaaaatcccaaatag

SEQ ID NO: 27637 - DNA, 122 bp, Homo sapiens
  misc_feature (61)..(62): /note="This region represents a CpG dinucleotide"
  misc_feature (61)..(61): /note="Nucleotide may be methylated to form 5-methylcytosine"
ttataaagcacttgctaatgtctgttaaataaattatattatccacacaccaatccaaggcgactataaggtagcaagaaccactccaagtcacataagaaaatgaattcctttcgttttag

SEQ ID NO: 27638 - DNA, 122 bp, Homo sapiens
  misc_feature (61)..(62): /note="This region represents a CpG dinucleotide"
  misc_feature (61)..(61): /note="Nucleotide may be methylated to form 5-methylcytosine"
cttgtctctatttctactgcacccccagggacaagccatttcacaatctttaggctttaacggatgcctaattgctcctctgcaatttcattcctggtattttgttgtggttttgttttgca

SEQ ID NO: 27639 - DNA, 122 bp, Homo sapiens
  misc_feature (61)..(62): /note="This region represents a CpG dinucleotide"
  misc_feature (61)..(61): /note="Nucleotide may be methylated to form 5-methylcytosine"
cttgtactacaggaaaacatttccacctagagtcctttcacagaatatctagagaccaaacgaaatcaaccataatgactaccagagccagatcataatcagtttttaattgaagtatcaag

SEQ ID NO: 27640 - DNA, 122 bp, Homo sapiens
  misc_feature (61)..(62): /note="This region represents a CpG dinucleotide"
  misc_feature (61)..(61): /note="Nucleotide may be methylated to form 5-methylcytosine"
ttctatatctgcacttacaaccagcaaacacatgatgcattggagcaagtatataaatcacgaggggaaattccaagagtagaattttgatgaatcagatccagttatttattgtattcata

SEQ ID NO: 27641 - DNA, 122 bp, Homo sapiens
  misc_feature (61)..(62): /note="This region represents a CpG dinucleotide"
  misc_feature (61)..(61): /note="Nucleotide may be methylated to form 5-methylcytosine"
ctggagaaaagatacaaaggcaacctctaaggggcatgaagggctcttttgtttgcagctcggggtgcgggaggcggggagattctcaccactgaagtggacgtaaacacacgtcagacgcg

SEQ ID NO: 27642 - DNA, 122 bp, Homo sapiens
  misc_feature (61)..(62): /note="This region represents a CpG dinucleotide"
  misc_feature (61)..(61): /note="Nucleotide may be methylated to form 5-methylcytosine"
gctgtattgccacagtaagttccttacctttgctgtgtctcacttttttcatttacaaaacggggaataatatagctataatagcataggatagctttaaggatgaaatacaataccgagaa

SEQ ID NO: 27643 - DNA, 122 bp, Homo sapiens
  misc_feature (61)..(62): /note="This region represents a CpG dinucleotide"
  misc_feature (61)..(61): /note="Nucleotide may be methylated to form 5-methylcytosine"
cgtcgctgtttccctagactgagagtgagctggctgtgctggccatgctgttagtaccaccgcacgaggtactgttgaggacttgtctgtggaagaagcatccctggcttgtgtagcttttg

SEQ ID NO: 27644 - DNA, 122 bp, Homo sapiens
  misc_feature (61)..(62): /note="This region represents a CpG dinucleotide"
  misc_feature (61)..(61): /note="Nucleotide may be methylated to form 5-methylcytosine"
tcagtggaaggccatagctctagtcaggcagccctttccatatagtggagtaactgcttccgctccttgcccttcaggcctagaacggtaatgactcaattattactagcttcagggtgcac

SEQ ID NO: 27645 - DNA, 122 bp, Homo sapiens
  misc_feature (61)..(62): /note="This region represents a CpG dinucleotide"
  misc_feature (61)..(61): /note="Nucleotide may be methylated to form 5-methylcytosine"
tcaagaccagcctggccaacatggtgaaaccctgtgtctagtaaaaatacaaaaattagccggtcatggtagcatgcacctgtagtcccaactactcaagaggatgaggcatgagaattgct

SEQ ID NO: 27646 - DNA, 122 bp, Homo sapiens
  misc_feature (61)..(62): /note="This region represents a CpG dinucleotide"
  misc_feature (61)..(61): /note="Nucleotide may be methylated to form 5-methylcytosine"
taggagaccaaaggaagggggaagggtggcggcatgcggggaggctgctagtgctgtaggcggcagagggatattaatagtacctggggcccttccagtctcttatcagtcttttcaagctt

SEQ ID NO: 27647 - DNA, 122 bp, Homo sapiens
  misc_feature (61)..(62): /note="This region represents a CpG dinucleotide"
  misc_feature (61)..(61): /note="Nucleotide may be methylated to form 5-methylcytosine"
atgatgactctctaggctaggatttcagcttcattgcatgcacatggtgcactcacagggcgtgacctctctctgtctcagtaacctcatctgaggaccgggataatcataccgcttcaaag

SEQ ID NO: 27648 - DNA, 122 bp, Homo sapiens
  misc_feature (61)..(62): /note="This region represents a CpG dinucleotide"
  misc_feature (61)..(61): /note="Nucleotide may be methylated to form 5-methylcytosine"
aggagggagtgagtcatctgagtctgtgaagaattttctaagcaaggcgagcagcaagcacgaaggctctcaggaaggagtgtgcttggtgagttctaagaacaagcaggccagtgtagctg

SEQ ID NO: 27649 - DNA, 122 bp, Homo sapiens
  misc_feature (61)..(62): /note="This region represents a CpG dinucleotide"
  misc_feature (61)..(61): /note="Nucleotide may be methylated to form 5-methylcytosine"
cactccagaggagcagaagagggcagcctgtaccttcccagaggcctccctctggaggagcgggtctttctccgcaggcctgggcccaggcagagctgagatgcacctttagaggcagcaga

SEQ ID NO: 27650 - DNA, 122 bp, Homo sapiens
  misc_feature (61)..(62): /note="This region represents a CpG dinucleotide"
  misc_feature (61)..(61): /note="Nucleotide may be methylated to form 5-methylcytosine"
gcaccagaggccccgacaacttgggctgcaggacatgagcgcagggacgggctcctcgggcgagcccagggctgagccgccaaccaggacacacggcagcagaggcaatggcaagaagcggc

SEQ ID NO: 27651 - DNA, 122 bp, Homo sapiens
  misc_feature (61)..(62): /note="This region represents a CpG dinucleotide"
  misc_feature (61)..(61): /note="Nucleotide may be methylated to form 5-methylcytosine"
tgcttccaaagtggttgtgacctgtacaggctacacagtgcttcttaccttaaatctatacgttttgaacaaaaacagcttggagcaattctctccaaacaaccccaaatgttaaccattcc

SEQ ID NO: 27652 - DNA, 122 bp, Homo sapiens
  misc_feature (61)..(62): /note="This region represents a CpG dinucleotide"
  misc_feature (61)..(61): /note="Nucleotide may be methylated to form 5-methylcytosine"
ataaacaacaaaaaaagctactcacggttgtgttgtgggtggctgggcactgggagctgccgggggctgaggagtcccagttgttttctgtcctctcccaggacctggccgtgggtgccact

SEQ ID NO: 27653 - DNA, 122 bp, Homo sapiens
  misc_feature (61)..(62): /note="This region represents a CpG dinucleotide"
  misc_feature (61)..(61): /note="Nucleotide may be methylated to form 5-methylcytosine"
gtctgagttcctgagaaagacagcagtgaacttcctcattgcagcacagggcacttcctccggcagcacagggcagggatccccctaactgaacataggcttgccaccaccctatttcccca

SEQ ID NO: 27654 - DNA, 122 bp, Homo sapiens
  misc_feature (61)..(62): /note="This region represents a CpG dinucleotide"
  misc_feature (61)..(61): /note="Nucleotide may be methylated to form 5-methylcytosine"
gcttgaagacctaatgctctctctaggtctatctcagcattgagcccctggatgctgttgcgtggcttagatgacttatacatgctttgtggcatgattcatactaccttctaccttctgtg

SEQ ID NO: 27655 - DNA, 122 bp, Homo sapiens
  misc_feature (61)..(62): /note="This region represents a CpG dinucleotide"
  misc_feature (61)..(61): /note="Nucleotide may be methylated to form 5-methylcytosine"
tgccttcagtaacatgagagggaaagcagaacaaatgggcaggacaggcaaggaggggcacgggctaacaccaactctgaaggacacagagaacatgttgggattcaacacccactctaagg

SEQ ID NO: 27656 - DNA, 122 bp, Homo sapiens
  misc_feature (61)..(62): /note="This region represents a CpG dinucleotide"
  misc_feature (61)..(61): /note="Nucleotide may be methylated to form 5-methylcytosine"
cacattccaggcactggctaaatgccatgcatcttgtgacagcctttgacgtggtgctaccgtcatcttcagtttatagatgagaaaacggacactcagaaacattaagtaacttgtccaag

SEQ ID NO: 27657 - DNA, 122 bp, Homo sapiens
  misc_feature (61)..(62): /note="This region represents a CpG dinucleotide"
  misc_feature (61)..(61): /note="Nucleotide may be methylated to form 5-methylcytosine"
tgacaacctgagacttcctggttcatagtacagacgtggccttgcccctggacagggctacgctggaggaaagtgtatgctccagaaaggagttaccacttaaggatctaatcagatttatt

SEQ ID NO: 27658 - DNA, 122 bp, Homo sapiens
  misc_feature (61)..(62): /note="This region represents a CpG dinucleotide"
  misc_feature (61)..(61): /note="Nucleotide may be methylated to form 5-methylcytosine"
accaaacaacaatgaagcagctcctcacttgagacttcaccaatagtaatttaaactatgcgttctcattaaactctaataccttaattctgttattgtattaacaagttatgagattctaa

SEQ ID NO: 27659 - DNA, 122 bp, Homo sapiens
  misc_feature (61)..(62): /note="This region represents a CpG dinucleotide"
  misc_feature (61)..(61): /note="Nucleotide may be methylated to form 5-methylcytosine"
aaattcacgtgtgctgggaggtgccactcacacaggcctactttgtacttctgcatcagccgcgccttcattcctggcacccccaccctccagagtctacactgatgtcagccagtgaggct

SEQ ID NO: 27660 - DNA, 122 bp, Homo sapiens
  misc_feature (61)..(62): /note="This region represents a CpG dinucleotide"
  misc_feature (61)..(61): /note="Nucleotide may be methylated to form 5-methylcytosine"
taggattagatccctggggaaggaacaagatacactaaagtggggctgtgccccagttaccgttctatgaggacacagggtaggaacagtttgacaagcacttcaagaatttacactgtcac

SEQ ID NO: 27661 - DNA, 122 bp, Homo sapiens
  misc_feature (61)..(62): /note="This region represents a CpG dinucleotide"
  misc_feature (61)..(61): /note="Nucleotide may be methylated to form 5-methylcytosine"
acagaacacaatagtcatgaacaaattcaggtcagtcatggtaagcgatgacactctgaacggcccaccacacactcgaaacgtcccaatcaaagaatccccattacccaggccttttccct

SEQ ID NO: 27662 - DNA, 122 bp, Homo sapiens
  misc_feature (61)..(62): /note="This region represents a CpG dinucleotide"
  misc_feature (61)..(61): /note="Nucleotide may be methylated to form 5-methylcytosine"
tacccagggaacctaaagtgctgcttggtgtaggtgggagatgattaatctctccgtgcacgataaaaagacagagctgccacccggaattagtctgtttatgtagaatgaggacagcccca

SEQ ID NO: 27663 - DNA, 122 bp, Homo sapiens
  misc_feature (61)..(62): /note="This region represents a CpG dinucleotide"
  misc_feature (61)..(61): /note="Nucleotide may be methylated to form 5-methylcytosine"
aacaggttgtacccactggcagtcagagtgacatactagccaaagattgctggagacctacgggcatgggcatctgcctggtgcccaagcctgacacccagctctggttgggaacgcagtgt

SEQ ID NO: 27664 - DNA, 122 bp, Homo sapiens
  misc_feature (61)..(62): /note="This region represents a CpG dinucleotide"
  misc_feature (61)..(61): /note="Nucleotide may be methylated to form 5-methylcytosine"
cctacagctcaattgttcatttaaagagagaacttgtattccaaagtttgaaagaaacctcggaatatcccgcaggtaggagtcattcctacaggtcctggtctctgtgctggtgggagcat

SEQ ID NO: 27665 - DNA, 122 bp, Homo sapiens
  misc_feature (61)..(62): /note="This region represents a CpG dinucleotide"
  misc_feature (61)..(61): /note="Nucleotide may be methylated to form 5-methylcytosine"
cttaaaactgccatccacccccgcgcggggcgccgcaggggctgctccgggcggtgccagcggctcaagcacaaagtagccagacagataagaaaggagggactgtcacaaggatccgagtt

SEQ ID NO: 27666 - DNA, 122 bp, Homo sapiens
  misc_feature (61)..(62): /note="This region represents a CpG dinucleotide"
  misc_feature (61)..(61): /note="Nucleotide may be methylated to form 5-methylcytosine"
tggtatgacaccctctctcagcagggaccctgctgacagtgactacgcgctggtggctggcgtctcctgagttccttgtactcagcctgatcatgaggaactgactcagagaaatgagagtc

SEQ ID NO: 27667 - DNA, 122 bp, Homo sapiens
  misc_feature (61)..(62): /note="This region represents a CpG dinucleotide"
  misc_feature (61)..(61): /note="Nucleotide may be methylated to form 5-methylcytosine"
gttctttgtgagagaggaaactcgcttatgaataacaggactggacgccgtaaaagttggcggctggaattcttgtttctcaggcgccgctgttttctcttgactttttatctctggttttt

SEQ ID NO: 27668 - DNA, 122 bp, Homo sapiens
  misc_feature (61)..(62): /note="This region represents a CpG dinucleotide"
  misc_feature (61)..(61): /note="Nucleotide may be methylated to form 5-methylcytosine"
gaaacctccggattacagggccttctctgagcagggagtggcgcaatcaagtgctatctgcgctaagtcccagcttgcagtgagtgacccaggaggcgcgggtaaacagagagaggaccccg

SEQ ID NO: 27669 - DNA, 122 bp, Homo sapiens
  misc_feature (61)..(62): /note="This region represents a CpG dinucleotide"
  misc_feature (61)..(61): /note="Nucleotide may be methylated to form 5-methylcytosine"
aagttgaaaaaaatgttaaaattcccttgcaagagagtttaacaccccagacacaggctgcgacaatgagcaaggaagatggttattcctgtgggataaggctatacattttagtgttccag

SEQ ID NO: 27670 - DNA, 122 bp, Homo sapiens
  misc_feature (61)..(62): /note="This region represents a CpG dinucleotide"
  misc_feature (61)..(61): /note="Nucleotide may be methylated to form 5-methylcytosine"
atctatttcaattatcccacttattagcatttccagcttttcccatttgctaataagaaccggagctctgggttgaggtaatcccttcagaagttaaatcattttgtgtattcagtaaccag

SEQ ID NO: 27671 - DNA, 122 bp, Homo sapiens
  misc_feature (61)..(62): /note="This region represents a CpG dinucleotide"
  misc_feature (61)..(61): /note="Nucleotide may be methylated to form 5-methylcytosine"
agatgggcagccggggacgattgctctgaagttggagttaaatctcctgccttttctccccgcgcccccccaccccgccctgtcccggctgtttttgtttttaaaaaggaaggatagatagg

SEQ ID NO: 27672 - DNA, 122 bp, Homo sapiens
  misc_feature (61)..(62): /note="This region represents a CpG dinucleotide"
  misc_feature (61)..(61): /note="Nucleotide may be methylated to form 5-methylcytosine"
ctttaggtctgaaatgaacttggaaagcttgttcaacctctgttcttcaaaacaaacgaacgaacaaaccatgctcttcaaatgagtaactgacaggatgtgccccacccaaagtctcacag

SEQ ID NO: 27673 - DNA, 122 bp, Homo sapiens
  misc_feature (61)..(62): /note="This region represents a CpG dinucleotide"
  misc_feature (61)..(61): /note="Nucleotide may be methylated to form 5-methylcytosine"
agcaaaagaacaggagatgtccctcctgggacatcaactcttccacaacagggctgggcacgcaggacgctcagaagaaggagcatgtgcctgccttcagcttgtactgttcttgttgaggg

SEQ ID NO: 27674 - DNA, 122 bp, Homo sapiens
  misc_feature (61)..(62): /note="This region represents a CpG dinucleotide"
  misc_feature (61)..(61): /note="Nucleotide may be methylated to form 5-methylcytosine"
ggattctataaagcacgtttgctgtttaacccaggaagacttgcctcagggattaggagacggaacactgcaaaactgttcccaaaactgcaccctaagtgtggttatttcacacccatggc

SEQ ID NO: 27675 - DNA, 122 bp, Homo sapiens
  misc_feature (61)..(62): /note="This region represents a CpG dinucleotide"
  misc_feature (61)..(61): /note="Nucleotide may be methylated to form 5-methylcytosine"
gagaggccctgtgctttcccaggactgctgttaagccacattgcttaaacagtgtccccacgactgcaggctcagccaacccaggcaagctcttgagcccatgtaaggcctgcctctctctc

SEQ ID NO: 27676 - DNA, 122 bp, Homo sapiens
  misc_feature (61)..(62): /note="This region represents a CpG dinucleotide"
  misc_feature (61)..(61): /note="Nucleotide may be methylated to form 5-methylcytosine"
aggcccggtttctcttgccacctgtacatggtggctcagtcccagtgaccctgggaccagcgagtcactacagtgcctcctgccactctgccctgcccaccaccaaaccccctgcatctgtc

SEQ ID NO: 27677 - DNA, 122 bp, Homo sapiens
  misc_feature (61)..(62): /note="This region represents a CpG dinucleotide"
  misc_feature (61)..(61): /note="Nucleotide may be methylated to form 5-methylcytosine"
gcgtgctgggcttcgtagttctcaagtctgccttccctgtcttcccccagcatttcactgcgctttccgagatgcaggcctgcactgcacagccatgcatttccgttcagctggcgtctttc

SEQ ID NO: 27678 - DNA, 122 bp, Homo sapiens
  misc_feature (61)..(62): /note="This region represents a CpG dinucleotide"
  misc_feature (61)..(61): /note="Nucleotide may be methylated to form 5-methylcytosine"
aggatactgttgaaatagctgcaaaagtcagtggccaataagaccctaaaaaatgagatgcgggccaagctggttaagaccaactgtacccagcatggtgctggatttgacctaggtttctc

SEQ ID NO: 27679 - DNA, 122 bp, Homo sapiens
  misc_feature (61)..(62): /note="This region represents a CpG dinucleotide"
  misc_feature (61)..(61): /note="Nucleotide may be methylated to form 5-methylcytosine"
gggctgaggcctcagattctgcatttctaacaagttcctgtcacgccagcctctctggcccgtggatcacactgtgagggccaggtgtggtggtgcatgactataatccaaacactttgtga

SEQ ID NO: 27680 - DNA, 122 bp, Homo sapiens
  misc_feature (61)..(62): /note="This region represents a CpG dinucleotide"
  misc_feature (61)..(61): /note="Nucleotide may be methylated to form 5-methylcytosine"
agggtctggagcaaatgagtcaaggcactgcctgcttccaggtaggacaacaactgccttcgtccttgtggtctacagcatatggaaatcttataaaatcttcagatttttagttgtttcat

SEQ ID NO: 27681 - DNA, 122 bp, Homo sapiens
  misc_feature (61)..(62): /note="This region represents a CpG dinucleotide"
  misc_feature (61)..(61): /note="Nucleotide may be methylated to form 5-methylcytosine"
ccactttgtgaatatctgtatcttagcatttaatgtttttatcgaagtgttctgtttatacgtatgtctcagctactaaacagtaaggtcaataaggacacaatttttaaatccttattttt

SEQ ID NO: 27682 - DNA, 122 bp, Homo sapiens
  misc_feature (61)..(62): /note="This region represents a CpG dinucleotide"
  misc_feature (61)..(61): /note="Nucleotide may be methylated to form 5-methylcytosine"
caactgtgtttttaacggataagtgtccatgacaacaggaaaaaatgccacagcagtgcacgcaacactgttagcagactcaaagagattagggtagaattagcctagtgattccttccttc

SEQ ID NO: 27683 - DNA, 122 bp, Homo sapiens
  misc_feature (61)..(62): /note="This region represents a CpG dinucleotide"
  misc_feature (61)..(61): /note="Nucleotide may be methylated to form 5-methylcytosine"
gtcctgtggcagaatcagaggctagattgaaaacgggaatgaggacatagaaatggtgagcgcaggcttcttattttgaagttgggaaaaaggaataaagaacaaggatggattcaaaagag

SEQ ID NO: 27684 - DNA, 122 bp, Homo sapiens
  misc_feature (61)..(62): /note="This region represents a CpG dinucleotide"
  misc_feature (61)..(61): /note="Nucleotide may be methylated to form 5-methylcytosine"
cagcactttttttttcagttcttcacatggtttggatcaatgcagctgccagataaacagcgttacctaccacaataaagcaaagactgaatccgaatcctagactgttgagaatattaatg

SEQ ID NO: 27685 - DNA, 122 bp, Homo sapiens
  misc_feature (61)..(62): /note="This region represents a CpG dinucleotide"
  misc_feature (61)..(61): /note="Nucleotide may be methylated to form 5-methylcytosine"
ttgtgctatctcatttaattcttacaagctttaaaaatagtgccagaaacattgtaagcacgtgtttgtttgagggcctcaggtgtacaaattggctgatgacaaactactggccctagcag

SEQ ID NO: 27686 - DNA, 122 bp, Homo sapiens
  misc_feature (61)..(62): /note="This region represents a CpG dinucleotide"
  misc_feature (61)..(61): /note="Nucleotide may be methylated to form 5-methylcytosine"
caggggctccccagcctgtgtagattctgctgtaagtgactcttctctgaaagactggcgcgaggcggctgcttctgactcctgtttcagtttaccctctgtgtgaaatctgtaactatcca

SEQ ID NO: 27687 - DNA, 122 bp, Homo sapiens
  misc_feature (61)..(62): /note="This region represents a CpG dinucleotide"
  misc_feature (61)..(61): /note="Nucleotide may be methylated to form 5-methylcytosine"
ggccaggtgaaccacgatgaaccacggcgacggcaggggccagcgtccccgtctccctcccgttctagaagacataaatggtgccttcattttgtgagtctgcgctgagtgaggccgtgagg

SEQ ID NO: 27688 - DNA, 122 bp, Homo sapiens
  misc_feature (61)..(62): /note="This region represents a CpG dinucleotide"
  misc_feature (61)..(61): /note="Nucleotide may be methylated to form 5-methylcytosine"
atcttattaagtacacattgaatgtccttccttagcaagtaggttgttcctgccaggtctcgtatccctcagtcttgaagaacatacactgacacagatgagtgggatgcacaaaatcatag

SEQ ID NO: 27689 - DNA, 122 bp, Homo sapiens
  misc_feature (61)..(62): /note="This region represents a CpG dinucleotide"
  misc_feature (61)..(61): /note="Nucleotide may be methylated to form 5-methylcytosine"
ggaacattcaaatataatgatttacatccttccccaactcccttccagtgtgggtcagggcgaacatggaccatggacgtgactggagccaggggtgcatgccctctctgggctccctcttg

SEQ ID NO: 27690 - DNA, 122 bp, Homo sapiens
  misc_feature (61)..(62): /note="This region represents a CpG dinucleotide"
  misc_feature (61)..(61): /note="Nucleotide may be methylated to form 5-methylcytosine"
tccagcatattaaattaggtagtttttcttatttactttttgccgtgggggcctcacaatcgcagtgctgtttagttaagaatcaagtcaagaaaagtttgggaatcggtgtatgtaacttg

SEQ ID NO: 27691 - DNA, 122 bp, Homo sapiens
  misc_feature (61)..(62): /note="This region represents a CpG dinucleotide"
  misc_feature (61)..(61): /note="Nucleotide may be methylated to form 5-methylcytosine"
agaagagtctacttctttaattcaagatcaagtttctcttcataatgaccttgtagccctcgctcctcagacttgctggctgactggacccacaagaaatacaggtaccaaattgtgggctt

SEQ ID NO: 27692 - DNA, 122 bp, Homo sapiens
  misc_feature (61)..(62): /note="This region represents a CpG dinucleotide"
  misc_feature (61)..(61): /note="Nucleotide may be methylated to form 5-methylcytosine"
tatatatacatataagcacctactacatgccaggcatcattaaatgtgttgcatccatcacgtcatttaaccccagcacttgcacactcctttctggttgtggaagactaagtaatttatct

SEQ ID NO: 27693 - DNA, 122 bp, Homo sapiens
  misc_feature (61)..(62): /note="This region represents a CpG dinucleotide"
  misc_feature (61)..(61): /note="Nucleotide may be methylated to form 5-methylcytosine"
tgtttggcatttcaaactttaattgtccaaaacagaattttgatcattagtctcttcaaacgtttatctcccattgtttgcaccttagtgaagtgcacatgccatagtcaaagacaaatatt

SEQ ID NO: 27694 - DNA, 122 bp, Homo sapiens
  misc_feature (61)..(62): /note="This region represents a CpG dinucleotide"
  misc_feature (61)..(61): /note="Nucleotide may be methylated to form 5-methylcytosine"
attacttccttgtttacctgccatgtccctggaagttcccatttatccagtaacaacctacgctaactggaagtgagttctgtgtctcatgtctgaagagaccctgtgaaggttcaggagag

SEQ ID NO: 27695 - DNA, 122 bp, Homo sapiens
  misc_feature (61)..(62): /note="This region represents a CpG dinucleotide"
  misc_feature (61)..(61): /note="Nucleotide may be methylated to form 5-methylcytosine"
actgctgcccatattccactggccaagcaagccacatggccacacccagcctcaaggggacgtggggatatgcacttctcaatgtacctataagtgagcctgtgggtggtagttaatccctg

SEQ ID NO: 27696 - DNA, 122 bp, Homo sapiens
  misc_feature (61)..(62): /note="This region represents a CpG dinucleotide"
  misc_feature (61)..(61): /note="Nucleotide may be methylated to form 5-methylcytosine"
agattgagcaagtccaataaacatttaacagcagtgacatctttactctgagatctaacacgatatattgtgatttcagctctgagaaaatcatctgatggcaatgataaaaatgcacacca

SEQ ID NO: 27697 - DNA, 122 bp, Homo sapiens
  misc_feature (61)..(62): /note="This region represents a CpG dinucleotide"
  misc_feature (61)..(61): /note="Nucleotide may be methylated to form 5-methylcytosine"
cctccatcacatgatttcttgactgcagtactgcagtagcttccttgctagacttgcctgcggtcttgccactctccaaaccactcctcccagggcagccagagtaaccttttaaaaatgga

SEQ ID NO: 27698 - DNA, 122 bp, Homo sapiens
  misc_feature (61)..(62): /note="This region represents a CpG dinucleotide"
  misc_feature (61)..(61): /note="Nucleotide may be methylated to form 5-methylcytosine"
agacatcacagatagccaataaatgaagtcaggtatgatatgcatggtttaggctttcctcggtggttaaacaggccttttggaggcctagggttagcttgaatgtcagtccacattgcatg

SEQ ID NO: 27699 - DNA, 122 bp, Homo sapiens
  misc_feature (61)..(62): /note="This region represents a CpG dinucleotide"
  misc_feature (61)..(61): /note="Nucleotide may be methylated to form 5-methylcytosine"
gctgtaacttagagatcataggcaaaagataactgcaactccttctccaaacactcccttcgcaatcaacaaaagatgacattccaaaaacaaattatatataagcctttgaattcctaagt

SEQ ID NO: 27700 - DNA, 122 bp, Homo sapiens
  misc_feature (61)..(62): /note="This region represents a CpG dinucleotide"
  misc_feature (61)..(61): /note="Nucleotide may be methylated to form 5-methylcytosine"
gggacgtggcttctggagtgtgacgaataagtgcaggtgccatcaggcgtcacccggccacgggaaaggtccttgagacatggcaggagaacataagagtaatattcctgcccgtgtcccag

SEQ ID NO: 27701 - DNA, 122 bp, Homo sapiens
  misc_feature (61)..(62): /note="This region represents a CpG dinucleotide"
  misc_feature (61)..(61): /note="Nucleotide may be methylated to form 5-methylcytosine"
ctcatctgtctggagcggagaatagggcctgtgtggtgcacacacatctctggtagaaggcgcaaaagtcctcgaggctctttggtgtgtccagaactatgaacctcacccagtgcctgtaa

SEQ ID NO: 27702 - DNA, 122 bp, Homo sapiens
  misc_feature (61)..(62): /note="This region represents a CpG dinucleotide"
  misc_feature (61)..(61): /note="Nucleotide may be methylated to form 5-methylcytosine"
ccaatgcctagctcttcatcagtcattattgctctgaggtactgagcaattcactacattcgctgaaatttgatgtttctacatctaaggagaaatatgaataccatgaaaagtttatggga

SEQ ID NO: 27703 - DNA, 122 bp, Homo sapiens
  misc_feature (61)..(62): /note="This region represents a CpG dinucleotide"
  misc_feature (61)..(61): /note="Nucleotide may be methylated to form 5-methylcytosine"
atgctaagtactaaggagacagatccagctccaactggttggccaagccccacacttccacgtgtgtttagagaaaagtccacagaagcgatacttacgaacggtgtcattactggaatccc

SEQ ID NO: 27704 - DNA, 122 bp, Homo sapiens
  misc_feature (61)..(62): /note="This region represents a CpG dinucleotide"
  misc_feature (61)..(61): /note="Nucleotide may be methylated to form 5-methylcytosine"
cattgctcagcatctggtgcaataagctggtcatgcttctgtaggttgtattgaatctaacgtggtaaggatcttattcctggtgatacttggatgggtacctgtcacatcaaaactgggag

SEQ ID NO: 27705 - DNA, 122 bp, Homo sapiens
  misc_feature (61)..(62): /note="This region represents a CpG dinucleotide"
  misc_feature (61)..(61): /note="Nucleotide may be methylated to form 5-methylcytosine"
aaaagctaagcaacctcactcacctattctgttcttccagtttagccaggagttctaagtcgtctggactcaactgtgatggggaagatggtgaaagggctggtgttgatagtgtggtagat

SEQ ID NO: 27706 - DNA, 122 bp, Homo sapiens
  misc_feature (61)..(62): /note="This region represents a CpG dinucleotide"
  misc_feature (61)..(61): /note="Nucleotide may be methylated to form 5-methylcytosine"
catttcttttgccaggtggatccattctattctctaccaatagggggcactaaggaagaccgaaaggcagtaggaggcaacagggaattgctcctgcctattctttctgttgcccccgcagg

SEQ ID NO: 27707 - DNA, 122 bp, Homo sapiens
  misc_feature (61)..(62): /note="This region represents a CpG dinucleotide"
  misc_feature (61)..(61): /note="Nucleotide may be methylated to form 5-methylcytosine"
aaaagatcagggatgtaatatttgttgagcaactgttatgcgctggctccatagtaattccgggttgcaaatgctactgtcctttttatccaactgaggaagccaaggctcagagaggttaa

SEQ ID NO: 27708 - DNA, 122 bp, Homo sapiens
  misc_feature (61)..(62): /note="This region represents a CpG dinucleotide"
  misc_feature (61)..(61): /note="Nucleotide may be methylated to form 5-methylcytosine"
aacagtaccttaatttggcctgtatttattggacttggtgttctttttgctgtgagaagacggtgaaggtgattcttgaatgtttgttttctgtgttgcatcatgtttgtacaacacggtaa

SEQ ID NO: 27709 - DNA, 122 bp, Homo sapiens
  misc_feature (61)..(62): /note="This region represents a CpG dinucleotide"
  misc_feature (61)..(61): /note="Nucleotide may be methylated to form 5-methylcytosine"
cactcacatagccatgtgcctatgaatacaaacacatttattctaagatgcacatacacgcgtataatctacggcctgaccttgcagtgtaaatcactgagttcaaccaaagagatgctgag

SEQ ID NO: 27710 - DNA, 122 bp, Homo sapiens
  misc_feature (61)..(62): /note="This region represents a CpG dinucleotide"
  misc_feature (61)..(61): /note="Nucleotide may be methylated to form 5-methylcytosine"
caagtgaggggctcatcaggagagctgatgggaagggaaaatagatgggagggtggttagcgagagacgtttgaggaaccaggccccacatccagatccaccatgtctagagcctccagcct

SEQ ID NO: 27711 - DNA, 122 bp, Homo sapiens
  misc_feature (61)..(62): /note="This region represents a CpG dinucleotide"
  misc_feature (61)..(61): /note="Nucleotide may be methylated to form 5-methylcytosine"
gacttagagagcaggcagatgctttgaaggcgtggtaacacaggtcttcattaatctccacgcaggacttgcacttctactatgcctaggctgaagaaaatggctcaggaagatgaacaatc

SEQ ID NO: 27712 - DNA, 122 bp, Homo sapiens
  misc_feature (61)..(62): /note="This region represents a CpG dinucleotide"
  misc_feature (61)..(61): /note="Nucleotide may be methylated to form 5-methylcytosine"
aactggcatagattttaacagggcctccagcacaaagcataagttaaaaactgacagtgccgggcatatataagcagttgtggtgaccataggcaataaatctgtcctcttggtttgaagtt

SEQ ID NO: 27713 - DNA, 122 bp, Homo sapiens
  misc_feature (61)..(62): /note="This region represents a CpG dinucleotide"
  misc_feature (61)..(61): /note="Nucleotide may be methylated to form 5-methylcytosine"
agaaaaatatcactttgggtacttaattggttgtagaaagactgcctgttaagaaccacacgtgatgggaacaaaggacactacacgctaaagaaggaaagggaagaaactcaaataaggag

SEQ ID NO: 27714 - DNA, 122 bp, Homo sapiens
  misc_feature (61)..(62): /note="This region represents a CpG dinucleotide"
  misc_feature (61)..(61): /note="Nucleotide may be methylated to form 5-methylcytosine"
ccctttcccacctcctctaatggctcagccccagccccgcccccttccctgaacaggggtcgttggacttccgagaggaggcagagggctcagacatgcacaaaagccctgtccctgcatca

SEQ ID NO: 27715 - DNA, 122 bp, Homo sapiens
  misc_feature (61)..(62): /note="This region represents a CpG dinucleotide"
  misc_feature (61)..(61): /note="Nucleotide may be methylated to form 5-methylcytosine"
gtccttgggccaggccctttattgtgtccaggacattatccaaacaggtttggcacagggcgtctcaatgagtgggcttagagcaagcagacacgagtttcagaaggtcatgctgtgactag

SEQ ID NO: 27716 - DNA, 122 bp, Homo sapiens
  misc_feature (61)..(62): /note="This region represents a CpG dinucleotide"
  misc_feature (61)..(61): /note="Nucleotide may be methylated to form 5-methylcytosine"
taaatgcctctctctccagttctacttcctttcactcccctcttttcatctcttcgctcacgtttcaaggaaaatatcttgtctgacccgtgaagtgatctaggaactcagtctcatgatct

SEQ ID NO: 27717 - DNA, 122 bp, Homo sapiens
  misc_feature (61)..(62): /note="This region represents a CpG dinucleotide"
  misc_feature (61)..(61): /note="Nucleotide may be methylated to form 5-methylcytosine"
tatctttgttgctaaatctaatggaatctgtttaatcatttgccattttaactacttgttcgttcttgaaattttcttcttatacttctgggacaccatattttccttatttccttcttagg

SEQ ID NO: 27718 - DNA, 122 bp, Homo sapiens
  misc_feature (61)..(62): /note="This region represents a CpG dinucleotide"
  misc_feature (61)..(61): /note="Nucleotide may be methylated to form 5-methylcytosine"
tgaagctttagggaaatttttcattaaggcattccatcactgggataaccagtttctccccgaaaggtacaaccaatctccagtccttgaaattcaacagcttgctttgtggacaatggcta

SEQ ID NO: 27719 - DNA, 122 bp, Homo sapiens
  misc_feature (61)..(62): /note="This region represents a CpG dinucleotide"
  misc_feature (61)..(61): /note="Nucleotide may be methylated to form 5-methylcytosine"
ccattcttgatctgaggcgagtattgggattgtggttttactttcccatttacttagaggcgggaaggtttagttatttgaatgccttagaccaggaaattattggctattgtcagtggaat

SEQ ID NO: 27720 - DNA, 122 bp, Homo sapiens
  misc_feature (61)..(62): /note="This region represents a CpG dinucleotide"
  misc_feature (61)..(61): /note="Nucleotide may be methylated to form 5-methylcytosine"
cacaaagatgagcagcctggggtttcggggagaatgtacagacacgcaaagcggtcgggccggcctgtgactcgtgggctctgcaaaaggctttcagttgttctccgggagccgattctacc

SEQ ID NO: 27721 - DNA, 122 bp, Homo sapiens
  misc_feature (61)..(62): /note="This region represents a CpG dinucleotide"
  misc_feature (61)..(61): /note="Nucleotide may be methylated to form 5-methylcytosine"
catattattcattcagtgttgcacaacaatatagccacacacttagaagcttaacaatcacgtattcattgtctcacagtgtccatggctcaggaatctgcaaaaaagggataatttatctg

SEQ ID NO: 27722 - DNA, 122 bp, Homo sapiens
  misc_feature (61)..(62): /note="This region represents a CpG dinucleotide"
  misc_feature (61)..(61): /note="Nucleotide may be methylated to form 5-methylcytosine"
accagttataaataagattcaataaattaaaacagcaactggaattctcttctgttaaggcggggcagggagagccctcagtctggcacaggtagggttgggtggcagaagagcaaagcaaa

SEQ ID NO: 27723 - DNA, 122 bp, Homo sapiens
  misc_feature (61)..(62): /note="This region represents a CpG dinucleotide"
  misc_feature (61)..(61): /note="Nucleotide may be methylated to form 5-methylcytosine"
tgcaagcatggtagtagtgccttgaaaaaaaaaaccagtcgatttaagtagtagattgtgcggttcagtagcatggaacaaagttcattgtcatatcctggacagaacatttcttggatctt

SEQ ID NO: 27724 - DNA, 122 bp, Homo sapiens
  misc_feature (61)..(62): /note="This region represents a CpG dinucleotide"
  misc_feature (61)..(61): /note="Nucleotide may be methylated to form 5-methylcytosine"
taaattggattagaataatttttttcatgtccctttactttcctgtagcttgctgatgaccgtatggcactggtgtcaggcatcagcttagatccagaagcagcgattggtgtgacaaaacg

SEQ ID NO: 27725 - DNA, 122 bp, Homo sapiens
  misc_feature (61)..(62): /note="This region represents a CpG dinucleotide"
  misc_feature (61)..(61): /note="Nucleotide may be methylated to form 5-methylcytosine"
gagccacctcgcccgtcacatccccttcccaggggctgtgcatccaatgtcgagtcagtgcgggggattagagggccggggtcctcgccctacctcagtgcatctctgcagggccgtaccag

SEQ ID NO: 27726 - DNA, 122 bp, Homo sapiens
  misc_feature (61)..(62): /note="This region represents a CpG dinucleotide"
  misc_feature (61)..(61): /note="Nucleotide may be methylated to form 5-methylcytosine"
ttggaatcaggagccgtagagctactttgtggattaactcagagtgaaaatcctgctttacgagtgaatggaatttgggctttaatggtacgtttcacttttatatatatcataacttacaa

SEQ ID NO: 27727 - DNA, 122 bp, Homo sapiens
  misc_feature (61)..(62): /note="This region represents a CpG dinucleotide"
  misc_feature (61)..(61): /note="Nucleotide may be methylated to form 5-methylcytosine"
atttctaaatcatgaacaccaaaggccttaaaattgggcattgggccatgtccaatccttcgatgtttagctattaagggagaaggaggcaacacagaggtcattgtatccatcacatttta

SEQ ID NO: 27728 - DNA, 122 bp, Homo sapiens
  misc_feature (61)..(62): /note="This region represents a CpG dinucleotide"
  misc_feature (61)..(61): /note="Nucleotide may be methylated to form 5-methylcytosine"
aatatagcaaggaagtggactttagtcattgttccaatgctacgtaaatagatgcatcctcgctagctcagagatcagtttttcctgctctcatcaatccttgggagctcatcgcaaaagat

SEQ ID NO: 27729 - DNA, 122 bp, Homo sapiens
  misc_feature (61)..(62): /note="This region represents a CpG dinucleotide"
  misc_feature (61)..(61): /note="Nucleotide may be methylated to form 5-methylcytosine"
gtggctggggaggcctcaggaaacttacaatcatggcggaaggtgaagaggaagcaagcacgttttcacagggcaacaggagagagctagcaaaaggggaagtgccacacccatttaaacca

SEQ ID NO: 27730 - DNA, 122 bp, Homo sapiens
  misc_feature (61)..(62): /note="This region represents a CpG dinucleotide"
  misc_feature (61)..(61): /note="Nucleotide may be methylated to form 5-methylcytosine"
gaacagaatagagaacccacctacaacaatctgatctttgacaaagttgacaataacaagcgatggggagagaactccccattcaataaatgatgctggaataactggctagtcatatgcag

SEQ ID NO: 27731 - DNA, 122 bp, Homo sapiens
  misc_feature (61)..(62): /note="This region represents a CpG dinucleotide"
  misc_feature (61)..(61): /note="Nucleotide may be methylated to form 5-methylcytosine"
actctcattgtcagctctagaccctaaagattctcctctcctttgggggtcagcctccttcgtggggtgcctggcagtgctgggctcagctctgcctcacaatacccacgtgccacccccag

SEQ ID NO: 27732 - DNA, 122 bp, Homo sapiens
  misc_feature (61)..(62): /note="This region represents a CpG dinucleotide"
  misc_feature (61)..(61): /note="Nucleotide may be methylated to form 5-methylcytosine"
tgatgactaatgaagccactatttagcattgtatctaggatttccttgccatctgtaaaccgtgacccctcccttcaggcagttttttaacctgaggtggttacctgtttttgtttgctgtc

SEQ ID NO: 27733 - DNA, 122 bp, Homo sapiens
  misc_feature (61)..(62): /note="This region represents a CpG dinucleotide"
  misc_feature (61)..(61): /note="Nucleotide may be methylated to form 5-methylcytosine"
gctcctgaatgggtggaggttccaactgaaattgaagagagcacctgagtttttttccctcgatagataacctgaagcaataggaagaaaactgtctcagaagaggtatggggcaggaaaga

SEQ ID NO: 27734 - DNA, 122 bp, Homo sapiens
  misc_feature (61)..(62): /note="This region represents a CpG dinucleotide"
  misc_feature (61)..(61): /note="Nucleotide may be methylated to form 5-methylcytosine"
atggaatacctggggtggctcctatcagaccctgactccctggagctggcaacagagaaccggcatgtaatggtccccgtaaacacagctagcctgcatcagggtttctaatgttctgctgc

SEQ ID NO: 27735 - DNA, 122 bp, Homo sapiens
  misc_feature (61)..(62): /note="This region represents a CpG dinucleotide"
  misc_feature (61)..(61): /note="Nucleotide may be methylated to form 5-methylcytosine"
taactgttgtttggtattgctttctcaatttcctttttttttttttttcgcctcatctcccggaatgtatcaaaggaaacccctgtctttgaaaaagacttcttttgagctaactttcttat

SEQ ID NO: 27736 - DNA, 122 bp, Homo sapiens
  misc_feature (61)..(62): /note="This region represents a CpG dinucleotide"
  misc_feature (61)..(61): /note="Nucleotide may be methylated to form 5-methylcytosine"
ctcttgagcccgtggcttcctttgcaaaggcccagggtaagaaaggcagtgcagggaacacgtggagtcagttgtctaacaataacaaagatctgctcttgggaggtgtggctccatcccca

SEQ ID NO: 27737 - DNA, 122 bp, Homo sapiens
  misc_feature (61)..(62): /note="This region represents a CpG dinucleotide"
  misc_feature (61)..(61): /note="Nucleotide may be methylated to form 5-methylcytosine"
agtgctatagcttgaatgtttttgtcccgtcccaaattcatgtgttggaatcttagtcaccgacacaataatgttgggaggtggggcctaatgggtggtgtttaggtcttgagagctccagt

SEQ ID NO: 27738 - DNA, 122 bp, Homo sapiens
  misc_feature (61)..(62): /note="This region represents a CpG dinucleotide"
  misc_feature (61)..(61): /note="Nucleotide may be methylated to form 5-methylcytosine"
ggattggggttaaaaaagaaaaaaggaaatgtatctgaatgtaagcagtatcatctgtggcgccatcatccttgctgggaggcagctttgtgaactggttgaaagcacaggctttggagtca

SEQ ID NO: 27739 - DNA, 122 bp, Homo sapiens
  misc_feature (61)..(62): /note="This region represents a CpG dinucleotide"
  misc_feature (61)..(61): /note="Nucleotide may be methylated to form 5-methylcytosine"
ctgttgttggtggtagctctgtttaattgcttttccagctcctggattatatatgtttgacgagtaaccaagccttgaaggttctctttctcttcctttaaggtgtccaactcttccttgtg

SEQ ID NO: 27740 - DNA, 122 bp, Homo sapiens
  misc_feature (61)..(62): /note="This region represents a CpG dinucleotide"
  misc_feature (61)..(61): /note="Nucleotide may be methylated to form 5-methylcytosine"
tctcatgtcactatggttttagcttaatgaacttttaccacaaaggctctacaagggaggcgagcaaaatgagtcccttgccctgcaactaccaccataaaaggaagtcaggtgttgggaaa

SEQ ID NO: 27741 - DNA, 122 bp, Homo sapiens
  misc_feature (61)..(62): /note="This region represents a CpG dinucleotide"
  misc_feature (61)..(61): /note="Nucleotide may be methylated to form 5-methylcytosine"
ttgatgtagaggctataaccaaggagacaatcatgggagggtttttgctgtatttgtttacggaagaacatgcagtgccaagtattcaaatgaaacttacataggctgacaataagtaaagg

SEQ ID NO: 27742 - DNA, 122 bp, Homo sapiens
  misc_feature (61)..(62): /note="This region represents a CpG dinucleotide"
  misc_feature (61)..(61): /note="Nucleotide may be methylated to form 5-methylcytosine"
tccagaatgaacttaatgattgccctttttgcgttttagtccccctcccatccatcacaccgctaggcttgcccctcctcctggggcaactggaatggtttttgtaaaagcataaatcggat

SEQ ID NO: 27743 - DNA, 122 bp, Homo sapiens
  misc_feature (61)..(62): /note="This region represents a CpG dinucleotide"
  misc_feature (61)..(61): /note="Nucleotide may be methylated to form 5-methylcytosine"
gcgttctcagctcccacacagtggcacacccctgagaaggttgagtcacgacctgtcatccgctgatcctagttaatgcatggtccccgcacagccaggcttaccttctgagcagcctccat

SEQ ID NO: 27744 - DNA, 122 bp, Homo sapiens
  misc_feature (61)..(62): /note="This region represents a CpG dinucleotide"
  misc_feature (61)..(61): /note="Nucleotide may be methylated to form 5-methylcytosine"
cagcagccaggaatgtttccaagggtgacattacaaggatatctccagcagcctggctctcggtgaggaagatagagcagggcgcccgaggggcacacgttggacggcaagggcgtgtggct

SEQ ID NO: 27745 - DNA, 122 bp, Homo sapiens
  misc_feature (61)..(62): /note="This region represents a CpG dinucleotide"
  misc_feature (61)..(61): /note="Nucleotide may be methylated to form 5-methylcytosine"
gttccttttgatcagagccacatcagtgtctcaggtttctagtctccatttatagctaaccggaagcatcaggtcctctcatgaatatacccctgtggtattaaagtgactgtgtctgaata

SEQ ID NO: 27746 - DNA, 122 bp, Homo sapiens
  misc_feature (61)..(62): /note="This region represents a CpG dinucleotide"
  misc_feature (61)..(61): /note="Nucleotide may be methylated to form 5-methylcytosine"
cgagcagatggccagccacagcgcagtgctggaggccggcaaaaacctctacacgttctgcgtgagctatgtggattccatccagcaaatgaggaacaagtttgccttccgagaggccatca

SEQ ID NO: 27747 - DNA, 122 bp, Homo sapiens
  misc_feature (61)..(62): /note="This region represents a CpG dinucleotide"
  misc_feature (61)..(61): /note="Nucleotide may be methylated to form 5-methylcytosine"
cttatccttctatctcccagggaaggggaaaccttctggctcctcctatgcagaattaatcgctcacccttgaagggtaccagtatatgccacctcaaactatctttagcatgtggattatt

SEQ ID NO: 27748 - DNA, 122 bp, Homo sapiens
  misc_feature (61)..(62): /note="This region represents a CpG dinucleotide"
  misc_feature (61)..(61): /note="Nucleotide may be methylated to form 5-methylcytosine"
agttgaagctgctgtggttccagacgcaggcaggtcacccctgatgctttcaacaagaggcgtgcagtgcatcgcaggacatctgctaagggccatctcagaggcccacccctggaagccac

SEQ ID NO: 27749 - DNA, 122 bp, Homo sapiens
  misc_feature (61)..(62): /note="This region represents a CpG dinucleotide"
  misc_feature (61)..(61): /note="Nucleotide may be methylated to form 5-methylcytosine"
aggtggggcctgatgggaggtgtttgtgtcctcatattgagaaacttctctatttgtttccgggagatctgattgtttttaagaaagcctgttacctcctctcactctctgtgtttgtccct

SEQ ID NO: 27750 - DNA, 122 bp, Homo sapiens
  misc_feature (61)..(62): /note="This region represents a CpG dinucleotide"
  misc_feature (61)..(61): /note="Nucleotide may be methylated to form 5-methylcytosine"
cggcacactctttctctaaaaggccggctaaaaaaatgtttttggctctgtgggcccatacgaccttgactgtgactactggactctgccactgtggagcaaacacagctgtgggcgtcaca

SEQ ID NO: 27751 - DNA, 122 bp, Homo sapiens
  misc_feature (61)..(62): /note="This region represents a CpG dinucleotide"
  misc_feature (61)..(61): /note="Nucleotide may be methylated to form 5-methylcytosine"
gtgaggatagcccaccccaagggaagaatcaagggaggagaaacagaaacccaggaaccacgccaatggagaaaaccccaagtcaaggatcaaatagggcacttggatctctcaagttgccc

SEQ ID NO: 27752 - DNA, 122 bp, Homo sapiens
  misc_feature (61)..(62): /note="This region represents a CpG dinucleotide"
  misc_feature (61)..(61): /note="Nucleotide may be methylated to form 5-methylcytosine"
catttaacagatgagccccagggatgttaaacaacccttccaagtcacatggctggaccacggtgctgggcctgtacctaggtctcctggctcttcccactacagtgtactggctaccacct

SEQ ID NO: 27753 - DNA, 122 bp, Homo sapiens
  misc_feature (61)..(62): /note="This region represents a CpG dinucleotide"
  misc_feature (61)..(61): /note="Nucleotide may be methylated to form 5-methylcytosine"
gaagacttaggttcaccaactccattttctattgtgagaatatattttcctgtatcattgcgagtaacttgaggaatggtgagtaatgaggatgaatcagtgttttcaatgctgtatctggc

SEQ ID NO: 27754 - DNA, 122 bp, Homo sapiens
  misc_feature (61)..(62): /note="This region represents a CpG dinucleotide"
  misc_feature (61)..(61): /note="Nucleotide may be methylated to form 5-methylcytosine"
aaggagtgcaagtcagcccttttaccctctgggctactcactgctcaacgaatgtctccacgctcttcctgttgcattcaatagccattacttaccactgacaagaaatcctaggcttcctt

SEQ ID NO: 27755 - DNA, 122 bp, Homo sapiens
  misc_feature (61)..(62): /note="This region represents a CpG dinucleotide"
  misc_feature (61)..(61): /note="Nucleotide may be methylated to form 5-methylcytosine"
taaaaatccaaacagcatttttctccttcttctctttggtcagactgctcaatgcttttacgcttcctcctccgccccctgcttgcgtccatcccccaccccacaccccaccccatgcaaca

SEQ ID NO: 27756 - DNA, 122 bp, Homo sapiens
  misc_feature (61)..(62): /note="This region represents a CpG dinucleotide"
  misc_feature (61)..(61): /note="Nucleotide may be methylated to form 5-methylcytosine"
gattataaatcctttaagtccaaactaaaagcccaaacagaaatgtagtcaccgtagccacgcactgcttgcttcttaaccaagtaaggcaatgaattgtggttattctcatagtagcaata

SEQ ID NO: 27757 - DNA, 122 bp, Homo sapiens
  misc_feature (61)..(62): /note="This region represents a CpG dinucleotide"
  misc_feature (61)..(61): /note="Nucleotide may be methylated to form 5-methylcytosine"
ttcatataagagggggctggctggttgcatatgtaggatgtcccatctcccagcccacttcgtcatgacagacaccagaaacaccactctgcttcactgaagaacaataaaatctgcgtgtc

SEQ ID NO: 27758 - DNA, 122 bp, Homo sapiens
  misc_feature (61)..(62): /note="This region represents a CpG dinucleotide"
  misc_feature (61)..(61): /note="Nucleotide may be methylated to form 5-methylcytosine"
tgagccgcgcccgtcttcccgggccgcgtgtcgtgagccgcacccatcttcctggggctacgtgtcttgagcggcacccatatacctgctgtgcactggctggcctcaagctttgtcctgaa

SEQ ID NO: 27759 - DNA, 122 bp, Homo sapiens
  misc_feature (61)..(62): /note="This region represents a CpG dinucleotide"
  misc_feature (61)..(61): /note="Nucleotide may be methylated to form 5-methylcytosine"
tcctaatctagtctccagaagagaaaaaagaaaaacatacagaaaggaatgtataagttacggaggataaagagaggggttatgatatgatcaaaacaataacagttaagatcttttgagat

SEQ ID NO: 27760 - DNA, 122 bp, Homo sapiens
  misc_feature (61)..(62): /note="This region represents a CpG dinucleotide"
  misc_feature (61)..(61): /note="Nucleotide may be methylated to form 5-methylcytosine"
atcggcagcacatggagccagggtggggtggagtgggatgaggttggggaggttgtatcgcgcaatggttctgagccaggttccagacaagaggctcaaactccaggactacctcttactac

SEQ ID NO: 27761 - DNA, 122 bp, Homo sapiens
  misc_feature (61)..(62): /note="This region represents a CpG dinucleotide"
  misc_feature (61)..(61): /note="Nucleotide may be methylated to form 5-methylcytosine"
tgggatatgcgtgtctaaacgtgtactgtcgcagagaatgcctcttattgttgttcttatcgtaatgttatcctgcagcttttctcagtatcgagcatccacacaaagcaaatatttctttc

SEQ ID NO: 27762 - DNA, 122 bp, Homo sapiens
  misc_feature (61)..(62): /note="This region represents a CpG dinucleotide"
  misc_feature (61)..(61): /note="Nucleotide may be methylated to form 5-methylcytosine"
ttacccactgaagaagtctctctctcctcccttatctgatgaagctgtctctcccttgttcgaaaacatatctatcccctttccttgtaagaggaagacaatcctctctaactaaagacaaa

SEQ ID NO: 27763 - DNA, 122 bp, Homo sapiens
  misc_feature (61)..(62): /note="This region represents a CpG dinucleotide"
  misc_feature (61)..(61): /note="Nucleotide may be methylated to form 5-methylcytosine"
gcctgggtcacagcctgggtggaatgaccagtgtggtcacagcccagatgggatgactagcgtgaaggccctgaggaccttgccacgccaatggccaagggcaagggccaaggctgctttcc

SEQ ID NO: 27764 - DNA, 122 bp, Homo sapiens
  misc_feature (61)..(62): /note="This region represents a CpG dinucleotide"
  misc_feature (61)..(61): /note="Nucleotide may be methylated to form 5-methylcytosine"
aaatctgtctctcacttccctccctgccttttactttttctttatgttgtaaaagacacacgagcgtagaaaaatgctcaattttttaatagatgttaatatttttagtttcctgatttaaa

SEQ ID NO: 27765 - DNA, 122 bp, Homo sapiens
  misc_feature (61)..(62): /note="This region represents a CpG dinucleotide"
  misc_feature (61)..(61): /note="Nucleotide may be methylated to form 5-methylcytosine"
atgaactgcattgttgacatcacttcttgtatgtctcaaagaccttaaactcaaactcaacgtggctcaaaacaaatcaccatgtctttcactcctcaaaacttagtcctctcccaggaatc

SEQ ID NO: 27766 - DNA, 122 bp, Homo sapiens
  misc_feature (61)..(62): /note="This region represents a CpG dinucleotide"
  misc_feature (61)..(61): /note="Nucleotide may be methylated to form 5-methylcytosine"
cgacttagcattgggctccattataattgctctgtctttgatctgtcctttcactttctacgtctaactcagtgcaaatgcatgctacagtatctcttaagaaacactatattattcccata

SEQ ID NO: 27767 - DNA, 122 bp, Homo sapiens
  misc_feature (61)..(62): /note="This region represents a CpG dinucleotide"
  misc_feature (61)..(61): /note="Nucleotide may be methylated to form 5-methylcytosine"
tgcttgctcctctctttccctccctctctcttttttttctacccttcttcttgtccttgtcgctctggttgggggctggttggtttagatacagcgagtgctccctggcagcctgaactgcc

SEQ ID NO: 27768 - DNA, 122 bp, Homo sapiens
  misc_feature (61)..(62): /note="This region represents a CpG dinucleotide"
  misc_feature (61)..(61): /note="Nucleotide may be methylated to form 5-methylcytosine"
cgcatgggtgtgttgccatagagacgacgggaacgctggatgtagatttcaatgtttttgcgttccaaagaggcatagagctcctcaattttgcgggcaggcaacaactccccatgctgctt

SEQ ID NO: 27769 - DNA, 122 bp, Homo sapiens
  misc_feature (61)..(62): /note="This region represents a CpG dinucleotide"
  misc_feature (61)..(61): /note="Nucleotide may be methylated to form 5-methylcytosine"
gactgttgctgacgacagaaggtatataaagctcctgttcagatttagaagttaaagctacgatgtgagatgtttcaggcatgtttgtagaattacctttataatctacttcaggagttata

SEQ ID NO: 27770 - DNA, 122 bp, Homo sapiens
  misc_feature (61)..(62): /note="This region represents a CpG dinucleotide"
  misc_feature (61)..(61): /note="Nucleotide may be methylated to form 5-methylcytosine"
ttcaaagctctggtgattcagtagtggacgggtaaggttcctgcctctcctggggcttaccgtccaggggtggggaggacgtcactatatgaaattatcttatttatagcttaatgtcatta

SEQ ID NO: 27771 - DNA, 122 bp, Homo sapiens
  misc_feature (61)..(62): /note="This region represents a CpG dinucleotide"
  misc_feature (61)..(61): /note="Nucleotide may be methylated to form 5-methylcytosine"
ggtattggaatgaatacatatttcatagtgatcattgcacacctatcatggggcagctagcgctgggtcagcctgcctagttgggcaaatgccactgtggccaagcctggcacacagtcagt

SEQ ID NO: 27772 - DNA, 122 bp, Homo sapiens
  misc_feature (61)..(62): /note="This region represents a CpG dinucleotide"
  misc_feature (61)..(61): /note="Nucleotide may be methylated to form 5-methylcytosine"
aagaaaggagaaatggagcctacctgtctttctagccttatctcctacccagcgcctactcgtcccttagaccacagccagactggatgactcgattccccaaacatgcctggtgtgctgtc

SEQ ID NO: 27773 - DNA, 122 bp, Homo sapiens
  misc_feature (61)..(62): /note="This region represents a CpG dinucleotide"
  misc_feature (61)..(61): /note="Nucleotide may be methylated to form 5-methylcytosine"
cacctgacccagctcccatcaaggtcaccacctcaaggtggccaattccagtggacacaacgtcatctttcctgatctctcagaaacacttttcgtgttggccactccttcttctttgaact

SEQ ID NO: 27774 - DNA, 122 bp, Homo sapiens
  misc_feature (61)..(62): /note="This region represents a CpG dinucleotide"
  misc_feature (61)..(61): /note="Nucleotide may be methylated to form 5-methylcytosine"
ttcctttgtttggttcggagactgcttgatccatggctgcttggcaggcttcttctttagcgttcattcttgtggccatttattctctgatattaaactacaggataattttaatctcaact

SEQ ID NO: 27775 - DNA, 122 bp, Homo sapiens
  misc_feature (61)..(62): /note="This region represents a CpG dinucleotide"
  misc_feature (61)..(61): /note="Nucleotide may be methylated to form 5-methylcytosine"
gttgaatagaaaactatagtttgctctcagcaacccacttctgtgtgttttgtttctttccgttgtggtgtcatcctctccacacagttaaactaacagagagtccgtctatctaggttcta

SEQ ID NO: 27776 - DNA, 122 bp, Homo sapiens
  misc_feature (61)..(62): /note="This region represents a CpG dinucleotide"
  misc_feature (61)..(61): /note="Nucleotide may be methylated to form 5-methylcytosine"
tttggcattattattgtaactgctccagaatgtacacagatggcataatggattcaaaggcggttttacaggaacataggggcaatctatgaagtaaaaatccatttccaggatggccgcat

SEQ ID NO: 27777 - DNA, 122 bp, Homo sapiens
  misc_feature (61)..(62): /note="This region represents a CpG dinucleotide"
  misc_feature (61)..(61): /note="Nucleotide may be methylated to form 5-methylcytosine"
tccagacctctcagagatgtttcattccttgggctgggttgaactgagacatagccctgccgcgagacaggagggagaaggagccagtggacagaatgttctcatgcctggatgcaccagcc

SEQ ID NO: 27778 - DNA, 122 bp, Homo sapiens
  misc_feature (61)..(62): /note="This region represents a CpG dinucleotide"
  misc_feature (61)..(61): /note="Nucleotide may be methylated to form 5-methylcytosine"
cagacttggctgccagagcccttggttgctgagtttagtgatcagtcacagtaaccagttcgtcccaggtacatctggtgctcctaatagatgtctggcctggcatctgcttttatgttttg

SEQ ID NO: 27779 - DNA, 122 bp, Homo sapiens
  misc_feature (61)..(62): /note="This region represents a CpG dinucleotide"
  misc_feature (61)..(61): /note="Nucleotide may be methylated to form 5-methylcytosine"
ttttggtctgactcagagactgagtttattaaccctaggactcaaagcaggaaccctggccggagctcccaggttgccagggttcctcttgtgctctgtgtggccccaccatagctcacctg

SEQ ID NO: 27780 - DNA, 122 bp, Homo sapiens
  misc_feature (61)..(62): /note="This region represents a CpG dinucleotide"
  misc_feature (61)..(61): /note="Nucleotide may be methylated to form 5-methylcytosine"
agcccatccccgcttgcccaccccagccctgagtctgtccacaggaacatccgacacaagcgcactttgttacagactcactgtgacaccatgaggtggttttgggtttgttctcatgcccg

SEQ ID NO: 27781 - DNA, 122 bp, Homo sapiens
  misc_feature (61)..(62): /note="This region represents a CpG dinucleotide"
  misc_feature (61)..(61): /note="Nucleotide may be methylated to form 5-methylcytosine"
atgtatttattccgtagtatcaacaattatagcatggaaacacacagaacctctattaaacgttatctatttcaaaactcctaaaatctattacttgtcttacaccaaaatgtgatatagta

SEQ ID NO: 27782 - DNA, 122 bp, Homo sapiens
  misc_feature (61)..(62): /note="This region represents a CpG dinucleotide"
  misc_feature (61)..(61): /note="Nucleotide may be methylated to form 5-methylcytosine"
tttctgtcatctactcatttaatacagaatatgtcctgctagccccggaggacgagtggacggaacaactttctcacccctcgcggagcttagtctaacggaggagacagacttgtttcaac

SEQ ID NO: 27783 - DNA, 122 bp, Homo sapiens
  misc_feature (61)..(62): /note="This region represents a CpG dinucleotide"
  misc_feature (61)..(61): /note="Nucleotide may be methylated to form 5-methylcytosine"
ttgggggaaacattaaaaagagaatataaactttcaagtaagattcagggcccatgcaagcgtcagtttctatagatttacagcagatccacgtctactgcagaaatacaatcaggtttctg

SEQ ID NO: 27784 - DNA, 122 bp, Homo sapiens
  misc_feature (61)..(62): /note="This region represents a CpG dinucleotide"
  misc_feature (61)..(61): /note="Nucleotide may be methylated to form 5-methylcytosine"
cccccacacccgtgtcatgtgtctgtttataaacatgtccccttccctttccttccccctcggccacccgcctccctctcaaccttgtaaattccccttcccaaccccgaggggcttgcagg

SEQ ID NO: 27785 - DNA, 122 bp, Homo sapiens
  misc_feature (61)..(62): /note="This region represents a CpG dinucleotide"
  misc_feature (61)..(61): /note="Nucleotide may be methylated to form 5-methylcytosine"
ccctgaccacctcactatctcacctccctcacctgtaactttgctccggtgctctggccacgtgggcagggcctctggacatgcagattccactgccccaaaagctctttctgcagactgtc

SEQ ID NO: 27786 - DNA, 122 bp, Homo sapiens
  misc_feature (61)..(62): /note="This region represents a CpG dinucleotide"
  misc_feature (61)..(61): /note="Nucleotide may be methylated to form 5-methylcytosine"
ggtcatctgaaagaccaaacaagtgaatagagggtgggaactttcagccacccccaacctcgggggagggagggtaacttgagactgggttgtaaaaactcttgaataatgagataaggagt

SEQ ID NO: 27787 - DNA, 122 bp, Homo sapiens
  misc_feature (61)..(62): /note="This region represents a CpG dinucleotide"
  misc_feature (61)..(61): /note="Nucleotide may be methylated to form 5-methylcytosine"
gagctacacagtgacagactgagctcaaggagaaagacaggcattctgagtttcagactacggagccatttggaggtgacatgtacagaacaatgcacagctttgagattttatattggtcc

SEQ ID NO: 27788 - DNA, 122 bp, Homo sapiens
  misc_feature (61)..(62): /note="This region represents a CpG dinucleotide"
  misc_feature (61)..(61): /note="Nucleotide may be methylated to form 5-methylcytosine"
gcttcaattgtttaaatgttcttttcacttcatagatactaaggcatgttgatcttctatcgagcttaattttttaaaaagcttgttacctactttcatctccaaggcattttaaataaata

SEQ ID NO: 27789 - DNA, 122 bp, Homo sapiens
  misc_feature (61)..(62): /note="This region represents a CpG dinucleotide"
  misc_feature (61)..(61): /note="Nucleotide may be methylated to form 5-methylcytosine"
tgtggtccctggtcatttcttgtttgcatgctagtcaccttgttatccctaggcatataccgtcaggaaggagcattgtttggtgatgcgggccatcaggacaggttgcccagcctctgaac

SEQ ID NO: 27790 - DNA, 122 bp, Homo sapiens
  misc_feature (61)..(62): /note="This region represents a CpG dinucleotide"
  misc_feature (61)..(61): /note="Nucleotide may be methylated to form 5-methylcytosine"
ttttcttaacctaggattcctaaggtgtgacacgtatttactatgtgtacagcatttcctcgagccattctgcattaccccctgggactttggaggcaagggggactaatgggaacatataa

SEQ ID NO: 27791 - DNA, 122 bp, Homo sapiens
  misc_feature (61)..(62): /note="This region represents a CpG dinucleotide"
  misc_feature (61)..(61): /note="Nucleotide may be methylated to form 5-methylcytosine"
ataattatcataggccaagttctataatctgaggtgattggattctttctttccccatagcgacttttgaatacaacttttctgactcagtgtaatgctttaccattcattatatcaaactg

SEQ ID NO: 27792 - DNA, 122 bp, Homo sapiens
  misc_feature (61)..(62): /note="This region represents a CpG dinucleotide"
  misc_feature (61)..(61): /note="Nucleotide may be methylated to form 5-methylcytosine"
tagcgccttgcatctgctacagcagcttcacctgctcaatcagggccacaactatcttggcgacagcagcagcaatgccaccagccagatggtccttggcaaaggagatcgcctgttgtgtc

SEQ ID NO: 27793 - DNA, 122 bp, Homo sapiens
  misc_feature (61)..(62): /note="This region represents a CpG dinucleotide"
  misc_feature (61)..(61): /note="Nucleotide may be methylated to form 5-methylcytosine"
tagaggccatggagacaaacaagacagaggagatgagctgcagccgcctctagctggaaacgcagtgcagaggcgcccaggccaaagcagcttctgttcacaaaaagtctccccgaggccct

SEQ ID NO: 27794 - DNA, 122 bp, Homo sapiens
  misc_feature (61)..(62): /note="This region represents a CpG dinucleotide"
  misc_feature (61)..(61): /note="Nucleotide may be methylated to form 5-methylcytosine"
tctaaactgacgtagaggagagaagagaaagatttcactctgacccataagtggctggagcggaaagatggcttcggacatttcccgtgtttcagacgctgctcctcctcctcctcctcctc

SEQ ID NO: 27795 - DNA, 122 bp, Homo sapiens
  misc_feature (61)..(62): /note="This region represents a CpG dinucleotide"
  misc_feature (61)..(61): /note="Nucleotide may be methylated to form 5-methylcytosine"
atccatctttatcttcctcctctcaggttttttattgatccattcagcaaacattaatgacgtagctgctatgtgctaggcactgcatatacagaatcctgctccttctctgggtaattgtc

SEQ ID NO: 27796 - DNA, 122 bp, Homo sapiens
  misc_feature (61)..(62): /note="This region represents a CpG dinucleotide"
  misc_feature (61)..(61): /note="Nucleotide may be methylated to form 5-methylcytosine"
agaatttctacaagatgaatttgagttgaaccttcagtctttccacgaagaaggtctgctcgccaccctcaaagccatctgcctttctgtctcagtttattcacagatcctttcagagacca

SEQ ID NO: 27797 - DNA, 122 bp, Homo sapiens
  misc_feature (61)..(62): /note="This region represents a CpG dinucleotide"
  misc_feature (61)..(61): /note="Nucleotide may be methylated to form 5-methylcytosine"
ttactgagaacttgctgtgtcttctcttgggcctcttacctccaaggtaaattttactctcgtcatgtgatcaatgaggatgtgaggctcctagtggggccacgtttgtttgctcagtgagc

SEQ ID NO: 27798 - DNA, 122 bp, Homo sapiens
  misc_feature (61)..(62): /note="This region represents a CpG dinucleotide"
  misc_feature (61)..(61): /note="Nucleotide may be methylated to form 5-methylcytosine"
tggggccaaaaaaaaaaaaaaggtttctgcttttagagctgggtgcagcctgattatttacggctgagggaaaaacaacttggtttgaaaacatagaagagagaaacgggaattcgtgacgc

SEQ ID NO: 27799 - DNA, 122 bp, Homo sapiens
  misc_feature (61)..(62): /note="This region represents a CpG dinucleotide"
  misc_feature (61)..(61): /note="Nucleotide may be methylated to form 5-methylcytosine"
ctctgtttcagtttccccatctgtgaaaaggggaaatatagtaccttcctcatgtggtgacgagcctgatcaaatgcagcaggccttgtacagtgtgtagcagactgcctggccctggtcag

SEQ ID NO: 27800 - DNA, 122 bp, Homo sapiens
  misc_feature (61)..(62): /note="This region represents a CpG dinucleotide"
  misc_feature (61)..(61): /note="Nucleotide may be methylated to form 5-methylcytosine"
catgtgccatgttggtgtgctgcacccattaactcatcaagagcagttaaacttcttacacggcaattggctctgcccagagagagcattctttaagagaaagaaaatggggctggccaggg

SEQ ID NO: 27801 - DNA, 122 bp, Homo sapiens
  misc_feature (61)..(62): /note="This region represents a CpG dinucleotide"
  misc_feature (61)..(61): /note="Nucleotide may be methylated to form 5-methylcytosine"
aggtagctggccactaatttttttcctgcaggtttagatcctaggtctttatatcaccaccgatttccagggactatcacacaatctgtcagcctcttgtcttctcctgtgccagatgggat

SEQ ID NO: 27802 - DNA, 122 bp, Homo sapiens
  misc_feature (61)..(62): /note="This region represents a CpG dinucleotide"
  misc_feature (61)..(61): /note="Nucleotide may be methylated to form 5-methylcytosine"
ttttatttcctcagctgtcaagtgggggttatcctacatgaaaaccatgagggttcctcccgctaatatttgttgacagtgattttgacatctgtgcttgttgggttacttactacttgatg

SEQ ID NO: 27803 - DNA, 122 bp, Homo sapiens
  misc_feature (61)..(62): /note="This region represents a CpG dinucleotide"
  misc_feature (61)..(61): /note="Nucleotide may be methylated to form 5-methylcytosine"
tccctgtaccgagggagtgctattttccaggccctgggcaaagggctttatgcagcctctcgtctgcagagcagcttggtcaaatggaatcaatatcctcatcttagaggtgcagaaaccac

SEQ ID NO: 27804 - DNA, 122 bp, Homo sapiens
  misc_feature (61)..(62): /note="This region represents a CpG dinucleotide"
  misc_feature (61)..(61): /note="Nucleotide may be methylated to form 5-methylcytosine"
gtagcgatagggcacccaatctgccacccaccgccggcagtgcaaccccagatagcgcaccgaactcactccctgctgggcagtgcaaccccacatagcatccaacccgcctccccacccag

SEQ ID NO: 27805 - DNA, 122 bp, Homo sapiens
  misc_feature (61)..(62): /note="This region represents a CpG dinucleotide"
  misc_feature (61)..(61): /note="Nucleotide may be methylated to form 5-methylcytosine"
gaggtgctggctctgagctgtctgagtgccagggccacagatgactgcaggcagacacttcgtccttgctcctcccgccctcttgctcctgcagggcacctgggttttgggtgccttactcc

SEQ ID NO: 27806 - DNA, 122 bp, Homo sapiens
  misc_feature (61)..(62): /note="This region represents a CpG dinucleotide"
  misc_feature (61)..(61): /note="Nucleotide may be methylated to form 5-methylcytosine"
ttttttcttgttctcccctattttcggagttctcaaccatcatctcctgcccccaggaggcgactctgggaattagaggttgtctattcccatgtctgaattcttgcctaaaggccttcaat

SEQ ID NO: 27807 - DNA, 122 bp, Homo sapiens
  misc_feature (61)..(62): /note="This region represents a CpG dinucleotide"
  misc_feature (61)..(61): /note="Nucleotide may be methylated to form 5-methylcytosine"
cctctccacatggcagctcacaccttggaagcctgcttcatcaaagccaggagttaagagcgtgaaaacaaggtagaaattacagctttcataaccgcatcttggatgtggctacacatcac

SEQ ID NO: 27808 - DNA, 122 bp, Homo sapiens
  misc_feature (61)..(62): /note="This region represents a CpG dinucleotide"
  misc_feature (61)..(61): /note="Nucleotide may be methylated to form 5-methylcytosine"
agagaccagcatggcaggagcaaatgagcgagaggaagagcggtggaagatgaggccagacggttcaatgcatctcgaagggtctggagaccatgtaaagagcttagtctttgtccatttgg

SEQ ID NO: 27809 - DNA, 122 bp, Homo sapiens
  misc_feature (61)..(62): /note="This region represents a CpG dinucleotide"
  misc_feature (61)..(61): /note="Nucleotide may be methylated to form 5-methylcytosine"
agaggaggggacttgtgggcaggatcaggagggaggacaatggggagcataggttgaaggcggatcagacaggaagcagctgcctacctattccagctgatggatgtgccctgcgagttcta

SEQ ID NO: 27810 - DNA, 122 bp, Homo sapiens
  misc_feature (61)..(62): /note="This region represents a CpG dinucleotide"
  misc_feature (61)..(61): /note="Nucleotide may be methylated to form 5-methylcytosine"
cctggctttgcctctcagaggttccggggctctcccagggttggtttacttgtggtgaagcgtgactaataggtaaagtatctgacaaaatgggccccacaggccatggttgctgcttctgg

SEQ ID NO: 27811 - DNA, 122 bp, Homo sapiens
  misc_feature (61)..(62): /note="This region represents a CpG dinucleotide"
  misc_feature (61)..(61): /note="Nucleotide may be methylated to form 5-methylcytosine"
atggcatcagccaccacacggcctgctctcatggagatggttcagcacccagggacctgacgggaacagtggacagcatacaatacaatactcaaaacaaatgggctgtccctgccaagtga

SEQ ID NO: 27812 - DNA, 122 bp, Homo sapiens
  misc_feature (61)..(62): /note="This region represents a CpG dinucleotide"
  misc_feature (61)..(61): /note="Nucleotide may be methylated to form 5-methylcytosine"
ccttacaggaagtacagtgtgatggagcagcagtccaagttcatcctccaagagagtacacggagggcaccactctatgctgccagccagagccacagccttcagaaaagggaggggtcttt

SEQ ID NO: 27813 - DNA, 122 bp, Homo sapiens
  misc_feature (61)..(62): /note="This region represents a CpG dinucleotide"
  misc_feature (61)..(61): /note="Nucleotide may be methylated to form 5-methylcytosine"
agcctcacaccctttatctgtgatgacttttcgagagtctggggccaacgtcctgcagaacgtcccccagatgcatctgtctctcagggcatcattaaattccctcttatgcacctcagttc

SEQ ID NO: 27814 - DNA, 122 bp, Homo sapiens
  misc_feature (61)..(62): /note="This region represents a CpG dinucleotide"
  misc_feature (61)..(61): /note="Nucleotide may be methylated to form 5-methylcytosine"
tgagctgagtaactgggtgggtgatgatgtcactgactaggatagggaagctaggacaagcggagttcacggaaacacagcaattcccctctatggggcacgtctcaccctatgtggttaca

SEQ ID NO: 27815 - DNA, 122 bp, Homo sapiens
  misc_feature (61)..(62): /note="This region represents a CpG dinucleotide"
  misc_feature (61)..(61): /note="Nucleotide may be methylated to form 5-methylcytosine"
gtgcgtagtacgaatttgtgcctgctgggtccttgtacctttacgccaggcagaaatctccgtaatcgtcagtgtagatttcatttccttgtggcaaggaatataaagtaatacaaccaaag

SEQ ID NO: 27816 - DNA, 122 bp, Homo sapiens
  misc_feature (61)..(62): /note="This region represents a CpG dinucleotide"
  misc_feature (61)..(61): /note="Nucleotide may be methylated to form 5-methylcytosine"
agagccccctggcatgttgggagtggggtgaggcagggagttatcgaagaggaagagaagcggagaaataaggaagcccagtgtcaaagcttaaaatgcccgtttctacaccctgcaccagc

SEQ ID NO: 27817 - DNA, 122 bp, Homo sapiens
  misc_feature (61)..(62): /note="This region represents a CpG dinucleotide"
  misc_feature (61)..(61): /note="Nucleotide may be methylated to form 5-methylcytosine"
acaccttgcactgcttctgggtttactgttgcctcgttttaaagtgggactttctcttgacggaagtgtgttaagaattggaaaattccctatcagtagactagcaccatcttgacagcctt

SEQ ID NO: 27818 - DNA, 122 bp, Homo sapiens
  misc_feature (61)..(62): /note="This region represents a CpG dinucleotide"
  misc_feature (61)..(61): /note="Nucleotide may be methylated to form 5-methylcytosine"
cagtgacctcaccatttccaccccacaagactccgccaacaggcagtctgcccctcagagcgccccatgggcaggagctttgtggctgtgtcagctgtgccacatcctcctgcccagcccgg

SEQ ID NO: 27819 - DNA, 122 bp, Homo sapiens
  misc_feature (61)..(62): /note="This region represents a CpG dinucleotide"
  misc_feature (61)..(61): /note="Nucleotide may be methylated to form 5-methylcytosine"
gacaaagagacctgggtttaatccttgcagaccttagctatattgtctaacctcttgggacgtcagtttcctcatctttgaaatgggcatgccaacatccaacttctcatgaggacttatgg

SEQ ID NO: 27820 - DNA, 122 bp, Homo sapiens
  misc_feature (61)..(62): /note="This region represents a CpG dinucleotide"
  misc_feature (61)..(61): /note="Nucleotide may be methylated to form 5-methylcytosine"
tagtaggcaatgtgccaagtcagtgctagggaaatacagagatgaacaagagcacacagtcggttcctggagggctgcgtctcagcctggagaggcaaacagcttgtaacatctttggaagc

SEQ ID NO: 27821 - DNA, 122 bp, Homo sapiens
  misc_feature (61)..(62): /note="This region represents a CpG dinucleotide"
  misc_feature (61)..(61): /note="Nucleotide may be methylated to form 5-methylcytosine"
aaaaattagccaggtgtgatggtgtgtgcctatagtccccactatccaggaggctaagcccggagggttgcttgagcttgggtggttgaggctgcagtgagctgtgattgcgccactgcact

SEQ ID NO: 27822 - DNA, 122 bp, Homo sapiens
  misc_feature (61)..(62): /note="This region represents a CpG dinucleotide"
  misc_feature (61)..(61): /note="Nucleotide may be methylated to form 5-methylcytosine"
ttctcacaatgtatagcctatgatgtttcaatacaaacagctggactgagacccatacaacgcatatgcacagtcttcatttcacaataagcttctcctcccagaaagctcttcagttggtt

SEQ ID NO: 27823 - DNA, 122 bp, Homo sapiens
  misc_feature (61)..(62): /note="This region represents a CpG dinucleotide"
  misc_feature (61)..(61): /note="Nucleotide may be methylated to form 5-methylcytosine"
agggctgcaggcccagggccagatcctgacttgcccacccgccggctgtgtgaccttcagcgcgcgactaacctctctgtgcctatttcctcgaggaaaatgccgggaaatagcagcgcctg

SEQ ID NO: 27824 - DNA, 122 bp, Homo sapiens
  misc_feature (61)..(62): /note="This region represents a CpG dinucleotide"
  misc_feature (61)..(61): /note="Nucleotide may be methylated to form 5-methylcytosine"
tggtggggcagcgggcagacggtcctggagcaggaagcgggcagtgggggtggcacccgccgcctcccgggcagcccaaggcaagcacaggcaaccggggccgggccacggcacctgggggt

SEQ ID NO: 27825 - DNA, 122 bp, Homo sapiens
  misc_feature (61)..(62): /note="This region represents a CpG dinucleotide"
  misc_feature (61)..(61): /note="Nucleotide may be methylated to form 5-methylcytosine"
aattctaagaatagggcccaagaatctacggtctagggagcttccaggcgattctcattacgccaaagctgggaaaccactgcaatattgggttgttgccagtgaagagtttgctaaactcc

SEQ ID NO: 27826 - DNA, 122 bp, Homo sapiens
  misc_feature (61)..(62): /note="This region represents a CpG dinucleotide"
  misc_feature (61)..(61): /note="Nucleotide may be methylated to form 5-methylcytosine"
ctgcatgctgcactgcacgccactgtggtccaggacctgggcctgcacgacggcatccagcgcgtgctgtttggcaacaacctgaacttctggctgcacaagcttgtcttcgtggatgccgt

SEQ ID NO: 27827 - DNA, 122 bp, Homo sapiens
  misc_feature (61)..(62): /note="This region represents a CpG dinucleotide"
  misc_feature (61)..(61): /note="Nucleotide may be methylated to form 5-methylcytosine"
cacctgccaggtgcagcagctgcagctgcccaccctggcctccgaggagcaggggctgcacgcagctgggccggggcggaggcagcagtcgggccagcaggagcggggaggggaggccatgg

SEQ ID NO: 27828 - DNA, 122 bp, Homo sapiens
  misc_feature (61)..(62): /note="This region represents a CpG dinucleotide"
  misc_feature (61)..(61): /note="Nucleotide may be methylated to form 5-methylcytosine"
ggcccacaggctgggaaactcctccttgaagctgggaagcagagggttgggtctcacaggcgaagctcacaggcaaaaaggaacattgagggcggagctgtgaacccttccaaagctctccc

SEQ ID NO: 27829 - DNA, 122 bp, Homo sapiens
  misc_feature (61)..(62): /note="This region represents a CpG dinucleotide"
  misc_feature (61)..(61): /note="Nucleotide may be methylated to form 5-methylcytosine"
tcctctttctgtacagccagtgtaagaacgcagcctgtgggtaagtaccaggaggcctaccgcaacgtgttttatcagcaaggtctttgtgacctgtaccttgtgtcgacctcctatctcat

SEQ ID NO: 27830 - DNA, 122 bp, Homo sapiens
  misc_feature (61)..(62): /note="This region represents a CpG dinucleotide"
  misc_feature (61)..(61): /note="Nucleotide may be methylated to form 5-methylcytosine"
ttcatttgggaaacattaaagaccacaaatctatatttcagaaccatactttaatgcctgcgaaatagtctacctttcaacgactgaatttatttaaccaatttccttctgctgaacactca

SEQ ID NO: 27831 - DNA, 122 bp, Homo sapiens
  misc_feature (61)..(62): /note="This region represents a CpG dinucleotide"
  misc_feature (61)..(61): /note="Nucleotide may be methylated to form 5-methylcytosine"
tcatctttttgttgaccaacttttcctttaatcccaaattgctcgggatttatcatgagccgcctaagaagacatggagttggaagtggagacccagagtggtgcatggaagctggttgtca

SEQ ID NO: 27832 - DNA, 122 bp, Homo sapiens
  misc_feature (61)..(62): /note="This region represents a CpG dinucleotide"
  misc_feature (61)..(61): /note="Nucleotide may be methylated to form 5-methylcytosine"
tcagccccggctgctgaagctgccggcaggtgggcggctccatggagtcctgtgggtaggcgcaggcgcctcctaatcaaatgcagaggatgagcacaactgtttggagaacatggggcctc

SEQ ID NO: 27833 - DNA, 122 bp, Homo sapiens
  misc_feature (61)..(62): /note="This region represents a CpG dinucleotide"
  misc_feature (61)..(61): /note="Nucleotide may be methylated to form 5-methylcytosine"
caatatttttaaaaaatagatctcacctttggttaggtgtcctggaactgctggtaatggcgtctttctctgatggtaccagaaataatggaacttccttgaagctgatagccaatgaaatg

SEQ ID NO: 27834 - DNA, 122 bp, Homo sapiens
  misc_feature (61)..(62): /note="This region represents a CpG dinucleotide"
  misc_feature (61)..(61): /note="Nucleotide may be methylated to form 5-methylcytosine"
cacatttcctctgcctgaagcgggctcccgtcccacatgttcggctgcacatgctccaggcgccccacgggctccagtctccgtccacatgctccgggatgggcgtcttgctcacgcactcc

SEQ ID NO: 27835 - DNA, 122 bp, Homo sapiens
  misc_feature (61)..(62): /note="This region represents a CpG dinucleotide"
  misc_feature (61)..(61): /note="Nucleotide may be methylated to form 5-methylcytosine"
gtgaaactttaagttcactccattatcatttctaaaatttattttgaataagttccctttcgggggagatacccatgtgtagagaatggtatggaaatctgccaatggagggattagaaatt

SEQ ID NO: 27836 - DNA, 122 bp, Homo sapiens
  misc_feature (61)..(62): /note="This region represents a CpG dinucleotide"
  misc_feature (61)..(61): /note="Nucleotide may be methylated to form 5-methylcytosine"
tctgcctaaccacttcagttgacagctcatttgtaagatctgccacactcttttattcagcgtctcctaaagatgccacctctcagatatcaccttaacacacttcttatctgggagggatt

SEQ ID NO: 27837 - DNA, 122 bp, Homo sapiens
  misc_feature (61)..(62): /note="This region represents a CpG dinucleotide"
  misc_feature (61)..(61): /note="Nucleotide may be methylated to form 5-methylcytosine"
aaggaaagatgaattccaacactattttttccctgctccgtcctgggcctatccctcctccgttagccaggcaagtgtgaatcattctgacccagaccaggtgcacaaaaccctgggagggg

SEQ ID NO: 27838 - DNA, 122 bp, Homo sapiens
  misc_feature (61)..(62): /note="This region represents a CpG dinucleotide"
  misc_feature (61)..(61): /note="Nucleotide may be methylated to form 5-methylcytosine"
tcttctttcagagtcactgaaacctgtgactcaaactctctgacataccagaggagggtgcgaggtgctaaaacaggtcacaaggcttgaagtagctgatgcaaactgactcagggaagaga

SEQ ID NO: 27839 - DNA, 122 bp, Homo sapiens
  misc_feature (61)..(62): /note="This region represents a CpG dinucleotide"
  misc_feature (61)..(61): /note="Nucleotide may be methylated to form 5-methylcytosine"
tcagacctagcctctgttctccatgcacttagacaaaaaccgcaaagctgcatatttattcgtaagtcacatctgtcccttgtactagcatagctctgtctctccacctctcgtgtcgcaag

SEQ ID NO: 27840 - DNA, 122 bp, Homo sapiens
  misc_feature (61)..(62): /note="This region represents a CpG dinucleotide"
  misc_feature (61)..(61): /note="Nucleotide may be methylated to form 5-methylcytosine"
tacaaccgcaaaagataatctatagaagctcagccattccaacaattcacacagtaccttcgtgcctggcaggttgcaattctgtcttgctttggcaaatgagtcagtcagaagccagaaag

SEQ ID NO: 27841 - DNA, 122 bp, Homo sapiens
  misc_feature (61)..(62): /note="This region represents a CpG dinucleotide"
  misc_feature (61)..(61): /note="Nucleotide may be methylated to form 5-methylcytosine"
ttctgttgtaatgaaaggtgaggctccaggcagactgcattccttttaaaacaagacagacgtaacaaatcagctgaagtccaaaaaaaaaaaaaaaaaaaaaaaacaaaagctttaaatgc

SEQ ID NO: 27842 - DNA, 122 bp, Homo sapiens
  misc_feature (61)..(62): /note="This region represents a CpG dinucleotide"
  misc_feature (61)..(61): /note="Nucleotide may be methylated to form 5-methylcytosine"
ttgccttttaaagtagagtgtcataggtcatattgattacacaatttttgagttagtgtgcgtcttatgtgttgaatacattagctaaaagtaagatgcttggaaaatgtgtaaactgtgaa

SEQ ID NO: 27843 - DNA, 122 bp, Homo sapiens
  misc_feature (61)..(62): /note="This region represents a CpG dinucleotide"
  misc_feature (61)..(61): /note="Nucleotide may be methylated to form 5-methylcytosine"
tcctggggaaaatttcagcagctggggccatgtaatttaaaacctctgaaaagtgtgctgcggtccgtgcacagcattagtataacgtgagggctgaatgcagcccattctctggagaactt

SEQ ID NO: 27844 - DNA, 122 bp, Homo sapiens
  misc_feature (61)..(62): /note="This region represents a CpG dinucleotide"
  misc_feature (61)..(61): /note="Nucleotide may be methylated to form 5-methylcytosine"
gcagaggcgtgagactgccggccagccctgctgtgtacactgatagaattagtgagcgagcgtcccactctgatggaatccagatggaactcgtcactgtcactgcggtggagacggtgggg

SEQ ID NO: 27845 - DNA, 122 bp, Homo sapiens
  misc_feature (61)..(62): /note="This region represents a CpG dinucleotide"
  misc_feature (61)..(61): /note="Nucleotide may be methylated to form 5-methylcytosine"
gctactgtgagggctgttgaatttttctccaaagctcagatgcccagtattcctagtcttcgaaagagagagaggaagattgagagagagagagagagagagagagagagaagaagttttct

SEQ ID NO: 27846 - DNA, 122 bp, Homo sapiens
  misc_feature (61)..(62): /note="This region represents a CpG dinucleotide"
  misc_feature (61)..(61): /note="Nucleotide may be methylated to form 5-methylcytosine"
aaacacatatttttctagtgatacatgcaaagaaaactcaaacagggtgagggcacagagcgttccctcagaaccctggacatgctattctggtggcctcagtaatgcagtgatactgtatg

SEQ ID NO: 27847 - DNA, 122 bp, Homo sapiens
  misc_feature (61)..(62): /note="This region represents a CpG dinucleotide"
  misc_feature (61)..(61): /note="Nucleotide may be methylated to form 5-methylcytosine"
gggattggagagcagagatcttagtctagttttctttctttctttttttcctttttgagacggagtctcgctctgttgcccaggctggagagcagtggcgagatcttggctcactgcaagct

SEQ ID NO: 27848 - DNA, 122 bp, Homo sapiens
  misc_feature (61)..(62): /note="This region represents a CpG dinucleotide"
  misc_feature (61)..(61): /note="Nucleotide may be methylated to form 5-methylcytosine"
tactcaccacatctgtcagatcagattcaacttcagaatgaagagaatcccagacaagcccggtcgtttctttgcaatgttcttcatggtcgaggtcatccagctctgtcttctagggaata

SEQ ID NO: 27849 - DNA, 122 bp, Homo sapiens
  misc_feature (61)..(62): /note="This region represents a CpG dinucleotide"
  misc_feature (61)..(61): /note="Nucleotide may be methylated to form 5-methylcytosine"
ggtggacacagtgttcctggtgctttctccacaaaagaaacctcaccttcctaaagctatcgatccacccactggcgctgtggcaatgaaattctcacgggggaaagtctcagggccagcat

SEQ ID NO: 27850 - DNA, 122 bp, Homo sapiens
  misc_feature (61)..(62): /note="This region represents a CpG dinucleotide"
  misc_feature (61)..(61): /note="Nucleotide may be methylated to form 5-methylcytosine"
gcccttaggcagattcacacagcattcttgcctttccctgggggactgacttcaaatgtccgtcacattcctttcctatagcatataggccctgggtcttgggggtaatggcatggggatcc

SEQ ID NO: 27851 - DNA, 122 bp, Homo sapiens
  misc_feature (61)..(62): /note="This region represents a CpG dinucleotide"
  misc_feature (61)..(61): /note="Nucleotide may be methylated to form 5-methylcytosine"
caggttaaagttcaaactccttaacatggtcctttatgacctggctcctgcctgcctaaccggcttcatctttggtcactcactcacatttcagccacactaaactactctgagcttcctga

SEQ ID NO: 27852 - DNA, 122 bp, Homo sapiens
  misc_feature (61)..(62): /note="This region represents a CpG dinucleotide"
  misc_feature (61)..(61): /note="Nucleotide may be methylated to form 5-methylcytosine"
gctgctctcactgtgttccctcagttaattccacaacaaccctaggaaggaggaacaaggcgtggagggattaagaccttgcccacagccacatacagagctagtgagcatcaatgtcaatg

SEQ ID NO: 27853 - DNA, 122 bp, Homo sapiens
  misc_feature (61)..(62): /note="This region represents a CpG dinucleotide"
  misc_feature (61)..(61): /note="Nucleotide may be methylated to form 5-methylcytosine"
gatgtgacgccatgacaagtcaggctggtcataattggccccagttaactcgcatagatgcgtcaccctttcatacacactccagggcaagaaattttgtattgtttctttgaagttatcca

SEQ ID NO: 27854 - DNA, 122 bp, Homo sapiens
  misc_feature (61)..(62): /note="This region represents a CpG dinucleotide"
  misc_feature (61)..(61): /note="Nucleotide may be methylated to form 5-methylcytosine"
gtcagctaaggtaaccatttaatgcctgacaacaagtgagtcaagaacactacaaagaaccggatggacagcacttttatttgatgaatgacctgaactacaaaccgagcagacctcaatat

SEQ ID NO: 27855 - DNA, 122 bp, Homo sapiens
  misc_feature (61)..(62): /note="This region represents a CpG dinucleotide"
  misc_feature (61)..(61): /note="Nucleotide may be methylated to form 5-methylcytosine"
tggaagccagtcacaccaccagagcagcttcattctgtgaagaagttccaatgatccgcccgccttggcctcccaaagtgctcggattataggcgtgagccaccacacccggccctaataca

SEQ ID NO: 27856 - DNA, 122 bp, Homo sapiens
  misc_feature (61)..(62): /note="This region represents a CpG dinucleotide"
  misc_feature (61)..(61): /note="Nucleotide may be methylated to form 5-methylcytosine"
tgccctctgagaacacttggcaataacattcctttcctgacaggctcattttgtagctgacggacattgttttctttcccctgtttacctaatgtggcccagagtaacagaacaggctgtgc

SEQ ID NO: 27857 - DNA, 122 bp, Homo sapiens
  misc_feature (61)..(62): /note="This region represents a CpG dinucleotide"
  misc_feature (61)..(61): /note="Nucleotide may be methylated to form 5-methylcytosine"
catgtgtattattaaacattcaaatgaaacagaaatatttgcctgtggggagaatgtctgcggtggcctctggtgacagctctgcaacagaactgagacagccacctcgcatggtgcttggg

SEQ ID NO: 27858 - DNA, 122 bp, Homo sapiens
  misc_feature (61)..(62): /note="This region represents a CpG dinucleotide"
  misc_feature (61)..(61): /note="Nucleotide may be methylated to form 5-methylcytosine"
taagtagggctgcctcaggctcccatgaaggttctcaggatgtcacccgtgctccacttgcgcttggtgtggccttgttgctccagtccagcagcagcaattgtcctaggtgtggctgtgtg

SEQ ID NO: 27859 - DNA, 122 bp, Homo sapiens
  misc_feature (61)..(62): /note="This region represents a CpG dinucleotide"
  misc_feature (61)..(61): /note="Nucleotide may be methylated to form 5-methylcytosine"
aaattgttcatattattatagctcttcaaatatgactcacttaagattcttgccgagcaccgtggctcatacttgtagtcccagtactttgggaggctgaggcggatggatcctttgaggtc

SEQ ID NO: 27860 - DNA, 122 bp, Homo sapiens
  misc_feature (61)..(62): /note="This region represents a CpG dinucleotide"
  misc_feature (61)..(61): /note="Nucleotide may be methylated to form 5-methylcytosine"
aactgggcgtgcacacaacagggagcgcagagctcagggccgacagcactcttgccactgcgagctttgtagggcgcaacatcaatctggttacatcccctcagaagttgactggaagtgtc

SEQ ID NO: 27861 - DNA, 122 bp, Homo sapiens
  misc_feature (61)..(62): /note="This region represents a CpG dinucleotide"
  misc_feature (61)..(61): /note="Nucleotide may be methylated to form 5-methylcytosine"
gtgaatatttcagtaacattggctgtaaatcatacccaggccttttctttctgtgactcacgtgatgtaaggaagagatcagatgacgaggtcaagaggacacaaaacctcagccctgcttc

SEQ ID NO: 27862 - DNA, 122 bp, Homo sapiens
  misc_feature (61)..(62): /note="This region represents a CpG dinucleotide"
  misc_feature (61)..(61): /note="Nucleotide may be methylated to form 5-methylcytosine"
gaagataagaaaaaaagaggaagaggagtgactcaaattctttggagcactcaccagctacgctccagatagagcaagagcgctgaatcaacccagcatcacacctctcagttaagcaagtt

SEQ ID NO: 27863 - DNA, 122 bp, Homo sapiens
  misc_feature (61)..(62): /note="This region represents a CpG dinucleotide"
  misc_feature (61)..(61): /note="Nucleotide may be methylated to form 5-methylcytosine"
cccaatttataacagtgctagttccaaacaaatctaaagtatgtgaatcactcactgtatcgacagctgtctaatttcactcatccaagcccacaatatgcctgacacggtctcagtctgcc

SEQ ID NO: 27864 - DNA, 122 bp, Homo sapiens
  misc_feature (61)..(62): /note="This region represents a CpG dinucleotide"
  misc_feature (61)..(61): /note="Nucleotide may be methylated to form 5-methylcytosine"
atacattaaaccatttgggagtatttacttaggaaggagatgaaagaagtaccagcttagcgggcattgtgaagcaccatgagaatgtataagggagagctcacaaatgcctaattccttag

SEQ ID NO: 27865 - DNA, 122 bp, Homo sapiens
  misc_feature (61)..(62): /note="This region represents a CpG dinucleotide"
  misc_feature (61)..(61): /note="Nucleotide may be methylated to form 5-methylcytosine"
ggaggccgtggcaggcagatcacttgaaaagccatccatgatccatccatgatccagcctcgccatccatgatccagcctcgcctctcttttcctcacatatcctgtctactttactcccca

SEQ ID NO: 27866 - DNA, 122 bp, Homo sapiens
  misc_feature (61)..(62): /note="This region represents a CpG dinucleotide"
  misc_feature (61)..(61): /note="Nucleotide may be methylated to form 5-methylcytosine"
ttcatgtacacattttttggagatgtaagttttcatgtggacgtaagttttcatttctcacgaatatacacctaggaatggaattgctggcccatatggtaactctgtagttaaccttttga

SEQ ID NO: 27867 - DNA, 122 bp, Homo sapiens
  misc_feature (61)..(62): /note="This region represents a CpG dinucleotide"
  misc_feature (61)..(61): /note="Nucleotide may be methylated to form 5-methylcytosine"
atggggtaaagcaagttttgcaaggtcattgcagcctgaaagatcactatgatttcagttcgtgctggaagttttcaaaaattgaaatcctgaaaaaaaaaaactgctaacatatagaagat

SEQ ID NO: 27868 - DNA, 122 bp, Homo sapiens
  misc_feature (61)..(62): /note="This region represents a CpG dinucleotide"
  misc_feature (61)..(61): /note="Nucleotide may be methylated to form 5-methylcytosine"
tcctgtttctatggatttgactattctgggtactatatgtaaatgataccacacagtctgcgttcttgtgactggcttacttcacttagcacaatgtcattagaattcatccatgtggtagc

SEQ ID NO: 27869 - DNA, 122 bp, Homo sapiens
  misc_feature (61)..(62): /note="This region represents a CpG dinucleotide"
  misc_feature (61)..(61): /note="Nucleotide may be methylated to form 5-methylcytosine"
ttcaccctaaaatttggggagaaatactattgtttttcaaatatatatattgtttattaacgtgtaatgatgtagtatttcttaacaaatagtttaaaatattctctagggctgggcacagt

SEQ ID NO: 27870 - DNA, 122 bp, Homo sapiens
  misc_feature (61)..(62): /note="This region represents a CpG dinucleotide"
  misc_feature (61)..(61): /note="Nucleotide may be methylated to form 5-methylcytosine"
gtgtgctgcatgcagtgcgtatcttgcttctgcgagcctaagatggcaggcaggattagccgtgcttgtgctgtgtgtgcatgctgtgtctagaattcattacacgttgcctagtatttcag

SEQ ID NO: 27871 - DNA, 122 bp, Homo sapiens
  misc_feature (61)..(62): /note="This region represents a CpG dinucleotide"
  misc_feature (61)..(61): /note="Nucleotide may be methylated to form 5-methylcytosine"
taggaagtgagatggtagtaaaaataaggtaggtgaagttatacccacaaaatagaatatcggggtgccagatcaatatttaataaatggttgaaaacttcaaacatttaaagattattttg

SEQ ID NO: 27872 - DNA, 122 bp, Homo sapiens
  misc_feature (61)..(62): /note="This region represents a CpG dinucleotide"
  misc_feature (61)..(61): /note="Nucleotide may be methylated to form 5-methylcytosine"
ggtttggccctcactggttggcttgtttacctgccatttacaaacaggtccttgatagctcgtagcagggagggacagcctgctgctgagcccagccccccagcaagtgggccttggacaca

SEQ ID NO: 27873 - DNA, 122 bp, Homo sapiens
  misc_feature (61)..(62): /note="This region represents a CpG dinucleotide"
  misc_feature (61)..(61): /note="Nucleotide may be methylated to form 5-methylcytosine"
accttctgctttctagaaacatcattgctaatattacatttggccttttttcacttctctcgccttctgcttgttttattgacttttctttccttcctactaagaaagcacttccttggggg

SEQ ID NO: 27874 - DNA, 122 bp, Homo sapiens
  misc_feature (61)..(62): /note="This region represents a CpG dinucleotide"
  misc_feature (61)..(61): /note="Nucleotide may be methylated to form 5-methylcytosine"
gccagtggggatgtggagggccaggagtgccagaaggtccaaggtgttggtgtggtgtcacgtccaaggcaatcccaaactggccccagaacccacgtgtctaagtcctaccttcgtcgcct

SEQ ID NO: 27875 - DNA, 122 bp, Homo sapiens
  misc_feature (61)..(62): /note="This region represents a CpG dinucleotide"
  misc_feature (61)..(61): /note="Nucleotide may be methylated to form 5-methylcytosine"
tgggcaatgagagcatgtgggagctccacttacgggcagccttggctggtttctgttgagcgtcttcaccgttatctacgagtccagaaacatccagcagagggattgtgcatcgatattgc

SEQ ID NO: 27876 - DNA, 122 bp, Homo sapiens
  misc_feature (61)..(62): /note="This region represents a CpG dinucleotide"
  misc_feature (61)..(61): /note="Nucleotide may be methylated to form 5-methylcytosine"
gaggactcgccaggcaggtgctgtgtggggctgggggcccaggctgcaaacccagcaggacggggagggccaggatgggtgttcagtgtgaggttggccaggcagtcccagtctctggctgc

SEQ ID NO: 27877 - DNA, 122 bp, Homo sapiens
  misc_feature (61)..(62): /note="This region represents a CpG dinucleotide"
  misc_feature (61)..(61): /note="Nucleotide may be methylated to form 5-methylcytosine"
aaaaaagtgtgtccttcatgggttacactttcatatttttatgcagtgttaagttagctacgttatggggaacttgggttttattcctgctcgtgcatgatgtatgtttcagaacttatttg

SEQ ID NO: 27878 - DNA, 122 bp, Homo sapiens
  misc_feature (61)..(62): /note="This region represents a CpG dinucleotide"
  misc_feature (61)..(61): /note="Nucleotide may be methylated to form 5-methylcytosine"
ctggttcctgttcctgggcatccccaaggagaaggccccaagtcgtgtgtccactgcagacgtcatgactcacaggactgggattgtggctaaaaggagtctcaatggttcagctcctctcc

SEQ ID NO: 27879 - DNA, 122 bp, Homo sapiens
  misc_feature (61)..(62): /note="This region represents a CpG dinucleotide"
  misc_feature (61)..(61): /note="Nucleotide may be methylated to form 5-methylcytosine"
gaatttttgtaaatatacttaaatgccttacgttccctaaaggggactatttcaaacagacgcaaatacttgactgtgtcttctaaaggacttgtttactcaattcgagagatgaagagaga

SEQ ID NO: 27880 - DNA, 122 bp, Homo sapiens
  misc_feature (61)..(62): /note="This region represents a CpG dinucleotide"
  misc_feature (61)..(61): /note="Nucleotide may be methylated to form 5-methylcytosine"
aacaaacccgtgaagtgagtgctattattatctgctgttcacaagtgagaagctgaggcacggagaggttaagtaaacttgctcaaggtcacacagctacaaagaggcaaaaccaggattgc

SEQ ID NO: 27881 - DNA, 122 bp, Homo sapiens
  misc_feature (61)..(62): /note="This region represents a CpG dinucleotide"
  misc_feature (61)..(61): /note="Nucleotide may be methylated to form 5-methylcytosine"
ccagacatatctagcaaataaaacaggcctcaatccagaggctagtatttcttctcacatcggaaatgataaagatgctgtgaccacaactttcacagatcgtcatttcactgttttgccac

SEQ ID NO: 27882 - DNA, 122 bp, Homo sapiens
  misc_feature (61)..(62): /note="This region represents a CpG dinucleotide"
  misc_feature (61)..(61): /note="Nucleotide may be methylated to form 5-methylcytosine"
cctcagctggccagcaggacttgactgcaacctgatttaaagtattaacatacctagggccgggctcagtggtttggtggctcatgcctgtaatcccaacactttcggaggctgacgtgggc

SEQ ID NO: 27883 - DNA, 122 bp, Homo sapiens
  misc_feature (61)..(62): /note="This region represents a CpG dinucleotide"
  misc_feature (61)..(61): /note="Nucleotide may be methylated to form 5-methylcytosine"
accagtctctgtcttccctctttggctccagctgctttaattggctggggctgccagtggcgctgacatttacctggtgggaaggagggcctcctccctcttgaattgagatgctaaaaata

SEQ ID NO: 27884 - DNA, 122 bp, Homo sapiens
  misc_feature (61)..(62): /note="This region represents a CpG dinucleotide"
  misc_feature (61)..(61): /note="Nucleotide may be methylated to form 5-methylcytosine"
gggctggaatttagaagccaacatgtctagttttacggtccacattcttaaccattaggacgtatggccctaacgttttcagttgcatgccgagggcagtgtacaccaattaagcaaggaag

SEQ ID NO: 27885 - DNA, 122 bp, Homo sapiens
  misc_feature (61)..(62): /note="This region represents a CpG dinucleotide"
  misc_feature (61)..(61): /note="Nucleotide may be methylated to form 5-methylcytosine"
gacttcctagatacctaattcagtggacattttttcagaccttgtcttccttaaacttttcgtagcatttcacttggttaaccaggaagatatgggtgctaatactcacccagtcacttaag

SEQ ID NO: 27886 - DNA, 122 bp, Homo sapiens
  misc_feature (61)..(62): /note="This region represents a CpG dinucleotide"
  misc_feature (61)..(61): /note="Nucleotide may be methylated to form 5-methylcytosine"
ctcgagttaggtctccagaccaaaacagagctccacctcttatatttccagatgattgtgcgatgaacataaacaatgttaccatcattttagattttctgtttctgagttatccaatttac

SEQ ID NO: 27887 - DNA, 122 bp, Homo sapiens
  misc_feature (61)..(62): /note="This region represents a CpG dinucleotide"
  misc_feature (61)..(61): /note="Nucleotide may be methylated to form 5-methylcytosine"
tatctaataccttcctttatagcaaaaggccattcagaattacacattgcacttagttgtcgtatctcagtttgaaatagttccttgtcttcctttgatttttataaccttgactttttaaa

SEQ ID NO: 27888 - DNA, 122 bp, Homo sapiens
  misc_feature (61)..(62): /note="This region represents a CpG dinucleotide"
  misc_feature (61)..(61): /note="Nucleotide may be methylated to form 5-methylcytosine"
cacatagttttttacttgtgttctttccctgtaaatgtcaaccacttacactcaaagacacggaaggaaagggaaagatatggcaatcatagttccttttcttttcaggttatcctttgcaa

SEQ ID NO: 27889 - DNA, 122 bp, Homo sapiens
  misc_feature (61)..(62): /note="This region represents a CpG dinucleotide"
  misc_feature (61)..(61): /note="Nucleotide may be methylated to form 5-methylcytosine"
acagatgaggaaactgaggcccagagaagccaagtagtgacctagggtcacacagattgccgttaagtggcaagatacggggtgtgtactcaggcatatcggatctgtaaagtgagggataa

SEQ ID NO: 27890 - DNA, 122 bp, Homo sapiens
  misc_feature (61)..(62): /note="This region represents a CpG dinucleotide"
  misc_feature (61)..(61): /note="Nucleotide may be methylated to form 5-methylcytosine"
ttcttggggttgatcttgaacttggccccatgaggcctatagtgcacgggagtgggcgtccgctcctcctccagggagcgcaggtagtggccgggcaggcgggaacagatgccctcccgcag

SEQ ID NO: 27891 - DNA, 122 bp, Homo sapiens
  misc_feature (61)..(62): /note="This region represents a CpG dinucleotide"
  misc_feature (61)..(61): /note="Nucleotide may be methylated to form 5-methylcytosine"
acctggaagcttttacggtggggagcggcggggctctagttcttccgggttaggactttgcgcaggaatgcagaggcagtgggagggaatgggggtaaatgttccgtgccgcctcacgcggt

SEQ ID NO: 27892 - DNA, 122 bp, Homo sapiens
  misc_feature (61)..(62): /note="This region represents a CpG dinucleotide"
  misc_feature (61)..(61): /note="Nucleotide may be methylated to form 5-methylcytosine"
ataaaggttgagttaggacaagaacccagttttctaggcagtgctctccccatacatggccgctatttatttccttccttccttccttccttccttctttccttctttcttttctctttctt

SEQ ID NO: 27893 - DNA, 122 bp, Homo sapiens
  misc_feature (61)..(62): /note="This region represents a CpG dinucleotide"
  misc_feature (61)..(61): /note="Nucleotide may be methylated to form 5-methylcytosine"
caagcctccacatcgttcctgccaccacaactaatcccagttcccagatctgggggtctgcgtgttcagcttctgtcactgagtctgagagagaaaaaatcatgagaacagggaccgcatag

SEQ ID NO: 27894 - DNA, 122 bp, Homo sapiens
  misc_feature (61)..(62): /note="This region represents a CpG dinucleotide"
  misc_feature (61)..(61): /note="Nucleotide may be methylated to form 5-methylcytosine"
ttctatcagatgccagatcaccctccttccatcacgtcacaagctgtaagacccgacttgcgtaagcaatctcctgggctttttgagggttaagtattatgtttattgcagcacctatgctt

SEQ ID NO: 27895 - DNA, 122 bp, Homo sapiens
  misc_feature (61)..(62): /note="This region represents a CpG dinucleotide"
  misc_feature (61)..(61): /note="Nucleotide may be methylated to form 5-methylcytosine"
tcccttgacttctctgagcctgcttactgtcttagctgctcttgctggaaacctgggagtcgtttctgactcattgtgcttcctcaatgcccacgtggaatcagctagcaaatcctactggc

SEQ ID NO: 27896 - DNA, 122 bp, Homo sapiens
  misc_feature (61)..(62): /note="This region represents a CpG dinucleotide"
  misc_feature (61)..(61): /note="Nucleotide may be methylated to form 5-methylcytosine"
cacccagttaatgagcaaacaaggtaggtggcacccatgagcctgctgtgacatttaccacggggcacattctcctaagagtaactgcaaggcaatgtgtataatgataaaatgatcttact

SEQ ID NO: 27897 - DNA, 122 bp, Homo sapiens
  misc_feature (61)..(62): /note="This region represents a CpG dinucleotide"
  misc_feature (61)..(61): /note="Nucleotide may be methylated to form 5-methylcytosine"
actggaagataatagatttgtgttgttttaagccacaaagtttggggtaatttgttacagcggcaataggaaattaatacattggtttcaagggttagtatgtggagacaattcaaaaacta

SEQ ID NO: 27898 - DNA, 122 bp, Homo sapiens
  misc_feature (61)..(62): /note="This region represents a CpG dinucleotide"
  misc_feature (61)..(61): /note="Nucleotide may be methylated to form 5-methylcytosine"
tcccattttacagatgacaaaactgaggctcacgaaggtggttaactagccaaggccactcgtctaggaagtgagaggccaaggttcaatcctaggcaatctggcttaagtttgtgttctgt

SEQ ID NO: 27899 - DNA, 122 bp, Homo sapiens
  misc_feature (61)..(62): /note="This region represents a CpG dinucleotide"
  misc_feature (61)..(61): /note="Nucleotide may be methylated to form 5-methylcytosine"
cgaacgagtaggaccttaaaacacaccgctccccaccttccttctgtgaagaactcaatgcgagattgatcatagtggtgatgacatgactctgtcagttgttgaagcacatggatggaagt

SEQ ID NO: 27900 - DNA, 122 bp, Homo sapiens
  misc_feature (61)..(62): /note="This region represents a CpG dinucleotide"
  misc_feature (61)..(61): /note="Nucleotide may be methylated to form 5-methylcytosine"
acatagataaaaatagaacatttgccaacccgtgggtactgtcatcattccccttggctgcgttcccaccctcctgctacaatcagtgtgaaccagaagtaaacagcgagcagctcaggagc

SEQ ID NO: 27901 - DNA, 122 bp, Homo sapiens
  misc_feature (61)..(62): /note="This region represents a CpG dinucleotide"
  misc_feature (61)..(61): /note="Nucleotide may be methylated to form 5-methylcytosine"
gattttattcaaatacaaatgaatatttgtatttgtgaaatagatactgtttttattctccgtttttacaagtggggaaattcaggctctgagagggaagggaactgtccaaggtatcacaa

SEQ ID NO: 27902 - DNA, 122 bp, Homo sapiens
  misc_feature (61)..(62): /note="This region represents a CpG dinucleotide"
  misc_feature (61)..(61): /note="Nucleotide may be methylated to form 5-methylcytosine"
tagattagtcatttggaaagttctttagcccagtgtccagtcattacatgaaaaagcaaacggatcttttaccttgctcaaacatgtttgtttttcattgtttcagttttttctgtttgtta

SEQ ID NO: 27903 - DNA, 122 bp, Homo sapiens
  misc_feature (61)..(62): /note="This region represents a CpG dinucleotide"
  misc_feature (61)..(61): /note="Nucleotide may be methylated to form 5-methylcytosine"
tgttttagaaaactaagtagtaggtactcctagaaatatcatgagaaaagcttttggctccgagaactgtgaacctctcattttacaaaccatgtaaatagatccctccccagtctcccaat

SEQ ID NO: 27904 - DNA, 122 bp, Homo sapiens
  misc_feature (61)..(62): /note="This region represents a CpG dinucleotide"
  misc_feature (61)..(61): /note="Nucleotide may be methylated to form 5-methylcytosine"
tcccccagagaactctgctctgttagaggaaagaaaccaacctcacatattgaaacaaaacggataggataaaaataaagccctgaagtggtttggtgaccgaggtcatttggggcattaag

SEQ ID NO: 27905 - DNA, 122 bp, Homo sapiens
  misc_feature (61)..(62): /note="This region represents a CpG dinucleotide"
  misc_feature (61)..(61): /note="Nucleotide may be methylated to form 5-methylcytosine"
caagtaatctccctctcataccaactagttatcacaagggttccttacctgttagtggaacgaggattgtgttctcttgttctctatcaatcaaccaacaaaggttatagtctcagcactaa

SEQ ID NO: 27906 - DNA, 122 bp, Homo sapiens
  misc_feature (61)..(62): /note="This region represents a CpG dinucleotide"
  misc_feature (61)..(61): /note="Nucleotide may be methylated to form 5-methylcytosine"
ctggagactactgttcagagaatgcagccttgcaagcctgcactgagtcaagctgctgaccgacaaccaccccccttctcccaatctcctttacccaataaatacaaagggctgtaaaactc

SEQ ID NO: 27907 - DNA, 122 bp, Homo sapiens
  misc_feature (61)..(62): /note="This region represents a CpG dinucleotide"
  misc_feature (61)..(61): /note="Nucleotide may be methylated to form 5-methylcytosine"
ggtaaggcctggcaatcagtagttatcaagttcccccaggtgattctaatacccattaagcgttaagaagccacacctgacatacgttaagtctttaacgctcaggattagtgatcattcag

SEQ ID NO: 27908 - DNA, 122 bp, Homo sapiens
  misc_feature (61)..(62): /note="This region represents a CpG dinucleotide"
  misc_feature (61)..(61): /note="Nucleotide may be methylated to form 5-methylcytosine"
tcatgggatggcacagggatgcgtggaccctgccagggttgcatgaaacagctaggcagccgcgggagttggcacatgtgtgctgagcactgtgaaagaaacacagagacagaaggctgcag

SEQ ID NO: 27909 - DNA, 122 bp, Homo sapiens
  misc_feature (61)..(62): /note="This region represents a CpG dinucleotide"
  misc_feature (61)..(61): /note="Nucleotide may be methylated to form 5-methylcytosine"
tcttgtggtgtctgagttgcccagaacagtacagctgtagtcagtccgcatctgtgacttcgttcactgtgattctgcatccaagttcaagcatctgatgacataattacacggtctacctt

SEQ ID NO: 27910 - DNA, 122 bp, Homo sapiens
  misc_feature (61)..(62): /note="This region represents a CpG dinucleotide"
  misc_feature (61)..(61): /note="Nucleotide may be methylated to form 5-methylcytosine"
ggaagtgactaactagcagccacctcatccatgctgagccttccaggccccacactgagtcggagactgatataaaattctctatgggaaccagggacacttccttcagggttgaggaatcc

SEQ ID NO: 27911 - DNA, 122 bp, Homo sapiens
  misc_feature (61)..(62): /note="This region represents a CpG dinucleotide"
  misc_feature (61)..(61): /note="Nucleotide may be methylated to form 5-methylcytosine"
cctattcggccatcttggaaatgcttcccttgattaatatttcaaatatacttaaccctgcgtctaattggggctgaaaacagttgaatccaatgaaatcagacttgctggcagttagagga

SEQ ID NO: 27912 - DNA, 122 bp, Homo sapiens
  misc_feature (61)..(62): /note="This region represents a CpG dinucleotide"
  misc_feature (61)..(61): /note="Nucleotide may be methylated to form 5-methylcytosine"
tgcattgtgtcttggtttggctttggcaactgtctgattaggtccttaacagcagcgactcgctgtcttggttcttgctctgaaaaaagataataaccagatattttacagcaaattcttat

SEQ ID NO: 27913 - DNA, 122 bp, Homo sapiens
  misc_feature (61)..(62): /note="This region represents a CpG dinucleotide"
  misc_feature (61)..(61): /note="Nucleotide may be methylated to form 5-methylcytosine"
tttgtgagggttagtttaaactagttaatacctattaatcactaacctggaacatgcaaacgacaacatgtagcaattctggaagctgaggacatataagggagtgccatagggccatccct

SEQ ID NO: 27914 - DNA, 122 bp, Homo sapiens
  misc_feature (61)..(62): /note="This region represents a CpG dinucleotide"
  misc_feature (61)..(61): /note="Nucleotide may be methylated to form 5-methylcytosine"
ttttgaaccctgtggatttcatcacaataggataagaatgctgcatgggtttaggatagacgttcacaatctgagatgagcagtgctagccccagtccccaaaggaaacctagttagggtgg

SEQ ID NO: 27915 - DNA, 122 bp, Homo sapiens
  misc_feature (61)..(62): /note="This region represents a CpG dinucleotide"
  misc_feature (61)..(61): /note="Nucleotide may be methylated to form 5-methylcytosine"
aggccacaccttgctttacataataaaggtgtccttaaaagggtgtgcaacttgaacttgcgtaagtaaagcgtgcttgacctgctcccgggggacctttgtctgaaggactaattctgaaa

SEQ ID NO: 27916 - DNA, 122 bp, Homo sapiens
  misc_feature (61)..(62): /note="This region represents a CpG dinucleotide"
  misc_feature (61)..(61): /note="Nucleotide may be methylated to form 5-methylcytosine"
ccaatttcagaaagtcttgaaagtgttagattggcatgtattcacacatctcccttaaatcgtttcaaatatatgtggaaacttctaagacaagaccaagtgagtaatgaatggatataacc

SEQ ID NO: 27917 - DNA, 122 bp, Homo sapiens
  misc_feature (61)..(62): /note="This region represents a CpG dinucleotide"
  misc_feature (61)..(61): /note="Nucleotide may be methylated to form 5-methylcytosine"
cagctgctgcaggaacagcaacccagcaactggccacacagagggcgagtgacccctgggcggactgatgggccacaccacaggccacaccacggaccacaggccacacccagagagctagt

SEQ ID NO: 27918 - DNA, 122 bp, Homo sapiens
  misc_feature (61)..(62): /note="This region represents a CpG dinucleotide"
  misc_feature (61)..(61): /note="Nucleotide may be methylated to form 5-methylcytosine"
cacgctcaggagcgatgagaggggcgccctggccacgcttcaggaaagcctgtgtctgcgcgcggggcaaggggctccacgacaaaaggacaagatttgacttaaattaagtttttcccttg

SEQ ID NO: 27919 - DNA, 122 bp, Homo sapiens
  misc_feature (61)..(62): /note="This region represents a CpG dinucleotide"
  misc_feature (61)..(61): /note="Nucleotide may be methylated to form 5-methylcytosine"
cacgtggtgtatccacagaatggaactcagcaacaacatagtcgaaactcagaaacattacgctgtgtgagggaaccaaacataaaaggctacatatgtgattccattataagaaatgtcta

SEQ ID NO: 27920 - DNA, 122 bp, Homo sapiens
  misc_feature (61)..(62): /note="This region represents a CpG dinucleotide"
  misc_feature (61)..(61): /note="Nucleotide may be methylated to form 5-methylcytosine"
aggagctgtgattttttttttttttttttttttggcaagactgcttccctcggtggagggcggcccccagagaaggactcagttgtgtatcatcagtaaccaactccagaagctgagggaat

SEQ ID NO: 27921 - DNA, 122 bp, Homo sapiens
  misc_feature (61)..(62): /note="This region represents a CpG dinucleotide"
  misc_feature (61)..(61): /note="Nucleotide may be methylated to form 5-methylcytosine"
tttccctacaaaataatttattggaacacacagctacagcagacactctatgtacaagcacgttgacactcctgacctaccctcaactaggggacccttttcttcccccttgccttgcggac

SEQ ID NO: 27922 - DNA, 122 bp, Homo sapiens
  misc_feature (61)..(62): /note="This region represents a CpG dinucleotide"
  misc_feature (61)..(61): /note="Nucleotide may be methylated to form 5-methylcytosine"
gtaatggcaaaatagaacccagaggaggcaatgactgggagatgacagaggaaaccaaatcgaagcagctttattgcaccattaagtacatcactgcatcaaagacagtgccacaaatgcaa

SEQ ID NO: 27923 - DNA, 122 bp, Homo sapiens
  misc_feature (61)..(62): /note="This region represents a CpG dinucleotide"
  misc_feature (61)..(61): /note="Nucleotide may be methylated to form 5-methylcytosine"
tattgagttattatctcatatagtgagagtgtttaatcatgatacatctccattttataccgtggtttatgtgccattttctaaggagctatgactcataaatccatatattatgggtcagt

SEQ ID NO: 27924 - DNA, 122 bp, Homo sapiens
  misc_feature (61)..(62): /note="This region represents a CpG dinucleotide"
  misc_feature (61)..(61): /note="Nucleotide may be methylated to form 5-methylcytosine"
ctcttctttgaactcctatgatgcttgtatatgacacgtacccatttattacttagttctcgtgtgttgtttttttttcttcagtgaaatgggtaaagttcttgagaacagtagtcatgtca

SEQ ID NO: 27925 - DNA, 122 bp, Homo sapiens
  misc_feature (61)..(62): /note="This region represents a CpG dinucleotide"
  misc_feature (61)..(61): /note="Nucleotide may be methylated to form 5-methylcytosine"
aggattaaatgagctcattcacatagagtgcttagcacaatgcctggtacataccaaacacgcaataactgttaatagttacttagtagtcacagctcagaaatcaggattggcactacctg

SEQ ID NO: 27926 - DNA, 122 bp, Homo sapiens
  misc_feature (61)..(62): /note="This region represents a CpG dinucleotide"
  misc_feature (61)..(61): /note="Nucleotide may be methylated to form 5-methylcytosine"
atctcggctcactgcaacctctgtctcttgggttcaagggattctcgtgcctcagcctcccgaatagctgtgatcccagctattcaagggaagagtggaggatggggcaacctctgggaggc

SEQ ID NO: 27927 - DNA, 122 bp, Homo sapiens
  misc_feature (61)..(62): /note="This region represents a CpG dinucleotide"
  misc_feature (61)..(61): /note="Nucleotide may be methylated to form 5-methylcytosine"
tcaaaacaacccattgatcctgaggcaaaccgctttcaaaaccaccacatagttcctggacgtcctggcttcctcatgacacttggggaagaggagtcttttgaaattttaaattttattat

SEQ ID NO: 27928 - DNA, 122 bp, Homo sapiens
  misc_feature (61)..(62): /note="This region represents a CpG dinucleotide"
  misc_feature (61)..(61): /note="Nucleotide may be methylated to form 5-methylcytosine"
tgcaagaattcaaaagcacataacaacaaccaatcctaggaacagttcaacagtttaactcgcttcaacagcctgattctataagcacttgaagtgttcctggtttgcagtgatgaaagttc

SEQ ID NO: 27929 - DNA, 122 bp, Homo sapiens
  misc_feature (61)..(62): /note="This region represents a CpG dinucleotide"
  misc_feature (61)..(61): /note="Nucleotide may be methylated to form 5-methylcytosine"
ggctccagctccatgggctctggaaacacttttctcctttgctatgtagcctagagagagcgcagtcttcctgctgttgctagactctggatgactcaactggatggttctcttagtcatac

SEQ ID NO: 27930 - DNA, 122 bp, Homo sapiens
  misc_feature (61)..(62): /note="This region represents a CpG dinucleotide"
  misc_feature (61)..(61): /note="Nucleotide may be methylated to form 5-methylcytosine"
actcaagtaccagtgctgttcacgagagccttccaggcggggggtgttgtgcagcttctacgtgtgttaagagtagggcccaggactgcacccagcattgacctacagttattttttgtttt

SEQ ID NO: 27931 - DNA, 122 bp, Homo sapiens
  misc_feature (61)..(62): /note="This region represents a CpG dinucleotide"
  misc_feature (61)..(61): /note="Nucleotide may be methylated to form 5-methylcytosine"
catccccaggaccaccccgggtggagagggccgagtgtggtgcctccgcgggtgctctgacgatcgtctcgagccacgggggtgacagtgacaaggacctgtgtgcacgttagtggggcagc

SEQ ID NO: 27932 - DNA, 122 bp, Homo sapiens
  misc_feature (61)..(62): /note="This region represents a CpG dinucleotide"
  misc_feature (61)..(61): /note="Nucleotide may be methylated to form 5-methylcytosine"
aaaaatttttttgttgttgttaagcctatgcaaggccaaaggagtattaaagtttcactacggaagaaatatggccactgccaagaactgattagtcataaaatccgagggcattatcatca

SEQ ID NO: 27933 - DNA, 122 bp, Homo sapiens
  misc_feature (61)..(62): /note="This region represents a CpG dinucleotide"
  misc_feature (61)..(61): /note="Nucleotide may be methylated to form 5-methylcytosine"
ttaccttcatctccattttcagccattgccaagagcagcagactcctgagggtgagtcaacgggcaagccagctgagccagcactgtccctcccttacgccatccttccaccccatgtcctg

SEQ ID NO: 27934 - DNA, 122 bp, Homo sapiens
  misc_feature (61)..(62): /note="This region represents a CpG dinucleotide"
  misc_feature (61)..(61): /note="Nucleotide may be methylated to form 5-methylcytosine"
aaactggatttctggctcctcttgcaactcagaggattggacaagctgggccagcattcccgcatgggcacaaggagctggagctcagaggcactcccaactctggatgaggtgtggttttc

SEQ ID NO: 27935 - DNA, 122 bp, Homo sapiens
  misc_feature (61)..(62): /note="This region represents a CpG dinucleotide"
  misc_feature (61)..(61): /note="Nucleotide may be methylated to form 5-methylcytosine"
aatcctgtaaatgacaaactggctgcagctcagagaggctggctaactcatccaatgttacgcagctttgaatgtctactctttgaacagtccaattcctcggcccaatacctggagacttt

SEQ ID NO: 27936 - DNA, 122 bp, Homo sapiens
  misc_feature (61)..(62): /note="This region represents a CpG dinucleotide"
  misc_feature (61)..(61): /note="Nucleotide may be methylated to form 5-methylcytosine"
tgagtgagcagagtttgctcatgcaggcacctaaattgctggcaagttcctgagctcattcgcttcaattcccgtactcatttgcatgggtgctccctcccacaaggggttgaacaggacag

SEQ ID NO: 27937 - DNA, 122 bp, Homo sapiens
  misc_feature (61)..(62): /note="This region represents a CpG dinucleotide"
  misc_feature (61)..(61): /note="Nucleotide may be methylated to form 5-methylcytosine"
cttaaatgcagactttcccagaaacagaggtggacttaatgaccatgaaagatcccactccgccttgtgattttgtgatttcaaagtattatacttacacgggtcacagtgtacctacaagc

SEQ ID NO: 27938 - DNA, 122 bp, Homo sapiens
  misc_feature (61)..(62): /note="This region represents a CpG dinucleotide"
  misc_feature (61)..(61): /note="Nucleotide may be methylated to form 5-methylcytosine"
gtgtctggaaagtcttgaccgggtcaaaagggctgacattgagcgagccaagacacgtttcgacccgccgctcccctcccgggggaagcaggacttccgcatctttgaaaatactgtcaagt

SEQ ID NO: 27939 - DNA, 122 bp, Homo sapiens
  misc_feature (61)..(62): /note="This region represents a CpG dinucleotide"
  misc_feature (61)..(61): /note="Nucleotide may be methylated to form 5-methylcytosine"
tagaggatactttccaattcaacttctccacagtgagaccagcgatgataaggtcattttcgtagtaaattagtgactgggctaggactgtaacatgaatttccagatccttaatccatttt

SEQ ID NO: 27940 - DNA, 122 bp, Homo sapiens
  misc_feature (61)..(62): /note="This region represents a CpG dinucleotide"
  misc_feature (61)..(61): /note="Nucleotide may be methylated to form 5-methylcytosine"
caatgggcagccctgccaagctagcttgactagatgggttgtctcataatcctgagacaacgcagacgctctgcatcccttatcaccacctttcaacctactggggctctgtgattgattta

SEQ ID NO: 27941 - DNA, 122 bp, Homo sapiens
  misc_feature (61)..(62): /note="This region represents a CpG dinucleotide"
  misc_feature (61)..(61): /note="Nucleotide may be methylated to form 5-methylcytosine"
actacattacccagaaaccctgtggcagaacctgggctgtcccatggctttcattcctaccggcagtagcctgagctgctgagtaggcagagagaatctcctctgagctctaaagaccaatc

SEQ ID NO: 27942 - DNA, 122 bp, Homo sapiens
  misc_feature (61)..(62): /note="This region represents a CpG dinucleotide"
  misc_feature (61)..(61): /note="Nucleotide may be methylated to form 5-methylcytosine"
gtctgcctaagattccttcatgttcactgtggcaagtgtagtcattgtatgaaaatatcacgatgaatgtcttcatactcctaatgaagaatatttactcatctcagaagagccaaaggtac

SEQ ID NO: 27943 - DNA, 122 bp, Homo sapiens
  misc_feature (61)..(62): /note="This region represents a CpG dinucleotide"
  misc_feature (61)..(61): /note="Nucleotide may be methylated to form 5-methylcytosine"
ttttagaaaggtggacatgcgtgtcttcggagtgtgttcataacactctagttttccaaacgtagtagcaaggttgtttcaaaaagcacatagaatgttgtcaccacaaacttgattgcctc

SEQ ID NO: 27944 - DNA, 122 bp, Homo sapiens
  misc_feature (61)..(62): /note="This region represents a CpG dinucleotide"
  misc_feature (61)..(61): /note="Nucleotide may be methylated to form 5-methylcytosine"
aggaaaggggaccaggtcacgtagaacctcgtagaccactgcagaaccttggcttacgtacgcagagacagcaggaaccactgataggtttagggagatttgaggagagggacatgatttgg

SEQ ID NO: 27945 - DNA, 122 bp, Homo sapiens
  misc_feature (61)..(62): /note="This region represents a CpG dinucleotide"
  misc_feature (61)..(61): /note="Nucleotide may be methylated to form 5-methylcytosine"
ggcctctgcatggccccggggggccaaagctgcgggaagagcagagtcaggctcaggaggcgcagcagcccgacggggctcccaggcaccgcgaggagagacgcaggcctgggtgcagaggc

SEQ ID NO: 27946 - DNA, 122 bp, Homo sapiens
  misc_feature (61)..(62): /note="This region represents a CpG dinucleotide"
  misc_feature (61)..(61): /note="Nucleotide may be methylated to form 5-methylcytosine"
ttcagtgctgcatacacttcctgcaggctgcccctctgttctctcgcccttctcatctcacgtgattgatcacctgacaagctacctggatttcctagtgccccagagttgccctcaatcaa

SEQ ID NO: 27947 - DNA, 122 bp, Homo sapiens
  misc_feature (61)..(62): /note="This region represents a CpG dinucleotide"
  misc_feature (61)..(61): /note="Nucleotide may be methylated to form 5-methylcytosine"
atatgaaatgtgaactttccactgaaattgagttttagccaaaacaaacttactataaaacggtattattataggcctaataccactatgggaattatgaggaatataaaaacgcagaagtt

SEQ ID NO: 27948 - DNA, 122 bp, Homo sapiens
  misc_feature (61)..(62): /note="This region represents a CpG dinucleotide"
  misc_feature (61)..(61): /note="Nucleotide may be methylated to form 5-methylcytosine"
gaccaatccctggggtttctggtcggcctgtggatgtgtcccggtcaggcctaggtcaggcgcctgacagcgtcacctgtggccactgagaatcatcctccttcaggagtcccagtcagtca

SEQ ID NO: 27949 - DNA, 122 bp, Homo sapiens
  misc_feature (61)..(62): /note="This region represents a CpG dinucleotide"
  misc_feature (61)..(61): /note="Nucleotide may be methylated to form 5-methylcytosine"
tttatgacattgacttttccgtaaaataaatatatacatatttttaaagttaattacaaacgtacagaatggagaggagcactttaacagccatcacatgattgggattttgttgacagtaa

SEQ ID NO: 27950 - DNA, 122 bp, Homo sapiens
  misc_feature (61)..(62): /note="This region represents a CpG dinucleotide"
  misc_feature (61)..(61): /note="Nucleotide may be methylated to form 5-methylcytosine"
agggccattcagcctcactaagaaatctgttaggcacattcaccaagagaggacccttggcgtctcctaggagtctggagtccaggtcacatcaagtctaaagtacagttttcagattttca

SEQ ID NO: 27951 - DNA, 122 bp, Homo sapiens
  misc_feature (61)..(62): /note="This region represents a CpG dinucleotide"
  misc_feature (61)..(61): /note="Nucleotide may be methylated to form 5-methylcytosine"
aactacagtgatcaaattttgttccttaattaggcaagttgctttttcccctgagagccccgtatctaatgtgccccttagtctggagtgaggtgagacagaggtggaagagggggcaggtt

SEQ ID NO: 27952 - DNA, 122 bp, Homo sapiens
  misc_feature (61)..(62): /note="This region represents a CpG dinucleotide"
  misc_feature (61)..(61): /note="Nucleotide may be methylated to form 5-methylcytosine"
acaagcctgttggtccaagctgagaaggcatcaggaagtgtttatgggaaggagttccaacggcaccctcttgagctggccgttgatactgacctccttatgtttgcacagatggaactact

SEQ ID NO: 27953 - DNA, 122 bp, Homo sapiens
  misc_feature (61)..(62): /note="This region represents a CpG dinucleotide"
  misc_feature (61)..(61): /note="Nucleotide may be methylated to form 5-methylcytosine"
gcctcctgccccaacccggaggctgaaactgtcatgtggctgtggacctgtgctcaccagcgctcttccagacacctgcccctgcaaaggaagggatggggctgaggagcctgggttccaag

SEQ ID NO: 27954 - DNA, 122 bp, Homo sapiens
  misc_feature (61)..(62): /note="This region represents a CpG dinucleotide"
  misc_feature (61)..(61): /note="Nucleotide may be methylated to form 5-methylcytosine"
ctttgcccgcgaccgaacagggcgagcaggcattttccttcacgtaggcctgaaaagccacgtcacccgcatccctgaaggcggccccaccagcgactacggcttgggctccacggcgcgct

SEQ ID NO: 27955 - DNA, 122 bp, Homo sapiens
  misc_feature (61)..(62): /note="This region represents a CpG dinucleotide"
  misc_feature (61)..(61): /note="Nucleotide may be methylated to form 5-methylcytosine"
ccaagggttgagcaaggatagttgatgactccatgctctgccactctccaggtgactctgcgcaaggtgttgaattctttagctcaactttccttttctatagaatgggaagaatacccatc

SEQ ID NO: 27956 - DNA, 122 bp, Homo sapiens
  misc_feature (61)..(62): /note="This region represents a CpG dinucleotide"
  misc_feature (61)..(61): /note="Nucleotide may be methylated to form 5-methylcytosine"
cttccagcccattcgggaagatgacacactgaacaaacagatagtggcaggaaagggtgtcgtgtacctgacgggtaacacacaagatgccctggaagctcttagcacaggggcttgtgaga

SEQ ID NO: 27957 - DNA, 122 bp, Homo sapiens
  misc_feature (61)..(62): /note="This region represents a CpG dinucleotide"
  misc_feature (61)..(61): /note="Nucleotide may be methylated to form 5-methylcytosine"
caggtgaagggcatggacacttgagtcaggtgactggtccaccacatgcagattgtgtcccgttgacaaaattttgtagcctttctatgccttgatcttgttgtctatgaagggaggatgac

SEQ ID NO: 27958 - DNA, 122 bp, Homo sapiens
  misc_feature (61)..(62): /note="This region represents a CpG dinucleotide"
  misc_feature (61)..(61): /note="Nucleotide may be methylated to form 5-methylcytosine"
taaactgatttgtgatagcagagcagagatttgtgataggagaggttaatgccgctagcacgtcagtgcagaagggattcagatcctggctcaggccctgcctacctgtgtgaccttcagaa

SEQ ID NO: 27959 - DNA, 122 bp, Homo sapiens
  misc_feature (61)..(62): /note="This region represents a CpG dinucleotide"
  misc_feature (61)..(61): /note="Nucleotide may be methylated to form 5-methylcytosine"
gactacagaggagagattccagcccccttcatgctgcagattgttagagctagggctgcacgttccctgggacagggacaagcccatgttaggaggctgcttctcacggggagtgccctgag

SEQ ID NO: 27960 - DNA, 122 bp, Homo sapiens
  misc_feature (61)..(62): /note="This region represents a CpG dinucleotide"
  misc_feature (61)..(61): /note="Nucleotide may be methylated to form 5-methylcytosine"
accctgaatattgactgggtagagatttaaacagcatgcatgcaatagaattggcctcatcgccccatctgtagaacacaagcctgtgaaatccagtgtgtctgtgtgacatgcaattagct

SEQ ID NO: 27961 - DNA, 122 bp, Homo sapiens
  misc_feature (61)..(62): /note="This region represents a CpG dinucleotide"
  misc_feature (61)..(61): /note="Nucleotide may be methylated to form 5-methylcytosine"
gactgactggatgggaatatcctatttcctttttgttcttacaagtatagtgttcactcacggattcttaatttttccttattctaatcagtcaactcttttttaacattcactaagttcag

SEQ ID NO: 27962 - DNA, 122 bp, Homo sapiens
  misc_feature (61)..(62): /note="This region represents a CpG dinucleotide"
  misc_feature (61)..(61): /note="Nucleotide may be methylated to form 5-methylcytosine"
ccagtgtgccacatctacccatgatttttgttcctgtgtgagctgtgaatggttagcgagcgcacagtgaaaatgccttagtcataacactggattgtcctgggtgaataaagtgtttcttc

SEQ ID NO: 27963 - DNA, 122 bp, Homo sapiens
  misc_feature (61)..(62): /note="This region represents a CpG dinucleotide"
  misc_feature (61)..(61): /note="Nucleotide may be methylated to form 5-methylcytosine"
aagggaggggagaaaaggctcaggggacatggctgggacacaacttccagcccagccctgcgtgggcagagaggagggaacagtccatctattctaggctggacgtgagagggaggacggcc

SEQ ID NO: 27964 - DNA, 122 bp, Homo sapiens
  misc_feature (61)..(62): /note="This region represents a CpG dinucleotide"
  misc_feature (61)..(61): /note="Nucleotide may be methylated to form 5-methylcytosine"
cgtggggaccacactttgagaactaccgccttatctcagagatactcttaacttgtgtatcgtgactcctagtcccctggggatgctttactcctcccctaaaacctagtcactcgatgggt

SEQ ID NO: 27965 - DNA, 122 bp, Homo sapiens
  misc_feature (61)..(62): /note="This region represents a CpG dinucleotide"
  misc_feature (61)..(61): /note="Nucleotide may be methylated to form 5-methylcytosine"
cctcagagctttgtgaatgtctcctgtttcagatctgatctcttgtatcctagccacactcgtatctcagaaacctgagaatcaaagtccttgctggtatattgatttttatgaattgcaaa

SEQ ID NO: 27966 - DNA, 122 bp, Homo sapiens
  misc_feature (61)..(62): /note="This region represents a CpG dinucleotide"
  misc_feature (61)..(61): /note="Nucleotide may be methylated to form 5-methylcytosine"
agcttaagcagccctctcgctccagcctcccaaagtgctgggattacaggcgtgagacaccgcacccagccagtagatgcatttcaatccaatatatggcctttgtgttgaggcatggcaat

SEQ ID NO: 27967 - DNA, 122 bp, Homo sapiens
  misc_feature (61)..(62): /note="This region represents a CpG dinucleotide"
  misc_feature (61)..(61): /note="Nucleotide may be methylated to form 5-methylcytosine"
aaacagcaggtacactgccagtttccactaatttctaggtataagaggtagacaagataacgtaactgatatgtaatattaaacaagtaccacacgaggagtgaaacaactagaaagaagat

SEQ ID NO: 27968 - DNA, 122 bp, Homo sapiens
  misc_feature (61)..(62): /note="This region represents a CpG dinucleotide"
  misc_feature (61)..(61): /note="Nucleotide may be methylated to form 5-methylcytosine"
cctctgcatagccacagtacacataattctagcttccaatagggataagagtgatgtggccgctcctatcaggaagctgtcagttcctggacgctcctgtgggggatcttggggaaggaagc

SEQ ID NO: 27969 - DNA, 122 bp, Homo sapiens
  misc_feature (61)..(62): /note="This region represents a CpG dinucleotide"
  misc_feature (61)..(61): /note="Nucleotide may be methylated to form 5-methylcytosine"
tgagtcaggttctaggaattctctttcagttccgcctttgatggaataactggcagtggtcggatgaagcaggctggggtctgatctgtttccttaaaaggctggctcagttaaatttgttc

SEQ ID NO: 27970 - DNA, 122 bp, Homo sapiens
  misc_feature (61)..(62): /note="This region represents a CpG dinucleotide"
  misc_feature (61)..(61): /note="Nucleotide may be methylated to form 5-methylcytosine"
tgtagccaatgaggcaggatgaaaatcagaaagagcggtgtcccagaagccaaggggaaacgacattttgatagggaaggagttatctgttgcctgtgtcaaatgtggctgaagatccagtt

SEQ ID NO: 27971 - DNA, 122 bp, Homo sapiens
  misc_feature (61)..(62): /note="This region represents a CpG dinucleotide"
  misc_feature (61)..(61): /note="Nucleotide may be methylated to form 5-methylcytosine"
caggaaaggaagtcatttccccaggaaagcacatctgacccctaaccttgcatgtggtcacggtggccgtggggccccctcccttcccctggcccgcaaggctggactgtgctgtcatcccg

SEQ ID NO: 27972 - DNA, 122 bp, Homo sapiens
  misc_feature (61)..(62): /note="This region represents a CpG dinucleotide"
  misc_feature (61)..(61): /note="Nucleotide may be methylated to form 5-methylcytosine"
ccagtgaacagtagaacaagttgaagacatcaaatgaggctcctagcccttgcttgtggacgctgttgtgttttgcatgtaagtcaacatactttggtgaagggaacaaagggaagtgggtc

SEQ ID NO: 27973 - DNA, 122 bp, Homo sapiens
  misc_feature (61)..(62): /note="This region represents a CpG dinucleotide"
  misc_feature (61)..(61): /note="Nucleotide may be methylated to form 5-methylcytosine"
agtggtgactcaggcttccccacctcagcttctcagtcaagagatccttcaagccttcagcgccaccctcctctctgccttggatgtgggaggggtgctgtccacctgcggtgctgtcttcc

SEQ ID NO: 27974 - DNA, 122 bp, Homo sapiens
  misc_feature (61)..(62): /note="This region represents a CpG dinucleotide"
  misc_feature (61)..(61): /note="Nucleotide may be methylated to form 5-methylcytosine"
gcacactgtgcaaggctgtgggttacataagtccatatgtgaaggcggtcttgccacaggcgatggttcaatattgctgtggggagaacaactgcccatatctccctgaggtctcaaggcta

SEQ ID NO: 27975 - DNA, 122 bp, Homo sapiens
  misc_feature (61)..(62): /note="This region represents a CpG dinucleotide"
  misc_feature (61)..(61): /note="Nucleotide may be methylated to form 5-methylcytosine"
tggggctcaagtgagacagaatatgaaagtgcatgatgcctggtgctggctgcagaccaacgaaaatctctgggccttggtgtttatacaggtgtgcctctaactgtctgtgggtctgcagt

SEQ ID NO: 27976 - DNA, 122 bp, Homo sapiens
  misc_feature (61)..(62): /note="This region represents a CpG dinucleotide"
  misc_feature (61)..(61): /note="Nucleotide may be methylated to form 5-methylcytosine"
tctcgggcccagagccggaggctagttttgtgggaaggcaccccagtccacacacccactcggcagcctcgagggacagggtgctggttttaagggtggactcctacgtgtcccatcacagt

SEQ ID NO: 27977 - DNA, 122 bp, Homo sapiens
  misc_feature (61)..(62): /note="This region represents a CpG dinucleotide"
  misc_feature (61)..(61): /note="Nucleotide may be methylated to form 5-methylcytosine"
gcttctgtgctgcgccagaatcatcgagtctcagttctcgctgccttcccggccagtaggcgtctcccccagctggggagggtcccccaaaccctgtgcttctaggaccgcggggccggcaa

SEQ ID NO: 27978 - DNA, 122 bp, Homo sapiens
  misc_feature (61)..(62): /note="This region represents a CpG dinucleotide"
  misc_feature (61)..(61): /note="Nucleotide may be methylated to form 5-methylcytosine"
gaccagctcgccctgcatacacttcttggctgtgtgcgctcagcaggacgtgggaggctccggcttcaaggtcggtgagtccgtgaaactctgctttattcctccaaagaggggtcatggct

SEQ ID NO: 27979 - DNA, 122 bp, Homo sapiens
  misc_feature (61)..(62): /note="This region represents a CpG dinucleotide"
  misc_feature (61)..(61): /note="Nucleotide may be methylated to form 5-methylcytosine"
tgattataaaacattgcgcttctcatttcctttcccttcctgctactctcaactaacccacgctatcacttgacaggcatgtgaataggataaagtaaatctgggcagcaccacaggcagga

SEQ ID NO: 27980 - DNA, 122 bp, Homo sapiens
  misc_feature (61)..(62): /note="This region represents a CpG dinucleotide"
  misc_feature (61)..(61): /note="Nucleotide may be methylated to form 5-methylcytosine"
tagatctgtgtttgcctaactggagttgttcctgttctatctttatgatttttgccatatcgtctatattatttagcatttttatatctgtaccatctatattatttacttaacatttttct

SEQ ID NO: 27981 - DNA, 122 bp, Homo sapiens
  misc_feature (61)..(62): /note="This region represents a CpG dinucleotide"
  misc_feature (61)..(61): /note="Nucleotide may be methylated to form 5-methylcytosine"
atcttagcctcagagccctgaaatctaatagcaatttaaggaacactttttcattttcttcgagtacattttcaatgatctttttaaccctcagttgtcctttcttttcttctaacttctat

SEQ ID NO: 27982 - DNA, 122 bp, Homo sapiens
  misc_feature (61)..(62): /note="This region represents a CpG dinucleotide"
  misc_feature (61)..(61): /note="Nucleotide may be methylated to form 5-methylcytosine"
agagtgtaaatttcaactaagtttcaacgggatgagttactctgtcagcagtacaaacaccgtaaatttcagattgcttaggacaaaacctgacaccgagcggtaacattttactcattctt

SEQ ID NO: 27983 - DNA, 122 bp, Homo sapiens
  misc_feature (61)..(62): /note="This region represents a CpG dinucleotide"
  misc_feature (61)..(61): /note="Nucleotide may be methylated to form 5-methylcytosine"
gctcacagagccatgcccctcgggggacttcttgaccttggtggtggaggccttggcagacgctcaggtgtttggttccatatttgcttccagataagactgtttagtagacatgcaactgc

SEQ ID NO: 27984 - DNA, 122 bp, Homo sapiens
  misc_feature (61)..(62): /note="This region represents a CpG dinucleotide"
  misc_feature (61)..(61): /note="Nucleotide may be methylated to form 5-methylcytosine"
agcacatatgggagctggtcactctgcattttgggccctcctggaggtgtttagaccttccgagagagaaactgagacacatgagagggaagaaatgactcagtggtgagaccctgtggagt

SEQ ID NO: 27985 - DNA, 122 bp, Homo sapiens
  misc_feature (61)..(62): /note="This region represents a CpG dinucleotide"
  misc_feature (61)..(61): /note="Nucleotide may be methylated to form 5-methylcytosine"
atcaaataagatatgagatagtttgtgttcttgctattcctaacacctcatcatcatacccggaatttgagcaataggtcaggattacttggcagccctcacacacctgtacacaaaaaatc

SEQ ID NO: 27986 - DNA, 122 bp, Homo sapiens
  misc_feature (61)..(62): /note="This region represents a CpG dinucleotide"
  misc_feature (61)..(61): /note="Nucleotide may be methylated to form 5-methylcytosine"
agtcaatatttaaacaccaacaccatctctggcaaaacagagaacagagatctgggactgcggagagaagaaaaagagaaagcagacagacaaagcaattaggatgtggggctggcatgcct

SEQ ID NO: 27987 - DNA, 122 bp, Homo sapiens
  misc_feature (61)..(62): /note="This region represents a CpG dinucleotide"
  misc_feature (61)..(61): /note="Nucleotide may be methylated to form 5-methylcytosine"
aggttttggtactccctgcactcaccttcagacacctgcattactgtttgacaggtgtaccgcaccagtccgactctgcacttggcactattccaggaccagttaacatccagccagcatgt

SEQ ID NO: 27988 - DNA, 122 bp, Homo sapiens
  misc_feature (61)..(62): /note="This region represents a CpG dinucleotide"
  misc_feature (61)..(61): /note="Nucleotide may be methylated to form 5-methylcytosine"
ttcgaacagcatgttcttatgcatgtcaaaatacacagaatagtaggtattaaaaagcaacgtcaaggtaaaataattattgtttggtgatcaaaactatgaagacatataatcaaaactga

SEQ ID NO: 27989 - DNA, 122 bp, Homo sapiens
  misc_feature (61)..(62): /note="This region represents a CpG dinucleotide"
  misc_feature (61)..(61): /note="Nucleotide may be methylated to form 5-methylcytosine"
gccttatgtacaccagtggtgaaggggtcagggtgtggagtagaaacctttctggggcttcgtgacacagaagcacaatgcactgtgatttcaaaacctgttgataaagtcctaatggaggc

SEQ ID NO: 27990 - DNA, 122 bp, Homo sapiens
  misc_feature (61)..(62): /note="This region represents a CpG dinucleotide"
  misc_feature (61)..(61): /note="Nucleotide may be methylated to form 5-methylcytosine"
aggggaggggcgcaagttccaggcaacggaagcagcacatacaaggaccctgtggtgcaacgtgcctggtgcctcttaggaaggccaaggcaccaggagggtgcagggtcccgagaggcctc

SEQ ID NO: 27991 - DNA, 122 bp, Homo sapiens
  misc_feature (61)..(62): /note="This region represents a CpG dinucleotide"
  misc_feature (61)..(61): /note="Nucleotide may be methylated to form 5-methylcytosine"
atgcataacgatggggccattgggtggtaaacaaatgcagtttgaatcaggcgtctccctcgccctttctggagatgcgcaaatcatagagaaaagagttactaacccagcggtaaaccgcc

SEQ ID NO: 27992 - DNA, 122 bp, Homo sapiens
  misc_feature (61)..(62): /note="This region represents a CpG dinucleotide"
  misc_feature (61)..(61): /note="Nucleotide may be methylated to form 5-methylcytosine"
tattgagcttcacaccccagtccactggcatcatgtaagaaacaactcattacactctaacggtagtttagtgaaatggatgagtagtcttagtctgcctcctcaggctgcaacagaaagtc

SEQ ID NO: 27993 - DNA, 122 bp, Homo sapiens
  misc_feature (61)..(62): /note="This region represents a CpG dinucleotide"
  misc_feature (61)..(61): /note="Nucleotide may be methylated to form 5-methylcytosine"
cctacactgaggccacgaaagctcagagaaagcagcagatggcagaggtaatgagactaacgttcaggggttctattaaaagatgtgtgaaattatgttgaaaagtttaaactgcccggcac

SEQ ID NO: 27994 - DNA, 122 bp, Homo sapiens
  misc_feature (61)..(62): /note="This region represents a CpG dinucleotide"
  misc_feature (61)..(61): /note="Nucleotide may be methylated to form 5-methylcytosine"
gattttctttctcagatcttcattgcagctggtgattgctgaaaatgatgatctcagagtcgcctgttcctgccagagagcctgcacacagagagatgcctttgtgaagccagccatagaaa

SEQ ID NO: 27995 - DNA, 122 bp, Homo sapiens
  misc_feature (61)..(62): /note="This region represents a CpG dinucleotide"
  misc_feature (61)..(61): /note="Nucleotide may be methylated to form 5-methylcytosine"
agagcccttcttcagcttcctttttctcctcttctgctctttccaaaaggggaagcttaacgctgatattccaaaatggaataacagagcaacagctgacggtgagtggaccagaagcagga

SEQ ID NO: 27996 - DNA, 122 bp, Homo sapiens
  misc_feature (61)..(62): /note="This region represents a CpG dinucleotide"
  misc_feature (61)..(61): /note="Nucleotide may be methylated to form 5-methylcytosine"
attaagtgcttaaaagctccatttgttcttaaaacaaatctcttcctctccaattgcagccgaagagaagacatagactgtgcggctgcaccaacaagctgagcagacagacaatagggcca

SEQ ID NO: 27997 - DNA, 122 bp, Homo sapiens
  misc_feature (61)..(62): /note="This region represents a CpG dinucleotide"
  misc_feature (61)..(61): /note="Nucleotide may be methylated to form 5-methylcytosine"
gccctgtggcaggaatgattcagagcccaggtcagactctaggaggtctggctcttgggacgcatgaagaatagcacccacgcacctgagacaggtgcaggtctatgtatgtttcagcctcc

SEQ ID NO: 27998 - DNA, 122 bp, Homo sapiens
  misc_feature (61)..(62): /note="This region represents a CpG dinucleotide"
  misc_feature (61)..(61): /note="Nucleotide may be methylated to form 5-methylcytosine"
taagattatgattccttggtgattcattataccatatttggcacttgaaaaaggaccaaccgtggaccagtgagtagcatggagctgacatgaaagaaggaagttgattaatttataagtgc

SEQ ID NO: 27999 - DNA, 122 bp, Homo sapiens
  misc_feature (61)..(62): /note="This region represents a CpG dinucleotide"
  misc_feature (61)..(61): /note="Nucleotide may be methylated to form 5-methylcytosine"
ccgaggggaagaaaatcaccccatccgtggtagggagggtaccggccacagtgaaacttccgcccagcatggcagcacgcacataggccaatcgacccaccacacacacaaggccaaagaga

SEQ ID NO: 28000 - DNA, 122 bp, Homo sapiens
  misc_feature (61)..(62): /note="This region represents a CpG dinucleotide"
  misc_feature (61)..(61): /note="Nucleotide may be methylated to form 5-methylcytosine"
tctgctctgctgcctccactcctgcggaactgttgccttgggcctcccttgtcagggtctcggacagctctgcagtctcttttggagctacccctggaactggccactcttcttttctccca

SEQ ID NO: 28001 - DNA, 122 bp, Homo sapiens
  misc_feature (61)..(62): /note="This region represents a CpG dinucleotide"
  misc_feature (61)..(61): /note="Nucleotide may be methylated to form 5-methylcytosine"
cacacaaatgtacatacaattccaggttgctcacagaccccctctaggagatgttactgtcgctcattcgtatttccggttctactcctcttccgggcacactggagaattacacttccttg

SEQ ID NO: 28002 - DNA, 122 bp, Homo sapiens
  misc_feature (61)..(62): /note="This region represents a CpG dinucleotide"
  misc_feature (61)..(61): /note="Nucleotide may be methylated to form 5-methylcytosine"
cctaagatagtccttaagtacaaggacatctcactagacttcattgtcttgtgaaaggagcggtatttcaggaattaactactcatttaataaagcaaaaaggctggatgtgatagctcaca

SEQ ID NO: 28003 - DNA, 122 bp, Homo sapiens
  misc_feature (61)..(62): /note="This region represents a CpG dinucleotide"
  misc_feature (61)..(61): /note="Nucleotide may be methylated to form 5-methylcytosine"
gaaaggaaaggaaggaaggaaagaaggccagcctcagcctcccaaagtgctgggattacacgtgtgagtcaccacgccaggcaaggcatggatgttttccaaaaactccctaggggatcttg

SEQ ID NO: 28004 - DNA, 122 bp, Homo sapiens
  misc_feature (61)..(62): /note="This region represents a CpG dinucleotide"
  misc_feature (61)..(61): /note="Nucleotide may be methylated to form 5-methylcytosine"
ggaagcaggatggaaggatggaagctggactgaacagcttctggggttcccctacagtgccggggatccacagtgattgtttcttctacaatcactgagagaatcactcccaggaccttgcc

SEQ ID NO: 28005 - DNA, 122 bp, Homo sapiens
  misc_feature (61)..(62): /note="This region represents a CpG dinucleotide"
  misc_feature (61)..(61): /note="Nucleotide may be methylated to form 5-methylcytosine"
tgtgtgtgtgtgcatgcatgtgttgatacagacatggacactgtgttcattcagcaccgtcgttcacagctggagttcaccttaggtcccctgcctggaccctcagccagatgctggcccca

SEQ ID NO: 28006 - DNA, 122 bp, Homo sapiens
  misc_feature (61)..(62): /note="This region represents a CpG dinucleotide"
  misc_feature (61)..(61): /note="Nucleotide may be methylated to form 5-methylcytosine"
ctcaaagagacagaaggaggtgacaacgaggaaggaagataatcaagagagtataatgtccgggaatctaaatgaacactgaataaaatgtaaagcctttcctgcatattcatttattcatt

SEQ ID NO: 28007 - DNA, 122 bp, Homo sapiens
  misc_feature (61)..(62): /note="This region represents a CpG dinucleotide"
  misc_feature (61)..(61): /note="Nucleotide may be methylated to form 5-methylcytosine"
gcggcttgccagcattttctcgggctgcagaggctggaggcttatggacgactccgtggtcgcctcccccggggttacgatatttggagaaggtttttcctccttgatcattttgggcaaca

SEQ ID NO: 28008 - DNA, 122 bp, Homo sapiens
  misc_feature (61)..(62): /note="This region represents a CpG dinucleotide"
  misc_feature (61)..(61): /note="Nucleotide may be methylated to form 5-methylcytosine"
ctgcagaaagcaagtggccagaggcacagagaatagtgatgtactcaagttctccttctgcggcagaattaagaattaaatctagctccagtgaggaagcagcagaccatgcattcaagacc

SEQ ID NO: 28009 - DNA, 122 bp, Homo sapiens
  misc_feature (61)..(62): /note="This region represents a CpG dinucleotide"
  misc_feature (61)..(61): /note="Nucleotide may be methylated to form 5-methylcytosine"
ggtggctgctaatgcctcacagctcccctagccttgtcactcccctagccgtgtcctacacggaaacttgttgactcagctaaggttacattcctccctgggaggagcccatttctaatgac

SEQ ID NO: 28010 - DNA, 122 bp, Homo sapiens
  misc_feature (61)..(62): /note="This region represents a CpG dinucleotide"
  misc_feature (61)..(61): /note="Nucleotide may be methylated to form 5-methylcytosine"
ctcctgttgtcctgggaaacatctgtgtagctgggcaggtggccctctccattctcactacgggtaaccaggctagccatacctgccagagcttccagtccgatgatccctcttctgtctga

SEQ ID NO: 28011 - DNA, 122 bp, Homo sapiens
  misc_feature (61)..(62): /note="This region represents a CpG dinucleotide"
  misc_feature (61)..(61): /note="Nucleotide may be methylated to form 5-methylcytosine"
ttgtttggatagtatgaaaggacaaagtatcagcactcagaaatgtcaacctttgaacctcgaacactttctgatttataaaaagaatccttccaaaaagatgcaggagccctaatgtaatc

SEQ ID NO: 28012 - DNA, 122 bp, Homo sapiens
  misc_feature (61)..(62): /note="This region represents a CpG dinucleotide"
  misc_feature (61)..(61): /note="Nucleotide may be methylated to form 5-methylcytosine"
tttcattcattcaagcaccaattctttcactcattcagccagacggtatttctggacttccgtgtttgggtgttaaggggatttcaggatgaataagaaagggacctgcccctgggacttac

SEQ ID NO: 28013 - DNA, 122 bp, Homo sapiens
  misc_feature (61)..(62): /note="This region represents a CpG dinucleotide"
  misc_feature (61)..(61): /note="Nucleotide may be methylated to form 5-methylcytosine"
gtgtttgtgtccagagtggaattactgacattggccacataggctcagggtggctaggcacgtctgtggtgataactctgataaactattagcactatttttatttaatagatacaccattg

SEQ ID NO: 28014 - DNA, 122 bp, Homo sapiens
  misc_feature (61)..(62): /note="This region represents a CpG dinucleotide"
  misc_feature (61)..(61): /note="Nucleotide may be methylated to form 5-methylcytosine"
ctcgaagtcatacagtcctatagagaaataagaaggatccacaaacaaaatcagcagcagcgttgcatgatgatgaacttgctatcacttgagatgatcaggaaatgccaggtgacaacttg

SEQ ID NO: 28015 - DNA, 122 bp, Homo sapiens
  misc_feature (61)..(62): /note="This region represents a CpG dinucleotide"
  misc_feature (61)..(61): /note="Nucleotide may be methylated to form 5-methylcytosine"
tttgaaataaatttccccggaacagctcgcccctctcaacaggactctgaggctccactacgttgctgttattcctgacagagtgatgaaaggaaatttaaacaagtggcattttgtaaaac

SEQ ID NO: 28016 - DNA, 122 bp, Homo sapiens
  misc_feature (61)..(62): /note="This region represents a CpG dinucleotide"
  misc_feature (61)..(61): /note="Nucleotide may be methylated to form 5-methylcytosine"
gtaacaatctgtgccaattatcacccttgcttatctatgcctcttgttcacaatcattcacgagtgcattcatcttcaattaaactgtaaactccttgaagagagagatcacagcatgctga

SEQ ID NO: 28017 - DNA, 122 bp, Homo sapiens
  misc_feature (61)..(62): /note="This region represents a CpG dinucleotide"
  misc_feature (61)..(61): /note="Nucleotide may be methylated to form 5-methylcytosine"
aaactgaaattctgtcattagctctgactagcaccagctgctgtataaattctgtgttgacgtagacctccattggtgttccaaatattgcagatgaatctctctctgcctccaaaatcctc

SEQ ID NO: 28018 - DNA, 122 bp, Homo sapiens
  misc_feature (61)..(62): /note="This region represents a CpG dinucleotide"
  misc_feature (61)..(61): /note="Nucleotide may be methylated to form 5-methylcytosine"
ttgtcacttttgagatgttgtagagataaccaggtattttgcaaagtattaaggcatgcacgagttttaatgatttctcctgttatgaatacatcatggactcagccagtcacagagagccc

SEQ ID NO: 28019 - DNA, 122 bp, Homo sapiens
  misc_feature (61)..(62): /note="This region represents a CpG dinucleotide"
  misc_feature (61)..(61): /note="Nucleotide may be methylated to form 5-methylcytosine"
gaacccaattatttattaatatatgaatgtaggaatgtagttcctactgaatccccagcacggtgactggcacattgtaaatgcttggtaaataaactcatgcaagaaaaggagaggtgaaa

SEQ ID NO: 28020 - DNA, 122 bp, Homo sapiens
  misc_feature (61)..(62): /note="This region represents a CpG dinucleotide"
  misc_feature (61)..(61): /note="Nucleotide may be methylated to form 5-methylcytosine"
gaaaacctgaactccaggaagtagcaggggttcagaggaaagaacaggtactcacacaggcgtattatatcttcagggtaaacctttaacctggtgaggtttggtaggatcagagtgaattt

SEQ ID NO: 28021 - DNA, 122 bp, Homo sapiens
  misc_feature (61)..(62): /note="This region represents a CpG dinucleotide"
  misc_feature (61)..(61): /note="Nucleotide may be methylated to form 5-methylcytosine"
gcatcagaatcactagaagtgcttgggcaacattcctattgaatgttgaagcagaatctgcggtggttaggcccaggaatctgtgctcttaatcaacacttcagatgattcttaagcacaaa

SEQ ID NO: 28022 - DNA, 122 bp, Homo sapiens
  misc_feature (61)..(62): /note="This region represents a CpG dinucleotide"
  misc_feature (61)..(61): /note="Nucleotide may be methylated to form 5-methylcytosine"
ctctccccttctctccaaccacagtcccccaggaagggggaggaccaaacgttggtggggcggatattgagggtggcagaaatccttgccatgagctcctgcaaccagaagtcccggttgag

SEQ ID NO: 28023 - DNA, 122 bp, Homo sapiens
  misc_feature (61)..(62): /note="This region represents a CpG dinucleotide"
  misc_feature (61)..(61): /note="Nucleotide may be methylated to form 5-methylcytosine"
agaggctgccctctttggagatgggaaaatggatagccccagagggaaaagaaaaccgagcgctgaaaagtttttgttaatcttttactggtgaaacagagctgggagcagagcagcctgtt

SEQ ID NO: 28024 - DNA, 122 bp, Homo sapiens
  misc_feature (61)..(62): /note="This region represents a CpG dinucleotide"
  misc_feature (61)..(61): /note="Nucleotide may be methylated to form 5-methylcytosine"
ctgagcagtcctgggtcccagctctgtgtttcattgctttagaaggaacatcgacctttccgagcaatgaacatcagctccagctcataggcatgagtcagggcaggcttcaccaggccagg

SEQ ID NO: 28025 - DNA, 122 bp, Homo sapiens
  misc_feature (61)..(62): /note="This region represents a CpG dinucleotide"
  misc_feature (61)..(61): /note="Nucleotide may be methylated to form 5-methylcytosine"
aagttctacctggctttcgagaactcgcagcacctggattatatcaccgagaagctctggcgcaacgcgttgctcgctggggcggtgccggtggtgctgggcccagaccgtgccaactacga

SEQ ID NO: 28026 - DNA, 122 bp, Homo sapiens
  misc_feature (61)..(62): /note="This region represents a CpG dinucleotide"
  misc_feature (61)..(61): /note="Nucleotide may be methylated to form 5-methylcytosine"
ttttaagatggtaggatgtttactagcatcccagacccttaacaattaggtgtcagtagccgctgttccctatactaaccagtttgggccaaaaacaggctccacatgtggccaaacctttc

SEQ ID NO: 28027 - DNA, 122 bp, Homo sapiens
  misc_feature (61)..(62): /note="This region represents a CpG dinucleotide"
  misc_feature (61)..(61): /note="Nucleotide may be methylated to form 5-methylcytosine"
agcccagtgcaactcccatctcacaggccaccagcaagttgctcacatccagacaggagacgctagtcctacaggtgcagtgggaggatctgcagatgactacagctcttggcccttccata

SEQ ID NO: 28028 - DNA, 122 bp, Homo sapiens
  misc_feature (61)..(62): /note="This region represents a CpG dinucleotide"
  misc_feature (61)..(61): /note="Nucleotide may be methylated to form 5-methylcytosine"
ccccaagagctccagcgctgctgtttcaaggtcatacttacctctcaagcactgtatttgcgtcatcttcctcgtcatctgcagccttcccccagggtatgtcctccgaatgctctgggaag

SEQ ID NO: 28029 - DNA, 122 bp, Homo sapiens
  misc_feature (61)..(62): /note="This region represents a CpG dinucleotide"
  misc_feature (61)..(61): /note="Nucleotide may be methylated to form 5-methylcytosine"
caacccccaccttttgagttttatttctagacttaatagtttctctcctctcagtgcgaacgatagcagaataatcatatagaaatccccagtgtgtgtataaattagcattcatgctcttt

SEQ ID NO: 28030 - DNA, 122 bp, Homo sapiens
  misc_feature (61)..(62): /note="This region represents a CpG dinucleotide"
  misc_feature (61)..(61): /note="Nucleotide may be methylated to form 5-methylcytosine"
agccagctaattcaaggttcatcatctagacagaaagtgagtaaataatagctacacttccgacacatttttaaattaatctatgtgtataaggcacagtgataagtttagtagagaaggta

SEQ ID NO: 28031 - DNA, 122 bp, Homo sapiens
  misc_feature (61)..(62): /note="This region represents a CpG dinucleotide"
  misc_feature (61)..(61): /note="Nucleotide may be methylated to form 5-methylcytosine"
tgagaccagaaggacaagctaaattatgcattcttacttgagggatcggaatggatggggcggagttctcttcaggctagccttctgggaaaagtggatgtctttttcagagattcatcata

SEQ ID NO: 28032 - DNA, 122 bp, Homo sapiens
  misc_feature (61)..(62): /note="This region represents a CpG dinucleotide"
  misc_feature (61)..(61): /note="Nucleotide may be methylated to form 5-methylcytosine"
tttcactgtttgttgagacagcccaggcagcatcttgggggctaatcccgggggctgagtcgctggagaggggtcaaggggagtggcctgtggctgccattagtgcctgtccctgtggcctc

SEQ ID NO: 28033 - DNA, 122 bp, Homo sapiens
  misc_feature (61)..(62): /note="This region represents a CpG dinucleotide"
  misc_feature (61)..(61): /note="Nucleotide may be methylated to form 5-methylcytosine"
ataagaaagccctcagtgctacatttatgggagcattttcttaatctttctggaaatgaacgctcattggagtttgatatcctgagaagctgatgactaaccctatgctcatgtataccacc

SEQ ID NO: 28034 - DNA, 122 bp, Homo sapiens
  misc_feature (61)..(62): /note="This region represents a CpG dinucleotide"
  misc_feature (61)..(61): /note="Nucleotide may be methylated to form 5-methylcytosine"
ttcagctggagcacctgttgtaagatgtgctgccggaggttctcctgggcaatccccattcgctcgagctttttgtcagtaagtctcagcagggctcgccctgcagggttttaagaaataaa

SEQ ID NO: 28035 - DNA, 122 bp, Homo sapiens
  misc_feature (61)..(62): /note="This region represents a CpG dinucleotide"
  misc_feature (61)..(61): /note="Nucleotide may be methylated to form 5-methylcytosine"
ccaggccagtggttcccaaatgccgatcaaggacagcaagaattactgagttctaaaacccgccagcagatagtctgattcagtggctgaagacattttattttttaaacaagcaactcatc

SEQ ID NO: 28036 - DNA, 122 bp, Homo sapiens
  misc_feature (61)..(62): /note="This region represents a CpG dinucleotide"
  misc_feature (61)..(61): /note="Nucleotide may be methylated to form 5-methylcytosine"
gaatcttcatcataagggctgttaaggagctttcccttttctccaggaagctttgcagggcgcatattgttggctttgcttcctcctctagcaatgaccacctggtgttgcaacactgctgt

SEQ ID NO: 28037 - DNA, 122 bp, Homo sapiens
  misc_feature (61)..(62): /note="This region represents a CpG dinucleotide"
  misc_feature (61)..(61): /note="Nucleotide may be methylated to form 5-methylcytosine"
attaacatgtgcctcttgtgatctgcctgacttttctgcttcacagttaatttggacttccgtgaaaaaggaaaagcatggttgagcagcattaacttaaatttaagaaagttgaattatag

SEQ ID NO: 28038 - DNA, 122 bp, Homo sapiens
  misc_feature (61)..(62): /note="This region represents a CpG dinucleotide"
  misc_feature (61)..(61): /note="Nucleotide may be methylated to form 5-methylcytosine"
aacgagtgatgtttaagcctcattagggctatagaaccagcgttctgacaaaaaaatactcgctattgactttgacctcacttccctacctccctctgttcgtgggattattgaaccagggt

SEQ ID NO: 28039 - DNA, 122 bp, Homo sapiens
  misc_feature (61)..(62): /note="This region represents a CpG dinucleotide"
  misc_feature (61)..(61): /note="Nucleotide may be methylated to form 5-methylcytosine"
acaattcagtggctattagcatattcacagtgttgtgcaaccagcacatccatctagtttcggaagcatttcatcaccccagctggaaacctggtaccattaaacagttggtctccattcct

SEQ ID NO: 28040 - DNA, 122 bp, Homo sapiens
  misc_feature (61)..(62): /note="This region represents a CpG dinucleotide"
  misc_feature (61)..(61): /note="Nucleotide may be methylated to form 5-methylcytosine"
tggggcagaaacaaatcacaatggtggaatgtcatcagttaaggctattttcacttctttcgtggatcttcaattgcttcaggggatatgatggcttagcttgggctcagaggcctgacatg

SEQ ID NO: 28041 - DNA, 122 bp, Homo sapiens
  misc_feature (61)..(62): /note="This region represents a CpG dinucleotide"
  misc_feature (61)..(61): /note="Nucleotide may be methylated to form 5-methylcytosine"
tccagatactcaaattttcccccttgtgtaaacatggtctttatcatgaaaccgaacaaacgtttttctaaattcgtctctcaggagcatacccacgctgcacatcatggaacattttatcc

SEQ ID NO: 28042 - DNA, 122 bp, Homo sapiens
  misc_feature (61)..(62): /note="This region represents a CpG dinucleotide"
  misc_feature (61)..(61): /note="Nucleotide may be methylated to form 5-methylcytosine"
taatgaaagagaaagtttgaataactgattttttttttaagttgaggtcctgtgcatgcacggacatgagtcaaatgaccagtgtagcaggatcttgggaggggcaggcagacattacaatt

SEQ ID NO: 28043 - DNA, 122 bp, Homo sapiens
  misc_feature (61)..(62): /note="This region represents a CpG dinucleotide"
  misc_feature (61)..(61): /note="Nucleotide may be methylated to form 5-methylcytosine"
cacccctgtgctgaaggtattgaaaggaataagacacagtctctcctccagagtctgtggcgtagacagtgagtcatcggatgctacaatgtgctgtgataaatgtatcacagggacagtgc

SEQ ID NO: 28044 - DNA, 122 bp, Homo sapiens
  misc_feature (61)..(62): /note="This region represents a CpG dinucleotide"
  misc_feature (61)..(61): /note="Nucleotide may be methylated to form 5-methylcytosine"
tagtgtgtttagatttatgagggagtgaatgaccttctctgccacagttttttacattttcgtttttccaggactgattttccatctggcctaaccagagtctgaagttgctgaatcaaaca

SEQ ID NO: 28045 - DNA, 122 bp, Homo sapiens
  misc_feature (61)..(62): /note="This region represents a CpG dinucleotide"
  misc_feature (61)..(61): /note="Nucleotide may be methylated to form 5-methylcytosine"
acagtgctcctgctccagcatctttaatgaagtcccataaactcccataaaatcctcgatcgttgacaaatcatacacacacgcttagggcaaggctcactggatcacgatgctctcttcct

SEQ ID NO: 28046 - DNA, 122 bp, Homo sapiens
  misc_feature (61)..(62): /note="This region represents a CpG dinucleotide"
  misc_feature (61)..(61): /note="Nucleotide may be methylated to form 5-methylcytosine"
acacggaaaggaagctatttcataactatcagtcatgtgaaatttggcaggcccctagcccgttagtggccacagtcacatgattgattaccggttggggacccacagttagcttattgcag

SEQ ID NO: 28047 - DNA, 122 bp, Homo sapiens
  misc_feature (61)..(62): /note="This region represents a CpG dinucleotide"
  misc_feature (61)..(61): /note="Nucleotide may be methylated to form 5-methylcytosine"
gaaagatgtcaggagggggagaagcagatgacatgggtaagaggagaattcttacttctacgtggctccaacggaaatttgcagccataaaacccaaaggaggtatttgctgaatcacaggc

SEQ ID NO: 28048 - DNA, 122 bp, Homo sapiens
  misc_feature (61)..(62): /note="This region represents a CpG dinucleotide"
  misc_feature (61)..(61): /note="Nucleotide may be methylated to form 5-methylcytosine"
gatccagcttgcttttccccttgtcttcttcctcagactttatgaaagtatttgcagagacgccttgtcccctgccatgagctgtaaatacttatgcagatgaagggtttgttactctagtt

SEQ ID NO: 28049 - DNA, 122 bp, Homo sapiens
  misc_feature (61)..(62): /note="This region represents a CpG dinucleotide"
  misc_feature (61)..(61): /note="Nucleotide may be methylated to form 5-methylcytosine"
gcccctggtggtgttggtcacggtaaggctgggttggtgcaagtcctcatcattactgaacgttcagcctgaattacattccagggttggaaggggcctcttggagcataatcacattgttg

SEQ ID NO: 28050 - DNA, 122 bp, Homo sapiens
  misc_feature (61)..(62): /note="This region represents a CpG dinucleotide"
  misc_feature (61)..(61): /note="Nucleotide may be methylated to form 5-methylcytosine"
tttttctaagttcatgccagccttgggcagggccaagtgccaggtctcaaggtggtacctcgagatggcagtggcagtgcaggatttgaatcttgccctacagcagctgcccccattgccct

SEQ ID NO: 28051 - DNA, 122 bp, Homo sapiens
  misc_feature (61)..(62): /note="This region represents a CpG dinucleotide"
  misc_feature (61)..(61): /note="Nucleotide may be methylated to form 5-methylcytosine"
ttgaatcctgtactttcaatgttgacttctgagctttatcttgactttctttgattggcacgcccttcccaaggagctggttgtctaggtgatgaatactgcatgtcataataaaacaaaat

SEQ ID NO: 28052 - DNA, 122 bp, Homo sapiens
  misc_feature (61)..(62): /note="This region represents a CpG dinucleotide"
  misc_feature (61)..(61): /note="Nucleotide may be methylated to form 5-methylcytosine"
ttgcagtcaaatactggatttgtaaccttcagggctgacatgctgcccagtttgcttcatcgggagaatagcaacaggtagacacatctcaaggctaaatctgctcatgtcgccactgctct

SEQ ID NO: 28053 - DNA, 122 bp, Homo sapiens
  misc_feature (61)..(62): /note="This region represents a CpG dinucleotide"
  misc_feature (61)..(61): /note="Nucleotide may be methylated to form 5-methylcytosine"
ttgtttgaattcccaggaatcaatcacccaatcagtcaacaaggaagtgatgttcagtctcgtgaatagctccaactcttcagctctccagattttcctagggaagacagagaaaatcctac

SEQ ID NO: 28054 - DNA, 122 bp, Homo sapiens
  misc_feature (61)..(62): /note="This region represents a CpG dinucleotide"
  misc_feature (61)..(61): /note="Nucleotide may be methylated to form 5-methylcytosine"
ttttccttagcacacacctccattataacactgaggttttctgtcctgttagttggatgccgttcatggcttggaaccccatttcttcttaaagttgtgcttctcagtgctgactgccttcc

SEQ ID NO: 28055 - DNA, 122 bp, Homo sapiens
  misc_feature (61)..(62): /note="This region represents a CpG dinucleotide"
  misc_feature (61)..(61): /note="Nucleotide may be methylated to form 5-methylcytosine"
gtgttagtaaatgagcttcagacagccagaaatgactagagtgatgtgggattaagaacacggaagtggtaagtattacatgtatagttaggtgtatgattaaggccatatgaagcttaaag

SEQ ID NO: 28056 - DNA, 122 bp, Homo sapiens
  misc_feature (61)..(62): /note="This region represents a CpG dinucleotide"
  misc_feature (61)..(61): /note="Nucleotide may be methylated to form 5-methylcytosine"
attttgtttaaagtgcctatcgacagtacatagtgaaatgctcggttccagctaattaagcgctcagctgtacggtgtggaaactaagagatcatgtatatggaactgtgaaatggagtttc

SEQ ID NO: 28057 - DNA, 122 bp, Homo sapiens
  misc_feature (61)..(62): /note="This region represents a CpG dinucleotide"
  misc_feature (61)..(61): /note="Nucleotide may be methylated to form 5-methylcytosine"
gagtgagtcaggcgatggtgagcctccgtgccagaacaacttgtaggctgtggaagcaaccgcaaagggatggcagcggtgatatatatagttgaaagatcactgtctgctgtgtagaggat

SEQ ID NO: 28058 - DNA, 122 bp, Homo sapiens
  misc_feature (61)..(62): /note="This region represents a CpG dinucleotide"
  misc_feature (61)..(61): /note="Nucleotide may be methylated to form 5-methylcytosine"
cgaggtcgtggcggccaagcgcccgcaacgtgttagatgatagatcgagcagcctcaggccgctggcgttgacgaagacgccgcgacccagcgcatctagttcgttgtggtctaggtgcagg

SEQ ID NO: 28059 - DNA, 122 bp, Homo sapiens
  misc_feature (61)..(62): /note="This region represents a CpG dinucleotide"
  misc_feature (61)..(61): /note="Nucleotide may be methylated to form 5-methylcytosine"
ctgggtaccagacgcatggtctaggtagggggtgtcatgtactaggtgagcatggggttccgctgggcatgttcccttgtcttgtaggatgttagctctgaggggcgtggctggaagaaggc

SEQ ID NO: 28060 - DNA, 122 bp, Homo sapiens
  misc_feature (61)..(62): /note="This region represents a CpG dinucleotide"
  misc_feature (61)..(61): /note="Nucleotide may be methylated to form 5-methylcytosine"
gttgcttttgagaattttaaacataccctcttatttcgaggcagcgaacctcagcagttccggctttgctgttagctcttttgtctttgttcccgggactcaggggctgtgttgctgctggc

SEQ ID NO: 28061 - DNA, 122 bp, Homo sapiens
  misc_feature (61)..(62): /note="This region represents a CpG dinucleotide"
  misc_feature (61)..(61): /note="Nucleotide may be methylated to form 5-methylcytosine"
gttttctttatccaggatcccttctatccccagctagagccactagatcactaaatcaatcgtatgtgcaggctgcctctgatttatttccctcgctgctgctggcctgcccctgcctttta

SEQ ID NO: 28062 - DNA, 122 bp, Homo sapiens
  misc_feature (61)..(62): /note="This region represents a CpG dinucleotide"
  misc_feature (61)..(61): /note="Nucleotide may be methylated to form 5-methylcytosine"
ctaagggtacgacctgctgggagaatcatccatctatcttctaagtgctaattgagtgcacgcctttcttacctctgagtgttaaagctttgtcaggaaacgtggcaacatctcaggctgaa

SEQ ID NO: 28063 - DNA, 122 bp, Homo sapiens
  misc_feature (61)..(62): /note="This region represents a CpG dinucleotide"
  misc_feature (61)..(61): /note="Nucleotide may be methylated to form 5-methylcytosine"
atgggtggggcaagcaggtggtgaggctttgagtatacagcacatcatacttgtaagatacgggatgaaactgaggtgactgtggctgattataaatgcaaagtaccttgtaacaaggagcc

SEQ ID NO: 28064 - DNA, 122 bp, Homo sapiens
  misc_feature (61)..(62): /note="This region represents a CpG dinucleotide"
  misc_feature (61)..(61): /note="Nucleotide may be methylated to form 5-methylcytosine"
ccccagagcctagaacagtgcctggctgaaaataaataggtgggtcaacagcctgaggagcgatctgggctagaggcatacatgtatgagtcatgtgcatagaggtgataactaaagccaat

SEQ ID NO: 28065 - DNA, 122 bp, Homo sapiens
  misc_feature (61)..(62): /note="This region represents a CpG dinucleotide"
  misc_feature (61)..(61): /note="Nucleotide may be methylated to form 5-methylcytosine"
gaaatagaagaggggaggatcctatctagaaagagtagccaaggaagatctttctgagaacgtgaaattgacatttcaataggagatgaatatctgagagaagcattctgggcagagataag

SEQ ID NO: 28066 - DNA, 122 bp, Homo sapiens
  misc_feature (61)..(62): /note="This region represents a CpG dinucleotide"
  misc_feature (61)..(61): /note="Nucleotide may be methylated to form 5-methylcytosine"
attgccatggatctggctcaaaggcaacaagggcactgtcgggactggacttcctgtgggcgcagctggagtcaaggcttggggtcttggggtatgcttccagcagccagcaggtgcttggg

SEQ ID NO: 28067 - DNA, 122 bp, Homo sapiens
  misc_feature (61)..(62): /note="This region represents a CpG dinucleotide"
  misc_feature (61)..(61): /note="Nucleotide may be methylated to form 5-methylcytosine"
aagcctttctactgaggcttctgggatcttttcttagtgccccaagtattcagttctggccggaaggaacttgaatatctgtcagccatatagcttcctggcttttattctttgccaggctt

SEQ ID NO: 28068 - DNA, 122 bp, Homo sapiens
  misc_feature (61)..(62): /note="This region represents a CpG dinucleotide"
  misc_feature (61)..(61): /note="Nucleotide may be methylated to form 5-methylcytosine"
aaagcctaatcaacacttctgtgaggaagttagcagccttccttctgacctgactgcttccgcttctggtggtggcagcgctgtcaagcctcattactggaaagttcatcttgttaaatttc

SEQ ID NO: 28069 - DNA, 122 bp, Homo sapiens
  misc_feature (61)..(62): /note="This region represents a CpG dinucleotide"
  misc_feature (61)..(61): /note="Nucleotide may be methylated to form 5-methylcytosine"
tcacaaaggcccacatattgtacaacgccactcatataacatgttcaaaacaggcaaaaccggcctggcacagtggctcacccctgtaatcccagcactttaggaggccaaggcgggcagat

SEQ ID NO: 28070 - DNA, 122 bp, Homo sapiens
  misc_feature (61)..(62): /note="This region represents a CpG dinucleotide"
  misc_feature (61)..(61): /note="Nucleotide may be methylated to form 5-methylcytosine"
gtaatgccagagtcactttccatcaacccgcccactcagctgaattgcgccagccttttgcgcaaagcatcacactcctgttgtaagattgattgggtgttgagccaccgccacaaagacaa

SEQ ID NO: 28071 - DNA, 122 bp, Homo sapiens
  misc_feature (61)..(62): /note="This region represents a CpG dinucleotide"
  misc_feature (61)..(61): /note="Nucleotide may be methylated to form 5-methylcytosine"
taggtacagaaaattatattgctttcagttttctttcccctttcctctccatcccccccacggaacttgtctcaggttttcagagtcggactgctagattagtacaataaaagtgttgtgaa

SEQ ID NO: 28072 - DNA, 122 bp, Homo sapiens
  misc_feature (61)..(62): /note="This region represents a CpG dinucleotide"
  misc_feature (61)..(61): /note="Nucleotide may be methylated to form 5-methylcytosine"
gaccaagggccctgcagggtaacttgaggacagagactcacctgatcgtctctgcctgcacgtttctgcagtgatgacgcgtccgcaccctgaaaggaagaaggggccacagttcgtgcctc

SEQ ID NO: 28073 - DNA, 122 bp, Homo sapiens
  misc_feature (61)..(62): /note="This region represents a CpG dinucleotide"
  misc_feature (61)..(61): /note="Nucleotide may be methylated to form 5-methylcytosine"
atctgcctgcctcggcctcccaaagtgctgggattacaggcgtgagtcaccacgccgggccggtaaggcttttgaaaagagatataagacctgattatggagctggccctcttagtcccatt

SEQ ID NO: 28074 - DNA, 122 bp, Homo sapiens
  misc_feature (61)..(62): /note="This region represents a CpG dinucleotide"
  misc_feature (61)..(61): /note="Nucleotide may be methylated to form 5-methylcytosine"
ccgcaagatttcttaagtaaaacacacacaaaacctaaccataggccgggtgcagtggctcgtatctgtaatcccagcacttcaggaggcttaagtgtgaggattgcatgagcccaggagtt

SEQ ID NO: 28075 - DNA, 122 bp, Homo sapiens
  misc_feature (61)..(62): /note="This region represents a CpG dinucleotide"
  misc_feature (61)..(61): /note="Nucleotide may be methylated to form 5-methylcytosine"
caaagtccaagatttggcaccagcggagttcctctgaggctctccttggctagtagatgccgtcttctccctgtgtcctcaggtggccttccctctgggcctgtcggcattctgattgcctc

SEQ ID NO: 28076 - DNA, 122 bp, Homo sapiens
  misc_feature (61)..(62): /note="This region represents a CpG dinucleotide"
  misc_feature (61)..(61): /note="Nucleotide may be methylated to form 5-methylcytosine"
tactgcacccgcttcatcccattgaagatatgacactcacacttagcctgctccaagaaacgtgctgtggggacacgaacgatccagtcacagggatggcctctgaggaagacactgacagc

SEQ ID NO: 28077 - DNA, 122 bp, Homo sapiens
  misc_feature (61)..(62): /note="This region represents a CpG dinucleotide"
  misc_feature (61)..(61): /note="Nucleotide may be methylated to form 5-methylcytosine"
ccaccccctttctccaataaagtccaaaatcagcaatcagtgttgacatcaacgtgcaaacggcttagagccccaggtaaaacaaaagacgcctgcaaaaaggcaaacgagaaaggaactca

SEQ ID NO: 28078 - DNA, 122 bp, Homo sapiens
  misc_feature (61)..(62): /note="This region represents a CpG dinucleotide"
  misc_feature (61)..(61): /note="Nucleotide may be methylated to form 5-methylcytosine"
gtctcattacaacagaccaatgtgagagaattatttctggacagttgcacttcttataaacgtttaacatgattccaaacttttatttggtaatttgttagtcctttggcaaaggactaatg

SEQ ID NO: 28079 - DNA, 122 bp, Homo sapiens
  misc_feature (61)..(62): /note="This region represents a CpG dinucleotide"
  misc_feature (61)..(61): /note="Nucleotide may be methylated to form 5-methylcytosine"
ctaaaggcctcccatggtcttcaaacaagaagagatgctctaagataaattacttcattacgttgatgcttcatcatccgtggaagctgtgactcagagccctgcagcaataattaggcagt

SEQ ID NO: 28080 - DNA, 122 bp, Homo sapiens
  misc_feature (61)..(62): /note="This region represents a CpG dinucleotide"
  misc_feature (61)..(61): /note="Nucleotide may be methylated to form 5-methylcytosine"
ggcgtccattgcaacatcagggagaggagtgaagccacaaggatgacatggtctatggcacgtccggctgctactgctgctgcccatgacacactcctggagcccaggcagagtctgtgttt

SEQ ID NO: 28081 - DNA, 122 bp, Homo sapiens
  misc_feature (61)..(62): /note="This region represents a CpG dinucleotide"
  misc_feature (61)..(61): /note="Nucleotide may be methylated to form 5-methylcytosine"
aattggtctcactgcaggaaacagctttgtaaactgctgtccacctaaagtgtcatttatcgcatttgatatgcttaatataccttatattcttttgtaaatattcttcttacagccaaaaa

SEQ ID NO: 28082 - DNA, 122 bp, Homo sapiens
  misc_feature (61)..(62): /note="This region represents a CpG dinucleotide"
  misc_feature (61)..(61): /note="Nucleotide may be methylated to form 5-methylcytosine"
actttattgtgtattatcaataataaagctaatttgataaaacattgtaagtctctcagccgggcgccgtggctcacacctgtaatcccaacactttgggaggccgaggcaggtggatctcc

SEQ ID NO: 28083 - DNA, 122 bp, Homo sapiens
  misc_feature (61)..(62): /note="This region represents a CpG dinucleotide"
  misc_feature (61)..(61): /note="Nucleotide may be methylated to form 5-methylcytosine"
acagtttaaagcaatgagtagtgacaaaatccaaaacaaaggaactgcctattatgcaaacgcctggccactcaaagccattcgaaaccattattgcttagacgagatcaagtaaaatcaaa

SEQ ID NO: 28084 - DNA, 122 bp, Homo sapiens
  misc_feature (61)..(62): /note="This region represents a CpG dinucleotide"
  misc_feature (61)..(61): /note="Nucleotide may be methylated to form 5-methylcytosine"
tagaaagcaccataagctatacatattcttgtctctcctaagcttttaaaaaaattttaacgggatttaccctgggaacataaattcatctacaagagaaattagagacgtttcaaggaata

SEQ ID NO: 28085 - DNA, 122 bp, Homo sapiens
  misc_feature (61)..(62): /note="This region represents a CpG dinucleotide"
  misc_feature (61)..(61): /note="Nucleotide may be methylated to form 5-methylcytosine"
tcactccagtgttttcaatcttcatatctccttacttctttatccttgactttcttgcctcgctcttataaggtcattatatttagggctcatccagataatccaggataatctccccattt

SEQ ID NO: 28086 - DNA, 122 bp, Homo sapiens
  misc_feature (61)..(62): /note="This region represents a CpG dinucleotide"
  misc_feature (61)..(61): /note="Nucleotide may be methylated to form 5-methylcytosine"
taccatggtaagactgtggacatttacctttttaagtctctgtttccctgtggcaaggggcgctctcaactctcacttccagggaagccctgtggcccaagagcccccatcctgccccctcc

SEQ ID NO: 28087 - DNA, 122 bp, Homo sapiens
  misc_feature (61)..(62): /note="This region represents a CpG dinucleotide"
  misc_feature (61)..(61): /note="Nucleotide may be methylated to form 5-methylcytosine"
gtgtgtgattctggccccagccccagcacctctacccccacctttactacccctaggctgcgggaagaggctttgcccagcaatagtcctgatctaatggatccttgaagcacaataaacag

SEQ ID NO: 28088 - DNA, 122 bp, Homo sapiens
  misc_feature (61)..(62): /note="This region represents a CpG dinucleotide"
  misc_feature (61)..(61): /note="Nucleotide may be methylated to form 5-methylcytosine"
ccccatgctcagttcactccaggcagtcacaatgaccacatcattcttcctcaaacaccccgactcactgcccccttggagactgtgtgcttgttcttcctggctcatgaaatatttgttcc

SEQ ID NO: 28089 - DNA, 122 bp, Homo sapiens
  misc_feature (61)..(62): /note="This region represents a CpG dinucleotide"
  misc_feature (61)..(61): /note="Nucleotide may be methylated to form 5-methylcytosine"
cagtacatccagtatatttagtgcagctaggcctgcttctatatggaagttcttgctcagcgtgtgcttaccactaaatgacagaaagtggaaaataattggctgagcaggaaagttagagg

SEQ ID NO: 28090 - DNA, 122 bp, Homo sapiens
  misc_feature (61)..(62): /note="This region represents a CpG dinucleotide"
  misc_feature (61)..(61): /note="Nucleotide may be methylated to form 5-methylcytosine"
tgtaaggcttggggggcagcgagtgggcatcgtggtgaaagcctcgggatcagggagctgcgtctgcaggcaggcctgctggccggaaacctgccaggaaaggaaggggctgtcccggggcg

SEQ ID NO: 28091 - DNA, 122 bp, Homo sapiens
  misc_feature (61)..(62): /note="This region represents a CpG dinucleotide"
  misc_feature (61)..(61): /note="Nucleotide may be methylated to form 5-methylcytosine"
ccaaatttaacatgcacttttaacttcatttcatatgtgagccccctgcccttgtagtcccgaatgctccctttttcttgaaactctcttgttcttttgattgtgtgatatagttatctcct

SEQ ID NO: 28092 - DNA, 122 bp, Homo sapiens
  misc_feature (61)..(62): /note="This region represents a CpG dinucleotide"
  misc_feature (61)..(61): /note="Nucleotide may be methylated to form 5-methylcytosine"
attatctcatgtaagtcctgcaacaactattaagtaggcccattttatggactgaaaaagcgaggcacagagtatttgcccaaggtctgagtcactgaagtatgataatgtgtgaagtgaac

SEQ ID NO: 28093 - DNA, 122 bp, Homo sapiens
  misc_feature (61)..(62): /note="This region represents a CpG dinucleotide"
  misc_feature (61)..(61): /note="Nucleotide may be methylated to form 5-methylcytosine"
ggaacggctgacccataagaggacgtcctcaaggtccccaagggctagaggctgagatgccgccttcgcctgggcgggcctcgcagcctggaggcaggcggtggtgcagctcgggcaggccc

SEQ ID NO: 28094 - DNA, 122 bp, Homo sapiens
  misc_feature (61)..(62): /note="This region represents a CpG dinucleotide"
  misc_feature (61)..(61): /note="Nucleotide may be methylated to form 5-methylcytosine"
gtttgggatataaggcccctctgtgggtgtttaaggcacaatatttcaggcctaaaccaccgaatgacacatgcctaaacccagaatcctgtattctccaccaggactccagggtatgtgag

SEQ ID NO: 28095 - DNA, 122 bp, Homo sapiens
  misc_feature (61)..(62): /note="This region represents a CpG dinucleotide"
  misc_feature (61)..(61): /note="Nucleotide may be methylated to form 5-methylcytosine"
tactgttgagtactttatttataatactgagattctatttctattttacacaataggaaacggatacataacttgcataaggacataaagacaacaagtggtgaggcagtgatgcaatgaat

SEQ ID NO: 28096 - DNA, 122 bp, Homo sapiens
  misc_feature (61)..(62): /note="This region represents a CpG dinucleotide"
  misc_feature (61)..(61): /note="Nucleotide may be methylated to form 5-methylcytosine"
ctataaaatccacatggtgtcttttcaaaccacagaaaccccaagaaccaaaagttttgccgtatcatattgcataagtcatagggtcacttttatgacaacctgaacctgctggagagccc

SEQ ID NO: 28097 - DNA, 122 bp, Homo sapiens
  misc_feature (61)..(62): /note="This region represents a CpG dinucleotide"
  misc_feature (61)..(61): /note="Nucleotide may be methylated to form 5-methylcytosine"
ggggagtgtggtagccataggatgcatcattcaaatcatcctccaaaagaggaccagttgcgaggagcatagtcagctaacagcttcttccagctgtgcaccttctggttcctctgtagtgt

SEQ ID NO: 28098 - DNA, 122 bp, Homo sapiens
  misc_feature (61)..(62): /note="This region represents a CpG dinucleotide"
  misc_feature (61)..(61): /note="Nucleotide may be methylated to form 5-methylcytosine"
tgtccgctagggaactctaggctaaatagtcattcagacaagtaagacctgatcaggtcgcgcttggcatcatattgacatagaaggatattgcgcaggaaacagcatgccagcagagcaat

SEQ ID NO: 28099 - DNA, 122 bp, Homo sapiens
  misc_feature (61)..(62): /note="This region represents a CpG dinucleotide"
  misc_feature (61)..(61): /note="Nucleotide may be methylated to form 5-methylcytosine"
cctgctctgctgctgcctgtctctctgagtatgaaggctgggcctgatgggtccagagcacgcagcacagagggcttgtgcttagtagggattgacaaatgcttattcatcacttccttcaa

SEQ ID NO: 28100 - DNA, 122 bp, Homo sapiens
  misc_feature (61)..(62): /note="This region represents a CpG dinucleotide"
  misc_feature (61)..(61): /note="Nucleotide may be methylated to form 5-methylcytosine"
ccaggggccttgcacaacatgattgctcacagactcaccttctccacctctcgggggagacggaggggaagaacgcctgcttcatgcaacagtcagtattaaatacttagcacagtgcctgg

SEQ ID NO: 28101 - DNA, 122 bp, Homo sapiens
  misc_feature (61)..(62): /note="This region represents a CpG dinucleotide"
  misc_feature (61)..(61): /note="Nucleotide may be methylated to form 5-methylcytosine"
aaaccaccaggaagaataactgctcttcatgtcagaagagggagagagagcacttctcagcgggtggtcaaggtaggattcctggaagaaggccggttctgaaaactgagagagctgtttat

SEQ ID NO: 28102 - DNA, 122 bp, Homo sapiens
  misc_feature (61)..(62): /note="This region represents a CpG dinucleotide"
  misc_feature (61)..(61): /note="Nucleotide may be methylated to form 5-methylcytosine"
tggctatctagtttcagagtcttaggcacctagccacttgatacgctgcctctccctagacgtgtccgctaagaactagagtgagaacagactatgataagggcccagtaggaacataaata

SEQ ID NO: 28103 - DNA, 122 bp, Homo sapiens
  misc_feature (61)..(62): /note="This region represents a CpG dinucleotide"
  misc_feature (61)..(61): /note="Nucleotide may be methylated to form 5-methylcytosine"
ctcagagaaaggatgaacaggcaaacgattcccaacttcctagagactatctcaaagattcgctggattttagatttctttttaaaagcccagggggttagaaattagggaggttcaagaaa

SEQ ID NO: 28104 - DNA, 122 bp, Homo sapiens
  misc_feature (61)..(62): /note="This region represents a CpG dinucleotide"
  misc_feature (61)..(61): /note="Nucleotide may be methylated to form 5-methylcytosine"
attttcgtttctgggagtcattctgacttgtcacacttattatactcagtcacagagcttcgtattttcaacttctgcaggttctattagctctcccactgcttcccatcctgctggccagg

SEQ ID NO: 28105 - DNA, 122 bp, Homo sapiens
  misc_feature (61)..(62): /note="This region represents a CpG dinucleotide"
  misc_feature (61)..(61): /note="Nucleotide may be methylated to form 5-methylcytosine"
agtccggggagtccaggtatggaatgggaggcagaaagttcaatcaagggactgggatttcggaatgaataatgaagggagatggactgggtccatgccgaaggtttctccctggtttctca

SEQ ID NO: 28106 - DNA, 122 bp, Homo sapiens
  misc_feature (61)..(62): /note="This region represents a CpG dinucleotide"
  misc_feature (61)..(61): /note="Nucleotide may be methylated to form 5-methylcytosine"
gactggtgcactcatagtagctggatggcgctgtgggcggtgagcgtatcatcccacccacgtgacctatgcactcacccaccttgtgaggcccagtaattcaggacaccccggtcttgcag

SEQ ID NO: 28107 - DNA, 122 bp, Homo sapiens
  misc_feature (61)..(62): /note="This region represents a CpG dinucleotide"
  misc_feature (61)..(61): /note="Nucleotide may be methylated to form 5-methylcytosine"
gttaagaagccacagtggtgtgccccagaaaccagtagcgtgagccacagctgcctaatccgtgcacaataacctcgctgcccattcgtccacattttccttaggttttcagagaagtataa

SEQ ID NO: 28108 - DNA, 122 bp, Homo sapiens
  misc_feature (61)..(62): /note="This region represents a CpG dinucleotide"
  misc_feature (61)..(61): /note="Nucleotide may be methylated to form 5-methylcytosine"
gggctccgtagtgtgggaggaggatctcagtcatagagaagtcctccagctcagaggctacgcagctccaggaacaagagaccaggggagtgcagggtcagctgtctttgatcatgactctg

SEQ ID NO: 28109 - DNA, 122 bp, Homo sapiens
  misc_feature (61)..(62): /note="This region represents a CpG dinucleotide"
  misc_feature (61)..(61): /note="Nucleotide may be methylated to form 5-methylcytosine"
tgattcaacagtaacggcacaccctgccaggaagacatttccatgtgacacagtttttgacgtttaatagcagcataaattttcaaaaggcaaacaaggtatgttagcttcatgataggaag

SEQ ID NO: 28110 - DNA, 122 bp, Homo sapiens
  misc_feature (61)..(62): /note="This region represents a CpG dinucleotide"
  misc_feature (61)..(61): /note="Nucleotide may be methylated to form 5-methylcytosine"
ctggatatcgtcagtgagtccccagcggttgtgcaggcaccgggagctggggcagcggggcgggaaggagtgtggccggaaggcctccccgcaccttccccagcaggcctggatggcagatc

SEQ ID NO: 28111 - DNA, 122 bp, Homo sapiens
  misc_feature (61)..(62): /note="This region represents a CpG dinucleotide"
  misc_feature (61)..(61): /note="Nucleotide may be methylated to form 5-methylcytosine"
gcacttacacaaacctagatggtatcacctactacaggcctaggctagatggtatatagccgattgctcctagtctacaaacctgttcagtatgctacttttctgaatactgtagtcagttg

SEQ ID NO: 28112 - DNA, 122 bp, Homo sapiens
  misc_feature (61)..(62): /note="This region represents a CpG dinucleotide"
  misc_feature (61)..(61): /note="Nucleotide may be methylated to form 5-methylcytosine"
atttaatccaaattggtgagggtttactaagcattgcgggattttccaggtatgaattttcggcatgtataacactgagattgggtattctgacctccaaatattatagtctgaagagactt

SEQ ID NO: 28113 - DNA, 122 bp, Homo sapiens
  misc_feature (61)..(62): /note="This region represents a CpG dinucleotide"
  misc_feature (61)..(61): /note="Nucleotide may be methylated to form 5-methylcytosine"
ttcacttaaggcaccatgttacttgagggcgatccctctcagcaatcctgctgtatcctacgtgaaggcttcatcagaaagaattggcagaacaggtctggagagcctcaggttttaattaa

SEQ ID NO: 28114 - DNA, 122 bp, Homo sapiens
  misc_feature (61)..(62): /note="This region represents a CpG dinucleotide"
  misc_feature (61)..(61): /note="Nucleotide may be methylated to form 5-methylcytosine"
ggtttcacaatatactttaagcatacattttacttgttgtgaacaggaacctgacatcctcggtctacagtttggtacacttgatattgccaagctgttttcatgacagtaaaggggatggt

SEQ ID NO: 28115 - DNA, 122 bp, Homo sapiens
  misc_feature (61)..(62): /note="This region represents a CpG dinucleotide"
  misc_feature (61)..(61): /note="Nucleotide may be methylated to form 5-methylcytosine"
atcctagtcaggaattgtatttaacacataaactgagtatttcctttggctttacttaaacgcttacaaaacaaaacttgatcaaatcagaaatgtttagtctgctgtatcttgactgagga

SEQ ID NO: 28116 - DNA, 122 bp, Homo sapiens
  misc_feature (61)..(62): /note="This region represents a CpG dinucleotide"
  misc_feature (61)..(61): /note="Nucleotide may be methylated to form 5-methylcytosine"
tctatcaatgaggaaggagatttagtctcaggcctgagaaaccccatggaagaaaccaagcgttcaggtggactctcaggaacatcaggcaggagagcaagaacaacagagagaggaggaga

SEQ ID NO: 28117 - DNA, 122 bp, Homo sapiens
  misc_feature (61)..(62): /note="This region represents a CpG dinucleotide"
  misc_feature (61)..(61): /note="Nucleotide may be methylated to form 5-methylcytosine"
gtctttgcctcaacttcaaaaatgcacagttgttgagagcctggaagagacattcaggaacgggctgcaacaagccttgctctggtgtggtcctgcttatccaattgttgctcaataatgtc

SEQ ID NO: 28118 - DNA, 122 bp, Homo sapiens
  misc_feature (61)..(62): /note="This region represents a CpG dinucleotide"
  misc_feature (61)..(61): /note="Nucleotide may be methylated to form 5-methylcytosine"
gacgaaaagaggggcaagtcactcttcatctctgtgtgtatatagatacatctttgccctcgtagaatttactgcctcaggaaattttcaataaaatgttaagattcaaatggtagataaat

SEQ ID NO: 28119 - DNA, 122 bp, Homo sapiens
  misc_feature (61)..(62): /note="This region represents a CpG dinucleotide"
  misc_feature (61)..(61): /note="Nucleotide may be methylated to form 5-methylcytosine"
tggtgtaacgatggcagtctatgaatccccttggttattatctctggggtagccaggtctcgcaagaacagagctcagcaggcctgccagggactaccacaccctctcctgaggatgtcgtg

SEQ ID NO: 28120 - DNA, 122 bp, Homo sapiens
  misc_feature (61)..(62): /note="This region represents a CpG dinucleotide"
  misc_feature (61)..(61): /note="Nucleotide may be methylated to form 5-methylcytosine"
ctcctttccagcctgctggaaattccttcttggaccacaggaaacacacgagggatgtggcgtgggggaatcccagcttctactagtaggcaggcaaagtggaagggaaattcctcaatcag

SEQ ID NO: 28121 - DNA, 122 bp, Homo sapiens
  misc_feature (61)..(62): /note="This region represents a CpG dinucleotide"
  misc_feature (61)..(61): /note="Nucleotide may be methylated to form 5-methylcytosine"
ggcattgcttttgacgccatggactcttagggctctcagtcctgcctgggccccggctctcgttctctccaacatgacgccatctgctcaagcccttctggaatcctgtgctagaagagcac

SEQ ID NO: 28122 - DNA, 122 bp, Homo sapiens
  misc_feature (61)..(62): /note="This region represents a CpG dinucleotide"
  misc_feature (61)..(61): /note="Nucleotide may be methylated to form 5-methylcytosine"
acgtattgtcttttttttgttctaagatttcatgttacatttagtcatcatgtcaccttacgctcctcttggctgtgacagttactcaggctttcctggtttgacagttttaaggagccctg

SEQ ID NO: 28123 - DNA, 122 bp, Homo sapiens
  misc_feature (61)..(62): /note="This region represents a CpG dinucleotide"
  misc_feature (61)..(61): /note="Nucleotide may be methylated to form 5-methylcytosine"
cagggggactgtctgcagctctctggaattgtttttctgtgtagctttcctttctgataccgttgtctgtgaactctggtcaccctgatatccctagagtcacatccccgtctcttcaatcc

SEQ ID NO: 28124 - DNA, 122 bp, Homo sapiens
  misc_feature (61)..(62): /note="This region represents a CpG dinucleotide"
  misc_feature (61)..(61): /note="Nucleotide may be methylated to form 5-methylcytosine"
ccagccatgcttcctgtagagcctgtggaactgagtcaagcttcttttctttatacagtacgcactctcaggtaattcttttttgggaggacagagtttcactcttgtcacccagactggaa

SEQ ID NO: 28125 - DNA, 122 bp, Homo sapiens
  misc_feature (61)..(62): /note="This region represents a CpG dinucleotide"
  misc_feature (61)..(61): /note="Nucleotide may be methylated to form 5-methylcytosine"
gtcactcactgactccatgaggattttttcacacatcattgcaacacaggcagtgactgacgccaccacctttgccctggaggctggtttctgggccctgccggtgcgggacataaaggccg

SEQ ID NO: 28126 - DNA, 122 bp, Homo sapiens
  misc_feature (61)..(62): /note="This region represents a CpG dinucleotide"
  misc_feature (61)..(61): /note="Nucleotide may be methylated to form 5-methylcytosine"
ttctcctttgcaagggcagatgccaaggactcaatttctcactaactcagttaacaagcacgtattgatcacttactgagtacggaatgccaaatgaattgtgttggaagatgtaaaataaa

SEQ ID NO: 28127 - DNA, 122 bp, Homo sapiens
  misc_feature (61)..(62): /note="This region represents a CpG dinucleotide"
  misc_feature (61)..(61): /note="Nucleotide may be methylated to form 5-methylcytosine"
tttaatttttttagtgttctttataatatgtaactcattaacgcagtctcatgtgcaaaacgtttatgaatacacgaattgcgagtatcagaccaatcagactatggggtagaaggaataca

SEQ ID NO: 28128 - DNA, 122 bp, Homo sapiens
  misc_feature (61)..(62): /note="This region represents a CpG dinucleotide"
  misc_feature (61)..(61): /note="Nucleotide may be methylated to form 5-methylcytosine"
ccgcttgtctggtctaatgatctcactacggaaattatcaccagtcagcagactgtcattcgtgtccgcgacttgggttttgttcttccaagtgtttggcagctacagaatttctggccagc

SEQ ID NO: 28129 - DNA, 122 bp, Homo sapiens
  misc_feature (61)..(62): /note="This region represents a CpG dinucleotide"
  misc_feature (61)..(61): /note="Nucleotide may be methylated to form 5-methylcytosine"
catgtgttgacagggggcagggagccgagctcgggcagcagctcagggtgtgggtccaggcgggccagacggctctgctccagggcaatggcttcggctgagtgcttgcacttctcagagcc

SEQ ID NO: 28130 - DNA, 122 bp, Homo sapiens
  misc_feature (61)..(62): /note="This region represents a CpG dinucleotide"
  misc_feature (61)..(61): /note="Nucleotide may be methylated to form 5-methylcytosine"
agggaaaagggaacaaagaattaaaaacaggatcagcaagaattgaggaaaacatgataccggaagatgagtttgaggataagaaagaataatgaagattagagagagaagaggaggggaag

SEQ ID NO: 28131 - DNA, 122 bp, Homo sapiens
  misc_feature (61)..(62): /note="This region represents a CpG dinucleotide"
  misc_feature (61)..(61): /note="Nucleotide may be methylated to form 5-methylcytosine"
gggtcacatactgacctcttggcccaatctcaggtcagagcgaaatgtgattggccaggacgcatcccacgcccatcctggagggtagagcactgtgacgggcagccctgccagcaccactg

SEQ ID NO: 28132 - DNA, 122 bp, Homo sapiens
  misc_feature (61)..(62): /note="This region represents a CpG dinucleotide"
  misc_feature (61)..(61): /note="Nucleotide may be methylated to form 5-methylcytosine"
ggaaatcctatacagtatgcgagggttcagagagagtactcaaaggaggagttcagacctcgttggagaaggtatgtctcagcccactggataagcagcaatgttagatggtttggccaggc

SEQ ID NO: 28133 - DNA, 122 bp, Homo sapiens
  misc_feature (61)..(62): /note="This region represents a CpG dinucleotide"
  misc_feature (61)..(61): /note="Nucleotide may be methylated to form 5-methylcytosine"
attagcttatttagctattagaaataagatcgcagtatatctaggacattttgtgagacacgacactgagtattacgggtcaaattctggttaagtatacataggcgtatattcaacctatc

SEQ ID NO: 28134 - DNA, 122 bp, Homo sapiens
  misc_feature (61)..(62): /note="This region represents a CpG dinucleotide"
  misc_feature (61)..(61): /note="Nucleotide may be methylated to form 5-methylcytosine"
gtaacttacaagtaacttattgctacaagatgctaacagttatctgaacctgcagtgagccgtagtctttttgctcatggaagatgttgcctcaatgttgatagctgttgactcatcagggt

SEQ ID NO: 28135 - DNA, 122 bp, Homo sapiens
  misc_feature (61)..(62): /note="This region represents a CpG dinucleotide"
  misc_feature (61)..(61): /note="Nucleotide may be methylated to form 5-methylcytosine"
tgctcaatttctctgagccttgtctttatcacctgtaaaagggagatgataaggagtacccgaaacatagaaagtactcaataggtgccggctataaccttacaatagggaagcatccctta

SEQ ID NO: 28136 - DNA, 122 bp, Homo sapiens
  misc_feature (61)..(62): /note="This region represents a CpG dinucleotide"
  misc_feature (61)..(61): /note="Nucleotide may be methylated to form 5-methylcytosine"
tctctattaagggctttattttatatataagaaaaccgatgcttagagagatgaagtcaccggcccaaggtcacacagcaggttcaaaggattaggaattgaattccggccaatgtgggttc

SEQ ID NO: 28137 - DNA, 122 bp, Homo sapiens
  misc_feature (61)..(62): /note="This region represents a CpG dinucleotide"
  misc_feature (61)..(61): /note="Nucleotide may be methylated to form 5-methylcytosine"
tacccactctcaggcatttctttatagcaacacaagaccagcctaacacacaaggtggcacgaagagtaagcaactgagtaaggatttgacctcagtctgcctgactctaaattctagattc

SEQ ID NO: 28138 - DNA, 122 bp, Homo sapiens
  misc_feature (61)..(62): /note="This region represents a CpG dinucleotide"
  misc_feature (61)..(61): /note="Nucleotide may be methylated to form 5-methylcytosine"
tcacaagtgctttaagtttgcctgtacctacagtcattgtttagatcctgctgcgttgaccgttcttactgagcgtatttactttttttccattactcaaggaaagcagacaaggattcaac

SEQ ID NO: 28139 - DNA, 122 bp, Homo sapiens
  misc_feature (61)..(62): /note="This region represents a CpG dinucleotide"
  misc_feature (61)..(61): /note="Nucleotide may be methylated to form 5-methylcytosine"
gtaaagtagaggggccaggtagagatcctgctgacctggcaagcacatgttccctccagtcggggcgttgaccgctcagcagcaggtctagtgtcacccagtctttctagttctcaggagaa

SEQ ID NO: 28140 - DNA, 122 bp, Homo sapiens
  misc_feature (61)..(62): /note="This region represents a CpG dinucleotide"
  misc_feature (61)..(61): /note="Nucleotide may be methylated to form 5-methylcytosine"
gtagctcaaccaacgagctatcttggaatgcagtgaagtctgctgtacctcacttcacctcgtttcttcctctgctgtggcctctagtggcctctgttctgttacttttcggtccctgtatt

SEQ ID NO: 28141 - DNA, 122 bp, Homo sapiens
  misc_feature (61)..(62): /note="This region represents a CpG dinucleotide"
  misc_feature (61)..(61): /note="Nucleotide may be methylated to form 5-methylcytosine"
gtttggtgtctttcttgttaaggaactagtctccagtgatctcaggcttcatcttcataacgacaagaaatccagaccatgggtcagacaacctagtgattcatgtgtcttaatgactgacc

SEQ ID NO: 28142 - DNA, 122 bp, Homo sapiens
  misc_feature (61)..(62): /note="This region represents a CpG dinucleotide"
  misc_feature (61)..(61): /note="Nucleotide may be methylated to form 5-methylcytosine"
cgctctgccgccggctctgtgcgcggctgggccgggcagctccaagggttccgagagctgcgcgtcttggggctggggcggaccagcccagcccagcgggcactgatggggtcctgggagcc

SEQ ID NO: 28143 - DNA, 122 bp, Homo sapiens
  misc_feature (61)..(62): /note="This region represents a CpG dinucleotide"
  misc_feature (61)..(61): /note="Nucleotide may be methylated to form 5-methylcytosine"
ccctgaaaaacctttctccctcctccttgcccacccttatccctagtactcactggatgtcggatatcagtgataagcaggacgatgtcagacatctctaacacccgccacagctgcctcca

SEQ ID NO: 28144 - DNA, 122 bp, Homo sapiens
  misc_feature (61)..(62): /note="This region represents a CpG dinucleotide"
  misc_feature (61)..(61): /note="Nucleotide may be methylated to form 5-methylcytosine"
ctaaactggaaatccctttgaattgttttccttttcatgggacatagtgttcctttcttccgtttgatatatttcgttctctgtcgtgcttgagctctctctcgacttatgacttcaccgtc

SEQ ID NO: 28145 - DNA, 122 bp, Homo sapiens
  misc_feature (61)..(62): /note="This region represents a CpG dinucleotide"
  misc_feature (61)..(61): /note="Nucleotide may be methylated to form 5-methylcytosine"
gagcagttcatctccatgtctgtcataaaacgtgttttagtttacagagaatgacatatacgcacacacaaagcaagttgtgtactgaaaaaagcaaacaaatgaacttaatcccacataaa

SEQ ID NO: 28146 - DNA, 122 bp, Homo sapiens
  misc_feature (61)..(62): /note="This region represents a CpG dinucleotide"
  misc_feature (61)..(61): /note="Nucleotide may be methylated to form 5-methylcytosine"
ctaaaataaaaaaaatgaaaaacaaatgagcctaactatatatcaaatgtataacataaccgcatgaagacaattatttcaagtaagtgtagaatactttgcctatacattctcagcaagat

SEQ ID NO: 28147 - DNA, 122 bp, Homo sapiens
  misc_feature (61)..(62): /note="This region represents a CpG dinucleotide"
  misc_feature (61)..(61): /note="Nucleotide may be methylated to form 5-methylcytosine"
agcctgctaccgagcctttcctataatgggcatagttactctatacatatactatacatacgggattacatactattgctacttttactgtgcacagaacaaggtcggtccttgagctttta

SEQ ID NO: 28148 - DNA, 122 bp, Homo sapiens
  misc_feature (61)..(62): /note="This region represents a CpG dinucleotide"
  misc_feature (61)..(61): /note="Nucleotide may be methylated to form 5-methylcytosine"
taatacagacctctctgaggctcagaccatacacataatcactatgcactcttttcctctcgctccctctagaggataatccaggtaggaatttaggtagtcttgggacaaaagaggctgct

SEQ ID NO: 28149 - DNA, 122 bp, Homo sapiens
  misc_feature (61)..(62): /note="This region represents a CpG dinucleotide"
  misc_feature (61)..(61): /note="Nucleotide may be methylated to form 5-methylcytosine"
caagagatcaaactgcagatcccacgctggttcttctgggaggtcggagaagacatggatcgcagtgagagagaggcccttggagtcagcaaacacaacgcgcttcttggcttggttgtgtg

SEQ ID NO: 28150 - DNA, 122 bp, Homo sapiens
  misc_feature (61)..(62): /note="This region represents a CpG dinucleotide"
  misc_feature (61)..(61): /note="Nucleotide may be methylated to form 5-methylcytosine"
gaggaaggatgaggggactgcagggcagagagggagaaagaaaagcatccaaagttaaaacggtaggaagaaataagaagtatattacatgggtttgaaggaatttcataactgaacaagtc

SEQ ID NO: 28151 - DNA, 122 bp, Homo sapiens
  misc_feature (61)..(62): /note="This region represents a CpG dinucleotide"
  misc_feature (61)..(61): /note="Nucleotide may be methylated to form 5-methylcytosine"
gagaactagaaggcactcaagggcaaggtgaggacctacaagccaatggaaaaccctcttcgttacagggcaggggattagccaatgtaagtttcatcactagaaacatcctagtggacctt

SEQ ID NO: 28152 - DNA, 122 bp, Homo sapiens
  misc_feature (61)..(62): /note="This region represents a CpG dinucleotide"
  misc_feature (61)..(61): /note="Nucleotide may be methylated to form 5-methylcytosine"
gtggaaggagcttgctggagctgctggtcagtgcagcagcatggggaactgggcccacagcgtggtgcttcatgaaccttgcatgcttcctggccactctcgcagaatagtcagactctgtg

SEQ ID NO: 28153 - DNA, 122 bp, Homo sapiens
  misc_feature (61)..(62): /note="This region represents a CpG dinucleotide"
  misc_feature (61)..(61): /note="Nucleotide may be methylated to form 5-methylcytosine"
agaaccaggggcggcggctgtgatgaggtcagagatcatcataagatttgtgaaccacatcgtcaaggccccgtggacgacagcaaaaataacaggtcacagggaatgacgtgacctgattc

SEQ ID NO: 28154 - DNA, 122 bp, Homo sapiens
  misc_feature (61)..(62): /note="This region represents a CpG dinucleotide"
  misc_feature (61)..(61): /note="Nucleotide may be methylated to form 5-methylcytosine"
gcccagtttgcaaagagtctagccatgcttgggagctctgaggacaacacggcattgtcacgggcactctcccagctggctgaggtggaagaaaaaattgagcagctccaccaggaacaggc

SEQ ID NO: 28155 - DNA, 122 bp, Homo sapiens
  misc_feature (61)..(62): /note="This region represents a CpG dinucleotide"
  misc_feature (61)..(61): /note="Nucleotide may be methylated to form 5-methylcytosine"
gtttattaacattatctggtcgtgtgtgctgtggacgatcacgtgtgctggacttgtgcccggctggcagcgctgtggacttgttcacgctggcgtcacacaggggcgggagccatgcgttg

SEQ ID NO: 28156 - DNA, 122 bp, Homo sapiens
  misc_feature (61)..(62): /note="This region represents a CpG dinucleotide"
  misc_feature (61)..(61): /note="Nucleotide may be methylated to form 5-methylcytosine"
ggcctgatatggtttggctgtgtgtccctactcaaatgccatcttgaattgtaatcccctcgtattgagggagggaagtgactggattatgagggtggtttcccccatgctggtcttgtgat

SEQ ID NO: 28157 - DNA, 122 bp, Homo sapiens
  misc_feature (61)..(62): /note="This region represents a CpG dinucleotide"
  misc_feature (61)..(61): /note="Nucleotide may be methylated to form 5-methylcytosine"
ttccctagctataccccctacccaaaccaggcgacctccccactttcttctccatcattgcggtttgtacttatgtacacacccatctggcatggttgtgtggttgatgaaactgggctcct

SEQ ID NO: 28158 - DNA, 122 bp, Homo sapiens
  misc_feature (61)..(62): /note="This region represents a CpG dinucleotide"
  misc_feature (61)..(61): /note="Nucleotide may be methylated to form 5-methylcytosine"
gcagtgcggcgggcgggtaacttcctgcaacagcggcagggctgggcatccgagctggcacggttcaagtgcaccacagcattctgaacatttgggaacacaggaagggctgcgttttttaa

SEQ ID NO: 28159 - DNA, 122 bp, Homo sapiens
  misc_feature (61)..(62): /note="This region represents a CpG dinucleotide"
  misc_feature (61)..(61): /note="Nucleotide may be methylated to form 5-methylcytosine"
tgtcgaagagccatctccagttccacccagttcatcttcatcagaacatctatgagtcgtcgtctctgcagtccatttgtttgcccgcttgggaacagcaagctccttaagggcaggactac

SEQ ID NO: 28160 - DNA, 122 bp, Homo sapiens
  misc_feature (61)..(62): /note="This region represents a CpG dinucleotide"
  misc_feature (61)..(61): /note="Nucleotide may be methylated to form 5-methylcytosine"
gtctatattcagaggaggaactgctgggtcatagatgatatttcataggtattgccaaaccgttctctggagaagtggtatgggtttaccctgggattcttctatggagggaatagttgagc

SEQ ID NO: 28161 - DNA, 122 bp, Homo sapiens
  misc_feature (61)..(62): /note="This region represents a CpG dinucleotide"
  misc_feature (61)..(61): /note="Nucleotide may be methylated to form 5-methylcytosine"
aagctgaagatggtgggtaagtggtggatagcagctatagaagtcagaagggagagaaagcgagacaaacagctgctcttgtcagcatggggataagtgtaaagagattaatagttatttga

SEQ ID NO: 28162 - DNA, 122 bp, Homo sapiens
  misc_feature (61)..(62): /note="This region represents a CpG dinucleotide"
  misc_feature (61)..(61): /note="Nucleotide may be methylated to form 5-methylcytosine"
ttaccacaaggatacttctttcatatttttttataggcactgtaccaaggataaaaaatacgatatgtttgacctcaggaagtttttgttcatataacaactagtaactgagcgtacagaga

SEQ ID NO: 28163 - DNA, 122 bp, Homo sapiens
  misc_feature (61)..(62): /note="This region represents a CpG dinucleotide"
  misc_feature (61)..(61): /note="Nucleotide may be methylated to form 5-methylcytosine"
gtgaatttacatattaataagaaacacatttaaaccttgccctgccacagaattattttgcgggggggggggggggggggaagatgtactttttgaatatgtgtacatcaaaaccaaaaagt

SEQ ID NO: 28164 - DNA, 122 bp, Homo sapiens
  misc_feature (61)..(62): /note="This region represents a CpG dinucleotide"
  misc_feature (61)..(61): /note="Nucleotide may be methylated to form 5-methylcytosine"
aatccagtctaattcagtagtatatagcttattcccagtgatgtctcacattcgcaagcccgttacacgttggttttacctgtcaccaaaacctttgtatcactcttataaaaaaccacatc

SEQ ID NO: 28165 - DNA, 122 bp, Homo sapiens
  misc_feature (61)..(62): /note="This region represents a CpG dinucleotide"
  misc_feature (61)..(61): /note="Nucleotide may be methylated to form 5-methylcytosine"
actcctccaaagaatatttacagtttagaatggcacaaacctttagccaagagagaaacccgctaatggtaaaatatcaggtaatatgttaggcacactgcaaattaaatggaattcaagcg

SEQ ID NO: 28166 - DNA, 122 bp, Homo sapiens
  misc_feature (61)..(62): /note="This region represents a CpG dinucleotide"
  misc_feature (61)..(61): /note="Nucleotide may be methylated to form 5-methylcytosine"
ccctctcctctcagtttcaccttgaacgagagaaagagaaagggaggcagatgacagctccgtccagcacagaacggggtgtcctgtgaagtggtgagctccctgttcctgggagtatgtaa

SEQ ID NO: 28167 - DNA, 122 bp, Homo sapiens
  misc_feature (61)..(62): /note="This region represents a CpG dinucleotide"
  misc_feature (61)..(61): /note="Nucleotide may be methylated to form 5-methylcytosine"
ccctcaattgtctggagtggcagtggcggccagtgagtggaggcctcagccacttctatccgtcctgtgaccactccatagaacagagctgagcttctaaacatccacttcaatgtggatgg

SEQ ID NO: 28168 - DNA, 122 bp, Homo sapiens
  misc_feature (61)..(62): /note="This region represents a CpG dinucleotide"
  misc_feature (61)..(61): /note="Nucleotide may be methylated to form 5-methylcytosine"
agtatgagacatccattgtacccaaagctaggtggccttaagaaggtcagtgtcgctcagcgacagggctcggccccccctcgtgcaaacccaccccgaggtgtgaggccaggagtgtgcgg

SEQ ID NO: 28169 - DNA, 122 bp, Homo sapiens
  misc_feature (61)..(62): /note="This region represents a CpG dinucleotide"
  misc_feature (61)..(61): /note="Nucleotide may be methylated to form 5-methylcytosine"
acttttggcagcaggtcacagaaattcctgactcaactggcttacatagtcagggcaagccgttatttcacataacaagaagtcccagtgcagagtcttgcaggagtgagaaagctgtaagc

SEQ ID NO: 28170 - DNA, 122 bp, Homo sapiens
  misc_feature (61)..(62): /note="This region represents a CpG dinucleotide"
  misc_feature (61)..(61): /note="Nucleotide may be methylated to form 5-methylcytosine"
agagagaaagaggcagagttctagagctgaggatacaacagggggcaccaatgcctctgccgtcagggagctttcattttaactacaatacatttatcaaaaataaattaattattacataa

SEQ ID NO: 28171 - DNA, 122 bp, Homo sapiens
  misc_feature (61)..(62): /note="This region represents a CpG dinucleotide"
  misc_feature (61)..(61): /note="Nucleotide may be methylated to form 5-methylcytosine"
ttttttctcctgcttctcagaaggcctctgctgagcacgatctctgtgggggtaggagctcggcatgtgtgtattgacagacaggctcatgccctttctcgtggctattttcagctctctgg

SEQ ID NO: 28172 - DNA, 122 bp, Homo sapiens
  misc_feature (61)..(62): /note="This region represents a CpG dinucleotide"
  misc_feature (61)..(61): /note="Nucleotide may be methylated to form 5-methylcytosine"
tctgtcacacgtcattgtttctgccttctggattcaggaccacaaagctgcaggctgggacgcagccctggggctgaagattgtgctgtgtcacatgggtctagctgctgctgtggtatgtg

SEQ ID NO: 28173 - DNA, 122 bp, Homo sapiens
  misc_feature (61)..(62): /note="This region represents a CpG dinucleotide"
  misc_feature (61)..(61): /note="Nucleotide may be methylated to form 5-methylcytosine"
atggcaataactgcctggtgtacacactggtctatgtactcttgtcttagtgcattgtcccggagaatatacaattctctttctagtgatgagtaactgtttactcctactctttgttaaga

SEQ ID NO: 28174 - DNA, 122 bp, Homo sapiens
  misc_feature (61)..(62): /note="This region represents a CpG dinucleotide"
  misc_feature (61)..(61): /note="Nucleotide may be methylated to form 5-methylcytosine"
gatctgtgactccccggtgcccctgccagaattgatctcgaaatggtggattacaacagccgtggtacatccacaagctgcctgggagtttcttgtcttctcatcacagtcaaaatggctta

SEQ ID NO: 28175 - DNA, 122 bp, Homo sapiens
  misc_feature (61)..(62): /note="This region represents a CpG dinucleotide"
  misc_feature (61)..(61): /note="Nucleotide may be methylated to form 5-methylcytosine"
aacccggggaggtctggcctgcttttcctccctgaactggcccaatgactggctccctcacgctgaccactcctctgggctggcctcctgcactcgcgctaacagcccaggctccagggaca

SEQ ID NO: 28176 - DNA, 122 bp, Homo sapiens
  misc_feature (61)..(62): /note="This region represents a CpG dinucleotide"
  misc_feature (61)..(61): /note="Nucleotide may be methylated to form 5-methylcytosine"
gacactgtctcatgtgagtattgtaaagattaaatgagctaatgcatgtaaagctcttagcgtagtgcttggcatgcagtaagcactcagtacatgttagctggtacagctgtcttgtgaat

SEQ ID NO: 28177 - DNA, 122 bp, Homo sapiens
  misc_feature (61)..(62): /note="This region represents a CpG dinucleotide"
  misc_feature (61)..(61): /note="Nucleotide may be methylated to form 5-methylcytosine"
ttacatactcaagtcaatgtgtctgcacaataaagatataatgaagctgcaagaaaggaacgggatgttatgaaagccctgaggaaaagatcttttaagaaataaggaataacctgtggcat

SEQ ID NO: 28178 - DNA, 122 bp, Homo sapiens
  misc_feature (61)..(62): /note="This region represents a CpG dinucleotide"
  misc_feature (61)..(61): /note="Nucleotide may be methylated to form 5-methylcytosine"
gattactgccctgtgagagagaaccaagggcgcttgtttgccccttccacaatgtgagaacgcagcaggaagatatcctgtgaagcagaaagtaagccctcaccagataccacatccgttgg

SEQ ID NO: 28179 - DNA, 122 bp, Homo sapiens
  misc_feature (61)..(62): /note="This region represents a CpG dinucleotide"
  misc_feature (61)..(61): /note="Nucleotide may be methylated to form 5-methylcytosine"
tcgggtcccggagctgcctttggtgcgcacgggcgcgcacgggctggggtgtagacggggcgcggaaggctgtgcttcgcggaggcctgcgtggtggtgcctgcccggagcgtggctctgag

SEQ ID NO: 28180 - DNA, 122 bp, Homo sapiens
  misc_feature (61)..(62): /note="This region represents a CpG dinucleotide"
  misc_feature (61)..(61): /note="Nucleotide may be methylated to form 5-methylcytosine"
tactggggattaggatttcagcatatgaatttagggcaagggaggaggacataattcagacgtagaaggcagattagttgactgtactggtgtaagtttctacacgaatgagccttgaatga

SEQ ID NO: 28181 - DNA, 122 bp, Homo sapiens
  misc_feature (61)..(62): /note="This region represents a CpG dinucleotide"
  misc_feature (61)..(61): /note="Nucleotide may be methylated to form 5-methylcytosine"
gagagagtagggggaccgctgagctctgtccacagactagagcaggaaaggggggaaaggcggcgatagaggttagcaggaatgtttaattatcaggagcaggaacagaactgagggcatgc

SEQ ID NO: 28182 - DNA, 122 bp, Homo sapiens
  misc_feature (61)..(62): /note="This region represents a CpG dinucleotide"
  misc_feature (61)..(61): /note="Nucleotide may be methylated to form 5-methylcytosine"
cttgcgaaggtcaccaattttgcatgttttgtttcctgatgcatttccagttcttgaaaacggtgcctgacacatagcagacactggatatactatggctcatttgaatgaataaaaggagt

SEQ ID NO: 28183 - DNA, 122 bp, Homo sapiens
  misc_feature (61)..(62): /note="This region represents a CpG dinucleotide"
  misc_feature (61)..(61): /note="Nucleotide may be methylated to form 5-methylcytosine"
tagctaattatgtagcagaacaaggccttacatatctgactctgcagtgtagactgaccccgtgctagtgatgtggtctatgcccatttgttcatacaagctagtggctgtcacagatgcat

SEQ ID NO: 28184 - DNA, 122 bp, Homo sapiens
  misc_feature (61)..(62): /note="This region represents a CpG dinucleotide"
  misc_feature (61)..(61): /note="Nucleotide may be methylated to form 5-methylcytosine"
acatctcatcttcctgtttacctgcattatgagttggacaaataaattgtagctcctctccgtcttgccatgtttcctgtttagaactttcaggcatcccgtggcatttacagaaggctctg

SEQ ID NO: 28185 - DNA, 122 bp, Homo sapiens
  misc_feature (61)..(62): /note="This region represents a CpG dinucleotide"
  misc_feature (61)..(61): /note="Nucleotide may be methylated to form 5-methylcytosine"
tcctgtcaaattgaaacctcctgcatcctgagtgcctcatgtctcacgtatttagggtaccgtgaatatttagtgcctccttggtctttctgtcccttttgatctctgtacacacgaatatg

SEQ ID NO: 28186 - DNA, 122 bp, Homo sapiens
  misc_feature (61)..(62): /note="This region represents a CpG dinucleotide"
  misc_feature (61)..(61): /note="Nucleotide may be methylated to form 5-methylcytosine"
agcctgcctcctttggagagcccttgagcatcactgttgtgaccggggtgcacacctgggcgactccttgatcattcgtgcattctggtcaagttgacccgataagccaaaagtacttttca

SEQ ID NO: 28187 - DNA, 122 bp, Homo sapiens
  misc_feature (61)..(62): /note="This region represents a CpG dinucleotide"
  misc_feature (61)..(61): /note="Nucleotide may be methylated to form 5-methylcytosine"
agccaggagtggacagttgcagactgtgtggacatggatcatcaagtgcatactgtttgtcgtatgatatctgattgaaacctaggttctgacctagctcctggatcttgtctaatggcaga

SEQ ID NO: 28188 - DNA, 122 bp, Homo sapiens
  misc_feature (61)..(62): /note="This region represents a CpG dinucleotide"
  misc_feature (61)..(61): /note="Nucleotide may be methylated to form 5-methylcytosine"
ttggggtttttattaaaattcgctatcacgatccctctaggtaacccctacacagccacacgtgagagaatggcttcacaatacatacaaattgtggagatctggctattaaaatgccttga

SEQ ID NO: 28189 - DNA, 122 bp, Homo sapiens
  misc_feature (61)..(62): /note="This region represents a CpG dinucleotide"
  misc_feature (61)..(61): /note="Nucleotide may be methylated to form 5-methylcytosine"
aagcagagaaacactcagggagatggaacagctacaagaagctgtgaccaagcttctccccgctgatttgaggcactgtttgccttcctctactcttagtttacagactctactgatcccag

SEQ ID NO: 28190 - DNA, 122 bp, Homo sapiens
  misc_feature (61)..(62): /note="This region represents a CpG dinucleotide"
  misc_feature (61)..(61): /note="Nucleotide may be methylated to form 5-methylcytosine"
ggatatatgtatgaatagagaatatggagagttataaaaaaagggaggtaagaaagctcacggaaaagagtgtaaattataaagatcacacgggaagaggcttgccttttgagatcagaaac

SEQ ID NO: 28191 - DNA, 122 bp, Homo sapiens
  misc_feature (61)..(62): /note="This region represents a CpG dinucleotide"
  misc_feature (61)..(61): /note="Nucleotide may be methylated to form 5-methylcytosine"
tgctgccaaaggcgtgaacttctgtgtctccaccccagtgcaccctcctctcaatgcatacgcccattggagttttgtcagggagtccttcccacatgactatctcagtatgaaggaggagt

SEQ ID NO: 28192 - DNA, 122 bp, Homo sapiens
  misc_feature (61)..(62): /note="This region represents a CpG dinucleotide"
  misc_feature (61)..(61): /note="Nucleotide may be methylated to form 5-methylcytosine"
taaaaacttgacttggttgttatatagaccaggtttccagcccatctgtgccacagagtgcgttgggcaaggacttcacctttccaggatcacttctcccatctgtgaatcttggtttttgg

SEQ ID NO: 28193 - DNA, 122 bp, Homo sapiens
  misc_feature (61)..(62): /note="This region represents a CpG dinucleotide"
  misc_feature (61)..(61): /note="Nucleotide may be methylated to form 5-methylcytosine"
gtgacattggttctctcctctgtggctgaattcttgagaacattgccaatattagcagaccgtattgtatttctcatatcttatttttttccttttcatatctgtcattatcatctgatgcc

SEQ ID NO: 28194 - DNA, 122 bp, Homo sapiens
  misc_feature (61)..(62): /note="This region represents a CpG dinucleotide"
  misc_feature (61)..(61): /note="Nucleotide may be methylated to form 5-methylcytosine"
aggtacttctcattccatgtcactgtcattcactgccctctcattctctccctctctgcacgcgcagaaccacagagcacagactcgagcaagctaaatcgctatttgcagagcctgtggct

SEQ ID NO: 28195 - DNA, 122 bp, Homo sapiens
  misc_feature (61)..(62): /note="This region represents a CpG dinucleotide"
  misc_feature (61)..(61): /note="Nucleotide may be methylated to form 5-methylcytosine"
agcttgacactggggaatccagccagtccagcacactcttccatcctgtcctgtccaatgcgggggcactgcagaactctctagaaatgtcatgattgagcttcagagctaaaatgccttca

SEQ ID NO: 28196 - DNA, 122 bp, Homo sapiens
  misc_feature (61)..(62): /note="This region represents a CpG dinucleotide"
  misc_feature (61)..(61): /note="Nucleotide may be methylated to form 5-methylcytosine"
agtagtttggcattttaataaagggtctctaagtaaattaaaatagaacactcggttggccgatctctgaatctctctacacctcggggagacctcactacaaagtaagggagagtgtgtag

SEQ ID NO: 28197 - DNA, 122 bp, Homo sapiens
  misc_feature (61)..(62): /note="This region represents a CpG dinucleotide"
  misc_feature (61)..(61): /note="Nucleotide may be methylated to form 5-methylcytosine"
aaatgtttttctatataaaagtcactttacaaatgttatttttctggctatagaacatcccgttgtgcacatgtaccatggtattcttagatatatcattgtttccagtgtctctctattat

SEQ ID NO: 28198 - DNA, 122 bp, Homo sapiens
  misc_feature (61)..(62): /note="This region represents a CpG dinucleotide"
  misc_feature (61)..(61): /note="Nucleotide may be methylated to form 5-methylcytosine"
ttgctggtatattcgaaatatgttcaccagatctacctatagctccacctgaaaaaattccgcaccgcttcccaatttatgaagggattgcacaataatttaacacaaattctgtcaagcat

SEQ ID NO: 28199 - DNA, 122 bp, Homo sapiens
  misc_feature (61)..(62): /note="This region represents a CpG dinucleotide"
  misc_feature (61)..(61): /note="Nucleotide may be methylated to form 5-methylcytosine"
tctttgagattacagcaagtcttaagacatttacggtgctagcctctcactagcttgagacgactgctgtcctgcccagatggcactttcagttagtgagcacttactagtggcagctttat

SEQ ID NO: 28200 - DNA, 122 bp, Homo sapiens
  misc_feature (61)..(62): /note="This region represents a CpG dinucleotide"
  misc_feature (61)..(61): /note="Nucleotide may be methylated to form 5-methylcytosine"
tctcaataaagctgttacaacaaagaggaagatcaagtgtgtcaaatgccgctgacagggcgaataatgaaatctgagaactgaccactgaatttggcaatgtgctgtttcattttgtagta

SEQ ID NO: 28201 - DNA, 122 bp, Homo sapiens
  misc_feature (61)..(62): /note="This region represents a CpG dinucleotide"
  misc_feature (61)..(61): /note="Nucleotide may be methylated to form 5-methylcytosine"
ggggcctgccctgactcatcctcactggttagctctaacctgtccttccatctggccacacgcacaccccaaggcagaaatggggctcataccattggcattagaacttagcagtattatta

SEQ ID NO: 28202 - DNA, 122 bp, Homo sapiens
  misc_feature (61)..(62): /note="This region represents a CpG dinucleotide"
  misc_feature (61)..(61): /note="Nucleotide may be methylated to form 5-methylcytosine"
tgactttgtgatctgcctgcctcggcctcccaaagtgctgggattacagtcgtgagccaccgcacccagccgcacctactcttttgtaaagcacctgtgacaatgaaggacagatttatcac

SEQ ID NO: 28203 - DNA, 122 bp, Homo sapiens
  misc_feature (61)..(62): /note="This region represents a CpG dinucleotide"
  misc_feature (61)..(61): /note="Nucleotide may be methylated to form 5-methylcytosine"
ttggacacgattctatttgtcacagtctgatttaagtactctgtgctcctggaacatattcgtttcttgcttcagagaagataagcttcaaactcctcaaaatatgcttggctacctacagt

SEQ ID NO: 28204 - DNA, 122 bp, Homo sapiens
  misc_feature (61)..(62): /note="This region represents a CpG dinucleotide"
  misc_feature (61)..(61): /note="Nucleotide may be methylated to form 5-methylcytosine"
gttatttccacagtagagcagatttgcttaagtaaccccctgacaaaaatagcttagttccgcctccccgcagcatgcctgcccctccctgctgtgtgcatttcccccagtccttcagtcgt

SEQ ID NO: 28205 - DNA, 122 bp, Homo sapiens
  misc_feature (61)..(62): /note="This region represents a CpG dinucleotide"
  misc_feature (61)..(61): /note="Nucleotide may be methylated to form 5-methylcytosine"
agcttataaatcgtcttcatacagtggggacgtttatgtttgtgagtatatgtgcatatacgcacacatttgtttgttgggagagtgagaattatcagaataccagaatattctggacattc

SEQ ID NO: 28206 - DNA, 122 bp, Homo sapiens
  misc_feature (61)..(62): /note="This region represents a CpG dinucleotide"
  misc_feature (61)..(61): /note="Nucleotide may be methylated to form 5-methylcytosine"
atgggcatggagctgtataaatgccggtatccttacaccaaatgatctcacacagctctgcgtttgtagttgaacttacttcacctactgctgtcggcaggggacctgagcctgccagtttt

SEQ ID NO: 28207 - DNA, 122 bp, Homo sapiens
  misc_feature (61)..(62): /note="This region represents a CpG dinucleotide"
  misc_feature (61)..(61): /note="Nucleotide may be methylated to form 5-methylcytosine"
tctgcaaaaaggaaaaagaaaccacaaattggggaaaaaaaaagaagaaaaacctgtttccgtgtgcaaaagcacacatatgtatgtctgtgttataaaatgactgtgcttgttcgtaacag

SEQ ID NO: 28208 - DNA, 122 bp, Homo sapiens
  misc_feature (61)..(62): /note="This region represents a CpG dinucleotide"
  misc_feature (61)..(61): /note="Nucleotide may be methylated to form 5-methylcytosine"
ttagcaaagtgctttataatccttcattagctattttactctccctttattagtaccacccgttccacaaattaggtaactaaggcttgaagagacaatgcaatgcatattgggcttgtgac

SEQ ID NO: 28209 - DNA, 122 bp, Homo sapiens
  misc_feature (61)..(62): /note="This region represents a CpG dinucleotide"
  misc_feature (61)..(61): /note="Nucleotide may be methylated to form 5-methylcytosine"
ttttgactcacaactggctctgccccacctctgtaccttgaacacagacataatggctaccggcatgacagctatcttgtgaccatgatgggacaagcaaaagcacactaaggatgatggaa

SEQ ID NO: 28210 - DNA, 122 bp, Homo sapiens
  misc_feature (61)..(62): /note="This region represents a CpG dinucleotide"
  misc_feature (61)..(61): /note="Nucleotide may be methylated to form 5-methylcytosine"
tatatgttaaggctattagacaaaagtaattgtttgtgctttgctctgttttgtttttgccgtctagtcctagactgaatttcttaagattatcttagggattggactgggagggagtagtt

SEQ ID NO: 28211 - DNA, 122 bp, Homo sapiens
  misc_feature (61)..(62): /note="This region represents a CpG dinucleotide"
  misc_feature (61)..(61): /note="Nucleotide may be methylated to form 5-methylcytosine"
ctcctccaagcatacaccctagatctgcctcacttccagagcctagactttggcgttaaacgaaatgtgtgctttgcttgtttggcgctaagcaccccagagtcccaatcccttcacgtgtg

SEQ ID NO: 28212 - DNA, 122 bp, Homo sapiens
  misc_feature (61)..(62): /note="This region represents a CpG dinucleotide"
  misc_feature (61)..(61): /note="Nucleotide may be methylated to form 5-methylcytosine"
ttgcctttctttctatctgggctgtcagctgattggatggtgcccacccactttgggtgacggaggatcttccttattgagtcgactgattcaaatgtcaaatctcttctggaaacactttc

SEQ ID NO: 28213 - DNA, 122 bp, Homo sapiens
  misc_feature (61)..(62): /note="This region represents a CpG dinucleotide"
  misc_feature (61)..(61): /note="Nucleotide may be methylated to form 5-methylcytosine"
taaacctaaagggactgcattgtatcaaattagcaagcctaagtttcctaccattagcaacgcctaaatggagtccagttataatgctataatgagccctcgatctttgtgcacgggtaaac

SEQ ID NO: 28214 - DNA, 122 bp, Homo sapiens
  misc_feature (61)..(62): /note="This region represents a CpG dinucleotide"
  misc_feature (61)..(61): /note="Nucleotide may be methylated to form 5-methylcytosine"
tcccttttcctccttcacttttcctaaaagcagttcctggatctcaaaactgatctctctcggtctgttttccttcctgtctgtccctttccctctttttcctcttctccccctttctccct

SEQ ID NO: 28215 - DNA, 122 bp, Homo sapiens
  misc_feature (61)..(62): /note="This region represents a CpG dinucleotide"
  misc_feature (61)..(61): /note="Nucleotide may be methylated to form 5-methylcytosine"
tgtgctataaagcctgaataaagccttcagactttacccagacaatggtcaaaattgctacgaagctgtttccacctgccttgactccagggaggagcaggaagaggcctccataacttgta

SEQ ID NO: 28216 - DNA, 122 bp, Homo sapiens
  misc_feature (61)..(62): /note="This region represents a CpG dinucleotide"
  misc_feature (61)..(61): /note="Nucleotide may be methylated to form 5-methylcytosine"
atatctgctttggaagcaaatgatggaaagttttgtccaggttgccttccctcacttttgcgcgtgggtgtgagtttgtgtacccgattctactgtgaggagttcaggttgctttacctgct

SEQ ID NO: 28217 - DNA, 122 bp, Homo sapiens
  misc_feature (61)..(62): /note="This region represents a CpG dinucleotide"
  misc_feature (61)..(61): /note="Nucleotide may be methylated to form 5-methylcytosine"
ctctgccccagtgtttattcctagtagcccatttagttctccccacaagctgatgaggtgcgtatgctgtcatcctcctttttcagacaaagcacagagcggtgaggtctcttgcctaaggt

SEQ ID NO: 28218 - DNA, 122 bp, Homo sapiens
  misc_feature (61)..(62): /note="This region represents a CpG dinucleotide"
  misc_feature (61)..(61): /note="Nucleotide may be methylated to form 5-methylcytosine"
ggacaaattgaccatgtgtagactccaacagctgtgggtgagaaccgggcaagatgacgacgctgccatgtgcccaatacacctggcccagaggcattcagcagaggacggaggtgtccaag

SEQ ID NO: 28219 - DNA, 122 bp, Homo sapiens
  misc_feature (61)..(62): /note="This region represents a CpG dinucleotide"
  misc_feature (61)..(61): /note="Nucleotide may be methylated to form 5-methylcytosine"
gatgctgagcagctccatccagcagagccacaaccggctcctgaagctggaaggagacagcgtctggctccacaccctgctcatcaaccagagtgaccagcaacgtctgcaggcaaggtccc

SEQ ID NO: 28220 - DNA, 122 bp, Homo sapiens
  misc_feature (61)..(62): /note="This region represents a CpG dinucleotide"
  misc_feature (61)..(61): /note="Nucleotide may be methylated to form 5-methylcytosine"
gaacagcaggactagcatggtaaacagactgtaaacaaggagtgtaacctcttgcaaaggcgaggagaggagaccaggaagggaggtgtccagtgaggtgaggaaagcaggtcgagacactc

SEQ ID NO: 28221 - DNA, 122 bp, Homo sapiens
  misc_feature (61)..(62): /note="This region represents a CpG dinucleotide"
  misc_feature (61)..(61): /note="Nucleotide may be methylated to form 5-methylcytosine"
ttgaactaggagtgaccaatctaaactaaaaaggtcaagcaggggcaggaagttgagtttcgcaatgaaagcattaacaacctgtgctttgggttttgagctgaaaagaaactgttcccagg

SEQ ID NO: 28222 - DNA, 122 bp, Homo sapiens
  misc_feature (61)..(62): /note="This region represents a CpG dinucleotide"
  misc_feature (61)..(61): /note="Nucleotide may be methylated to form 5-methylcytosine"
ctcttcaccagatcccagaggctgaacacctcgaccttctctgcacagcaggtgagtctccgcattaggaacaccttaatattctccaatagtttctttattttgattgagatctctttgct

SEQ ID NO: 28223 - DNA, 122 bp, Homo sapiens
  misc_feature (61)..(62): /note="This region represents a CpG dinucleotide"
  misc_feature (61)..(61): /note="Nucleotide may be methylated to form 5-methylcytosine"
aaggctttatgcttcctatttcacaaagcagacatgtggttttcttttttgagctcattgcgtgaactaagcttaagctcttcttctacaaagataatggagatgatatttcctgtgctgtc

SEQ ID NO: 28224 - DNA, 122 bp, Homo sapiens
  misc_feature (61)..(62): /note="This region represents a CpG dinucleotide"
  misc_feature (61)..(61): /note="Nucleotide may be methylated to form 5-methylcytosine"
aaaaccacaagaaaggttcttgtccatctttcttctctctccttttgccacttaatgggccgtggggcttcccatggggccctgcatggtgtggcacccccctcctcttgggaactgtgagt

SEQ ID NO: 28225 - DNA, 122 bp, Homo sapiens
  misc_feature (61)..(62): /note="This region represents a CpG dinucleotide"
  misc_feature (61)..(61): /note="Nucleotide may be methylated to form 5-methylcytosine"
tggaaaagaattcaagtcaccaaatcttaagcatttatttagtgtttgtgctgtgtcaagcgtagttctgggggctaagtatacaaaagtaaataagacttagattctgccctaaggaactc

SEQ ID NO: 28226 - DNA, 122 bp, Homo sapiens
  misc_feature (61)..(62): /note="This region represents a CpG dinucleotide"
  misc_feature (61)..(61): /note="Nucleotide may be methylated to form 5-methylcytosine"
caaaaagctacagttagaattcagaactgtgttgttaccctgcctctgagttttcctctacgttcagctccccttttgtggatgatcgtgaagctgtttacatgttgtcctcttccgtgaac

SEQ ID NO: 28227 - DNA, 122 bp, Homo sapiens
  misc_feature (61)..(62): /note="This region represents a CpG dinucleotide"
  misc_feature (61)..(61): /note="Nucleotide may be methylated to form 5-methylcytosine"
gtagcagaaggagggagcaggagccgaccagacgtgcaagatgcatattgctgggaaggtcgggaaggatgcagagaggagccagggaagccacgctgctatttatcctctctccctctcgc

SEQ ID NO: 28228 - DNA, 122 bp, Homo sapiens
  misc_feature (61)..(62): /note="This region represents a CpG dinucleotide"
  misc_feature (61)..(61): /note="Nucleotide may be methylated to form 5-methylcytosine"
aggttagcatgtaattacagcactgtattctaaattgaatagaggtgtggacagagactgcgactaactcttacacactggatagaggctgcagctaactcttacacacccaggagtcacca

SEQ ID NO: 28229 - DNA, 122 bp, Homo sapiens
  misc_feature (61)..(62): /note="This region represents a CpG dinucleotide"
  misc_feature (61)..(61): /note="Nucleotide may be methylated to form 5-methylcytosine"
caaggatggtttccagatctttatttggtcctttaaatgtgccatattttcctgtttcttcgtatgccttgtgattatttgttagaaatttggcatttgggaaaaaaaaaaaacagccacct

SEQ ID NO: 28230 - DNA, 122 bp, Homo sapiens
  misc_feature (61)..(62): /note="This region represents a CpG dinucleotide"
  misc_feature (61)..(61): /note="Nucleotide may be methylated to form 5-methylcytosine"
aggcacactggaggggaggattgcagagccgcccatctgtttctctgcaattgtttatcccggggcccccttccagctgcataatttctcagagaagacactaaacaggcagtgagcgagtc

SEQ ID NO: 28231 - DNA, 122 bp, Homo sapiens
  misc_feature (61)..(62): /note="This region represents a CpG dinucleotide"
  misc_feature (61)..(61): /note="Nucleotide may be methylated to form 5-methylcytosine"
aaatgagttcagcaggactgcaaggagctacagcattccaaccctgtgtgtgacaggggccgaagccagagggtgccaggcccaggaggggaaccctgcaatgctcacctcggctgcagctg

SEQ ID NO: 28232 - DNA, 122 bp, Homo sapiens
  misc_feature (61)..(62): /note="This region represents a CpG dinucleotide"
  misc_feature (61)..(61): /note="Nucleotide may be methylated to form 5-methylcytosine"
gctatgactagcctgctagtcagccctccagctgaccacagacacaagagcaagccaagccgagattagctgagtccagcccaggtttacagaaccacctagctgacctatagatttgtgag

SEQ ID NO: 28233 - DNA, 122 bp, Homo sapiens
  misc_feature (61)..(62): /note="This region represents a CpG dinucleotide"
  misc_feature (61)..(61): /note="Nucleotide may be methylated to form 5-methylcytosine"
tactctagagaaatctaaatcaaaaatgcagatcattctttgaaaaatccccaaatcatacgtagagactcagacagatgtggtaaaaagaggaaggttattttatacttcgtatctccaac

SEQ ID NO: 28234 - DNA, 122 bp, Homo sapiens
  misc_feature (61)..(62): /note="This region represents a CpG dinucleotide"
  misc_feature (61)..(61): /note="Nucleotide may be methylated to form 5-methylcytosine"
tgaaagctgccagctttatccacagctggcctttccccttcagatgccaaatgttccaaacgacaggtacaactctgagagggccgttaaggttcatgccagaaacattcacctaggaagcc

SEQ ID NO: 28235 - DNA, 122 bp, Homo sapiens
  misc_feature (61)..(62): /note="This region represents a CpG dinucleotide"
  misc_feature (61)..(61): /note="Nucleotide may be methylated to form 5-methylcytosine"
cctaaggtgattcacttcattcagctttaacatcactaaaatgtgaattcatactattagcgtacttctagtacaagctataaaacccattacccatgtgtaaggcataattctgacagcct

SEQ ID NO: 28236 - DNA, 122 bp, Homo sapiens
  misc_feature (61)..(62): /note="This region represents a CpG dinucleotide"
  misc_feature (61)..(61): /note="Nucleotide may be methylated to form 5-methylcytosine"
aaataaattattttggaaactcaaaatgatttactagagataccagaagtaaattattttcgaaacagtgtgccatcactaatagaatacacaaagacagcaactccatgaaacaaaatcag

SEQ ID NO: 28237 - DNA, 122 bp, Homo sapiens
  misc_feature (61)..(62): /note="This region represents a CpG dinucleotide"
  misc_feature (61)..(61): /note="Nucleotide may be methylated to form 5-methylcytosine"
cccaactttccagctcatctccagcctgtgcttctccccgactcaactcattttcaaccacgtgctaggcctccacccttggatgtcgaagagccatctccagttccacccagttcatcttc

SEQ ID NO: 28238 - DNA, 122 bp, Homo sapiens
  misc_feature (61)..(62): /note="This region represents a CpG dinucleotide"
  misc_feature (61)..(61): /note="Nucleotide may be methylated to form 5-methylcytosine"
acccaagaggtggttcaggggcagcgcctgcaacccccaacagtgattaaaataggctcacggctgctttttaataccattgatgtaagtttttaaaatagggggaaaaaatccatgctgaa

SEQ ID NO: 28239 - DNA, 122 bp, Homo sapiens
  misc_feature (61)..(62): /note="This region represents a CpG dinucleotide"
  misc_feature (61)..(61): /note="Nucleotide may be methylated to form 5-methylcytosine"
aaagtaaaccttgatttcttctttataactttgactaaggctgacccaatgactacctcacggcaggattcagttattgcaaaggaaagtggtataattgcacaatgcctcacgcaaatccc

SEQ ID NO: 28240 - DNA, 122 bp, Homo sapiens
  misc_feature (61)..(62): /note="This region represents a CpG dinucleotide"
  misc_feature (61)..(61): /note="Nucleotide may be methylated to form 5-methylcytosine"
tggagattaatctcgtatgtagaagttcattagtaaatatattcatgtcatacagactttcggttccttattgcaaatttatgatttgggaactcccttaatgaaatttgggagcaagcaag

SEQ ID NO: 28241 - DNA, 122 bp, Homo sapiens
  misc_feature (61)..(62): /note="This region represents a CpG dinucleotide"
  misc_feature (61)..(61): /note="Nucleotide may be methylated to form 5-methylcytosine"
ctctgaaaaaaacaaaagaaggagatgaaatttacataacttaaaattagccattttgaacggtacagtgaagtggttttcggtgcattcaccgacttgtgcaaccatcactgctgtccagt

SEQ ID NO: 28242 - DNA, 122 bp, Homo sapiens
  misc_feature (61)..(62): /note="This region represents a CpG dinucleotide"
  misc_feature (61)..(61): /note="Nucleotide may be methylated to form 5-methylcytosine"
tacacaacaaccagagtgatagtgatcctgttaaagcttaagttagatcacatgacttctcggctcaatacaatccactagcttcccttctcacctggaataaaagccaatgtctttgcaat

SEQ ID NO: 28243 - DNA, 122 bp, Homo sapiens
  misc_feature (61)..(62): /note="This region represents a CpG dinucleotide"
  misc_feature (61)..(61): /note="Nucleotide may be methylated to form 5-methylcytosine"
ggaggcagatctaagaattgcatgaggttctatgtattccctctctgtctcctattccatcgtaaccttctcccccacataaagatgtgcttcaacttttctggataaaaagggacagattt

SEQ ID NO: 28244 - DNA, 122 bp, Homo sapiens
  misc_feature (61)..(62): /note="This region represents a CpG dinucleotide"
  misc_feature (61)..(61): /note="Nucleotide may be methylated to form 5-methylcytosine"
atggttattcccataataataatgtgtgtatcatgcataatgcactgcacctcttcaccacgctggtgcccactcttctgctccccctgccggattcctcagccccttctaccctgatggtt

SEQ ID NO: 28245 - DNA, 122 bp, Homo sapiens
  misc_feature (61)..(62): /note="This region represents a CpG dinucleotide"
  misc_feature (61)..(61): /note="Nucleotide may be methylated to form 5-methylcytosine"
gtgtttatacccagcaataaaaagggaaaactgaggatacatgccacaacctggatgaaccgtgaaaacatgctgaaagaaaccagacacaaacgatgacatatatgattccatttatatga

SEQ ID NO: 28246 - DNA, 122 bp, Homo sapiens
  misc_feature (61)..(62): /note="This region represents a CpG dinucleotide"
  misc_feature (61)..(61): /note="Nucleotide may be methylated to form 5-methylcytosine"
tacttgtgtgtcaggcactggactaaatgcttgacacgcgttatcatttaaacggtgatacggcctgttgactcaggtgctatgattgtccctgtgtttacagatgacctgttatatgatgt

SEQ ID NO: 28247 - DNA, 122 bp, Homo sapiens
  misc_feature (61)..(62): /note="This region represents a CpG dinucleotide"
  misc_feature (61)..(61): /note="Nucleotide may be methylated to form 5-methylcytosine"
caattcaactgaagatgactcatcttttcattaaaaggaagatccattcactgtttctagcgcttcacttagtggcaacattaagtctttagagaagtttgagttaggatgagtgcagctgg

SEQ ID NO: 28248 - DNA, 122 bp, Homo sapiens
  misc_feature (61)..(62): /note="This region represents a CpG dinucleotide"
  misc_feature (61)..(61): /note="Nucleotide may be methylated to form 5-methylcytosine"
tttataaaaaattgaggaagaaactgaggctcagaaagactgagtagtctttctagaccacgaagctagttaagttatggttccaggatttaaagcctgacaactgaccccaggatcaacat

SEQ ID NO: 28249 - DNA, 122 bp, Homo sapiens
  misc_feature (61)..(62): /note="This region represents a CpG dinucleotide"
  misc_feature (61)..(61): /note="Nucleotide may be methylated to form 5-methylcytosine"
gtctgcggtggtttggcagtagcttagcctcaaggataaaggagagccatgactactcaccgctagagcaagacacactctagccatagttctaattcaagacagtgtattgcagtagccgt

SEQ ID NO: 28250 - DNA, 122 bp, Homo sapiens
  misc_feature (61)..(62): /note="This region represents a CpG dinucleotide"
  misc_feature (61)..(61): /note="Nucleotide may be methylated to form 5-methylcytosine"
taaatctgcccttcaaggaatattacttttacgtactaaatgggaaccagtaagcttgcccgagcccacacagtgcagaggagaagctagagcacctgataaagataaattctccatttgac

SEQ ID NO: 28251 - DNA, 122 bp, Homo sapiens
  misc_feature (61)..(62): /note="This region represents a CpG dinucleotide"
  misc_feature (61)..(61): /note="Nucleotide may be methylated to form 5-methylcytosine"
tgttaattggtatcaacagttacatgcagctagtggctggcactgggcagtgcagtcctacgtcacagttataagaagtcctataaacaccaagctgaacaaataaaagatcacacctagac

SEQ ID NO: 28252 - DNA, 122 bp, Homo sapiens
  misc_feature (61)..(62): /note="This region represents a CpG dinucleotide"
  misc_feature (61)..(61): /note="Nucleotide may be methylated to form 5-methylcytosine"
gctggtggcgggtgtacttctgggcgtgaacttcacgctcactgggagcagcccatgcaccggccccctcggtgcgctcaggtctcaggtgcctccgggaaagaggagaaggcagctgtctc

SEQ ID NO: 28253 - DNA, 122 bp, Homo sapiens
  misc_feature (61)..(62): /note="This region represents a CpG dinucleotide"
  misc_feature (61)..(61): /note="Nucleotide may be methylated to form 5-methylcytosine"
gggttcttaggtttagaaagagccgcccagcggagcagcgtggtcgtcctgcattgcgcacggggtgagagactgcagtcaccccgatggcctctgaattcctaaactttggacttcgatgg

SEQ ID NO: 28254 - DNA, 122 bp, Homo sapiens
  misc_feature (61)..(62): /note="This region represents a CpG dinucleotide"
  misc_feature (61)..(61): /note="Nucleotide may be methylated to form 5-methylcytosine"
ctatgaccccaggcttcgagaaaagactccaccaagttccatgagcacctgtaggagagccggcctctgggtagatttcacccaaagaagctaaaacgctcacgtggtgcttatgggatcac

SEQ ID NO: 28255 - DNA, 122 bp, Homo sapiens
  misc_feature (61)..(62): /note="This region represents a CpG dinucleotide"
  misc_feature (61)..(61): /note="Nucleotide may be methylated to form 5-methylcytosine"
aagtgttagcaatcattctgctactgtgtgcaaggctttatccatgctctaccaaccacccgtgatgggtctgtcaaccagaaagtatctgaggcagggctccatcaatttagaagtttatt

SEQ ID NO: 28256 - DNA, 122 bp, Homo sapiens
  misc_feature (61)..(62): /note="This region represents a CpG dinucleotide"
  misc_feature (61)..(61): /note="Nucleotide may be methylated to form 5-methylcytosine"
aggaaatctgatgttctaaacagagcgattatataaaacgctggctgtggcttaagcaaacgcaatcacagaattgcctagctgtgagtcagagtcggcttgatcctgaaaagtcccttgct

SEQ ID NO: 28257 - DNA, 122 bp, Homo sapiens
  misc_feature (61)..(62): /note="This region represents a CpG dinucleotide"
  misc_feature (61)..(61): /note="Nucleotide may be methylated to form 5-methylcytosine"
tgtccctaaatggaaacaaatataatcccacaaaaccaacaattttatttgcctctactacgtcaggcagaattcttcaattaagttgaactacatttgttgatcccttttctcatcttacc

SEQ ID NO: 28258 - DNA, 122 bp, Homo sapiens
  misc_feature (61)..(62): /note="This region represents a CpG dinucleotide"
  misc_feature (61)..(61): /note="Nucleotide may be methylated to form 5-methylcytosine"
ccaccacaggtccctctacccagactctacccagagctctgtctgccaggctctcctccccggcaccaggcttgagtattccgcctcactcaccaagcctcagcccccgcccatttcctcag

SEQ ID NO: 28259 - DNA, 122 bp, Homo sapiens
  misc_feature (61)..(62): /note="This region represents a CpG dinucleotide"
  misc_feature (61)..(61): /note="Nucleotide may be methylated to form 5-methylcytosine"
aaaagactgaaagactaagtattaaggatccaattttgaattcatcttagaagttgagaccggaacaatcaaactgagaaaggaaataataaacaacaaataagtatatgctccaatattta

SEQ ID NO: 28260 - DNA, 122 bp, Homo sapiens
  misc_feature (61)..(62): /note="This region represents a CpG dinucleotide"
  misc_feature (61)..(61): /note="Nucleotide may be methylated to form 5-methylcytosine"
ctgtccacctcttagcctgatttgtagtctaaggctcaaacatctcatcaatgagcaacccgcttttgcctccctcctctccgtctgcaggattcagggtcactgatcttattccacaactg

SEQ ID NO: 28261 - DNA, 122 bp, Homo sapiens
  misc_feature (61)..(62): /note="This region represents a CpG dinucleotide"
  misc_feature (61)..(61): /note="Nucleotide may be methylated to form 5-methylcytosine"
ctttgagtcaggatggctaaatttatagctggctgaatacttcccagaggatgagtgtaacgatattgattttagcgaagtgagtcatatgcctactgcctggaaacacaagctcaattacc

SEQ ID NO: 28262 - DNA, 122 bp, Homo sapiens
  misc_feature (61)..(62): /note="This region represents a CpG dinucleotide"
  misc_feature (61)..(61): /note="Nucleotide may be methylated to form 5-methylcytosine"
attgactcctaccaagtggcagaacaagacagacaaaaagccactgccctagattctagacgtgagccagatgataaacaggcaagcgaagaaagaaatacatgaggacttcaggtagtgag

SEQ ID NO: 28263 - DNA, 122 bp, Homo sapiens
  misc_feature (61)..(62): /note="This region represents a CpG dinucleotide"
  misc_feature (61)..(61): /note="Nucleotide may be methylated to form 5-methylcytosine"
ctaagacatggaagcagagtgactggcctgagctcacagcctgagctgggattcaagcctcgctctttcccaagactattctttccttgtgtttgatcccattaatcatcattctttttttt

SEQ ID NO: 28264 - DNA, 122 bp, Homo sapiens
  misc_feature (61)..(62): /note="This region represents a CpG dinucleotide"
  misc_feature (61)..(61): /note="Nucleotide may be methylated to form 5-methylcytosine"
aggttatatgtttcggttactgtgctctcactcaaaactggcaaacagattttttgtttacgcaaattaaactcaatcttggcaacctgctccatggatgctggtttgggaggactaatgtc

SEQ ID NO: 28265 - DNA, 122 bp, Homo sapiens
  misc_feature (61)..(62): /note="This region represents a CpG dinucleotide"
  misc_feature (61)..(61): /note="Nucleotide may be methylated to form 5-methylcytosine"
gagatctgaaagccaagtgttcagcaaaatgctgggcaggctccccagcctgcgcggccacgcacctttacaccacgccgcgctgccccagcctgcgtgctgcaaacgacgcatttgacctc

SEQ ID NO: 28266 - DNA, 122 bp, Homo sapiens
  misc_feature (61)..(62): /note="This region represents a CpG dinucleotide"
  misc_feature (61)..(61): /note="Nucleotide may be methylated to form 5-methylcytosine"
aagaatagtttgcttaaggtgtggaaagggttagttcattcttaaaggacccattaaatacgcactatttactaggcaaacagagaagcagaagtggataaagcaggagaaggggttaaaga

SEQ ID NO: 28267 - DNA, 122 bp, Homo sapiens
  misc_feature (61)..(62): /note="This region represents a CpG dinucleotide"
  misc_feature (61)..(61): /note="Nucleotide may be methylated to form 5-methylcytosine"
aagaaagcgcagaaacagacaagggacacacccacagaaacatatatagactgagaaagccgggtgcgggtgggaaggtgagggtggtcagatgaatcaagataggttgggggagagggaga

SEQ ID NO: 28268 - DNA, 122 bp, Homo sapiens
  misc_feature (61)..(62): /note="This region represents a CpG dinucleotide"
  misc_feature (61)..(61): /note="Nucleotide may be methylated to form 5-methylcytosine"
acccaatgagtcctgagaaagggctttttcatcccagataaagtagcaggaagaaagtaacgggcaggaagcaattccaagaactccacagtggatacaatggcatccattttattatttta

SEQ ID NO: 28269 - DNA, 122 bp, Homo sapiens
  misc_feature (61)..(62): /note="This region represents a CpG dinucleotide"
  misc_feature (61)..(61): /note="Nucleotide may be methylated to form 5-methylcytosine"
gtgaagagattaaaccctcctgccttagtgggtcactgttagaggacagtgcctggcacacgtgaactcagtattagctgttgtcattgagagagaacatgagggacaactaaaggacaaag

SEQ ID NO: 28270 - DNA, 122 bp, Homo sapiens
  misc_feature (61)..(62): /note="This region represents a CpG dinucleotide"
  misc_feature (61)..(61): /note="Nucleotide may be methylated to form 5-methylcytosine"
aagctgtccctcccgtggcaaatactgagttattatcagccttccatctgctgtgggaaacggtggggctccactcacggcatttgcatctcgtctaaaacgggagcatcgcctgggaggcc

SEQ ID NO: 28271 - DNA, 122 bp, Homo sapiens
  misc_feature (61)..(62): /note="This region represents a CpG dinucleotide"
  misc_feature (61)..(61): /note="Nucleotide may be methylated to form 5-methylcytosine"
aaggtcacccgactcacaccacaccccagccggctcagacactgaggacccacaagtgaacgggaaaaccttaaaacctctagaagaaaacacagggaactatctttccaaattggggccgg

SEQ ID NO: 28272 - DNA, 122 bp, Homo sapiens
  misc_feature (61)..(62): /note="This region represents a CpG dinucleotide"
  misc_feature (61)..(61): /note="Nucleotide may be methylated to form 5-methylcytosine"
ccaattgtcatgcctctcgtgggttagttgtaaatggaacacaactctagcatgacattgcgacttaaaagagcatatccagtatttcgatgatcattctggaaatatatttcctcttcaaa

SEQ ID NO: 28273 - DNA, 122 bp, Homo sapiens
  misc_feature (61)..(62): /note="This region represents a CpG dinucleotide"
  misc_feature (61)..(61): /note="Nucleotide may be methylated to form 5-methylcytosine"
attacattagatgcagcctatttagtctgaaccaagccagacaaattggtgtgtcctgcccgctgcttctaaaatattgtaaacatgtctcagctcataggaaaataaatgttccgggtaaa

SEQ ID NO: 28274 - DNA, 122 bp, Homo sapiens
  misc_feature (61)..(62): /note="This region represents a CpG dinucleotide"
  misc_feature (61)..(61): /note="Nucleotide may be methylated to form 5-methylcytosine"
attaccaagtgccaaaatattctcctagagctaatccagagcctggtgtccccagggtgtcgaggagtccacactcaaaagtagctgttttgaataattcatttttttgtaaaaagaagaat

SEQ ID NO: 28275 - DNA, 122 bp, Homo sapiens
  misc_feature (61)..(62): /note="This region represents a CpG dinucleotide"
  misc_feature (61)..(61): /note="Nucleotide may be methylated to form 5-methylcytosine"
gaagaagagagagaaggcagaggtgctacacacttttaaaccacaggatctcataattcccgcactcactatcacgagaatagcacctagaagattgtgctaaaccatgagaaactgctccc

SEQ ID NO: 28276 - DNA, 122 bp, Homo sapiens
  misc_feature (61)..(62): /note="This region represents a CpG dinucleotide"
  misc_feature (61)..(61): /note="Nucleotide may be methylated to form 5-methylcytosine"
cagagtacagagggttaaattgcaggaggtgaggaagtagagaccatggataaggctactcgcaggaagcctggctaagaacagggagtgagctaacaggaaatactggatcaaattgtatt

SEQ ID NO: 28277 - DNA, 122 bp, Homo sapiens
  misc_feature (61)..(62): /note="This region represents a CpG dinucleotide"
  misc_feature (61)..(61): /note="Nucleotide may be methylated to form 5-methylcytosine"
atattaaggcatctttttctttcatttgcgcacaatgctgatttttgcagtcctattttacgccttaatgtgacaacttcctggtttttttttttttaaacccagaacttaactattacaac

SEQ ID NO: 28278 - DNA, 122 bp, Homo sapiens
  misc_feature (61)..(62): /note="This region represents a CpG dinucleotide"
  misc_feature (61)..(61): /note="Nucleotide may be methylated to form 5-methylcytosine"
ttggtcacttccactggaacgtaagcttcatgagcgtgggggctttctctgttttattcacggctatgtactcaaactaggacagtgtaaatatttgttgaatgaatgaagctatacacttc

SEQ ID NO: 28279 - DNA, 122 bp, Homo sapiens
  misc_feature (61)..(62): /note="This region represents a CpG dinucleotide"
  misc_feature (61)..(61): /note="Nucleotide may be methylated to form 5-methylcytosine"
gagaggaatagagtgggggtgggagaagtggggagcagagagagacagagaatgaactagcggaaagcaagcaagtcagcttttagaagtagacctgaagccctagcaacactgaaaagaga

SEQ ID NO: 28280 - DNA, 122 bp, Homo sapiens
  misc_feature (61)..(62): /note="This region represents a CpG dinucleotide"
  misc_feature (61)..(61): /note="Nucleotide may be methylated to form 5-methylcytosine"
gttgccctcctatttccaacctcatccctacctccactgccacaatcccttccagccaagcgtgtctgagccattcctgttgacaggtacagacacagtgactatgacgtgctaacagagga

SEQ ID NO: 28281 - DNA, 122 bp, Homo sapiens
  misc_feature (61)..(62): /note="This region represents a CpG dinucleotide"
  misc_feature (61)..(61): /note="Nucleotide may be methylated to form 5-methylcytosine"
tgacagcacggctttgcactaagaaatacttgacgagcttgatatactcaggcactatgtcgtcatcacaacagaggtgcattccatgaagggccagctcccagtgccactaaaccacggag

SEQ ID NO: 28282 - DNA, 122 bp, Homo sapiens
  misc_feature (61)..(62): /note="This region represents a CpG dinucleotide"
  misc_feature (61)..(61): /note="Nucleotide may be methylated to form 5-methylcytosine"
tctgtcagctacagcatgaaaaattcagtgtcctgcagattccccatcgcagtgaatcatcgcatcagccagagagcaagctgactaatgattgctatgctgcagacaatgaagatgatata

SEQ ID NO: 28283 - DNA, 122 bp, Homo sapiens
  misc_feature (61)..(62): /note="This region represents a CpG dinucleotide"
  misc_feature (61)..(61): /note="Nucleotide may be methylated to form 5-methylcytosine"
gatacagaaaactgtgtaactgcacatacacataccagtagcacgatgagctcagatggacggaatgcttatgtgagcagacagacagggagagatactgcaagcatgttcccctccttccc

SEQ ID NO: 28284 - DNA, 122 bp, Homo sapiens
  misc_feature (61)..(62): /note="This region represents a CpG dinucleotide"
  misc_feature (61)..(61): /note="Nucleotide may be methylated to form 5-methylcytosine"
tgctgggagagcacatcacataactgctcacatcacagggcacttttacagcttagaaagcgcctggctcaccctctgggtgctcccaaatgccacccgggagaccataggccgaggatgag

SEQ ID NO: 28285 - DNA, 122 bp, Homo sapiens
  misc_feature (61)..(62): /note="This region represents a CpG dinucleotide"
  misc_feature (61)..(61): /note="Nucleotide may be methylated to form 5-methylcytosine"
gtggttgtcaggcctactctgaaaaggggctggaaaggtctctctagagttgtgaagcaacggctgcatgtgattagtcagtccttaccttgaaatgatttatttaaaaagaatacattgtt

SEQ ID NO: 28286 - DNA, 122 bp, Homo sapiens
  misc_feature (61)..(62): /note="This region represents a CpG dinucleotide"
  misc_feature (61)..(61): /note="Nucleotide may be methylated to form 5-methylcytosine"
actgacctcacctggatttgtgactcataactcaactggtcatatggccccacctagaggcgcactgagtgcaccaggagctttttccacacgttgatgatttcatccccaaccaatcagca

SEQ ID NO: 28287 - DNA, 122 bp, Homo sapiens
  misc_feature (61)..(62): /note="This region represents a CpG dinucleotide"
  misc_feature (61)..(61): /note="Nucleotide may be methylated to form 5-methylcytosine"
ccgccactctctctgtgtcttttctttaaccctcgccttccctccaaaacctaacagttacgatatggggaaatgaaagtctaagaaatatgattttcagcttctttaacccagatacttaa

SEQ ID NO: 28288 - DNA, 122 bp, Homo sapiens
  misc_feature (61)..(62): /note="This region represents a CpG dinucleotide"
  misc_feature (61)..(61): /note="Nucleotide may be methylated to form 5-methylcytosine"
cctgttgtggaggtcacagctttacctacttaccttaaacacaggagttttctggccaggcgcggtggctcacgcctgtaatcccaacactttaggagaccgaggcgggtggatcacctgag

SEQ ID NO: 28289 - DNA, 122 bp, Homo sapiens
  misc_feature (61)..(62): /note="This region represents a CpG dinucleotide"
  misc_feature (61)..(61): /note="Nucleotide may be methylated to form 5-methylcytosine"
cccctcctcccaccttgggactgcccccacactgttacctgtccctggtccaggaggattcgggcagctaactcagcctcctggagagacacacacggattcacacagaaacacatgaccat

SEQ ID NO: 28290 - DNA, 122 bp, Homo sapiens
  misc_feature (61)..(62): /note="This region represents a CpG dinucleotide"
  misc_feature (61)..(61): /note="Nucleotide may be methylated to form 5-methylcytosine"
tacattgtcccctcccccctttttctctcagttaaaaatctgtcccagaatgaggtttggcgggacatatggtttggcgtgcttgtgggggctggcagggtgaggtatgtatggtagtgtag

SEQ ID NO: 28291 - DNA, 122 bp, Homo sapiens
  misc_feature (61)..(62): /note="This region represents a CpG dinucleotide"
  misc_feature (61)..(61): /note="Nucleotide may be methylated to form 5-methylcytosine"
tccagcacactcactctctggtccagtcttagacacagtttattctctctctgcacctgtcgtcaattcataagaggcagcagcatcagagcatcacctacctggggaatcatgagacagca

SEQ ID NO: 28292 - DNA, 122 bp, Homo sapiens
  misc_feature (61)..(62): /note="This region represents a CpG dinucleotide"
  misc_feature (61)..(61): /note="Nucleotide may be methylated to form 5-methylcytosine"
tgagggacccctcatgccagtagtggctgggggttagggactggagcctgctgcccagcacggtggtcacaccctggccagccccaccccacccggccctggaggggaggccaaggtaaggc

SEQ ID NO: 28293 - DNA, 122 bp, Homo sapiens
  misc_feature (61)..(62): /note="This region represents a CpG dinucleotide"
  misc_feature (61)..(61): /note="Nucleotide may be methylated to form 5-methylcytosine"
ggggttaaccctgtggactggattcaggaaggggccccctggccctgaccttctctctcccgtaacttaggccctcaagcctatactctggggaatctcccagctactaggacctgtcagga

SEQ ID NO: 28294 - DNA, 122 bp, Homo sapiens
  misc_feature (61)..(62): /note="This region represents a CpG dinucleotide"
  misc_feature (61)..(61): /note="Nucleotide may be methylated to form 5-methylcytosine"
tctcatgacccaagtgccccttttttggtggcatctgtttctttaagctgtattttatctcgtctgtgtaaaggtgtttcctttggcgtttccttctgtgcattgtctcattgctttgaatg

SEQ ID NO: 28295 - DNA, 122 bp, Homo sapiens
  misc_feature (61)..(62): /note="This region represents a CpG dinucleotide"
  misc_feature (61)..(61): /note="Nucleotide may be methylated to form 5-methylcytosine"
acacataattacagtcagcacaactgcattcaatgtcagccatttctatcagctctttctcgttctttgatcttaattacatgaacaagtagcagaccatgagccttagaggcctgtggacc

SEQ ID NO: 28296 - DNA, 122 bp, Homo sapiens
  misc_feature (61)..(62): /note="This region represents a CpG dinucleotide"
  misc_feature (61)..(61): /note="Nucleotide may be methylated to form 5-methylcytosine"
attgttacaatctcaaaatattagagtcacttgactattcagctcatagtcctgctaccacgtagggttagacctaaaccacatgaattaaatatcccagaaaatgaaattccacaacctct

SEQ ID NO: 28297 - DNA, 122 bp, Homo sapiens
  misc_feature (61)..(62): /note="This region represents a CpG dinucleotide"
  misc_feature (61)..(61): /note="Nucleotide may be methylated to form 5-methylcytosine"
acacacgagtcattcacgggtcagcaatgattcagtcatgggtcacacactggtcacacacgtcagtcacatccccccccccacatcagctatgtgtcagaacatacctgccatgtgtcaga

SEQ ID NO: 28298 - DNA, 122 bp, Homo sapiens
  misc_feature (61)..(62): /note="This region represents a CpG dinucleotide"
  misc_feature (61)..(61): /note="Nucleotide may be methylated to form 5-methylcytosine"
gagaatctacccgtgacagagctgcgtggaagctgacaggaggcccctctcaggaggtgacgcagaaactgggaccgggaaaatgaggcagggcccacgtgcggagacccagggaaggggga

SEQ ID NO: 28299 - DNA, 122 bp, Homo sapiens
  misc_feature (61)..(62): /note="This region represents a CpG dinucleotide"
  misc_feature (61)..(61): /note="Nucleotide may be methylated to form 5-methylcytosine"
ctgcatttttttaagtgggtaacccagagaattctcatatggtagttcatgaagcacacacggagaagttttacatctggaaattatctaaaagaattaaagagaaaatgaacacggaaaaa

SEQ ID NO: 28300 - DNA, 122 bp, Homo sapiens
  misc_feature (61)..(62): /note="This region represents a CpG dinucleotide"
  misc_feature (61)..(61): /note="Nucleotide may be methylated to form 5-methylcytosine"
gttcgggcaggtgagataatacctaacctgaagcaaattatcggatgcagaggcttagagcgagtgacttgtattctttactgaagaatataagacctgggggcttcacttaaacgccaaag

SEQ ID NO: 28301 - DNA, 122 bp, Homo sapiens
  misc_feature (61)..(62): /note="This region represents a CpG dinucleotide"
  misc_feature (61)..(61): /note="Nucleotide may be methylated to form 5-methylcytosine"
tcctgtctgaactgttcctcattagacctctaatgtttcttaattggaccaacttggcatcgtgtccaacattcagttgcctgttagctgagctgccagtttttcccttgtttgtgtgtgtg

SEQ ID NO: 28302 - DNA, 122 bp, Homo sapiens
  misc_feature (61)..(62): /note="This region represents a CpG dinucleotide"
  misc_feature (61)..(61): /note="Nucleotide may be methylated to form 5-methylcytosine"
ccacctctttctgctctgtctggctaataccttctaaagccaggtatcagcttagactgccgcttgccccatacttgtgtgggtgcctctccttggtgctggcattacaccctgtgctcagt

SEQ ID NO: 28303 - DNA, 122 bp, Homo sapiens
  misc_feature (61)..(62): /note="This region represents a CpG dinucleotide"
  misc_feature (61)..(61): /note="Nucleotide may be methylated to form 5-methylcytosine"
agcccagaaaccaagggcgtggcgggactcacaggcagggagcggtgaggcagagctgtccgctggagcgagcccctgctctagggccatggccctcggggtccgttcatgcagcaagccac

SEQ ID NO: 28304 - DNA, 122 bp, Homo sapiens
  misc_feature (61)..(62): /note="This region represents a CpG dinucleotide"
  misc_feature (61)..(61): /note="Nucleotide may be methylated to form 5-methylcytosine"
gctttccagctgttgcagaactaatggcacagaggaggaagctggggtggatgccacacacgcccatcagccacgagttagcaaaggaagcagagacctatttccaggggactttggcttct

SEQ ID NO: 28305 - DNA, 122 bp, Homo sapiens
  misc_feature (61)..(62): /note="This region represents a CpG dinucleotide"
  misc_feature (61)..(61): /note="Nucleotide may be methylated to form 5-methylcytosine"
ggtcacagcatgactcacagtatcttacacaccttggatgtatatacgcacttcttatgtcgtaagtaatccagagggaggagtttgctagagctagtccagagttcagccatcttagggct

SEQ ID NO: 28306 - DNA, 122 bp, Homo sapiens
  misc_feature (61)..(62): /note="This region represents a CpG dinucleotide"
  misc_feature (61)..(61): /note="Nucleotide may be methylated to form 5-methylcytosine"
gtattaatgattcaagctcctatcattacacagttgcagagatagcaaaagttgtcattacgtgaaaaccttcctctgttgaactgaaatcttatgagtcctgtttcttgcatcttcctgaa

SEQ ID NO: 28307 - DNA, 122 bp, Homo sapiens
  misc_feature (61)..(62): /note="This region represents a CpG dinucleotide"
  misc_feature (61)..(61): /note="Nucleotide may be methylated to form 5-methylcytosine"
ttggggttttcagagcagtttaaagaaaacagtctgtcatctgaagctgaaaagccagtgcggtaatatctgattgtcactgggtattgtctggcctaggaatgaaagtgactgggcagaaa

SEQ ID NO: 28308 - DNA, 122 bp, Homo sapiens
  misc_feature (61)..(62): /note="This region represents a CpG dinucleotide"
  misc_feature (61)..(61): /note="Nucleotide may be methylated to form 5-methylcytosine"
aacctgggaagaattttttttttttccctttaaggatgattctacatgttgacaagaatacggtaacaccagtattctcacagagagctggtgggaacataatttggttaaacattttttgg

SEQ ID NO: 28309 - DNA, 122 bp, Homo sapiens
  misc_feature (61)..(62): /note="This region represents a CpG dinucleotide"
  misc_feature (61)..(61): /note="Nucleotide may be methylated to form 5-methylcytosine"
ctgtccaaaagcaaactcagtggtccttcccaggtctctggccacttctggccccgggaacgtagagcggcttctgcatctccctgactcacctcggagtaggctctgtgggagacaccgcc

SEQ ID NO: 28310 - DNA, 122 bp, Homo sapiens
  misc_feature (61)..(62): /note="This region represents a CpG dinucleotide"
  misc_feature (61)..(61): /note="Nucleotide may be methylated to form 5-methylcytosine"
ctttgcttacacaacttgtctgtcttgtctgggcagtagatactttctccaaacatagagcgggctggactgtaggattccatttgttactgaaatttcttctgcttcccctcatgaccaaa

SEQ ID NO: 28311 - DNA, 122 bp, Homo sapiens
  misc_feature (61)..(62): /note="This region represents a CpG dinucleotide"
  misc_feature (61)..(61): /note="Nucleotide may be methylated to form 5-methylcytosine"
gcccaagagagcttttgtctttgccgcagggcagcccaaaaaagagtaggactgtgcatacgatccttatggaatgattcaatacagaaatagtaaaatggtgatgatgtgaaagatccccc

SEQ ID NO: 28312 - DNA, 122 bp, Homo sapiens
  misc_feature (61)..(62): /note="This region represents a CpG dinucleotide"
  misc_feature (61)..(61): /note="Nucleotide may be methylated to form 5-methylcytosine"
agaacagtgtccttggggccagaagaggctgtcccacaagggagaaagccactatctggacgtgtccttgtgcctaacaaaaagccatttgctatgccaagagaacagagcatgcaaactca

SEQ ID NO: 28313 - DNA, 122 bp, Homo sapiens
  misc_feature (61)..(62): /note="This region represents a CpG dinucleotide"
  misc_feature (61)..(61): /note="Nucleotide may be methylated to form 5-methylcytosine"
ggttttgtggcatttgggtgttgtagttagagtttcctttagactccttgggtcctttgacgatgagacagacccattatgcccacctgtgccattctggtgggattctttgaaggcacttt

SEQ ID NO: 28314 - DNA, 122 bp, Homo sapiens
  misc_feature (61)..(62): /note="This region represents a CpG dinucleotide"
  misc_feature (61)..(61): /note="Nucleotide may be methylated to form 5-methylcytosine"
ttcccctgttcttcatttgcaaagacttgcctccttgagattatttactcacaaacttaccgttaatcataggcctcattttaccgtcactcttccttatttttctgaactggatttgagaa

SEQ ID NO: 28315 - DNA, 122 bp, Homo sapiens
  misc_feature (61)..(62): /note="This region represents a CpG dinucleotide"
  misc_feature (61)..(61): /note="Nucleotide may be methylated to form 5-methylcytosine"
cctgctctgggcttccttctctgcgctgctcacagcggagacgtggtcatgaggccgggtcgccttggagccagggcctctcagtccctgtggtggtctctggtcagatttggcccaggagg

SEQ ID NO: 28316 - DNA, 122 bp, Homo sapiens
  misc_feature (61)..(62): /note="This region represents a CpG dinucleotide"
  misc_feature (61)..(61): /note="Nucleotide may be methylated to form 5-methylcytosine"
agcaaacaaaacagatgtatagattagagtgtggagaaaacagaggaaaacttgcagttacgaagactggcaacttggctttactaagttttcagactggcaggaagtcaaacctattaggc

SEQ ID NO: 28317 - DNA, 122 bp, Homo sapiens
  misc_feature (61)..(62): /note="This region represents a CpG dinucleotide"
  misc_feature (61)..(61): /note="Nucleotide may be methylated to form 5-methylcytosine"
aggtcaagctaaacaaggtctagacaaaacttaaacaacaaaacaaagtcaggcactgtacgtaggtcacaatgactgtataactagcttgaagaagaaatgaacaaaactttctttgctac

SEQ ID NO: 28318 - DNA, 122 bp, Homo sapiens
  misc_feature (61)..(62): /note="This region represents a CpG dinucleotide"
  misc_feature (61)..(61): /note="Nucleotide may be methylated to form 5-methylcytosine"
tgatcaactttgatcagcatcagcatgatttcaaagtctttgtcaagaaacagacgctggcgttggatgaggcatgggaaagatgaagagagttggctgagaaggacgtggtccccagccct

SEQ ID NO: 28319 - DNA, 122 bp, Homo sapiens
  misc_feature (61)..(62): /note="This region represents a CpG dinucleotide"
  misc_feature (61)..(61): /note="Nucleotide may be methylated to form 5-methylcytosine"
caacttgtgtccttcctgtcacttatctgaagttcatttgaatttggtgattttattttacgtggcctatgtatttggctaatgtttcatcattttatatgtcaaggaggaagactattaat

SEQ ID NO: 28320 - DNA, 122 bp, Homo sapiens
  misc_feature (61)..(62): /note="This region represents a CpG dinucleotide"
  misc_feature (61)..(61): /note="Nucleotide may be methylated to form 5-methylcytosine"
aaaagggctgatggaagcaaagagaagaggaagtggttgtcggggtgagagctgggcccgcgccccacatggctgtcacacaggaagccctgctgaagcagctgtccccggaagaagccatt

SEQ ID NO: 28321 - DNA, 122 bp, Homo sapiens
  misc_feature (61)..(62): /note="This region represents a CpG dinucleotide"
  misc_feature (61)..(61): /note="Nucleotide may be methylated to form 5-methylcytosine"
cttctgtggtccccaagacttggggctcctctgctctcttgtgagtgttggagtctgaggcggggcccgtggacaaggcagtttctgcgtctcttggccacagctgcttggggaagtgtttt

SEQ ID NO: 28322 - DNA, 122 bp, Homo sapiens
  misc_feature (61)..(62): /note="This region represents a CpG dinucleotide"
  misc_feature (61)..(61): /note="Nucleotide may be methylated to form 5-methylcytosine"
cccaccctaatattatcatgctgcttgatctactttcaggtctctctttgtgcagtctcacgctgttccttccaccagggaatataatagcatttttcacaagggtaaattctactcatgta

SEQ ID NO: 28323 - DNA, 122 bp, Homo sapiens
  misc_feature (61)..(62): /note="This region represents a CpG dinucleotide"
  misc_feature (61)..(61): /note="Nucleotide may be methylated to form 5-methylcytosine"
aatatgatggccagaaggcaggttgccagtaggaacatgagaagcatctggcttagtcgacggctcatgtgattcagtgcccaaggtgcaacacaattggccaggagggtgactgcaccaaa

SEQ ID NO: 28324 - DNA, 122 bp, Homo sapiens
  misc_feature (61)..(62): /note="This region represents a CpG dinucleotide"
  misc_feature (61)..(61): /note="Nucleotide may be methylated to form 5-methylcytosine"
taaagaaaccccaaaaacaaaaaacacaactttcccacataccaaactctatatggaatacgttttttccctcctacttaagaaggggattcaggggacaacatgaattgataaggaagcca

SEQ ID NO: 28325 - DNA, 122 bp, Homo sapiens
  misc_feature (61)..(62): /note="This region represents a CpG dinucleotide"
  misc_feature (61)..(61): /note="Nucleotide may be methylated to form 5-methylcytosine"
cagggaagacttcctggggtctgtgggaaatgattcacatacacaatctcttacaatcctcgctcaacaaggtgggtacggttattatcctcatttacagacaaggacacaaagactcaagg

SEQ ID NO: 28326 - DNA, 122 bp, Homo sapiens
  misc_feature (61)..(62): /note="This region represents a CpG dinucleotide"
  misc_feature (61)..(61): /note="Nucleotide may be methylated to form 5-methylcytosine"
agctgctccctgaatacatggctgcctgcttccttcttcagaacgctctcctccttatcccgctttgttcaggagaactggtttaccccactaagggccacagggcgcaagtagaatggcct

SEQ ID NO: 28327 - DNA, 122 bp, Homo sapiens
  misc_feature (61)..(62): /note="This region represents a CpG dinucleotide"
  misc_feature (61)..(61): /note="Nucleotide may be methylated to form 5-methylcytosine"
cggccagtggctcagctcccaagccgaggccgctggttgtcgccagcgtacccaggagagcggtgccctagaaaatgctaggtctctttcagtgcccacagcctcagtttgccacctgataa

SEQ ID NO: 28328 - DNA, 122 bp, Homo sapiens
  misc_feature (61)..(62): /note="This region represents a CpG dinucleotide"
  misc_feature (61)..(61): /note="Nucleotide may be methylated to form 5-methylcytosine"
gtaaggatgcagatttggtgacctgataactgctctaactgattggtttattttttgcttcgtttcctgcttttcaacattctctactgatttgcttattttgcagcaagtacactcttttt

SEQ ID NO: 28329 - DNA, 122 bp, Homo sapiens
  misc_feature (61)..(62): /note="This region represents a CpG dinucleotide"
  misc_feature (61)..(61): /note="Nucleotide may be methylated to form 5-methylcytosine"
gtgatggcttgtattgcctgtcacaggtgtgctgacccactgatgacatgtctgttccatcgttttcttaataaggtgtcaagcagccctgtgaaacaggtaaaggaaaaggcaagatgggt

SEQ ID NO: 28330 - DNA, 122 bp, Homo sapiens
  misc_feature (61)..(62): /note="This region represents a CpG dinucleotide"
  misc_feature (61)..(61): /note="Nucleotide may be methylated to form 5-methylcytosine"
aacacaagccaagattgtgaaaccacatcaaatcattaagagttcaagaaatcaaagcagcgatgggcagtggtttgaaaattcttggttagatgtttacattgtaacaatttgcatttcag

SEQ ID NO: 28331 - DNA, 122 bp, Homo sapiens
  misc_feature (61)..(62): /note="This region represents a CpG dinucleotide"
  misc_feature (61)..(61): /note="Nucleotide may be methylated to form 5-methylcytosine"
gactaatttagcctgttgagcaaaggggatatgacctgaatgaacttttcagaaatgtgacgaagagtaggttgagatctagtccatatgaatgtaagacttagtaagttaattctttaaaa

SEQ ID NO: 28332 - DNA, 122 bp, Homo sapiens
  misc_feature (61)..(62): /note="This region represents a CpG dinucleotide"
  misc_feature (61)..(61): /note="Nucleotide may be methylated to form 5-methylcytosine"
tgcctcagcaattttctgacatttatgatagactggattctgcatttcaccagtcagctacgtgaggagagtctaccttcatcaccctccaacatctttgattccagcccatgtataaccag

SEQ ID NO: 28333 - DNA, 122 bp, Homo sapiens
  misc_feature (61)..(62): /note="This region represents a CpG dinucleotide"
  misc_feature (61)..(61): /note="Nucleotide may be methylated to form 5-methylcytosine"
gcctccatctttttttacatcctgggggcatggccataaccgcttagcaaagctttgtttcgcaatcctgccttagggagtaagtttctccctggtttaatatctgcctgttctcccagccc

SEQ ID NO: 28334 - DNA, 122 bp, Homo sapiens
  misc_feature (61)..(62): /note="This region represents a CpG dinucleotide"
  misc_feature (61)..(61): /note="Nucleotide may be methylated to form 5-methylcytosine"
tttctggggttttaagccactacatgtgtgcaatttgttccagcagcaataggaaactgacgcactgcttctttctcaggactagatgcaaacctccaggaggccttctgcaacacaccttg

SEQ ID NO: 28335 - DNA, 122 bp, Homo sapiens
  misc_feature (61)..(62): /note="This region represents a CpG dinucleotide"
  misc_feature (61)..(61): /note="Nucleotide may be methylated to form 5-methylcytosine"
gaaaattaggattcttaatggatttcttagctgagacgcctcaactttgccctgaaacagcgtcagcaccctggttttagatccaaatgttacttccaggtatcaccaataatcaaattaag

SEQ ID NO: 28336 - DNA, 122 bp, Homo sapiens
  misc_feature (61)..(62): /note="This region represents a CpG dinucleotide"
  misc_feature (61)..(61): /note="Nucleotide may be methylated to form 5-methylcytosine"
acactcacctcttccggagagctgttcccaattcaccaaccaaatcccgatgaggccccacgtctttggagttccagttccaagacacaggactcggccagtttgtgaagccttcgtgatgc

SEQ ID NO: 28337 - DNA, 122 bp, Homo sapiens
  misc_feature (61)..(62): /note="This region represents a CpG dinucleotide"
  misc_feature (61)..(61): /note="Nucleotide may be methylated to form 5-methylcytosine"
atgcaggctgtactgaaagacaacaagtcacaggaagctgcctctcttacagggtggtgccgtcctgtggtttcccaccctcttggaggtgtagccattgtttgcttggtttcatgacacct

SEQ ID NO: 28338 - DNA, 122 bp, Homo sapiens
  misc_feature (61)..(62): /note="This region represents a CpG dinucleotide"
  misc_feature (61)..(61): /note="Nucleotide may be methylated to form 5-methylcytosine"
gacccaggagtgctgggtcggttcagttgaactccttgggacccgtggattaggtggcctcgtagacaaaatgcccaaatgcacaggcctgctggcatctaccttgagccaaccaggtggtg

SEQ ID NO: 28339 - DNA, 122 bp, Homo sapiens
  misc_feature (61)..(62): /note="This region represents a CpG dinucleotide"
  misc_feature (61)..(61): /note="Nucleotide may be methylated to form 5-methylcytosine"
ccttcaaggctggttctgggtcccggaaccatcctttcctggttcaggctgggtgcaggccgtccagcaccacctctctgactcaaggctggaattagtggggaggtgagtgaggctcttgt

SEQ ID NO: 28340 - DNA, 122 bp, Homo sapiens
  misc_feature (61)..(62): /note="This region represents a CpG dinucleotide"
  misc_feature (61)..(61): /note="Nucleotide may be methylated to form 5-methylcytosine"
cctgagagtcctgatctttcagtgctgttgtttccctgtcagggttgattgtttccttttcgagtgccgttctgaatctgaagtgaaagtgcagcgtggaggcatgtcactgttgtgtctca

SEQ ID NO: 28341 - DNA, 122 bp, Homo sapiens
  misc_feature (61)..(62): /note="This region represents a CpG dinucleotide"
  misc_feature (61)..(61): /note="Nucleotide may be methylated to form 5-methylcytosine"
agggagcaaatcaatccatgataaagggtgggcattctcactcacagagctaccaaaagacggaatggttgtttggggaagtagggagtttcccatccctgttcttggatgactatcaaaag

SEQ ID NO: 28342 - DNA, 122 bp, Homo sapiens
  misc_feature (61)..(62): /note="This region represents a CpG dinucleotide"
  misc_feature (61)..(61): /note="Nucleotide may be methylated to form 5-methylcytosine"
gtgaatttattttctttgtatctccagcactgactagaaattcagaaaaaatttttaaaacggaaataaaacaagttatgtgaaaatacagaaggataccttaaagaacaggtttttttaac

SEQ ID NO: 28343 - DNA, 122 bp, Homo sapiens
  misc_feature (61)..(62): /note="This region represents a CpG dinucleotide"
  misc_feature (61)..(61): /note="Nucleotide may be methylated to form 5-methylcytosine"
tacacacacacatacacacacacatacacacacctctataaacatacattctattgattccgtttctctagagtcataaatttgaatttaaagtaaacagtatgaagtagtaacattttact

SEQ ID NO: 28344 - DNA, 122 bp, Homo sapiens
  misc_feature (61)..(62): /note="This region represents a CpG dinucleotide"
  misc_feature (61)..(61): /note="Nucleotide may be methylated to form 5-methylcytosine"
ctttattgtttttcttctcattataatttatgtttcagtttagacttttggaaatatagccgagaaaaaggtgtgaccatttagaaaacagcaaaaagaagaaaattaaaattttctgtaat

SEQ ID NO: 28345 - DNA, 122 bp, Homo sapiens
  misc_feature (61)..(62): /note="This region represents a CpG dinucleotide"
  misc_feature (61)..(61): /note="Nucleotide may be methylated to form 5-methylcytosine"
gccaagcgtggaaaggctgtcttttccctggatgatgtataactaagcaggagagagcttcgagtgggttcaccacatcagccaccactcctgcttctgagcacagggtgctctcctcttga

SEQ ID NO: 28346 - DNA, 122 bp, Homo sapiens
  misc_feature (61)..(62): /note="This region represents a CpG dinucleotide"
  misc_feature (61)..(61): /note="Nucleotide may be methylated to form 5-methylcytosine"
aaagcctgaggatgcacttagtctggagcgacaacccaaggcaacgccggcagacagcaccgcctgcctcagagcagccgtgggtgtgtacccttgtgggcgcaaaaacccaagtacaacag

SEQ ID NO: 28347 - DNA, 122 bp, Homo sapiens
  misc_feature (61)..(62): /note="This region represents a CpG dinucleotide"
  misc_feature (61)..(61): /note="Nucleotide may be methylated to form 5-methylcytosine"
aggtaaaagagttctggggaagcagcaaggaattgggcagtattctagggttagttactgcgagcaaatgagagggagtaatcccttccaacagcaagcagttttcaagctttagtatgcat

SEQ ID NO: 28348 - DNA, 122 bp, Homo sapiens
  misc_feature (61)..(62): /note="This region represents a CpG dinucleotide"
  misc_feature (61)..(61): /note="Nucleotide may be methylated to form 5-methylcytosine"
cgggaggcgtgggagcgcagggcgccccgggtccggatccggctacaggggcgaacagagcgggttctccatcccctggggtgaaatctctgggcccaggctttgagaccctctaactcgcc

SEQ ID NO: 28349 - DNA, 122 bp, Homo sapiens
  misc_feature (61)..(62): /note="This region represents a CpG dinucleotide"
  misc_feature (61)..(61): /note="Nucleotide may be methylated to form 5-methylcytosine"
gtagcctaggagaacaaacagactccactctaaggagcccaggcattccatgctgatccacgcctgcccagcccggcggcatccccactgtctgtgcatggacaccagccctccctggctcc

SEQ ID NO: 28350 - DNA, 122 bp, Homo sapiens
  misc_feature (61)..(62): /note="This region represents a CpG dinucleotide"
  misc_feature (61)..(61): /note="Nucleotide may be methylated to form 5-methylcytosine"
ttcggctctcccaggccccggatgcagatggctgttaggggctggccatcctcatctcaacggtcctggaaggcaccactttcagggcatatgccatgactaacattccggtgagcaatgct

SEQ ID NO: 28351 - DNA, 122 bp, Homo sapiens
  misc_feature (61)..(62): /note="This region represents a CpG dinucleotide"
  misc_feature (61)..(61): /note="Nucleotide may be methylated to form 5-methylcytosine"
acatgggatggtgaatcttcttactcatgaaaaacagcccaaggtactgctaatttgggacgttttatttattggaaaggttctttcaagggaacttttctgcaagaccaagcaatgtatgt

SEQ ID NO: 28352 - DNA, 122 bp, Homo sapiens
  misc_feature (61)..(62): /note="This region represents a CpG dinucleotide"
  misc_feature (61)..(61): /note="Nucleotide may be methylated to form 5-methylcytosine"
tgagaaggaaggagcagggcagtgattgcttagtttatcctgggacgcgggagctgtccccgtggactgagtggcgcggagaggggatcactgagaccgggaagggtcatccagacaaataa

SEQ ID NO: 28353 - DNA, 122 bp, Homo sapiens
  misc_feature (61)..(62): /note="This region represents a CpG dinucleotide"
  misc_feature (61)..(61): /note="Nucleotide may be methylated to form 5-methylcytosine"
ggtttctttcatgctgattcgctcggaggaccctggcccttctgctgcgctcaccgccgccgctctggtaaatgactgtccgcatggtttcaacatgcagttcttcctgcgaagtccactag

SEQ ID NO: 28354 - DNA, 122 bp, Homo sapiens
  misc_feature (61)..(62): /note="This region represents a CpG dinucleotide"
  misc_feature (61)..(61): /note="Nucleotide may be methylated to form 5-methylcytosine"
taacagtgctcttttgtagatgatgaaacagaacactggtgattaatgatcataagatcacggaaacaatgttgctagcagaaatcaggactatatgatgtctgcgatgtggcaccttacag

SEQ ID NO: 28355 - DNA, 122 bp, Homo sapiens
  misc_feature (61)..(62): /note="This region represents a CpG dinucleotide"
  misc_feature (61)..(61): /note="Nucleotide may be methylated to form 5-methylcytosine"
ttgcaccataccacaaacactgacacttcttaaacgctgcttctcatgccaactgtttcacgttatcactgatatcaataaattcaaactatcacgtggggtggtcccacctgccagccact

SEQ ID NO: 28356 - DNA, 122 bp, Homo sapiens
  misc_feature (61)..(62): /note="This region represents a CpG dinucleotide"
  misc_feature (61)..(61): /note="Nucleotide may be methylated to form 5-methylcytosine"
atttaaatttgcaggctgctactctgagtgactgaacaggaagctagctggtccctttagcgctaacaaagcttgatttaggctgaaagattagaaagcacatcttattctataaacgcttc

SEQ ID NO: 28357 - DNA, 122 bp, Homo sapiens
  misc_feature (61)..(62): /note="This region represents a CpG dinucleotide"
  misc_feature (61)..(61): /note="Nucleotide may be methylated to form 5-methylcytosine"
caaaagtatctgtggctaaaaacattaagatcctgtggtctagcaaaaaatgtcattttacggatgagacaactgagactcagaattaagacacaagaggaatggcttactcatagtcattg

SEQ ID NO: 28358 - DNA, 122 bp, Homo sapiens
  misc_feature (61)..(62): /note="This region represents a CpG dinucleotide"
  misc_feature (61)..(61): /note="Nucleotide may be methylated to form 5-methylcytosine"
aatatactatagtgtcactggagccacaactggattatggatgtgactcacctagtgatgcgccatccttttcaataacatctgataattgcagagatgactacatcagactagttgagcca

SEQ ID NO: 28359 - DNA, 122 bp, Homo sapiens
  misc_feature (61)..(62): /note="This region represents a CpG dinucleotide"
  misc_feature (61)..(61): /note="Nucleotide may be methylated to form 5-methylcytosine"
aacagagctgttttttacactggctgttaccctgtagatacatgcatggcttgttgtctccgtccagtctttgctttttaaatgtcagtttcttaaaaagatgtgcctattttatttaaaac

SEQ ID NO: 28360 - DNA, 122 bp, Homo sapiens
  misc_feature (61)..(62): /note="This region represents a CpG dinucleotide"
  misc_feature (61)..(61): /note="Nucleotide may be methylated to form 5-methylcytosine"
gattttttttttttttcctggtgcggaaaggcctggtggtctctgggactctccagttatcgagcgttcccaccctacagcgtccgcccaggcgcaggcctgcccctagttcaggagtgaac

SEQ ID NO: 28361 - DNA, 122 bp, Homo sapiens
  misc_feature (61)..(62): /note="This region represents a CpG dinucleotide"
  misc_feature (61)..(61): /note="Nucleotide may be methylated to form 5-methylcytosine"
aacaactatgtacataagagccaccttgtaggctaagagtttaacgttgtttaaacacagcgtttgaggcaaacagtagcaacagcagcagcaaatgcaccaaactgacgaaaagacccaga

SEQ ID NO: 28362 - DNA, 122 bp, Homo sapiens
  misc_feature (61)..(62): /note="This region represents a CpG dinucleotide"
  misc_feature (61)..(61): /note="Nucleotide may be methylated to form 5-methylcytosine"
ataattatttgactacattttactattatctgtgctctgaagattacttgcttctacttacgtctggtatggtggaaataccatataataatgtgtgactaagcatctcttcccaactccat

SEQ ID NO: 28363 - DNA, 122 bp, Homo sapiens
  misc_feature (61)..(62): /note="This region represents a CpG dinucleotide"
  misc_feature (61)..(61): /note="Nucleotide may be methylated to form 5-methylcytosine"
cactgcacaatgtaaacttttgaccctcaactttttgacctgcagttgtaacgcactaaccgcaaagatacacaaagccgagcctcttctttcagggggaaggggccccccagcatctcagg

SEQ ID NO: 28364 - DNA, 122 bp, Homo sapiens
  misc_feature (61)..(62): /note="This region represents a CpG dinucleotide"
  misc_feature (61)..(61): /note="Nucleotide may be methylated to form 5-methylcytosine"
cgaactgagaaaactcgtgaagtaacccctgtccttcttcgagatctgattcgtagatttcgaccgcccttatggatcggctcagacaacgggcctgcatttttggctgccttggtacagaa

SEQ ID NO: 28365 - DNA, 122 bp, Homo sapiens
  misc_feature (61)..(62): /note="This region represents a CpG dinucleotide"
  misc_feature (61)..(61): /note="Nucleotide may be methylated to form 5-methylcytosine"
gaagagccacatgaaatcaagaggagacactttggcgttcttcaagcagaactgaggctgcgaaaaatccaagtctctacagagacactgatgaagttgaaagggtaattgtttttccatgc

SEQ ID NO: 28366 - DNA, 122 bp, Homo sapiens
  misc_feature (61)..(62): /note="This region represents a CpG dinucleotide"
  misc_feature (61)..(61): /note="Nucleotide may be methylated to form 5-methylcytosine"
gtccaataccatggttgatctcatgggcaaccttgtccatgccgtggttgagcccctggacgcctttgtccaactccttgccggtgtggctccccatgttgctaagtccgttgaaaaccttc

SEQ ID NO: 28367 - DNA, 122 bp, Homo sapiens
  misc_feature (61)..(62): /note="This region represents a CpG dinucleotide"
  misc_feature (61)..(61): /note="Nucleotide may be methylated to form 5-methylcytosine"
ctcagtggtgtcttttttacagcccagagccgcacatgtcctgtccgtgttccggtcctgcggtgactcacagtcacatcacagtgcaggcagacgctcccctgacagcccattggctcttc

SEQ ID NO: 28368 - DNA, 122 bp, Homo sapiens
  misc_feature (61)..(62): /note="This region represents a CpG dinucleotide"
  misc_feature (61)..(61): /note="Nucleotide may be methylated to form 5-methylcytosine"
gaactacaggccctggtggggcctgctccctgtcgccagcaaagttgctgagagagcacacgccagccacggtggtgaagtcatagaaatgctatgcccccacaggccacaggaattgtgga

SEQ ID NO: 28369 - DNA, 122 bp, Homo sapiens
  misc_feature (61)..(62): /note="This region represents a CpG dinucleotide"
  misc_feature (61)..(61): /note="Nucleotide may be methylated to form 5-methylcytosine"
cccgggggccacagtgtgcggcgcgttccttcattcttgtatggaccccagtgcccaggacgttccttgactgctctgtgagcagggggaggagggctggagggagcgggtgggggggcagt

SEQ ID NO: 28370 - DNA, 122 bp, Homo sapiens
  misc_feature (61)..(62): /note="This region represents a CpG dinucleotide"
  misc_feature (61)..(61): /note="Nucleotide may be methylated to form 5-methylcytosine"
ctattcagttcctgagtcaccatgattactagccagtgtcacaaatctctgagatttagacgaatctgattactgcttctgctctcactgaccttggcattaactgttaagtgccactacag

SEQ ID NO: 28371 - DNA, 122 bp, Homo sapiens
  misc_feature (61)..(62): /note="This region represents a CpG dinucleotide"
  misc_feature (61)..(61): /note="Nucleotide may be methylated to form 5-methylcytosine"
ttctggaaatttcataatattggggccaaggagaaaattctacagtcttaaagcaggggtcgggggaacaatttatatagaaagcatgaagagttaaaatagctttgaatgtctcaacagcc

SEQ ID NO: 28372 - DNA, 122 bp, Homo sapiens
  misc_feature (61)..(62): /note="This region represents a CpG dinucleotide"
  misc_feature (61)..(61): /note="Nucleotide may be methylated to form 5-methylcytosine"
ggagctataaaaggcctgggtggggcgggcgcggcggcaggacagccgagttcaggtgagcggttgctcgtcgtcggggcggccggcagcggcggctccagggcccagcatgcgcgggggac

SEQ ID NO: 28373 - DNA, 122 bp, Homo sapiens
  misc_feature (61)..(62): /note="This region represents a CpG dinucleotide"
  misc_feature (61)..(61): /note="Nucleotide may be methylated to form 5-methylcytosine"
aggtaatggaggggggagttccctgatcctgggactgaatgggtgcttcagcattagctgcgcctgtagaagtcctgtgatagccgagcaccctccctcagatggcctgttgagattggcag

SEQ ID NO: 28374 - DNA, 122 bp, Homo sapiens
  misc_feature (61)..(62): /note="This region represents a CpG dinucleotide"
  misc_feature (61)..(61): /note="Nucleotide may be methylated to form 5-methylcytosine"
cccacacttgactggaaactcatctttctaatccagtgtagtatctccagctcctgcccccgaggtcaggactcaggaaaagtttgtcacgtgaaggagggagggatgctgtatggcttact

SEQ ID NO: 28375 - DNA, 122 bp, Homo sapiens
  misc_feature (61)..(62): /note="This region represents a CpG dinucleotide"
  misc_feature (61)..(61): /note="Nucleotide may be methylated to form 5-methylcytosine"
tttaatcctttcagatacacctgcacatgattaatattcccatttaacagatgtgaacaccgaggaaaggtgggattaggacgttaggacatttgtcatgctcatacactataattgaaatg

SEQ ID NO: 28376 - DNA, 122 bp, Homo sapiens
  misc_feature (61)..(62): /note="This region represents a CpG dinucleotide"
  misc_feature (61)..(61): /note="Nucleotide may be methylated to form 5-methylcytosine"
ccatcacgttgtcagccaggttctttgcaaagcacggatgtgatgaaactacccaaggctcgtggaagaaccacctgaggggatcagaagtataacaatatatgtcattcacgtgcagagcc

SEQ ID NO: 28377 - DNA, 122 bp, Homo sapiens
  misc_feature (61)..(62): /note="This region represents a CpG dinucleotide"
  misc_feature (61)..(61): /note="Nucleotide may be methylated to form 5-methylcytosine"
caggctgtcaatgtacctttgaccaaattgcagcttgcattcccataccaaatgtggtttcgcagaaccccagctcactctaacagaaccagctgggaccagagagggtcctggtttgctct

SEQ ID NO: 28378 - DNA, 122 bp, Homo sapiens
  misc_feature (61)..(62): /note="This region represents a CpG dinucleotide"
  misc_feature (61)..(61): /note="Nucleotide may be methylated to form 5-methylcytosine"
tccatccgtgggaccactctgttttccagtactggcccacaatagcctcactgggcagctcgcagacataaccactcctgctggagatagatgctggcccacagagaccagctggaactgcg

SEQ ID NO: 28379 - DNA, 122 bp, Homo sapiens
  misc_feature (61)..(62): /note="This region represents a CpG dinucleotide"
  misc_feature (61)..(61): /note="Nucleotide may be methylated to form 5-methylcytosine"
gggaaaaagtactgtgactttctgtggatatcttccagcgatctcatcatgacttcttggcgttttctaatgaggtgatgtagtaggtttcaggtgataaaataacaagagcactgggtgga

SEQ ID NO: 28380 - DNA, 122 bp, Homo sapiens
  misc_feature (61)..(62): /note="This region represents a CpG dinucleotide"
  misc_feature (61)..(61): /note="Nucleotide may be methylated to form 5-methylcytosine"
aattctagcagattccatgcagcatgatggatgatgtgcatggcaggtcttggggtgcggcgtgacaaaggaagcacatttgaaggaaaacccagaaaggtgtggcattatgagtagggaga

SEQ ID NO: 28381 - DNA, 122 bp, Homo sapiens
  misc_feature (61)..(62): /note="This region represents a CpG dinucleotide"
  misc_feature (61)..(61): /note="Nucleotide may be methylated to form 5-methylcytosine"
ttattgctcaatagcattccattgtggctaaaccacaattagcttctccattatcttgttcgtggacatttgggttgttctagtgtttggcaattgtgaatcaggctactgtaaacattctt

SEQ ID NO: 28382 - DNA, 122 bp, Homo sapiens
  misc_feature (61)..(62): /note="This region represents a CpG dinucleotide"
  misc_feature (61)..(61): /note="Nucleotide may be methylated to form 5-methylcytosine"
ttgaagtaaggcgaattgaagtccgctggtctccagacaggcacggtaacgtgcacgcatcggatgtggttcccggggaatggtgggtgattgtccatcttcctaacagtcctcaaatgagg

SEQ ID NO: 28383 - DNA, 122 bp, Homo sapiens
  misc_feature (61)..(62): /note="This region represents a CpG dinucleotide"
  misc_feature (61)..(61): /note="Nucleotide may be methylated to form 5-methylcytosine"
gcacgggccagccccttattctaatgttagggtttatctcacttgacctcttgtcccttgcgtgcccttctttatgcaaacccaagaggagtaaatcccctgcatgctagggattaattact

SEQ ID NO: 28384 - DNA, 122 bp, Homo sapiens
  misc_feature (61)..(62): /note="This region represents a CpG dinucleotide"
  misc_feature (61)..(61): /note="Nucleotide may be methylated to form 5-methylcytosine"
agagctggcaatcgaaaatggtgtggtcagaaagacaatgacatccgcccacttcctcgacgccagctgagctcccaggatgtgcctcaagtcatcctgggccacctggcctcaaccatgcc

SEQ ID NO: 28385 - DNA, 122 bp, Homo sapiens
  misc_feature (61)..(62): /note="This region represents a CpG dinucleotide"
  misc_feature (61)..(61): /note="Nucleotide may be methylated to form 5-methylcytosine"
tcccaagtatgtctgattcagagcctgtgcaatttcctagcaggtcaaaataatgaaggacgcattgccagggtctcctgttccagtgtagcctgcttccttgaggtccctgtacatctcat

SEQ ID NO: 28386 - DNA, 122 bp, Homo sapiens
  misc_feature (61)..(62): /note="This region represents a CpG dinucleotide"
  misc_feature (61)..(61): /note="Nucleotide may be methylated to form 5-methylcytosine"
tagtcccaaacaggaggagaaagggcaatgttacttagcttccggtgcctagaggatctgcgtgttctctgtccagtcccaatgttaccgggccttggtttacttcctccattcaggtccct

SEQ ID NO: 28387 - DNA, 122 bp, Homo sapiens
  misc_feature (61)..(62): /note="This region represents a CpG dinucleotide"
  misc_feature (61)..(61): /note="Nucleotide may be methylated to form 5-methylcytosine"
ttctctctttgcatcactgcccacagcagtggggcaggccaggccccattctggtggccacgttcaggctctcaaagcccagcctggggcagagtcccaaaccacctatggcctaggatgga

SEQ ID NO: 28388 - DNA, 122 bp, Homo sapiens
  misc_feature (61)..(62): /note="This region represents a CpG dinucleotide"
  misc_feature (61)..(61): /note="Nucleotide may be methylated to form 5-methylcytosine"
gcttggcccggccccaggggggcagggctcccaattgggggtggagggtggcctgggcaacgggcagcagctcctgcccctggggccccggccacacggaagtggctgttgaagaggaagct

SEQ ID NO: 28389 - DNA, 122 bp, Homo sapiens
  misc_feature (61)..(62): /note="This region represents a CpG dinucleotide"
  misc_feature (61)..(61): /note="Nucleotide may be methylated to form 5-methylcytosine"
caaacaaacaagaaaataatttatgaaagtcaagagcctgataaacagtcaccacccattcgtaatctgtgctgccacacctctagccagcagatctgccatcttttgaaatgagtatcaac

SEQ ID NO: 28390 - DNA, 122 bp, Homo sapiens
  misc_feature (61)..(62): /note="This region represents a CpG dinucleotide"
  misc_feature (61)..(61): /note="Nucleotide may be methylated to form 5-methylcytosine"
ctgaggcccttccagtgtcttttgtttcaaagcactcagcacgtcaaggtgccacaatttcgggtattgtgttttgagccctgtcagaggcagtatgtctcttttagccaacttttagtttt

SEQ ID NO: 28391 - DNA, 122 bp, Homo sapiens
  misc_feature (61)..(62): /note="This region represents a CpG dinucleotide"
  misc_feature (61)..(61): /note="Nucleotide may be methylated to form 5-methylcytosine"
tcctatttcatcatttgtgcttatctcatttttctccaaacttacttagtctgttctcaacgttagaaccaaagaatcaagtgttggtaagttgatacatagctctacttaactctttagga

SEQ ID NO: 28392 - DNA, 122 bp, Homo sapiens
  misc_feature (61)..(62): /note="This region represents a CpG dinucleotide"
  misc_feature (61)..(61): /note="Nucleotide may be methylated to form 5-methylcytosine"
taagagaggctcacctatagatcaggaagccaactgactcatttcccgtgagaagtgtcacggctcagtgggtcagcctttcacatcattactgccggtgtctcctttccctggagaaaagc

SEQ ID NO: 28393 - DNA, 122 bp, Homo sapiens
  misc_feature (61)..(62): /note="This region represents a CpG dinucleotide"
  misc_feature (61)..(61): /note="Nucleotide may be methylated to form 5-methylcytosine"
aagggtttcacgggctatgactaaagccaggcctggtttacttgtttcctcactccagaccgatatgctttctgagacattctctgaggcagatttggggcctactttagggtttattttaa

SEQ ID NO: 28394 - DNA, 122 bp, Homo sapiens
  misc_feature (61)..(62): /note="This region represents a CpG dinucleotide"
  misc_feature (61)..(61): /note="Nucleotide may be methylated to form 5-methylcytosine"
acagcctggggcagacattcttgtttcttttgttcacttgtccattagcagtgctctaagcgcagagcccagcacacaggaagtgctcaagaaaaggattgttgaatgaatgaatgagcctc

SEQ ID NO: 28395 - DNA, 122 bp, Homo sapiens
  misc_feature (61)..(62): /note="This region represents a CpG dinucleotide"
  misc_feature (61)..(61): /note="Nucleotide may be methylated to form 5-methylcytosine"
cttccgtctcagcgagaggagtgtggtcacctcaggctgttctcccaacagggatctccacgacacaccaggggcccaggccctgcccttatgggtggcttcctgataaatgcttgttgaaa

SEQ ID NO: 28396 - DNA, 122 bp, Homo sapiens
  misc_feature (61)..(62): /note="This region represents a CpG dinucleotide"
  misc_feature (61)..(61): /note="Nucleotide may be methylated to form 5-methylcytosine"
ggagcagtttagctggtgagtcaagatgtcacttgaggccgcagtcatctgaaggcttgacggaggctgaaagacctgttaccaagataattcacttgcatagctgttgcagaggcctcatt

SEQ ID NO: 28397 - DNA, 122 bp, Homo sapiens
  misc_feature (61)..(62): /note="This region represents a CpG dinucleotide"
  misc_feature (61)..(61): /note="Nucleotide may be methylated to form 5-methylcytosine"
aagaatgaatgagtccttattcctcaccactgtcaagcagggcctgaggttcctgagatacgagatcagcctgagtttccatggaagggcaaggtgctctctggtctcctgggtgcagactc

SEQ ID NO: 28398 - DNA, 122 bp, Homo sapiens
  misc_feature (61)..(62): /note="This region represents a CpG dinucleotide"
  misc_feature (61)..(61): /note="Nucleotide may be methylated to form 5-methylcytosine"
gaactgtgggaaaaaccctgccttcaagggtttccaggccatgggaagcctaggatataacgcaggcaacttcagaatcatcagtccaccttgggatggtcagcccataaggatgaagaaac

SEQ ID NO: 28399 - DNA, 122 bp, Homo sapiens
  misc_feature (61)..(62): /note="This region represents a CpG dinucleotide"
  misc_feature (61)..(61): /note="Nucleotide may be methylated to form 5-methylcytosine"
gggtctgctctgcttaactgtgctgccgttagctgaggtttccagatcttatcactgatccgtacaacctgaaagagcctaactgactgagcaggggttagagttgaactggaaagagacca

SEQ ID NO: 28400 - DNA, 122 bp, Homo sapiens
  misc_feature (61)..(62): /note="This region represents a CpG dinucleotide"
  misc_feature (61)..(61): /note="Nucleotide may be methylated to form 5-methylcytosine"
cattgggcaggtgtatgcagatcctgactgccttccccgaacactggactttggcctcaacgtgaagcttttctgggagaagtttgttcccacagattgtcccccggccttcttcccgctgg

SEQ ID NO: 28401 - DNA, 122 bp, Homo sapiens
  misc_feature (61)..(62): /note="This region represents a CpG dinucleotide"
  misc_feature (61)..(61): /note="Nucleotide may be methylated to form 5-methylcytosine"
gataacaccaggagacaccctgggtggatttcctgaaccgaccgatagatgagccttccacgcgggagacctggatccttatcgtctttgtggccccttccatctgcacgtgcggacgaggt

SEQ ID NO: 28402 - DNA, 122 bp, Homo sapiens
  misc_feature (61)..(62): /note="This region represents a CpG dinucleotide"
  misc_feature (61)..(61): /note="Nucleotide may be methylated to form 5-methylcytosine"
ggttggaggtgtgttggagctggggtctcctgtcagctctgccgtggagctgggaacacacgcagcagggaccacgggatggggaaaagcttccctaatcagtctgcttaaaaacaataaca

SEQ ID NO: 28403 - DNA, 122 bp, Homo sapiens
  misc_feature (61)..(62): /note="This region represents a CpG dinucleotide"
  misc_feature (61)..(61): /note="Nucleotide may be methylated to form 5-methylcytosine"
gccagaaggacaaggaggtagaaaggaattgcaaccagaatctatggtgtatggttaatacgtgttacatgctaactgcaatgaggtcttgaatgccgagttgctcacagactcacccagca

SEQ ID NO: 28404 - DNA, 122 bp, Homo sapiens
  misc_feature (61)..(62): /note="This region represents a CpG dinucleotide"
  misc_feature (61)..(61): /note="Nucleotide may be methylated to form 5-methylcytosine"
tttggggtcactacaaattcattgagtggcttacctcttcttttcctaatgttatgagaacgtcttcagtcaagggaattgctacaaaaacaaaacaaaacaaagttacacatatatttagt

SEQ ID NO: 28405 - DNA, 122 bp, Homo sapiens
  misc_feature (61)..(62): /note="This region represents a CpG dinucleotide"
  misc_feature (61)..(61): /note="Nucleotide may be methylated to form 5-methylcytosine"
tccaagtagtatgttatatatattttgttcttctaaatgctcttctgtcgttgtcagaggcgcagtagctaatttataacttttcctttgagggaatccagatgaaaggcccagattgctct

SEQ ID NO: 28406 - DNA, 122 bp, Homo sapiens
  misc_feature (61)..(62): /note="This region represents a CpG dinucleotide"
  misc_feature (61)..(61): /note="Nucleotide may be methylated to form 5-methylcytosine"
cttgggcaacgtaggagacctccgtctccacaagtaaaattaattagccggctgtggtggcgcgcacctgtggtcccagctactcaggaggctgaggtaggaggatcacctgagcccgggag

SEQ ID NO: 28407 - DNA, 122 bp, Homo sapiens
  misc_feature (61)..(62): /note="This region represents a CpG dinucleotide"
  misc_feature (61)..(61): /note="Nucleotide may be methylated to form 5-methylcytosine"
tgtgtctgccttcccctgctctaattaagaatcatcctgtggactgggtgcggtggctcacgcctgtaatcctagcactttgggaggcaggggcgggcggatcacgaggtcaggagatctct

SEQ ID NO: 28408 - DNA, 122 bp, Homo sapiens
  misc_feature (61)..(62): /note="This region represents a CpG dinucleotide"
  misc_feature (61)..(61): /note="Nucleotide may be methylated to form 5-methylcytosine"
aaacaacttacagaattcaacaccccaccacccaggtctatgatggtgatcacctgtacacgactctgcactccagtgactacgtcactcagtggtaacagagagcaaagctctaccatctg

SEQ ID NO: 28409 - DNA, 122 bp, Homo sapiens
  misc_feature (61)..(62): /note="This region represents a CpG dinucleotide"
  misc_feature (61)..(61): /note="Nucleotide may be methylated to form 5-methylcytosine"
ctcttcaaaaaggctgtgcaaaattacagtcctgataacagctacccagagatcctgtaacggcatttgccctcatcattattattattattattattattattattattatttgaatttga

SEQ ID NO: 28410 - DNA, 122 bp, Homo sapiens
  misc_feature (61)..(62): /note="This region represents a CpG dinucleotide"
  misc_feature (61)..(61): /note="Nucleotide may be methylated to form 5-methylcytosine"
ggtatttatttttctttgcctgtgaaagccctgttttcgctcaggctgtgtagggcttcccgacactgccatgggtgcgcacatctgcacactctggggtgcctgccatgcagaggcatctg

SEQ ID NO: 28411 - DNA, 122 bp, Homo sapiens
  misc_feature (61)..(62): /note="This region represents a CpG dinucleotide"
  misc_feature (61)..(61): /note="Nucleotide may be methylated to form 5-methylcytosine"
ttggttaagatatggctgagggaggcatagggattttttttcaatggtagtcaccacagacggttgagggtaaattggcgttgttctcaataagggttattgtgaccatggtccaaagtctg

SEQ ID NO: 28412 - DNA, 122 bp, Homo sapiens
  misc_feature (61)..(62): /note="This region represents a CpG dinucleotide"
  misc_feature (61)..(61): /note="Nucleotide may be methylated to form 5-methylcytosine"
cctgcactcatcacatatgcagtgtgtgtcctcagctgttcctcagaaagcaaatataggcgccagcgaggccattgtgctctgagcagctctgtcaccccatcagacccggctggcacaat

SEQ ID NO: 28413 - DNA, 122 bp, Homo sapiens
  misc_feature (61)..(62): /note="This region represents a CpG dinucleotide"
  misc_feature (61)..(61): /note="Nucleotide may be methylated to form 5-methylcytosine"
attactcaggacatcctggcaaacacctttcaagcaagtcaccacaagggcctgtatagacggtagtgatgatgagaggagccaactttagcaccaatgctatttagcagtagaagggtaga

SEQ ID NO: 28414 - DNA, 122 bp, Homo sapiens
  misc_feature (61)..(62): /note="This region represents a CpG dinucleotide"
  misc_feature (61)..(61): /note="Nucleotide may be methylated to form 5-methylcytosine"
aaatatgggttctgattccgaaagtctacgtggaaccccaaagttcccaggtgataagttcgctggtctacactttgagaagcaagactgtagtctgtaacaatagtttcctaatagccaga

SEQ ID NO: 28415 - DNA, 122 bp, Homo sapiens
  misc_feature (61)..(62): /note="This region represents a CpG dinucleotide"
  misc_feature (61)..(61): /note="Nucleotide may be methylated to form 5-methylcytosine"
taacacatggctccatttgtgtctatttccacctagcgtattgtgaatattttctacaggcgcacactaatcaccaactgaagtgagaatcacattttcctccacttggcttggtactacag

SEQ ID NO: 28416 - DNA, 122 bp, Homo sapiens
  misc_feature (61)..(62): /note="This region represents a CpG dinucleotide"
  misc_feature (61)..(61): /note="Nucleotide may be methylated to form 5-methylcytosine"
cagagagggctgagccacccactcatactccccaccgcgtcacacagggtgtgagtgacacggcctcaggggaagacccctctatgctggggctgcaataaacccctgtgctgggcccattc

SEQ ID NO: 28417 - DNA, 122 bp, Homo sapiens
  misc_feature (61)..(62): /note="This region represents a CpG dinucleotide"
  misc_feature (61)..(61): /note="Nucleotide may be methylated to form 5-methylcytosine"
gacccttatttgatcgttcctctctcagaccaagacacagtgcctgtcctcaggatgccacgtgtctatttagaaagacagacaggcaagtcggtgcctatgagtcactgatgagggcccga

SEQ ID NO: 28418 - DNA, 122 bp, Homo sapiens
  misc_feature (61)..(62): /note="This region represents a CpG dinucleotide"
  misc_feature (61)..(61): /note="Nucleotide may be methylated to form 5-methylcytosine"
gctgcctgggtttacaatttataaaatgctttcacaactatgacctcatttgacttccaccgtcaccctgacaggcaggtacggcagacctgactgtcatctcatagacaacgaaactcagg

SEQ ID NO: 28419 - DNA, 122 bp, Homo sapiens
  misc_feature (61)..(62): /note="This region represents a CpG dinucleotide"
  misc_feature (61)..(61): /note="Nucleotide may be methylated to form 5-methylcytosine"
tcagggttggaggaagccggacaaagatgaatgggattcagagcctgaactcaaggtcaacgtcttctgaatcacaaagagctggtgggtcagtctgggagaagaaagaaaattctgcgcca

SEQ ID NO: 28420 - DNA, 122 bp, Homo sapiens
  misc_feature (61)..(62): /note="This region represents a CpG dinucleotide"
  misc_feature (61)..(61): /note="Nucleotide may be methylated to form 5-methylcytosine"
gttggctgtgcaggtgaggcagatggcatggcttgtgcttattttgtttggattagagagcgctgcactcactcagaagtcctcagttgagtcgcagatctgtgacttagtcacactgtgac

SEQ ID NO: 28421 - DNA, 122 bp, Homo sapiens
  misc_feature (61)..(62): /note="This region represents a CpG dinucleotide"
  misc_feature (61)..(61): /note="Nucleotide may be methylated to form 5-methylcytosine"
tccccgacatctggtggttttcaaaggacaatgctcagaccagtgcaccaggaagtgggccgggcgagtgatctgcagtccatcgggatgtccaggagatgctgacacaggctgagaagctc

SEQ ID NO: 28422 - DNA, 122 bp, Homo sapiens
  misc_feature (61)..(62): /note="This region represents a CpG dinucleotide"
  misc_feature (61)..(61): /note="Nucleotide may be methylated to form 5-methylcytosine"
tctgggtggaccaaggccacgtagtcattgcaggtggtgacattgcccaaggctgagagccgctcctccacccgcctaatctgcactgtgtctgggaggctgttgcgaatgtgttgcagctc

SEQ ID NO: 28423 - DNA, 122 bp, Homo sapiens
  misc_feature (61)..(62): /note="This region represents a CpG dinucleotide"
  misc_feature (61)..(61): /note="Nucleotide may be methylated to form 5-methylcytosine"
ggaggtggggcctgtccctcctcccacctgggagattaaaagagttagaaaggccctttacgatgacctagtccaacccactcattgtacagattgggaaactggggcccagcgagattact

SEQ ID NO: 28424 - DNA, 122 bp, Homo sapiens
  misc_feature (61)..(62): /note="This region represents a CpG dinucleotide"
  misc_feature (61)..(61): /note="Nucleotide may be methylated to form 5-methylcytosine"
attatgaatcagactttgcttgtaaaagcacagctttggaacttgcagtgtggctatttccgcttttcatttcatcttctaactccagaaggaaaaggaactgtctatgtgagtttcctgct

SEQ ID NO: 28425 - DNA, 122 bp, Homo sapiens
  misc_feature (61)..(62): /note="This region represents a CpG dinucleotide"
  misc_feature (61)..(61): /note="Nucleotide may be methylated to form 5-methylcytosine"
cctaggccttgctgccaacaagcgtcaatcttgatttttgaaaaggtccaaggatgattacgacgtgcgtaggttgcgaaccatcgaaaagcacccaccaatgtgtcaacctggcaactcag

SEQ ID NO: 28426 - DNA, 122 bp, Homo sapiens
  misc_feature (61)..(62): /note="This region represents a CpG dinucleotide"
  misc_feature (61)..(61): /note="Nucleotide may be methylated to form 5-methylcytosine"
tcttacttaatccttcctttgtaaacattagctatttagacctgaggaagtactctaggacgtggagggaattttccaagaaggaaataggaatagttctagcattacaaaactaaatcagg

SEQ ID NO: 28427 - DNA, 122 bp, Homo sapiens
  misc_feature (61)..(62): /note="This region represents a CpG dinucleotide"
  misc_feature (61)..(61): /note="Nucleotide may be methylated to form 5-methylcytosine"
aagtaaatactaaggaatgttatctctcaaattggaagcagtttaacaaatctttaatctcgcccttttcccacagagatgactgatttagtaaatgttactagttaaggaattaatgctaa

SEQ ID NO: 28428 - DNA, 122 bp, Homo sapiens
  misc_feature (61)..(62): /note="This region represents a CpG dinucleotide"
  misc_feature (61)..(61): /note="Nucleotide may be methylated to form 5-methylcytosine"
cattctgtgtgtttgcatacattaatcagatttagagatgatagccttagctctgtgccccggcaaagataagaactatataatacttttttttaaacaaaaatttcacaagaattttacag

SEQ ID NO: 28429 - DNA, 122 bp, Homo sapiens
  misc_feature (61)..(62): /note="This region represents a CpG dinucleotide"
  misc_feature (61)..(61): /note="Nucleotide may be methylated to form 5-methylcytosine"
ggcaggaagaaaacctgattactgctgtccacaggcccagagtagaaatgtttcaaaagacggaaggaaaagctgttttgaatctgctgatatatcatggtttgcccccagacaatcccagt

SEQ ID NO: 28430 - DNA, 122 bp, Homo sapiens
  misc_feature (61)..(62): /note="This region represents a CpG dinucleotide"
  misc_feature (61)..(61): /note="Nucleotide may be methylated to form 5-methylcytosine"
tggcaagctgaagtgtgacaaaagaataatgaatcacagatatatctaaaataagctctacgccatcacagtagttttgaattagcagccaatggtagtggtggtaatctcctcccccttca

SEQ ID NO: 28431 - DNA, 122 bp, Homo sapiens
  misc_feature (61)..(62): /note="This region represents a CpG dinucleotide"
  misc_feature (61)..(61): /note="Nucleotide may be methylated to form 5-methylcytosine"
cctctgatacctggagcctgtcttctgctaacaagcctgtgttcaggggcctgtgctcagcgtgctcgtggagtctggcctcccaccttctccctccctgctggggagaggaggggcaacag

SEQ ID NO: 28432 - DNA, 122 bp, Homo sapiens
  misc_feature (61)..(62): /note="This region represents a CpG dinucleotide"
  misc_feature (61)..(61): /note="Nucleotide may be methylated to form 5-methylcytosine"
tttaaagctattgtcccagaatacgtggtgtgttttttgaggaggaggaagatctatccacggcacacatcaggaagaggtggttaaaggtcagagagttattctgcagaaaatccatctga

SEQ ID NO: 28433 - DNA, 122 bp, Homo sapiens
  misc_feature (61)..(62): /note="This region represents a CpG dinucleotide"
  misc_feature (61)..(61): /note="Nucleotide may be methylated to form 5-methylcytosine"
tactcatctggccagccctggcccaagatgcacagaactctaagagcgaaccctgagccgcggagtatactactgacagaaacatggcaggcaggaaaaatgaccctcacttcctctaggcc

SEQ ID NO: 28434 - DNA, 122 bp, Homo sapiens
  misc_feature (61)..(62): /note="This region represents a CpG dinucleotide"
  misc_feature (61)..(61): /note="Nucleotide may be methylated to form 5-methylcytosine"
aaagagcaagtcaatgagaacctgctgggcaggcatggaatctgactcaggagtcactggcgtggcactggtgcagggtgtgaggatcagacacagggtcctccactgccacaggccaggcc

SEQ ID NO: 28435 - DNA, 122 bp, Homo sapiens
  misc_feature (61)..(62): /note="This region represents a CpG dinucleotide"
  misc_feature (61)..(61): /note="Nucleotide may be methylated to form 5-methylcytosine"
ctgggaggtagcaccacggtttctcagcagtgttcgtgcaaattatcactataatgcacccgtgcaggcccagcagcctgtgcaagtatcacagcaccatacagacatgaattcatgtgtct

SEQ ID NO: 28436 - DNA, 122 bp, Homo sapiens
  misc_feature (61)..(62): /note="This region represents a CpG dinucleotide"
  misc_feature (61)..(61): /note="Nucleotide may be methylated to form 5-methylcytosine"
aactgagtcacttataatgttcttcaggaagcatattaaaagttcttcactcagctcttacgctttccctttctcattcttcctgcctcttgatctcttgtttttaaaatcttcctccttat

SEQ ID NO: 28437 - DNA, 122 bp, Homo sapiens
  misc_feature (61)..(62): /note="This region represents a CpG dinucleotide"
  misc_feature (61)..(61): /note="Nucleotide may be methylated to form 5-methylcytosine"
tgagcactttgtgtacattaatctaatttaatcctcatagcagccacgtgaggtagctaccgctgaactgaggcttagtaagattaagtaacttgcccaaggtcatacagctagtaagtggc

SEQ ID NO: 28438 - DNA, 122 bp, Homo sapiens
  misc_feature (61)..(62): /note="This region represents a CpG dinucleotide"
  misc_feature (61)..(61): /note="Nucleotide may be methylated to form 5-methylcytosine"
ggttacatgagttccttctcagacccttctctgtgtgtccaccttggggtgatgtgtgtgcgtgaaccaacctgccgaaaattaaacagacaaaagaaaaaaaatatgaaaacaaaaagagc

SEQ ID NO: 28439 - DNA, 122 bp, Homo sapiens
  misc_feature (61)..(62): /note="This region represents a CpG dinucleotide"
  misc_feature (61)..(61): /note="Nucleotide may be methylated to form 5-methylcytosine"
aagatgcctctgcctttggaacttgaacacttgtactaccactccctgagttaccatggacgctatccagttgtctggctgctaccagaatttcaggagctcccactgggctgtgcagaaac

SEQ ID NO: 28440 - DNA, 122 bp, Homo sapiens
  misc_feature (61)..(62): /note="This region represents a CpG dinucleotide"
  misc_feature (61)..(61): /note="Nucleotide may be methylated to form 5-methylcytosine"
tctgaattgaaatgagatggggtggtaccaaggtatcagcttgtccttattctgaaattacggtttgtgggtaatatcatttgagtcagtctttaaaaggttaacaggctgggcgtggtgac

SEQ ID NO: 28441 - DNA, 122 bp, Homo sapiens
  misc_feature (61)..(62): /note="This region represents a CpG dinucleotide"
  misc_feature (61)..(61): /note="Nucleotide may be methylated to form 5-methylcytosine"
taaacttctgcttataatgtatgagactttctgtttcatgggtgtgggtttttaaaccaacgatactggcctatttagaaaggacagagttttattttcaaaatacacaaaactttgacccc

SEQ ID NO: 28442 - DNA, 122 bp, Homo sapiens
  misc_feature (61)..(62): /note="This region represents a CpG dinucleotide"
  misc_feature (61)..(61): /note="Nucleotide may be methylated to form 5-methylcytosine"
tatttgaaacctgtttacatcttcagaacattcctggcctgatgattagatagcaaaatccgtctgtaaagctgactgtgaagttaccaaactcaaccattattttattataatttgttaaa

SEQ ID NO: 28443 - DNA, 122 bp, Homo sapiens
  misc_feature (61)..(62): /note="This region represents a CpG dinucleotide"
  misc_feature (61)..(61): /note="Nucleotide may be methylated to form 5-methylcytosine"
gtgaagggaagggtggaagattggacttgggtggatgtggaggcattggcaataactcctcgctaggttttagccttgagtaaatgaaagggtaaaagattccttgaccaagacaataaagc

SEQ ID NO: 28444 - DNA, 122 bp, Homo sapiens
  misc_feature (61)..(62): /note="This region represents a CpG dinucleotide"
  misc_feature (61)..(61): /note="Nucleotide may be methylated to form 5-methylcytosine"
aaatttgaaaaataaacaaactctttgctctcattttttccttttatcaaatgccttgaccgtccagacgcaggagagatgtttaacctgtgcaattgaagctattttgataacctttagct

SEQ ID NO: 28445 - DNA, 122 bp, Homo sapiens
  misc_feature (61)..(62): /note="This region represents a CpG dinucleotide"
  misc_feature (61)..(61): /note="Nucleotide may be methylated to form 5-methylcytosine"
tcacacttaagaaatgtactgccttaaatgttgtatcttcattagagtgcatgatctttccgtgtttattttgttaaatattgttaactttcatacttttcacagaagtcttccaattactc

SEQ ID NO: 28446 - DNA, 122 bp, Homo sapiens
  misc_feature (61)..(62): /note="This region represents a CpG dinucleotide"
  misc_feature (61)..(61): /note="Nucleotide may be methylated to form 5-methylcytosine"
ctcaggaaagctaagttggccgactatcacctcatgtcctgatggttatttatgatgactcggcagagattatgttccttgataaacacagaggaccaggtgtcagcttatattggaacagt

SEQ ID NO: 28447 - DNA, 122 bp, Homo sapiens
  misc_feature (61)..(62): /note="This region represents a CpG dinucleotide"
  misc_feature (61)..(61): /note="Nucleotide may be methylated to form 5-methylcytosine"
ctcctccgaggaaactaggatattgctgccttgcttaaaatctggctaagccctactccacgtgacatgcaaggccctttgtgacctggtcccttaggtcaagcctcccctcccactcctgc

SEQ ID NO: 28448 - DNA, 122 bp, Homo sapiens
  misc_feature (61)..(62): /note="This region represents a CpG dinucleotide"
  misc_feature (61)..(61): /note="Nucleotide may be methylated to form 5-methylcytosine"
tcagatgggacagcattgtgtaattgcagcttatttggcactcagggcccagctccagaacgttctattaaaccagctatatgtccactcggaagttatcagataattccaacacttgattt

SEQ ID NO: 28449 - DNA, 122 bp, Homo sapiens
  misc_feature (61)..(62): /note="This region represents a CpG dinucleotide"
  misc_feature (61)..(61): /note="Nucleotide may be methylated to form 5-methylcytosine"
agcaactctagtgtgaaactacgatgtcatgaaagttctctaaggatatttagaagctgacggcattaaataaggtgtcctaaagggaaaagggcaaactgtatttgaaatcttagtgaaca

SEQ ID NO: 28450 - DNA, 122 bp, Homo sapiens
  misc_feature (61)..(62): /note="This region represents a CpG dinucleotide"
  misc_feature (61)..(61): /note="Nucleotide may be methylated to form 5-methylcytosine"
tcttacttagagatttcaaagacctgaaaacaagtaatccaccctctgaaccactgagatcgcaattcacaatctctcacttggctgcttctagcaaagggtagagttctcgaccttccatt

SEQ ID NO: 28451 - DNA, 122 bp, Homo sapiens
  misc_feature (61)..(62): /note="This region represents a CpG dinucleotide"
  misc_feature (61)..(61): /note="Nucleotide may be methylated to form 5-methylcytosine"
ggagctgtataagtaggaggaaggggaggtgttacagaagccgctgtccatggtgccacacggacacttcagctccagcttgcagagcttgcaggactagggttattaaaagcctgacatgc

SEQ ID NO: 28452 - DNA, 122 bp, Homo sapiens
  misc_feature (61)..(62): /note="This region represents a CpG dinucleotide"
  misc_feature (61)..(61): /note="Nucleotide may be methylated to form 5-methylcytosine"
aaaggggtctgtctgggtttgcttgtcaccgcaagtgcagggctggacaggagcttgacacgtgctgggtgctcagtagatagttactgagcaggaagaaaggagggacagcagagagggag

SEQ ID NO: 28453 - DNA, 122 bp, Homo sapiens
  misc_feature (61)..(62): /note="This region represents a CpG dinucleotide"
  misc_feature (61)..(61): /note="Nucleotide may be methylated to form 5-methylcytosine"
atagtaactctaatcctttcactgaccctatgacacacggtattgtcatcctcatagatacggaaataaaggcatggagaagaatttgtccagtgtcacacagctaagcaaatggcacagtc

SEQ ID NO: 28454 - DNA, 122 bp, Homo sapiens
  misc_feature (61)..(62): /note="This region represents a CpG dinucleotide"
  misc_feature (61)..(61): /note="Nucleotide may be methylated to form 5-methylcytosine"
gatctgtcaggatatgggcttatatgccgcttccccccacccacctccctgaggttggtacgatttatgcttgtgcaggaacttgccctctaagttcaaggtggatgcacactgactctgcc

SEQ ID NO: 28455 - DNA, 122 bp, Homo sapiens
  misc_feature (61)..(62): /note="This region represents a CpG dinucleotide"
  misc_feature (61)..(61): /note="Nucleotide may be methylated to form 5-methylcytosine"
tcatggctcaggctccctgagtgtacagctggtttacttgactcatgagcaagatgcacacgtcacatctggctggcacgtctctgaagcctttttacatctctaggctttccccattcctc

SEQ ID NO: 28456 - DNA, 122 bp, Homo sapiens
  misc_feature (61)..(62): /note="This region represents a CpG dinucleotide"
  misc_feature (61)..(61): /note="Nucleotide may be methylated to form 5-methylcytosine"
tgggtgtgagtgttttgtggctctgaagtcctgtattctgactttgcttttcctttgcgccgcttgtctggtctaatgatctcactacggaaattatcaccagtcagcagactgtcattcgt

SEQ ID NO: 28457 - DNA, 122 bp, Homo sapiens
  misc_feature (61)..(62): /note="This region represents a CpG dinucleotide"
  misc_feature (61)..(61): /note="Nucleotide may be methylated to form 5-methylcytosine"
tattaacaagactgttcgccagagtactacatgcagcagcttaaaactcaaaggacttggcggtgctttatagccttctagaggagccggttctataattgataaaccccgatatacctcac

SEQ ID NO: 28458 - DNA, 122 bp, Homo sapiens
  misc_feature (61)..(62): /note="This region represents a CpG dinucleotide"
  misc_feature (61)..(61): /note="Nucleotide may be methylated to form 5-methylcytosine"
gaaaaacaatccatccataaaagtcttatctacagtgaaaaaaatgaatcatataagagacggcttcagaatgtacgtaaggtgtgctttgactagccaggaaaagaacctctccctgtgtg

SEQ ID NO: 28459 - DNA, 122 bp, Homo sapiens
  misc_feature (61)..(62): /note="This region represents a CpG dinucleotide"
  misc_feature (61)..(61): /note="Nucleotide may be methylated to form 5-methylcytosine"
aaggatacataactaccattgattgagagctcaccataaaaagccaggctttgtacaaagcgtttacgtgcattatctcattcaatcctcaaagacatcatggaggaaggaattactaacca

SEQ ID NO: 28460 - DNA, 122 bp, Homo sapiens
  misc_feature (61)..(62): /note="This region represents a CpG dinucleotide"
  misc_feature (61)..(61): /note="Nucleotide may be methylated to form 5-methylcytosine"
cttgtctgtagctgtccttgaagtggtgtccactattcccctggatgaggttcattcttacgttctgttccataacctagttgtgttattaacttcccatcatacatccttttattaaaaat

SEQ ID NO: 28461 - DNA, 122 bp, Homo sapiens
  misc_feature (61)..(62): /note="This region represents a CpG dinucleotide"
  misc_feature (61)..(61): /note="Nucleotide may be methylated to form 5-methylcytosine"
tgttttcactgcctgccagcccttatcatttcccattgtaatggttatcacagtgagtttcgttggtggtagctttttttttttttttttttttttggctaaattggcaaatcaaaaatata

SEQ ID NO: 28462 - DNA, 122 bp, Homo sapiens
  misc_feature (61)..(62): /note="This region represents a CpG dinucleotide"
  misc_feature (61)..(61): /note="Nucleotide may be methylated to form 5-methylcytosine"
atattctgccaaaagagttgaaggcactgggggtttacagcaagtattttctctttaaaacggtttattacttcaacaagcaaagagcaaaccaactggagaaatgtatgttttttcttttt

SEQ ID NO: 28463 - DNA, 122 bp, Homo sapiens
  misc_feature (61)..(62): /note="This region represents a CpG dinucleotide"
  misc_feature (61)..(61): /note="Nucleotide may be methylated to form 5-methylcytosine"
actttgacaattctatgtatcggtgtaatatttccattacctgggcaaattccccttcgccgggccttaagcataatctacagaaaaaactacgtacataaatatacgtttacaactcaatg

SEQ ID NO: 28464 - DNA, 122 bp, Homo sapiens
  misc_feature (61)..(62): /note="This region represents a CpG dinucleotide"
  misc_feature (61)..(61): /note="Nucleotide may be methylated to form 5-methylcytosine"
gaggaagacgtggcatacgttaaaaaaaatgtaaatctgttagtccaagatttttacaaacgaagtagatgttgcatgtgcaacctaaaggaaaatcacttgacattagtagagagatctat

SEQ ID NO: 28465 - DNA, 122 bp, Homo sapiens
  misc_feature (61)..(62): /note="This region represents a CpG dinucleotide"
  misc_feature (61)..(61): /note="Nucleotide may be methylated to form 5-methylcytosine"
ctcaagagaattggaactattttgcaataaaagatgtgtaaggctgaccctccctgcctacgctgctctctgcttaaatgggttgagtcagtatttcctctttttctaattcagcaatgggc

SEQ ID NO: 28466 - DNA, 122 bp, Homo sapiens
  misc_feature (61)..(62): /note="This region represents a CpG dinucleotide"
  misc_feature (61)..(61): /note="Nucleotide may be methylated to form 5-methylcytosine"
tatgggatattttataagaggattggcaggttctgtgaccgcagattcttcctgctcaaccgcagattctacaggtgcatcctgtagacactttacaggcgaagttacagggaagaggattt

SEQ ID NO: 28467 - DNA, 122 bp, Homo sapiens
  misc_feature (61)..(62): /note="This region represents a CpG dinucleotide"
  misc_feature (61)..(61): /note="Nucleotide may be methylated to form 5-methylcytosine"
gctcctctcctgttttcccattagctgcaccgctatttaatcaagtgagctaatcaactgcggagttcttaatggatgtcagtaacatttcctgtgttatgattgatgaatctaactttgga

SEQ ID NO: 28468 - DNA, 122 bp, Homo sapiens
  misc_feature (61)..(62): /note="This region represents a CpG dinucleotide"
  misc_feature (61)..(61): /note="Nucleotide may be methylated to form 5-methylcytosine"
tattaactggaatattctttttttttttttcagcttttccaaaaatgtcaattaatagaacgaatacttgaagcctgggaaatgaatgagaagaaacagtaagtaaattgtttttttgaaag

SEQ ID NO: 28469 - DNA, 122 bp, Homo sapiens
  misc_feature (61)..(62): /note="This region represents a CpG dinucleotide"
  misc_feature (61)..(61): /note="Nucleotide may be methylated to form 5-methylcytosine"
cagaccacagcagcgcaggatgatgtgggctggcccctcacctccaggagggaggtctgacgatggcattttgtctgagatgcccgtatcatcactcaggctcgtcatgaggacgggccgca

SEQ ID NO: 28470 - DNA, 122 bp, Homo sapiens
  misc_feature (61)..(62): /note="This region represents a CpG dinucleotide"
  misc_feature (61)..(61): /note="Nucleotide may be methylated to form 5-methylcytosine"
atacatttgtaatacagttagattctcttcatagtctgcattccttactgagatccctgacgtcctaaatgatttttaaaatttgcatacgttattagttcattgtttactctttaaattct

SEQ ID NO: 28471 - DNA, 122 bp, Homo sapiens
  misc_feature (61)..(62): /note="This region represents a CpG dinucleotide"
  misc_feature (61)..(61): /note="Nucleotide may be methylated to form 5-methylcytosine"
tctcaaaaacaaaacaaaacaaaacaaaacaaaataaccacacacatagaattagctgggcgtgctggcgggtgccacctgtaggattataagattacacctgtaatcctaacactttggga

SEQ ID NO: 28472 - DNA, 122 bp, Homo sapiens
  misc_feature (61)..(62): /note="This region represents a CpG dinucleotide"
  misc_feature (61)..(61): /note="Nucleotide may be methylated to form 5-methylcytosine"
ctgagaagcgcatgtctccatcagggccctacctctgcttctccacagttggcctagaaccggaagcccctccaaggccccctgactctcctgacctcttggccacagctccggattctcac

SEQ ID NO: 28473 - DNA, 122 bp, Homo sapiens
  misc_feature (61)..(62): /note="This region represents a CpG dinucleotide"
  misc_feature (61)..(61): /note="Nucleotide may be methylated to form 5-methylcytosine"
tgctgttaagagccaggttcttaaatcaacccgccccacacacatgttgcttacatgctgcgttttctcacggtaagtaagtaggcatcagaagagagctcagaaagggaaaaataaacatg

SEQ ID NO: 28474 - DNA, 122 bp, Homo sapiens
  misc_feature (61)..(62): /note="This region represents a CpG dinucleotide"
  misc_feature (61)..(61): /note="Nucleotide may be methylated to form 5-methylcytosine"
tacatggtgttaataactctgttttgttatacattacttttctgttatacattacttctccgaatagtatttaatcatctgatttattttctttaaactgcctcaagttatacgtgtcttaa

SEQ ID NO: 28475 - DNA, 122 bp, Homo sapiens
  misc_feature (61)..(62): /note="This region represents a CpG dinucleotide"
  misc_feature (61)..(61): /note="Nucleotide may be methylated to form 5-methylcytosine"
gggtgggaagaggacagcccggcactggctgctggcccaggtgctgtgatgggtttcgtgcgcagagaggcctgacagcctctgcatcagtgaccgggcgaagagtggggcagctcggacgg

SEQ ID NO: 28476 - DNA, 122 bp, Homo sapiens
  misc_feature (61)..(62): /note="This region represents a CpG dinucleotide"
  misc_feature (61)..(61): /note="Nucleotide may be methylated to form 5-methylcytosine"
gagagccacttggccatgtacctcattggagagccacttggccacgtgcctaattagaagcgcacattctttgatccagcagatccacttctggaaatactggcatattttgtaatagcaaa

SEQ ID NO: 28477 - DNA, 122 bp, Homo sapiens
  misc_feature (61)..(62): /note="This region represents a CpG dinucleotide"
  misc_feature (61)..(61): /note="Nucleotide may be methylated to form 5-methylcytosine"
tgcttggcttggtagggtgatgatttaccaccagccatctactttgtttttccaactctccgttgctctcaccagaacacgatgtcctacaagcatcaagatgtgtttgtgttttttttttc

SEQ ID NO: 28478 - DNA, 122 bp, Homo sapiens
  misc_feature (61)..(62): /note="This region represents a CpG dinucleotide"
  misc_feature (61)..(61): /note="Nucleotide may be methylated to form 5-methylcytosine"
tgcttcttccaaggcaaccttaggagaaaaaaatttaacatagtccccctgccaaggtagcgaaggaagaagggtgagatctctgcaagaaatgctgatgaatccacgtcagggcattttta

SEQ ID NO: 28479 - DNA, 122 bp, Homo sapiens
  misc_feature (61)..(62): /note="This region represents a CpG dinucleotide"
  misc_feature (61)..(61): /note="Nucleotide may be methylated to form 5-methylcytosine"
ccagctgagtcatgggtcacttagtaggaaggcaccctgagatacagacagggtgctgtgcgcgctgcagaatgcctcctcccaccctcctccctccctgacttctcctggcgtaggaatct

SEQ ID NO: 28480 - DNA, 122 bp, Homo sapiens
  misc_feature (61)..(62): /note="This region represents a CpG dinucleotide"
  misc_feature (61)..(61): /note="Nucleotide may be methylated to form 5-methylcytosine"
tgtgtgcatcagtgagtcatgtttcagtcatctaatgccgtgtaataaactaccccaagacgtaatggcatttaaaccctcaatgatcattttagtgtctcttagggttcggggggttacct

SEQ ID NO: 28481 - DNA, 122 bp, Homo sapiens
  misc_feature (61)..(62): /note="This region represents a CpG dinucleotide"
  misc_feature (61)..(61): /note="Nucleotide may be methylated to form 5-methylcytosine"
aattgctctactggtgtgggtaccctgcacctgcctgcatgatgttacactgctggatggcggtgtgctgcagccggctggcctcttcctgcagccgcagagcagcatgacagagaggtaag

SEQ ID NO: 28482 - DNA, 122 bp, Homo sapiens
  misc_feature (61)..(62): /note="This region represents a CpG dinucleotide"
  misc_feature (61)..(61): /note="Nucleotide may be methylated to form 5-methylcytosine"
ccctagccaggagcctgcctggttggaggctggtcagtgacgttgctgtggagaccaggacggtccagcaagtgaccatggcactggccccaggtggctgctgggtgctgccctgggagcaa

SEQ ID NO: 28483 - DNA, 122 bp, Homo sapiens
  misc_feature (61)..(62): /note="This region represents a CpG dinucleotide"
  misc_feature (61)..(61): /note="Nucleotide may be methylated to form 5-methylcytosine"
tttctaatcatctacaaaattgccagcctctctgaagtggtccggctgatacttacagctcgtggttttttgtttaacttcagatcaatcctgtgacagaaaagataaaagatatttccatt

SEQ ID NO: 28484 - DNA, 122 bp, Homo sapiens
  misc_feature (61)..(62): /note="This region represents a CpG dinucleotide"
  misc_feature (61)..(61): /note="Nucleotide may be methylated to form 5-methylcytosine"
gggggggcccctggaaccctctgtgggctggcagtgtgcttcctgcacccagcgccagcccgccctggggaggggctgaacccgccctgctcgtgataaggcacaagcaagggctgccctga

SEQ ID NO: 28485 - DNA, 122 bp, Homo sapiens
  misc_feature (61)..(62): /note="This region represents a CpG dinucleotide"
  misc_feature (61)..(61): /note="Nucleotide may be methylated to form 5-methylcytosine"
aatcccaccaaaccaaggaaatcctttcgcacccgaaggaaggcctgccgcgtggcgtgccgactgcagtcctagagtttggagcctcatggagatcattaccataaaacaaataaccatct

SEQ ID NO: 28486 - DNA, 122 bp, Homo sapiens
  misc_feature (61)..(62): /note="This region represents a CpG dinucleotide"
  misc_feature (61)..(61): /note="Nucleotide may be methylated to form 5-methylcytosine"
tggcagagtaagtgggatccaaatacgggagtttgtatctgttttaagattggagaaaagcggcatgtttgtatgctgctgggaaagatccagcagagaatgaaacatcaacattatgagag

SEQ ID NO: 28487 - DNA, 122 bp, Homo sapiens
  misc_feature (61)..(62): /note="This region represents a CpG dinucleotide"
  misc_feature (61)..(61): /note="Nucleotide may be methylated to form 5-methylcytosine"
acttaacaccaagtcagtatacttgtcaaagagttgaaagaacaaatgaatcaacaaattcgctcaatgaaacaaaattaagtgataaaaggagaataccaaactggaaacataggcattta

SEQ ID NO: 28488 - DNA, 122 bp, Homo sapiens
  misc_feature (61)..(62): /note="This region represents a CpG dinucleotide"
  misc_feature (61)..(61): /note="Nucleotide may be methylated to form 5-methylcytosine"
taggtagcatgtgcatttgttccgtctgtttgtatatttatcttgcctttctctttcctgcgtagattgtttatcagaaataatttgtgaaatgtgtgtgtatgtttgctgaggttattgtg

SEQ ID NO: 28489 - DNA, 122 bp, Homo sapiens
  misc_feature (61)..(62): /note="This region represents a CpG dinucleotide"
  misc_feature (61)..(61): /note="Nucleotide may be methylated to form 5-methylcytosine"
ttctcattcctaaaggaaaatatttatattacgccacagaacgggtttccatgacagtgacgactgtaacactgttgccttagcaaccacttgagtccatcttgaatgatctgaatcccctt

SEQ ID NO: 28490 - DNA, 122 bp, Homo sapiens
  misc_feature (61)..(62): /note="This region represents a CpG dinucleotide"
  misc_feature (61)..(61): /note="Nucleotide may be methylated to form 5-methylcytosine"
gtgaactctagtcccagtttcttattcctggtactggcttagtttgaggcagctgcccaccgttaagtccagtgagccatggcctggggacaaggtcaggtacatgtgtaatcagctgggtc

SEQ ID NO: 28491 - DNA, 122 bp, Homo sapiens
  misc_feature (61)..(62): /note="This region represents a CpG dinucleotide"
  misc_feature (61)..(61): /note="Nucleotide may be methylated to form 5-methylcytosine"
tttactctctgcttaaaccatccagcaagtcatcaaagttacaaaagcccctgcttagtgcgttctgggttacttcattgtgaagatcaggggactgaagctcagccagatcaagtgcctcg

SEQ ID NO: 28492 - DNA, 122 bp, Homo sapiens
  misc_feature (61)..(62): /note="This region represents a CpG dinucleotide"
  misc_feature (61)..(61): /note="Nucleotide may be methylated to form 5-methylcytosine"
tgcccagcagccagaataagggagctcctgtgctgctttgttttgcaggtcagagtttaacgttaagacagattttttaagtttgaaaggttttcagatgagatgagttctttgggtgataa

SEQ ID NO: 28493 - DNA, 122 bp, Homo sapiens
  misc_feature (61)..(62): /note="This region represents a CpG dinucleotide"
  misc_feature (61)..(61): /note="Nucleotide may be methylated to form 5-methylcytosine"
ccagggcagccctgctccaagaggacatctgataacctgcagataattataagtttatggcgaacaaactattgctgaaagatggcatcgtgcacagctgttgtttagacaaacccgctgta

SEQ ID NO: 28494 - DNA, 122 bp, Homo sapiens
  misc_feature (61)..(62): /note="This region represents a CpG dinucleotide"
  misc_feature (61)..(61): /note="Nucleotide may be methylated to form 5-methylcytosine"
tcaacttcctcctgtggtttgtcaagtcttttatatcatgaccactccaattcatcaaagcgttcatgcttattttgtgcctcagtgtttcacaatgatttcactcactcctgttaggtgag

SEQ ID NO: 28495 - DNA, 122 bp, Homo sapiens
  misc_feature (61)..(62): /note="This region represents a CpG dinucleotide"
  misc_feature (61)..(61): /note="Nucleotide may be methylated to form 5-methylcytosine"
gcaagccttgacccgtgacgcatccctacacggttctgctagatggatgacagtaatccacgtccttgacttagctgggacctctgccctggtgaaggcatcacagaaccaaagatgaggaa

SEQ ID NO: 28496 - DNA, 122 bp, Homo sapiens
  misc_feature (61)..(62): /note="This region represents a CpG dinucleotide"
  misc_feature (61)..(61): /note="Nucleotide may be methylated to form 5-methylcytosine"
ctctactgtaattcccatcttgataaataggttctgttgagccagcgggcaaggtgaccccgttgggtggttacaattagacagtcatgcatcacttaacaatgggaatacattctaagaaa

SEQ ID NO: 28497 - DNA, 122 bp, Homo sapiens
  misc_feature (61)..(62): /note="This region represents a CpG dinucleotide"
  misc_feature (61)..(61): /note="Nucleotide may be methylated to form 5-methylcytosine"
ccattgctcttacataatcaaagtgctcaggctctcgctgatgaatccagagactaaccacgtaatctagaagaaattcatctttgtccccaaggctcccagcatttggcaattattgaaca

SEQ ID NO: 28498 - DNA, 122 bp, Homo sapiens
  misc_feature (61)..(62): /note="This region represents a CpG dinucleotide"
  misc_feature (61)..(61): /note="Nucleotide may be methylated to form 5-methylcytosine"
ttttggatttaccagcgtggtgaacctcatcataggactggagcaagatggaatcattgacgggttcatgacacactacttgagagaggtatgggatcacttagtgattatgaggtttcaac

SEQ ID NO: 28499 - DNA, 122 bp, Homo sapiens
  misc_feature (61)..(62): /note="This region represents a CpG dinucleotide"
  misc_feature (61)..(61): /note="Nucleotide may be methylated to form 5-methylcytosine"
gcctttcactggggccaccctttggcttatatcacaatgtacttttttgggttcactgtccgttcccctaaggctcttggcctcccatgaaggctggggccctggcagacagaaccagcagg

SEQ ID NO: 28500 - DNA, 122 bp, Homo sapiens
  misc_feature (61)..(62): /note="This region represents a CpG dinucleotide"
  misc_feature (61)..(61): /note="Nucleotide may be methylated to form 5-methylcytosine"
ttgctgcgtaggcactatgataggtgctgactgatacaccggctgacttgggtaaaaaggcgttcctaaaaagttggaaaaaattaaataggcattcagttattttgtcaaacactacagaa

SEQ ID NO: 28501 - DNA, 122 bp, Homo sapiens
  misc_feature (61)..(62): /note="This region represents a CpG dinucleotide"
  misc_feature (61)..(61): /note="Nucleotide may be methylated to form 5-methylcytosine"
catgaagcaaatatagaaactctgtccctttgcagataggactgcctgttaagtgatggccggtcagacttacttgatgactcagtacagtgagagacaagcattagagctgttagttgtta

SEQ ID NO: 28502 - DNA, 122 bp, Homo sapiens
  misc_feature (61)..(62): /note="This region represents a CpG dinucleotide"
  misc_feature (61)..(61): /note="Nucleotide may be methylated to form 5-methylcytosine"
accttctctcctttcatacaacacattttctgaatattcattattggggtatttaaattgcgctctcttattcttaagccatttaaaatggaatctattagacaaatcacttcatcttttag

SEQ ID NO: 28503 - DNA, 122 bp, Homo sapiens
  misc_feature (61)..(62): /note="This region represents a CpG dinucleotide"
  misc_feature (61)..(61): /note="Nucleotide may be methylated to form 5-methylcytosine"
agaaacctgcatggcaggtgcacacggtgttctgtttctcctggcctgtagggagaagtgcggcacagctaaaggagaagcgcctgcacccccaccccacaggacagaggaagtgacgaggg

SEQ ID NO: 28504 - DNA, 122 bp, Homo sapiens
  misc_feature (61)..(62): /note="This region represents a CpG dinucleotide"
  misc_feature (61)..(61): /note="Nucleotide may be methylated to form 5-methylcytosine"
tcccttcacaattacttcttatttctactctcctcaacttgtttcaggtctgtattacctcgtaactacatgattaagtagaattttcacctctgcagtgaggtagagagtcaggttatact

SEQ ID NO: 28505 - DNA, 122 bp, Homo sapiens
  misc_feature (61)..(62): /note="This region represents a CpG dinucleotide"
  misc_feature (61)..(61): /note="Nucleotide may be methylated to form 5-methylcytosine"
agagtttgaggctacagtgagctgagatcacaccactgcactccaacctgggtgacagagcgagatcctgccttaaaaacaaacaagggctgggcacagtggctcacccctgtgatcccagc

SEQ ID NO: 28506 - DNA, 122 bp, Homo sapiens
  misc_feature (61)..(62): /note="This region represents a CpG dinucleotide"
  misc_feature (61)..(61): /note="Nucleotide may be methylated to form 5-methylcytosine"
tccattccaaggctctgggcctctggaggtggagttctctcagctggccccgggagacagcgcagtggccagagctctggctcatcaggtcagggaaagaaaatcaccctcagaatctctca

SEQ ID NO: 28507 - DNA, 122 bp, Homo sapiens
  misc_feature (61)..(62): /note="This region represents a CpG dinucleotide"
  misc_feature (61)..(61): /note="Nucleotide may be methylated to form 5-methylcytosine"
atataatagttctctaggactgccacagcaaatcaccatgaactgggtagcttaacacaacgaatttattctctcacagttctggaggccggaagtctgaaatcaaggtctcggcagggttg

SEQ ID NO: 28508 - DNA, 122 bp, Homo sapiens
  misc_feature (61)..(62): /note="This region represents a CpG dinucleotide"
  misc_feature (61)..(61): /note="Nucleotide may be methylated to form 5-methylcytosine"
tccactttgatagtggcgagaagagtagcctcttgcttttgcatgttttcctaatcacagcgtgctttcttgtctgctatttcatttgacttttttcaaccagccgctgaggtggggattat

SEQ ID NO: 28509 - DNA, 122 bp, Homo sapiens
  misc_feature (61)..(62): /note="This region represents a CpG dinucleotide"
  misc_feature (61)..(61): /note="Nucleotide may be methylated to form 5-methylcytosine"
tgtaattcttgtcccactggttcttgtaagttagagtgacagtgtgcctggcacagtcaccgctaacagtgcaaggcattgtcttaaaaccattgcagatggtttgatcctgctagcaacct

SEQ ID NO: 28510 - DNA, 122 bp, Homo sapiens
  misc_feature (61)..(62): /note="This region represents a CpG dinucleotide"
  misc_feature (61)..(61): /note="Nucleotide may be methylated to form 5-methylcytosine"
aaagagaacagtataaaaaggggtgggggaagtaactttacagtggataaatctaacaaacgctactccagaaggatgatcaaggtcagtaataatgtgataagtcaccttgatagtatgta

SEQ ID NO: 28511 - DNA, 122 bp, Homo sapiens
  misc_feature (61)..(62): /note="This region represents a CpG dinucleotide"
  misc_feature (61)..(61): /note="Nucleotide may be methylated to form 5-methylcytosine"
tgtagaaacataattttatgtgtgtgctctgtggaggaagaagattgtcagagggagggtcggggttacaaacataggaatgtggttccctaggtgaatgcatatgaaaaaggaccccaagc

SEQ ID NO: 28512 - DNA, 122 bp, Homo sapiens
  misc_feature (61)..(62): /note="This region represents a CpG dinucleotide"
  misc_feature (61)..(61): /note="Nucleotide may be methylated to form 5-methylcytosine"
gtagtatattccacagggcataggtgtgaatgaacactcaagatgcaatttcctctccatcgagttctgttatgtaaatagtgctaataatagagtagaacagattttgtattacaaaataa

SEQ ID NO: 28513 - DNA, 122 bp, Homo sapiens
  misc_feature (61)..(62): /note="This region represents a CpG dinucleotide"
  misc_feature (61)..(61): /note="Nucleotide may be methylated to form 5-methylcytosine"
ctttgaaatagagtgctcggaggacaaacatggctccattctggaggattattactagaacgttctagagagcctgttaagcaactttgaatggattgctgcgaagtttagggctggttata

SEQ ID NO: 28514 - DNA, 122 bp, Homo sapiens
  misc_feature (61)..(62): /note="This region represents a CpG dinucleotide"
  misc_feature (61)..(61): /note="Nucleotide may be methylated to form 5-methylcytosine"
gttcataacacaccattatcactgactcacaccaaaggatccaaagtcccttgaacaagacgaattacagcagaatagaatctcagtttagggttagattacaaagtcagtgtacacagacc

SEQ ID NO: 28515 - DNA, 122 bp, Homo sapiens
  misc_feature (61)..(62): /note="This region represents a CpG dinucleotide"
  misc_feature (61)..(61): /note="Nucleotide may be methylated to form 5-methylcytosine"
atcttctcttcctcctccatgtctatttagtaccacagtgatggcacaaagatgttcacccggacaccaaagtcacattcctcttgtttaacccttttcccaagaggccacaaaattctgcc

SEQ ID NO: 28516 - DNA, 122 bp, Homo sapiens
  misc_feature (61)..(62): /note="This region represents a CpG dinucleotide"
  misc_feature (61)..(61): /note="Nucleotide may be methylated to form 5-methylcytosine"
tcattttcctccctgcaatgcttctgaaatagctaattggatgattcattcctatggatgcgtctgccccattcagaaactgtttatggcagtgaacaaaactaactctctaatgtgtggag

SEQ ID NO: 28517 - DNA, 122 bp, Homo sapiens
  misc_feature (61)..(62): /note="This region represents a CpG dinucleotide"
  misc_feature (61)..(61): /note="Nucleotide may be methylated to form 5-methylcytosine"
aacacactccaggagagcattctaaatacccttgactctcccattactgtagccgagttgcgtactgtcagtttgtttgggatattctctactccttgaaggtggggactctgggagatgac

SEQ ID NO: 28518 - DNA, 122 bp, Homo sapiens
  misc_feature (61)..(62): /note="This region represents a CpG dinucleotide"
  misc_feature (61)..(61): /note="Nucleotide may be methylated to form 5-methylcytosine"
aatggggataaccctagtgtctcctgtacagggctgttgggaggatgaaatgggatgatacgtgtgaagcacttgaaatattgcttaccacactgtacatgggccaacaggtgtgtgtaatg

SEQ ID NO: 28519 - DNA, 122 bp, Homo sapiens
  misc_feature (61)..(62): /note="This region represents a CpG dinucleotide"
  misc_feature (61)..(61): /note="Nucleotide may be methylated to form 5-methylcytosine"
atggaaacagcccttgtttccaccagcttgctaagtggagcacagtggccacacatcttacgctggagggagctgaagtcacatacaaattctggcttctcaggttcccctttccttgtaga

SEQ ID NO: 28520 - DNA, 122 bp, Homo sapiens
  misc_feature (61)..(62): /note="This region represents a CpG dinucleotide"
  misc_feature (61)..(61): /note="Nucleotide may be methylated to form 5-methylcytosine"
ttctcacccctgaccttgcctagtcctaagcgtcctttctgccttgtcagaaggattccccgagccctcctgcccagtccggcttccgcaggagacctgagtttgttttcttttactgagtt

SEQ ID NO: 28521 - DNA, 122 bp, Homo sapiens
  misc_feature (61)..(62): /note="This region represents a CpG dinucleotide"
  misc_feature (61)..(61): /note="Nucleotide may be methylated to form 5-methylcytosine"
catcctgatgccttggagtccaaggcccatgcctccctatccaccacgctgccctcccgccggctgggtaactctgcttggctgataatgaggagcttagcctcagaggtgtcctatcagcc

SEQ ID NO: 28522 - DNA, 122 bp, Homo sapiens
  misc_feature (61)..(62): /note="This region represents a CpG dinucleotide"
  misc_feature (61)..(61): /note="Nucleotide may be methylated to form 5-methylcytosine"
catccagttaatgtgtaacttctatgcaaatgacttcaataccctatcagtacacctgaccgcattccagatctctgactcaggatttttatcttgcatgcatgacatacttacttgaatgc

SEQ ID NO: 28523 - DNA, 122 bp, Homo sapiens
  misc_feature (61)..(62): /note="This region represents a CpG dinucleotide"
  misc_feature (61)..(61): /note="Nucleotide may be methylated to form 5-methylcytosine"
ctcgggaagttagctgatttttcttttcacttcctcttagcattcttctgactaatcaggcgttcatatctgcctaattttgtttttgcaaccacaacttttgtatatcttttcatgtatgt

SEQ ID NO: 28524 - DNA, 122 bp, Homo sapiens
  misc_feature (61)..(62): /note="This region represents a CpG dinucleotide"
  misc_feature (61)..(61): /note="Nucleotide may be methylated to form 5-methylcytosine"
attaggaatttcctttcttcctggcactatttgctatcatgtggtcatatcttcataaatcggtgcattatttttcctaagagaatacagaatagagccagatactgtgtcttctgtttctt

SEQ ID NO: 28525 - DNA, 122 bp, Homo sapiens
  misc_feature (61)..(62): /note="This region represents a CpG dinucleotide"
  misc_feature (61)..(61): /note="Nucleotide may be methylated to form 5-methylcytosine"
ttcttatccctaggtttatttgtatttcctatctattgcctttgtaaaaaacagagaaaacgatcacggacaggtatgcactggtaacatgcagatgatttcatccagctaagctggttgga

SEQ ID NO: 28526 - DNA, 122 bp, Homo sapiens
  misc_feature (61)..(62): /note="This region represents a CpG dinucleotide"
  misc_feature (61)..(61): /note="Nucleotide may be methylated to form 5-methylcytosine"
atgcctttgaaaggcaagaagtctattttcccttcctgtttttcccttcttcagctgaaacgcaaacgtggtggtgaatcatcttgaattaagctgaaaagggtaacatggaagagatggca

SEQ ID NO: 28527 - DNA, 122 bp, Homo sapiens
  misc_feature (61)..(62): /note="This region represents a CpG dinucleotide"
  misc_feature (61)..(61): /note="Nucleotide may be methylated to form 5-methylcytosine"
acatataacatcttgacctaaagcagccttcattgtccctgaaacttgtcgagtgatttccgcaacagcccagcctgcctaaccccaaattctttcaacaaattcattcttcccttccatga

SEQ ID NO: 28528 - DNA, 122 bp, Homo sapiens
  misc_feature (61)..(62): /note="This region represents a CpG dinucleotide"
  misc_feature (61)..(61): /note="Nucleotide may be methylated to form 5-methylcytosine"
tttttgcttctttctgtagccattgtaatgcctcctggctaagtgctgagaaccaagtcccggcatgtgcacatggtaactggttaatgatattattctgcatgcccaaggcagtggtcagg

SEQ ID NO: 28529 - DNA, 122 bp, Homo sapiens
  misc_feature (61)..(62): /note="This region represents a CpG dinucleotide"
  misc_feature (61)..(61): /note="Nucleotide may be methylated to form 5-methylcytosine"
ctgtgtgaccttgggtgagtccctgtccctctctgaggctcactttcctcatttgtaaaacggagagctctcttaaatttttttttttttttgagacagtcttactctgttgcccaagctgg

SEQ ID NO: 28530 - DNA, 122 bp, Homo sapiens
  misc_feature (61)..(62): /note="This region represents a CpG dinucleotide"
  misc_feature (61)..(61): /note="Nucleotide may be methylated to form 5-methylcytosine"
ggcttagcataggactcctgcactcgaactggagttccttggcagaagcagaaccagtttcgtgactctgatcactctgttaaacttttctgtacctcaattcctaatttgaaaataggcat

SEQ ID NO: 28531 - DNA, 122 bp, Homo sapiens
  misc_feature (61)..(62): /note="This region represents a CpG dinucleotide"
  misc_feature (61)..(61): /note="Nucleotide may be methylated to form 5-methylcytosine"
gatcctgtctctaaatacaagaagaaaaaaagacttactataaagctacaatagttacaacgatgcagtttggaaacaatgatagacataagtcaataggacttatgtcccgaagagtccaa

SEQ ID NO: 28532 - DNA, 122 bp, Homo sapiens
  misc_feature (61)..(62): /note="This region represents a CpG dinucleotide"
  misc_feature (61)..(61): /note="Nucleotide may be methylated to form 5-methylcytosine"
ggtgtcacgtggtataacaagttgtgacttgtgcctgtgttgtcaacagagttttagccccgtccagacatgaaaaagaatggagccccgaagatgattcacctccggtctgcgatgggccc

SEQ ID NO: 28533 - DNA, 122 bp, Homo sapiens
  misc_feature (61)..(62): /note="This region represents a CpG dinucleotide"
  misc_feature (61)..(61): /note="Nucleotide may be methylated to form 5-methylcytosine"
cagcactttgtccatttatgtaacaaatgtttgtttacatataggctgagccaagttacacgttaggtcccacggctaactcaatatggtccatagcagatgagccctgccagcaacttgtc

SEQ ID NO: 28534 - DNA, 122 bp, Homo sapiens
  misc_feature (61)..(62): /note="This region represents a CpG dinucleotide"
  misc_feature (61)..(61): /note="Nucleotide may be methylated to form 5-methylcytosine"
acctgtctccccacatcctgggcttctttccatcctgtccaattcttgcctaaatcatagcgaaggtgagggaagggagggctctctgcagagctggtgtgggatggggaggagctgctgtg

SEQ ID NO: 28535 - DNA, 122 bp, Homo sapiens
  misc_feature (61)..(62): /note="This region represents a CpG dinucleotide"
  misc_feature (61)..(61): /note="Nucleotide may be methylated to form 5-methylcytosine"
catttgcatggtgttgttttgttagatatcagcccagaaacagaatgtcagagctttcagcgagttggagcaatcacctagctcaaccctcccttggagggcggggaatctgagactccgag

SEQ ID NO: 28536 - DNA, 122 bp, Homo sapiens
  misc_feature (61)..(62): /note="This region represents a CpG dinucleotide"
  misc_feature (61)..(61): /note="Nucleotide may be methylated to form 5-methylcytosine"
cctgtgatggggaacaggctctgccaggcagggttctttggctggagtctcaaagcctggcgcttgtatcctgaagatgaatggcctggcccagtcccgactagagacatgcatctcttatc

SEQ ID NO: 28537 - DNA, 122 bp, Homo sapiens
  misc_feature (61)..(62): /note="This region represents a CpG dinucleotide"
  misc_feature (61)..(61): /note="Nucleotide may be methylated to form 5-methylcytosine"
tgagctcaaagcaatccgcccgcctcagcctcccaaagtgtatacacacttttaaacaaccggatctcacaataactcactatcaagagaacagcaccaagggaatggtgctaaaccattca

SEQ ID NO: 28538 - DNA, 122 bp, Homo sapiens
  misc_feature (61)..(62): /note="This region represents a CpG dinucleotide"
  misc_feature (61)..(61): /note="Nucleotide may be methylated to form 5-methylcytosine"
cactgcctaatcctccctgccctgagatcctggcaaccactaatctactttgtgtctctgcggatttgtcagttctagatatttcatataagtggaatcacagggtatgtaaccttttgtgt

SEQ ID NO: 28539 - DNA, 122 bp, Homo sapiens
  misc_feature (61)..(62): /note="This region represents a CpG dinucleotide"
  misc_feature (61)..(61): /note="Nucleotide may be methylated to form 5-methylcytosine"
agcagtgggaagggtagagaagagaaaacaagaaagtgagaatgtgtcatccattgaagacgcaggatgataaaaagcctacaaattaactcagtaccacagcaatgttctcactgctgctt

SEQ ID NO: 28540 - DNA, 122 bp, Homo sapiens
  misc_feature (61)..(62): /note="This region represents a CpG dinucleotide"
  misc_feature (61)..(61): /note="Nucleotide may be methylated to form 5-methylcytosine"
gcctaaagagacctgcctctaaaataaacaaacaaaacagacttaatgtcaacttttacacgcttttcccattccaaataatttactatcttatttttgccctaatataaattcatcaacag

SEQ ID NO: 28541 - DNA, 122 bp, Homo sapiens
  misc_feature (61)..(62): /note="This region represents a CpG dinucleotide"
  misc_feature (61)..(61): /note="Nucleotide may be methylated to form 5-methylcytosine"
aaatgcttgggcatgacaaccctagaaggcataaggcccgatgtgtgtactttctgataacgaatgtttggctttaagagaagattgtcagaagctattacaaagaagaatatagcaacaca

SEQ ID NO: 28542 - DNA, 122 bp, Homo sapiens
  misc_feature (61)..(62): /note="This region represents a CpG dinucleotide"
  misc_feature (61)..(61): /note="Nucleotide may be methylated to form 5-methylcytosine"
tttgtgtatgctgtattgcagcacacgtcacatggagatgggcgtcaagaagttacctctcgtaccagccgctcaggagctcggtgtagaaactctatagcctcctgtgcagatgaacaacc

SEQ ID NO: 28543 - DNA, 122 bp, Homo sapiens
  misc_feature (61)..(62): /note="This region represents a CpG dinucleotide"
  misc_feature (61)..(61): /note="Nucleotide may be methylated to form 5-methylcytosine"
ccaggcttatttcaatcactgttatttgcctgtctctacagaaactgcatgcttatttgacgtgtttgtgtgtgtgtatatacatatacagacagcaatctgtatgtgtaaatactggaatt

SEQ ID NO: 28544 - DNA, 122 bp, Homo sapiens
  misc_feature (61)..(62): /note="This region represents a CpG dinucleotide"
  misc_feature (61)..(61): /note="Nucleotide may be methylated to form 5-methylcytosine"
agagcctgcacctgctcacctcttttccaggtgggaatgttggaagagaagtggaaagggcgtagtgactctcaagcagggttactgccaccttggcgacatttgttagtttgcgtgttaat

SEQ ID NO: 28545 - DNA, 122 bp, Homo sapiens
  misc_feature (61)..(62): /note="This region represents a CpG dinucleotide"
  misc_feature (61)..(61): /note="Nucleotide may be methylated to form 5-methylcytosine"
agtcctgtttgacctcgtcaatcatcgcagactgtaaaggtgactcggatgctcaagaaacgagcatacccagcagtgggccccagacttctcgcaggcccaggtcctcctgggtgcacaga

SEQ ID NO: 28546 - DNA, 122 bp, Homo sapiens
  misc_feature (61)..(62): /note="This region represents a CpG dinucleotide"
  misc_feature (61)..(61): /note="Nucleotide may be methylated to form 5-methylcytosine"
ctgggcccgggccttggcaggaagtcccacaggaggcctggctgccccggcactgctctgcggacttccccaggagcagcctggcaggccctgtactttcactgaagccacactccggcctc

SEQ ID NO: 28547 - DNA, 122 bp, Homo sapiens
  misc_feature (61)..(62): /note="This region represents a CpG dinucleotide"
  misc_feature (61)..(61): /note="Nucleotide may be methylated to form 5-methylcytosine"
cagctcagtgctctttctactgctgcctcactgccagattttcagtgtccttgtttttcacggaacatggtgacatagggtggtggttgagggcattatgatgcagtcagcatgcattggtg

SEQ ID NO: 28548 - DNA, 122 bp, Homo sapiens
  misc_feature (61)..(62): /note="This region represents a CpG dinucleotide"
  misc_feature (61)..(61): /note="Nucleotide may be methylated to form 5-methylcytosine"
ccaggaggatgtgggctccacaagggtggagattgggtctctctggttcctcactgtatgcggtgccccgcccaaggcctgcacccactaagggctgaataaatacttgttctaagaccagg

SEQ ID NO: 28549 - DNA, 122 bp, Homo sapiens
  misc_feature (61)..(62): /note="This region represents a CpG dinucleotide"
  misc_feature (61)..(61): /note="Nucleotide may be methylated to form 5-methylcytosine"
gaaatcccacaattctataactggtcttagacacaagaccagtaagagataggcgaaccccggccccgccccgcagtttgctccatgtgatacacagttcacactgagtgctagcagtaggg

SEQ ID NO: 28550 - DNA, 122 bp, Homo sapiens
  misc_feature (61)..(62): /note="This region represents a CpG dinucleotide"
  misc_feature (61)..(61): /note="Nucleotide may be methylated to form 5-methylcytosine"
ggcctgcctctgttaagagtctttatattagttatatttctctaaatccatctcttagtccgattttggagctggataaaccagcactagattcaatcaagactccttcccaatttttttat

SEQ ID NO: 28551 - DNA, 122 bp, Homo sapiens
  misc_feature (61)..(62): /note="This region represents a CpG dinucleotide"
  misc_feature (61)..(61): /note="Nucleotide may be methylated to form 5-methylcytosine"
gtgggtgtggccaagaagatggggctcactcccagctctcaatcagttgctacaacgtctcgctgggaggcttaagccaacagcatttctcattctgcctccaggtcttgttacagagcctg

SEQ ID NO: 28552 - DNA, 122 bp, Homo sapiens
  misc_feature (61)..(62): /note="This region represents a CpG dinucleotide"
  misc_feature (61)..(61): /note="Nucleotide may be methylated to form 5-methylcytosine"
ggaggttttcccacggtaattggctctgaagtatcctaacttaatggttgtgtttttcaacgggagactgaattccaaagggaattccacagggaatttaaatgtacaaacattttttgagt

SEQ ID NO: 28553 - DNA, 122 bp, Homo sapiens
  misc_feature (61)..(62): /note="This region represents a CpG dinucleotide"
  misc_feature (61)..(61): /note="Nucleotide may be methylated to form 5-methylcytosine"
cgtgtttcttcagctgaaaatcactgccgtaatgcacaataaatgcctgccaataggaggcgctcataatcttttttttcattagaagcgactgtttctgaatggagtgtcttattctgttg

SEQ ID NO: 28554 - DNA, 122 bp, Homo sapiens
  misc_feature (61)..(62): /note="This region represents a CpG dinucleotide"
  misc_feature (61)..(61): /note="Nucleotide may be methylated to form 5-methylcytosine"
ggccctactcacccctcgctccggggtcgcccctgacgcccacccgcggctgaggtcgcacgctccagcctcagtccaccctggaaccctgcatttggcagccacgagagcccatctcccgc

SEQ ID NO: 28555 - DNA, 122 bp, Homo sapiens
  misc_feature (61)..(62): /note="This region represents a CpG dinucleotide"
  misc_feature (61)..(61): /note="Nucleotide may be methylated to form 5-methylcytosine"
agtggcagaaaccaaatgaaaactcaggtcttgtctgatgcagaagccagaacaaacctccgtacattgctagagatggcagggcccttgaatgcacccacgtctccccacccctagctgac

SEQ ID NO: 28556 - DNA, 122 bp, Homo sapiens
  misc_feature (61)..(62): /note="This region represents a CpG dinucleotide"
  misc_feature (61)..(61): /note="Nucleotide may be methylated to form 5-methylcytosine"
atactacctcactgaagaaaaatcataaaactctcaggattcctccacaaatatttgccacgtgtcagttgcttgtgtaattgacttgtgaaactgcttcatgaaacagaaactgttgcatt

SEQ ID NO: 28557 - DNA, 122 bp, Homo sapiens
  misc_feature (61)..(62): /note="This region represents a CpG dinucleotide"
  misc_feature (61)..(61): /note="Nucleotide may be methylated to form 5-methylcytosine"
tctgctccctcccatccgtgcctcagggcccataaggataatttctccctaacacaaatgcgaatgggaaacgaggattaagcataccattcagagaagcaagtccatgatagagtccatat

SEQ ID NO: 28558 - DNA, 122 bp, Homo sapiens
  misc_feature (61)..(62): /note="This region represents a CpG dinucleotide"
  misc_feature (61)..(61): /note="Nucleotide may be methylated to form 5-methylcytosine"
tgaggagaaatggtggacaataaagacttcagcagtggcatcgtctgtgcttgaggtgaacggtagcaaagaggccagctaaagcagggttactttcaagattgaatttactttcacgatga

SEQ ID NO: 28559 - DNA, 122 bp, Homo sapiens
  misc_feature (61)..(62): /note="This region represents a CpG dinucleotide"
  misc_feature (61)..(61): /note="Nucleotide may be methylated to form 5-methylcytosine"
tttgcaattagcatatgcaagtgaagtcttcttttccctgtggctgtctcttcctggagccggcctgcccctcgtcaaacacggggctttaaatcagcgtcggccccacctcagtcttgtcc

SEQ ID NO: 28560 - DNA, 122 bp, Homo sapiens
  misc_feature (61)..(62): /note="This region represents a CpG dinucleotide"
  misc_feature (61)..(61): /note="Nucleotide may be methylated to form 5-methylcytosine"
aggttgttgatttactcagtcagcacttttaaaaagttttaatccatgcatcagcagcagcgggggatagcaaactatggcctgtgggtcaaacccagcctgctgcctgtttttgtatggcc

SEQ ID NO: 28561 - DNA, 122 bp, Homo sapiens
  misc_feature (61)..(62): /note="This region represents a CpG dinucleotide"
  misc_feature (61)..(61): /note="Nucleotide may be methylated to form 5-methylcytosine"
tgctgaacgtcgggccccatgctgactgcaggtcctatgatagcatgggctatgtcagcccgcctctgctactgactcactgacatgcacagattcccagtttgcctccttacagcgaattc

SEQ ID NO: 28562 - DNA, 122 bp, Homo sapiens
  misc_feature (61)..(62): /note="This region represents a CpG dinucleotide"
  misc_feature (61)..(61): /note="Nucleotide may be methylated to form 5-methylcytosine"
acagtgctcacccatttgttacatggcatttaaggcagggatctggttcctgtcacaacacgtgtatgtgtgttattagcaaaaggtactcaggaagatgaaaggtcctatacagtgaagcc

SEQ ID NO: 28563 - DNA, 122 bp, Homo sapiens
  misc_feature (61)..(62): /note="This region represents a CpG dinucleotide"
  misc_feature (61)..(61): /note="Nucleotide may be methylated to form 5-methylcytosine"
tggggtacctcacagggccctttgagacactgatgtgatatcatttctcctcagatggagcgtctgtgtggcaccaggtgtccctctggttccaggaggctcatctctctgcctccagtcca

SEQ ID NO: 28564 - DNA, 122 bp, Homo sapiens
  misc_feature (61)..(62): /note="This region represents a CpG dinucleotide"
  misc_feature (61)..(61): /note="Nucleotide may be methylated to form 5-methylcytosine"
gctgtgttactttgggggtgtgatatgtctctgaatctcagcctcctcatccatcaaatacgtggggttaaaccagatgatctctaagacttcttccagctctaaaattctgtcactctctg

SEQ ID NO: 28565 - DNA, 122 bp, Homo sapiens
  misc_feature (61)..(62): /note="This region represents a CpG dinucleotide"
  misc_feature (61)..(61): /note="Nucleotide may be methylated to form 5-methylcytosine"
ggggaggccctgggggacccacctggaagcccagcaggatgcacaggtaccaaggtggcacgtcctcgatcttgtacaacatgtcaaacttaggctctgtgggtagcggggtcgaggggtcc

SEQ ID NO: 28566 - DNA, 122 bp, Homo sapiens
  misc_feature (61)..(62): /note="This region represents a CpG dinucleotide"
  misc_feature (61)..(61): /note="Nucleotide may be methylated to form 5-methylcytosine"
tgggattcagttgtgtctaggaaatctcctaaacatcttaatgctaatgatgttggttctcgtgcttatctttgtctgtcttcactgtgattttgcagaaatgccaattctaattctcctac

SEQ ID NO: 28567 - DNA, 122 bp, Homo sapiens
  misc_feature (61)..(62): /note="This region represents a CpG dinucleotide"
  misc_feature (61)..(61): /note="Nucleotide may be methylated to form 5-methylcytosine"
gcaatttttaaataccagctaaagaggaactccagtgaatatctggccggatgtgagagacgcacagctctctgatgatttgggcaaccaaagtctcactgggcttattgtaattattagag

SEQ ID NO: 28568 - DNA, 122 bp, Homo sapiens
  misc_feature (61)..(62): /note="This region represents a CpG dinucleotide"
  misc_feature (61)..(61): /note="Nucleotide may be methylated to form 5-methylcytosine"
cttttcaaatatgatttttatctaaatggtgtcccttaaaacttcattttaacactcaaacgatccccagctgttcgggtagattggcccctgctgggtctgtttcccaacacttcccatat

SEQ ID NO: 28569 - DNA, 122 bp, Homo sapiens
  misc_feature (61)..(62): /note="This region represents a CpG dinucleotide"
  misc_feature (61)..(61): /note="Nucleotide may be methylated to form 5-methylcytosine"
cctccagcccaacagacagatgaggctccggaagacattccttcttcttgatgggagtcccgctgctacttaaccctccctgcagtaggtccaagtctgtctgtctttctcttgccatggtt

SEQ ID NO: 28570 - DNA, 122 bp, Homo sapiens
  misc_feature (61)..(62): /note="This region represents a CpG dinucleotide"
  misc_feature (61)..(61): /note="Nucleotide may be methylated to form 5-methylcytosine"
acatggctcaaagggggctccccacaggcagccagggctacagaatcagaaaacatctggcgactctggaaggctcagctggccgccaaacacacaggcctccagttatggacaccagccag

SEQ ID NO: 28571 - DNA, 122 bp, Homo sapiens
  misc_feature (61)..(62): /note="This region represents a CpG dinucleotide"
  misc_feature (61)..(61): /note="Nucleotide may be methylated to form 5-methylcytosine"
atttttaagcactctatgggccaaacgaatgtgcctgctggctggggttggcttcgggcacgcctcccagtaatttccacttaaaggaatgttctgtcttgtgttttagagttgagaagggc

SEQ ID NO: 28572 - DNA, 122 bp, Homo sapiens
  misc_feature (61)..(62): /note="This region represents a CpG dinucleotide"
  misc_feature (61)..(61): /note="Nucleotide may be methylated to form 5-methylcytosine"
agaagattctgcaactggctgaatgggacaaggagcactggataagcagaaaggcagagccgaagatcacaggcagacgctgagcttgagtgagagagaactgtgctgccactcactacagc

SEQ ID NO: 28573 - DNA, 122 bp, Homo sapiens
  misc_feature (61)..(62): /note="This region represents a CpG dinucleotide"
  misc_feature (61)..(61): /note="Nucleotide may be methylated to form 5-methylcytosine"
gtttgaaaattgtatttttgtatgtggcatggcagaatgaaaattagatctagctaatctcggtagatgtcattacaacctggaaaataaatcaccctaagtgacacaaattgaagcatgta

SEQ ID NO: 28574 - DNA, 122 bp, Homo sapiens
  misc_feature (61)..(62): /note="This region represents a CpG dinucleotide"
  misc_feature (61)..(61): /note="Nucleotide may be methylated to form 5-methylcytosine"
aaaagctgtaattacctaagaaaagcatagcatttttgtctgtgcagggctcacctatttcgtatgtctttaaaactttgaccaattataaatcttttagcaaggtagagagtaaaatccta

SEQ ID NO: 28575 - DNA, 122 bp, Homo sapiens
  misc_feature (61)..(62): /note="This region represents a CpG dinucleotide"
  misc_feature (61)..(61): /note="Nucleotide may be methylated to form 5-methylcytosine"
gagtggctggaacacaaatccacctttccgagcacgacccagtgtgcgttccatcacaaacgctgactgtgagccggagtaaaatgcccctgaggaatccagactcaggaaaaaaacactca

SEQ ID NO: 28576 - DNA, 122 bp, Homo sapiens
  misc_feature (61)..(62): /note="This region represents a CpG dinucleotide"
  misc_feature (61)..(61): /note="Nucleotide may be methylated to form 5-methylcytosine"
agaatagaaacctcccaacaaccggggcttctagacacaggcagctagaatgaggcctggcgcaaagcaggtgccaaaactacctgctgaatgaatgggagtgcagagtgcaccccaggtag

SEQ ID NO: 28577 - DNA, 122 bp, Homo sapiens
  misc_feature (61)..(62): /note="This region represents a CpG dinucleotide"
  misc_feature (61)..(61): /note="Nucleotide may be methylated to form 5-methylcytosine"
caacctcctctgtgaatcttgtgctctctctcctccaagcagagtggctagcctgcttctcgcccgctcagcgtacttctcccctgcaccatctccctctgctgtaaatatctagactgtca

SEQ ID NO: 28578 - DNA, 122 bp, Homo sapiens
  misc_feature (61)..(62): /note="This region represents a CpG dinucleotide"
  misc_feature (61)..(61): /note="Nucleotide may be methylated to form 5-methylcytosine"
cagcatggtacttcttatcacacatggagtccacacacctgatgccaagtctccagttggcgcttgtccttaggccacactgccacccacaagagactcagggcgcaggggcaaacaagcca

SEQ ID NO: 28579 - DNA, 122 bp, Homo sapiens
  misc_feature (61)..(62): /note="This region represents a CpG dinucleotide"
  misc_feature (61)..(61): /note="Nucleotide may be methylated to form 5-methylcytosine"
atggcaacctccatcgctctacccagctgacagtgagctccaactttccagccatgtaagcgagtcatcttggaagcaactgtttctgcccgtagttgagtcacccctgctgatgccatatg

SEQ ID NO: 28580 - DNA, 122 bp, Homo sapiens
  misc_feature (61)..(62): /note="This region represents a CpG dinucleotide"
  misc_feature (61)..(61): /note="Nucleotide may be methylated to form 5-methylcytosine"
gtggcatcagaatgcacttagcaagaaatgttcgagaggagaaagaggtttgtaatatgtcgcttttatagaggggggaactttaagtataaaagatcatccactcctctgcgggcttgttt

SEQ ID NO: 28581 - DNA, 122 bp, Homo sapiens
  misc_feature (61)..(62): /note="This region represents a CpG dinucleotide"
  misc_feature (61)..(61): /note="Nucleotide may be methylated to form 5-methylcytosine"
ctgtgatgctcatcatattctggcttattgttgttcaataatacctactttctctactaccgttgtagagaagatttctgagctgggaggagattttgtttttaattatatatcttctaaga

SEQ ID NO: 28582 - DNA, 122 bp, Homo sapiens
  misc_feature (61)..(62): /note="This region represents a CpG dinucleotide"
  misc_feature (61)..(61): /note="Nucleotide may be methylated to form 5-methylcytosine"
cccccacctgggcctccccatttgccctgcagctctgggcctcggggactgggacaaagccgctaccccacctgtagcacctgcagcgtggcctgctctacagagaacaaagcaggggcctc

SEQ ID NO: 28583 - DNA, 122 bp, Homo sapiens
  misc_feature (61)..(62): /note="This region represents a CpG dinucleotide"
  misc_feature (61)..(61): /note="Nucleotide may be methylated to form 5-methylcytosine"
aatttatctccaggatgtggtcagcacacaatattcatgcctccttggttaaataagagacgtgttttccaagtctaatgttgccaaaaagaccacgtcagtgctttctgtggaatggaact

SEQ ID NO: 28584 - DNA, 122 bp, Homo sapiens
  misc_feature (61)..(62): /note="This region represents a CpG dinucleotide"
  misc_feature (61)..(61): /note="Nucleotide may be methylated to form 5-methylcytosine"
aaatccacaatcaagcccttgttgatgcaaatgttagtcgcccaaagcagaatgggttaacgaattactgcagtggttttaggtgcatgggtttgacccatgtaaatcattttaataagtaa

SEQ ID NO: 28585 - DNA, 122 bp, Homo sapiens
  misc_feature (61)..(62): /note="This region represents a CpG dinucleotide"
  misc_feature (61)..(61): /note="Nucleotide may be methylated to form 5-methylcytosine"
cgcccacctacgcctcccagagtgttgggattactggattgagccacgcatctggctgaacgttattttttaaatcaccagagaaagtaaaggagtgctcaaaatagtgtcagatgatgagt

SEQ ID NO: 28586 - DNA, 122 bp, Homo sapiens
  misc_feature (61)..(62): /note="This region represents a CpG dinucleotide"
  misc_feature (61)..(61): /note="Nucleotide may be methylated to form 5-methylcytosine"
acctgagttcaacagggagacctgaactgaaggcagggatctgggaagcagcggcattcacgttcccagtgaggacagtggaagaagacctcaggtcctgaaaaacaccaacagctgaaggg

SEQ ID NO: 28587 - DNA, 122 bp, Homo sapiens
  misc_feature (61)..(62): /note="This region represents a CpG dinucleotide"
  misc_feature (61)..(61): /note="Nucleotide may be methylated to form 5-methylcytosine"
tagagccactcttcctggtgctggactaagaggtgcaggcttggagggtgcagggcggtccgcctctcagacgtagaggcccggcctcggatgaaggcggaagggagggcaccgcctgttgc

SEQ ID NO: 28588 - DNA, 122 bp, Homo sapiens
  misc_feature (61)..(62): /note="This region represents a CpG dinucleotide"
  misc_feature (61)..(61): /note="Nucleotide may be methylated to form 5-methylcytosine"
aaccaagggagatacagacaccgggagttgccaaaggggacaaccacatggcctgggacacgtgggaggctcacggttgaggaagtccttcacactctggataagttcttgaagttcctggt

SEQ ID NO: 28589 - DNA, 122 bp, Homo sapiens
  misc_feature (61)..(62): /note="This region represents a CpG dinucleotide"
  misc_feature (61)..(61): /note="Nucleotide may be methylated to form 5-methylcytosine"
aaggaagcacagaatgacgggcaggttctgtttgctctctcctcagcagtgtttggccagcgcttggatgagactgtggcctatgaacagaaattcggcccccatctggtgcccatcctggt

SEQ ID NO: 28590 - DNA, 122 bp, Homo sapiens
  misc_feature (61)..(62): /note="This region represents a CpG dinucleotide"
  misc_feature (61)..(61): /note="Nucleotide may be methylated to form 5-methylcytosine"
gaatatgtctccagtctacctaactttgaggaagtaaatactgtaaatagatgtttcaaacgcattttaaagcaatgatcctagcatgtctttaagctacagtattgtgctgtctttgaaat

SEQ ID NO: 28591 - DNA, 122 bp, Homo sapiens
  misc_feature (61)..(62): /note="This region represents a CpG dinucleotide"
  misc_feature (61)..(61): /note="Nucleotide may be methylated to form 5-methylcytosine"
atcttgttcgttactgttaactgccacattcagcccaatgcctagctctgaatatgcactcgtaagtattggctgaatgaattaatcattttgttattagtaataatgactctgccactctg

SEQ ID NO: 28592 - DNA, 122 bp, Homo sapiens
  misc_feature (61)..(62): /note="This region represents a CpG dinucleotide"
  misc_feature (61)..(61): /note="Nucleotide may be methylated to form 5-methylcytosine"
gtttcagagacttccattctatggttttagatgtcctctcatccttgcctcagtgttggccgcaggaggactcccctcattggtggttcaagttctatctgaggatgggggaggaagaaatc

SEQ ID NO: 28593 - DNA, 122 bp, Homo sapiens
  misc_feature (61)..(62): /note="This region represents a CpG dinucleotide"
  misc_feature (61)..(61): /note="Nucleotide may be methylated to form 5-methylcytosine"
tccatcctttttgtaagaagatctttttccttcttgaaaccttgggagttgagtggcagccgtaagtaggaaggaggtgcccttgtctttgcttgttctctgtgctcagggaaacttcagaa

SEQ ID NO: 28594 - DNA, 122 bp, Homo sapiens
  misc_feature (61)..(62): /note="This region represents a CpG dinucleotide"
  misc_feature (61)..(61): /note="Nucleotide may be methylated to form 5-methylcytosine"
aaagtatgtgcctgcttcgtacactgaggattctcagaaactggtaaggattcctcttcacgatggcaaactaagactgggattagaaaaacccctggtcacaggaaagtggtcagcaatag

SEQ ID NO: 28595 - DNA, 122 bp, Homo sapiens
  misc_feature (61)..(62): /note="This region represents a CpG dinucleotide"
  misc_feature (61)..(61): /note="Nucleotide may be methylated to form 5-methylcytosine"
tttaatcatggtgactgttgttaaggccatttaacagatgaggaaaatcaggctgacagacggcagagtcgtctgaggcagaacacagaatctgtgttcttcaccactgttacaattctccc

SEQ ID NO: 28596 - DNA, 122 bp, Homo sapiens
  misc_feature (61)..(62): /note="This region represents a CpG dinucleotide"
  misc_feature (61)..(61): /note="Nucleotide may be methylated to form 5-methylcytosine"
attcagcattgtgtctttgggattatgattggcactggatgggctataagtgagttgagacgagagacattgcaaaacatctgatagggcacaggacagcccctacgatgaagaattatcta

SEQ ID NO: 28597 - DNA, 122 bp, Homo sapiens
  misc_feature (61)..(62): /note="This region represents a CpG dinucleotide"
  misc_feature (61)..(61): /note="Nucleotide may be methylated to form 5-methylcytosine"
gtgacccacggaacttagcccctctgttctgtttgcatacctgcaaattgtgggcattcacgccgggactgccaactcaccaggttatttatagtgacaagagagtgagacagtgggcttga

SEQ ID NO: 28598 - DNA, 122 bp, Homo sapiens
  misc_feature (61)..(62): /note="This region represents a CpG dinucleotide"
  misc_feature (61)..(61): /note="Nucleotide may be methylated to form 5-methylcytosine"
gccaaaataagaacagaggaactcacagatgggggttgaagatgcgactcattttggagacgtggtcgttgtcacagtctaggtcctcgtcacctggctccatgctgaacttcctcttgctg

SEQ ID NO: 28599 - DNA, 122 bp, Homo sapiens
  misc_feature (61)..(62): /note="This region represents a CpG dinucleotide"
  misc_feature (61)..(61): /note="Nucleotide may be methylated to form 5-methylcytosine"
tgcaagaattatcctttcccaaatgactcagataaaactcatcgatgcctctcttgtttacgtatgacaaggccaggcaccagacccttcaaattcccattctttgccccataagtgattgg

SEQ ID NO: 28600 - DNA, 122 bp, Homo sapiens
  misc_feature (61)..(62): /note="This region represents a CpG dinucleotide"
  misc_feature (61)..(61): /note="Nucleotide may be methylated to form 5-methylcytosine"
gatcctggggcatcttttctgggcgggggtgggcgtggaggcaggggatggaccaggtgacggctgccgcatgggtggagactatctggctctccatggtctgcttggctgtgctccagaca

SEQ ID NO: 28601 - DNA, 122 bp, Homo sapiens
  misc_feature (61)..(62): /note="This region represents a CpG dinucleotide"
  misc_feature (61)..(61): /note="Nucleotide may be methylated to form 5-methylcytosine"
agcccaggttgggcccaccaggaagacccatgaaacctcagtctgtgaatctggtttaaacggccccgacagtcagacactgctcctggcaccacccaggagcaacaggaatccagcctccg

SEQ ID NO: 28602 - DNA, 122 bp, Homo sapiens
  misc_feature (61)..(62): /note="This region represents a CpG dinucleotide"
  misc_feature (61)..(61): /note="Nucleotide may be methylated to form 5-methylcytosine"
aggaataagtgaatagctattcatccttagaccctgtccaaacagagcaacagtcatatacgccaccatagataaagagatccagagaactctcaaaccctttttccataattggaaattat

SEQ ID NO: 28603 - DNA, 122 bp, Homo sapiens
  misc_feature (61)..(62): /note="This region represents a CpG dinucleotide"
  misc_feature (61)..(61): /note="Nucleotide may be methylated to form 5-methylcytosine"
ctttccttctcgcttgacaatgaaggcattctttttcactgcttaacccaagagtagctacgctggctggctcagaattgcatgacactggtcaggtatgtaagcaactcagtgcctttcct

SEQ ID NO: 28604 - DNA, 122 bp, Homo sapiens
  misc_feature (61)..(62): /note="This region represents a CpG dinucleotide"
  misc_feature (61)..(61): /note="Nucleotide may be methylated to form 5-methylcytosine"
ttttggactcagattgagccactactggcttatttcttccccagcttgcagacggcttgacgtgggacttcttcgccttgttattgtgtgagccagttctccctaataagctccctttcata

SEQ ID NO: 28605 - DNA, 122 bp, Homo sapiens
  misc_feature (61)..(62): /note="This region represents a CpG dinucleotide"
  misc_feature (61)..(61): /note="Nucleotide may be methylated to form 5-methylcytosine"
actggacaagaagggagcataataaaggctctgaagcagcagacatccaaggagcatccacggggaaccagcaccatgctgaagatcaacactcatgctgactctgcagaccaagtacccct

SEQ ID NO: 28606 - DNA, 122 bp, Homo sapiens
  misc_feature (61)..(62): /note="This region represents a CpG dinucleotide"
  misc_feature (61)..(61): /note="Nucleotide may be methylated to form 5-methylcytosine"
aaatatatttgctgtatccaaaagtaaatacgttctgtcttgcttcctcatcttcatgcacgttactttactgtacctggtattcctttcttctttacttctatccaattcttcacctagcc

SEQ ID NO: 28607 - DNA, 122 bp, Homo sapiens
  misc_feature (61)..(62): /note="This region represents a CpG dinucleotide"
  misc_feature (61)..(61): /note="Nucleotide may be methylated to form 5-methylcytosine"
atctaaaaattaaatgagctgataaagaacgccgtcagcacagagcagacgctgggtgttcgcgctcttgagcgtgcgctctgcggggcgcgggctggtggcgggcgggggtcgccggctcc

SEQ ID NO: 28608 - DNA, 122 bp, Homo sapiens
  misc_feature (61)..(62): /note="This region represents a CpG dinucleotide"
  misc_feature (61)..(61): /note="Nucleotide may be methylated to form 5-methylcytosine"
cagaatggggagaggggaacaggagagtcaagtcacgtagaaggcggtgagtcagaaggacggtgcagagccaacatgtctcttgggctgtctgcatcatttaacttgtcaagatggctgtt

SEQ ID NO: 28609 - DNA, 122 bp, Homo sapiens
  misc_feature (61)..(62): /note="This region represents a CpG dinucleotide"
  misc_feature (61)..(61): /note="Nucleotide may be methylated to form 5-methylcytosine"
actgctaaaggtgttaggtgttcagtggcaggagtctgggttcgaatttagacagcctagcgacagagctagtgcttgtaaccactatgtcatgcatgacagttggtagtcaagtactacct

SEQ ID NO: 28610 - DNA, 122 bp, Homo sapiens
  misc_feature (61)..(62): /note="This region represents a CpG dinucleotide"
  misc_feature (61)..(61): /note="Nucleotide may be methylated to form 5-methylcytosine"
aaaagtaatagtatctcttttctacagatcacaaatagaagctcagggaggttaactccccgacaaagctacacaggtaactagagctgaacctggatacctgactaagaagttcatgctct

SEQ ID NO: 28611 - DNA, 122 bp, Homo sapiens
  misc_feature (61)..(62): /note="This region represents a CpG dinucleotide"
  misc_feature (61)..(61): /note="Nucleotide may be methylated to form 5-methylcytosine"
tttttacagtatgaaaatgacaccaatcatctagagaacaggaaaattaaaatcccccaacgtgtagcatctgcttttccagacgatttcagtttggagataactgtcaattacaggaacaa

SEQ ID NO: 28612 - DNA, 122 bp, Homo sapiens
  misc_feature (61)..(62): /note="This region represents a CpG dinucleotide"
  misc_feature (61)..(61): /note="Nucleotide may be methylated to form 5-methylcytosine"
gtgcatttggagccagtgcagtaagaggtggggtccccagagtttcctgccaagagtctgcgacatttgtgtgtgtttcactaggtttcataacggctcactcctggaggtcattgctgcgc

SEQ ID NO: 28613 - DNA, 122 bp, Homo sapiens
  misc_feature (61)..(62): /note="This region represents a CpG dinucleotide"
  misc_feature (61)..(61): /note="Nucleotide may be methylated to form 5-methylcytosine"
gatggtctccatctcatgacctcctgatctgcctgcctcccagagtgctgggattacaggcgtgagccaccacacctggccgggtagggtgtaatttccaaagttgacctcacgttgaacct

SEQ ID NO: 28614 - DNA, 122 bp, Homo sapiens
  misc_feature (61)..(62): /note="This region represents a CpG dinucleotide"
  misc_feature (61)..(61): /note="Nucleotide may be methylated to form 5-methylcytosine"
gagaaatgcatcactaggcaatttcattgttgtgcgaacatcaccacacctggatggtggcgcctactacacacctaggctacagggtacagtctattcctccttggctacaaacctgtaca

SEQ ID NO: 28615 - DNA, 122 bp, Homo sapiens
  misc_feature (61)..(62): /note="This region represents a CpG dinucleotide"
  misc_feature (61)..(61): /note="Nucleotide may be methylated to form 5-methylcytosine"
agctagtcctaaaaaaccagttacccaagtatgttcaggaaatctgccttacagctgttgcgcaaattagctttgagcatttgagtagactacagtgtgaaccagcaatgagatgttataac

SEQ ID NO: 28616 - DNA, 122 bp, Homo sapiens
  misc_feature (61)..(62): /note="This region represents a CpG dinucleotide"
  misc_feature (61)..(61): /note="Nucleotide may be methylated to form 5-methylcytosine"
tagctggcctgcaggtacaaaaagagtgagggacatgtatgcagagcaggctcagcccaacggtggcttagagctgcccagccaacatcagcctcatctagccaacctccagctgactcaca

SEQ ID NO: 28617 - DNA, 122 bp, Homo sapiens
  misc_feature (61)..(62): /note="This region represents a CpG dinucleotide"
  misc_feature (61)..(61): /note="Nucleotide may be methylated to form 5-methylcytosine"
aggaggtggttaggattttctctcatatgtatcatgattaatgattacttgttaactctgcggaacataggaaagagtactagttacagaagggtaataagtaacatttaaacccgtatacc

SEQ ID NO: 28618 - DNA, 122 bp, Homo sapiens
  misc_feature (61)..(62): /note="This region represents a CpG dinucleotide"
  misc_feature (61)..(61): /note="Nucleotide may be methylated to form 5-methylcytosine"
cgagcattcgaaaccaggtctgccaggcagcaaaggctaaatggtattttaaaaaggtgtcgcttctgagtgtatgtgttcaaggaatctctaggtaaaatacaagcatagcttccatgtag

SEQ ID NO: 28619 - DNA, 122 bp, Homo sapiens
  misc_feature (61)..(62): /note="This region represents a CpG dinucleotide"
  misc_feature (61)..(61): /note="Nucleotide may be methylated to form 5-methylcytosine"
taaaggaaagcgacaatctccttggtttcacaggggatttcacggcagcagggatcccgccggtgagcctcactgcccgctgctgccgcctccgcagagtgggcaggcagggtgcgcaggca

SEQ ID NO: 28620 - DNA, 122 bp, Homo sapiens
  misc_feature (61)..(62): /note="This region represents a CpG dinucleotide"
  misc_feature (61)..(61): /note="Nucleotide may be methylated to form 5-methylcytosine"
gtttgttgaagagcaggttgcagtaatctggtgagaggtggtgagtggttaaggaagttgcggtagaactacagagattatgcagaaagaagtgtcctgggaggcagtttagcttaaggcat

SEQ ID NO: 28621 - DNA, 122 bp, Homo sapiens
  misc_feature (61)..(62): /note="This region represents a CpG dinucleotide"
  misc_feature (61)..(61): /note="Nucleotide may be methylated to form 5-methylcytosine"
actaggtaaatgacagtcacagcggattccaggggttgtgtccacgatcccggggggcgtcggctttgagcagcctcaaggggagggttttgtctggctccttgcttcctctcgcgccgagc

SEQ ID NO: 28622 - DNA, 122 bp, Homo sapiens
  misc_feature (61)..(62): /note="This region represents a CpG dinucleotide"
  misc_feature (61)..(61): /note="Nucleotide may be methylated to form 5-methylcytosine"
ggtggagcccaaatggaaaggtgattttagtcagctcagtgggcagaaattagaattctacgccactgaaatagttggactttgcagggcaaggaactagagaaatggaagccctgtgacag

SEQ ID NO: 28623 - DNA, 122 bp, Homo sapiens
  misc_feature (61)..(62): /note="This region represents a CpG dinucleotide"
  misc_feature (61)..(61): /note="Nucleotide may be methylated to form 5-methylcytosine"
gcaagccatgcttagcattttccaaacccacatgtgggttctcttgcctctgagtgaaggcgtttgtaagagttgggtggctcactcgtacctatacctctggcagggggttcttagggatg

SEQ ID NO: 28624 - DNA, 122 bp, Homo sapiens
  misc_feature (61)..(62): /note="This region represents a CpG dinucleotide"
  misc_feature (61)..(61): /note="Nucleotide may be methylated to form 5-methylcytosine"
tttgtcctcgatgtccaccccagtgcctttcgggtagtcactgctcagttaacgtggaggcgtggactaacacacagaaccttgtaggatcgcatgcaagattcaaacagttttcctcaggc

SEQ ID NO: 28625 - DNA, 122 bp, Homo sapiens
  misc_feature (61)..(62): /note="This region represents a CpG dinucleotide"
  misc_feature (61)..(61): /note="Nucleotide may be methylated to form 5-methylcytosine"
aactggtcagtcatcagataaactcttccaattgttcacatgttcctcaacaggataccacgtaatagactgacagctcatcagtcttcaatgaggatagggaaatgtctccctccagccat

SEQ ID NO: 28626 - DNA, 122 bp, Homo sapiens
  misc_feature (61)..(62): /note="This region represents a CpG dinucleotide"
  misc_feature (61)..(61): /note="Nucleotide may be methylated to form 5-methylcytosine"
ccaccccaccccactcactctgtacttgcagtgagccaggccatagtcaccaatcttcaccgtcaggtcagccgtgagcaggcagttccgcagggccaggtcgctgcaggcaggggcagggg

SEQ ID NO: 28627 - DNA, 122 bp, Homo sapiens
  misc_feature (61)..(62): /note="This region represents a CpG dinucleotide"
  misc_feature (61)..(61): /note="Nucleotide may be methylated to form 5-methylcytosine"
gactgtgagtggcctgaccccagatcttggaagcagtacatgcatcacttcagtgtgaagcgtcctgggtaggtcaagctgtgctcccagaagtagaacaaacattgcagagcagagccaga

SEQ ID NO: 28628 - DNA, 122 bp, Homo sapiens
  misc_feature (61)..(62): /note="This region represents a CpG dinucleotide"
  misc_feature (61)..(61): /note="Nucleotide may be methylated to form 5-methylcytosine"
caagaaatggtcaacaacaaaaaaagaaaacttaaaagtcttaatgtccctgaaaccatacgaaaagtaagtatttaggaagtgttcaacaatgccagctacttcagagagatcaaattaaa

SEQ ID NO: 28629 - DNA, 122 bp, Homo sapiens
  misc_feature (61)..(62): /note="This region represents a CpG dinucleotide"
  misc_feature (61)..(61): /note="Nucleotide may be methylated to form 5-methylcytosine"
gctgatggcaagaatggggttcctggaggtgctggctccctctgcaggctgcagtcatggcgagtcaattctaaactcaccatcacagctcacactgtaaaggacacataccttagtataaa

SEQ ID NO: 28630 - DNA, 122 bp, Homo sapiens
  misc_feature (61)..(62): /note="This region represents a CpG dinucleotide"
  misc_feature (61)..(61): /note="Nucleotide may be methylated to form 5-methylcytosine"
agccttcatcctctgggtaactcctacctggtcttccagagcacgcccacgtaacaggcacgccgtaagtgttgaaccaaacaccagacactgctcaggggccataggaactgagagagctg

SEQ ID NO: 28631 - DNA, 122 bp, Homo sapiens
  misc_feature (61)..(62): /note="This region represents a CpG dinucleotide"
  misc_feature (61)..(61): /note="Nucleotide may be methylated to form 5-methylcytosine"
ttccagatgaagacaccgactcagagaggtttagtaattggctcaattggtcatgtagctcgtagatgccagagccaggttttaacccggtgaactaaggtcaaagctctttctatcatgga

SEQ ID NO: 28632 - DNA, 122 bp, Homo sapiens
  misc_feature (61)..(62): /note="This region represents a CpG dinucleotide"
  misc_feature (61)..(61): /note="Nucleotide may be methylated to form 5-methylcytosine"
cagaggacctgctatgtggcaggaagtgctgggagccctgaacacatgtatggccctcctcgaggactgactgagcagctctggctgatgggggtgtggctgagggggaggaggggaggggc

SEQ ID NO: 28633 - DNA, 122 bp, Homo sapiens
  misc_feature (61)..(62): /note="This region represents a CpG dinucleotide"
  misc_feature (61)..(61): /note="Nucleotide may be methylated to form 5-methylcytosine"
catgacttctgttagaagatccagccgagggtgtgtattgtgtgtaagatcttttgcaaccgatactcatgagagttctgttggccactgttgagacagcctctattgggaagattctgtaa

SEQ ID NO: 28634 - DNA, 122 bp, Homo sapiens
  misc_feature (61)..(62): /note="This region represents a CpG dinucleotide"
  misc_feature (61)..(61): /note="Nucleotide may be methylated to form 5-methylcytosine"
tcatccaccgcttccggcctgagctcatgtgagtctggggcccaggctggcccctggagacgagggatgccaaggccattctgctgcatgcagaatcttcattacttggttcaatatttctc

SEQ ID NO: 28635 - DNA, 122 bp, Homo sapiens
  misc_feature (61)..(62): /note="This region represents a CpG dinucleotide"
  misc_feature (61)..(61): /note="Nucleotide may be methylated to form 5-methylcytosine"
ttcttttagatcagcctgagatatggggttcaggccaaccaattaatccaagcatggagtcgccaaagttaacaaggccttttcccactggaagtaagttatgtgtctgctctgtctggaaa

SEQ ID NO: 28636 - DNA, 122 bp, Homo sapiens
  misc_feature (61)..(62): /note="This region represents a CpG dinucleotide"
  misc_feature (61)..(61): /note="Nucleotide may be methylated to form 5-methylcytosine"
gcactgccagattagaatgcctcaaaggcctaatgactcctaagtggctcaccgtcagctcggtacagctaagcaattcccatgctgctcaggagtcatgtattatgctggcaggctgcctc

SEQ ID NO: 28637 - DNA, 122 bp, Homo sapiens
  misc_feature (61)..(62): /note="This region represents a CpG dinucleotide"
  misc_feature (61)..(61): /note="Nucleotide may be methylated to form 5-methylcytosine"
cctgcgaattgaagctgggtgctgctagtgctgggggcaggcgtgggggagtcgcggaggcggggaggggggctgggcagaggttggaacgtctatttttagtgagggttttatagagtgga

SEQ ID NO: 28638 - DNA, 122 bp, Homo sapiens
  misc_feature (61)..(62): /note="This region represents a CpG dinucleotide"
  misc_feature (61)..(61): /note="Nucleotide may be methylated to form 5-methylcytosine"
tgtctccctgtgtctgtgtgtgcctgcgtgtctgtgtgcatccctgtgtctgtgtgtgtccgtgtctgcgcatctctgtatctgtgtgtgtctgcgtgtctgtgtgtgtccgtgtgcatgtg

SEQ ID NO: 28639 - DNA, 122 bp, Homo sapiens
  misc_feature (61)..(62): /note="This region represents a CpG dinucleotide"
  misc_feature (61)..(61): /note="Nucleotide may be methylated to form 5-methylcytosine"
tgaatttaaagaaccactggcaagtgccacgtcctctgtgtttgagttctaaagatagtccgttgagcacactgcttaccttctagtaatttctcgctgaatggacattagaagccattata

SEQ ID NO: 28640 - DNA, 122 bp, Homo sapiens
  misc_feature (61)..(62): /note="This region represents a CpG dinucleotide"
  misc_feature (61)..(61): /note="Nucleotide may be methylated to form 5-methylcytosine"
cattcagtaaacgtttcatgagctcctactgtgtgctgggcatagctctcggctggttcacggacctgatgttctcaaagggaaaacaaatgatcagcagataagcaaagccacgcgcagta

SEQ ID NO: 28641 - DNA, 122 bp, Homo sapiens
  misc_feature (61)..(62): /note="This region represents a CpG dinucleotide"
  misc_feature (61)..(61): /note="Nucleotide may be methylated to form 5-methylcytosine"
tgaaagaatcttcttccttccttgactcatgatgagttacctgcattccacatcccaaagcgggtcagtgtgtaatcaggacagagcttttacctgaagtaagccaagttacagatccaaaa

SEQ ID NO: 28642 - DNA, 122 bp, Homo sapiens
  misc_feature (61)..(62): /note="This region represents a CpG dinucleotide"
  misc_feature (61)..(61): /note="Nucleotide may be methylated to form 5-methylcytosine"
gtgctgctgaggacggggtgtctagggacagggtggggcagcccccctcctggatagaatcgcctcattgtgggctggactgtggccccaggcactgcccccaccctctgcccccatcccac

SEQ ID NO: 28643 - DNA, 122 bp, Homo sapiens
  misc_feature (61)..(62): /note="This region represents a CpG dinucleotide"
  misc_feature (61)..(61): /note="Nucleotide may be methylated to form 5-methylcytosine"
ttctctgtccagctttattggtcacacttgcagttagactggtctggccgatggccacaccgcggatgaggaatgtgatggtgtagttgtcaagggcttcatcaagggccctgaaacagagg

SEQ ID NO: 28644 - DNA, 122 bp, Homo sapiens
  misc_feature (61)..(62): /note="This region represents a CpG dinucleotide"
  misc_feature (61)..(61): /note="Nucleotide may be methylated to form 5-methylcytosine"
ccaaacataggaagatctcccatttgttaaatgggaaaaaatccatacagaaccattcaacgacatagtataaacattgtgcaagaacaaactgtgtgtctatgtgggtgaatgcattgaaa

SEQ ID NO: 28645 - DNA, 122 bp, Homo sapiens
  misc_feature (61)..(62): /note="This region represents a CpG dinucleotide"
  misc_feature (61)..(61): /note="Nucleotide may be methylated to form 5-methylcytosine"
ttgtttgttgttttaaataattttcagtttcactaggggtgaatcccgagctcttcatgccgtcctgctgttagtctctcttggtattattcttcacctttcctgtgagtttaaaattatct

SEQ ID NO: 28646 - DNA, 122 bp, Homo sapiens
  misc_feature (61)..(62): /note="This region represents a CpG dinucleotide"
  misc_feature (61)..(61): /note="Nucleotide may be methylated to form 5-methylcytosine"
gtccccaggaaggctagcccaactaagtttagaaaggagaagagcagttgggcaatgtggcgtcctggccagtcaatgtgtgccgattgtttatgagcaacactcaagttgatgttacaagc

SEQ ID NO: 28647 - DNA, 122 bp, Homo sapiens
  misc_feature (61)..(62): /note="This region represents a CpG dinucleotide"
  misc_feature (61)..(61): /note="Nucleotide may be methylated to form 5-methylcytosine"
gtcagggggcagaaggaaaccatgggcaagagcctttattatcgtttccgagggaaggaacgggtgaggcagagaatccaggtttaggattagctaattagaataatttcagcaggctctga

SEQ ID NO: 28648 - DNA, 122 bp, Homo sapiens
  misc_feature (61)..(62): /note="This region represents a CpG dinucleotide"
  misc_feature (61)..(61): /note="Nucleotide may be methylated to form 5-methylcytosine"
ccattggaccgctacatcctggtggacattgatgacatcttcgtgggcaaggagggcacacgcatgaaggtggaggacgtgaaggtatggccgggggtgctagaccgggcaaggcaggtggg

SEQ ID NO: 28649 - DNA, 122 bp, Homo sapiens
  misc_feature (61)..(62): /note="This region represents a CpG dinucleotide"
  misc_feature (61)..(61): /note="Nucleotide may be methylated to form 5-methylcytosine"
ttaataagtaaaatgttgatcatggaagatccaggctagattttagattgagtctgtgtacgttggctctgcagtgatggcaaggattacaaaatgatttctgtctatagtagctttgggaa

SEQ ID NO: 28650 - DNA, 122 bp, Homo sapiens
  misc_feature (61)..(62): /note="This region represents a CpG dinucleotide"
  misc_feature (61)..(61): /note="Nucleotide may be methylated to form 5-methylcytosine"
ctgttgttgaagttctgtgagattgcctgtgttcacaggagaatgcccggctgaggtaggcgtgccaggctagtgcatggcaacaccaagacctggctgatggagctaggcctgttatggac

SEQ ID NO: 28651 - DNA, 122 bp, Homo sapiens
  misc_feature (61)..(62): /note="This region represents a CpG dinucleotide"
  misc_feature (61)..(61): /note="Nucleotide may be methylated to form 5-methylcytosine"
cctcaacagttaatctgagaaccaagccaactactaagtaactaacggggcaggttgcatcgacagtttagagacactggacaaagggatgattcacatcatagatgggatggagcaggatg

SEQ ID NO: 28652 - DNA, 122 bp, Homo sapiens
  misc_feature (61)..(62): /note="This region represents a CpG dinucleotide"
  misc_feature (61)..(61): /note="Nucleotide may be methylated to form 5-methylcytosine"
gatgccctacattaacagaaacagcctgaaaaccagggggtctgaaaacacatcccttcacggagcttaacagtcactcagggttaacaccacggggctacaatctgctgcaagagacagtg

SEQ ID NO: 28653 - DNA, 122 bp, Homo sapiens
  misc_feature (61)..(62): /note="This region represents a CpG dinucleotide"
  misc_feature (61)..(61): /note="Nucleotide may be methylated to form 5-methylcytosine"
acagtcacacatacctggaagaagcaatggtccctgcatttctgtggtacgggtatcccacgccagccagccctggaagctctctactgtgccgtaagccaaccacctttcctagctcaaga

SEQ ID NO: 28654 - DNA, 122 bp, Homo sapiens
  misc_feature (61)..(62): /note="This region represents a CpG dinucleotide"
  misc_feature (61)..(61): /note="Nucleotide may be methylated to form 5-methylcytosine"
gagggaggatcccggcctaacctcagctctcctgttctcctcagacctctgtgtgagcggcggaagtttcttcatgacaacatggttgaaattccaaaccggatcatgttctcagaaatgaa

SEQ ID NO: 28655 - DNA, 122 bp, Homo sapiens
  misc_feature (61)..(62): /note="This region represents a CpG dinucleotide"
  misc_feature (61)..(61): /note="Nucleotide may be methylated to form 5-methylcytosine"
tggcattgtacagcccacagccaaatctggcctgtttttataaataacacttcatgaagccgcagccacactcattcatttacatactgtctatggttactttcacatcaccacagctaagc

SEQ ID NO: 28656 - DNA, 122 bp, Homo sapiens
  misc_feature (61)..(62): /note="This region represents a CpG dinucleotide"
  misc_feature (61)..(61): /note="Nucleotide may be methylated to form 5-methylcytosine"
catactccagcagggtccttattttaatattttttactgtaattacctctttaggagatgcgcaactagttgtgttcttcttttttatattttttctcagttttcttccatatagactgaga

SEQ ID NO: 28657 - DNA, 122 bp, Homo sapiens
  misc_feature (61)..(62): /note="This region represents a CpG dinucleotide"
  misc_feature (61)..(61): /note="Nucleotide may be methylated to form 5-methylcytosine"
tgcctcagaagactagtcatttggcaagtcgtaaattgcaaagaaacctgtgaataagagcgagtataatacatacactgggctttcaggatgaactaagctcttgaatgtccaaaaagcac

SEQ ID NO: 28658 - DNA, 122 bp, Homo sapiens
  misc_feature (61)..(62): /note="This region represents a CpG dinucleotide"
  misc_feature (61)..(61): /note="Nucleotide may be methylated to form 5-methylcytosine"
acacaggatataagacagccaaaggcaatattccttactcacattactcatgcaaagtctcgtgatgagcagcggcggaagtcatgggataaacaaaaacaaatccatgaccctcgaaacca

SEQ ID NO: 28659 - DNA, 122 bp, Homo sapiens
  misc_feature (61)..(62): /note="This region represents a CpG dinucleotide"
  misc_feature (61)..(61): /note="Nucleotide may be methylated to form 5-methylcytosine"
ccacggcctggcccctggggtgcaccagctaacctctccaaggccaagtttccccaaacacgggagaaagtcacagcacctacctcgtagggtcattgtgaaaatgaagtgagaaaatgccc

SEQ ID NO: 28660 - DNA, 122 bp, Homo sapiens
  misc_feature (61)..(62): /note="This region represents a CpG dinucleotide"
  misc_feature (61)..(61): /note="Nucleotide may be methylated to form 5-methylcytosine"
ttttaaataaatgagtggatttgcatttataaaatctgcaacagcaaaatataaaaacaacgactggagcaatactctgaatgaagcaaataaaaatgcaataccaataaaatgtcacacct

SEQ ID NO: 28661 - DNA, 122 bp, Homo sapiens
  misc_feature (61)..(62): /note="This region represents a CpG dinucleotide"
  misc_feature (61)..(61): /note="Nucleotide may be methylated to form 5-methylcytosine"
ccaccggggcctggctcttctccgggtcgtacaaccgcgtgcagctttggctggtcgggacgcgcggggaggcggagctggagctgcagctgcggcccgcgcggggcgaggtcagcgcgggg

SEQ ID NO: 28662 - DNA, 122 bp, Homo sapiens
  misc_feature (61)..(62): /note="This region represents a CpG dinucleotide"
  misc_feature (61)..(61): /note="Nucleotide may be methylated to form 5-methylcytosine"
tatagtcagttgaacccactgttaccattgttcttatcccatgggaagcagttggttacacgattcttattttataagaaacagctgagaggcactatggattagtcttctgaagtgaagga

SEQ ID NO: 28663 - DNA, 122 bp, Homo sapiens
  misc_feature (61)..(62): /note="This region represents a CpG dinucleotide"
  misc_feature (61)..(61): /note="Nucleotide may be methylated to form 5-methylcytosine"
ctggctgatatttgttaatttttaagagtgagagactaaaatgctgattaagcacacgaacggggcttaccaattgtgacattgacagtgaggtgatttgactgggccatttagtggagaaa

SEQ ID NO: 28664 - DNA, 122 bp, Homo sapiens
  misc_feature (61)..(62): /note="This region represents a CpG dinucleotide"
  misc_feature (61)..(61): /note="Nucleotide may be methylated to form 5-methylcytosine"
agcattcacaagccactcatcagtttttctgcttcttggtagaagctctcctcaaaactacgcattgagtgcctactatgtgcctaacactgacggatacagacatgagttgctgccctcat

SEQ ID NO: 28665 - DNA, 122 bp, Homo sapiens
  misc_feature (61)..(62): /note="This region represents a CpG dinucleotide"
  misc_feature (61)..(61): /note="Nucleotide may be methylated to form 5-methylcytosine"
aaattctacagttatgatatttttataattatgctcttttgtaatcagtttgattgcatacgtgtgaaagtgctctgggagaaaaattcaatatagatgcaaggtatgactaacagcttttg

SEQ ID NO: 28666 - DNA, 122 bp, Homo sapiens
  misc_feature (61)..(62): /note="This region represents a CpG dinucleotide"
  misc_feature (61)..(61): /note="Nucleotide may be methylated to form 5-methylcytosine"
atgtacctactgtagaatcttcccacacccctgggttgttaagagtaactagcagaggcacgtcccatacactccccaaatatctgagctggcaacaacaacagatattcagagaccttagc

SEQ ID NO: 28667 - DNA, 122 bp, Homo sapiens
  misc_feature (61)..(62): /note="This region represents a CpG dinucleotide"
  misc_feature (61)..(61): /note="Nucleotide may be methylated to form 5-methylcytosine"
ctggggctggaaagggcccagtgcacagccaggcaggtggggtggcccacacttgcctgtcgctgttgctcagctccggatcagcactgtcttccgaacccaaagaggctgggagatatttt

SEQ ID NO: 28668 - DNA, 122 bp, Homo sapiens
  misc_feature (61)..(62): /note="This region represents a CpG dinucleotide"
  misc_feature (61)..(61): /note="Nucleotide may be methylated to form 5-methylcytosine"
aggatgattgctcatcaacctggtcgtaccctgacttccagggtccttgggtgcaacatccggagctagtccagagtaccgccaatggccttgtcacacatacacagcaaatgtgcaaagac

SEQ ID NO: 28669 - DNA, 122 bp, Homo sapiens
  misc_feature (61)..(62): /note="This region represents a CpG dinucleotide"
  misc_feature (61)..(61): /note="Nucleotide may be methylated to form 5-methylcytosine"
tcaataaatccatggtatcatggctatatctttttcctctttactaaattatttaacccacgttataatttgaaaatttatcttggaactttaacattgtagaaacgttgggtttggacatt

SEQ ID NO: 28670 - DNA, 122 bp, Homo sapiens
  misc_feature (61)..(62): /note="This region represents a CpG dinucleotide"
  misc_feature (61)..(61): /note="Nucleotide may be methylated to form 5-methylcytosine"
tcagccgtgcactgggacagttctgtgggcagtggcaggaagccttcagtcggtgaacagcgtgaagacagcctgatgcatgcaaggcgtggggatgtgattgtgtgagcagatcaatacct

SEQ ID NO: 28671 - DNA, 122 bp, Homo sapiens
  misc_feature (61)..(62): /note="This region represents a CpG dinucleotide"
  misc_feature (61)..(61): /note="Nucleotide may be methylated to form 5-methylcytosine"
gacaaaaattttgcaatccctgggcactacagaaagatgtctcatgtgagagccaattaacgtaaggtgtatttggattctgtttgatatagcatgagatgagcttgatcagactagtattt

SEQ ID NO: 28672 - DNA, 122 bp, Homo sapiens
  misc_feature (61)..(62): /note="This region represents a CpG dinucleotide"
  misc_feature (61)..(61): /note="Nucleotide may be methylated to form 5-methylcytosine"
agctgagattcagctcctggctatctagtttcagagtcttaggcacctagccacttgatacgctgcctctccctagacgtgtccgctaagaactagagtgagaacagactatgataagggcc

SEQ ID NO: 28673 - DNA, 122 bp, Homo sapiens
  misc_feature (61)..(62): /note="This region represents a CpG dinucleotide"
  misc_feature (61)..(61): /note="Nucleotide may be methylated to form 5-methylcytosine"
agaacttccgtctgtcccaggatgacatcaagggcattcaggagctctatggtaaacctccgggcgggggttgggggtggagggtgaggaggggggaggtcatgtagcctgggatggaggcc

SEQ ID NO: 28674 - DNA, 122 bp, Homo sapiens
  misc_feature (61)..(62): /note="This region represents a CpG dinucleotide"
  misc_feature (61)..(61): /note="Nucleotide may be methylated to form 5-methylcytosine"
caggcgccgcaggttcccgagctcctgcaggtgggcagagagtcagagcgcggatgggcacgaagcagggggccagccccaccctgactcaccgggggcagtgctgacagctggttccggtc

SEQ ID NO: 28675 - DNA, 122 bp, Homo sapiens
  misc_feature (61)..(62): /note="This region represents a CpG dinucleotide"
  misc_feature (61)..(61): /note="Nucleotide may be methylated to form 5-methylcytosine"
atcattactatcaattttagaggcacagacttccttctaaataagactcctttccaaacacgtacatctagagccattcattctatcttctcccactgttagaatgtccttatcttaagcca

SEQ ID NO: 28676 - DNA, 122 bp, Homo sapiens
  misc_feature (61)..(62): /note="This region represents a CpG dinucleotide"
  misc_feature (61)..(61): /note="Nucleotide may be methylated to form 5-methylcytosine"
tttttcttctttttcttcaagttatggctgtgtctcctgcttttcccatttcttcccaggcgtgtctttcacaaagaaatacaacaaaagttggaatatctaatccattaaaagaaaaaaga

SEQ ID NO: 28677 - DNA, 122 bp, Homo sapiens
  misc_feature (61)..(62): /note="This region represents a CpG dinucleotide"
  misc_feature (61)..(61): /note="Nucleotide may be methylated to form 5-methylcytosine"
gatgtaaataggcagttgttgttacataggtctgaaactcagaggttgcctctgtgttggcgatgtcagttggaagccattaattcactgatggtatttaaaatagtgagaggggaggaaat

SEQ ID NO: 28678 - DNA, 122 bp, Homo sapiens
  misc_feature (61)..(62): /note="This region represents a CpG dinucleotide"
  misc_feature (61)..(61): /note="Nucleotide may be methylated to form 5-methylcytosine"
atgaatacctgaaactaaaagtcagaaaccaatccaaatcagtcagtgtccgcacagaaacggaccatttgagtgtttcaaaaagaattcagttcagggaattggtcatacaggggatggaa

SEQ ID NO: 28679 - DNA, 122 bp, Homo sapiens
  misc_feature (61)..(62): /note="This region represents a CpG dinucleotide"
  misc_feature (61)..(61): /note="Nucleotide may be methylated to form 5-methylcytosine"
tgcttgcttgctgggtggatcagctccatgagggaccaaaaaatcaaatacctgtggcagcgccaagtgggcaaattgtaggatagggtgggctagttatagacaaacctgtgcaaaccaga

SEQ ID NO: 28680 - DNA, 122 bp, Homo sapiens
  misc_feature (61)..(62): /note="This region represents a CpG dinucleotide"
  misc_feature (61)..(61): /note="Nucleotide may be methylated to form 5-methylcytosine"
accctcatagagtccattgcaccccgccactacctccactggaaaaggcattggtatccacggctgagagatccatcgatgactcacatcacaggactctgtccagacaacccccagtatga

SEQ ID NO: 28681 - DNA, 122 bp, Homo sapiens
  misc_feature (61)..(62): /note="This region represents a CpG dinucleotide"
  misc_feature (61)..(61): /note="Nucleotide may be methylated to form 5-methylcytosine"
ccacttatactctgagcttgaaacaactgctttatgccacaaaattcctattgctgtctccgttagtgactaattcaatatgtcctgaatgtcaacgtatttttattactcagctaaagttg

SEQ ID NO: 28682 - DNA, 122 bp, Homo sapiens
  misc_feature (61)..(62): /note="This region represents a CpG dinucleotide"
  misc_feature (61)..(61): /note="Nucleotide may be methylated to form 5-methylcytosine"
ggggaaagctaacctgtcctgtgtgattcatctgattatgaatccaggctctgactacatcgtatgtctagtttggttcagtgaaacattaacccgtttctctttatcgtggattgtggcag

SEQ ID NO: 28683 - DNA, 122 bp, Homo sapiens
  misc_feature (61)..(62): /note="This region represents a CpG dinucleotide"
  misc_feature (61)..(61): /note="Nucleotide may be methylated to form 5-methylcytosine"
ccacccttaaaatcttctgcataaagtcagtactggataaaatagtcatattctttcccccgtcaaaccccagtaagtacttagtcatattactagggaaacatttaccatagtctttcaaa

SEQ ID NO: 28684 - DNA, 122 bp, Homo sapiens
  misc_feature (61)..(62): /note="This region represents a CpG dinucleotide"
  misc_feature (61)..(61): /note="Nucleotide may be methylated to form 5-methylcytosine"
aagttgctagccaatcgggacaaatacagaatgtgaggtcctgttctagccaatggaaaccggacacagcagtaaggtggtaaggtggacgcatcaagttataaatgaccctgtctcctttg

SEQ ID NO: 28685 - DNA, 122 bp, Homo sapiens
  misc_feature (61)..(62): /note="This region represents a CpG dinucleotide"
  misc_feature (61)..(61): /note="Nucleotide may be methylated to form 5-methylcytosine"
ccccatctcttaaaaaaatctgaagcagatcacatcatccttccctgctgggaacccacacgtgaccctgttctactcatcacagtccaggcagccctgcaggatctggccctatcacctct

SEQ ID NO: 28686 - DNA, 122 bp, Homo sapiens
  misc_feature (61)..(62): /note="This region represents a CpG dinucleotide"
  misc_feature (61)..(61): /note="Nucleotide may be methylated to form 5-methylcytosine"
tgtcactgaaacctttcccagccttggtcttcccctctgtgaaatggagtctcacaggatcgccgtgagaactgaatgactaactctatggaaaatgcttccaaaacagccctcagtaggtg

SEQ ID NO: 28687 - DNA, 122 bp, Homo sapiens
  misc_feature (61)..(62): /note="This region represents a CpG dinucleotide"
  misc_feature (61)..(61): /note="Nucleotide may be methylated to form 5-methylcytosine"
cttgagtaaatgaaagggtaaaagattccttgaccaagacaataaagcctgaaagaggaacggactgagggggaagatcaagttcggctttgagaagttaagtttgaaatgtcggggcaaca

SEQ ID NO: 28688 - DNA, 122 bp, Homo sapiens
  misc_feature (61)..(62): /note="This region represents a CpG dinucleotide"
  misc_feature (61)..(61): /note="Nucleotide may be methylated to form 5-methylcytosine"
atgattttggaatttagaactaaggttgctgggagctgagccatgttcatggcagaggaacggaacttccctttgtggaagttcctggatcttccagagcctggggagttttcctcttcctt

SEQ ID NO: 28689 - DNA, 122 bp, Homo sapiens
  misc_feature (61)..(62): /note="This region represents a CpG dinucleotide"
  misc_feature (61)..(61): /note="Nucleotide may be methylated to form 5-methylcytosine"
ttatcccagcaccatttattgaatcaggaatcctttccccatggcttttgttaggcttgtcgaagatcagatagttgtaggtatgcagtcttatttctgggttctctattgtctgtttttgt

SEQ ID NO: 28690 - DNA, 122 bp, Homo sapiens
  misc_feature (61)..(62): /note="This region represents a CpG dinucleotide"
  misc_feature (61)..(61): /note="Nucleotide may be methylated to form 5-methylcytosine"
actcatgtgcgcagttcagagcagccctctcagcatcactggtgctgactgtgctctgggcggggacccacagagccaagcatccatctcacccgagtagcagaagttcctctgacttgccc

SEQ ID NO: 28691 - DNA, 122 bp, Homo sapiens
  misc_feature (61)..(62): /note="This region represents a CpG dinucleotide"
  misc_feature (61)..(61): /note="Nucleotide may be methylated to form 5-methylcytosine"
acctacacacatcttctcacataccttaaatcatctctagatcacctatgacacccaatacgatgtgaatgcgatgtaaatatttgttatgctgtactgtttagggaataatgacaagacaa

SEQ ID NO: 28692 - DNA, 122 bp, Homo sapiens
  misc_feature (61)..(62): /note="This region represents a CpG dinucleotide"
  misc_feature (61)..(61): /note="Nucleotide may be methylated to form 5-methylcytosine"
ctagaactagaaataccatttgacccagctcctgagatcttatccggaagcagcggatcacgtttcaggtgtttcctatctgttgggagatggcctttccctggcgccggctgtggccaatt

SEQ ID NO: 28693 - DNA, 122 bp, Homo sapiens
  misc_feature (61)..(62): /note="This region represents a CpG dinucleotide"
  misc_feature (61)..(61): /note="Nucleotide may be methylated to form 5-methylcytosine"
ttccacccatgccattgttggggaacaggtgtgaggaggcacctagtccaaggcagggcccggccactgagtaattgcttctctgagcctcaccttcttaggtaaagacagggtgcacgggc

SEQ ID NO: 28694 - DNA, 122 bp, Homo sapiens
  misc_feature (61)..(62): /note="This region represents a CpG dinucleotide"
  misc_feature (61)..(61): /note="Nucleotide may be methylated to form 5-methylcytosine"
ttccctaaatcctcaatatccaaggaaaaataattctatccagtggccataactttcttccgttgcttcttgatctctccttgctaacaactcatgtctgtgggaactggtaacatttacaa

SEQ ID NO: 28695 - DNA, 122 bp, Homo sapiens
  misc_feature (61)..(62): /note="This region represents a CpG dinucleotide"
  misc_feature (61)..(61): /note="Nucleotide may be methylated to form 5-methylcytosine"
atttccaggttttggtagcctctcacccacatctctcacctctttggggctcaacttcaacgagacctgaccacctggacacagttccctcactgaccaacccgtggctgtcctgtgcctgt

SEQ ID NO: 28696 - DNA, 122 bp, Homo sapiens
  misc_feature (61)..(62): /note="This region represents a CpG dinucleotide"
  misc_feature (61)..(61): /note="Nucleotide may be methylated to form 5-methylcytosine"
caaactcctgacctcaggtgatccacccaccttgacttcttaaagtgcttggattacaggcgtgagcctccatgccccaccaattgtcttggctttatagttaggagtggaattgctgagtc

SEQ ID NO: 28697 - DNA, 122 bp, Homo sapiens
  misc_feature (61)..(62): /note="This region represents a CpG dinucleotide"
  misc_feature (61)..(61): /note="Nucleotide may be methylated to form 5-methylcytosine"
tgaagttcagagtgtacatgatttgctcagggcaagaggcagagcttgtgctcaaactcacgccttgtaatacgagttatatgctcttttgctagccacttacatcagcagtactccagcct

SEQ ID NO: 28698 - DNA, 122 bp, Homo sapiens
  misc_feature (61)..(62): /note="This region represents a CpG dinucleotide"
  misc_feature (61)..(61): /note="Nucleotide may be methylated to form 5-methylcytosine"
gctgactaagaagcccgaggataaccacacccagtgccagctggtgcctgtggtggagatcggcatcagtgagcgccagaatgctgagcagcatgtcacccagctcatgtccaccgagcctc

SEQ ID NO: 28699 - DNA, 122 bp, Homo sapiens
  misc_feature (61)..(62): /note="This region represents a CpG dinucleotide"
  misc_feature (61)..(61): /note="Nucleotide may be methylated to form 5-methylcytosine"
acctcgtgatccacctgcctcagcctcccaaagtgctgggattacaggcgtgagctaccacgcccggccaggtgctccctttgctagagataaggagttaatggtatctactttgggatcta

SEQ ID NO: 28700 - DNA, 122 bp, Homo sapiens
  misc_feature (61)..(62): /note="This region represents a CpG dinucleotide"
  misc_feature (61)..(61): /note="Nucleotide may be methylated to form 5-methylcytosine"
ccttttgagccacagttcaggacagcctctcgcccttgtgaccacctgtccttcctgacacgctgacctttagtccctgagctgcctcatacctggcccatgatgctaactatccacaatga

SEQ ID NO: 28701 - DNA, 122 bp, Homo sapiens
  misc_feature (61)..(62): /note="This region represents a CpG dinucleotide"
  misc_feature (61)..(61): /note="Nucleotide may be methylated to form 5-methylcytosine"
caacctctgtctgccaggttcaagtgatcttgtgcctcttgtgcctattgggactacaggcgtgcaccaccacgcccggctaattctttttttttttttttagtagagatggggtttctcta

SEQ ID NO: 28702 - DNA, 122 bp, Homo sapiens
  misc_feature (61)..(62): /note="This region represents a CpG dinucleotide"
  misc_feature (61)..(61): /note="Nucleotide may be methylated to form 5-methylcytosine"
ataattaaatcatagctacaaattacccagcactaactacttgggcattgtgctaaatggcgcacacttgtgatctaatttaatcctcaaaaacaactctaagaaatgagcaatattatcct

SEQ ID NO: 28703 - DNA, 122 bp, Homo sapiens
  misc_feature (61)..(62): /note="This region represents a CpG dinucleotide"
  misc_feature (61)..(61): /note="Nucleotide may be methylated to form 5-methylcytosine"
tggactgtgagtcacaggaaaaggatggagaatcgcatgtcatatgaggagtgactgaaacgagagtgagaaataggagagaaaagtataatacaatgattaaatacatagactcaactcct

SEQ ID NO: 28704 - DNA, 122 bp, Homo sapiens
  misc_feature (61)..(62): /note="This region represents a CpG dinucleotide"
  misc_feature (61)..(61): /note="Nucleotide may be methylated to form 5-methylcytosine"
caggtgctgcctcaccagggatatccaaggcataaccttggacaagtcatgtggctccctcggtgtctcattgtcttcctgtgtaagacagggctgttgaagcttgcttggctatgaagatt

SEQ ID NO: 28705 - DNA, 122 bp, Homo sapiens
  misc_feature (61)..(62): /note="This region represents a CpG dinucleotide"
  misc_feature (61)..(61): /note="Nucleotide may be methylated to form 5-methylcytosine"
aataatgcattttctgaaaaaaattatgcatgtcacttgtattttttgtactttatgtgccggaagaacattgtatacaaatatgtcccatgtgcatgtatgaatttatatagctacatgta

SEQ ID NO: 28706 - DNA, 122 bp, Homo sapiens
  misc_feature (61)..(62): /note="This region represents a CpG dinucleotide"
  misc_feature (61)..(61): /note="Nucleotide may be methylated to form 5-methylcytosine"
atttttttcctttttcttttttaaactcacacctgggcacgcatctgcgtactgccctggcgactgacgtgagcatgaagggagctttagtcagccgctcggcccgcgggaaggaagaggcg

SEQ ID NO: 28707 - DNA, 122 bp, Homo sapiens
  misc_feature (61)..(62): /note="This region represents a CpG dinucleotide"
  misc_feature (61)..(61): /note="Nucleotide may be methylated to form 5-methylcytosine"
aggacgccggcccaggtctatctgagcttggtccccatgagatgccttctgagttccaatcgcagcccccaagcctcagaactgctggatcaaaactgcaggcaaggaaggatgggtgcaaa

SEQ ID NO: 28708 - DNA, 122 bp, Homo sapiens
  misc_feature (61)..(62): /note="This region represents a CpG dinucleotide"
  misc_feature (61)..(61): /note="Nucleotide may be methylated to form 5-methylcytosine"
atgtacatgccctggaagttgcttttccctggtctctgcattcaattaaccgtttagtgccgcaggtgtggaccataaggaaatggcctctccctggtgtcagctgccaatttatcactttt

SEQ ID NO: 28709 - DNA, 122 bp, Homo sapiens
  misc_feature (61)..(62): /note="This region represents a CpG dinucleotide"
  misc_feature (61)..(61): /note="Nucleotide may be methylated to form 5-methylcytosine"
attccaaacatagcctgttttagagaaatgaatggcgttgtcatcgaaaaaacacagactcgattgtgacagaaataccgccacaaacgcaggtacagggacagccgacaccgagaaccaag

SEQ ID NO: 28710 - DNA, 122 bp, Homo sapiens
  misc_feature (61)..(62): /note="This region represents a CpG dinucleotide"
  misc_feature (61)..(61): /note="Nucleotide may be methylated to form 5-methylcytosine"
tagatcagaggaattcccattaaagtcttaaggcaaggatagttgctatcatggtcactgcgttggtgatcataaccaaaataatatgacaagaaagaaattaggtaaattgattagaagtg

SEQ ID NO: 28711 - DNA, 122 bp, Homo sapiens
  misc_feature (61)..(62): /note="This region represents a CpG dinucleotide"
  misc_feature (61)..(61): /note="Nucleotide may be methylated to form 5-methylcytosine"
tctttctgtgaattcattcttggctgatctcatcatcagaatgccactattataaggtaccgcccctggaattgctcaaactcagcagctgactagacttcttcaggatgcctcaaggcatc

SEQ ID NO: 28712 - DNA, 122 bp, Homo sapiens
  misc_feature (61)..(62): /note="This region represents a CpG dinucleotide"
  misc_feature (61)..(61): /note="Nucleotide may be methylated to form 5-methylcytosine"
gagaggtgcttcggtgatggatttccctggtgacttgccaagacagggctttactgcctccgccctggactggctgagtcagactgtgcaggggtggacactttgactggtatttgggaggc

SEQ ID NO: 28713 - DNA, 122 bp, Homo sapiens
  misc_feature (61)..(62): /note="This region represents a CpG dinucleotide"
  misc_feature (61)..(61): /note="Nucleotide may be methylated to form 5-methylcytosine"
ttgacagcagcctggagaggttagcttattcagaagttctcaggggcttgtgacaatccccgggaaagccattcctaaaatacagattcctgggacctgcccagacataacagatcagaatt

SEQ ID NO: 28714 - DNA, 122 bp, Homo sapiens
  misc_feature (61)..(62): /note="This region represents a CpG dinucleotide"
  misc_feature (61)..(61): /note="Nucleotide may be methylated to form 5-methylcytosine"
tacagagcacctctttcactccctgagaatgctgaagagccttgagaccaggtcaaaatacggcaagagaaaaacagcatgtctacaccactgaaaattaatacaattcaatatttatgttt

SEQ ID NO: 28715 - DNA, 122 bp, Homo sapiens
  misc_feature (61)..(62): /note="This region represents a CpG dinucleotide"
  misc_feature (61)..(61): /note="Nucleotide may be methylated to form 5-methylcytosine"
tgtttagtagtatgtatatactgaacattctcatggccaacagatttacagagcacttaccgtgtaaggtggtaaaggtaagaaaagaatgcatgaatatgtattgcctttgaggtgtctat

SEQ ID NO: 28716 - DNA, 122 bp, Homo sapiens
  misc_feature (61)..(62): /note="This region represents a CpG dinucleotide"
  misc_feature (61)..(61): /note="Nucleotide may be methylated to form 5-methylcytosine"
aagtccgatctgcccacgcttcacagaactcaatgcggagccttctcaggagtcacttgacgtcaaggctgacttttaaatttgccaaaaaggcattctttggggagcggtcggcaccatca

SEQ ID NO: 28717 - DNA, 122 bp, Homo sapiens
  misc_feature (61)..(62): /note="This region represents a CpG dinucleotide"
  misc_feature (61)..(61): /note="Nucleotide may be methylated to form 5-methylcytosine"
gctgtttatgtgcaaatctacacgtccctttctctactggggaagaacagagataaggagcggacgtgctcaaagggtgagtcaatgggatcttaggccaggagcctattgttttcccattt

SEQ ID NO: 28718 - DNA, 122 bp, Homo sapiens
  misc_feature (61)..(62): /note="This region represents a CpG dinucleotide"
  misc_feature (61)..(61): /note="Nucleotide may be methylated to form 5-methylcytosine"
taggcaacctttcagctggaaaaaacgcctgtgcagaatggttctggcaagaattcaccacgtgccgggtgctgtccctgcattatttcaagccagagcaatcctgtgtacaaacacgtacg

SEQ ID NO: 28719 - DNA, 122 bp, Homo sapiens
  misc_feature (61)..(62): /note="This region represents a CpG dinucleotide"
  misc_feature (61)..(61): /note="Nucleotide may be methylated to form 5-methylcytosine"
tgtgttgttgagtataccaaaacagaactgccagccattagcccatggcttttctgcctacgtgaaaacagcaggattatagtacaaagggcagagacctaagccaagattatgtgctaaga

SEQ ID NO: 28720 - DNA, 122 bp, Homo sapiens
  misc_feature (61)..(62): /note="This region represents a CpG dinucleotide"
  misc_feature (61)..(61): /note="Nucleotide may be methylated to form 5-methylcytosine"
tgatgttatccgacatccctttcaaacattctattaaaaacctcaagctacacgagtgcacgtggtttaaagagagggtaaaggaaaggggaaaaaacacattttaggagaaagaggtaaaa

SEQ ID NO: 28721 - DNA, 122 bp, Homo sapiens
  misc_feature (61)..(62): /note="This region represents a CpG dinucleotide"
  misc_feature (61)..(61): /note="Nucleotide may be methylated to form 5-methylcytosine"
ttgaagaagaatgatcttatatgtgaatcagaaaggaaggaaattaggagtaagtgacaacgaagcaagtgatttgtgaacattgtgtccgaaagagaatctgaggaaaagggtgttttgag

SEQ ID NO: 28722 - DNA, 122 bp, Homo sapiens
  misc_feature (61)..(62): /note="This region represents a CpG dinucleotide"
  misc_feature (61)..(61): /note="Nucleotide may be methylated to form 5-methylcytosine"
gatttactgttttaagtccttgaagcttaagatatatttgataatctacatagcaggccacggagaacagtttcagccaactgtggcacacaatggcacatttacagaattttaaatatttc

SEQ ID NO: 28723 - DNA, 122 bp, Homo sapiens
  misc_feature (61)..(62): /note="This region represents a CpG dinucleotide"
  misc_feature (61)..(61): /note="Nucleotide may be methylated to form 5-methylcytosine"
cctgcagccgctggtgccctctgcgaccagctacgttcccactcgttctgacagcaccagcgccccaggggcagctcgcaaacccctgactcatgcccccgcctcctaatctgcccgcccca

SEQ ID NO: 28724 - DNA, 122 bp, Homo sapiens
  misc_feature (61)..(62): /note="This region represents a CpG dinucleotide"
  misc_feature (61)..(61): /note="Nucleotide may be methylated to form 5-methylcytosine"
gtttgtttgtgcctggctgatttcacttagcataatgtcctcaaggcctatctcagtcagcgtgtgtcagagtttccttcctttttgaggctgaataatactcctttacatgtatgtggcac

SEQ ID NO: 28725 - DNA, 122 bp, Homo sapiens
  misc_feature (61)..(62): /note="This region represents a CpG dinucleotide"
  misc_feature (61)..(61): /note="Nucleotide may be methylated to form 5-methylcytosine"
agctttctcctggcttctctgagtctcatctgtgaaacagatgtataaattggtgtgaaacgcctaatttatagggtaagagtatggaataaaagagataatgtgctttatcaggcacttag

SEQ ID NO: 28726 - DNA, 122 bp, Homo sapiens
  misc_feature (61)..(62): /note="This region represents a CpG dinucleotide"
  misc_feature (61)..(61): /note="Nucleotide may be methylated to form 5-methylcytosine"
gataccgtttatgacattaattcagtacatagttgtagagccatttctatgagccaggcacggggtactatgacaaacccagccacagccccttccttcatggagcttatagactagtgtga

SEQ ID NO: 28727 - DNA, 122 bp, Homo sapiens
  misc_feature (61)..(62): /note="This region represents a CpG dinucleotide"
  misc_feature (61)..(61): /note="Nucleotide may be methylated to form 5-methylcytosine"
ttaacacccgagttagcacttgataaaggcctagagttgtggttcagagccatggttgcacgttagaatcagctggggagctgccaaaaattaccagtgtctgagccccaccctgaccagtt

SEQ ID NO: 28728 - DNA, 122 bp, Homo sapiens
  misc_feature (61)..(62): /note="This region represents a CpG dinucleotide"
  misc_feature (61)..(61): /note="Nucleotide may be methylated to form 5-methylcytosine"
cagagttcttgtatgttcagtttgccttgttgacctggcttcccaaggtctgtccatctgcgcagcctcttctcatcctgtcaatctgctggcctatttcctgtttctgcagccggaccagg

SEQ ID NO: 28729 - DNA, 122 bp, Homo sapiens
  misc_feature (61)..(62): /note="This region represents a CpG dinucleotide"
  misc_feature (61)..(61): /note="Nucleotide may be methylated to form 5-methylcytosine"
caggggaaaagcagtctggctgaaaccattcagtttcgtcagtcaggaagcagctatctacgtaaacaggaagtagagaaggttgcaggagagggcagtggttagttggtgacaaacaagag

SEQ ID NO: 28730 - DNA, 122 bp, Homo sapiens
  misc_feature (61)..(62): /note="This region represents a CpG dinucleotide"
  misc_feature (61)..(61): /note="Nucleotide may be methylated to form 5-methylcytosine"
cttcctatgaggaagcccaatcaatcaaaaggtggccactttgctactaagtacttttgccgttagataccttatatccaataaaaagtggcttcctggaatttgaactttctcaccagccc

SEQ ID NO: 28731 - DNA, 122 bp, Homo sapiens
  misc_feature (61)..(62): /note="This region represents a CpG dinucleotide"
  misc_feature (61)..(61): /note="Nucleotide may be methylated to form 5-methylcytosine"
aacaagaatatagaaatgaacagcagggagaacttatggtcaaacatttgctttcatccacgactggttattgcggattcagcaaaataaagctctgagtcccattaggccattttttttca

SEQ ID NO: 28732 - DNA, 122 bp, Homo sapiens
  misc_feature (61)..(62): /note="This region represents a CpG dinucleotide"
  misc_feature (61)..(61): /note="Nucleotide may be methylated to form 5-methylcytosine"
taaatatgtgttgacctttttaaaataaccttttttaaaaataataacctggtttaataccgccagaagtacttatcatatgccttaaccgcagtgagaaatctgagccaaagccttggaat

SEQ ID NO: 28733 - DNA, 122 bp, Homo sapiens
  misc_feature (61)..(62): /note="This region represents a CpG dinucleotide"
  misc_feature (61)..(61): /note="Nucleotide may be methylated to form 5-methylcytosine"
aagggtttccagaaagaaggggttaccagaaagaagggtaaacctggctgttctgacatgcgtaaacagtgtgacttgaacttgttcctccaactttcaggatagaaataaacatttagtac

SEQ ID NO: 28734 - DNA, 122 bp, Homo sapiens
  misc_feature (61)..(62): /note="This region represents a CpG dinucleotide"
  misc_feature (61)..(61): /note="Nucleotide may be methylated to form 5-methylcytosine"
gcagcttaatattttttcctgattatgaaagtcaccaagttcacctctcacctggacacacgtaccagctcctggagtgatctaagaatgtcatcttgcacagccggtgactgctgcagaca

SEQ ID NO: 28735 - DNA, 122 bp, Homo sapiens
  misc_feature (61)..(62): /note="This region represents a CpG dinucleotide"
  misc_feature (61)..(61): /note="Nucleotide may be methylated to form 5-methylcytosine"
cgcctcctggaatgctaggggaggtttccggagacttccttttcctcattatacacctggcgaatgcacaccgccccaaggaacctgatcaatggtgatgtcatcctgactgatggcttcag

SEQ ID NO: 28736 - DNA, 122 bp, Homo sapiens
  misc_feature (61)..(62): /note="This region represents a CpG dinucleotide"
  misc_feature (61)..(61): /note="Nucleotide may be methylated to form 5-methylcytosine"
tttgtattttttgttgagacgggctctccctatgtttccttggctgattttgaattccagcgctcaagcgatccgcccatcttggcctcccaaagagctgggattacaggcatgagccatga

SEQ ID NO: 28737 - DNA, 122 bp, Homo sapiens
  misc_feature (61)..(62): /note="This region represents a CpG dinucleotide"
  misc_feature (61)..(61): /note="Nucleotide may be methylated to form 5-methylcytosine"
acttcttttctgccagggctgtctgtgttctctgccgaagcagacacaatcagtttctagcgtaggctgtctggcaccaactgtatttaccatggtttattcttgggattcctctaaaaggg

SEQ ID NO: 28738 - DNA, 122 bp, Homo sapiens
  misc_feature (61)..(62): /note="This region represents a CpG dinucleotide"
  misc_feature (61)..(61): /note="Nucleotide may be methylated to form 5-methylcytosine"
ctttctcctattacttcctcatctcctgactcatctccgctctgactaatttctacccaacgttgtactctaggacctagctattgtaagaaggcaagaaaaagaaagaaaaggtatgaaga

SEQ ID NO: 28739 - DNA, 122 bp, Homo sapiens
  misc_feature (61)..(62): /note="This region represents a CpG dinucleotide"
  misc_feature (61)..(61): /note="Nucleotide may be methylated to form 5-methylcytosine"
aaaagctgggtgtagatgggtcatttattctttgtctaaggattaatcagtccttgttctcgctaatggctctgccatttttctgtgtgttaatccaggaggaattttgttgtcagagaata

SEQ ID NO: 28740 - DNA, 122 bp, Homo sapiens
  misc_feature (61)..(62): /note="This region represents a CpG dinucleotide"
  misc_feature (61)..(61): /note="Nucleotide may be methylated to form 5-methylcytosine"
attttcctatttggcaatgtgcacttttctgagtataatcctgggaactatacaattcagcgtgaatgtaaaggatagggaaccaatgatatgggaaacatcaacagcttgtaatctgaaaa

SEQ ID NO: 28741 - DNA, 122 bp, Homo sapiens
  misc_feature (61)..(62): /note="This region represents a CpG dinucleotide"
  misc_feature (61)..(61): /note="Nucleotide may be methylated to form 5-methylcytosine"
tctttacagcattctatcaaaatacagtgttttgggcgtccggcttccttctgcaacagacgtgggtcacgctctctctggctctctttctgccgccatcttgattccacgttccctccaca

SEQ ID NO: 28742 - DNA, 122 bp, Homo sapiens
  misc_feature (61)..(62): /note="This region represents a CpG dinucleotide"
  misc_feature (61)..(61): /note="Nucleotide may be methylated to form 5-methylcytosine"
ttaagacctaaatcaaggtctaacttttgcttgtccaagtgccagccggaagaacagctccgtgaagccagctaaccaaccaaccaaaaccctgctgctgccccagggccagagaagccata

SEQ ID NO: 28743 - DNA, 122 bp, Homo sapiens
  misc_feature (61)..(62): /note="This region represents a CpG dinucleotide"
  misc_feature (61)..(61): /note="Nucleotide may be methylated to form 5-methylcytosine"
acagaaagttggcaccttaaagtatttgtggtgtgatggagacgaggcctcctgcatgaacgtgtctcagtgacgctgattctgcttcacaacaaaagcaaaacaagaacgtaatccttaat

SEQ ID NO: 28744 - DNA, 122 bp, Homo sapiens
  misc_feature (61)..(62): /note="This region represents a CpG dinucleotide"
  misc_feature (61)..(61): /note="Nucleotide may be methylated to form 5-methylcytosine"
atgtttgatcagcaattttagtagtgccctactgggaggagtttctctgaacatcagatccgccatgtgttgcttggaggtagcttcgagcaattaagtggattatgcttcataataaattt

SEQ ID NO: 28745 - DNA, 122 bp, Homo sapiens
  misc_feature (61)..(62): /note="This region represents a CpG dinucleotide"
  misc_feature (61)..(61): /note="Nucleotide may be methylated to form 5-methylcytosine"
tggcatgtgccaggctagagcagcttggctatggcagaacatccagccccaccgtgtggacggtagggtaagacccagccctagtctggcctcagactaagggctcctcatccccaggcttc

SEQ ID NO: 28746 - DNA, 122 bp, Homo sapiens
  misc_feature (61)..(62): /note="This region represents a CpG dinucleotide"
  misc_feature (61)..(61): /note="Nucleotide may be methylated to form 5-methylcytosine"
cactcaataaataacttgaataaatgaatgaatagcattgtcacaaagagctttcttacacggccctgaaatggattccctggcataggttctacctactgttactggttctgcttgagatc

SEQ ID NO: 28747 - DNA, 122 bp, Homo sapiens
  misc_feature (61)..(62): /note="This region represents a CpG dinucleotide"
  misc_feature (61)..(61): /note="Nucleotide may be methylated to form 5-methylcytosine"
tctcatttaccaaaagttcttaacgtaatgttacaccctcttaacaggcttatttgtcatcgagccagctgacaacaaaacattatgagacaatgggaatttagactgcctttaagaaaccc

SEQ ID NO: 28748 - DNA, 122 bp, Homo sapiens
  misc_feature (61)..(62): /note="This region represents a CpG dinucleotide"
  misc_feature (61)..(61): /note="Nucleotide may be methylated to form 5-methylcytosine"
cagcagccatttgttgtccctgtggggagcccagaaaacccagcccggttctcccacctgcggggaagaaatgaagcaatgataatgaagacactcccatgccaagcccatactgccctgag

SEQ ID NO: 28749 - DNA, 122 bp, Homo sapiens
  misc_feature (61)..(62): /note="This region represents a CpG dinucleotide"
  misc_feature (61)..(61): /note="Nucleotide may be methylated to form 5-methylcytosine"
tcctggactcattcagctaacatgtgaacaagctcaggtttgctgaaagatgagagaccacggggagagatggccttaataatcccagctgtccaggacaaggcaatcacaaactggtcagt

SEQ ID NO: 28750 - DNA, 122 bp, Homo sapiens
  misc_feature (61)..(62): /note="This region represents a CpG dinucleotide"
  misc_feature (61)..(61): /note="Nucleotide may be methylated to form 5-methylcytosine"
taaactaaaatgctacttcctttatacctgtgagactatctaaaacaattcagaagctgacgctcctgttcgccaaaacagatgtggggaaaaaaatcctgctcggattttattagaagcca

SEQ ID NO: 28751 - DNA, 122 bp, Homo sapiens
  misc_feature (61)..(62): /note="This region represents a CpG dinucleotide"
  misc_feature (61)..(61): /note="Nucleotide may be methylated to form 5-methylcytosine"
attaaaagtatagatgctacttcatcagtttggttttgtttaactattaataagaaaacacgtagtgaagaaatagtacttaacaatcatcctggccgggcatggttgctcacacatataat

SEQ ID NO: 28752 - DNA, 122 bp, Homo sapiens
  misc_feature (61)..(62): /note="This region represents a CpG dinucleotide"
  misc_feature (61)..(61): /note="Nucleotide may be methylated to form 5-methylcytosine"
gcacacacttaccacagaggacagataccacacagcgactcacaccacccgacgtgcacacgaaaacagacaaatcacacatcactgtgggcatgggttgcctcaatacactacacgatcac

SEQ ID NO: 28753 - DNA, 122 bp, Homo sapiens
  misc_feature (61)..(62): /note="This region represents a CpG dinucleotide"
  misc_feature (61)..(61): /note="Nucleotide may be methylated to form 5-methylcytosine"
gttaagcatgtaccacgttctctgtggtaggaactaacaataatcttgtccactttcatacgtattcttattgtctatcactgatgtctaattatattcaagaaacgtgtgtgaagtgacaa

SEQ ID NO: 28754 - DNA, 122 bp, Homo sapiens
  misc_feature (61)..(62): /note="This region represents a CpG dinucleotide"
  misc_feature (61)..(61): /note="Nucleotide may be methylated to form 5-methylcytosine"
ctctatgagactgttctgtggctctgatgtgactcttctgcagctctgatgtaactgttccgtggccctgatcgactgttctgtggcacccacattcttcagagccacactcagatggaagc

SEQ ID NO: 28755 - DNA, 122 bp, Homo sapiens
  misc_feature (61)..(62): /note="This region represents a CpG dinucleotide"
  misc_feature (61)..(61): /note="Nucleotide may be methylated to form 5-methylcytosine"
atgaactaggcccttaaaactcctcatggctccctacccaccacactagtgttaacggctcgattagggctctgtaggaaagggaaagaagtttgaatcaaaaattttctttttttttttaa

SEQ ID NO: 28756 - DNA, 122 bp, Homo sapiens
  misc_feature (61)..(62): /note="This region represents a CpG dinucleotide"
  misc_feature (61)..(61): /note="Nucleotide may be methylated to form 5-methylcytosine"
tcaggctgatctagagctcctgggctcagacaaccctcccgcctcagcatccccaagtgccgggattaccgatgtaagccactacacccagctgagacttagttttttcatctggaaatgaa

SEQ ID NO: 28757 - DNA, 122 bp, Homo sapiens
  misc_feature (61)..(62): /note="This region represents a CpG dinucleotide"
  misc_feature (61)..(61): /note="Nucleotide may be methylated to form 5-methylcytosine"
cctgctttccttctggacactaaatcattaacgagattccctggtagacaatacttcacacgcttgtcatgatttgatgctaaaggaattaagtgaatctactgtgactcctctgggagagg

SEQ ID NO: 28758 - DNA, 122 bp, Homo sapiens
  misc_feature (61)..(62): /note="This region represents a CpG dinucleotide"
  misc_feature (61)..(61): /note="Nucleotide may be methylated to form 5-methylcytosine"
gccaacggccggaaagggggagcctggctgtggcctgtggtcgggaggccccaccagcaacgcctggagcccaggcgggcgtttctgagaaatcgatggtctcaggtggtggctggtaataa

SEQ ID NO: 28759 - DNA, 122 bp, Homo sapiens
  misc_feature (61)..(62): /note="This region represents a CpG dinucleotide"
  misc_feature (61)..(61): /note="Nucleotide may be methylated to form 5-methylcytosine"
ggagccagggatccttcctcacaggcaacagggttagaatgtgaatccaggcatgtctgacgttaagcccaagctctctttctgctgcacaatgactcaacccgcttgcatcatctggacgg

SEQ ID NO: 28760 - DNA, 122 bp, Homo sapiens
  misc_feature (61)..(62): /note="This region represents a CpG dinucleotide"
  misc_feature (61)..(61): /note="Nucleotide may be methylated to form 5-methylcytosine"
agcatccattgcagaagcaacaccaaacaaccaagtgggcaggatgactcggccagtggacgtcagccagtctctgtcctcactcgtcatcctccaaccagtccttgcaccatatgggctca

SEQ ID NO: 28761 - DNA, 122 bp, Homo sapiens
  misc_feature (61)..(62): /note="This region represents a CpG dinucleotide"
  misc_feature (61)..(61): /note="Nucleotide may be methylated to form 5-methylcytosine"
gggggagaataaccactgtgtaatggttcaagttgctctgggtttaaagatctttagaagcgtgtaaagattatcttttggtttcacagttactgatgaacgcctacacagcccttctgtta

SEQ ID NO: 28762 - DNA, 122 bp, Homo sapiens
  misc_feature (61)..(62): /note="This region represents a CpG dinucleotide"
  misc_feature (61)..(61): /note="Nucleotide may be methylated to form 5-methylcytosine"
gtagtggcagccaatggggcagaagtcatatcttattaagagcagcaacaagttgaccgccgtggttttaattctgagaactcagcaaatgctacagtttatttttagtaccctcaaaccac

SEQ ID NO: 28763 - DNA, 122 bp, Homo sapiens
  misc_feature (61)..(62): /note="This region represents a CpG dinucleotide"
  misc_feature (61)..(61): /note="Nucleotide may be methylated to form 5-methylcytosine"
gagaggccattgaaaggtttcaagccagagaaatgatgtgagctggctgctgcattgaggcgtaaccacaggggattagggcagaaacaacacttaaaaggcttttgcagtaatccaagtga

SEQ ID NO: 28764 - DNA, 122 bp, Homo sapiens
  misc_feature (61)..(62): /note="This region represents a CpG dinucleotide"
  misc_feature (61)..(61): /note="Nucleotide may be methylated to form 5-methylcytosine"
gaaagccacaggaaaggaaagactggtcacagacttccttcttccctggaccatttgttacgggaagttctcaggaaacaggtcagtaagtgtagagggcatcacaggacaaacttcattgc

SEQ ID NO: 28765 - DNA, 122 bp, Homo sapiens
  misc_feature (61)..(62): /note="This region represents a CpG dinucleotide"
  misc_feature (61)..(61): /note="Nucleotide may be methylated to form 5-methylcytosine"
tacatgcaaatttgttagctaattgtgggaagctgagggaagttccccagctgatgcctccgttttctctgacagaaaacatgagactgagggaagagatatccaagttagagacaggggta

SEQ ID NO: 28766 - DNA, 122 bp, Homo sapiens
  misc_feature (61)..(62): /note="This region represents a CpG dinucleotide"
  misc_feature (61)..(61): /note="Nucleotide may be methylated to form 5-methylcytosine"
ttggacatggcaataattaaatatcagcatcaggcagcctcactaaacaagacgctgcagcgtttcaaattaaggggccaaccttaggcacacacacgaccgaagagcagccgctgagctca

SEQ ID NO: 28767 - DNA, 122 bp, Homo sapiens
  misc_feature (61)..(62): /note="This region represents a CpG dinucleotide"
  misc_feature (61)..(61): /note="Nucleotide may be methylated to form 5-methylcytosine"
ccggccaactttggtagttttagtagagacgaggtctcaccatgttggccaggttggtctcgaactcctgactgtcatacatgtccatatagaagaccacctaaacaggctttgtgtaagca

SEQ ID NO: 28768 - DNA, 122 bp, Homo sapiens
  misc_feature (61)..(62): /note="This region represents a CpG dinucleotide"
  misc_feature (61)..(61): /note="Nucleotide may be methylated to form 5-methylcytosine"
ctcccatgcaggatccggggatggccccagctgggccctcctgacattggagcaggggcccggctcacctggatttggggtgcggggcggctgaggctcacgcccagagccttctttagcag

SEQ ID NO: 28769 - DNA, 122 bp, Homo sapiens
  misc_feature (61)..(62): /note="This region represents a CpG dinucleotide"
  misc_feature (61)..(61): /note="Nucleotide may be methylated to form 5-methylcytosine"
ctctgaatggttggctcttgtgtagagtgaatcaaagtcctccctagcatgggaataaatcggtactgatgagctggagtttgtggcattcacttttctttggggaagtctggggacagcct

SEQ ID NO: 28770 - DNA, 122 bp, Homo sapiens
  misc_feature (61)..(62): /note="This region represents a CpG dinucleotide"
  misc_feature (61)..(61): /note="Nucleotide may be methylated to form 5-methylcytosine"
gtcaggaaatggtggcttgtataaatacctgagacaagagaataatcatgcagattgatgcgcagaagacatgtgatgtttcttgactgattatggcacctggcacattctctctctggctt

SEQ ID NO: 28771 - DNA, 122 bp, Homo sapiens
  misc_feature (61)..(62): /note="This region represents a CpG dinucleotide"
  misc_feature (61)..(61): /note="Nucleotide may be methylated to form 5-methylcytosine"
ctttctccaccctgcttacctcttatccaaaattatctcccccatatcacatatcatcctcggcctcaggaagaaatgtagggggaacatgacaactatgtataaacatttgataagctttg

SEQ ID NO: 28772 - DNA, 122 bp, Homo sapiens
  misc_feature (61)..(62): /note="This region represents a CpG dinucleotide"
  misc_feature (61)..(61): /note="Nucleotide may be methylated to form 5-methylcytosine"
ctgcagcttcactcctgagccagcaagaccacgaacccaccagaaggaagaaactccgaacgcatctgaacatcagaaggggcagacaccagacgcgccaccttaacagctgtaacactcac

SEQ ID NO: 28773 - DNA, 122 bp, Homo sapiens
  misc_feature (61)..(62): /note="This region represents a CpG dinucleotide"
  misc_feature (61)..(61): /note="Nucleotide may be methylated to form 5-methylcytosine"
acagagctgagctgaagcaccctgccccgcccagcaccggctccctctcactgccagtggcgaccagggcagtggcttgaagcctgcatccttctgacagcccctcacccgcagcccctgcc

SEQ ID NO: 28774 - DNA, 122 bp, Homo sapiens
  misc_feature (61)..(62): /note="This region represents a CpG dinucleotide"
  misc_feature (61)..(61): /note="Nucleotide may be methylated to form 5-methylcytosine"
ttttcaaagaggacttcaaaggggctcaagataatagaaatctgggacttcggcatctttcgtcacaggaatgatagaccaactactatcaatcaccatttgctgaagaaatatttacaaat

SEQ ID NO: 28775 - DNA, 122 bp, Homo sapiens
  misc_feature (61)..(62): /note="This region represents a CpG dinucleotide"
  misc_feature (61)..(61): /note="Nucleotide may be methylated to form 5-methylcytosine"
cattgagctgtgttgaatacagctgcattcagtgaagctaaatctgccatttctgccattcgtgaagatgaatatcaatacattaaactctacactcttttattttataagaatttagaatt

SEQ ID NO: 28776 - DNA, 122 bp, Homo sapiens
  misc_feature (61)..(62): /note="This region represents a CpG dinucleotide"
  misc_feature (61)..(61): /note="Nucleotide may be methylated to form 5-methylcytosine"
aacagttgtaaagattaaatgagataacttttgaacagtgcttttcaaactagaaaacaccgcaaatatttgattataaggtaggtttgtccaagtcccaacagctgtgggaggactgaaaa

SEQ ID NO: 28777 - DNA, 122 bp, Homo sapiens
  misc_feature (61)..(62): /note="This region represents a CpG dinucleotide"
  misc_feature (61)..(61): /note="Nucleotide may be methylated to form 5-methylcytosine"
aaaagatgtgagacagatacaaatcccttcaactttcaaaaccctaaatgttaagcgctacgacacaaccgtaccttaggaaatgtgaaggttagaatgaagattgtaaacatgccttttta

SEQ ID NO: 28778 - DNA, 122 bp, Homo sapiens
  misc_feature (61)..(62): /note="This region represents a CpG dinucleotide"
  misc_feature (61)..(61): /note="Nucleotide may be methylated to form 5-methylcytosine"
ttttgtctcctgcttgtggaatatcttcagttcctggaacctgaggttgtgtcttgcccccgtagcctccattgaatctggcccagtttggtatgatctcctagccacagcctctttgtctc

SEQ ID NO: 28779 - DNA, 122 bp, Homo sapiens
  misc_feature (61)..(62): /note="This region represents a CpG dinucleotide"
  misc_feature (61)..(61): /note="Nucleotide may be methylated to form 5-methylcytosine"
ctcaggtgatccgcccgccttgacctcccaaagtgctgggattataggcttgagccaccgcgcctgctccagatgtattacttaatgtcctgcaacatcctctaatctgcctccaggggaag

SEQ ID NO: 28780 - DNA, 122 bp, Homo sapiens
  misc_feature (61)..(62): /note="This region represents a CpG dinucleotide"
  misc_feature (61)..(61): /note="Nucleotide may be methylated to form 5-methylcytosine"
aaacattcctaagaacagagagcaacaacataaccttctgactcaagatagtctctgttccggtaatttgatgacaaatagtgttgctgatcagcagaatatagagtggaaagggcggcttt

SEQ ID NO: 28781 - DNA, 122 bp, Homo sapiens
  misc_feature (61)..(62): /note="This region represents a CpG dinucleotide"
  misc_feature (61)..(61): /note="Nucleotide may be methylated to form 5-methylcytosine"
cttaactacaggtcagagcacagctgcacagctttcagtctggtggctacactccttctgcgggtggaggaaaacaaattcctcctcactggccacaaggccttcagcgatccctgcctcct

SEQ ID NO: 28782 - DNA, 122 bp, Homo sapiens
  misc_feature (61)..(62): /note="This region represents a CpG dinucleotide"
  misc_feature (61)..(61): /note="Nucleotide may be methylated to form 5-methylcytosine"
gtttttctttaaaaagtttgttgaaaaagcaaaagatcttgtacttacatatcagtgactcgttcgggtctctgtgtagtagctgtgagtagttgtccaaactgaagtaagttttaactgtg

SEQ ID NO: 28783 - DNA, 122 bp, Homo sapiens
  misc_feature (61)..(62): /note="This region represents a CpG dinucleotide"
  misc_feature (61)..(61): /note="Nucleotide may be methylated to form 5-methylcytosine"
gttagtctaagttctgttttctcccctgtttatgttaagaatgcccatgttgtatgcctccgtgaccttatttttaatttgatgtagagtaaattttcctgtgggaaacttttatatcacct

SEQ ID NO: 28784 - DNA, 122 bp, Homo sapiens
  misc_feature (61)..(62): /note="This region represents a CpG dinucleotide"
  misc_feature (61)..(61): /note="Nucleotide may be methylated to form 5-methylcytosine"
aaactacatcttttgcttctaaaacagcttttctggtgccaggcatctgattccagcacacgctgtgctccagagttattcccaatgacgtgtgtagctctttgttttttttttaggatgaa

SEQ ID NO: 28785 - DNA, 122 bp, Homo sapiens
  misc_feature (61)..(62): /note="This region represents a CpG dinucleotide"
  misc_feature (61)..(61): /note="Nucleotide may be methylated to form 5-methylcytosine"
gtgatttcttactcaggctaaaggtatccagggatgaagccaatccctatgagtgactcacggctggtaaccaacggcccacgaggtaggctcatgtaaccaaacatcacctcctcagtcag

SEQ ID NO: 28786 - DNA, 122 bp, Homo sapiens
  misc_feature (61)..(62): /note="This region represents a CpG dinucleotide"
  misc_feature (61)..(61): /note="Nucleotide may be methylated to form 5-methylcytosine"
atggctctagggagggaccaccgatggttaccaggccagccactgtgagaaaaccaggtacgaggtgtattctacctgaagtaccaacgcgactgccccagggttcctgtccttccctccca

SEQ ID NO: 28787 - DNA, 122 bp, Homo sapiens
  misc_feature (61)..(62): /note="This region represents a CpG dinucleotide"
  misc_feature (61)..(61): /note="Nucleotide may be methylated to form 5-methylcytosine"
tctgtgatgtgctgacactggagctctgtgatttagtactgaatttctcctcccagtcttcgtgcctgatgatgaatgggtgggcgtgttgagccagcccagcatgcttgggcctgagttca

SEQ ID NO: 28788 - DNA, 122 bp, Homo sapiens
  misc_feature (61)..(62): /note="This region represents a CpG dinucleotide"
  misc_feature (61)..(61): /note="Nucleotide may be methylated to form 5-methylcytosine"
ctcgtttccaggctggcatctgggacaggcgctcccgttctgctttctctcggcctcgaacggacgcctcctcctgccggcgccgggctagcagctgtagcttccagtctgggatggtggcc

SEQ ID NO: 28789 - DNA, 122 bp, Homo sapiens
  misc_feature (61)..(62): /note="This region represents a CpG dinucleotide"
  misc_feature (61)..(61): /note="Nucleotide may be methylated to form 5-methylcytosine"
gaggcttttccttcttgcccttttcggagtattgcaaaggagctaaaactggtgtgcaaccgcacagcgctcctggtcgtcctcgcgcgcctctccctaccacgggtgctcgggacggctgg

SEQ ID NO: 28790 - DNA, 122 bp, Homo sapiens
  misc_feature (61)..(62): /note="This region represents a CpG dinucleotide"
  misc_feature (61)..(61): /note="Nucleotide may be methylated to form 5-methylcytosine"
aagtggtcacgaggaactcatctggggtgatggaaatgttctgtctccatacgtatgtgtcgaaactgattaaacagcacacttaagatctgtgctgtatgtaaattacacctcaatttaaa

SEQ ID NO: 28791 - DNA, 122 bp, Homo sapiens
  misc_feature (61)..(62): /note="This region represents a CpG dinucleotide"
  misc_feature (61)..(61): /note="Nucleotide may be methylated to form 5-methylcytosine"
gtggtgtcatatgtcttctctgcaagaaaaggcattgttagcaaggcaaacagaaatactcgatacagttatgtataaaccagaggaagcctttgccagagagattgttgacaattgctaga

SEQ ID NO: 28792 - DNA, 122 bp, Homo sapiens
  misc_feature (61)..(62): /note="This region represents a CpG dinucleotide"
  misc_feature (61)..(61): /note="Nucleotide may be methylated to form 5-methylcytosine"
cttgggtgtgacacaactctaacatgcaaatatagtccagttttgccaacagctacaactcgttggcttacctcgagaaaactaaggtgtccctttaatgaacaaattattttcagactagt

SEQ ID NO: 28793 - DNA, 122 bp, Homo sapiens
  misc_feature (61)..(62): /note="This region represents a CpG dinucleotide"
  misc_feature (61)..(61): /note="Nucleotide may be methylated to form 5-methylcytosine"
gttagaatcatcaccaccaacactttacgaggcaatctgctttccagaacatctagctgccggattaacttcacagccaccagattccacaggcaggtgctcagggggacacagctttctca

SEQ ID NO: 28794 - DNA, 122 bp, Homo sapiens
  misc_feature (61)..(62): /note="This region represents a CpG dinucleotide"
  misc_feature (61)..(61): /note="Nucleotide may be methylated to form 5-methylcytosine"
atgccctgccttgataagggaaatgggtacctcccgaggaggaagtttatttgaggtctgcgtctgcagtcaagatggtgtgcctagacattgagacaaactaaataaagaggacattttgg

SEQ ID NO: 28795 - DNA, 122 bp, Homo sapiens
  misc_feature (61)..(62): /note="This region represents a CpG dinucleotide"
  misc_feature (61)..(61): /note="Nucleotide may be methylated to form 5-methylcytosine"
tatttctgtaataggtttgttgtgagaataaagggagcttggtatcagctcttagaataccggacaggccacgttggctccactaagctgttgtcatcatccctaagggcacccagttaaaa

SEQ ID NO: 28796 - DNA, 122 bp, Homo sapiens
  misc_feature (61)..(62): /note="This region represents a CpG dinucleotide"
  misc_feature (61)..(61): /note="Nucleotide may be methylated to form 5-methylcytosine"
agtcccatctcctccgagtctgggcaccagaagaaccactggacagtgttcacttgcgaccgcccaactactaaagcaaaagctgttgtcttaaaaaacatgcaagtgcaagcatgcacggg

SEQ ID NO: 28797 - DNA, 122 bp, Homo sapiens
  misc_feature (61)..(62): /note="This region represents a CpG dinucleotide"
  misc_feature (61)..(61): /note="Nucleotide may be methylated to form 5-methylcytosine"
tgtgtgtgtgtgtgtgtgtgtgtcagaggtcagccctgatgtaattgccaccgaggtcaccgtggatgaggtcattgtgggtgaggttacagtgcaagagctgtcttttggtgctgttctgg

SEQ ID NO: 28798 - DNA, 122 bp, Homo sapiens
  misc_feature (61)..(62): /note="This region represents a CpG dinucleotide"
  misc_feature (61)..(61): /note="Nucleotide may be methylated to form 5-methylcytosine"
ctgagcaaggacctgggctcagagcagatatttccaagttttaacaaaacaaaatctcagcgggttttaatataatccaaatagtaggtgctcagagatttggcacacaaagcaggttagtg

SEQ ID NO: 28799 - DNA, 122 bp, Homo sapiens
  misc_feature (61)..(62): /note="This region represents a CpG dinucleotide"
  misc_feature (61)..(61): /note="Nucleotide may be methylated to form 5-methylcytosine"
gcagtcacgcacacatttaccggggacagcatgtgaaagccttgggaagagatgacctgccggtaccgaatgtcaaagccctgtgtattttgcaaacagataaccatggcgcccactgcccc

SEQ ID NO: 28800 - DNA, 122 bp, Homo sapiens
  misc_feature (61)..(62): /note="This region represents a CpG dinucleotide"
  misc_feature (61)..(61): /note="Nucleotide may be methylated to form 5-methylcytosine"
ttatatcccgctctttaaacttccccatgtatactcaatattatgtttcactacaaaagacgtatttttaaacatgaagaggcatccctgactctctctctcccttacatctggagaaaact

SEQ ID NO: 28801 - DNA, 122 bp, Homo sapiens
  misc_feature (61)..(62): /note="This region represents a CpG dinucleotide"
  misc_feature (61)..(61): /note="Nucleotide may be methylated to form 5-methylcytosine"
ttctgctccatgtaagtcttccattttgagatctgcagccatcacaacaacaggcatgcacgtgtgctgtgtgtgtgcctatgtatataggtgtgagcatgcaggtgtgagcatgcaggtgt

SEQ ID NO: 28802 - DNA, 122 bp, Homo sapiens
  misc_feature (61)..(62): /note="This region represents a CpG dinucleotide"
  misc_feature (61)..(61): /note="Nucleotide may be methylated to form 5-methylcytosine"
aaactgactttacgattacaactcaaaaatgtttacaagatctttagataatagtgtatgcgcagaaagatgaggaaacctctgaccaagaagtctagacacagattaagggcccaggaggg

SEQ ID NO: 28803 - DNA, 122 bp, Homo sapiens
  misc_feature (61)..(62): /note="This region represents a CpG dinucleotide"
  misc_feature (61)..(61): /note="Nucleotide may be methylated to form 5-methylcytosine"
catcctaagtcctaaacatataagcaaaatgggagactgtgattgttccgctgcttttcacgttcaaggcccacagatattcactgaatgggatttgagcctttgctgccgtctcctccctt

SEQ ID NO: 28804 - DNA, 122 bp, Homo sapiens
  misc_feature (61)..(62): /note="This region represents a CpG dinucleotide"
  misc_feature (61)..(61): /note="Nucleotide may be methylated to form 5-methylcytosine"
tggaagttttagaacacatacagacgcttaggaaaagaaaggctagttccttggaaatgacgatccaggatgatacaatcacttgatgacagaaggtaagcctttcttacaattagatttta

SEQ ID NO: 28805 - DNA, 122 bp, Homo sapiens
  misc_feature (61)..(62): /note="This region represents a CpG dinucleotide"
  misc_feature (61)..(61): /note="Nucleotide may be methylated to form 5-methylcytosine"
cctgactgccagccggccccttgatggcggtgcctgtctcagattctgtggtcagtgccacgcagctacctccagaggcagcctgcagcctggccatgtggccccaagctccaggctagagg

SEQ ID NO: 28806 - DNA, 122 bp, Homo sapiens
  misc_feature (61)..(62): /note="This region represents a CpG dinucleotide"
  misc_feature (61)..(61): /note="Nucleotide may be methylated to form 5-methylcytosine"
ctcagaacaaagctaagtccacgataactgtgaacaaattagccacagactgaaaaacagcgtgagtcaccagagggaataaaatgtacaacttatcagtgaaagatctcttggtttcctat

SEQ ID NO: 28807 - DNA, 122 bp, Homo sapiens
  misc_feature (61)..(62): /note="This region represents a CpG dinucleotide"
  misc_feature (61)..(61): /note="Nucleotide may be methylated to form 5-methylcytosine"
gtgatcctcccacctcagtctcccaaagagctgggattacaggcataagccaccttgccccgccagtttttagcctgtcagctctttgagggacacttgttatggtcatacccacagctttg

SEQ ID NO: 28808 - DNA, 122 bp, Homo sapiens
  misc_feature (61)..(62): /note="This region represents a CpG dinucleotide"
  misc_feature (61)..(61): /note="Nucleotide may be methylated to form 5-methylcytosine"
agtagtttgctgacccctgtcctgcagataatctccccaatcccatggatttaaatgtcacgtgtgtgctgacacacaggtttgggctggaaatacagtcctgatatctcccataattccag

SEQ ID NO: 28809 - DNA, 122 bp, Homo sapiens
  misc_feature (61)..(62): /note="This region represents a CpG dinucleotide"
  misc_feature (61)..(61): /note="Nucleotide may be methylated to form 5-methylcytosine"
tcaagtcccgatgcgtgtgagtgacagtcgatcggaatgatgaactgacactcggagctgcgtaattttctaaaggcaacgtagtaaaagattggagctccgcggggctgaggctgtttgtg

SEQ ID NO: 28810 - DNA, 122 bp, Homo sapiens
  misc_feature (61)..(62): /note="This region represents a CpG dinucleotide"
  misc_feature (61)..(61): /note="Nucleotide may be methylated to form 5-methylcytosine"
tatgggaatgttgtggctggtttgatcttctattcagatcactcaaactttctccctatccgcaataaggctgttttgctttcttatcattcgtaagttcactggagtagcactttcatttt

SEQ ID NO: 28811 - DNA, 122 bp, Homo sapiens
  misc_feature (61)..(62): /note="This region represents a CpG dinucleotide"
  misc_feature (61)..(61): /note="Nucleotide may be methylated to form 5-methylcytosine"
cacagtcaaataagcaaatccagtcaagatcattcaagccaagcacaaattaaccaagcccgagagactcataagctaagtaaatgtttaacattaaatgccactgaagttcagcagttgtt

SEQ ID NO: 28812 - DNA, 122 bp, Homo sapiens
  misc_feature (61)..(62): /note="This region represents a CpG dinucleotide"
  misc_feature (61)..(61): /note="Nucleotide may be methylated to form 5-methylcytosine"
agttaatcccagtagcagaaataatgtggttaaagttgctggcttcagaagcaaagcacccgcaccttgggtgcactcttcaaagcaacacacacagttaactgaccaaactgaagtctctg

SEQ ID NO: 28813 - DNA, 122 bp, Homo sapiens
  misc_feature (61)..(62): /note="This region represents a CpG dinucleotide"
  misc_feature (61)..(61): /note="Nucleotide may be methylated to form 5-methylcytosine"
aacatcaatgcactgacaaagtaaagaaaattatattgacatcagacttcttgagaggaacggtaatacaagaagataatggcaccgtatttaccagacacacataggaagaaaatgtaagg

SEQ ID NO: 28814 - DNA, 122 bp, Homo sapiens
  misc_feature (61)..(62): /note="This region represents a CpG dinucleotide"
  misc_feature (61)..(61): /note="Nucleotide may be methylated to form 5-methylcytosine"
ggcctctgctccccagcttcccttaggccggggtgattcaggctggcattggctgctgcacggctgcaggaaaccagctgcatctgttggaaggtcctttgaagtttaagtgcacagcctcc

SEQ ID NO: 28815 - DNA, 122 bp, Homo sapiens
  misc_feature (61)..(62): /note="This region represents a CpG dinucleotide"
  misc_feature (61)..(61): /note="Nucleotide may be methylated to form 5-methylcytosine"
aagccgtccatcaaggcggcgcgcgccaaaaagatcttcggctggggggacttctactttcgggtgcataccctcaagttttcgctgctggtgaccggcaagatcgtggaccatgtgaacgg

SEQ ID NO: 28816 - DNA, 122 bp, Homo sapiens
  misc_feature (61)..(62): /note="This region represents a CpG dinucleotide"
  misc_feature (61)..(61): /note="Nucleotide may be methylated to form 5-methylcytosine"
agaagccaacagctcacctgtgataaatcagcccattgaaggtcaatgcagtgaagtaaacggggttcgcataactgcgaatgtgcaactgcacaaactcaaggaagcaattttcagtgaca

SEQ ID NO: 28817 - DNA, 122 bp, Homo sapiens
  misc_feature (61)..(62): /note="This region represents a CpG dinucleotide"
  misc_feature (61)..(61): /note="Nucleotide may be methylated to form 5-methylcytosine"
acaacacggttgatttaaagggcgagtcttttgtgccttgcagtcccaaatgctcagccccgtttctacatagagaacagatactgtatacagtacaaagattgaggcaggctacaccagta

SEQ ID NO: 28818 - DNA, 122 bp, Homo sapiens
  misc_feature (61)..(62): /note="This region represents a CpG dinucleotide"
  misc_feature (61)..(61): /note="Nucleotide may be methylated to form 5-methylcytosine"
cccagagaagcttttcattgggggcctcaacctcaaaaccgacgagaaagccctcaaagccgagtttggcaagtatggccacatcatcaaggtgttcctgatgaaagaccgaaaaaccaaca

SEQ ID NO: 28819 - DNA, 122 bp, Homo sapiens
  misc_feature (61)..(62): /note="This region represents a CpG dinucleotide"
  misc_feature (61)..(61): /note="Nucleotide may be methylated to form 5-methylcytosine"
acatgtaaggcttaaggttcatggatctgaaccaggcttgtgaatactcatccaggtctccgccctggaagacgacttttccccatccaccagccccagtgccccctccctctccctctcaa

SEQ ID NO: 28820 - DNA, 122 bp, Homo sapiens
  misc_feature (61)..(62): /note="This region represents a CpG dinucleotide"
  misc_feature (61)..(61): /note="Nucleotide may be methylated to form 5-methylcytosine"
gatccccctcctctgcctcccaaagtgctgggattccaggcatgagccactgcgcctggccgatgtcatatctttaggagcgcttccctgaccactctgtttaaatagcatcccccgccctt

SEQ ID NO: 28821 - DNA, 122 bp, Homo sapiens
  misc_feature (61)..(62): /note="This region represents a CpG dinucleotide"
  misc_feature (61)..(61): /note="Nucleotide may be methylated to form 5-methylcytosine"
tttttctcttaaacagtggctggctaacaatcaaaaataggttttggtaatgttgggtaacgttgctcaaatacggctatattatgcagagcacatggcaatcgttgaagagtaaaacacag

SEQ ID NO: 28822 - DNA, 122 bp, Homo sapiens
  misc_feature (61)..(62): /note="This region represents a CpG dinucleotide"
  misc_feature (61)..(61): /note="Nucleotide may be methylated to form 5-methylcytosine"
ccactgcagagctgcaggtcccctccagggcagtggggagccacaagcagcgttaggcagcggctgggaccaggaccgcctgagcactcaagaacccccactgccccaagcactgctggcag

SEQ ID NO: 28823 - DNA, 122 bp, Homo sapiens
  misc_feature (61)..(62): /note="This region represents a CpG dinucleotide"
  misc_feature (61)..(61): /note="Nucleotide may be methylated to form 5-methylcytosine"
attaaccagtctcaggtagttctttgactcaggttgcattgcgagaacggactgatacaccgagtatttttctgctgctgtttttctgctgctgctttgggtgactatttgttcacagccca

SEQ ID NO: 28824 - DNA, 122 bp, Homo sapiens
  misc_feature (61)..(62): /note="This region represents a CpG dinucleotide"
  misc_feature (61)..(61): /note="Nucleotide may be methylated to form 5-methylcytosine"
ttggagtggcaagaggctttgaccagactccagaattttcccgtatataagatggagtaacgaagagatcagtaaatttgagtacaagaagcagtttaccttgcagggaagacaggcaaaca

SEQ ID NO: 28825 - DNA, 122 bp, Homo sapiens
  misc_feature (61)..(62): /note="This region represents a CpG dinucleotide"
  misc_feature (61)..(61): /note="Nucleotide may be methylated to form 5-methylcytosine"
tgggattatgggcgtgagccaccatgcccagctctatagtgtctaatacagtgtattaggcgctgggctcgttctctagctttggttttctggagatggggtccaagaatttgcatgcgtaa

SEQ ID NO: 28826 - DNA, 122 bp, Homo sapiens
  misc_feature (61)..(62): /note="This region represents a CpG dinucleotide"
  misc_feature (61)..(61): /note="Nucleotide may be methylated to form 5-methylcytosine"
ctctgagccttggtgtcctcatctgtataatgggaacaggactccctccctcccagattgcgtggagatgaaatgagatcatttctatgaaagctctttgtaagctgctacatgctgggcag

SEQ ID NO: 28827 - DNA, 122 bp, Homo sapiens
  misc_feature (61)..(62): /note="This region represents a CpG dinucleotide"
  misc_feature (61)..(61): /note="Nucleotide may be methylated to form 5-methylcytosine"
agtctgagcttttggaagcaccccatgtgtctgttcactggtatccactgagcactgggccgttgctccgtgggtgctcctgtgtcttcaagggagtaacagttacagaggtctcccccttg

SEQ ID NO: 28828 - DNA, 122 bp, Homo sapiens
  misc_feature (61)..(62): /note="This region represents a CpG dinucleotide"
  misc_feature (61)..(61): /note="Nucleotide may be methylated to form 5-methylcytosine"
acaccagtggcttcctgacccaggcctcagcagcctctttccctgcagtgatggttcattcgcatatgagtctgtgccttggcaacaaagcgccactcagccggctggatcgctgtctgtgg

SEQ ID NO: 28829 - DNA, 122 bp, Homo sapiens
  misc_feature (61)..(62): /note="This region represents a CpG dinucleotide"
  misc_feature (61)..(61): /note="Nucleotide may be methylated to form 5-methylcytosine"
atgagaggtgaaataagtacacaaaacactgccttgtgccacctcagctgggaatgtgcacgtcaggagactcagatgttttcactgccctgtccatgtgaatgtctgagattaacagccaa

SEQ ID NO: 28830 - DNA, 122 bp, Homo sapiens
  misc_feature (61)..(62): /note="This region represents a CpG dinucleotide"
  misc_feature (61)..(61): /note="Nucleotide may be methylated to form 5-methylcytosine"
gcgtgtatgcgcgtgcatgtgtgtgtgttcgcattcacatgtgtgatgtccagacagaaacgcttacctgtctgattcctgcagagatttgaccagatgggtatagatgtcctgctctttct

SEQ ID NO: 28831 - DNA, 122 bp, Homo sapiens
  misc_feature (61)..(62): /note="This region represents a CpG dinucleotide"
  misc_feature (61)..(61): /note="Nucleotide may be methylated to form 5-methylcytosine"
gttaaataaggtcacacaagaactgctaagataaacatcaaattcatgtcatttggtaaacgagaaagccatctgtgcaattcactgtgggtaaactgcagactgactggggctagacattt

SEQ ID NO: 28832 - DNA, 122 bp, Homo sapiens
  misc_feature (61)..(62): /note="This region represents a CpG dinucleotide"
  misc_feature (61)..(61): /note="Nucleotide may be methylated to form 5-methylcytosine"
atcagtgccaagtcctgcttcctctgccatctgtctgccttgccatttaagtcagcctgacgtactcatgggcccacttgctccaccccaccccaatcaaagggcagagactgaaaactgac

SEQ ID NO: 28833 - DNA, 122 bp, Homo sapiens
  misc_feature (61)..(62): /note="This region represents a CpG dinucleotide"
  misc_feature (61)..(61): /note="Nucleotide may be methylated to form 5-methylcytosine"
tttcagaagaataagtgagaaaagacacagtgccaagagaaacagacacaagacctgtggcgggctggacaccagggctctaaagcaagttctgcctaaactggcaagaacatttttcaggt

SEQ ID NO: 28834 - DNA, 122 bp, Homo sapiens
  misc_feature (61)..(62): /note="This region represents a CpG dinucleotide"
  misc_feature (61)..(61): /note="Nucleotide may be methylated to form 5-methylcytosine"
atctagactttgggtgccgtagaatgactcagagtctgaatcaacatgaaatcgagaaaacgtcctttgcaagggtttcagggaacacctgaaatcctgaagaactgtttgtatccatcctg

SEQ ID NO: 28835 - DNA, 122 bp, Homo sapiens
  misc_feature (61)..(62): /note="This region represents a CpG dinucleotide"
  misc_feature (61)..(61): /note="Nucleotide may be methylated to form 5-methylcytosine"
aacatattttcctgatgagtaaaactttcagtgatgttatcatatgactggaaaacaatacgagaacaagatctcaaccaaagctctgaaattcattatgggaaatgtgcaaaaaacatcct

SEQ ID NO: 28836 - DNA, 122 bp, Homo sapiens
  misc_feature (61)..(62): /note="This region represents a CpG dinucleotide"
  misc_feature (61)..(61): /note="Nucleotide may be methylated to form 5-methylcytosine"
tctgaatattcatttcaattcaactcatttgtagcatacagaataaaaagtcagatcaaccggttgggtaggcagcaaaagttagtaatgaatggtacaagcaacactgtaacctcaaatcc

SEQ ID NO: 28837 - DNA, 122 bp, Homo sapiens
  misc_feature (61)..(62): /note="This region represents a CpG dinucleotide"
  misc_feature (61)..(61): /note="Nucleotide may be methylated to form 5-methylcytosine"
aaactccatggctcattagttaaaacctctcttgctcctaacactgttaactccctaggccgtgacttcctccattcttctgcctagcaaatcctaactgtccaactattctaatctacaac

SEQ ID NO: 28838 - DNA, 122 bp, Homo sapiens
  misc_feature (61)..(62): /note="This region represents a CpG dinucleotide"
  misc_feature (61)..(61): /note="Nucleotide may be methylated to form 5-methylcytosine"
ttgaaagggcagggtggttgccagccattcccacacctacacattttctcactctggtcccgtggtgtttaatagcttgcccagaaaaccttccctttgtcacattgatcttaattgagttg

SEQ ID NO: 28839 - DNA, 122 bp, Homo sapiens
  misc_feature (61)..(62): /note="This region represents a CpG dinucleotide"
  misc_feature (61)..(61): /note="Nucleotide may be methylated to form 5-methylcytosine"
ctcccattgcctcttgctggcctgtggtttctctcgtcctctaagaacactcctgttggacgagtgggaagaatgactaacatcggtcacaatctttgagcacttaatgctgtgcatgtcac

SEQ ID NO: 28840 - DNA, 122 bp, Homo sapiens
  misc_feature (61)..(62): /note="This region represents a CpG dinucleotide"
  misc_feature (61)..(61): /note="Nucleotide may be methylated to form 5-methylcytosine"
ataccccccaggtggcatacctgttatagaggtccttagcctatttctcaacagaaacttcgtttacaaaaatagtcacatataataaacacatggattaacaaaaagatgaatccactaac

SEQ ID NO: 28841 - DNA, 122 bp, Homo sapiens
  misc_feature (61)..(62): /note="This region represents a CpG dinucleotide"
  misc_feature (61)..(61): /note="Nucleotide may be methylated to form 5-methylcytosine"
tccttgtgccaacaggtcatgagacactgaggtcttaatctaaaagccactgacaaactgcgtgtcactaacaaccttgtgagtgagcctgaggtggatctttctcagtggagccttgagat

SEQ ID NO: 28842 - DNA, 122 bp, Homo sapiens
  misc_feature (61)..(62): /note="This region represents a CpG dinucleotide"
  misc_feature (61)..(61): /note="Nucleotide may be methylated to form 5-methylcytosine"
ttattccatggggatattctgtgaaagtcctacttctcctttttaataattgagtggcctcgagcaagtcactcaatctctctaggtctctaagatgattatgatcactaagcatcactctt

SEQ ID NO: 28843 - DNA, 122 bp, Homo sapiens
  misc_feature (61)..(62): /note="This region represents a CpG dinucleotide"
  misc_feature (61)..(61): /note="Nucleotide may be methylated to form 5-methylcytosine"
cagaaagattaattagtgaggtaagaaaaattattagcacaagattttgttcctcatgtccgtcagtagcaagtcatttctagagtttaacaatttgttaaatgagagtagaaaaggaaaat

SEQ ID NO: 28844 - DNA, 122 bp, Homo sapiens
  misc_feature (61)..(62): /note="This region represents a CpG dinucleotide"
  misc_feature (61)..(61): /note="Nucleotide may be methylated to form 5-methylcytosine"
gctgctataagtttgacagttcatggcacattgtaaattcacctgaatctgatttatgtgcgtgcaaacactataatgagaaaaattactacaactgttagtgggagatgctatctgaatgg

SEQ ID NO: 28845 - DNA, 122 bp, Homo sapiens
  misc_feature (61)..(62): /note="This region represents a CpG dinucleotide"
  misc_feature (61)..(61): /note="Nucleotide may be methylated to form 5-methylcytosine"
cttcactctcttttctttctggaatttccacaatgggtattagtctgcttgatggtgtcccgcaggtctcttaggctctgtttatttttcttccatctttttcctttctgttcctcaaattt

SEQ ID NO: 28846 - DNA, 122 bp, Homo sapiens
  misc_feature (61)..(62): /note="This region represents a CpG dinucleotide"
  misc_feature (61)..(61): /note="Nucleotide may be methylated to form 5-methylcytosine"
cccgaggaaatcttcacattcattgatgactacctactgagcaatcaggagttgacccagcgtcgggagcaaagggacatatgcgagtgaacttgagccagggcatggttaaagtcaaggga

SEQ ID NO: 28847 - DNA, 122 bp, Homo sapiens
  misc_feature (61)..(62): /note="This region represents a CpG dinucleotide"
  misc_feature (61)..(61): /note="Nucleotide may be methylated to form 5-methylcytosine"
tatatccttgctgattttcttgcttggttactccaccatttattgagaaataggtgttgacgtctccaattataattttggacttgtgtatttctctttttagttccatcagtcttttttca

SEQ ID NO: 28848 - DNA, 122 bp, Homo sapiens
  misc_feature (61)..(62): /note="This region represents a CpG dinucleotide"
  misc_feature (61)..(61): /note="Nucleotide may be methylated to form 5-methylcytosine"
cttaatcccaggtttgtttatccaagcagtggtgtcagctgcctggccaaaccacacaggcgcctggatcctaggagacataaaccaatcctcccacccaagcaaagccccgtagcagcccg

SEQ ID NO: 28849 - DNA, 122 bp, Homo sapiens
  misc_feature (61)..(62): /note="This region represents a CpG dinucleotide"
  misc_feature (61)..(61): /note="Nucleotide may be methylated to form 5-methylcytosine"
gctggagaaattcccattagaagaatcacaatgaagtctcctaagaatctgacagaaaaccgcatcctctttggtatgtagctgtcattcttttggaaaacagtagtttgattgccactggg

SEQ ID NO: 28850 - DNA, 122 bp, Homo sapiens
  misc_feature (61)..(62): /note="This region represents a CpG dinucleotide"
  misc_feature (61)..(61): /note="Nucleotide may be methylated to form 5-methylcytosine"
tgattacttgatcatgtgtttatcaaagttgaagcaactttagaccatggcagatggtaacgctggaggtgtagcaagctaggtttctctgccacaagtgctctaatttaattaaaactaaa

SEQ ID NO: 28851 - DNA, 122 bp, Homo sapiens
  misc_feature (61)..(62): /note="This region represents a CpG dinucleotide"
  misc_feature (61)..(61): /note="Nucleotide may be methylated to form 5-methylcytosine"
atattaatcagaaaacatcctatggcaagttccccaagtttttatttgattcattacttccgcccagccctggacttatgtgtctaatactcagtcatagccttgccttcttataaggcaca

SEQ ID NO: 28852 - DNA, 122 bp, Homo sapiens
  misc_feature (61)..(62): /note="This region represents a CpG dinucleotide"
  misc_feature (61)..(61): /note="Nucleotide may be methylated to form 5-methylcytosine"
ccagacttcacaaggccgttgcaggcaaccagtagtataggtgtgtggaagcgctttagacgctcaatccagctgcagatgcgtgggacaattactatctagagctcatgtgccctgcctgc

SEQ ID NO: 28853 - DNA, 122 bp, Homo sapiens
  misc_feature (61)..(62): /note="This region represents a CpG dinucleotide"
  misc_feature (61)..(61): /note="Nucleotide may be methylated to form 5-methylcytosine"
tttctttcctcggaccacatcacagtgcctgagattcttccttgtactatgggattaaagcgtcaaccgtcctggcatttattaacatgttacctttttctgcataattctcagctcgtcac

SEQ ID NO: 28854 - DNA, 122 bp, Homo sapiens
  misc_feature (61)..(62): /note="This region represents a CpG dinucleotide"
  misc_feature (61)..(61): /note="Nucleotide may be methylated to form 5-methylcytosine"
tcccactcttcttcatctcgaatgagcttcattaactccagaaaattgggaggacaccctcgctgatccaagagctccagcttgcccctgagggcgggggtcatggcgacccgagctaagag

SEQ ID NO: 28855 - DNA, 122 bp, Homo sapiens
  misc_feature (61)..(62): /note="This region represents a CpG dinucleotide"
  misc_feature (61)..(61): /note="Nucleotide may be methylated to form 5-methylcytosine"
aactctgtgtgggactttctccagcaatactttctctcagaccattcatatatatctccacggtgatgatgaagagaatgatgattatgattatgatgacaatgaaataaaagggtcccaga

SEQ ID NO: 28856 - DNA, 122 bp, Homo sapiens
  misc_feature (61)..(62): /note="This region represents a CpG dinucleotide"
  misc_feature (61)..(61): /note="Nucleotide may be methylated to form 5-methylcytosine"
cacttagaatagaatggcatcacaattactaaggtgtctgtctgcagttgattgggataacgtgcaggtagaagataaggtgctgagttatctagtggctgtggcacaggaacattaagagg

SEQ ID NO: 28857 - DNA, 122 bp, Homo sapiens
  misc_feature (61)..(62): /note="This region represents a CpG dinucleotide"
  misc_feature (61)..(61): /note="Nucleotide may be methylated to form 5-methylcytosine"
aataaaagtttcaactcctcagatgttttatcttatttctgcctgatatgccttcctccacggggtgtgtgatacatcccaactcttcagcttccaggttttctatccctcgctccaaaaga

SEQ ID NO: 28858 - DNA, 122 bp, Homo sapiens
  misc_feature (61)..(62): /note="This region represents a CpG dinucleotide"
  misc_feature (61)..(61): /note="Nucleotide may be methylated to form 5-methylcytosine"
gggacttgttggcacacaaacgtcagcaacgtggtggatgtaaacctggccttggacagacgacaaaggcgatgattccaggccctcaagtgtgcctcagagaatgtatcagtgacaggaag

SEQ ID NO: 28859 - DNA, 122 bp, Homo sapiens
  misc_feature (61)..(62): /note="This region represents a CpG dinucleotide"
  misc_feature (61)..(61): /note="Nucleotide may be methylated to form 5-methylcytosine"
accgaatcaaagttcagcaaccacatgcaaaacaaaccctccgtgagggcagcaagtctccgtgaggacggctgggattggctgcacagcaaagccaggagaggctccatgaggagaacagc

SEQ ID NO: 28860 - DNA, 122 bp, Homo sapiens
  misc_feature (61)..(62): /note="This region represents a CpG dinucleotide"
  misc_feature (61)..(61): /note="Nucleotide may be methylated to form 5-methylcytosine"
cacctgaactccctgctcccaggcaaccaactgacctaggcagggccttgctttttggaacggacccagctcaacactttgttccggagccctgccacttgctatgtgactgagtggaagcc

SEQ ID NO: 28861 - DNA, 122 bp, Homo sapiens
  misc_feature (61)..(62): /note="This region represents a CpG dinucleotide"
  misc_feature (61)..(61): /note="Nucleotide may be methylated to form 5-methylcytosine"
gcctcgcttttaaaagcatgcagcgtggagggctggtccaggtcaggtggcatcaaagagcggagtacagggcctctccattcccctgatggagtctgggttagtggcctgtgcttttacca

SEQ ID NO: 28862 - DNA, 122 bp, Homo sapiens
  misc_feature (61)..(62): /note="This region represents a CpG dinucleotide"
  misc_feature (61)..(61): /note="Nucleotide may be methylated to form 5-methylcytosine"
ttggaacattgtgtccaaagatgaggttcagagacttcatttccttgtagatgaacactacgctgttcctcatttcttggccacccacaacaccttgtaagggaggaaaaaataattttcct

SEQ ID NO: 28863 - DNA, 122 bp, Homo sapiens
  misc_feature (61)..(62): /note="This region represents a CpG dinucleotide"
  misc_feature (61)..(61): /note="Nucleotide may be methylated to form 5-methylcytosine"
ttaccccacccaaacctgacagtcatgcagccttgggcttggctctaacctgtcaactggcggtgtgaccttgagcaagtcctggcctctcagcagcctctgtaaaaatgaggttgttgcat

SEQ ID NO: 28864 - DNA, 122 bp, Homo sapiens
  misc_feature (61)..(62): /note="This region represents a CpG dinucleotide"
  misc_feature (61)..(61): /note="Nucleotide may be methylated to form 5-methylcytosine"
ctcctcttccggccatgggcagacagggtggggctggccctagccgtgcctggccgctgacgagcttgcagctcctgtggtctgtgtttgatctgataagcgcaagttcctgagagtctgtt

SEQ ID NO: 28865 - DNA, 122 bp, Homo sapiens
  misc_feature (61)..(62): /note="This region represents a CpG dinucleotide"
  misc_feature (61)..(61): /note="Nucleotide may be methylated to form 5-methylcytosine"
attgcccactgtgtacaaaggcatcaatatttaatctttagaggaatgaaaatggctccacgttgatgaatatacttaattgggaagcaatatctgagtcatggaattgctaaactattaaa

SEQ ID NO: 28866 - DNA, 122 bp, Homo sapiens
  misc_feature (61)..(62): /note="This region represents a CpG dinucleotide"
  misc_feature (61)..(61): /note="Nucleotide may be methylated to form 5-methylcytosine"
atcaaatgagtaagtcaacatagtaaaagaaaagaacagttctttatcagattaaatgagcgaaacagctaaatgtcaagtgacaaaacattgggactgactgtataaaatgctaataacat

SEQ ID NO: 28867 - DNA, 122 bp, Homo sapiens
  misc_feature (61)..(62): /note="This region represents a CpG dinucleotide"
  misc_feature (61)..(61): /note="Nucleotide may be methylated to form 5-methylcytosine"
tacctggcactaggacaggtgttgtcatcacccccattctgtaaatggggatcaaggactcgggttcagtaacctgcctcagatcccctggcctgtaactgatgaggcctggaatcagtccc

SEQ ID NO: 28868 - DNA, 122 bp, Homo sapiens
  misc_feature (61)..(62): /note="This region represents a CpG dinucleotide"
  misc_feature (61)..(61): /note="Nucleotide may be methylated to form 5-methylcytosine"
ttctcaaactcctgggctcaagtgatctgcatgccttggtctccaaaagtgctgggattacggtgtgagtgaccaagcctggcccagattaatttatttaatccttataataaccctgtgag

SEQ ID NO: 28869 - DNA, 122 bp, Homo sapiens
  misc_feature (61)..(62): /note="This region represents a CpG dinucleotide"
  misc_feature (61)..(61): /note="Nucleotide may be methylated to form 5-methylcytosine"
cttcatactttacatgatcttcaaaatgtaaaactgttcttttgaatgaaatgatactaccgatactaccctcttaatcatcaggtaatgaatgaaatgatactatcctcttaatctcaggc

SEQ ID NO: 28870 - DNA, 122 bp, Homo sapiens
  misc_feature (61)..(62): /note="This region represents a CpG dinucleotide"
  misc_feature (61)..(61): /note="Nucleotide may be methylated to form 5-methylcytosine"
cgtgggacgctggctctagggttttcatcaaggccctggaggagcttgaggaagctccctcgttctagtccttgtttgctagcacctgtttgttttttgagtcagtgtttgattttgtgaaa

SEQ ID NO: 28871 - DNA, 122 bp, Homo sapiens
  misc_feature (61)..(62): /note="This region represents a CpG dinucleotide"
  misc_feature (61)..(61): /note="Nucleotide may be methylated to form 5-methylcytosine"
tgccttggctgctgagcttacagccacatttactgcctactctcagatattttgtaggatcgtaaattgatcttatctaaatctcctaaccaaattactcatttgcaggagtatgcatttta

SEQ ID NO: 28872 - DNA, 122 bp, Homo sapiens
  misc_feature (61)..(62): /note="This region represents a CpG dinucleotide"
  misc_feature (61)..(61): /note="Nucleotide may be methylated to form 5-methylcytosine"
gggagctccacttacgggcagccttggctggtttctgttgagcgtcttcaccgttatctacgagtccagaaacatccagcagagggattgtgcatcgatattgccatcaagatgaaaagaca

SEQ ID NO: 28873 - DNA, 122 bp, Homo sapiens
  misc_feature (61)..(62): /note="This region represents a CpG dinucleotide"
  misc_feature (61)..(61): /note="Nucleotide may be methylated to form 5-methylcytosine"
tgggaggagcccccggttaggaagctttgcattttaagcggggcctgacttcacagcccacggctggcaaggcccatctgaggagagcaagctacccattagtctctatcacaacatttcat

SEQ ID NO: 28874 - DNA, 122 bp, Homo sapiens
  misc_feature (61)..(62): /note="This region represents a CpG dinucleotide"
  misc_feature (61)..(61): /note="Nucleotide may be methylated to form 5-methylcytosine"
agagaatctccttgaagcttcctgcttaatatctgtgcacgtgtgaattgagttccactccgcaatacaggcctgctgcgaatgcttgggcaggttgttcactgcatacagaggaggagttg

SEQ ID NO: 28875 - DNA, 122 bp, Homo sapiens
  misc_feature (61)..(62): /note="This region represents a CpG dinucleotide"
  misc_feature (61)..(61): /note="Nucleotide may be methylated to form 5-methylcytosine"
acagacattttaaaatgcaaagttagaattgaatgcctggtttgaccccaggtagagagccgatgtgagtgaatcacacatcccaattagttgctgtgtctgtcccaccacacagggaggtt

SEQ ID NO: 28876 - DNA, 122 bp, Homo sapiens
  misc_feature (61)..(62): /note="This region represents a CpG dinucleotide"
  misc_feature (61)..(61): /note="Nucleotide may be methylated to form 5-methylcytosine"
gcttcaggtgacaggcctcttgcctgggtgatgagcttcccaggcccatgctatggtgtgcgctttttcacaggaagaggatcgagagcaagggtcccattctggtggtcctcagcccgcat

SEQ ID NO: 28877 - DNA, 122 bp, Homo sapiens
  misc_feature (61)..(62): /note="This region represents a CpG dinucleotide"
  misc_feature (61)..(61): /note="Nucleotide may be methylated to form 5-methylcytosine"
tcccatcaggaagcacatcctgttggtgtctggctgccgcggcagggccgctatttgttgcggttggctacgccttccagctcaccaaaaacagtctcaaaaacaaccatttcctctctgct

SEQ ID NO: 28878 - DNA, 122 bp, Homo sapiens
  misc_feature (61)..(62): /note="This region represents a CpG dinucleotide"
  misc_feature (61)..(61): /note="Nucleotide may be methylated to form 5-methylcytosine"
gattattatttaaaacatcgctgtggtatcagtctcactcagacaagtaatgacagtcaacgcaagatgaatgcagaaagctatgtatggtgatttaaggagggaaatcaaaataccactct

SEQ ID NO: 28879 - DNA, 122 bp, Homo sapiens
  misc_feature (61)..(62): /note="This region represents a CpG dinucleotide"
  misc_feature (61)..(61): /note="Nucleotide may be methylated to form 5-methylcytosine"
tctagtaaggccactcaagggtatgctgactaagaacaagaatgtgtgtgttcttcaccacgagcctgtaggaccagacaggatcaaggtattggctgtgacaaaccttacacaaggcttgg

SEQ ID NO: 28880 - DNA, 122 bp, Homo sapiens
  misc_feature (61)..(62): /note="This region represents a CpG dinucleotide"
  misc_feature (61)..(61): /note="Nucleotide may be methylated to form 5-methylcytosine"
gacatcttcctccaatatgacaagtacacaatctggccaccataatacttggggttgtcccgtctcttctgcctggggaaaatgttacgagctgagtcatgaatactgtccttttaagttac

SEQ ID NO: 28881 - DNA, 122 bp, Homo sapiens
  misc_feature (61)..(62): /note="This region represents a CpG dinucleotide"
  misc_feature (61)..(61): /note="Nucleotide may be methylated to form 5-methylcytosine"
ttaaacctgtttgggtggaaagatgttctgtttatgcctccccttctctctaggccttatcgctgcttccctccacctgcctgcagacagacttaatccggccggagccaagggtaaagggt

SEQ ID NO: 28882 - DNA, 122 bp, Homo sapiens
  misc_feature (61)..(62): /note="This region represents a CpG dinucleotide"
  misc_feature (61)..(61): /note="Nucleotide may be methylated to form 5-methylcytosine"
tagttataatcctcattcattgtctatcagtgctttatgactttgcagaactttcacactcgtatcctcttttaaccatcaaaactagcaatcaggcagacttctgtaaggaaaattgcagt

SEQ ID NO: 28883 - DNA, 122 bp, Homo sapiens
  misc_feature (61)..(62): /note="This region represents a CpG dinucleotide"
  misc_feature (61)..(61): /note="Nucleotide may be methylated to form 5-methylcytosine"
agatatctgggccaaacagatttagaaatcatcagcacatagatggaagggagttgaagtcggtaagctttgcttcaggtagtattttatggcaagaagatgttggaggatagagatctgag

SEQ ID NO: 28884 - DNA, 122 bp, Homo sapiens
  misc_feature (61)..(62): /note="This region represents a CpG dinucleotide"
  misc_feature (61)..(61): /note="Nucleotide may be methylated to form 5-methylcytosine"
ttagtgcccttagactcttcatcaaccagaaacactaatggtccctggtttccttctggccgttcttcaggaccatcagtagcacagccactgcttcagcctcttttatttgtgcacacaca

SEQ ID NO: 28885 - DNA, 122 bp, Homo sapiens
  misc_feature (61)..(62): /note="This region represents a CpG dinucleotide"
  misc_feature (61)..(61): /note="Nucleotide may be methylated to form 5-methylcytosine"
tattattttccatatgtctgttttcttagttactagattattgttcccatgcgttcttcccgacaattttgcttttacaagtcccgacaattttgcttttacaagtcgtggtgagcagggca

SEQ ID NO: 28886 - DNA, 122 bp, Homo sapiens
  misc_feature (61)..(62): /note="This region represents a CpG dinucleotide"
  misc_feature (61)..(61): /note="Nucleotide may be methylated to form 5-methylcytosine"
gattggcacgggcacagaccactgcccccacctgccctgcgccatctacccaagaaggctcggcacgggcaccaaccactgcctccaactgccccatgctgcctgagaaggcactgcacggc

SEQ ID NO: 28887 - DNA, 122 bp, Homo sapiens
  misc_feature (61)..(62): /note="This region represents a CpG dinucleotide"
  misc_feature (61)..(61): /note="Nucleotide may be methylated to form 5-methylcytosine"
caatgtggcatatccgtacaatgcactgttcacgttactcagccgtgaaaagaaatgaagcgctgacatgccacaacatgggtgaaccttgagtgaaagaagccaggttcaaaaggctacat

SEQ ID NO: 28888 - DNA, 122 bp, Homo sapiens
  misc_feature (61)..(62): /note="This region represents a CpG dinucleotide"
  misc_feature (61)..(61): /note="Nucleotide may be methylated to form 5-methylcytosine"
cacctgtacatctctttcctcctccctgtgcccttgacagagctacctgttaggtggtgacgagcaaagctaactcttagtggagggacaccgagtaccagagaaattctcccagcctagaa

SEQ ID NO: 28889 - DNA, 122 bp, Homo sapiens
  misc_feature (61)..(62): /note="This region represents a CpG dinucleotide"
  misc_feature (61)..(61): /note="Nucleotide may be methylated to form 5-methylcytosine"
gttctcagtgaagagtcatccattgagtgagcaatgagcttgatgggactctcctggatccgctctgtgccactacactgagtcatataccggagacactgtgactacaagttctgttacag

SEQ ID NO: 28890 - DNA, 122 bp, Homo sapiens
  misc_feature (61)..(62): /note="This region represents a CpG dinucleotide"
  misc_feature (61)..(61): /note="Nucleotide may be methylated to form 5-methylcytosine"
taaaacatcgataatcatttatcatctctcaccatttctgatcatcagaaattcaggagtcgtttggctgcaatattctggttttagatgtctcatgaggttgtagtcagatgtcaactaag

SEQ ID NO: 28891 - DNA, 122 bp, Homo sapiens
  misc_feature (61)..(62): /note="This region represents a CpG dinucleotide"
  misc_feature (61)..(61): /note="Nucleotide may be methylated to form 5-methylcytosine"
gctgctgggtctgtgtgggtaggccggcaggatttatttcaggtgacggaggaacatacacggaatatgaatttccgcaggagtggcgccgtgattccttccctctccctctcggccgccct

SEQ ID NO: 28892 - DNA, 122 bp, Homo sapiens
  misc_feature (61)..(62): /note="This region represents a CpG dinucleotide"
  misc_feature (61)..(61): /note="Nucleotide may be methylated to form 5-methylcytosine"
gattgatcctaaacttccctcctgcattcatgggagttagctgacaggaaatacacagtgcgaggaagtggtgagtgagagaaaaaaaaaaaacagctaactgataagatcttaattgcaag

SEQ ID NO: 28893 - DNA, 122 bp, Homo sapiens
  misc_feature (61)..(62): /note="This region represents a CpG dinucleotide"
  misc_feature (61)..(61): /note="Nucleotide may be methylated to form 5-methylcytosine"
ttactcatgaacaaattttaatttatatttaccatcttgtttctctactcagaattaacacgtaactgctttggaaagagctgttacaaaagccttttttgcacacctgagtttattcatct

SEQ ID NO: 28894 - DNA, 122 bp, Homo sapiens
  misc_feature (61)..(62): /note="This region represents a CpG dinucleotide"
  misc_feature (61)..(61): /note="Nucleotide may be methylated to form 5-methylcytosine"
cagcggggagtccttctcagcctccttgggtaacttgggcaccacagtgaaggagttgggcgtgccctggctgtggaagatgctgtcagagctggcctcggcttggtggctgtggtcacgga

SEQ ID NO: 28895 - DNA, 122 bp, Homo sapiens
  misc_feature (61)..(62): /note="This region represents a CpG dinucleotide"
  misc_feature (61)..(61): /note="Nucleotide may be methylated to form 5-methylcytosine"
ctggtctggagctgaggcatacctttgtttttccttccaatgatgggagtgactgcttcccgctttaacaaaacaatacgtgagccatctgggcctccttcacatatcctgaaacacaccac

SEQ ID NO: 28896 - DNA, 122 bp, Homo sapiens
  misc_feature (61)..(62): /note="This region represents a CpG dinucleotide"
  misc_feature (61)..(61): /note="Nucleotide may be methylated to form 5-methylcytosine"
attgtactgactcattatcccagaatacgtacaaacattctcagtgatctgagttcctggcgtattttcttttgtattgcaatctcacaaataatgtgtagagaaagaaaggaactgcatgc

SEQ ID NO: 28897 - DNA, 122 bp, Homo sapiens
  misc_feature (61)..(62): /note="This region represents a CpG dinucleotide"
  misc_feature (61)..(61): /note="Nucleotide may be methylated to form 5-methylcytosine"
gtttaaatgtgatgcctacacatagctcagcatgtttgcactgcatgtcttgtattgttccgtgtgatgccctgtctgcctccttccttgtgattccagtgtgccgggcatggcaggagaca

SEQ ID NO: 28898 - DNA, 122 bp, Homo sapiens
  misc_feature (61)..(62): /note="This region represents a CpG dinucleotide"
  misc_feature (61)..(61): /note="Nucleotide may be methylated to form 5-methylcytosine"
ctgattctcacatgtaaatccctttgggttataaaagacaagtgcatgcaggcacacacacgctcacacatgtcagctcaggggcatgagcagccttctcctcccaggcccgggccatcagg

SEQ ID NO: 28899 - DNA, 122 bp, Homo sapiens
  misc_feature (61)..(62): /note="This region represents a CpG dinucleotide"
  misc_feature (61)..(61): /note="Nucleotide may be methylated to form 5-methylcytosine"
agcatctgttatctgttccatcaagcttgcccaaggggtggtgttcaggaactcaaaccacgtttttcccctgctctcacgtcgacagcataacaatcaacacagaagacttctgtgacccc

SEQ ID NO: 28900 - DNA, 122 bp, Homo sapiens
  misc_feature (61)..(62): /note="This region represents a CpG dinucleotide"
  misc_feature (61)..(61): /note="Nucleotide may be methylated to form 5-methylcytosine"
tcacagcagaggtcatccccatgtccagaaggcatataaaatgtgctcagcatcattagtcgtcagggaaatgcacaatgagttcccactacctgcccaccagaatggctaacaggaaggtg

SEQ ID NO: 28901 - DNA, 122 bp, Homo sapiens
  misc_feature (61)..(62): /note="This region represents a CpG dinucleotide"
  misc_feature (61)..(61): /note="Nucleotide may be methylated to form 5-methylcytosine"
ctgtattaggactatgtcaacagttgcccagttagaaattaaatgatgcgtagaacaacacgtctagactttagatttttacttgggcaacacacacaaatactgtgattaagtatgcatgc

SEQ ID NO: 28902 - DNA, 122 bp, Homo sapiens
  misc_feature (61)..(62): /note="This region represents a CpG dinucleotide"
  misc_feature (61)..(61): /note="Nucleotide may be methylated to form 5-methylcytosine"
atcattacccagcaggtggctcaaaacgacagaagcatgttctctcacagtcctggaggccggaagtccaagatcaagatgacagcaggcctcactccctccaaaggctctaagggagaaac

SEQ ID NO: 28903 - DNA, 122 bp, Homo sapiens
  misc_feature (61)..(62): /note="This region represents a CpG dinucleotide"
  misc_feature (61)..(61): /note="Nucleotide may be methylated to form 5-methylcytosine"
gagctgcggcgcgcccctctcaccgcgattgttcacttgccaggcgccacgtgtgggcgacgtcactgggctttatgctttcatcgccgctatctgcctacgtgagctgctctcctcccatc

SEQ ID NO: 28904 - DNA, 122 bp, Homo sapiens
  misc_feature (61)..(62): /note="This region represents a CpG dinucleotide"
  misc_feature (61)..(61): /note="Nucleotide may be methylated to form 5-methylcytosine"
ccggcaatgcaagtgagtcctgtttgacctcgtcaatcatcgcagactgtaaaggtgactcggatgctcaagaaacgagcatacccagcagtgggccccagacttctcgcaggcccaggtcc

SEQ ID NO: 28905 - DNA, 122 bp, Homo sapiens
  misc_feature (61)..(62): /note="This region represents a CpG dinucleotide"
  misc_feature (61)..(61): /note="Nucleotide may be methylated to form 5-methylcytosine"
ccgaactccctgtgctacttaatggccctgtactcatgccatttcttctatctgaaataccgttccctgccctgccacccccaacccctcctttgcccccaaataacttctcagggcttcat

SEQ ID NO: 28906 - DNA, 122 bp, Homo sapiens
  misc_feature (61)..(62): /note="This region represents a CpG dinucleotide"
  misc_feature (61)..(61): /note="Nucleotide may be methylated to form 5-methylcytosine"
gctgaagcaatgaggccctctggccattttgaaagcattgttgcctcacaaatgctgtgacgacattgataccaggctagctgagtcttaacacctcactccattctggaattacagcttcc

SEQ ID NO: 28907 - DNA, 122 bp, Homo sapiens
  misc_feature (61)..(62): /note="This region represents a CpG dinucleotide"
  misc_feature (61)..(61): /note="Nucleotide may be methylated to form 5-methylcytosine"
ctgatatatcttaaacttacttgaatatgtagcacctattaacatgccatggaaataggacgtttggagtattgtaattaagaacaattcctattaatatacatggggcaactgagaattaa

SEQ ID NO: 28908 - DNA, 122 bp, Homo sapiens
  misc_feature (61)..(62): /note="This region represents a CpG dinucleotide"
  misc_feature (61)..(61): /note="Nucleotide may be methylated to form 5-methylcytosine"
tcaaagaggcaagaaggcaagtcctgccagatctgattgtgcagacccaaaggatctgatcgcccgtcactaaggctactaatcaaatttccatccaatatgctcacgcaggatttcctgat

SEQ ID NO: 28909 - DNA, 122 bp, Homo sapiens
  misc_feature (61)..(62): /note="This region represents a CpG dinucleotide"
  misc_feature (61)..(61): /note="Nucleotide may be methylated to form 5-methylcytosine"
ctgctttcattgctgaatcaatgaagcaaagataaaataagaccatgactcaagctgtcacgcagcaagtgagagaatgagcatcatctttggagtcacacggtcacatccacatcttggtc

SEQ ID NO: 28910 - DNA, 122 bp, Homo sapiens
  misc_feature (61)..(62): /note="This region represents a CpG dinucleotide"
  misc_feature (61)..(61): /note="Nucleotide may be methylated to form 5-methylcytosine"
cggatattcaatttctctcaggcctagagctaacgtcatgtgtctggctgctaaaagctccggctccttttattaccacagtaaaggaagataacaggcgagaggtctgctgtagacattta

SEQ ID NO: 28911 - DNA, 122 bp, Homo sapiens
  misc_feature (61)..(62): /note="This region represents a CpG dinucleotide"
  misc_feature (61)..(61): /note="Nucleotide may be methylated to form 5-methylcytosine"
cagtactcaaatacatttatacatatgttcataccagtactattcacaataaccaaaaggcgggcatagcccaagtgttcatcaacagatgaatgggtaaattatttgtggtatatacaaac

SEQ ID NO: 28912 - DNA, 122 bp, Homo sapiens
  misc_feature (61)..(62): /note="This region represents a CpG dinucleotide"
  misc_feature (61)..(61): /note="Nucleotide may be methylated to form 5-methylcytosine"
gtaacatggtgagactccatctctacccaaaatacaaaaaataagctgggtgtggtggttcgcgcccgtagtcccagctactggggaggctgaggcaggattgcttgagccccagaaccaga

SEQ ID NO: 28913 - DNA, 122 bp, Homo sapiens
  misc_feature (61)..(62): /note="This region represents a CpG dinucleotide"
  misc_feature (61)..(61): /note="Nucleotide may be methylated to form 5-methylcytosine"
ctccatgtctgagttcttgacagcatggtcaagccactgaactatattaccagcaaccatcgcttaccagtcttcttgttacatgaggaaaagaagcagctccaatttgtaggagccctaga

SEQ ID NO: 28914 - DNA, 122 bp, Homo sapiens
  misc_feature (61)..(62): /note="This region represents a CpG dinucleotide"
  misc_feature (61)..(61): /note="Nucleotide may be methylated to form 5-methylcytosine"
atgatgacttcatagtttcactcacagagggttgtttttccccagttcttacatgttatacgcaataccttcaagcctcataccagcaacacaaattatatttcatttatttccagtgttgc

SEQ ID NO: 28915 - DNA, 122 bp, Homo sapiens
  misc_feature (61)..(62): /note="This region represents a CpG dinucleotide"
  misc_feature (61)..(61): /note="Nucleotide may be methylated to form 5-methylcytosine"
gcctgacgcaccctcctccccagctcaggaaattgtgaggtgaactcttcccctccagagcgctgtctgctgtgaaggcggctcaggcccccaacacacacatagcaggtgacaggtagggc

SEQ ID NO: 28916 - DNA, 122 bp, Homo sapiens
  misc_feature (61)..(62): /note="This region represents a CpG dinucleotide"
  misc_feature (61)..(61): /note="Nucleotide may be methylated to form 5-methylcytosine"
aatttcagagcctcttacccttgcctcatcatgcattttgactataaatatttagcagtccgttttattatcttttctgtgagttaaacttttttcatggacctaagaatattcagaaataa

SEQ ID NO: 28917 - DNA, 122 bp, Homo sapiens
  misc_feature (61)..(62): /note="This region represents a CpG dinucleotide"
  misc_feature (61)..(61): /note="Nucleotide may be methylated to form 5-methylcytosine"
actaataacattttacacatgcatagtactttacagcttacaaagttctcattctagctacgacagctgtgtaaccagttgccctagaacttagtggcatcactatgacgacatcactcagg

SEQ ID NO: 28918 - DNA, 122 bp, Homo sapiens
  misc_feature (61)..(62): /note="This region represents a CpG dinucleotide"
  misc_feature (61)..(61): /note="Nucleotide may be methylated to form 5-methylcytosine"
cggtagggcaagagtcccgagcctcaggtcttcctcttcaggggccaaagcagaggctggcgagtcagggtgcttgcaaagaggaagcccaggagtttccctggggttaccagagggctggg

SEQ ID NO: 28919 - DNA, 122 bp, Homo sapiens
  misc_feature (61)..(62): /note="This region represents a CpG dinucleotide"
  misc_feature (61)..(61): /note="Nucleotide may be methylated to form 5-methylcytosine"
atattacagcagtcattaaacatctctggatctcaggcagtcttattagcataaactctgcgtattaccacaaggtttcaagtttctattctggcttctcatcttagctaccattttctgtc

SEQ ID NO: 28920 - DNA, 122 bp, Homo sapiens
  misc_feature (61)..(62): /note="This region represents a CpG dinucleotide"
  misc_feature (61)..(61): /note="Nucleotide may be methylated to form 5-methylcytosine"
ccagccgcctctctctgcctgggtttctcttgttgcagctgggggccaagactctgctggcgtgggcctctgtgggtgctcctcacagagggccgggcagtctttttaagaatgctcaagct

SEQ ID NO: 28921 - DNA, 122 bp, Homo sapiens
  misc_feature (61)..(62): /note="This region represents a CpG dinucleotide"
  misc_feature (61)..(61): /note="Nucleotide may be methylated to form 5-methylcytosine"
cggggcctctgcacactcaccctcggtgtgctggagtcctcggcggtgctcctggctgggcgtgggggctttgctaccagtctgccctgggtcacgtctagaaacctcagctggaggcgcgg

SEQ ID NO: 28922 - DNA, 122 bp, Homo sapiens
  misc_feature (61)..(62): /note="This region represents a CpG dinucleotide"
  misc_feature (61)..(61): /note="Nucleotide may be methylated to form 5-methylcytosine"
tgcaactggtgtggggcaactgttgccatctgtctggtgggatgtcaccagggaaggtctcgcccattcactccttcatgcaccgctgggcttgggccttttgtttggttggctggggaggg

SEQ ID NO: 28923 - DNA, 122 bp, Homo sapiens
  misc_feature (61)..(62): /note="This region represents a CpG dinucleotide"
  misc_feature (61)..(61): /note="Nucleotide may be methylated to form 5-methylcytosine"
cattgtgctttatgtatcttttctttcgttaccttcccctcctgctttgactgtagctgtcggggtgcctcgctcatcttagcatccccatggcatctgacttgatgcctcatgcatagctt

SEQ ID NO: 28924 - DNA, 122 bp, Homo sapiens
  misc_feature (61)..(62): /note="This region represents a CpG dinucleotide"
  misc_feature (61)..(61): /note="Nucleotide may be methylated to form 5-methylcytosine"
atagtaacataaacaataacaaaaacaacaatagaagctaccatttattcttaaatatgccggcagttatactagtcactttacatgcatttcctcacctaatctttacaattgccttgcaa

SEQ ID NO: 28925 - DNA, 122 bp, Homo sapiens
  misc_feature (61)..(62): /note="This region represents a CpG dinucleotide"
  misc_feature (61)..(61): /note="Nucleotide may be methylated to form 5-methylcytosine"
agaactatccgaacaagggacatctttttcacagacttgccttacacagtttcttgaagacgagtacccagacatgcccactgaaggcataaaaaatcttgttgactttctcactggtgagg

SEQ ID NO: 28926 - DNA, 122 bp, Homo sapiens
  misc_feature (61)..(62): /note="This region represents a CpG dinucleotide"
  misc_feature (61)..(61): /note="Nucleotide may be methylated to form 5-methylcytosine"
cctgaggattagtaaacaaatgtgtgatgtttaatgggagcataacagcctacttccactcgaatgcccagagaagaaaagcagggcagtggtacttccagcctctctcttcaaagaaaaag

SEQ ID NO: 28927 - DNA, 122 bp, Homo sapiens
  misc_feature (61)..(62): /note="This region represents a CpG dinucleotide"
  misc_feature (61)..(61): /note="Nucleotide may be methylated to form 5-methylcytosine"
ccttctagcaggctgtcacatgttgccagattaaaacattgtgtaattatttacaggagacggtggggtgtcagatcatttggctggaaagaccatgtttccaaataaatttgagagatagc

SEQ ID NO: 28928 - DNA, 122 bp, Homo sapiens
  misc_feature (61)..(62): /note="This region represents a CpG dinucleotide"
  misc_feature (61)..(61): /note="Nucleotide may be methylated to form 5-methylcytosine"
gcttctatgtcctgtacacaatcttcatgaaaggtaaaaacgaaactacaatagaaattccggaatcagctcttgggcagggtcaaagagttagcataaataagatcatttgcaggttctgc

SEQ ID NO: 28929 - DNA, 122 bp, Homo sapiens
  misc_feature (61)..(62): /note="This region represents a CpG dinucleotide"
  misc_feature (61)..(61): /note="Nucleotide may be methylated to form 5-methylcytosine"
agagagaagagggtaagttcaaaatctgagtcatcaaccaaatttcttgacactgactgccgcagccattagtgctaaatagatttgaaccactaccaccagccataaaggacagatacaac

SEQ ID NO: 28930 - DNA, 122 bp, Homo sapiens
  misc_feature (61)..(62): /note="This region represents a CpG dinucleotide"
  misc_feature (61)..(61): /note="Nucleotide may be methylated to form 5-methylcytosine"
ccttccagattgcctcgtgtgatttccagtacagctagtgatgtgtcatattcctgcctacgctgttttctcaatccctggtgattaattaggtccatttggcttggtcagtacccagatct

SEQ ID NO: 28931 - DNA, 122 bp, Homo sapiens
  misc_feature (61)..(62): /note="This region represents a CpG dinucleotide"
  misc_feature (61)..(61): /note="Nucleotide may be methylated to form 5-methylcytosine"
tctcttttcacttccttttcttcttcttctttttttaaatatcaactagttactttcaaacggaagagtcctgatgtatggaagtctatggaaatcaagaagtgaaatctgccaatttctca

SEQ ID NO: 28932 - DNA, 122 bp, Homo sapiens
  misc_feature (61)..(62): /note="This region represents a CpG dinucleotide"
  misc_feature (61)..(61): /note="Nucleotide may be methylated to form 5-methylcytosine"
ccttaaaagaatatggaagaggctggccaatcacgtacgttattcggcttcgagaccccgcgccacgctgaggttaatttatcgccgtggcgaacactccgcggtttggaactctgattggg

SEQ ID NO: 28933 - DNA, 122 bp, Homo sapiens
  misc_feature (61)..(62): /note="This region represents a CpG dinucleotide"
  misc_feature (61)..(61): /note="Nucleotide may be methylated to form 5-methylcytosine"
ctgaggtcttgtgcacagagggtgtgaagagtggaagaaaatgggtgggtgattgctgtgcgatcaaggagtaaataagcagcacttgagtacctagtatttaataggccatgaacggcagt

SEQ ID NO: 28934 - DNA, 122 bp, Homo sapiens
  misc_feature (61)..(62): /note="This region represents a CpG dinucleotide"
  misc_feature (61)..(61): /note="Nucleotide may be methylated to form 5-methylcytosine"
acgtgaggagaaaaacaataacaggaaccaacaatgatatgaacatggtgatgagtcatccgccaacccttgctgattgacgtcagaccagccacaaagggtgttttacaagttaaggacaa

SEQ ID NO: 28935 - DNA, 122 bp, Homo sapiens
  misc_feature (61)..(62): /note="This region represents a CpG dinucleotide"
  misc_feature (61)..(61): /note="Nucleotide may be methylated to form 5-methylcytosine"
gccacgcgggggccaacctcacagacctgccaacaggccctgacaacacttctacctgctcgtctgcaccctggctgtcagtagagagatttagtgatctcactatgggaaaaaacatgaga

SEQ ID NO: 28936 - DNA, 122 bp, Homo sapiens
  misc_feature (61)..(62): /note="This region represents a CpG dinucleotide"
  misc_feature (61)..(61): /note="Nucleotide may be methylated to form 5-methylcytosine"
aatccactcagacatgccccactttcctctggctctttcctccctggctaatgatatcttcgtgtcgtgactgatgacagtagggaaacactggtttgctcatcaactcctgaaatacaaga

SEQ ID NO: 28937 - DNA, 122 bp, Homo sapiens
  misc_feature (61)..(62): /note="This region represents a CpG dinucleotide"
  misc_feature (61)..(61): /note="Nucleotide may be methylated to form 5-methylcytosine"
agtttgggtgttcggtcacaatctgggcattgccatggaacatgtgacccatatgaataacgtctgcctggtgtgcggtgctgaataaacgtttgaggatccctgggccaactgccctcagg

SEQ ID NO: 28938 - DNA, 122 bp, Homo sapiens
  misc_feature (61)..(62): /note="This region represents a CpG dinucleotide"
  misc_feature (61)..(61): /note="Nucleotide may be methylated to form 5-methylcytosine"
actgcaaacctctggctgcaggggtcggctcagttgctagcgataccgttgctaactactcgcctgaaagtgacacctgtgatctaaccctggctgctagatcccagaaggaagccggcagc

SEQ ID NO: 28939 - DNA, 122 bp, Homo sapiens
  misc_feature (61)..(62): /note="This region represents a CpG dinucleotide"
  misc_feature (61)..(61): /note="Nucleotide may be methylated to form 5-methylcytosine"
ttgccaggcactcagcctgaggacattcactctctcttcaatatcagagcttggtttttacgtttcttcccgtacccctcagctagcacctaatattaactgccttgtcctacaagttctca

SEQ ID NO: 28940 - DNA, 122 bp, Homo sapiens
  misc_feature (61)..(62): /note="This region represents a CpG dinucleotide"
  misc_feature (61)..(61): /note="Nucleotide may be methylated to form 5-methylcytosine"
tcagatctaagcacatatcttaggttttctggagtgatcctgacatttaggtattttgtgcgagtcagacagtctgtccttgtgtttggcttggaaaacatgtttgccgtaactagagctag

SEQ ID NO: 28941 - DNA, 122 bp, Homo sapiens
  misc_feature (61)..(62): /note="This region represents a CpG dinucleotide"
  misc_feature (61)..(61): /note="Nucleotide may be methylated to form 5-methylcytosine"
ggtaatccgcccgccttggcctcccaaagtgctgggattacagttgtaagctaccacgcccgagcaaatacatttttagtaaagttctgaggcaaatgatgaaaacagggttagtataaaat

SEQ ID NO: 28942 - DNA, 122 bp, Homo sapiens
  misc_feature (61)..(62): /note="This region represents a CpG dinucleotide"
  misc_feature (61)..(61): /note="Nucleotide may be methylated to form 5-methylcytosine"
ccagcaaatgtgccatcttcagccactggaggtcatctgctgaaatttcattgcccagttcgtatcagatgcaatcagaatttgtttgatgacaaaaacacttatcagctagtctgtcagtg

SEQ ID NO: 28943 - DNA, 122 bp, Homo sapiens
  misc_feature (61)..(62): /note="This region represents a CpG dinucleotide"
  misc_feature (61)..(61): /note="Nucleotide may be methylated to form 5-methylcytosine"
tatggagatactcttattatttgcatttgataccatcttctgacaaggcctataaaattacggcacagagtatgagacaggacataattttacatatattgttagcggacaattagacatcc

SEQ ID NO: 28944 - DNA, 122 bp, Homo sapiens
  misc_feature (61)..(62): /note="This region represents a CpG dinucleotide"
  misc_feature (61)..(61): /note="Nucleotide may be methylated to form 5-methylcytosine"
cctcagccaatcagagacatttcttctgtgtgacttcacccacctcattaccatttactacgcaggccttgtaattaccttcagaagggaacacatcctgtttctgcttgctcaaactctct

SEQ ID NO: 28945 - DNA, 122 bp, Homo sapiens
  misc_feature (61)..(62): /note="This region represents a CpG dinucleotide"
  misc_feature (61)..(61): /note="Nucleotide may be methylated to form 5-methylcytosine"
gcccttaaaaggcttaagcagggggaggcttaatcagattttgaagcattaatctctgcacggtgtagatatgaatcagagggagtcaagaatggatatagcagatcagtttggaaactctg

SEQ ID NO: 28946 - DNA, 122 bp, Homo sapiens
  misc_feature (61)..(62): /note="This region represents a CpG dinucleotide"
  misc_feature (61)..(61): /note="Nucleotide may be methylated to form 5-methylcytosine"
acttgagagagttgcaatctgccactggacatgctccatcaagtggaacaggcactggagcgacacagccagttgcagggactaaacaaaatcaggggcaggttccacatggaaatctgggc

SEQ ID NO: 28947 - DNA, 122 bp, Homo sapiens
  misc_feature (61)..(62): /note="This region represents a CpG dinucleotide"
  misc_feature (61)..(61): /note="Nucleotide may be methylated to form 5-methylcytosine"
taaacatttacataaggcaggaggttcaacacttggagagtgtaatcaaggcagtagtaacgcagtgctcctctctttgacttgaatgacttcctccccattagggtcattattgttttgca

SEQ ID NO: 28948 - DNA, 122 bp, Homo sapiens
  misc_feature (61)..(62): /note="This region represents a CpG dinucleotide"
  misc_feature (61)..(61): /note="Nucleotide may be methylated to form 5-methylcytosine"
gtgaattgtggtagggtgttgccaaatgggaaggcccttcctggatctctgtgtctgcatcgcagagttttctagagtaggaggctgttgtttaatgttgcctaatgccaacgttagagctc

SEQ ID NO: 28949 - DNA, 122 bp, Homo sapiens
  misc_feature (61)..(62): /note="This region represents a CpG dinucleotide"
  misc_feature (61)..(61): /note="Nucleotide may be methylated to form 5-methylcytosine"
tggcaaacagccagcaagttctcagtagatttcccatttgtcataggtttctcatgtatccgggtttggcttaaagatcaaattgcctttaggttgacttctgatccttgccagaaagagct

SEQ ID NO: 28950 - DNA, 122 bp, Homo sapiens
  misc_feature (61)..(62): /note="This region represents a CpG dinucleotide"
  misc_feature (61)..(61): /note="Nucleotide may be methylated to form 5-methylcytosine"
cggtggacctgggtttacatcaaggctatgcactcaccagctgggagactttggagagatcgcacagtcttgctggtctcagcttccttactcataatttggggatagaaccatgtcccaca

SEQ ID NO: 28951 - DNA, 122 bp, Homo sapiens
  misc_feature (61)..(62): /note="This region represents a CpG dinucleotide"
  misc_feature (61)..(61): /note="Nucleotide may be methylated to form 5-methylcytosine"
agctaactcaagcctaaccccttatgaaaggtggatttcctgtacaactgttctgacaagcggaggattaggcacttcatacattctgcttgggtaagagactcacgacagaagtgaatcac

SEQ ID NO: 28952 - DNA, 122 bp, Homo sapiens
  misc_feature (61)..(62): /note="This region represents a CpG dinucleotide"
  misc_feature (61)..(61): /note="Nucleotide may be methylated to form 5-methylcytosine"
gcacctgcactccaaacttgctgagtcatgtgggatgtttaccttggcccatgcctgcctcgctgcattgcagccatgttccttacacaggaggatcccttgagcccgggagtttgaggtca

SEQ ID NO: 28953 - DNA, 122 bp, Homo sapiens
  misc_feature (61)..(62): /note="This region represents a CpG dinucleotide"
  misc_feature (61)..(61): /note="Nucleotide may be methylated to form 5-methylcytosine"
aaactagttagaatccacgctctctggagacagagttctgcagtaagtggaaccttctgacgatggagcctggagccagcagctgggttctgtcaccctgactggggcggccctgttagtgt

SEQ ID NO: 28954 - DNA, 122 bp, Homo sapiens
  misc_feature (61)..(62): /note="This region represents a CpG dinucleotide"
  misc_feature (61)..(61): /note="Nucleotide may be methylated to form 5-methylcytosine"
caaattagattacagaatcagcatttagtaaatctcagcctccttcctttcccaaactagcgactcatcctcgagtttaagaaagaacacaggaaggaaagaaggcaatatccctctctgct

SEQ ID NO: 28955 - DNA, 122 bp, Homo sapiens
  misc_feature (61)..(62): /note="This region represents a CpG dinucleotide"
  misc_feature (61)..(61): /note="Nucleotide may be methylated to form 5-methylcytosine"
gctggtgcagaaagggaagctccatggggccaggagatgactcactcactgtcaaacagacgcaaaggatctcccagcccaggcgcgacctggattacagagaatgacagcgacactcagag

SEQ ID NO: 28956 - DNA, 122 bp, Homo sapiens
  misc_feature (61)..(62): /note="This region represents a CpG dinucleotide"
  misc_feature (61)..(61): /note="Nucleotide may be methylated to form 5-methylcytosine"
ttacatcccagtcattaccatggcttacaaggctccacacagtctgatccctgcctacagcgttggtctcacttcctacaattctctccctcgcttgctccacttactcatctcagccacat

SEQ ID NO: 28957 - DNA, 122 bp, Homo sapiens
  misc_feature (61)..(62): /note="This region represents a CpG dinucleotide"
  misc_feature (61)..(61): /note="Nucleotide may be methylated to form 5-methylcytosine"
attggctgggccctggcagccggaaatgtcaccagccacacagcgtggagctggctctcccgcggccaccacagacctgagcccaggaggctctgtgacaaggcacagacctaccacagaga

SEQ ID NO: 28958 - DNA, 122 bp, Homo sapiens
  misc_feature (61)..(62): /note="This region represents a CpG dinucleotide"
  misc_feature (61)..(61): /note="Nucleotide may be methylated to form 5-methylcytosine"
agatacagtgaggctctggaatcagactactggactccaaactcttgctgactgtgtgatcgtggataagttaggtgacttcgctggcctcttcgtccctttataaaacaggaataatgctt

SEQ ID NO: 28959 - DNA, 122 bp, Homo sapiens
  misc_feature (61)..(62): /note="This region represents a CpG dinucleotide"
  misc_feature (61)..(61): /note="Nucleotide may be methylated to form 5-methylcytosine"
gcttcctccctcctgttttagatccagcagagaaaccagcctaacggggaggaggtgctgcgtgaggagccaaggacattcccagcaaatactttcacagcttaaaagccacagccaaaagc

SEQ ID NO: 28960 - DNA, 122 bp, Homo sapiens
  misc_feature (61)..(62): /note="This region represents a CpG dinucleotide"
  misc_feature (61)..(61): /note="Nucleotide may be methylated to form 5-methylcytosine"
gtcgagaggcaccttcactgccatctactcccaccttcttcctgatgcttgaaatctgtccgtgatcccaggtcagtgattgctcgaggctgtgacagggacactctcagacagcagcccac

SEQ ID NO: 28961 - DNA, 122 bp, Homo sapiens
  misc_feature (61)..(62): /note="This region represents a CpG dinucleotide"
  misc_feature (61)..(61): /note="Nucleotide may be methylated to form 5-methylcytosine"
tttgatcgttaggaagaacactaatgtttattgagcgccgggctgggtacttcattctcacgttctttttcagccctcagagcattcttgtggtagggcaagtgagtggcagatgcattgag

SEQ ID NO: 28962 - DNA, 122 bp, Homo sapiens
  misc_feature (61)..(62): /note="This region represents a CpG dinucleotide"
  misc_feature (61)..(61): /note="Nucleotide may be methylated to form 5-methylcytosine"
cccagtccaggaacttcaagttaaaatcaagggtccccactagggcagacgccaagaggacggtatcagcacaacagctcggcccccaggaacagaagtctctctgccaccttctacctcga

SEQ ID NO: 28963 - DNA, 122 bp, Homo sapiens
  misc_feature (61)..(62): /note="This region represents a CpG dinucleotide"
  misc_feature (61)..(61): /note="Nucleotide may be methylated to form 5-methylcytosine"
agccccttccccctgggctcagtttgccgatgaagagcctaagactccagagccaaaaggcgttgcctgtgttccctgggctgccaagggcgtcgctgatgctggacctctgagtttcagcc

SEQ ID NO: 28964 - DNA, 122 bp, Homo sapiens
  misc_feature (61)..(62): /note="This region represents a CpG dinucleotide"
  misc_feature (61)..(61): /note="Nucleotide may be methylated to form 5-methylcytosine"
aggagtgctgtgtctgtgcaaaatggcagggcgtgcagaccctgtttcttcctgccctcgcgctcagctaagggtagacaccatatcgtgcatcaccttgggtgtgctatttgccttgagtt

SEQ ID NO: 28965 - DNA, 122 bp, Homo sapiens
  misc_feature (61)..(62): /note="This region represents a CpG dinucleotide"
  misc_feature (61)..(61): /note="Nucleotide may be methylated to form 5-methylcytosine"
aaagcccatgggagctctgaggtctgttacagcccagaccacaagttcagtcagaacacacgaagggggatcaatgtctcttaactagggtcaggaaattcaacatttgtgtaattcttgag

SEQ ID NO: 28966 - DNA, 122 bp, Homo sapiens
  misc_feature (61)..(62): /note="This region represents a CpG dinucleotide"
  misc_feature (61)..(61): /note="Nucleotide may be methylated to form 5-methylcytosine"
cagcaccttccaggggttcccttcgtttgtgggctgggcccccagtgctgggctggaaatcgtctcttggtgcagtggttcatgagatcaggcagacgttttttagagtccaaatggcagac

SEQ ID NO: 28967 - DNA, 122 bp, Homo sapiens
  misc_feature (61)..(62): /note="This region represents a CpG dinucleotide"
  misc_feature (61)..(61): /note="Nucleotide may be methylated to form 5-methylcytosine"
ttatcatacttttgagtctggatgaattttgtcttagggcggagagctcatcagttctaccggtcttggagaacaagattttctaaagggaaaggaagattcttgaacatattgtgaaagag

SEQ ID NO: 28968 - DNA, 122 bp, Homo sapiens
  misc_feature (61)..(62): /note="This region represents a CpG dinucleotide"
  misc_feature (61)..(61): /note="Nucleotide may be methylated to form 5-methylcytosine"
taaggtgctgttttgtgaagcacaacgagttagtgagtgctaaatctccatgacccctgccgtctatatggcttggatacgtcatgtcaacctgacataaagccatgggtgaacattctctg

SEQ ID NO: 28969 - DNA, 122 bp, Homo sapiens
  misc_feature (61)..(62): /note="This region represents a CpG dinucleotide"
  misc_feature (61)..(61): /note="Nucleotide may be methylated to form 5-methylcytosine"
tagagacgaggttccctcttattgctcaggctggtctcgaattcctgggtttaagtgaaccgcccgcctcggcctcccagagtgtgaggacccgcctggcctaaaataatgttatcacttaa

SEQ ID NO: 28970 - DNA, 122 bp, Homo sapiens
  misc_feature (61)..(62): /note="This region represents a CpG dinucleotide"
  misc_feature (61)..(61): /note="Nucleotide may be methylated to form 5-methylcytosine"
aaaagtgcatttcaatatcatgctctgaatgagacattgctctcaggatgcagaatccctcgtttctttctcccctgtgtgctctgcatgaggccacctgagaagatctggactcatgcaga

SEQ ID NO: 28971 - DNA, 122 bp, Homo sapiens
  misc_feature (61)..(62): /note="This region represents a CpG dinucleotide"
  misc_feature (61)..(61): /note="Nucleotide may be methylated to form 5-methylcytosine"
tagcttggtttggctcaagatgaccaagagtcaggcttcatccttgggcttacttcactccggaagctcatggagtgacaggagcaggctaccccctgccaggtaatttgcctcctaatatt

SEQ ID NO: 28972 - DNA, 122 bp, Homo sapiens
  misc_feature (61)..(62): /note="This region represents a CpG dinucleotide"
  misc_feature (61)..(61): /note="Nucleotide may be methylated to form 5-methylcytosine"
cacccgcagagctgccctgccggccaccgaccaccatggagggagcattcagctggtgcgcgagctgggtactaaactggctctactgtgagccgccctcggcccctccatctcctcttacc

SEQ ID NO: 28973 - DNA, 122 bp, Homo sapiens
  misc_feature (61)..(62): /note="This region represents a CpG dinucleotide"
  misc_feature (61)..(61): /note="Nucleotide may be methylated to form 5-methylcytosine"
ctgatctcatgccatttccttcccctgtcaactctgcagccagatgcttctaaataaagacgcgctctctcactgtggaacttcccatgtgttttttgttttgttttgtttttgagatggag

SEQ ID NO: 28974 - DNA, 122 bp, Homo sapiens
  misc_feature (61)..(62): /note="This region represents a CpG dinucleotide"
  misc_feature (61)..(61): /note="Nucleotide may be methylated to form 5-methylcytosine"
agtcactgcctttattctgctttgagtctgcattttcttccttggcatgcctgtgattcacgcattctcagcctccccgaaagtgcccatcagggctcccctctgtttaatgagatccacat

SEQ ID NO: 28975 - DNA, 122 bp, Homo sapiens
  misc_feature (61)..(62): /note="This region represents a CpG dinucleotide"
  misc_feature (61)..(61): /note="Nucleotide may be methylated to form 5-methylcytosine"
atgtaagatgaacattggttttttccagaaaggcgtgacaatttgacgcaaaggcagactcgaggcaaaggcagaacaactcaaagaggggagtgggtttccaggtcataggtagataagag

SEQ ID NO: 28976 - DNA, 122 bp, Homo sapiens
  misc_feature (61)..(62): /note="This region represents a CpG dinucleotide"
  misc_feature (61)..(61): /note="Nucleotide may be methylated to form 5-methylcytosine"
acggctcctgggccactctgtggcattgacagggagctccagggcctcattggcggtttccgttccctgggtcccagtccccagtcagagttatcagggaggggctggctgacagcgatttt

SEQ ID NO: 28977 - DNA, 122 bp, Homo sapiens
  misc_feature (61)..(62): /note="This region represents a CpG dinucleotide"
  misc_feature (61)..(61): /note="Nucleotide may be methylated to form 5-methylcytosine"
ggggacgcagcgtccgcaggacggcagggccgtatcctgcggagcagggttctgatgcagcgggtgagcactgggtgtgtgagcactgggggagggcggcagagaaggcggagggccgaggc

SEQ ID NO: 28978 - DNA, 122 bp, Homo sapiens
  misc_feature (61)..(62): /note="This region represents a CpG dinucleotide"
  misc_feature (61)..(61): /note="Nucleotide may be methylated to form 5-methylcytosine"
gagtcctctcccaatggaatcacacaggatgcacttaattcccctagcagtgatttgttacgacatgtgaatgagttgtctactggacaaggtcactacagactcagtgcccaaagttttta

SEQ ID NO: 28979 - DNA, 122 bp, Homo sapiens
  misc_feature (61)..(62): /note="This region represents a CpG dinucleotide"
  misc_feature (61)..(61): /note="Nucleotide may be methylated to form 5-methylcytosine"
ataaatgcaaccattacaccttatagcattggctataacccagtatttctcacatgtaagcgtgcatcagaatcatctggaggactggttaaaacacagactggctaggtcctgccctgagg

SEQ ID NO: 28980 - DNA, 122 bp, Homo sapiens
  misc_feature (61)..(62): /note="This region represents a CpG dinucleotide"
  misc_feature (61)..(61): /note="Nucleotide may be methylated to form 5-methylcytosine"
gcccactgaatcatctctaggggtgaggtcagtatcttatttttaagcagctttgaaaagcgacaggctggttctaataaaccagcttcttcaatctgcaggattttgatagaaaactccct

SEQ ID NO: 28981 - DNA, 122 bp, Homo sapiens
  misc_feature (61)..(62): /note="This region represents a CpG dinucleotide"
  misc_feature (61)..(61): /note="Nucleotide may be methylated to form 5-methylcytosine"
ataccacaggtcttctgtggagtagaaacactggtgatgtctcccagtctttttccaactcggagtcactcaaaatagataacatgtagcagtagttattaaaaagttttattccctttagt

SEQ ID NO: 28982 - DNA, 122 bp, Homo sapiens
  misc_feature (61)..(62): /note="This region represents a CpG dinucleotide"
  misc_feature (61)..(61): /note="Nucleotide may be methylated to form 5-methylcytosine"
tttcattccacctgctgacataacagtggaggaatcattttgttgcataagactctgtcacgtcagaggctgaagtgacagcaactaagggaagcaaatcttcccaaagcaggatgtggaga

SEQ ID NO: 28983 - DNA, 122 bp, Homo sapiens
  misc_feature (61)..(62): /note="This region represents a CpG dinucleotide"
  misc_feature (61)..(61): /note="Nucleotide may be methylated to form 5-methylcytosine"
cctgaatccctccttggaggattagtgcccacaaattgtaaacagccacccagatctcagcgagcaagaaataaattatacctgaatgttttaaagggttttttggtggggaaagaacagtg

SEQ ID NO: 28984 - DNA, 122 bp, Homo sapiens
  misc_feature (61)..(62): /note="This region represents a CpG dinucleotide"
  misc_feature (61)..(61): /note="Nucleotide may be methylated to form 5-methylcytosine"
ttcctggtgctggactaagaggtgcaggcttggagggtgcagggcggtccgcctctcagacgtagaggcccggcctcggatgaaggcggaagggagggcaccgcctgttgctgggcaactgt

SEQ ID NO: 28985 - DNA, 122 bp, Homo sapiens
  misc_feature (61)..(62): /note="This region represents a CpG dinucleotide"
  misc_feature (61)..(61): /note="Nucleotide may be methylated to form 5-methylcytosine"
ttttattggttactactatcagtatctgttttagatggtttgtcttgtgtgtctaacagccgtgaacactcttttttttttttttttttctcctgagtcgaagtattcctctgtagcccagg

SEQ ID NO: 28986 - DNA, 122 bp, Homo sapiens
  misc_feature (61)..(62): /note="This region represents a CpG dinucleotide"
  misc_feature (61)..(61): /note="Nucleotide may be methylated to form 5-methylcytosine"
atcattaccttcatctgcactgcatcagggctacaagctacttctgccttagaaattgtacgtgtccctctaatagcccagtgaagtggggccctcacagattaattactatttccatttgg

SEQ ID NO: 28987 - DNA, 122 bp, Homo sapiens
  misc_feature (61)..(62): /note="This region represents a CpG dinucleotide"
  misc_feature (61)..(61): /note="Nucleotide may be methylated to form 5-methylcytosine"
cttagcatgaggcaagctctgcctaacattttacatgcattaactcacataatctttacacgtactctctgaggtattgtcacctctactatttaaatcatggctttagagaggttatgtca

SEQ ID NO: 28988 - DNA, 122 bp, Homo sapiens
  misc_feature (61)..(62): /note="This region represents a CpG dinucleotide"
  misc_feature (61)..(61): /note="Nucleotide may be methylated to form 5-methylcytosine"
tttcgagggttgtgggttttcgtgctgaggccagcagttcctgcagagcagaggtgaggtcgggctccaggctagagtcatgtctggtccgcacttgatctctcacccataaatcctttcct

SEQ ID NO: 28989 - DNA, 122 bp, Homo sapiens
  misc_feature (61)..(62): /note="This region represents a CpG dinucleotide"
  misc_feature (61)..(61): /note="Nucleotide may be methylated to form 5-methylcytosine"
gaagtccactcagctggttggggagcttagggttttctttttggtttacaagcggaactgcgaattagaataatgcatttaagggatttttaagttctagctttgacatgtaaagagcttaa

SEQ ID NO: 28990 - DNA, 122 bp, Homo sapiens
  misc_feature (61)..(62): /note="This region represents a CpG dinucleotide"
  misc_feature (61)..(61): /note="Nucleotide may be methylated to form 5-methylcytosine"
tggctggaggggggatgctcttcaggcagcaacagcggccagaggaccggccagtcaaggcgggccagtctgctctctggagacagaccgattggccaggcatttcgccttccagccaagac

SEQ ID NO: 28991 - DNA, 122 bp, Homo sapiens
  misc_feature (61)..(62): /note="This region represents a CpG dinucleotide"
  misc_feature (61)..(61): /note="Nucleotide may be methylated to form 5-methylcytosine"
tcacctcctttctagcttatccccttctctccaccccttaccgccccccccccacccccccgcccgaaagctgaggtgtgtcactgctgaactgaggctggtgaagagacttgagcactctc

SEQ ID NO: 28992 - DNA, 122 bp, Homo sapiens
  misc_feature (61)..(62): /note="This region represents a CpG dinucleotide"
  misc_feature (61)..(61): /note="Nucleotide may be methylated to form 5-methylcytosine"
atttttgtctctgacatgctcttgacctctgtggagtttttctactgttgtacatgccaccgacaaggtttgacaagggtgagagagcactggcatctgatgtccatccccacttacccgct

SEQ ID NO: 28993 - DNA, 122 bp, Homo sapiens
  misc_feature (61)..(62): /note="This region represents a CpG dinucleotide"
  misc_feature (61)..(61): /note="Nucleotide may be methylated to form 5-methylcytosine"
gatgaacctgttcacctacgagaagggctactgcttcgtgtactacctgtcccagctctgcggagacccacagcgctttgatgactttctccgagtgagcagccccctgcccgggacggccc

SEQ ID NO: 28994 - DNA, 122 bp, Homo sapiens
  misc_feature (61)..(62): /note="This region represents a CpG dinucleotide"
  misc_feature (61)..(61): /note="Nucleotide may be methylated to form 5-methylcytosine"
attttaatgaaaattaaatatgacttagaagcattgatttatgaaggcttatgatgtcatcggtttcgacagaaagcaaactccagcaggctgtgagcctacagggagttgacccagaaaca

SEQ ID NO: 28995 - DNA, 122 bp, Homo sapiens
  misc_feature (61)..(62): /note="This region represents a CpG dinucleotide"
  misc_feature (61)..(61): /note="Nucleotide may be methylated to form 5-methylcytosine"
gcatctgctttgcctggtgatgatgattaatagacaggcccaggtgcctggtgcccaaggcgcctaatttagtgtcgatcctgcaggggcagagcatcaagaatgacacaggcctggtaatg

SEQ ID NO: 28996 - DNA, 122 bp, Homo sapiens
  misc_feature (61)..(62): /note="This region represents a CpG dinucleotide"
  misc_feature (61)..(61): /note="Nucleotide may be methylated to form 5-methylcytosine"
cttttcattttctgtctcgtaagttctgtctttgcctgccacagacctgatgagcttcagcggaaaagtcagcatgaacatgtgaagcacacgatgaactttatcaggctgcgtctctgtgg

SEQ ID NO: 28997 - DNA, 122 bp, Homo sapiens
  misc_feature (61)..(62): /note="This region represents a CpG dinucleotide"
  misc_feature (61)..(61): /note="Nucleotide may be methylated to form 5-methylcytosine"
aaattctactgacacttattcttaatttttttaagagacagctgtaacattgtttacaaacgtataaataccatcccagcgagaaactagctttgtgcttctgtcataaaagagacacaggt

SEQ ID NO: 28998 - DNA, 122 bp, Homo sapiens
  misc_feature (61)..(62): /note="This region represents a CpG dinucleotide"
  misc_feature (61)..(61): /note="Nucleotide may be methylated to form 5-methylcytosine"
gcattcgatgctgtttctaagctggcctcctccctggccctctgcatctcagcagagcagcggttccatctccacactgagacttgcctttgagtatcgcatcacacacctccaccggttcc

SEQ ID NO: 28999 - DNA, 122 bp, Homo sapiens
  misc_feature (61)..(62): /note="This region represents a CpG dinucleotide"
  misc_feature (61)..(61): /note="Nucleotide may be methylated to form 5-methylcytosine"
gtgtatctgtaggatgtttctgatggactacattttgcacaggagatgtgttgtaccaaccgaaaataaatcgactaagagttattgtcctaggtccttgaccttttttatcctagcttgac

SEQ ID NO: 29000 - DNA, 122 bp, Homo sapiens
  misc_feature (61)..(62): /note="This region represents a CpG dinucleotide"
  misc_feature (61)..(61): /note="Nucleotide may be methylated to form 5-methylcytosine"
agaaactgaaaccagccactctggtgccctgcccattccaagtttaggttcaagccacagcggcttgacagctattagaataagaatgcatctaggggagagggcattttcagtcttatcag

SEQ ID NO: 29001 - DNA, 122 bp, Homo sapiens
  misc_feature (61)..(62): /note="This region represents a CpG dinucleotide"
  misc_feature (61)..(61): /note="Nucleotide may be methylated to form 5-methylcytosine"
ccctatctcagtagtaagcacattcaaagtgggttggttctgcaagacaacccctgccaacgaatttagggcctgttgttgggccttgatgctatgactgtagcttcccaagactgctgtac

SEQ ID NO: 29002 - DNA, 122 bp, Homo sapiens
  misc_feature (61)..(62): /note="This region represents a CpG dinucleotide"
  misc_feature (61)..(61): /note="Nucleotide may be methylated to form 5-methylcytosine"
gcaagagaacacggtcaagatgggaaaggtctgcagtagaggtgacacttctgagggtaccgtcaggatgaagcttccaggctagaggctagagaagaacaggcagaccaacatgcacatca

SEQ ID NO: 29003 - DNA, 122 bp, Homo sapiens
  misc_feature (61)..(62): /note="This region represents a CpG dinucleotide"
  misc_feature (61)..(61): /note="Nucleotide may be methylated to form 5-methylcytosine"
aagaatacacatagcacaataccatttttgcaaagcttaaaaatatgcagaatgacataacgtattgcctaggactaaatacacatctagtaatggtacaggaagtgcctgggaataaacaa

SEQ ID NO: 29004 - DNA, 122 bp, Homo sapiens
  misc_feature (61)..(62): /note="This region represents a CpG dinucleotide"
  misc_feature (61)..(61): /note="Nucleotide may be methylated to form 5-methylcytosine"
ttcctgtcatatgacccctcctctgggctccctcaccaccctgcctggcttggcaggagtcgtctgagaaggggactcctccagggacttggtccctaggtccccaggtgagctggatgtcc

SEQ ID NO: 29005 - DNA, 122 bp, Homo sapiens
  misc_feature (61)..(62): /note="This region represents a CpG dinucleotide"
  misc_feature (61)..(61): /note="Nucleotide may be methylated to form 5-methylcytosine"
tatacatacatatcattgtgtagattgcactttttcagaaaagacaactgatcaccagcacgtcactctcacttcctcccatgtacattttgtatcttccccacagggaagtgaaactggtg

SEQ ID NO: 29006 - DNA, 122 bp, Homo sapiens
  misc_feature (61)..(62): /note="This region represents a CpG dinucleotide"
  misc_feature (61)..(61): /note="Nucleotide may be methylated to form 5-methylcytosine"
ggaggtgcagtggccacccaaacataaataaccacccgcagtgtccagaggccctcagatcgtctcatacaagggaagagagagccactggctccacttatttcgggtccgctaggtggccc

SEQ ID NO: 29007 - DNA, 122 bp, Homo sapiens
  misc_feature (61)..(62): /note="This region represents a CpG dinucleotide"
  misc_feature (61)..(61): /note="Nucleotide may be methylated to form 5-methylcytosine"
aattcttgcttctaaagggagcagctgcaatgagcaatgcctgggaacacattattaactcgcaatacacagtgtggcccgctcttcctttctgtaaacagttacttggtgatcaacaacgt

SEQ ID NO: 29008 - DNA, 122 bp, Homo sapiens
  misc_feature (61)..(62): /note="This region represents a CpG dinucleotide"
  misc_feature (61)..(61): /note="Nucleotide may be methylated to form 5-methylcytosine"
acactgaaaatatttacctatcggtctgcacagaaaccaacaagtcagagctgtcagcaacgcctgtggctctgcaggtgatgagtatcacctgaagtgatatttaggagcagtttgaaggt

SEQ ID NO: 29009 - DNA, 122 bp, Homo sapiens
  misc_feature (61)..(62): /note="This region represents a CpG dinucleotide"
  misc_feature (61)..(61): /note="Nucleotide may be methylated to form 5-methylcytosine"
aaacttcaggaggttttagctagtggcgatccaaagacattaaatattgctttgtgggtacgtctccaccttgcgtcttacttggtgactgttcagtggtaggcaaatgtcagaacccagta

SEQ ID NO: 29010 - DNA, 122 bp, Homo sapiens
  misc_feature (61)..(62): /note="This region represents a CpG dinucleotide"
  misc_feature (61)..(61): /note="Nucleotide may be methylated to form 5-methylcytosine"
tgggagtgattcagagaccattgcgtaagtcatcgttgaaggcacatggtgtgttcattgcgagccatgggaagactccttgggtacttgtcaatgactattgtgctcctccctagggccaa

SEQ ID NO: 29011 - DNA, 122 bp, Homo sapiens
  misc_feature (61)..(62): /note="This region represents a CpG dinucleotide"
  misc_feature (61)..(61): /note="Nucleotide may be methylated to form 5-methylcytosine"
gctggactgtgtgcgtgcgtattcatgtgagagaaacagcctggttcgaccagtgcctgacgtcacttgttctgctgtgtcagcatggcacaggaggctgtatccccttgatacatttctca

SEQ ID NO: 29012 - DNA, 122 bp, Homo sapiens
  misc_feature (61)..(62): /note="This region represents a CpG dinucleotide"
  misc_feature (61)..(61): /note="Nucleotide may be methylated to form 5-methylcytosine"
gagtctggtataggaagactatcagtttcaggcacatagaaggcagttcttgactaggagcggaatatagaacaccccataaaaaaatgagaggcttgaggaagcaagaacccagggaaaac

SEQ ID NO: 29013 - DNA, 122 bp, Homo sapiens
  misc_feature (61)..(62): /note="This region represents a CpG dinucleotide"
  misc_feature (61)..(61): /note="Nucleotide may be methylated to form 5-methylcytosine"
aaagacaaattaaccacttgcctgtctctaccttgtcagttttactaccttagtctccaccggttctcaaaaagccctcctgcccactcagtccttcatccctgcctgctctctgttgaagt

SEQ ID NO: 29014 - DNA, 122 bp, Homo sapiens
  misc_feature (61)..(62): /note="This region represents a CpG dinucleotide"
  misc_feature (61)..(61): /note="Nucleotide may be methylated to form 5-methylcytosine"
agaaaaagtcccatttttgtcaatggatgcccattaaaagtctttgaattgtgctttgcacgatggaacttaatgcctgttgaaggtgtgaccagtaagagttccagcttgatcctagagtc

SEQ ID NO: 29015 - DNA, 122 bp, Homo sapiens
  misc_feature (61)..(62): /note="This region represents a CpG dinucleotide"
  misc_feature (61)..(61): /note="Nucleotide may be methylated to form 5-methylcytosine"
gtgatcctactaatcctgtcttgcttttcaagacttctgtactcagacacaaaaacacaacgtaactctttaaaatccaagtactaaaatagcacccagagcctacatcttctttcaaaggc

SEQ ID NO: 29016 - DNA, 122 bp, Homo sapiens
  misc_feature (61)..(62): /note="This region represents a CpG dinucleotide"
  misc_feature (61)..(61): /note="Nucleotide may be methylated to form 5-methylcytosine"
ttgtccataaatacagcatattgaagcaacccaaactctatggcccaactttacaagtgacgaaaagtactctgtgtttagaagagattgttgagacatcactcgggtgtgctcaaagagtg

SEQ ID NO: 29017 - DNA, 122 bp, Homo sapiens
  misc_feature (61)..(62): /note="This region represents a CpG dinucleotide"
  misc_feature (61)..(61): /note="Nucleotide may be methylated to form 5-methylcytosine"
actccaaaaacattaaattgaaagcttttgtcaaataacttgttaggatagtctgacttacggttactggccatggtaatatgtttattttgggggaaaattatactcctcacagttaattt

SEQ ID NO: 29018 - DNA, 122 bp, Homo sapiens
  misc_feature (61)..(62): /note="This region represents a CpG dinucleotide"
  misc_feature (61)..(61): /note="Nucleotide may be methylated to form 5-methylcytosine"
actctgctccatccatactctggactagtaggcagtcattaaagaaatgaggtcatcctgcgtgttccaatctgagaagatgttcagattatatagtgttttctttagggccccagaaggac

SEQ ID NO: 29019 - DNA, 122 bp, Homo sapiens
  misc_feature (61)..(62): /note="This region represents a CpG dinucleotide"
  misc_feature (61)..(61): /note="Nucleotide may be methylated to form 5-methylcytosine"
ggctaggtatcagagacatctcctctgtctccatcaggttgtttttccatggaattaaggcgtgtatctgtccactgataggggtgttttctctcacaccctgtccttaaacatagtcagtc

SEQ ID NO: 29020 - DNA, 122 bp, Homo sapiens
  misc_feature (61)..(62): /note="This region represents a CpG dinucleotide"
  misc_feature (61)..(61): /note="Nucleotide may be methylated to form 5-methylcytosine"
tcctgatattttcactggctggaaaataaatcaggttttacctccgaatgaaactatgatcgccttttcccaagcacctagagcctgtttcatgggtgtgtctgttatgcttgggtacatat

SEQ ID NO: 29021 - DNA, 122 bp, Homo sapiens
  misc_feature (61)..(62): /note="This region represents a CpG dinucleotide"
  misc_feature (61)..(61): /note="Nucleotide may be methylated to form 5-methylcytosine"
atgatttccttctccactgcccatgtatgaaatatacacaaatccagggcagccctgggccgaaggagtgtttatggttctgcccggccataaacatgccagccttcaaaacaccaggacat

SEQ ID NO: 29022 - DNA, 122 bp, Homo sapiens
  misc_feature (61)..(62): /note="This region represents a CpG dinucleotide"
  misc_feature (61)..(61): /note="Nucleotide may be methylated to form 5-methylcytosine"
tgataagcgaagaacagaggcctatgagaacatagagcagggagttcttaaactgatctacgatctagagaaggattcaataaagaggaaatatttaatgagacttgaagattgagtaggct

SEQ ID NO: 29023 - DNA, 122 bp, Homo sapiens
  misc_feature (61)..(62): /note="This region represents a CpG dinucleotide"
  misc_feature (61)..(61): /note="Nucleotide may be methylated to form 5-methylcytosine"
aaccaaagaatcacaatgctaaggagctggagggcatctttgagtgcatctcgtccgtggcgttccaccttcccacttaagtgtcctgagcagtcggggaaagaacattaacccattttttt

SEQ ID NO: 29024 - DNA, 122 bp, Homo sapiens
  misc_feature (61)..(62): /note="This region represents a CpG dinucleotide"
  misc_feature (61)..(61): /note="Nucleotide may be methylated to form 5-methylcytosine"
tgccatgtaaaatgctgtgttcccagcacctagcacaatgctgtcacccagtgggtgctacgtaaagatttatcaaataaacaaaagaattggcccacaggttagaaacccctgccctgcag

SEQ ID NO: 29025 - DNA, 122 bp, Homo sapiens
  misc_feature (61)..(62): /note="This region represents a CpG dinucleotide"
  misc_feature (61)..(61): /note="Nucleotide may be methylated to form 5-methylcytosine"
gatccttgttaaacaatttgagagcagaagccttctggatgtttatgatgtttttctccccgagactttgacagcagtcttgtgcacacctaatatgacaggaatttttatagcaactcact

SEQ ID NO: 29026 - DNA, 122 bp, Homo sapiens
  misc_feature (61)..(62): /note="This region represents a CpG dinucleotide"
  misc_feature (61)..(61): /note="Nucleotide may be methylated to form 5-methylcytosine"
tccatctctagtagagctgaactcactcaaatttcagtagttttgatgtgacagtaacatcggggatgaaataaaagttatgtatttattttaattatgcacatacactagaaagacccact

SEQ ID NO: 29027 - DNA, 122 bp, Homo sapiens
  misc_feature (61)..(62): /note="This region represents a CpG dinucleotide"
  misc_feature (61)..(61): /note="Nucleotide may be methylated to form 5-methylcytosine"
ttataccatataattcacatataagtgaattatatgacaacaatagcatatagttcagaacgggaaaaacagaaatatattgttgtaaggtgaagcagtacaatgccaatttaaagtagact

SEQ ID NO: 29028 - DNA, 122 bp, Homo sapiens
  misc_feature (61)..(62): /note="This region represents a CpG dinucleotide"
  misc_feature (61)..(61): /note="Nucleotide may be methylated to form 5-methylcytosine"
cattgggtacatttagttctgctgtatctacatcagaaaaaccctaagtgtaataaagcacgtgaagtattacattagctcaagttccttcttgagtcacttcagctgtggagtttctcttc

SEQ ID NO: 29029 - DNA, 122 bp, Homo sapiens
  misc_feature (61)..(62): /note="This region represents a CpG dinucleotide"
  misc_feature (61)..(61): /note="Nucleotide may be methylated to form 5-methylcytosine"
ttgatatttttctgacctgcgggagactctttgtgactcagtttgtttgactcataaacccgcaggccactggtttgaaacctaagccactaccagagctgattacaacctctgggagagcc

SEQ ID NO: 29030 - DNA, 122 bp, Homo sapiens
  misc_feature (61)..(62): /note="This region represents a CpG dinucleotide"
  misc_feature (61)..(61): /note="Nucleotide may be methylated to form 5-methylcytosine"
gctgggacacacaacactggataatggcataaaagactaacaggatgtggtataacttgacgcactaaatcctctgctaaatcacactttttgttttactcaactgtcttcctcttttcatt

SEQ ID NO: 29031 - DNA, 122 bp, Homo sapiens
  misc_feature (61)..(62): /note="This region represents a CpG dinucleotide"
  misc_feature (61)..(61): /note="Nucleotide may be methylated to form 5-methylcytosine"
tttgttttccaacactgtacgtagtctgtctttgccttttcaaagctgtgggggttatgccgggcgcggtggctcacgcctgtaatcccagcactttgagaggccaaggcgggcggatcacg

SEQ ID NO: 29032 - DNA, 122 bp, Homo sapiens
  misc_feature (61)..(62): /note="This region represents a CpG dinucleotide"
  misc_feature (61)..(61): /note="Nucleotide may be methylated to form 5-methylcytosine"
gctggctggagctggagcagtgtcctcagccactggccgggaaggctttgttagactaagcgtggcctgaggatgcctcagtgccaagtcacaccatgacctggacctgccttagtccgtga

SEQ ID NO: 29033 - DNA, 122 bp, Homo sapiens
  misc_feature (61)..(62): /note="This region represents a CpG dinucleotide"
  misc_feature (61)..(61): /note="Nucleotide may be methylated to form 5-methylcytosine"
ttttttgtatttttttgtagatacagggtttcactatgtagccaaggctagtcttgaattcgtgagctcaagtgaatcaccggccttggcctctcaagtctaggattacaggtgagccacca

SEQ ID NO: 29034 - DNA, 122 bp, Homo sapiens
  misc_feature (61)..(62): /note="This region represents a CpG dinucleotide"
  misc_feature (61)..(61): /note="Nucleotide may be methylated to form 5-methylcytosine"
agagggaaggacaagtgatggaggaaggatggattcggttaccagatgggagagtagctgcgccacagttgctaggagctgtagttggacaagaaaccacccatcgaggtcaggagtcactg

SEQ ID NO: 29035 - DNA, 122 bp, Homo sapiens
  misc_feature (61)..(62): /note="This region represents a CpG dinucleotide"
  misc_feature (61)..(61): /note="Nucleotide may be methylated to form 5-methylcytosine"
aacaagtagttccactcctaggtatgtacacagatatgcacacaggaatgtattcatatacgtccacacaaaacttgtccatgaatgttcacagcagcagcattcataaaagacaaaatgta

SEQ ID NO: 29036 - DNA, 122 bp, Homo sapiens
  misc_feature (61)..(62): /note="This region represents a CpG dinucleotide"
  misc_feature (61)..(61): /note="Nucleotide may be methylated to form 5-methylcytosine"
agcctgagatatgtcggcaattctcagtgtctcagcttttcagttctgtgtgtgtgcacgcgtgtgtggtgtttgtatgtgtcaaattttctgctgtgaaaaccctggcacagatacccaga

SEQ ID NO: 29037 - DNA, 122 bp, Homo sapiens
  misc_feature (61)..(62): /note="This region represents a CpG dinucleotide"
  misc_feature (61)..(61): /note="Nucleotide may be methylated to form 5-methylcytosine"
tgacaagatccctattcaacagatctcctggactctcattttgagaatcacgtttctctccgcgtgagttgcaccaaaccattcagctattattaagtgtctcattgtctgtctgtttacct

SEQ ID NO: 29038 - DNA, 122 bp, Homo sapiens
  misc_feature (61)..(62): /note="This region represents a CpG dinucleotide"
  misc_feature (61)..(61): /note="Nucleotide may be methylated to form 5-methylcytosine"
taatcatactgtttgtgattcatgtcaaatactgcagcatacacatccatggttaatacacgagcaccatttgttattgactgatgtgaggtggttggtctttgttaaattcaaaaatggaa

SEQ ID NO: 29039 - DNA, 122 bp, Homo sapiens
  misc_feature (61)..(62): /note="This region represents a CpG dinucleotide"
  misc_feature (61)..(61): /note="Nucleotide may be methylated to form 5-methylcytosine"
tggcctgcactgcccaagtttcaaggctcctctgtcctcatccgctgtgggaggggtaggcgggcatagtgcccggtgagcctcctctcctgccgtccacctcccatcttcatgagcagctt

SEQ ID NO: 29040 - DNA, 122 bp, Homo sapiens
  misc_feature (61)..(62): /note="This region represents a CpG dinucleotide"
  misc_feature (61)..(61): /note="Nucleotide may be methylated to form 5-methylcytosine"
cagggaggaaactcaaatcacccagaggctaggcaaagctatatgtcacaatcccacctgcgggcaggcccaaggatgagtcacaatcccacacatgtcccaggtccagtctctcacctgag

SEQ ID NO: 29041 - DNA, 122 bp, Homo sapiens
  misc_feature (61)..(62): /note="This region represents a CpG dinucleotide"
  misc_feature (61)..(61): /note="Nucleotide may be methylated to form 5-methylcytosine"
agagtgttgggaagttgtcaagactctgttcttcaagactttgcttggttgtcagctccccggaaactcttggctgactcacctgaggtgaggtccagaccttcctgtgtgctctcacagcc

SEQ ID NO: 29042 - DNA, 122 bp, Homo sapiens
  misc_feature (61)..(62): /note="This region represents a CpG dinucleotide"
  misc_feature (61)..(61): /note="Nucleotide may be methylated to form 5-methylcytosine"
ctcaggctgaaattacatattgccagctgtgctcttaccaggagcttgagttctcttctgcgctcatttctctaactgcaggatccaggtccttgtggttacaggacgatagtccccatttc

SEQ ID NO: 29043 - DNA, 122 bp, Homo sapiens
  misc_feature (61)..(62): /note="This region represents a CpG dinucleotide"
  misc_feature (61)..(61): /note="Nucleotide may be methylated to form 5-methylcytosine"
gtggcacaggcaccagagggaatctcctggtctatgggttgtgaagaccaagggagtgtacggtctactgagcctgagtgcacagttccttacagcacagtccctcagggcttcccttggct

SEQ ID NO: 29044 - DNA, 122 bp, Homo sapiens
  misc_feature (61)..(62): /note="This region represents a CpG dinucleotide"
  misc_feature (61)..(61): /note="Nucleotide may be methylated to form 5-methylcytosine"
ttccctgcacttgaagtagacttcacaccccggctgtggttggtcctgctttgtggaatccgccttgcctgcctgtctgacctcatcttgtcctgcctcttccccctttctcatcacctaca

SEQ ID NO: 29045 - DNA, 122 bp, Homo sapiens
  misc_feature (61)..(62): /note="This region represents a CpG dinucleotide"
  misc_feature (61)..(61): /note="Nucleotide may be methylated to form 5-methylcytosine"
tgttcctggcagtgattcactggatgagaacataaatgtatttgtgggaatatgtatgaacgttgctctgggaacaaaagaaacagttctgttataccacattggtggtaatcattctttcc

SEQ ID NO: 29046 - DNA, 122 bp, Homo sapiens
  misc_feature (61)..(62): /note="This region represents a CpG dinucleotide"
  misc_feature (61)..(61): /note="Nucleotide may be methylated to form 5-methylcytosine"
aaaatcctcaaaacaggaatttcaaaatgtcaacaaacaggcaaaactttctttcaacagcgctattatgactggtatgtttcacttgctttttttttttttttctttttctccagcaaatt

SEQ ID NO: 29047 - DNA, 122 bp, Homo sapiens
  misc_feature (61)..(62): /note="This region represents a CpG dinucleotide"
  misc_feature (61)..(61): /note="Nucleotide may be methylated to form 5-methylcytosine"
tgcaaaatcactgtttctcatttatgggctccatcctagcgctcttactgattactcaaccgcaaccctgtcctgaactttattctttttttctgtgttggcctggatattgttgtttctct

SEQ ID NO: 29048 - DNA, 122 bp, Homo sapiens
  misc_feature (61)..(62): /note="This region represents a CpG dinucleotide"
  misc_feature (61)..(61): /note="Nucleotide may be methylated to form 5-methylcytosine"
tgaacacccttccttcagaaaaggagagtcctttgttctctgcaaattcacgcagcacaacgagtggaggaaatcacaggcctaagccaggcattaacatccacgaaaagggacagggcaaa

SEQ ID NO: 29049 - DNA, 122 bp, Homo sapiens
  misc_feature (61)..(62): /note="This region represents a CpG dinucleotide"
  misc_feature (61)..(61): /note="Nucleotide may be methylated to form 5-methylcytosine"
gctccattcataaaaattatgttcctgagtctcatgtgtttactcggagagcctccctgacgtacttaggattccaaagtgggaggtaaatatgtgctggaaaattatctattccaaatatc

SEQ ID NO: 29050 - DNA, 122 bp, Homo sapiens
  misc_feature (61)..(62): /note="This region represents a CpG dinucleotide"
  misc_feature (61)..(61): /note="Nucleotide may be methylated to form 5-methylcytosine"
tacttcagattacttttattacctgagagacttcatctgcataacaagatagctttcggccgggtgtgtttgctcatgcttgtaatcccagcattttgggaggctgaggcagccagatcacc

SEQ ID NO: 29051 - DNA, 122 bp, Homo sapiens
  misc_feature (61)..(62): /note="This region represents a CpG dinucleotide"
  misc_feature (61)..(61): /note="Nucleotide may be methylated to form 5-methylcytosine"
agctgctaccgagtttgatgttagatggtgacataaaatacagtaattcctagatatatgcggagggactggtcccaggacagcctacatgtaaccaaatccacacatgaagtcccacagtc

SEQ ID NO: 29052 - DNA, 122 bp, Homo sapiens
  misc_feature (61)..(62): /note="This region represents a CpG dinucleotide"
  misc_feature (61)..(61): /note="Nucleotide may be methylated to form 5-methylcytosine"
tgtgtttggtttggggccattggccctgctcctgtagactcagagtagctgtctgtcccacgttgccatagctgagttcactcggcacagtcaccttgggctgtgtgctttttttgctgatc

SEQ ID NO: 29053 - DNA, 122 bp, Homo sapiens
  misc_feature (61)..(62): /note="This region represents a CpG dinucleotide"
  misc_feature (61)..(61): /note="Nucleotide may be methylated to form 5-methylcytosine"
cctagttctgcggccgagaggggctaacgtacgcaccaccagcccctagacaaacacaaacgcatgtgagttttaggttccaccgttgtcacttcagcccagggtcagtaaacattttctgt

SEQ ID NO: 29054 - DNA, 122 bp, Homo sapiens
  misc_feature (61)..(62): /note="This region represents a CpG dinucleotide"
  misc_feature (61)..(61): /note="Nucleotide may be methylated to form 5-methylcytosine"
tcagggtcaggcttggttctcagatggtcagggactacctcatggctgaaaacaggcacccgtccttcagtctgccgctgtaacacacagattttattgatcctactctgtactccaagaag

SEQ ID NO: 29055 - DNA, 122 bp, Homo sapiens
  misc_feature (61)..(62): /note="This region represents a CpG dinucleotide"
  misc_feature (61)..(61): /note="Nucleotide may be methylated to form 5-methylcytosine"
ttaaacactttccaacatccaatgagcacttatacaaagattgctttttatttcatttaccgccttctcagctgtttatgagtcaaactgtttcctggtactgttgctgtaggtgtatattg

SEQ ID NO: 29056 - DNA, 122 bp, Homo sapiens
  misc_feature (61)..(62): /note="This region represents a CpG dinucleotide"
  misc_feature (61)..(61): /note="Nucleotide may be methylated to form 5-methylcytosine"
ggcggcggcacccccaaatagccccacccgggcggtccacgggccgggccctgtgtgctgcggccgccatcccctggaggacagtcagtcggtattcctgggtcctgtctgtccccaaccgt

SEQ ID NO: 29057 - DNA, 122 bp, Homo sapiens
  misc_feature (61)..(62): /note="This region represents a CpG dinucleotide"
  misc_feature (61)..(61): /note="Nucleotide may be methylated to form 5-methylcytosine"
aatccttacccacagatataccaaaataatcttctacattatttaatcctagcttcttcgcgggcaagagccacattatctctgtgcttaatgagttctcagtacataagacagacattggt

SEQ ID NO: 29058 - DNA, 122 bp, Homo sapiens
  misc_feature (61)..(62): /note="This region represents a CpG dinucleotide"
  misc_feature (61)..(61): /note="Nucleotide may be methylated to form 5-methylcytosine"
gaaatggccttgaggcaatggcttaaatgattttttaaatctgtttttctctcatgtgagcgtctagaccgggaggcggccagaagtggccggcagctgtagagagagttttcctgggacac

SEQ ID NO: 29059 - DNA, 122 bp, Homo sapiens
  misc_feature (61)..(62): /note="This region represents a CpG dinucleotide"
  misc_feature (61)..(61): /note="Nucleotide may be methylated to form 5-methylcytosine"
tctagctactctactagagctacttcaggaagaagatagtttggcattgtgacaggagtacggcctttggaatcaggatgtgtagacctctgtttgacttcttttgatgaccgtgcccttgc

SEQ ID NO: 29060 - DNA, 122 bp, Homo sapiens
  misc_feature (61)..(62): /note="This region represents a CpG dinucleotide"
  misc_feature (61)..(61): /note="Nucleotide may be methylated to form 5-methylcytosine"
tgacatgatcacaaaagaaaccatttgaagacatttcacttctcctggtttggcttactccgttcttttttaaaccactgtatctgaaggtgcccttggagatcatctagtccagagatgtg

SEQ ID NO: 29061 - DNA, 122 bp, Homo sapiens
  misc_feature (61)..(62): /note="This region represents a CpG dinucleotide"
  misc_feature (61)..(61): /note="Nucleotide may be methylated to form 5-methylcytosine"
agctatgttttacaaagcttttttcacattcattaccttatttgatatgcctagaaatggcgccttttagaaaccaggtgtaactggtagagcaggtttgaggcatttttacattgtcaaat

SEQ ID NO: 29062 - DNA, 122 bp, Homo sapiens
  misc_feature (61)..(62): /note="This region represents a CpG dinucleotide"
  misc_feature (61)..(61): /note="Nucleotide may be methylated to form 5-methylcytosine"
attgaggatcaggaaattcttgtgaatcctggcagttggcattaggaaagtggcagtagacgttcacatagactaggggttccagattctggtgacctgcccataaaggtgaaagaaaatta

SEQ ID NO: 29063 - DNA, 122 bp, Homo sapiens
  misc_feature (61)..(62): /note="This region represents a CpG dinucleotide"
  misc_feature (61)..(61): /note="Nucleotide may be methylated to form 5-methylcytosine"
tttattctaagaatttacaaggcttgtcgttgctttctatcatgttggctttctgaagcacggggagttaacaactatttgatgtaatcaggaacccggggaaaatctttagttggttccct

SEQ ID NO: 29064 - DNA, 122 bp, Homo sapiens
  misc_feature (61)..(62): /note="This region represents a CpG dinucleotide"
  misc_feature (61)..(61): /note="Nucleotide may be methylated to form 5-methylcytosine"
agggtggggcgtagggagcgccgtctccaccctcagtacttttggggtgggggacctgagcgtgcggagagcgggaggcagagctgagagcggggttaagcgcgaagctaaggcgccgcata

SEQ ID NO: 29065 - DNA, 122 bp, Homo sapiens
  misc_feature (61)..(62): /note="This region represents a CpG dinucleotide"
  misc_feature (61)..(61): /note="Nucleotide may be methylated to form 5-methylcytosine"
agtgattcgcctgcctcgggctcccaaagtgttgggattacaggcgttagccaccgtgcccgccccatagtaggtatttagtaagcatttgctgagtaagcaaagattactcacttccaaag

SEQ ID NO: 29066 - DNA, 122 bp, Homo sapiens
  misc_feature (61)..(62): /note="This region represents a CpG dinucleotide"
  misc_feature (61)..(61): /note="Nucleotide may be methylated to form 5-methylcytosine"
aggcaccgcagctccgccacccttgtctggagcagaatcctgtgatcagaatggtaatctcgggttaccccacccaagtcaggatggcctgggagtacagataagggaagaggaagccatta

SEQ ID NO: 29067 - DNA, 122 bp, Homo sapiens
  misc_feature (61)..(62): /note="This region represents a CpG dinucleotide"
  misc_feature (61)..(61): /note="Nucleotide may be methylated to form 5-methylcytosine"
gacatttatgaaaagcattgtataatacccacttccccatttgtgagctctgtgagctttcggggtgtggtgactgtttctgccccatttaccgttgatctgccagtacctagcacagtgtc

SEQ ID NO: 29068 - DNA, 122 bp, Homo sapiens
  misc_feature (61)..(62): /note="This region represents a CpG dinucleotide"
  misc_feature (61)..(61): /note="Nucleotide may be methylated to form 5-methylcytosine"
tccaaaaagtttgtgttcatcagctgtgaatgtgaattctaacttcctgcactcagtacccgttactgcctcactgtttcctgttgacactttgaacgatcagttttctgcctcttaattgt

SEQ ID NO: 29069 - DNA, 122 bp, Homo sapiens
  misc_feature (61)..(62): /note="This region represents a CpG dinucleotide"
  misc_feature (61)..(61): /note="Nucleotide may be methylated to form 5-methylcytosine"
ctaggaggttggaaacaggccccggcgagcctggtgccatgtcttcatgggagttgcttacgtggtacaccaagcccaggtataagagagggaccagaaatgtcaactgttttctcggtcca

SEQ ID NO: 29070 - DNA, 122 bp, Homo sapiens
  misc_feature (61)..(62): /note="This region represents a CpG dinucleotide"
  misc_feature (61)..(61): /note="Nucleotide may be methylated to form 5-methylcytosine"
cttacaatgaaatggactaaatccaatctgccttatattcctgtgtccactaaccaccatcggaaatccaacttccttgttatctatgatgattcaagcctatcatgccccacaaaaactac

SEQ ID NO: 29071 - DNA, 122 bp, Homo sapiens
  misc_feature (61)..(62): /note="This region represents a CpG dinucleotide"
  misc_feature (61)..(61): /note="Nucleotide may be methylated to form 5-methylcytosine"
gcagcacatcacagcatctgctacatcagatctttctgtatttcatgacctttcagcttccgttgctgctgctcattgctaaagtctttcccaattcaaatcactgacagtgagaatctgat

SEQ ID NO: 29072 - DNA, 122 bp, Homo sapiens
  misc_feature (61)..(62): /note="This region represents a CpG dinucleotide"
  misc_feature (61)..(61): /note="Nucleotide may be methylated to form 5-methylcytosine"
tgtttacttatagatgaactgtttaaatacatacattacataacacaaacatgtaagtgacgcaactgaaacagagcttcttctgtgtccttcctccagctcaatcagcaagcattgtccag

SEQ ID NO: 29073 - DNA, 122 bp, Homo sapiens
  misc_feature (61)..(62): /note="This region represents a CpG dinucleotide"
  misc_feature (61)..(61): /note="Nucleotide may be methylated to form 5-methylcytosine"
cagctcctggaggaggccagcccagcaggaaagtctgtgagcaggaccccattcaccctgcggcagacgggcaccgtactggccacgggctgacgccggccacacttcccctccgagggcca

SEQ ID NO: 29074 - DNA, 122 bp, Homo sapiens
  misc_feature (61)..(62): /note="This region represents a CpG dinucleotide"
  misc_feature (61)..(61): /note="Nucleotide may be methylated to form 5-methylcytosine"
taagactcgtcaactttcatctttcctggtttctgcaaagttgatgatgaaatttcctaacgtcttctcagaaagcttaacactggatttagacttgtctctatcaggcactttctggtgcc

SEQ ID NO: 29075 - DNA, 122 bp, Homo sapiens
  misc_feature (61)..(62): /note="This region represents a CpG dinucleotide"
  misc_feature (61)..(61): /note="Nucleotide may be methylated to form 5-methylcytosine"
cataatgttgtgtgtaagtatcaacatcttgtaacaccctctttacgagttaacaacaagcgttttagtgcattaaaaagtccttttacttctgtgatccccaagtaataactatccatttt

SEQ ID NO: 29076 - DNA, 122 bp, Homo sapiens
  misc_feature (61)..(62): /note="This region represents a CpG dinucleotide"
  misc_feature (61)..(61): /note="Nucleotide may be methylated to form 5-methylcytosine"
attggcagaataaaggcccctgctaaagacgtcctgagaacctgtcaatatgttatgctacgtaacaaagggaattagggttgcaggtggaattaaggttgctattcagctggcctttttat

SEQ ID NO: 29077 - DNA, 122 bp, Homo sapiens
  misc_feature (61)..(62): /note="This region represents a CpG dinucleotide"
  misc_feature (61)..(61): /note="Nucleotide may be methylated to form 5-methylcytosine"
tatcttcattgggcacttaactatgtgccaggcactgcacatacaaaatgaagactaacacgcctgcctaacctcaaggagtacctcttaactggcaactcaatgccatactctgaccgggc

SEQ ID NO: 29078 - DNA, 122 bp, Homo sapiens
  misc_feature (61)..(62): /note="This region represents a CpG dinucleotide"
  misc_feature (61)..(61): /note="Nucleotide may be methylated to form 5-methylcytosine"
tccaacaacacagccagacttaaagaggtttgatgaaaggcgagtggctttgtttggaggcgctggtgctgggccctaggctcagtctgtggcatgcatgagaagctagtggcttatcaacg

SEQ ID NO: 29079 - DNA, 122 bp, Homo sapiens
  misc_feature (61)..(62): /note="This region represents a CpG dinucleotide"
  misc_feature (61)..(61): /note="Nucleotide may be methylated to form 5-methylcytosine"
gtatatgtcaacacatatgcccacgtgaatttcaaacaattaaacaagcgtaacacttgtcgtgcttattatgagccaggcatgttctaagtgcttcataagtatggtattaactcacttaa

SEQ ID NO: 29080 - DNA, 122 bp, Homo sapiens
  misc_feature (61)..(62): /note="This region represents a CpG dinucleotide"
  misc_feature (61)..(61): /note="Nucleotide may be methylated to form 5-methylcytosine"
ccaacctcaacaggccagaatgagataatactggattgaaacgtaccagcaggccaggcgcggtggctcacgcctgtaatcccagcactttgggaagctgaggcgagagggtcacaaggtca

SEQ ID NO: 29081 - DNA, 122 bp, Homo sapiens
  misc_feature (61)..(62): /note="This region represents a CpG dinucleotide"
  misc_feature (61)..(61): /note="Nucleotide may be methylated to form 5-methylcytosine"
ctgagcggagctggggtccctggccagaggcggaacaaaatggggtcatggccaggaagacgcgctaacgcagtaagagtcactcagagggccggaactgccggaactgccgaagacccgag

SEQ ID NO: 29082 - DNA, 122 bp, Homo sapiens
  misc_feature (61)..(62): /note="This region represents a CpG dinucleotide"
  misc_feature (61)..(61): /note="Nucleotide may be methylated to form 5-methylcytosine"
ccagcgtgcacgcgtctccgccacgcctcactcccgtctgcgcctggatccaccgccacccgcttgtataaaaagtgggccccacacggtgcagcttcgtagtctgcaaagaaaatgtccaa

SEQ ID NO: 29083 - DNA, 122 bp, Homo sapiens
  misc_feature (61)..(62): /note="This region represents a CpG dinucleotide"
  misc_feature (61)..(61): /note="Nucleotide may be methylated to form 5-methylcytosine"
gctaaatttaatgactcttattttatcagtaagaaaccaaggctaagcccttaaattggccggagctaaattgacatgccagcttcagagctgattccaaagcctggcatttttcgttacaa

SEQ ID NO: 29084 - DNA, 122 bp, Homo sapiens
  misc_feature (61)..(62): /note="This region represents a CpG dinucleotide"
  misc_feature (61)..(61): /note="Nucleotide may be methylated to form 5-methylcytosine"
ataagtaaaaagatatataaaaccatgtggaacctaaaaacatttatacacacaaccgtacgtacacatgaccaaaagatgggaagatgcacacccagatgttaatggtgtctatctctgag

SEQ ID NO: 29085 - DNA, 122 bp, Homo sapiens
  misc_feature (61)..(62): /note="This region represents a CpG dinucleotide"
  misc_feature (61)..(61): /note="Nucleotide may be methylated to form 5-methylcytosine"
tgccactttcttgagtggtaatcttgggcaggtcatttgtttcttcctcagttgatcccccgttttaaaaagataatatttccagtttccttcacagagatgttatggagataaaataagct

SEQ ID NO: 29086 - DNA, 122 bp, Homo sapiens
  misc_feature (61)..(62): /note="This region represents a CpG dinucleotide"
  misc_feature (61)..(61): /note="Nucleotide may be methylated to form 5-methylcytosine"
atgcccggcttatttacatttttgaaagatatgttacggcatgatttcttgactttggcacgctttatatttttggccagataactgttgttggggctgtcttgtgcattgtaggacattaa

SEQ ID NO: 29087 - DNA, 122 bp, Homo sapiens
  misc_feature (61)..(62): /note="This region represents a CpG dinucleotide"
  misc_feature (61)..(61): /note="Nucleotide may be methylated to form 5-methylcytosine"
ttttcttctcttgctaatttcttttttgctactaaagacttgtgtttctagagatatgaccgtaattattccaacctctccaatttataatttagtgttcaagcttttaaattaaggaacac

SEQ ID NO: 29088 - DNA, 122 bp, Homo sapiens
  misc_feature (61)..(62): /note="This region represents a CpG dinucleotide"
  misc_feature (61)..(61): /note="Nucleotide may be methylated to form 5-methylcytosine"
gctaggacttcaggtgcatgccatctgtatgctggctggctaattttttctttgtagtgacgaggtctcactatgttgcctaggctgatctcaaactcctggcctcaaacagttctctcacc

SEQ ID NO: 29089 - DNA, 122 bp, Homo sapiens
  misc_feature (61)..(62): /note="This region represents a CpG dinucleotide"
  misc_feature (61)..(61): /note="Nucleotide may be methylated to form 5-methylcytosine"
tttaaattagttcaagagttattacctacaacctaaagtatctgaactgagataactggtcgcctactgttttaactgccacacacccctttcttcttctggaaacactacttcccttcttt

SEQ ID NO: 29090 - DNA, 122 bp, Homo sapiens
  misc_feature (61)..(62): /note="This region represents a CpG dinucleotide"
  misc_feature (61)..(61): /note="Nucleotide may be methylated to form 5-methylcytosine"
tttggggggtgtcagagagtgtctgtatggggtgggtgccagctgccacctgcccacccacgtaacctggacacccaggaacccaggatctgcctgtcagggctctgccgccctggcctctg

SEQ ID NO: 29091 - DNA, 122 bp, Homo sapiens
  misc_feature (61)..(62): /note="This region represents a CpG dinucleotide"
  misc_feature (61)..(61): /note="Nucleotide may be methylated to form 5-methylcytosine"
taggctcctactgccttagtaagtctcgtaataagttacctaataaaaatggtgtaaattcgttttcggcttggttctcaaagaaatcaggagacatgtcagcttcttaatgaccttatagc

SEQ ID NO: 29092 - DNA, 122 bp, Homo sapiens
  misc_feature (61)..(62): /note="This region represents a CpG dinucleotide"
  misc_feature (61)..(61): /note="Nucleotide may be methylated to form 5-methylcytosine"
cattgaatatttcactaccttgatgtcttagcaggctgcaatgggagtttctcctgcagacgttgaaggcataagctgccatgttgtgacaagcctgtgagatgccacatgggaagaagctg

SEQ ID NO: 29093 - DNA, 122 bp, Homo sapiens
  misc_feature (61)..(62): /note="This region represents a CpG dinucleotide"
  misc_feature (61)..(61): /note="Nucleotide may be methylated to form 5-methylcytosine"
agctcagccaaccctttgaaactgagcctgcgggtgaagtcaggtcaatacattcacaggcgtttcaggccctatcgacgtctggggtgggaaacccacccgaaagctgttgaaatacaggg

SEQ ID NO: 29094 - DNA, 122 bp, Homo sapiens
  misc_feature (61)..(62): /note="This region represents a CpG dinucleotide"
  misc_feature (61)..(61): /note="Nucleotide may be methylated to form 5-methylcytosine"
gttattcgggaattaggcatctgccctgatgatgctgctgtaatccccatcaaaaacaaccggttttatactattgaaatcctaaaggtagaataatggaagccctgtctgtttgccacacc

SEQ ID NO: 29095 - DNA, 122 bp, Homo sapiens
  misc_feature (61)..(62): /note="This region represents a CpG dinucleotide"
  misc_feature (61)..(61): /note="Nucleotide may be methylated to form 5-methylcytosine"
attggaggagggtataactttaagagccagagtgcctgagtttgactcgcagctgtgccacgtactggctgtgtggtcttggggaagttgcttaacctctctgtgcctttgtttccccgtct

SEQ ID NO: 29096 - DNA, 122 bp, Homo sapiens
  misc_feature (61)..(62): /note="This region represents a CpG dinucleotide"
  misc_feature (61)..(61): /note="Nucleotide may be methylated to form 5-methylcytosine"
tgtcataactgctgacattcatcttgattactttagttaaaataaatagttatacttgggcggctttcagagaatacatcatagtagatgtaatgctggaaagcaatgggctcttggttttt

SEQ ID NO: 29097 - DNA, 122 bp, Homo sapiens
  misc_feature (61)..(62): /note="This region represents a CpG dinucleotide"
  misc_feature (61)..(61): /note="Nucleotide may be methylated to form 5-methylcytosine"
ggaggtgctgttccatcaccaggtaagggtccctggagtccctgtccatgtggctctgtgcgtgaacctgaggcttccagagctgagaacacttccttagcctttaagttgcattccatcct

SEQ ID NO: 29098 - DNA, 122 bp, Homo sapiens
  misc_feature (61)..(62): /note="This region represents a CpG dinucleotide"
  misc_feature (61)..(61): /note="Nucleotide may be methylated to form 5-methylcytosine"
taactttttatggatacataatattttacatatgtatgggatatctgtgatattttgttacgtgcataggatgtgtaatgattaagtcagagcattagtggtatccatcactttgggaattt

SEQ ID NO: 29099 - DNA, 122 bp, Homo sapiens
  misc_feature (61)..(62): /note="This region represents a CpG dinucleotide"
  misc_feature (61)..(61): /note="Nucleotide may be methylated to form 5-methylcytosine"
gtcaaggagggctggctacaggcagagtggatttcataaatcaccatcccctcttaaatgcgtgcttcacctttttactattttaagtatgattttctcaggttaaaaaaacttttccccaa

SEQ ID NO: 29100 - DNA, 122 bp, Homo sapiens
  misc_feature (61)..(62): /note="This region represents a CpG dinucleotide"
  misc_feature (61)..(61): /note="Nucleotide may be methylated to form 5-methylcytosine"
tttatctactgtgaggttcctggggcggagatgtgcagtggagcgagaacttcctgtgaccgtgacattgtctaggtggtgagcaggtgtgggggtgtggagagaggtgaggggctgaggta

SEQ ID NO: 29101 - DNA, 122 bp, Homo sapiens
  misc_feature (61)..(62): /note="This region represents a CpG dinucleotide"
  misc_feature (61)..(61): /note="Nucleotide may be methylated to form 5-methylcytosine"
ggtcagggtaaagcctgggcctcagaattgtccaaagaacacccaagtgtggttgggtttcggttttgctgatagcaccatttgctcacagtgaatcatgatcaggagaggaggcttgggat

SEQ ID NO: 29102 - DNA, 122 bp, Homo sapiens
  misc_feature (61)..(62): /note="This region represents a CpG dinucleotide"
  misc_feature (61)..(61): /note="Nucleotide may be methylated to form 5-methylcytosine"
caagcaatttgcccacctcagcctcccaaagtgctggggattagacatgagccactgtcacggcctaatcttgatatttgaaacacatgataggcgttcctcagtcttgctttcaaaggtac

SEQ ID NO: 29103 - DNA, 122 bp, Homo sapiens
  misc_feature (61)..(62): /note="This region represents a CpG dinucleotide"
  misc_feature (61)..(61): /note="Nucleotide may be methylated to form 5-methylcytosine"
ttaggtgctacctgactttagatctgaagagaagatactgtgaaatacagattcagtaagcgattctcaaatgggaaatgctgtcatttccatggagggtatttggaaatgtacagtggtgg

SEQ ID NO: 29104 - DNA, 122 bp, Homo sapiens
  misc_feature (61)..(62): /note="This region represents a CpG dinucleotide"
  misc_feature (61)..(61): /note="Nucleotide may be methylated to form 5-methylcytosine"
ttggcgggaagcagagtcacctaaaccgcctgctgtgcacaccggtgttcggaagggcagcgcactgcacatcctggccaggctgcttcgtggccgtctctcccaccggggtctgcaggtgc

SEQ ID NO: 29105 - DNA, 122 bp, Homo sapiens
  misc_feature (61)..(62): /note="This region represents a CpG dinucleotide"
  misc_feature (61)..(61): /note="Nucleotide may be methylated to form 5-methylcytosine"
tacatcccagcccagccacacgccatgccaggtacacagcaggtgcccctggaagaggagcgtctaaagataacacaacaagataacaaggaggacgccgcctgcctaacgtgtaaataaca

SEQ ID NO: 29106 - DNA, 122 bp, Homo sapiens
  misc_feature (61)..(62): /note="This region represents a CpG dinucleotide"
  misc_feature (61)..(61): /note="Nucleotide may be methylated to form 5-methylcytosine"
gtccaagagggtggtgtcaatcatctccagctgtaaccattaggaattgggaaagaggcacgggaagtcacacccagctcttctggggagcatcgcacgccacttctgctcatatctcatta

SEQ ID NO: 29107 - DNA, 122 bp, Homo sapiens
  misc_feature (61)..(62): /note="This region represents a CpG dinucleotide"
  misc_feature (61)..(61): /note="Nucleotide may be methylated to form 5-methylcytosine"
taaggatatgaaaaggagtaaatctggtagacagtgcagagtcaactagacttcgtgaaacgctgaattagggaagtgcaagaagatttgaaaatgactctaagcatctggtcacaagtggc

SEQ ID NO: 29108 - DNA, 122 bp, Homo sapiens
  misc_feature (61)..(62): /note="This region represents a CpG dinucleotide"
  misc_feature (61)..(61): /note="Nucleotide may be methylated to form 5-methylcytosine"
tgtggccacactgcctggggctctggggacttgactaagttgtgtggactctcggagcctcgtttctcatctgtcaagagggagaagttagtaatcatagctcctgcagagtagttatgagg

SEQ ID NO: 29109 - DNA, 122 bp, Homo sapiens
  misc_feature (61)..(62): /note="This region represents a CpG dinucleotide"
  misc_feature (61)..(61): /note="Nucleotide may be methylated to form 5-methylcytosine"
tttctcgctgaatctagtgatgcgtttgctttttctttgcaactgctgtgcaaattggaccgtagcccagaaaagaaaaagagatggcaggctgctttggctttttagaaacaacttaattc

SEQ ID NO: 29110 - DNA, 122 bp, Homo sapiens
  misc_feature (61)..(62): /note="This region represents a CpG dinucleotide"
  misc_feature (61)..(61): /note="Nucleotide may be methylated to form 5-methylcytosine"
ttttctaaactggtacatttccccaggtacaaatctgcctcctgtggtagatgcagtgtgcgttaccacatctactgagtgcctgccaggacctggctctgccgtcatccacgtttcttgcc

SEQ ID NO: 29111 - DNA, 122 bp, Homo sapiens
  misc_feature (61)..(62): /note="This region represents a CpG dinucleotide"
  misc_feature (61)..(61): /note="Nucleotide may be methylated to form 5-methylcytosine"
ccaaaagtacttttcaagatttagatggcaaacagccatccccacccttgtctaggaagtcgtattcgcaggtcacaggaaggcgtcaggtcaggcttgaagcagccggggtgtgggcaggg

SEQ ID NO: 29112 - DNA, 122 bp, Homo sapiens
  misc_feature (61)..(62): /note="This region represents a CpG dinucleotide"
  misc_feature (61)..(61): /note="Nucleotide may be methylated to form 5-methylcytosine"
gttgccaagatctactccatcaatgtcaccaatgttatgaatggtgtggcctcctactgccgtccctgtgccctagaagcctctgatgtgggctcctcctgcacctcttgtcctgctggtta

SEQ ID NO: 29113 - DNA, 122 bp, Homo sapiens
  misc_feature (61)..(62): /note="This region represents a CpG dinucleotide"
  misc_feature (61)..(61): /note="Nucleotide may be methylated to form 5-methylcytosine"
ttttggtcagcagtgctagagcaagctagcagctaaactggaactgcaggtttgctggaacgtgtagctgcctactgatgttgaggacaaatctagaagccaagaaaaaaaaaataacactt

SEQ ID NO: 29114 - DNA, 122 bp, Homo sapiens
  misc_feature (61)..(62): /note="This region represents a CpG dinucleotide"
  misc_feature (61)..(61): /note="Nucleotide may be methylated to form 5-methylcytosine"
aaactttgggtttgggttgattttcaggtttgtggcctcaagggaggcgtgttcccatcacggagcacatgggtgggggctgagcctgccatctgatcattaggcttctcatggttactcct

SEQ ID NO: 29115 - DNA, 122 bp, Homo sapiens
  misc_feature (61)..(62): /note="This region represents a CpG dinucleotide"
  misc_feature (61)..(61): /note="Nucleotide may be methylated to form 5-methylcytosine"
taccatctaggtttgtgtaaccacactctatgatgtttgcacaatagcgaaattgcccaacgacaaatttcgcagaatgtatccattgttgagtgatgcatggctgtgtaatgcaggtgctt

SEQ ID NO: 29116 - DNA, 122 bp, Homo sapiens
  misc_feature (61)..(62): /note="This region represents a CpG dinucleotide"
  misc_feature (61)..(61): /note="Nucleotide may be methylated to form 5-methylcytosine"
catcatcagacccattctgagtcatgtaacacagttttcctggcacagcaggtgcacttccgtctgagttatttttaatctaaacatacataattctgtcactgagatttttaatccaagac

SEQ ID NO: 29117 - DNA, 122 bp, Homo sapiens
  misc_feature (61)..(62): /note="This region represents a CpG dinucleotide"
  misc_feature (61)..(61): /note="Nucleotide may be methylated to form 5-methylcytosine"
aagtgggggaggggaggagaaaatgggtgcagaggctctggtagtacactattatctatgcgatgttaagatggcatttgagaaaaacagttacatagtcacttgcctttatatgtgcctaa

SEQ ID NO: 29118 - DNA, 122 bp, Homo sapiens
  misc_feature (61)..(62): /note="This region represents a CpG dinucleotide"
  misc_feature (61)..(61): /note="Nucleotide may be methylated to form 5-methylcytosine"
aagtagctggagttaggtcatttgattttatactctgtactcaagactgctcctctctgccgactacaacaggttggtactttatttcttttcttattctgacttgaatatttttttaagcc

SEQ ID NO: 29119 - DNA, 122 bp, Homo sapiens
  misc_feature (61)..(62): /note="This region represents a CpG dinucleotide"
  misc_feature (61)..(61): /note="Nucleotide may be methylated to form 5-methylcytosine"
tcacagcaaggagcagagtcatgattttaaaccaggcttgtttctatcaaaacacaagctcgcttattcagcccaaccactccttcactgggactcctggccacatcagagctttctcctcc

SEQ ID NO: 29120 - DNA, 122 bp, Homo sapiens
  misc_feature (61)..(62): /note="This region represents a CpG dinucleotide"
  misc_feature (61)..(61): /note="Nucleotide may be methylated to form 5-methylcytosine"
ttatttgtttattttgtaacttacactttcctcccactcctgatgttaaacatgcagcttcgcccaagtgtgaacttcagagagtattccatcagttactctccctctgtggtctgcacaat

SEQ ID NO: 29121 - DNA, 122 bp, Homo sapiens
  misc_feature (61)..(62): /note="This region represents a CpG dinucleotide"
  misc_feature (61)..(61): /note="Nucleotide may be methylated to form 5-methylcytosine"
ttaacaaaaatatattgtacttgggtggtggacaccctaaacactctgacttgatcactacgcattatatacatgtaacaaaattttatatgtaaccaatacatttgtgcaaataaagagta

SEQ ID NO: 29122 - DNA, 122 bp, Homo sapiens
  misc_feature (61)..(62): /note="This region represents a CpG dinucleotide"
  misc_feature (61)..(61): /note="Nucleotide may be methylated to form 5-methylcytosine"
gaggcctgtggctcagaagacctccccagataatgagtccttgctgggtctcagggaggccggatccctcggactgcagtgtaataactccaaagggttcggtttgataggctactgctgaa

SEQ ID NO: 29123 - DNA, 122 bp, Homo sapiens
  misc_feature (61)..(62): /note="This region represents a CpG dinucleotide"
  misc_feature (61)..(61): /note="Nucleotide may be methylated to form 5-methylcytosine"
aaatccaggagtagaaattgcaggattgtagggtaagtgtgtttatagtttttaaagtaacggcctattttgcattcccactggcaatgcatgagaattccagggctccaaatccttgttga

SEQ ID NO: 29124 - DNA, 122 bp, Homo sapiens
  misc_feature (61)..(62): /note="This region represents a CpG dinucleotide"
  misc_feature (61)..(61): /note="Nucleotide may be methylated to form 5-methylcytosine"
aaaaaaagactagaagtaagaattctacaatcattagactgggcagatgaactcttaagacgggaagaaaagttgcaaaacgttagagctttaaaataattttacttggttttggaatactt

SEQ ID NO: 29125 - DNA, 122 bp, Homo sapiens
  misc_feature (61)..(62): /note="This region represents a CpG dinucleotide"
  misc_feature (61)..(61): /note="Nucleotide may be methylated to form 5-methylcytosine"
cacaaggggctgtgtcctgcagctgcgctctggagaccttgccctttctcctgcctgctgcgtcccctccgcctccagcacgtgggcctttctgtcctgttgctgggctgtgcgtgcgtcca

SEQ ID NO: 29126 - DNA, 122 bp, Homo sapiens
  misc_feature (61)..(62): /note="This region represents a CpG dinucleotide"
  misc_feature (61)..(61): /note="Nucleotide may be methylated to form 5-methylcytosine"
tgtggggccccagaaaccagaaaccggaggtcttgtaaatttttttatctaagagcatcacggaaactgagaacaattttgtttgaaggtacatgagtgcttttttgtagggggaagattca

SEQ ID NO: 29127 - DNA, 122 bp, Homo sapiens
  misc_feature (61)..(62): /note="This region represents a CpG dinucleotide"
  misc_feature (61)..(61): /note="Nucleotide may be methylated to form 5-methylcytosine"
ctcaagtgatccacccacctcagcctcccaaagtgctgggattacaggtgtgagccactacgcctggccctgtgaggtatttttcagcagctttctagactgacaagagcagctggaagcat

SEQ ID NO: 29128 - DNA, 122 bp, Homo sapiens
  misc_feature (61)..(62): /note="This region represents a CpG dinucleotide"
  misc_feature (61)..(61): /note="Nucleotide may be methylated to form 5-methylcytosine"
gctttggctttacttcccaggtgatttttctgttacgcttagcatgcatcgttgctgcttcgttgttttgttttgttttgttttgttttgttttgtttttttagatggagtctggcactgtc

SEQ ID NO: 29129 - DNA, 122 bp, Homo sapiens
  misc_feature (61)..(62): /note="This region represents a CpG dinucleotide"
  misc_feature (61)..(61): /note="Nucleotide may be methylated to form 5-methylcytosine"
cttatctgcaaggccccttagggcagttctgcctcttgggaacaccttaggctgagtgatcgccttcccgtggctgagagctgagaagttcttccagactgcacaggtgtccggtctgtctg

SEQ ID NO: 29130 - DNA, 122 bp, Homo sapiens
  misc_feature (61)..(62): /note="This region represents a CpG dinucleotide"
  misc_feature (61)..(61): /note="Nucleotide may be methylated to form 5-methylcytosine"
ggcagcagcctccccgcctgccatgccacagcctctccctgccatgccacagttcagctccgagagagagtgccaaggtttgagagacaacccgtgtttaatccttcagtggttttgtagag

SEQ ID NO: 29131 - DNA, 122 bp, Homo sapiens
  misc_feature (61)..(62): /note="This region represents a CpG dinucleotide"
  misc_feature (61)..(61): /note="Nucleotide may be methylated to form 5-methylcytosine"
acagtattcttattttatagaggcagagaggttagtgtgtactatgtggtagaaaatgaacgcgaatttaaacaggacatgttcagacaaaaaggagagagagaaaatcatcactataattc

SEQ ID NO: 29132 - DNA, 122 bp, Homo sapiens
  misc_feature (61)..(62): /note="This region represents a CpG dinucleotide"
  misc_feature (61)..(61): /note="Nucleotide may be methylated to form 5-methylcytosine"
gaaacaaaagcaaaataaaatatctgcctattgtcttttataagccagtattgttattcacggctggggtttgaatcttgcttaattatttgcaattgccagaccatgacctaagtagttgg

SEQ ID NO: 29133 - DNA, 122 bp, Homo sapiens
  misc_feature (61)..(62): /note="This region represents a CpG dinucleotide"
  misc_feature (61)..(61): /note="Nucleotide may be methylated to form 5-methylcytosine"
gagaaacaaaccactctgccaagagatgggcaaggggcctcttgtggccctcccggtggacggctgcatctacagtcctttgcctaaaaccaacaatcctgcctgaccccagtccctgtgag

SEQ ID NO: 29134 - DNA, 122 bp, Homo sapiens
  misc_feature (61)..(62): /note="This region represents a CpG dinucleotide"
  misc_feature (61)..(61): /note="Nucleotide may be methylated to form 5-methylcytosine"
gtttcttggagtgttctgtctgttttaatgcaattcacttggatagattttgtggttccacgtaaacacagttgttaaatctactgtgtccttaatttttccactaatggttttcttttttc

SEQ ID NO: 29135 - DNA, 122 bp, Homo sapiens
  misc_feature (61)..(62): /note="This region represents a CpG dinucleotide"
  misc_feature (61)..(61): /note="Nucleotide may be methylated to form 5-methylcytosine"
cgctgcggggcgctgcaccgtgcacagtcaggccgggccatacctccagacgctgtatgccgccgactccccgcctagccgccgctccggctcataaactagtagacgataaaattgccttc

SEQ ID NO: 29136 - DNA, 122 bp, Homo sapiens
  misc_feature (61)..(62): /note="This region represents a CpG dinucleotide"
  misc_feature (61)..(61): /note="Nucleotide may be methylated to form 5-methylcytosine"
ttcctccagagcttcctgcctggacttcaaggcagccagcatgtccttcttggccgactgcgagctatctgattcctgagaacctgtcgataaacagtggggttacttggccagctgacagg

SEQ ID NO: 29137 - DNA, 122 bp, Homo sapiens
  misc_feature (61)..(62): /note="This region represents a CpG dinucleotide"
  misc_feature (61)..(61): /note="Nucleotide may be methylated to form 5-methylcytosine"
aacatgcagctgtgccacccagctcaacagcagcagaaaacatactagagctggcaggaccgcaaggagtgagagacaacacatactaacatcacttttgggcagggagaaagagacagcat

SEQ ID NO: 29138 - DNA, 122 bp, Homo sapiens
  misc_feature (61)..(62): /note="This region represents a CpG dinucleotide"
  misc_feature (61)..(61): /note="Nucleotide may be methylated to form 5-methylcytosine"
acacaggacatatattagggtcctcattttaaagacggagactctagactcatggggtgacgtgagattaagatttgggacacataacatgaaacagctagaggaaattgctaaagcaggag

SEQ ID NO: 29139 - DNA, 122 bp, Homo sapiens
  misc_feature (61)..(62): /note="This region represents a CpG dinucleotide"
  misc_feature (61)..(61): /note="Nucleotide may be methylated to form 5-methylcytosine"
tttctgcagcccctgcaggtcaacccttgactgacctccatttactcatacttagattaccgaaagctctccattttcccctgtaaaacacaaatacggagaatcaaatgtactgctgactc

SEQ ID NO: 29140 - DNA, 122 bp, Homo sapiens
  misc_feature (61)..(62): /note="This region represents a CpG dinucleotide"
  misc_feature (61)..(61): /note="Nucleotide may be methylated to form 5-methylcytosine"
gtaactttgaatatagtggagtatggcatatttttctctagtagttttctctcttggcaccgtcaggacatcttttcatcagagcttataaaaatagaggatttgttaacccttgtgaaatt

SEQ ID NO: 29141 - DNA, 122 bp, Homo sapiens
  misc_feature (61)..(62): /note="This region represents a CpG dinucleotide"
  misc_feature (61)..(61): /note="Nucleotide may be methylated to form 5-methylcytosine"
tcctctttttcatcaacagcttagcctctattagaactctgtttacttgaaggtttttgacgttggcataacattccaacttcatggggttggaataagtcaggattccctggttgggacag

SEQ ID NO: 29142 - DNA, 122 bp, Homo sapiens
  misc_feature (61)..(62): /note="This region represents a CpG dinucleotide"
  misc_feature (61)..(61): /note="Nucleotide may be methylated to form 5-methylcytosine"
atctgcgtgatcttccccagcagacgtgcccctgctcctggagggttctttctgtggccacgtggggcttgtcatgtctcagaactgctttcagagccaagcactcatgccaaatccattaa

SEQ ID NO: 29143 - DNA, 122 bp, Homo sapiens
  misc_feature (61)..(62): /note="This region represents a CpG dinucleotide"
  misc_feature (61)..(61): /note="Nucleotide may be methylated to form 5-methylcytosine"
ctctgtcatagctactcaattctgccactgcagcacaaaagccatacacaattatgtaaacgaatgagtatggctgtgctccaacaaaatcttatttacaaaaaaaaaaaaaagtgggccaa

SEQ ID NO: 29144 - DNA, 122 bp, Homo sapiens
  misc_feature (61)..(62): /note="This region represents a CpG dinucleotide"
  misc_feature (61)..(61): /note="Nucleotide may be methylated to form 5-methylcytosine"
aggtgtcatcagcatttgaaactgagtgaggtcaccaagagaaggaatgttaaatagatacgcagtcagagaaatgatctgggctcttaatcatatagaggtcaggagaaccagggaaggag

SEQ ID NO: 29145 - DNA, 122 bp, Homo sapiens
  misc_feature (61)..(62): /note="This region represents a CpG dinucleotide"
  misc_feature (61)..(61): /note="Nucleotide may be methylated to form 5-methylcytosine"
cgacagacgcaccctcacaaacccacaggaaaaatgacggcacggacagaggccgtgaaccggtggctcagaaggaaaaagaaaacaagacacaggaagaccattcacctcacgcccgtctc

SEQ ID NO: 29146 - DNA, 122 bp, Homo sapiens
  misc_feature (61)..(62): /note="This region represents a CpG dinucleotide"
  misc_feature (61)..(61): /note="Nucleotide may be methylated to form 5-methylcytosine"
caccatgttggtcaggctgatctcataacaatgccttcctaaacaatgcctaagcctgggcgtggtggttcacacctgtaatcccagcactttgggaggctcaggtgagtggatcacttgag

SEQ ID NO: 29147 - DNA, 122 bp, Homo sapiens
  misc_feature (61)..(62): /note="This region represents a CpG dinucleotide"
  misc_feature (61)..(61): /note="Nucleotide may be methylated to form 5-methylcytosine"
attcaggaagaggaaaatatctttaaatgcaatgaatgtgaaaaagtgtttaacaagaaacgcctgcttgctcggcatgagaggattcactctggagtgaagccctatgaatgcacagagtg

SEQ ID NO: 29148 - DNA, 122 bp, Homo sapiens
  misc_feature (61)..(62): /note="This region represents a CpG dinucleotide"
  misc_feature (61)..(61): /note="Nucleotide may be methylated to form 5-methylcytosine"
tacaggacctgacggtaatacatttaaatattacatctccaccccaaggtgaacatgagtcgtatgttacacacgtgtctgtttaacacgtgtcagcaccacctttgtaaatatctgcagct

SEQ ID NO: 29149 - DNA, 122 bp, Homo sapiens
  misc_feature (61)..(62): /note="This region represents a CpG dinucleotide"
  misc_feature (61)..(61): /note="Nucleotide may be methylated to form 5-methylcytosine"
ggcctcagggacttgcaggggccttcccaagggcttcacaggcagaagcatctcctcatgcggcatgtgactcacctgttattgctgcatttgacagggaagacggaacctgagtcactgag

SEQ ID NO: 29150 - DNA, 122 bp, Homo sapiens
  misc_feature (61)..(62): /note="This region represents a CpG dinucleotide"
  misc_feature (61)..(61): /note="Nucleotide may be methylated to form 5-methylcytosine"
agtgatatcagggctggtgtctttgtgattctctaggtctttctctcaggctcatgacttcgtggtggcaaaatgctactctggctccacccaacatgtttatgattaaggcatgaaggatg

SEQ ID NO: 29151 - DNA, 122 bp, Homo sapiens
  misc_feature (61)..(62): /note="This region represents a CpG dinucleotide"
  misc_feature (61)..(61): /note="Nucleotide may be methylated to form 5-methylcytosine"
tttttgaacttctaccctgaaattgctttgggccttcatttataagtcatactagaaaatcggtacattaactgaaaagtatactttatttttaacaaagaacaggattatgcaacaaaatc

SEQ ID NO: 29152 - DNA, 122 bp, Homo sapiens
  misc_feature (61)..(62): /note="This region represents a CpG dinucleotide"
  misc_feature (61)..(61): /note="Nucleotide may be methylated to form 5-methylcytosine"
gtttgacactcacaacatctgtgtgaggtggggcctgtcactctcccagttagatgatgacgctgaagttcagagagctttgctggcactgcttgagaggaagggccaaccccggctttgag

SEQ ID NO: 29153 - DNA, 122 bp, Homo sapiens
  misc_feature (61)..(62): /note="This region represents a CpG dinucleotide"
  misc_feature (61)..(61): /note="Nucleotide may be methylated to form 5-methylcytosine"
caatcggttaagactttggtcccataatgcttagcaaaagaagctgaagatcattcagaacggaaatggaattctgtgtgccaagccttagagctaagctttaaaaagtcacccatgaacga

SEQ ID NO: 29154 - DNA, 122 bp, Homo sapiens
  misc_feature (61)..(62): /note="This region represents a CpG dinucleotide"
  misc_feature (61)..(61): /note="Nucleotide may be methylated to form 5-methylcytosine"
aagattccgtctcttaggaaggaaaattagaaaaaaaaacagtaattactgtactagagtcgcaacatctcaagcagaagtaggtttcagagtgattcattcaataaacacttactgaatag

SEQ ID NO: 29155 - DNA, 122 bp, Homo sapiens
  misc_feature (61)..(62): /note="This region represents a CpG dinucleotide"
  misc_feature (61)..(61): /note="Nucleotide may be methylated to form 5-methylcytosine"
gcatgtccttaggttttacccattcatcaaactgctctgctgtgagagagccaagttcaacggcagtttcctttaaggttgatccattttggggtgttgtcttagcaattctgctgttttgt

SEQ ID NO: 29156 - DNA, 122 bp, Homo sapiens
  misc_feature (61)..(62): /note="This region represents a CpG dinucleotide"
  misc_feature (61)..(61): /note="Nucleotide may be methylated to form 5-methylcytosine"
gctgcaatgttcacttcccttgttattgcatgccttacaattgcaccaactgaatgatgacgaggaaggcatgcaaatatatgttcacagtgggattcagtctattttagaccatgaattct

SEQ ID NO: 29157 - DNA, 122 bp, Homo sapiens
  misc_feature (61)..(62): /note="This region represents a CpG dinucleotide"
  misc_feature (61)..(61): /note="Nucleotide may be methylated to form 5-methylcytosine"
cctgctcaaagcctgcagtggctccacatttcactcagaaattccaggtttctacaacagcgtaaagccctgcatggtctgccctccaacccctaactttcgttttcactctcttcatccct

SEQ ID NO: 29158 - DNA, 122 bp, Homo sapiens
  misc_feature (61)..(62): /note="This region represents a CpG dinucleotide"
  misc_feature (61)..(61): /note="Nucleotide may be methylated to form 5-methylcytosine"
ctgagctgcctggttcgtgttggatctgttgtttaccagctgggggaccttggcaagttacgtaacatgtatcacacagtggcagtgtgaaaattaaatacggataaagtgtctagccaaaa

SEQ ID NO: 29159 - DNA, 122 bp, Homo sapiens
  misc_feature (61)..(62): /note="This region represents a CpG dinucleotide"
  misc_feature (61)..(61): /note="Nucleotide may be methylated to form 5-methylcytosine"
gtggaagaaaattcttcatttcagtgactgctgtcaagccactgtttctaggacctcccccggatggatgaagataaagaccaataaaaagggctggttggtttgcttttgctacatcaagg

SEQ ID NO: 29160 - DNA, 122 bp, Homo sapiens
  misc_feature (61)..(62): /note="This region represents a CpG dinucleotide"
  misc_feature (61)..(61): /note="Nucleotide may be methylated to form 5-methylcytosine"
agtgatactcccacctcagcctctagagtagctgagactacagacaggagccactatgcccggctgaagttgtgttttagaaaacagctctgatgtagcaaggcggaggcctgaggggtgaa

SEQ ID NO: 29161 - DNA, 122 bp, Homo sapiens
  misc_feature (61)..(62): /note="This region represents a CpG dinucleotide"
  misc_feature (61)..(61): /note="Nucleotide may be methylated to form 5-methylcytosine"
attgttttactttattattgttgttgctaatctcttattgtttctaaattgtaaattaaacgtcataggaaaaaacagtacatatagggctcagggctatatggtttcaagtatccactggg

SEQ ID NO: 29162 - DNA, 122 bp, Homo sapiens
  misc_feature (61)..(62): /note="This region represents a CpG dinucleotide"
  misc_feature (61)..(61): /note="Nucleotide may be methylated to form 5-methylcytosine"
tttttaggatgtggaatctgagtcaggtcagagaggttaaagatcttgccttaagtcacacggcttagtaagggatggagcccagattagaaacgtggtatattacactttgaagcttatgc

SEQ ID NO: 29163 - DNA, 122 bp, Homo sapiens
  misc_feature (61)..(62): /note="This region represents a CpG dinucleotide"
  misc_feature (61)..(61): /note="Nucleotide may be methylated to form 5-methylcytosine"
cacttgggcaagtaataaactgtagaactttaaaagtagtaaaggcatataccaagcatacgtgactccacacattgtcagaaaggcagtggactggctaacgagtttctgccaagtttcag

SEQ ID NO: 29164 - DNA, 122 bp, Homo sapiens
  misc_feature (61)..(62): /note="This region represents a CpG dinucleotide"
  misc_feature (61)..(61): /note="Nucleotide may be methylated to form 5-methylcytosine"
atataagatgacggtataaacactctctctttcatgtcacagtcacatacaccttagtgacgtgaatcccaagagaaattgttgagcagccacagggcgtgtgtgcttagggaatgagttca

SEQ ID NO: 29165 - DNA, 122 bp, Homo sapiens
  misc_feature (61)..(62): /note="This region represents a CpG dinucleotide"
  misc_feature (61)..(61): /note="Nucleotide may be methylated to form 5-methylcytosine"
caatactccttacagtaagactaaaatattcccccccgccaacttttccaataatcaccacgtggggagcagagattattttaaaagaggtacatggtaggaaaattttcctagcagaacag

SEQ ID NO: 29166 - DNA, 122 bp, Homo sapiens
  misc_feature (61)..(62): /note="This region represents a CpG dinucleotide"
  misc_feature (61)..(61): /note="Nucleotide may be methylated to form 5-methylcytosine"
cacccgccagagtggggacggaaaagaaccgggtgggcggaaaaccaaggtcgcgggagacgatccaaagaggatgggctacggtcagacttcgacagtcacaaccgcccctggaaaaccat

SEQ ID NO: 29167 - DNA, 122 bp, Homo sapiens
  misc_feature (61)..(62): /note="This region represents a CpG dinucleotide"
  misc_feature (61)..(61): /note="Nucleotide may be methylated to form 5-methylcytosine"
atattaaaatttctattaactaattgtaatatttattgtaattactatactatttaccctcgaaatatttcaacattttaaccatcaatatggtgcagggtgcataatggctaaatatcgga

SEQ ID NO: 29168 - DNA, 122 bp, Homo sapiens
  misc_feature (61)..(62): /note="This region represents a CpG dinucleotide"
  misc_feature (61)..(61): /note="Nucleotide may be methylated to form 5-methylcytosine"
ggcaacagatagaggtctaggagcgaggaagagcactgatcatccattaaaatcacatatcgagcaaactgtactccaaggctaggaatggccaactttaggaaaagactcagaaaactagg

SEQ ID NO: 29169 - DNA, 122 bp, Homo sapiens
  misc_feature (61)..(62): /note="This region represents a CpG dinucleotide"
  misc_feature (61)..(61): /note="Nucleotide may be methylated to form 5-methylcytosine"
cacttcctgttttccataaattatgtggtcacctatcacttgagcacaaacaaataggcacgttcaggacacaggcagccagtatcagaataggcagcctatcacagagggcaattctactt

SEQ ID NO: 29170 - DNA, 122 bp, Homo sapiens
  misc_feature (61)..(62): /note="This region represents a CpG dinucleotide"
  misc_feature (61)..(61): /note="Nucleotide may be methylated to form 5-methylcytosine"
cacgactcagaggcccagatccatggttcccctctttaaaccttcaccccagcctctgtccgcccctaaggcagcccctgaaggcactgactgttaccagctgccaaggaagttccagccca

SEQ ID NO: 29171 - DNA, 122 bp, Homo sapiens
  misc_feature (61)..(62): /note="This region represents a CpG dinucleotide"
  misc_feature (61)..(61): /note="Nucleotide may be methylated to form 5-methylcytosine"
gccccctggagctgtgggtgctggcagtgtcttccttctgtgccttcttgcagccacttccgcccccgcctgcaggagccactgccaagcactgatgagctggcactgacctcaggcttgta

SEQ ID NO: 29172 - DNA, 122 bp, Homo sapiens
  misc_feature (61)..(62): /note="This region represents a CpG dinucleotide"
  misc_feature (61)..(61): /note="Nucleotide may be methylated to form 5-methylcytosine"
atcccagctactcgggaggttgaggcaggagaatcacttgaacacaggaggcagaggttgcggtaagtggagatcgctccattgtttatttgcatgtggacataagaaagggttaacatggc

SEQ ID NO: 29173 - DNA, 122 bp, Homo sapiens
  misc_feature (61)..(62): /note="This region represents a CpG dinucleotide"
  misc_feature (61)..(61): /note="Nucleotide may be methylated to form 5-methylcytosine"
ttaacagcaatttctcacttacttaccgaaaaaaagaaagaaagaaagaaagaaaaaagacgccttggtacatttggaaggaagaaagctgaggatcaagagagagacttccagcctggccc

SEQ ID NO: 29174 - DNA, 122 bp, Homo sapiens
  misc_feature (61)..(62): /note="This region represents a CpG dinucleotide"
  misc_feature (61)..(61): /note="Nucleotide may be methylated to form 5-methylcytosine"
tgtggattaacaatagtatctgtaaagctacttttcaatcttcttggtacagagtaagagcgtagtaatgttagcggtttaataaatttgtccaaagattgattaggaaatcagtaggccag

SEQ ID NO: 29175 - DNA, 122 bp, Homo sapiens
  misc_feature (61)..(62): /note="This region represents a CpG dinucleotide"
  misc_feature (61)..(61): /note="Nucleotide may be methylated to form 5-methylcytosine"
gagttttattccgtaccagagggtgagggctctgaagatagcgccaggtcttatttacctcgataccccacaacactcattacatgtctgatgaatgaatgcatagggggatggctgggtgc

SEQ ID NO: 29176 - DNA, 122 bp, Homo sapiens
  misc_feature (61)..(62): /note="This region represents a CpG dinucleotide"
  misc_feature (61)..(61): /note="Nucleotide may be methylated to form 5-methylcytosine"
gattcttttccttaactgtattaacttcaggtgtcaggaaacccggatcactcctgacagcggcctagcgatcacttgggcttgaccttgacattgagtaacagtgatagtaacttctatta

SEQ ID NO: 29177 - DNA, 122 bp, Homo sapiens
  misc_feature (61)..(62): /note="This region represents a CpG dinucleotide"
  misc_feature (61)..(61): /note="Nucleotide may be methylated to form 5-methylcytosine"
acctgagtttgggtttcacttcctgcgttgggccttgtggcttccttactattatgtcagcgtagcagcacgtttgaaagatgtctaaaacagcatggaacagcatttaagtttttatcagg

SEQ ID NO: 29178 - DNA, 122 bp, Homo sapiens
  misc_feature (61)..(62): /note="This region represents a CpG dinucleotide"
  misc_feature (61)..(61): /note="Nucleotide may be methylated to form 5-methylcytosine"
cttacacaaatacattctaactcaattaactgggaggtgaaggaaaaaagaaagacaatacggaaatgtcaagtcatttggaaccatctgctgtaagagagctcctgagtgtctgtacacaa

SEQ ID NO: 29179 - DNA, 122 bp, Homo sapiens
  misc_feature (61)..(62): /note="This region represents a CpG dinucleotide"
  misc_feature (61)..(61): /note="Nucleotide may be methylated to form 5-methylcytosine"
attccctgactccaggagctgggcaacactagacaaaacaggagaatgaaaaaagcatgacggtactttctcctgtcaacactgctaaatgctgtgtgtagccgtatcattcacacaaagcc

SEQ ID NO: 29180 - DNA, 122 bp, Homo sapiens
  misc_feature (61)..(62): /note="This region represents a CpG dinucleotide"
  misc_feature (61)..(61): /note="Nucleotide may be methylated to form 5-methylcytosine"
tcatgtgacaatgaagtgagaaggcaccacctatgaaccaggaagtgggtcttcaccagacgttagattagccagtacatttaccttggacttcccagcctgcagaacagtgagaaatacat

SEQ ID NO: 29181 - DNA, 122 bp, Homo sapiens
  misc_feature (61)..(62): /note="This region represents a CpG dinucleotide"
  misc_feature (61)..(61): /note="Nucleotide may be methylated to form 5-methylcytosine"
caccacacatcaaagccagaggccctgggaggctggccagccgccaaagacgcctgagagcggcaggggagtgtgttgccttaggacaatagcaaactgggacgtggtagagtctgtaaatt

SEQ ID NO: 29182 - DNA, 122 bp, Homo sapiens
  misc_feature (61)..(62): /note="This region represents a CpG dinucleotide"
  misc_feature (61)..(61): /note="Nucleotide may be methylated to form 5-methylcytosine"
ttgttacaggtgtgatcacaccatcatgatgtgattttgtaacaggatgattttgtaacacgatgacattttgtaacagacacagagccagggacaataccactgagctgctgaagcaaccc

SEQ ID NO: 29183 - DNA, 122 bp, Homo sapiens
  misc_feature (61)..(62): /note="This region represents a CpG dinucleotide"
  misc_feature (61)..(61): /note="Nucleotide may be methylated to form 5-methylcytosine"
attgctccacagaaggaaccagtgatggtgactgattattttcctttcaaaacatttgatcgtctacactgaaatacagaggctagtatgaaaatgggaaacagacaaattcagttttagat

SEQ ID NO: 29184 - DNA, 122 bp, Homo sapiens
  misc_feature (61)..(62): /note="This region represents a CpG dinucleotide"
  misc_feature (61)..(61): /note="Nucleotide may be methylated to form 5-methylcytosine"
gctttttctttcttcttttcttccaccccatggaaatgtctacattcttttgctatgtttcgtctgttgtgcaatttcattttgctaatgaggcatctgagctgtggccgaccggttgattg

SEQ ID NO: 29185 - DNA, 122 bp, Homo sapiens
  misc_feature (61)..(62): /note="This region represents a CpG dinucleotide"
  misc_feature (61)..(61): /note="Nucleotide may be methylated to form 5-methylcytosine"
cttaacctttgaacttcaacttccatatctatagaatggggataataatatctatctcaccgaatcattataaggattagttgagttaatatatgtaaaaatgctttaaacagtgtggagcc

SEQ ID NO: 29186 - DNA, 122 bp, Homo sapiens
  misc_feature (61)..(62): /note="This region represents a CpG dinucleotide"
  misc_feature (61)..(61): /note="Nucleotide may be methylated to form 5-methylcytosine"
ctcacctagaggaggacagagacatcaataacacacagctcccaagccggttttgcccatcgtcattcccttgcaggtctgttaaccagcaccaaggtgatgggtagagcaggttctctgtg

SEQ ID NO: 29187 - DNA, 122 bp, Homo sapiens
  misc_feature (61)..(62): /note="This region represents a CpG dinucleotide"
  misc_feature (61)..(61): /note="Nucleotide may be methylated to form 5-methylcytosine"
taaatttgccaagagggtttgttagaaaatcagacttcacaccagacccaccatgtccaccgtcatagagacatggcatttgctcaaggctcataattcttagacctgattacataccaaca

SEQ ID NO: 29188 - DNA, 122 bp, Homo sapiens
  misc_feature (61)..(62): /note="This region represents a CpG dinucleotide"
  misc_feature (61)..(61): /note="Nucleotide may be methylated to form 5-methylcytosine"
gtggagatatttattcatttattcaattgactatttattctccactatgaattaggccctcggccaggtagcagatataaagcttaataagatatatggctttccgcccaggtgctcatggt

SEQ ID NO: 29189 - DNA, 122 bp, Homo sapiens
  misc_feature (61)..(62): /note="This region represents a CpG dinucleotide"
  misc_feature (61)..(61): /note="Nucleotide may be methylated to form 5-methylcytosine"
ctttcactcagcataatcctgtcaacattattccatttgtgccatgtagcatcacttgatcgtattgttgagtaggattccattttatggctagatcacaatttgtttctccatttgtctat

SEQ ID NO: 29190 - DNA, 122 bp, Homo sapiens
  misc_feature (61)..(62): /note="This region represents a CpG dinucleotide"
  misc_feature (61)..(61): /note="Nucleotide may be methylated to form 5-methylcytosine"
ctgaaactcagactcttcttggaccttgagctggctggcttttagtctagaactacacatcggttctcctaaatctccaggttgctaattgcagatcttgggacttctgagcctccaataat

SEQ ID NO: 29191 - DNA, 122 bp, Homo sapiens
  misc_feature (61)..(62): /note="This region represents a CpG dinucleotide"
  misc_feature (61)..(61): /note="Nucleotide may be methylated to form 5-methylcytosine"
ccttagctattactgtttttcaggtgtccttgactcaccattctcttattacagagactacgtctgtcttactcatttgtttccaaaacctcctcgagtaaaaagaggaatttgctggaagg

SEQ ID NO: 29192 - DNA, 122 bp, Homo sapiens
  misc_feature (61)..(62): /note="This region represents a CpG dinucleotide"
  misc_feature (61)..(61): /note="Nucleotide may be methylated to form 5-methylcytosine"
tgggtggtccagggtgcaggagcctgattcagagacttatagatgagcctcacaataaggcgggggtccatacttagagcatttttactctaagttttctcccatctcctgagagaggactc

SEQ ID NO: 29193 - DNA, 122 bp, Homo sapiens
  misc_feature (61)..(62): /note="This region represents a CpG dinucleotide"
  misc_feature (61)..(61): /note="Nucleotide may be methylated to form 5-methylcytosine"
gctggcgcagggccgtccttccagagagcgcggggtgggaagggctgggctccttccgcgcggctccacctgcagaaaccgatggagctgatccatcgtggtttgcacagaggagcctgacg

SEQ ID NO: 29194 - DNA, 122 bp, Homo sapiens
  misc_feature (61)..(62): /note="This region represents a CpG dinucleotide"
  misc_feature (61)..(61): /note="Nucleotide may be methylated to form 5-methylcytosine"
agtagaggcggtgcttcgacggctgatgatcttgcggagaggagagaggagcattagttacggttttaagtcccggctgaactggcaggggttacatgacctcagactcaggggtaagtgcg

SEQ ID NO: 29195 - DNA, 122 bp, Homo sapiens
  misc_feature (61)..(62): /note="This region represents a CpG dinucleotide"
  misc_feature (61)..(61): /note="Nucleotide may be methylated to form 5-methylcytosine"
tgtattgtatcatgtacagcctgttagatatttgcaggttttataggttattcagtccaacgctttatttatttgctcttgttagttgttgctgtgaaacagtcatttcctttctggacatc

SEQ ID NO: 29196 - DNA, 122 bp, Homo sapiens
  misc_feature (61)..(62): /note="This region represents a CpG dinucleotide"
  misc_feature (61)..(61): /note="Nucleotide may be methylated to form 5-methylcytosine"
tggcagacgatgggtgttagtccaggcttggggttgtgttccggtcacctgctcctctgacgcaggcagtgagacccatttctcagaacacttgggacagagcccagcccttgggtggaggt

SEQ ID NO: 29197 - DNA, 122 bp, Homo sapiens
  misc_feature (61)..(62): /note="This region represents a CpG dinucleotide"
  misc_feature (61)..(61): /note="Nucleotide may be methylated to form 5-methylcytosine"
ttgtgaaatttcctaaatactatcagcctgcatatctccattttatccaagattacaccacggaagacttactttgttctaaaaataaaagccagaaacaatccttatgagtagggaagcta

SEQ ID NO: 29198 - DNA, 122 bp, Homo sapiens
  misc_feature (61)..(62): /note="This region represents a CpG dinucleotide"
  misc_feature (61)..(61): /note="Nucleotide may be methylated to form 5-methylcytosine"
tctttcatttaggtattctgtctgtctcctttgatgtcgcacagcagagttgagtagtagcgacagacaccatctggcccaccaagtctaaaatatttaataactggccctgcactgagact

SEQ ID NO: 29199 - DNA, 122 bp, Homo sapiens
  misc_feature (61)..(62): /note="This region represents a CpG dinucleotide"
  misc_feature (61)..(61): /note="Nucleotide may be methylated to form 5-methylcytosine"
agataagagaggaagtgttaaagatttgtggagagaggagaaggtgggaaataattatctcggaaagtaggagtgtgaatttacaagggagatgtggtagaattagctcactgtgttaagta

SEQ ID NO: 29200 - DNA, 122 bp, Homo sapiens
  misc_feature (61)..(62): /note="This region represents a CpG dinucleotide"
  misc_feature (61)..(61): /note="Nucleotide may be methylated to form 5-methylcytosine"
gagagtgctgagaagggatcaagatatcctaggagtataaagcatcacaagagagtcatacggatcagtgatcctccaagtgtggtccctagatcaggagcatcgcatcacatgaaaacttg

SEQ ID NO: 29201 - DNA, 122 bp, Homo sapiens
  misc_feature (61)..(62): /note="This region represents a CpG dinucleotide"
  misc_feature (61)..(61): /note="Nucleotide may be methylated to form 5-methylcytosine"
ttcacaaatgacaattttatactgtttagccccaagggcagcttgagagaatcacaattgcgatagtcatacttagtcttgatgtatcacctttcttctgagaacgtaaaaacatatcataa

SEQ ID NO: 29202 - DNA, 122 bp, Homo sapiens
  misc_feature (61)..(62): /note="This region represents a CpG dinucleotide"
  misc_feature (61)..(61): /note="Nucleotide may be methylated to form 5-methylcytosine"
aaatgggttcaatgtaattttgtaagcttttgaagatgcttacccttcccttgtgagacacgatacacattgtctccccttgtgcttagctttgtcctaatatgggaaacaatgataaccac

SEQ ID NO: 29203 - DNA, 122 bp, Homo sapiens
  misc_feature (61)..(62): /note="This region represents a CpG dinucleotide"
  misc_feature (61)..(61): /note="Nucleotide may be methylated to form 5-methylcytosine"
agtggcagcggctcacctgggctcacacctaacccggccccatgcctgcagtcccacgggcgccctcatcagcagccacatagacaggcatcacacgaacctggcacttcccagcaaggccc

SEQ ID NO: 29204 - DNA, 122 bp, Homo sapiens
  misc_feature (61)..(62): /note="This region represents a CpG dinucleotide"
  misc_feature (61)..(61): /note="Nucleotide may be methylated to form 5-methylcytosine"
gacctcagtctgaaactgaaataaacctggacgcagcgtacccttgaatcgcaagaacgccgccttcagtgtttctccggagaaaagcattcacgccaggttgtgacgaaaacattttttga

SEQ ID NO: 29205 - DNA, 122 bp, Homo sapiens
  misc_feature (61)..(62): /note="This region represents a CpG dinucleotide"
  misc_feature (61)..(61): /note="Nucleotide may be methylated to form 5-methylcytosine"
tgtctcaaaaaaaaaatctgtaatatagatttataccacataaagagctaaaagaatacacgaagaggagaggttaattctggcttaaacctagggtgactcagcttcaaagaagaggtaat

SEQ ID NO: 29206 - DNA, 122 bp, Homo sapiens
  misc_feature (61)..(62): /note="This region represents a CpG dinucleotide"
  misc_feature (61)..(61): /note="Nucleotide may be methylated to form 5-methylcytosine"
tcttggtaaggatgactcagcaattcataaatctcaacatttacaataaacacaaacctacgtcacatgtcttttactctcaaataggtagtacagtaccaagctgcttctcaggactacat

SEQ ID NO: 29207 - DNA, 122 bp, Homo sapiens
  misc_feature (61)..(62): /note="This region represents a CpG dinucleotide"
  misc_feature (61)..(61): /note="Nucleotide may be methylated to form 5-methylcytosine"
gcagaggtgtcagcagagggtgagagaaagttcaccctgacagattaactgggcagcaaacgggcttgcaaaatgtggcctttgctcaaaccaaaggtagaatgtgagagtggagtagtaca

SEQ ID NO: 29208 - DNA, 122 bp, Homo sapiens
  misc_feature (61)..(62): /note="This region represents a CpG dinucleotide"
  misc_feature (61)..(61): /note="Nucleotide may be methylated to form 5-methylcytosine"
aaagcaaaggagcatggccacagcacaccacagatggcagcaacatttgcaaagttgtgccgtgcaaagaggctggttctgactcacttcagtcagaggtacaaaccagttgccttggccag

SEQ ID NO: 29209 - DNA, 122 bp, Homo sapiens
  misc_feature (61)..(62): /note="This region represents a CpG dinucleotide"
  misc_feature (61)..(61): /note="Nucleotide may be methylated to form 5-methylcytosine"
tgtgttattacacatttctcttttgctctaatatttcattattttccagtttgtcagtaccgttatcagagggacgaggaaggaataacacaccagttgaccattttgtttctctgaaaatc

SEQ ID NO: 29210 - DNA, 122 bp, Homo sapiens
  misc_feature (61)..(62): /note="This region represents a CpG dinucleotide"
  misc_feature (61)..(61): /note="Nucleotide may be methylated to form 5-methylcytosine"
ccccaaaggccccaggtctggctggctgggctgcaggataaccctgacaccaaaatggaacggaaaggtctggaagtcactgctctgtccacagccctggcaccactcctggggaggcttca

SEQ ID NO: 29211 - DNA, 122 bp, Homo sapiens
  misc_feature (61)..(62): /note="This region represents a CpG dinucleotide"
  misc_feature (61)..(61): /note="Nucleotide may be methylated to form 5-methylcytosine"
gactaaataaaagacttaattttcaggccagagatcagtaaagtagatcttcggagtgtgcgggacaagttgtcaggacagaattatagcaagaaacgtaatcacaggtggaaaaccacggg

SEQ ID NO: 29212 - DNA, 122 bp, Homo sapiens
  misc_feature (61)..(62): /note="This region represents a CpG dinucleotide"
  misc_feature (61)..(61): /note="Nucleotide may be methylated to form 5-methylcytosine"
gcatgagaggtaatattcgctcttcctggctgcctcaaaccatagtcaggattataaagacgcatgaatcagagatggcagcctataacaaaagctttacctccagctgttttgctcatttt

SEQ ID NO: 29213 - DNA, 122 bp, Homo sapiens
  misc_feature (61)..(62): /note="This region represents a CpG dinucleotide"
  misc_feature (61)..(61): /note="Nucleotide may be methylated to form 5-methylcytosine"
cagcagcactattttagactcacttaccctcagggttgatctcattaactacccctgttacgattcaaatgaagcgggattacttccaggtgttctgttttctgcagttaggctctttctct

SEQ ID NO: 29214 - DNA, 122 bp, Homo sapiens
  misc_feature (61)..(62): /note="This region represents a CpG dinucleotide"
  misc_feature (61)..(61): /note="Nucleotide may be methylated to form 5-methylcytosine"
ccattgttagcaggctattccacggcagctttgcatctggctccggcgggaagcggaaaacgggaggcggctctcgaagcttcccgaccttcctgcgccatcaacttctcaggagtggctgg

SEQ ID NO: 29215 - DNA, 122 bp, Homo sapiens
  misc_feature (61)..(62): /note="This region represents a CpG dinucleotide"
  misc_feature (61)..(61): /note="Nucleotide may be methylated to form 5-methylcytosine"
ccccttaaagggccagcccagcaggcaaaggaaaccatagcgaccacaagttaaggaagacggatgaaaagcttgtaaacacagcttccagccatgtggcatagctttgggttcctaggaga

SEQ ID NO: 29216 - DNA, 122 bp, Homo sapiens
  misc_feature (61)..(62): /note="This region represents a CpG dinucleotide"
  misc_feature (61)..(61): /note="Nucleotide may be methylated to form 5-methylcytosine"
actgctatgaaataaagcagtctagccgaacactgagcacaggagctcagcagtgggaggcgtggggaactggttgcagtgttaactagggttagcagtagcttttctgtctcctgcggagg

SEQ ID NO: 29217 - DNA, 122 bp, Homo sapiens
  misc_feature (61)..(62): /note="This region represents a CpG dinucleotide"
  misc_feature (61)..(61): /note="Nucleotide may be methylated to form 5-methylcytosine"
gcaggtcggctgttgagcccctgaacaatgaggagctcacctttagagggtccagtgctccgcctgggtcacagaggctcagaattacaaaatcctctggtagctttcatggcactctcact

SEQ ID NO: 29218 - DNA, 122 bp, Homo sapiens
  misc_feature (61)..(62): /note="This region represents a CpG dinucleotide"
  misc_feature (61)..(61): /note="Nucleotide may be methylated to form 5-methylcytosine"
aagtgtcagacattcctggatagcatctaaagcttctctcttcactcgatgtcatggggacgtttttaaagatagacactagcatgaagaaagattacccagtagtagatgtgtctgaacag

SEQ ID NO: 29219 - DNA, 122 bp, Homo sapiens
  misc_feature (61)..(62): /note="This region represents a CpG dinucleotide"
  misc_feature (61)..(61): /note="Nucleotide may be methylated to form 5-methylcytosine"
gggagctgcagtgccctgaattccccctcttactccaccccctcaatactgacacacagccgacactcaataaaagtttgttgaattgacaaaaataaatttgcggcttcttgcccagtact

SEQ ID NO: 29220 - DNA, 122 bp, Homo sapiens
  misc_feature (61)..(62): /note="This region represents a CpG dinucleotide"
  misc_feature (61)..(61): /note="Nucleotide may be methylated to form 5-methylcytosine"
acttacacaaacctagatggtacagccaactacacacgtagcctatatggtatagcctatcgctcctaggttacaaacctgcacagcatgttcatttactgaatactgtaggcaattacagc

SEQ ID NO: 29221 - DNA, 122 bp, Homo sapiens
  misc_feature (61)..(62): /note="This region represents a CpG dinucleotide"
  misc_feature (61)..(61): /note="Nucleotide may be methylated to form 5-methylcytosine"
aaaaacccacagcccaggcactatcccagatcacctgcttctaattaccccattttgtggcgatgagttactcattaagctcagtctggagaacagaaccagaagaagcagaggtaaaattt

SEQ ID NO: 29222 - DNA, 122 bp, Homo sapiens
  misc_feature (61)..(62): /note="This region represents a CpG dinucleotide"
  misc_feature (61)..(61): /note="Nucleotide may be methylated to form 5-methylcytosine"
actagcttaattgggtgcaattagcctacattgacataggtcaggcatttattcacctaccgtcttgtactgccatgcactagggttgtgagatggagcttcattatgttaagtcactaaga

SEQ ID NO: 29223 - DNA, 122 bp, Homo sapiens
  misc_feature (61)..(62): /note="This region represents a CpG dinucleotide"
  misc_feature (61)..(61): /note="Nucleotide may be methylated to form 5-methylcytosine"
caaactctaggactctgaggtgtccttgcagggattaaaactctgactaggtgtcttagtcggcttgggctgccatcacaaaataccatagtcagaatggcttcaacaacagacatttattt

SEQ ID NO: 29224 - DNA, 122 bp, Homo sapiens
  misc_feature (61)..(62): /note="This region represents a CpG dinucleotide"
  misc_feature (61)..(61): /note="Nucleotide may be methylated to form 5-methylcytosine"
cccctgtacagaggcggggcatggagccggcggctttcagaactcccagggtctctgctgcggtagaccggctatttaacctccctttaatgcctgtgtaatgtgctggagaacaactagct

SEQ ID NO: 29225 - DNA, 122 bp, Homo sapiens
  misc_feature (61)..(62): /note="This region represents a CpG dinucleotide"
  misc_feature (61)..(61): /note="Nucleotide may be methylated to form 5-methylcytosine"
gaacttggactgtggcatgcccgtgcctgggctggggaggggagagctgtgcgtggcatgcgaagaggtgaaatgctgaccgagttactcatccagtgaaagacagcctgctttctgcaaca

SEQ ID NO: 29226 - DNA, 122 bp, Homo sapiens
  misc_feature (61)..(62): /note="This region represents a CpG dinucleotide"
  misc_feature (61)..(61): /note="Nucleotide may be methylated to form 5-methylcytosine"
acctaagaaaacagggcagctatgactcactgggccctgctgtatcaggtactgtctcagcgctttatgtgcaccatctgatgtcatcctcccaacaattctacaaacagttactactctct

SEQ ID NO: 29227 - DNA, 122 bp, Homo sapiens
  misc_feature (61)..(62): /note="This region represents a CpG dinucleotide"
  misc_feature (61)..(61): /note="Nucleotide may be methylated to form 5-methylcytosine"
gggcggtccgcctctcagacgtagaggcccggcctcggatgaaggcggaagggagggcaccgcctgttgctgggcaactgtgccccaactcgtctgcccctggggagtgtttgtttccaaag

SEQ ID NO: 29228 - DNA, 122 bp, Homo sapiens
  misc_feature (61)..(62): /note="This region represents a CpG dinucleotide"
  misc_feature (61)..(61): /note="Nucleotide may be methylated to form 5-methylcytosine"
cttaggcagctacaatattaaacaactgctgcttattgtctttgtcaaattccctgctggcggagctgtttgcacaaagtgagctctgattcatgtcaaataaatacaagccctgagaacgg

SEQ ID NO: 29229 - DNA, 122 bp, Homo sapiens
  misc_feature (61)..(62): /note="This region represents a CpG dinucleotide"
  misc_feature (61)..(61): /note="Nucleotide may be methylated to form 5-methylcytosine"
tagtagaggtggtgacaggaggatacctgaaaccttggttatataataaacttccttctacgacagtgagtcatttcagaatagaaatgatggaataattggaaatcaagttgaaggcttaa

SEQ ID NO: 29230 - DNA, 122 bp, Homo sapiens
  misc_feature (61)..(62): /note="This region represents a CpG dinucleotide"
  misc_feature (61)..(61): /note="Nucleotide may be methylated to form 5-methylcytosine"
tcaattcacataagaatgatctcaggttagggctgagggacttcctcttcaataggccctcgctgcagcttagctttcagggaaaattataacctgttgggaaaacatgaattattagagaa

SEQ ID NO: 29231 - DNA, 122 bp, Homo sapiens
  misc_feature (61)..(62): /note="This region represents a CpG dinucleotide"
  misc_feature (61)..(61): /note="Nucleotide may be methylated to form 5-methylcytosine"
catgcacagattggggccagaagtcgagattctgcgcgtcctctcccgccaccccactcccggtcccctagagtggcccagactcaggctaaagtctagggcttctttcctgggatgccctt

SEQ ID NO: 29232 - DNA, 122 bp, Homo sapiens
  misc_feature (61)..(62): /note="This region represents a CpG dinucleotide"
  misc_feature (61)..(61): /note="Nucleotide may be methylated to form 5-methylcytosine"
attcgtgctttctccaccactaccacaggctactatccacccctctatttttttatttagcgatccccacgaccaaacgggtcataatattttgtatttggcttgctctggtttctgctgga

SEQ ID NO: 29233 - DNA, 122 bp, Homo sapiens
  misc_feature (61)..(62): /note="This region represents a CpG dinucleotide"
  misc_feature (61)..(61): /note="Nucleotide may be methylated to form 5-methylcytosine"
tgtcaatgttggccttgaggctagacgtgaagtcaaattcacctagtcacatgtaataaacgtagggagaggaatagtttctctgggaaaatcagacatgaacctaggagaaatggattctg

SEQ ID NO: 29234 - DNA, 122 bp, Homo sapiens
  misc_feature (61)..(62): /note="This region represents a CpG dinucleotide"
  misc_feature (61)..(61): /note="Nucleotide may be methylated to form 5-methylcytosine"
agcgcttggcacagggcaagcgccccataaaatggcagttaggattaaaatcgaggttgccgggggacccccaggcaggagctgagatttgtgtggagcggcgaagtggggcggcggcgcgt

SEQ ID NO: 29235 - DNA, 122 bp, Homo sapiens
  misc_feature (61)..(62): /note="This region represents a CpG dinucleotide"
  misc_feature (61)..(61): /note="Nucleotide may be methylated to form 5-methylcytosine"
ctctggcccacccatgcctgctaggccatgcttcttcagaagtggccacaactctcctgacgtctccagagccggtcattccacccagggggacttcagctgccactggacacttcaattgt

SEQ ID NO: 29236 - DNA, 122 bp, Homo sapiens
  misc_feature (61)..(62): /note="This region represents a CpG dinucleotide"
  misc_feature (61)..(61): /note="Nucleotide may be methylated to form 5-methylcytosine"
atagctgaatcacctttcccagaattctctctttcatcataaatgtagcaacacttactacgaagtgggttatctcctcacagtgtttaagattcttcttgctcggggccagatgcaagata

SEQ ID NO: 29237 - DNA, 122 bp, Homo sapiens
  misc_feature (61)..(62): /note="This region represents a CpG dinucleotide"
  misc_feature (61)..(61): /note="Nucleotide may be methylated to form 5-methylcytosine"
gaatgagttagacagatgggatttgtaactcaccaactgctgaatgactctctcgaccaacgttgaaaacgtaatgtcctcagtttctctgttgtcgaacacatatttaatcagcttggcga

SEQ ID NO: 29238 - DNA, 122 bp, Homo sapiens
  misc_feature (61)..(62): /note="This region represents a CpG dinucleotide"
  misc_feature (61)..(61): /note="Nucleotide may be methylated to form 5-methylcytosine"
atgagagtggatttttccttccaaatccacttggagtgagtcccgaaagactcacttttgcggcaatccccacaatgacatcactggagcggaggttatataatttaaagcaaccacatctc

SEQ ID NO: 29239 - DNA, 122 bp, Homo sapiens
  misc_feature (61)..(62): /note="This region represents a CpG dinucleotide"
  misc_feature (61)..(61): /note="Nucleotide may be methylated to form 5-methylcytosine"
caatcagtattctaagtgtggccgagtgacagtgggcatagatttataacaaggaagtgacgtgcttatcaccatagatttgcaagtaaactgcatgtatttaattgtattgaattgagttc

SEQ ID NO: 29240 - DNA, 122 bp, Homo sapiens
  misc_feature (61)..(62): /note="This region represents a CpG dinucleotide"
  misc_feature (61)..(61): /note="Nucleotide may be methylated to form 5-methylcytosine"
ccggaggctcctcgggacaggaaatagcggtgagccagtgccagcagaagattgtgctcccgcctgggtgtgtggcttattccctggctccattaattcctctccctgagcctcagctttct

SEQ ID NO: 29241 - DNA, 122 bp, Homo sapiens
  misc_feature (61)..(62): /note="This region represents a CpG dinucleotide"
  misc_feature (61)..(61): /note="Nucleotide may be methylated to form 5-methylcytosine"
cccagccagcgagggagtcagggcctcccaacagagctaagcggtgccaagggaccaggtcgaggacaaaaggtttatttgatgtgaggcattagcacctactagcaccttactgtagggag

SEQ ID NO: 29242 - DNA, 122 bp, Homo sapiens
  misc_feature (61)..(62): /note="This region represents a CpG dinucleotide"
  misc_feature (61)..(61): /note="Nucleotide may be methylated to form 5-methylcytosine"
aagggctagaatgagtccatggttggtcttatcaggagaaagttactaaaatcagtctcacgttcagtcaaagctatagttacagttagtggaacaggggtacagtttgtcagcatctagtg

SEQ ID NO: 29243 - DNA, 122 bp, Homo sapiens
  misc_feature (61)..(62): /note="This region represents a CpG dinucleotide"
  misc_feature (61)..(61): /note="Nucleotide may be methylated to form 5-methylcytosine"
cagaaatttaccgacgtcctgctggaagccatgaatgtgcctgacaagagactgaaacagcggttggcagagacatgaataaaagaccagtgtcttggtttaatcacctggctctaaggtgg

SEQ ID NO: 29244 - DNA, 122 bp, Homo sapiens
  misc_feature (61)..(62): /note="This region represents a CpG dinucleotide"
  misc_feature (61)..(61): /note="Nucleotide may be methylated to form 5-methylcytosine"
ccctgagtttcttttgaagccaacctctgacccacaatgggtggcagggactgtggctggcgcctgataaatgacacttatcttggtgtgcctcatgaggtcattgtggacaatcaggtttg

SEQ ID NO: 29245 - DNA, 122 bp, Homo sapiens
  misc_feature (61)..(62): /note="This region represents a CpG dinucleotide"
  misc_feature (61)..(61): /note="Nucleotide may be methylated to form 5-methylcytosine"
tcttaatagtttgcccagacagctcaccttcagtaccccagagcctccagcctggcagtccgggctccaggtacctctagagggctgtggcgcacactatgcataagtcacagggacactgg

SEQ ID NO: 29246 - DNA, 122 bp, Homo sapiens
  misc_feature (61)..(62): /note="This region represents a CpG dinucleotide"
  misc_feature (61)..(61): /note="Nucleotide may be methylated to form 5-methylcytosine"
ctctgcaggtgccgctcttccccagaggacaccccttccctgccagtcaaccccaccagccgcaggcagacatttcccccgagaaagctctccaggatccctgctccccaggcctgtgtctg

SEQ ID NO: 29247 - DNA, 122 bp, Homo sapiens
  misc_feature (61)..(62): /note="This region represents a CpG dinucleotide"
  misc_feature (61)..(61): /note="Nucleotide may be methylated to form 5-methylcytosine"
tggaacaaggaaatggatttcaaaagcactacctatgtggccagggcgagtaaactggggcgataaagcttacacaactgagttatgagtcctaaatgagataacaagaaaagcagagcatg

SEQ ID NO: 29248 - DNA, 122 bp, Homo sapiens
  misc_feature (61)..(62): /note="This region represents a CpG dinucleotide"
  misc_feature (61)..(61): /note="Nucleotide may be methylated to form 5-methylcytosine"
ttaaattactaaaacttcaaacctgtaaacagtgggaacgtctagttcccccacccccaccgcacccgaccccaccccccacatttctccccaggccttcccttctgaatctacaaggagag

SEQ ID NO: 29249 - DNA, 122 bp, Homo sapiens
  misc_feature (61)..(62): /note="This region represents a CpG dinucleotide"
  misc_feature (61)..(61): /note="Nucleotide may be methylated to form 5-methylcytosine"
agatatatatagcttatttagacagcaaagtataagttagtaaactctttcctactttaacgccagtccatgggagaattaaagggaggaaggggcaagaatataaattaatcatctacatg

SEQ ID NO: 29250 - DNA, 122 bp, Homo sapiens
  misc_feature (61)..(62): /note="This region represents a CpG dinucleotide"
  misc_feature (61)..(61): /note="Nucleotide may be methylated to form 5-methylcytosine"
agagaagaaaccaactccgtgcctgagggcagctgttgagtgccaggccatggaagttcccgcatcagggagagccaggttaggtgggcaaacagcagcctcagcacctggtagtaagctaa

SEQ ID NO: 29251 - DNA, 122 bp, Homo sapiens
  misc_feature (61)..(62): /note="This region represents a CpG dinucleotide"
  misc_feature (61)..(61): /note="Nucleotide may be methylated to form 5-methylcytosine"
gtacgaggaggcaaacacataaggcacgaggcgagaaacgtgcagagcggaggacgaggccgacggacggggaggctgggggggacactaggcagcctggccaactctgcttgtccccctgc

SEQ ID NO: 29252 - DNA, 122 bp, Homo sapiens
  misc_feature (61)..(62): /note="This region represents a CpG dinucleotide"
  misc_feature (61)..(61): /note="Nucleotide may be methylated to form 5-methylcytosine"
aacctagacattcatctctagatctgtcccactaccctttcagctcgatttccccagtcgcgccagttagacaaacacacaaacaaataaacagagtggggtctggggcctctctccaaatg

SEQ ID NO: 29253 - DNA, 122 bp, Homo sapiens
  misc_feature (61)..(62): /note="This region represents a CpG dinucleotide"
  misc_feature (61)..(61): /note="Nucleotide may be methylated to form 5-methylcytosine"
taatacagctgccttggacgaatgttccctgcctgctgcgtatttactcagtcatcaaagcgcaaatgtggtgggtaacagatcactcccttcgagagaatccactccactgccagctcaca

SEQ ID NO: 29254 - DNA, 122 bp, Homo sapiens
  misc_feature (61)..(62): /note="This region represents a CpG dinucleotide"
  misc_feature (61)..(61): /note="Nucleotide may be methylated to form 5-methylcytosine"
tgggataacattttcactatgttcattcttcacattcctctaaagtggttttaactccaccgtttttgctcacagacctctttgggaatgtgataaaagttgcctacgtagaaaaatgactc

SEQ ID NO: 29255 - DNA, 122 bp, Homo sapiens
  misc_feature (61)..(62): /note="This region represents a CpG dinucleotide"
  misc_feature (61)..(61): /note="Nucleotide may be methylated to form 5-methylcytosine"
attggaacagtaatttggggccagatcgttatggttgcttctggatgttatgattgcatccgcttttcttttttagctttaagccatctaaatattagattaaaaggagataaaattgaaat

SEQ ID NO: 29256 - DNA, 122 bp, Homo sapiens
  misc_feature (61)..(62): /note="This region represents a CpG dinucleotide"
  misc_feature (61)..(61): /note="Nucleotide may be methylated to form 5-methylcytosine"
aatggtgttcttgttgacattcaagaggaaggccacaggccatatggagaggtatttaaccggcatggagctggtatccaggagggctgcagaatcctcttgaaccagtcgtgtggcggtcc

SEQ ID NO: 29257 - DNA, 122 bp, Homo sapiens
  misc_feature (61)..(62): /note="This region represents a CpG dinucleotide"
  misc_feature (61)..(61): /note="Nucleotide may be methylated to form 5-methylcytosine"
acattgcacagtcatagtaatgaggtaagatcttccgtgtaaagtgactgtatggtccagcgtgtggcaagctctccatgagtaacagctgttgctatttcagctccaccagatgctgtgtc

SEQ ID NO: 29258 - DNA, 122 bp, Homo sapiens
  misc_feature (61)..(62): /note="This region represents a CpG dinucleotide"
  misc_feature (61)..(61): /note="Nucleotide may be methylated to form 5-methylcytosine"
cttgaagttcagctgggccaaatgaggggaacagggaacccagagctctcagcctcccagcgcccagacctggcatttgtacagctgtgtctgacatgtaattctttcgacataacttctta

SEQ ID NO: 29259 - DNA, 122 bp, Homo sapiens
  misc_feature (61)..(62): /note="This region represents a CpG dinucleotide"
  misc_feature (61)..(61): /note="Nucleotide may be methylated to form 5-methylcytosine"
attgataaggtcaagcaagtcatgtgatcatgggacgggggctcttccctctaaggtagccgaagcagagagggaaggcagcataagtcagcattttcttctatgcacttataagaaagatc

SEQ ID NO: 29260 - DNA, 122 bp, Homo sapiens
  misc_feature (61)..(62): /note="This region represents a CpG dinucleotide"
  misc_feature (61)..(61): /note="Nucleotide may be methylated to form 5-methylcytosine"
tcattccttcctctcccaaatagagaagccttggcttgaaaattccagggagtggccatgcgaggtggctcatgcctgtaatcctagccctttgggaagccaaggtgggtaggtcacttgag

SEQ ID NO: 29261 - DNA, 122 bp, Homo sapiens
  misc_feature (61)..(62): /note="This region represents a CpG dinucleotide"
  misc_feature (61)..(61): /note="Nucleotide may be methylated to form 5-methylcytosine"
tagtgagggagccccgtgagcccgtgccagcccggaacccgcaccagcctgcaagcgccacgctcagccccggctggcttcggcgcctcccgctccacacctccctgagagcagagggagcc

SEQ ID NO: 29262 - DNA, 122 bp, Homo sapiens
  misc_feature (61)..(62): /note="This region represents a CpG dinucleotide"
  misc_feature (61)..(61): /note="Nucleotide may be methylated to form 5-methylcytosine"
agcttgtggtaaagatgaaaggtatgaattcgtgtgaagcggttagaaccatggagtaagcgtgtgttggctgtcatcatcactgaggtaggtgctgtcatcaccctcattttacatgtaga

SEQ ID NO: 29263 - DNA, 122 bp, Homo sapiens
  misc_feature (61)..(62): /note="This region represents a CpG dinucleotide"
  misc_feature (61)..(61): /note="Nucleotide may be methylated to form 5-methylcytosine"
gaagttcaaatatgcactacatgtactattcattcattcacacatttgacaaatatttaccgagtgcccactatgggtcaaggactgtgctaggcactggaaatacaacagaataagaaaga

SEQ ID NO: 29264 - DNA, 122 bp, Homo sapiens
  misc_feature (61)..(62): /note="This region represents a CpG dinucleotide"
  misc_feature (61)..(61): /note="Nucleotide may be methylated to form 5-methylcytosine"
atggctttaaatttacaagtgaagactcatccatcatcaaagacccagaatgctcactgccgtcacattaaaaataacttacaaaagatatgttttcatttgtgtatcatccccttcaacac

SEQ ID NO: 29265 - DNA, 122 bp, Homo sapiens
  misc_feature (61)..(62): /note="This region represents a CpG dinucleotide"
  misc_feature (61)..(61): /note="Nucleotide may be methylated to form 5-methylcytosine"
taggaaccagagaccatcgtgtgcctgtctgtgtcccgtgactttcagtccatcaacacacgtcactgtagcattttggaatgttctggttcagttgctctcagatgttagctacttcagaa

SEQ ID NO: 29266 - DNA, 122 bp, Homo sapiens
  misc_feature (61)..(62): /note="This region represents a CpG dinucleotide"
  misc_feature (61)..(61): /note="Nucleotide may be methylated to form 5-methylcytosine"
gacatattgtacatgggaagctgtttattttttattactgaaaagtacagtatttggttgcgattgaagtcagccattctgtagctgtaaacagcctgaagctaggcagctgtattctttac

SEQ ID NO: 29267 - DNA, 122 bp, Homo sapiens
  misc_feature (61)..(62): /note="This region represents a CpG dinucleotide"
  misc_feature (61)..(61): /note="Nucleotide may be methylated to form 5-methylcytosine"
ctgttttattacaagatgctgttatgagttatagcagctttccttatgctctacggctgtcgccaaacaagttacatgaatataagcagttttatttgcaattttttgcttacattttctta

SEQ ID NO: 29268 - DNA, 122 bp, Homo sapiens
  misc_feature (61)..(62): /note="This region represents a CpG dinucleotide"
  misc_feature (61)..(61): /note="Nucleotide may be methylated to form 5-methylcytosine"
ttggctctgtttcattagtaatctgagagccacatgaaacaattgagttgtgagaaaaaccgtctctaagacttacaatgtatgactaagaattgctgtgccttgtgaaagattaggactaa

SEQ ID NO: 29269 - DNA, 122 bp, Homo sapiens
  misc_feature (61)..(62): /note="This region represents a CpG dinucleotide"
  misc_feature (61)..(61): /note="Nucleotide may be methylated to form 5-methylcytosine"
gctcagcgtttaaatgccgtctgtatttttatccgatgatgggccacttttgaaaaaccccgctcatgctctgcccctctaagaatacatttccatttatagcatctgcacacaggatgttg

SEQ ID NO: 29270 - DNA, 122 bp, Homo sapiens
  misc_feature (61)..(62): /note="This region represents a CpG dinucleotide"
  misc_feature (61)..(61): /note="Nucleotide may be methylated to form 5-methylcytosine"
acatcccacagtgatttcaaatgatccagcctttcatcattaaaaaataaattctgtgggcgaggagaaaagaatcgtgaggcccctaagcaggtgactcatttcagacagaaatgccaaag

SEQ ID NO: 29271 - DNA, 122 bp, Homo sapiens
  misc_feature (61)..(62): /note="This region represents a CpG dinucleotide"
  misc_feature (61)..(61): /note="Nucleotide may be methylated to form 5-methylcytosine"
gtcacagaggcagcaatggggagggtaagagctctactgtgggcccagccctgattcacacgtaaggccctaattgcctgataaccctaccagggacagcaggacatccctgagcctctcac

SEQ ID NO: 29272 - DNA, 122 bp, Homo sapiens
  misc_feature (61)..(62): /note="This region represents a CpG dinucleotide"
  misc_feature (61)..(61): /note="Nucleotide may be methylated to form 5-methylcytosine"
acaaataccacatgatctcactcatacatggtcattcatatattgggcaaacaccaccttcgatgtataatgatggtttggctcatcactctggtcttacaacattatttgatttctacatg

SEQ ID NO: 29273 - DNA, 122 bp, Homo sapiens
  misc_feature (61)..(62): /note="This region represents a CpG dinucleotide"
  misc_feature (61)..(61): /note="Nucleotide may be methylated to form 5-methylcytosine"
catttcaaagcccttgaatggcagctcaaaagtctccatctctttcagaataaaagccagcgtgcaaacgctctagtgtttctttgatcctacctttatctcccactctgtttcagccacac

SEQ ID NO: 29274 - DNA, 122 bp, Homo sapiens
  misc_feature (61)..(62): /note="This region represents a CpG dinucleotide"
  misc_feature (61)..(61): /note="Nucleotide may be methylated to form 5-methylcytosine"
agcggacagggtgttcagggatgagctgggcaggcgctggggcctccccatgtcagaggccgcttggcttctgggtacctgccctcctcttccccttcctctcccccacccccaaatgtcac

SEQ ID NO: 29275 - DNA, 122 bp, Homo sapiens
  misc_feature (61)..(62): /note="This region represents a CpG dinucleotide"
  misc_feature (61)..(61): /note="Nucleotide may be methylated to form 5-methylcytosine"
acagcgagtctcctgagccgcaggcgccggggctgtggagagccgtctccattcagcaggcgccagggctatggggagccgtctccattcagcaggctctggagctatgaagagccgtctcc

SEQ ID NO: 29276 - DNA, 122 bp, Homo sapiens
  misc_feature (61)..(62): /note="This region represents a CpG dinucleotide"
  misc_feature (61)..(61): /note="Nucleotide may be methylated to form 5-methylcytosine"
aatcactgtgccttgcatagatattaggcatagaaataagcctgccacaaagctctcctccgtgctgtggtgctcatggagccatgcagggcacagagacagcaaaactcagctggaggcct

SEQ ID NO: 29277 - DNA, 122 bp, Homo sapiens
  misc_feature (61)..(62): /note="This region represents a CpG dinucleotide"
  misc_feature (61)..(61): /note="Nucleotide may be methylated to form 5-methylcytosine"
cagtagttgataaagacaggcttacttaaagttcgaattgcctcaatcagagataacgggcgagtcccttttggcagtgagatatgaaaacaggagaatgatctgttatcagagtgaacatg

SEQ ID NO: 29278 - DNA, 122 bp, Homo sapiens
  misc_feature (61)..(62): /note="This region represents a CpG dinucleotide"
  misc_feature (61)..(61): /note="Nucleotide may be methylated to form 5-methylcytosine"
agggaatgtcctcaatgaaaccagactgaccctatccttgttcttcttactttcatggtacggccagccagactggcctaagccttcgaaaagcacaatgccatggggaagaggcatcgtgg

SEQ ID NO: 29279 - DNA, 122 bp, Homo sapiens
  misc_feature (61)..(62): /note="This region represents a CpG dinucleotide"
  misc_feature (61)..(61): /note="Nucleotide may be methylated to form 5-methylcytosine"
cagatgttaaacctgaagacaaggcaagtcggcgggacttgtacttgttccacctaccctcgtaatgtgcacagagcccgtctcagatggctcattccctttacagctgatctgtacttcca

SEQ ID NO: 29280 - DNA, 122 bp, Homo sapiens
  misc_feature (61)..(62): /note="This region represents a CpG dinucleotide"
  misc_feature (61)..(61): /note="Nucleotide may be methylated to form 5-methylcytosine"
tggcaaaaatgggacaggaagagtttgcacttggttttttgtgaaagaatgttagaaatacgtgaaaccgttggtagtattttgactatcacctgaaaggtactaaatgttaaactagtaat

SEQ ID NO: 29281 - DNA, 122 bp, Homo sapiens
  misc_feature (61)..(62): /note="This region represents a CpG dinucleotide"
  misc_feature (61)..(61): /note="Nucleotide may be methylated to form 5-methylcytosine"
acagtagcaatgaaaaataatagctaccagggagaacaatcaatatgcctaataggtgggcgtggggaaaggaggaaatagacaaagacaatgactaagaaaatgacaataatacttagaga

SEQ ID NO: 29282 - DNA, 122 bp, Homo sapiens
  misc_feature (61)..(62): /note="This region represents a CpG dinucleotide"
  misc_feature (61)..(61): /note="Nucleotide may be methylated to form 5-methylcytosine"
atgataaaacagtgtaacaataaacaataacaaaattcactgtagaaggatttgttttgccgtgaggaaaatggttccgtttcatcttgggattcctggttaaaagagtctccagtttacaa

SEQ ID NO: 29283 - DNA, 122 bp, Homo sapiens
  misc_feature (61)..(62): /note="This region represents a CpG dinucleotide"
  misc_feature (61)..(61): /note="Nucleotide may be methylated to form 5-methylcytosine"
ataccaatctggactacacccttaggactcataattcatttgcttctttttgtcctctgtcgcccaggctagagtgcagtggtgtgatctcagctcactgcaacctccgcctcctaggttca

SEQ ID NO: 29284 - DNA, 122 bp, Homo sapiens
  misc_feature (61)..(62): /note="This region represents a CpG dinucleotide"
  misc_feature (61)..(61): /note="Nucleotide may be methylated to form 5-methylcytosine"
aatcctataaaaggagacacttaacaggaatgctgagagacagtaggttcctacatgaggcggctgcatgaacaaataaaaggtgttctctctctctgtgtgtgtgtgtgtctctctctctc

SEQ ID NO: 29285 - DNA, 122 bp, Homo sapiens
  misc_feature (61)..(62): /note="This region represents a CpG dinucleotide"
  misc_feature (61)..(61): /note="Nucleotide may be methylated to form 5-methylcytosine"
tagtgtctaaaagaagcctcatatcattccacaaatgctgtatcttttaaacattttaaacgtttgaaatgtcttcatctatgccatcccataataggaagattagtgggccttaacacatt

SEQ ID NO: 29286 - DNA, 122 bp, Homo sapiens
  misc_feature (61)..(62): /note="This region represents a CpG dinucleotide"
  misc_feature (61)..(61): /note="Nucleotide may be methylated to form 5-methylcytosine"
ttgaattgcaagtggggaaaatcccagcctagatgtagtataactaaggttttattagagcgctggcaaactgatgactacagcttattgaaatttgggctgggcacaatggctcacacctg

SEQ ID NO: 29287 - DNA, 122 bp, Homo sapiens
  misc_feature (61)..(62): /note="This region represents a CpG dinucleotide"
  misc_feature (61)..(61): /note="Nucleotide may be methylated to form 5-methylcytosine"
ccaaaggcccatctgcctggaaaccttgctgtcttgctatttagctcagagccctggaagcgttgcttttgatgtctaccattactgcttaacttaggaacgctctgcctagtgaggggtct

SEQ ID NO: 29288 - DNA, 122 bp, Homo sapiens
  misc_feature (61)..(62): /note="This region represents a CpG dinucleotide"
  misc_feature (61)..(61): /note="Nucleotide may be methylated to form 5-methylcytosine"
aaggcttgggaaatgggagatgggcctgcttcgtggctgggttaatgcctttccaccacccgtctttggagagatcagtttttgctgaattaacacttggagctctggcggccccagggctc

SEQ ID NO: 29289 - DNA, 122 bp, Homo sapiens
  misc_feature (61)..(62): /note="This region represents a CpG dinucleotide"
  misc_feature (61)..(61): /note="Nucleotide may be methylated to form 5-methylcytosine"
gcagctgcctggatttggcctgtgggttgtagtttgccaacccttgctctaaatcattagcggagaaagaataacagcatgatgtattataaaagcagccaatccagatggctaaaaatatt

SEQ ID NO: 29290 - DNA, 122 bp, Homo sapiens
  misc_feature (61)..(62): /note="This region represents a CpG dinucleotide"
  misc_feature (61)..(61): /note="Nucleotide may be methylated to form 5-methylcytosine"
ctttgccggaagccggtcctgctggccaggtgttttacgtcagcagggaaatgtggcacacgccctcgaggcattttaacactgcgcttcaggaaatctcaagttccatcttgtgttagtaa

SEQ ID NO: 29291 - DNA, 122 bp, Homo sapiens
  misc_feature (61)..(62): /note="This region represents a CpG dinucleotide"
  misc_feature (61)..(61): /note="Nucleotide may be methylated to form 5-methylcytosine"
gggagcccttgagaagcaggccttgccctggaggataatttgacagtttgcaaagctccccgatccctgcttcaggagccttctcagcagccctgtatggagctaagtcctcatgtcaccag

SEQ ID NO: 29292 - DNA, 122 bp, Homo sapiens
  misc_feature (61)..(62): /note="This region represents a CpG dinucleotide"
  misc_feature (61)..(61): /note="Nucleotide may be methylated to form 5-methylcytosine"
gactcatggtggagttttccaggctcgaggggactgttgacatttactctgctcctcccacgccacagagtctaactttttctatcttcccccaaacataactcattacctccagtttatcc

SEQ ID NO: 29293 - DNA, 122 bp, Homo sapiens
  misc_feature (61)..(62): /note="This region represents a CpG dinucleotide"
  misc_feature (61)..(61): /note="Nucleotide may be methylated to form 5-methylcytosine"
gctggaggatgtcgggggctgggccaggctgggcacaggcacatggccatggtgattgaccgcatttgcctcaccacttcacgtggggacctggcaaccacacaatggccctggggcatggt

SEQ ID NO: 29294 - DNA, 122 bp, Homo sapiens
  misc_feature (61)..(62): /note="This region represents a CpG dinucleotide"
  misc_feature (61)..(61): /note="Nucleotide may be methylated to form 5-methylcytosine"
tctatgtttcaatgtcatctcagaaactgctcatatctatgctggcttctattttcattccgtaaagctagccaagggagctatgttttacgaggacatgcagtttcaacttcgtatcattc

SEQ ID NO: 29295 - DNA, 122 bp, Homo sapiens
  misc_feature (61)..(62): /note="This region represents a CpG dinucleotide"
  misc_feature (61)..(61): /note="Nucleotide may be methylated to form 5-methylcytosine"
ggaaaatcccacagctgccctcatgtgatgggtcacatatattattaaaaatattgtggtcgggtgcagcggttcacacctgtaatcccaacgctttgggaggccaaggcagcgggcggatc

SEQ ID NO: 29296 - DNA, 122 bp, Homo sapiens
  misc_feature (61)..(62): /note="This region represents a CpG dinucleotide"
  misc_feature (61)..(61): /note="Nucleotide may be methylated to form 5-methylcytosine"
cctatgctacacacctgtacagcgtattttgtaccgaatactgtaggcaattgtaagcaccgtgatacttgtgtatctaaacacagaaaaggtaatgtgttggttggctaccacatcagtag

SEQ ID NO: 29297 - DNA, 122 bp, Homo sapiens
  misc_feature (61)..(62): /note="This region represents a CpG dinucleotide"
  misc_feature (61)..(61): /note="Nucleotide may be methylated to form 5-methylcytosine"
ggcatttgttgaatgggggaagagcatggaggttttcacacgcaatttttatgggtcagacgtggtagtggcacacatcacttctgttgacatttcattggcttggtcttagtcacgtggcc

SEQ ID NO: 29298 - DNA, 122 bp, Homo sapiens
  misc_feature (61)..(62): /note="This region represents a CpG dinucleotide"
  misc_feature (61)..(61): /note="Nucleotide may be methylated to form 5-methylcytosine"
ctgaaccctgatgtgattccagctctcctctttcttcacatctctgcacagcagcttatacgctcttactaatccaccatcccgctcttacaacagctctgagcagtgtcagggtgagcatt

SEQ ID NO: 29299 - DNA, 122 bp, Homo sapiens
  misc_feature (61)..(62): /note="This region represents a CpG dinucleotide"
  misc_feature (61)..(61): /note="Nucleotide may be methylated to form 5-methylcytosine"
gtttccttgtaagctcatgtttgcccagtgccaaggttagatacatgtcttggaggtgaccgtcaggttaccacaggtgcagagtgttcaacacatgtgacattgctgatagcaaaattgtt

SEQ ID NO: 29300 - DNA, 122 bp, Homo sapiens
  misc_feature (61)..(62): /note="This region represents a CpG dinucleotide"
  misc_feature (61)..(61): /note="Nucleotide may be methylated to form 5-methylcytosine"
caagtgcatggtttgactcttgacttggggttttatctgttggcatgcttgtgaggtctacgtctcttctcccctgattcttccctgaggtgggctgtctgcatgcacagtggtctgccagc

SEQ ID NO: 29301 - DNA, 122 bp, Homo sapiens
  misc_feature (61)..(62): /note="This region represents a CpG dinucleotide"
  misc_feature (61)..(61): /note="Nucleotide may be methylated to form 5-methylcytosine"
tgtaaaaagaggaccaaaaaagaaggccagaaataagaaaagtggtagcaaaatggaaagcgaggcctctccaaaggtatgtttttctaacttcaacttgggcttggagttggcttacatgc

SEQ ID NO: 29302 - DNA, 122 bp, Homo sapiens
  misc_feature (61)..(62): /note="This region represents a CpG dinucleotide"
  misc_feature (61)..(61): /note="Nucleotide may be methylated to form 5-methylcytosine"
cttaagccctagaagtctaggcagtaatgagctgtgaccatgccactgaactccagcctacgtgacagagactctgtctcaaaaaagaaaaaaaaaaagtcatatcaccaatgagatctgac

SEQ ID NO: 29303 - DNA, 122 bp, Homo sapiens
  misc_feature (61)..(62): /note="This region represents a CpG dinucleotide"
  misc_feature (61)..(61): /note="Nucleotide may be methylated to form 5-methylcytosine"
gagtgtaggaaggcaacacacaatcactaaaataaagtgatctttcataagttgacaacacgggaagtattcttgtaaaggttttctaagaaacctaaggctgagtgacctaccacttttgg

SEQ ID NO: 29304 - DNA, 122 bp, Homo sapiens
  misc_feature (61)..(62): /note="This region represents a CpG dinucleotide"
  misc_feature (61)..(61): /note="Nucleotide may be methylated to form 5-methylcytosine"
aagacaggtctttgtgttctctcagcagcccgtggtgacatgagtgagtgcctctgtacacgctgcactgtctctctggttatcatctgacagtcagccttcccatcgctcttcctgtcttt

SEQ ID NO: 29305 - DNA, 122 bp, Homo sapiens
  misc_feature (61)..(62): /note="This region represents a CpG dinucleotide"
  misc_feature (61)..(61): /note="Nucleotide may be methylated to form 5-methylcytosine"
ccccgccctcagttcctatcactttgatgagtataaatctaaatttcccatatccagctccgtccaccacttatatctatagtgctgtatattcaagtgcatcctagtgatgtcttcctgat

SEQ ID NO: 29306 - DNA, 122 bp, Homo sapiens
  misc_feature (61)..(62): /note="This region represents a CpG dinucleotide"
  misc_feature (61)..(61): /note="Nucleotide may be methylated to form 5-methylcytosine"
gccatccccaagaacacacaacagcaacagccccacccttcatcacaaagctgtgcagaacgtctcagtgacgtgctagttttgaacaatgatacaatagggttgttgccaaccacagggaa

SEQ ID NO: 29307 - DNA, 122 bp, Homo sapiens
  misc_feature (61)..(62): /note="This region represents a CpG dinucleotide"
  misc_feature (61)..(61): /note="Nucleotide may be methylated to form 5-methylcytosine"
ttgactcacagttccacgtggctagggaggcctcacaatcatggcagaaggcaaaaggcacgtcttacatggcagcagacatgagaggatatgagaaccaagtgaaaggggtttccccttat

SEQ ID NO: 29308 - DNA, 122 bp, Homo sapiens
  misc_feature (61)..(62): /note="This region represents a CpG dinucleotide"
  misc_feature (61)..(61): /note="Nucleotide may be methylated to form 5-methylcytosine"
tacaaccaagagcttcttaagctattaacagccaagtgtcacagccttaaagatttgcaccgtttgctcatctcaggcatgcccccagtcacaaattcctgcaaaataaaccttggttggac

SEQ ID NO: 29309 - DNA, 122 bp, Homo sapiens
  misc_feature (61)..(62): /note="This region represents a CpG dinucleotide"
  misc_feature (61)..(61): /note="Nucleotide may be methylated to form 5-methylcytosine"
gtttgttgcctgctgaatcattttcatatttgagcagtttctgcctttggtcctccagctcgttgatgccagataggagcagccttcgctctgcctggctcaggacatttaggatgaataca

SEQ ID NO: 29310 - DNA, 122 bp, Homo sapiens
  misc_feature (61)..(62): /note="This region represents a CpG dinucleotide"
  misc_feature (61)..(61): /note="Nucleotide may be methylated to form 5-methylcytosine"
ttgggtctgcaagtgtatccagagccagtgagtcagcactgccatgagctcctgggcttccggttcattgggtttgaatgttgggccctctaatttaggtttgcctcttgttcttgccagga

SEQ ID NO: 29311 - DNA, 122 bp, Homo sapiens
  misc_feature (61)..(62): /note="This region represents a CpG dinucleotide"
  misc_feature (61)..(61): /note="Nucleotide may be methylated to form 5-methylcytosine"
tcttgtttcagggacacgttcactgatataactgaggcttcagactcctagggtgtggcacgaacgagcgcgctttcatccagccacagggtccgacccacggtgagcgtgggcagcatacc

SEQ ID NO: 29312 - DNA, 122 bp, Homo sapiens
  misc_feature (61)..(62): /note="This region represents a CpG dinucleotide"
  misc_feature (61)..(61): /note="Nucleotide may be methylated to form 5-methylcytosine"
aggaatcatcccagataattctgcttacgccagctaaacaacttgcatcattaaataaaccgtcttctgactgtatttatgaaatgttatgtctacctatcaatgagactacattatgcaaa

SEQ ID NO: 29313 - DNA, 122 bp, Homo sapiens
  misc_feature (61)..(62): /note="This region represents a CpG dinucleotide"
  misc_feature (61)..(61): /note="Nucleotide may be methylated to form 5-methylcytosine"
gaacagtgtggttcagagcacagggccctggagagcatgccctgaaggctgggctgtagccggttctattactggatacttggacaagtcacttgtccggtgtgaatcatttccttttctga

SEQ ID NO: 29314 - DNA, 122 bp, Homo sapiens
  misc_feature (61)..(62): /note="This region represents a CpG dinucleotide"
  misc_feature (61)..(61): /note="Nucleotide may be methylated to form 5-methylcytosine"
gaaaggttccctggcaaaactccagccagcctgcatactgaggtggagcttcgggaagttcgcacaatttgcatggggaggagcctggcccctcctcttcctttgtgaaacctgggattcaa

SEQ ID NO: 29315 - DNA, 122 bp, Homo sapiens
  misc_feature (61)..(62): /note="This region represents a CpG dinucleotide"
  misc_feature (61)..(61): /note="Nucleotide may be methylated to form 5-methylcytosine"
cccgctgcttccacacagccgccacacttaggagcgtggccccagatgctggggaataaccgagggtagtctgaccccagagcagcacagcccacagtggacgccacatccaccgcagcggt

SEQ ID NO: 29316 - DNA, 122 bp, Homo sapiens
  misc_feature (61)..(62): /note="This region represents a CpG dinucleotide"
  misc_feature (61)..(61): /note="Nucleotide may be methylated to form 5-methylcytosine"
gagctgcctggcacgcaggagagccgtgacctcaccagagcacacaggcaccccggtacacggtacacgcagacgcatgtctgccatgtgctccgtcaatccacccaataccccctaagact

SEQ ID NO: 29317 - DNA, 122 bp, Homo sapiens
  misc_feature (61)..(62): /note="This region represents a CpG dinucleotide"
  misc_feature (61)..(61): /note="Nucleotide may be methylated to form 5-methylcytosine"
caacataaatgtccattaataagtagaatggacaaatttagtatactcatacaatgaagtcgactcagcaatacaaagcagtaaactactgaaacatgcaacaacatggagtgaaagaaact

SEQ ID NO: 29318 - DNA, 122 bp, Homo sapiens
  misc_feature (61)..(62): /note="This region represents a CpG dinucleotide"
  misc_feature (61)..(61): /note="Nucleotide may be methylated to form 5-methylcytosine"
taactgttgtaaatcaacacattggcattctcgtttgctccaccagtttgttgtgaacttcgtcaggggaaggcatcatgcctaagtctattcaactctgggatactgacaaggtcaaattt

SEQ ID NO: 29319 - DNA, 122 bp, Homo sapiens
  misc_feature (61)..(62): /note="This region represents a CpG dinucleotide"
  misc_feature (61)..(61): /note="Nucleotide may be methylated to form 5-methylcytosine"
caaacagaacaacaaacacaagagttgagcagcggggtgggggtggggggttgccatctacgccgttttagtgtgagggacactgggaacgatgcccagaggctgctctcctcccagcctca

SEQ ID NO: 29320 - DNA, 122 bp, Homo sapiens
  misc_feature (61)..(62): /note="This region represents a CpG dinucleotide"
  misc_feature (61)..(61): /note="Nucleotide may be methylated to form 5-methylcytosine"
ctcaagtgatctgcctaccttagcctcccaaagtgctgggattacaggtgtgagccaccacgcctggccagtgatggctttagactgtcaagttcaaacaggcattttctgatttcatgctt

SEQ ID NO: 29321 - DNA, 122 bp, Homo sapiens
  misc_feature (61)..(62): /note="This region represents a CpG dinucleotide"
  misc_feature (61)..(61): /note="Nucleotide may be methylated to form 5-methylcytosine"
caaatactggtctcagaccatggtgaggatgcgggtgcagggtgaggactacatagggtgcggtaggtcagtggatcagatccagttagccggggctcagccttgtgcccaggaggctaaag

SEQ ID NO: 29322 - DNA, 122 bp, Homo sapiens
  misc_feature (61)..(62): /note="This region represents a CpG dinucleotide"
  misc_feature (61)..(61): /note="Nucleotide may be methylated to form 5-methylcytosine"
cctatttttccccaggctccttagctaggtttattcctcttccagaaagacttttgttggcgcatacatgagttccattttcaattgacactaaactaacagagcagtctaccaagacagga

SEQ ID NO: 29323 - DNA, 122 bp, Homo sapiens
  misc_feature (61)..(62): /note="This region represents a CpG dinucleotide"
  misc_feature (61)..(61): /note="Nucleotide may be methylated to form 5-methylcytosine"
tggctcttcctgttccgtgccacactctggtgtgggtctataacatgctgtcggactctgcgagttgtgatactgaggccttgggcaaatcacacttgatgttccagggcttcagttttctc

SEQ ID NO: 29324 - DNA, 122 bp, Homo sapiens
  misc_feature (61)..(62): /note="This region represents a CpG dinucleotide"
  misc_feature (61)..(61): /note="Nucleotide may be methylated to form 5-methylcytosine"
gaagaagtctttatacttgcagggtctttgtacctttggaaatgagccctgtttatttcacgatactaatgcattactagcatatctggtgctttatcagttttcagttgcttttgcatacg

SEQ ID NO: 29325 - DNA, 122 bp, Homo sapiens
  misc_feature (61)..(62): /note="This region represents a CpG dinucleotide"
  misc_feature (61)..(61): /note="Nucleotide may be methylated to form 5-methylcytosine"
gtgccttgagtgccccgtgaagacttctctttaatgacctccaggtgtgttcctgccccacgcactcgggctgaacaaacgatccgcttcagaaaccccgcttctctgggcttctggcattt

SEQ ID NO: 29326 - DNA, 122 bp, Homo sapiens
  misc_feature (61)..(62): /note="This region represents a CpG dinucleotide"
  misc_feature (61)..(61): /note="Nucleotide may be methylated to form 5-methylcytosine"
tggtgaaatccagcaagggaaagtcacgttcaaagattattaagtgataaatgagaaaaacgcactagtggacaaaagatcttcagtaaaatggaagcacagaatgtgagaactattgaaag

SEQ ID NO: 29327 - DNA, 122 bp, Homo sapiens
  misc_feature (61)..(62): /note="This region represents a CpG dinucleotide"
  misc_feature (61)..(61): /note="Nucleotide may be methylated to form 5-methylcytosine"
atcctttgaagttggtaatgaggtcatccttctcccaagagtgaaagctacatttctacacgagttgtttcacagctagcctggtgtccagcagttgtccatgcagaccgggttcaccccta

SEQ ID NO: 29328 - DNA, 122 bp, Homo sapiens
  misc_feature (61)..(62): /note="This region represents a CpG dinucleotide"
  misc_feature (61)..(61): /note="Nucleotide may be methylated to form 5-methylcytosine"
cacctgcactatccatagctggctgcttatatattcttatcacattgttatgataaatggcgcagagtgaagctgtgctacccatgtggcagggagcctcctccccagcccctcctccctgt

SEQ ID NO: 29329 - DNA, 122 bp, Homo sapiens
  misc_feature (61)..(62): /note="This region represents a CpG dinucleotide"
  misc_feature (61)..(61): /note="Nucleotide may be methylated to form 5-methylcytosine"
ctagggcctaaggcacaactgccttgccctgggctgaattctaccctagggcagagttttcggtggcctcggtgtactcttagtagtatttctactaaaaagccaacatagagggcatagac

SEQ ID NO: 29330 - DNA, 122 bp, Homo sapiens
  misc_feature (61)..(62): /note="This region represents a CpG dinucleotide"
  misc_feature (61)..(61): /note="Nucleotide may be methylated to form 5-methylcytosine"
tcaggcacggaaatttcaacagtacttggcaatttcctagcagcttacaactgctgatcccgccaacacagggagtttagatgcagtttcctcgtccttctagtttctataaatgtccttcc

SEQ ID NO: 29331 - DNA, 122 bp, Homo sapiens
  misc_feature (61)..(62): /note="This region represents a CpG dinucleotide"
  misc_feature (61)..(61): /note="Nucleotide may be methylated to form 5-methylcytosine"
agaatcttaaaatgttttcattgtgaaagactggcaactctgctccacactctctagtgacgtcccatttctgtctgaataaaaaagcacagtgcttatgatggtggatactagctacagca

SEQ ID NO: 29332 - DNA, 122 bp, Homo sapiens
  misc_feature (61)..(62): /note="This region represents a CpG dinucleotide"
  misc_feature (61)..(61): /note="Nucleotide may be methylated to form 5-methylcytosine"
ggggcaggtccagaggctgagctgggatgctggctcccaactcagggtccttaggacccacggaccctgcctctgtgaagggtgcctgggtgagcgggaggccccgggctcaccttgatggg

SEQ ID NO: 29333 - DNA, 122 bp, Homo sapiens
  misc_feature (61)..(62): /note="This region represents a CpG dinucleotide"
  misc_feature (61)..(61): /note="Nucleotide may be methylated to form 5-methylcytosine"
ggaggaacaggtagtggccagagagcctgtctggagggacgttgctcacacctgagtgggcgtgtgggggtgagttgtgttctgggagcaaagagcaataacatcccccttctcccagcaag

SEQ ID NO: 29334 - DNA, 122 bp, Homo sapiens
  misc_feature (61)..(62): /note="This region represents a CpG dinucleotide"
  misc_feature (61)..(61): /note="Nucleotide may be methylated to form 5-methylcytosine"
tctcatgtaacaatgaatgagcaataattgaaaccaacactcatgctcgaatgcccaacacgagtagaattttggacatcctgatatgtgggtaatggcttgcataaacactgctattctgg

SEQ ID NO: 29335 - DNA, 122 bp, Homo sapiens
  misc_feature (61)..(62): /note="This region represents a CpG dinucleotide"
  misc_feature (61)..(61): /note="Nucleotide may be methylated to form 5-methylcytosine"
acagatcggggatcgggccgggggcagctggggtgggctcagcagagcagtccctggccccgcggttaattgaaataaccgggtcaatacacggccgccgggacccagccccatttgatctc

SEQ ID NO: 29336 - DNA, 122 bp, Homo sapiens
  misc_feature (61)..(62): /note="This region represents a CpG dinucleotide"
  misc_feature (61)..(61): /note="Nucleotide may be methylated to form 5-methylcytosine"
gtgtaagagcacatacttaccacaaatcctgcccttaggtctaaataacctcaatgtgatcgttcttcaattctacacatcacttctgaatcaccccttccctatggtatataagccctgag

SEQ ID NO: 29337 - DNA, 122 bp, Homo sapiens
  misc_feature (61)..(62): /note="This region represents a CpG dinucleotide"
  misc_feature (61)..(61): /note="Nucleotide may be methylated to form 5-methylcytosine"
aacagcaatagaaacagtgcagcctgcagtttgaattatgagaccatgttaatcaaagaacgggcaaccacttggtggcagcatactcaaattcaaataagaggaaatatttttaagtgaga

SEQ ID NO: 29338 - DNA, 122 bp, Homo sapiens
  misc_feature (61)..(62): /note="This region represents a CpG dinucleotide"
  misc_feature (61)..(61): /note="Nucleotide may be methylated to form 5-methylcytosine"
aaaattgctgactaccttcgatagcttgcttaacccattggatctgcggtgacttctcttcgtgatgagctgttatgaagtgcatatgagatgatgcatggaatgcctggagcatagtgagg

SEQ ID NO: 29339 - DNA, 122 bp, Homo sapiens
  misc_feature (61)..(62): /note="This region represents a CpG dinucleotide"
  misc_feature (61)..(61): /note="Nucleotide may be methylated to form 5-methylcytosine"
aatctcgttttgtcgctcaggctggagtgccctggcacgatctgggtttattgtaacctccgcctcccgcgttcaagcgattctcctgcctcagcctcctgagtagctgggactacagacac

SEQ ID NO: 29340 - DNA, 122 bp, Homo sapiens
  misc_feature (61)..(62): /note="This region represents a CpG dinucleotide"
  misc_feature (61)..(61): /note="Nucleotide may be methylated to form 5-methylcytosine"
ccaaaggcaccccacatgacatgaagcagcaactaggatcaggcaaagtctgtcagctgccgctgtatgttcaggaatataaacattactttacacaggtcacattcctaaatgagtgtgtt

SEQ ID NO: 29341 - DNA, 122 bp, Homo sapiens
  misc_feature (61)..(62): /note="This region represents a CpG dinucleotide"
  misc_feature (61)..(61): /note="Nucleotide may be methylated to form 5-methylcytosine"
tgcacccgtctatatttctttattaagcctaacgactggagtctttttcaaaaaagcacccgtctccaaatcctctcaattccagtgtggcaaacagcctctcacttacaacaaatagcaca

SEQ ID NO: 29342 - DNA, 122 bp, Homo sapiens
  misc_feature (61)..(62): /note="This region represents a CpG dinucleotide"
  misc_feature (61)..(61): /note="Nucleotide may be methylated to form 5-methylcytosine"
caaggatgtgtttttggaggggtcatttggaaagggaagagaaatgatgggaggagaaaacgataatcaaacctctgtgggagagagggtcacacagattttaacacctttaacatgggaag

SEQ ID NO: 29343 - DNA, 122 bp, Homo sapiens
  misc_feature (61)..(62): /note="This region represents a CpG dinucleotide"
  misc_feature (61)..(61): /note="Nucleotide may be methylated to form 5-methylcytosine"
cagaaaatgagaaatgaatttaaaatgagccaagacttgcaagagggagagggaaaaacacgagagagccccttctattattcctagcccgggaagagccttccagatttcctgggtatctt

SEQ ID NO: 29344 - DNA, 122 bp, Homo sapiens
  misc_feature (61)..(62): /note="This region represents a CpG dinucleotide"
  misc_feature (61)..(61): /note="Nucleotide may be methylated to form 5-methylcytosine"
atatgtagtgtaaatggctgactgttactgatctaacccaggccatttaacccatataagcgcaccctcctggtgcaattcagcaagttcttttgtcctcggtatttcctacaatccagcag

SEQ ID NO: 29345 - DNA, 122 bp, Homo sapiens
  misc_feature (61)..(62): /note="This region represents a CpG dinucleotide"
  misc_feature (61)..(61): /note="Nucleotide may be methylated to form 5-methylcytosine"
agcagtggggccgtcacaggcaggacagggctgaggcgccgatgtcaacagcagtggggccgtcacaggcggggcaggggctgaggcggcgatgtcaacggcagtggggccgtcacaggcgg

SEQ ID NO: 29346 - DNA, 122 bp, Homo sapiens
  misc_feature (61)..(62): /note="This region represents a CpG dinucleotide"
  misc_feature (61)..(61): /note="Nucleotide may be methylated to form 5-methylcytosine"
cagtgacatgcatgttttgtctgacaacctgtacttaccactgacctctgtcaatatgcacgttatttataatccctcttaatgtgccacctcagatcctctctgctccacctgtctctggg

SEQ ID NO: 29347 - DNA, 122 bp, Homo sapiens
  misc_feature (61)..(62): /note="This region represents a CpG dinucleotide"
  misc_feature (61)..(61): /note="Nucleotide may be methylated to form 5-methylcytosine"
gccctattcacctcggcaatgagatcactcagacctggggggaggcgcgttctgggagagcgtggtgacttccacagcaggggctcttgcatcagttctggttacccacgggagactgcatg

SEQ ID NO: 29348 - DNA, 122 bp, Homo sapiens
  misc_feature (61)..(62): /note="This region represents a CpG dinucleotide"
  misc_feature (61)..(61): /note="Nucleotide may be methylated to form 5-methylcytosine"
cagttccttgcacatactaggtagagatacagaaaatatttcttctctagcccatactaccgaaaggttatttgtttgtttgtttttggtaatacaagcatatgtgtgtttgctcctcagta

SEQ ID NO: 29349 - DNA, 122 bp, Homo sapiens
  misc_feature (61)..(62): /note="This region represents a CpG dinucleotide"
  misc_feature (61)..(61): /note="Nucleotide may be methylated to form 5-methylcytosine"
gtggctgccttctcgggagactcaaattctttggatctgcgcacgattcctgggtcccatcggggatgactggaaacccagtcttgacccatctccaggacctctacagaggcctctcaggg

SEQ ID NO: 29350 - DNA, 122 bp, Homo sapiens
  misc_feature (61)..(62): /note="This region represents a CpG dinucleotide"
  misc_feature (61)..(61): /note="Nucleotide may be methylated to form 5-methylcytosine"
agaagttctcctgcctccagctgagaagatgatcagattctagctgctcctggggaaagtcggtactcacagctggacacaaacatagcttgcaggaggaagagtgtcagagcaagagacag

SEQ ID NO: 29351 - DNA, 122 bp, Homo sapiens
  misc_feature (61)..(62): /note="This region represents a CpG dinucleotide"
  misc_feature (61)..(61): /note="Nucleotide may be methylated to form 5-methylcytosine"
ggcagggatgtcattcacttctgtgactcagtgctctgaatcaggcccagtgaagactgacgtgcagcctgtattggcagaatgaatgaataaatactacacacgcatattttgaattgaaa

SEQ ID NO: 29352 - DNA, 122 bp, Homo sapiens
  misc_feature (61)..(62): /note="This region represents a CpG dinucleotide"
  misc_feature (61)..(61): /note="Nucleotide may be methylated to form 5-methylcytosine"
gccagcaaggggtgggctgaggctttcttccctgtcacagcacaatttgggtgtgggccacgtgagatcatgggccaggcggtggaaaagacctcctgtgtgaggtcatctgcccgtcctcc

SEQ ID NO: 29353 - DNA, 122 bp, Homo sapiens
  misc_feature (61)..(62): /note="This region represents a CpG dinucleotide"
  misc_feature (61)..(61): /note="Nucleotide may be methylated to form 5-methylcytosine"
gacaagaggaggccacagccaaaacttgcttggcccttacaagcagagaccagatggggacgcagacagctcatcggctgccaactcggaacagagatgacagccaagaaccacatgtccca

SEQ ID NO: 29354 - DNA, 122 bp, Homo sapiens
  misc_feature (61)..(62): /note="This region represents a CpG dinucleotide"
  misc_feature (61)..(61): /note="Nucleotide may be methylated to form 5-methylcytosine"
tgcgcgctgaagaggcactggcgggaaccacgcccgggcgaatcccaagctccccgccagcggcgctaggtaacgtgtccctcacctggactcacccttgagagattctgggcctactctga

SEQ ID NO: 29355 - DNA, 122 bp, Homo sapiens
  misc_feature (61)..(62): /note="This region represents a CpG dinucleotide"
  misc_feature (61)..(61): /note="Nucleotide may be methylated to form 5-methylcytosine"
ctacaattaagccctttctagccaccaatgtaatttttccaaaaactccaggaaaagtctcgtttattcagttttgtttttgtttttgtttttgtttttgttttttgagacagagtcttgct

SEQ ID NO: 29356 - DNA, 122 bp, Homo sapiens
  misc_feature (61)..(62): /note="This region represents a CpG dinucleotide"
  misc_feature (61)..(61): /note="Nucleotide may be methylated to form 5-methylcytosine"
aaacctgtatattgaagagatgctgcacttctgtgtttattgcgacactactcacaataacgaatagtgttgcaataaaccaagccaagagatgggatgatcctaagtgtccatcagcagat

SEQ ID NO: 29357 - DNA, 122 bp, Homo sapiens
  misc_feature (61)..(62): /note="This region represents a CpG dinucleotide"
  misc_feature (61)..(61): /note="Nucleotide may be methylated to form 5-methylcytosine"
ccaaaacagttcccctcccacccatccaccctcctaccggggctgggtgacaaaaatgaacgccccagagatcttgccaagttctgggccacgctcagcccagggaacacgcaattccccgt

SEQ ID NO: 29358 - DNA, 122 bp, Homo sapiens
  misc_feature (61)..(62): /note="This region represents a CpG dinucleotide"
  misc_feature (61)..(61): /note="Nucleotide may be methylated to form 5-methylcytosine"
agtagctgtgaagtcccaagataaactatggttgaaaattgtttatcaaactctcgtgttcggcttgcctgttatcactaaagacattaaagaatactatagaaattgacctatgttcagac

SEQ ID NO: 29359 - DNA, 122 bp, Homo sapiens
  misc_feature (61)..(62): /note="This region represents a CpG dinucleotide"
  misc_feature (61)..(61): /note="Nucleotide may be methylated to form 5-methylcytosine"
gccatgcacctgcacagaggcccctgcaggcccgagggaccgtgcggaggtgggccccagcggtgaaggaaggggctccgccagggtgggagtggcctattaacttcccaggtgacaagcca

SEQ ID NO: 29360 - DNA, 122 bp, Homo sapiens
  misc_feature (61)..(62): /note="This region represents a CpG dinucleotide"
  misc_feature (61)..(61): /note="Nucleotide may be methylated to form 5-methylcytosine"
gatccctgaaaaggcccttaattcagctctatgagccattttcagagcagtttttcaatccgttctataataataatgatcatatatgacatatatatatattttgagatggagtctcactc

SEQ ID NO: 29361 - DNA, 122 bp, Homo sapiens
  misc_feature (61)..(62): /note="This region represents a CpG dinucleotide"
  misc_feature (61)..(61): /note="Nucleotide may be methylated to form 5-methylcytosine"
cccagatcatcccggtgaccagacgctcccaagatctagaaaaagcccctgcatcacagccgacaaatgatcttgatcagacgtcccagagaaaagtcactcgtggaagaatcctcctaaag

SEQ ID NO: 29362 - DNA, 122 bp, Homo sapiens
  misc_feature (61)..(62): /note="This region represents a CpG dinucleotide"
  misc_feature (61)..(61): /note="Nucleotide may be methylated to form 5-methylcytosine"
agaatctagacatgtgttaatgacaaatattattattcagattatatttacttttcaaatcgcaaaggaaaagaccataaaaaggcctggagcatgaaaataaccataggctaccttcctaa

SEQ ID NO: 29363 - DNA, 122 bp, Homo sapiens
  misc_feature (61)..(62): /note="This region represents a CpG dinucleotide"
  misc_feature (61)..(61): /note="Nucleotide may be methylated to form 5-methylcytosine"
agtatttccattcattatataatcatggggttgatcgaatccctgactgggcatctttctcgtctccctgctgtgaagtaacatatgggccctcctgctggttaagcacttgagtcaccttc

SEQ ID NO: 29364 - DNA, 122 bp, Homo sapiens
  misc_feature (61)..(62): /note="This region represents a CpG dinucleotide"
  misc_feature (61)..(61): /note="Nucleotide may be methylated to form 5-methylcytosine"
cccatttttataactgttccatatgttctatgttattgtatttgtatactatttttaacacgttgtaacaacatttcttaaagtagacaatattgtattgaatctttcaattaaattagaaa

SEQ ID NO: 29365 - DNA, 122 bp, Homo sapiens
  misc_feature (61)..(62): /note="This region represents a CpG dinucleotide"
  misc_feature (61)..(61): /note="Nucleotide may be methylated to form 5-methylcytosine"
gatgacaaaaccagaggttggagggatgtcctttgaagatgggaaaggggccaggagctacggaatgtaggcagcttctaccaactggaaaagcgaaggaaacagattcttccctgagcctc

SEQ ID NO: 29366 - DNA, 122 bp, Homo sapiens
  misc_feature (61)..(62): /note="This region represents a CpG dinucleotide"
  misc_feature (61)..(61): /note="Nucleotide may be methylated to form 5-methylcytosine"
attcttaagaagctatgaaatgcctctgaaaattccttgcaaccttggagtaacttgatccggagcctagacacttgattctagtccttgattttcttatcactttctgtaaacattgaata

SEQ ID NO: 29367 - DNA, 122 bp, Homo sapiens
  misc_feature (61)..(62): /note="This region represents a CpG dinucleotide"
  misc_feature (61)..(61): /note="Nucleotide may be methylated to form 5-methylcytosine"
tggcctgaggtttaatcctgtttcaaccacataacaattcacagtaggtctgttgaagggcggctcaagagttcagctgcaaccctgtttagctgtttagcataatcaacaacttcttgagt

SEQ ID NO: 29368 - DNA, 122 bp, Homo sapiens
  misc_feature (61)..(62): /note="This region represents a CpG dinucleotide"
  misc_feature (61)..(61): /note="Nucleotide may be methylated to form 5-methylcytosine"
tggcagagctgcgtctgcactgttttcccttgtggcgttgtggtgtcggcccgtttggtgcgcagctcagcatccgttcagacatgtggctgccatcctgttcctgatgaggcaaatggctg

SEQ ID NO: 29369 - DNA, 122 bp, Homo sapiens
  misc_feature (61)..(62): /note="This region represents a CpG dinucleotide"
  misc_feature (61)..(61): /note="Nucleotide may be methylated to form 5-methylcytosine"
aaaaatagttcgctgatccctagcttggaaggttcttcctcactgcacttgcctggttcacgccctcgcattcttcatatcttggcttcaatgtccctgaccttttggtgttaagttctcct

SEQ ID NO: 29370 - DNA, 122 bp, Homo sapiens
  misc_feature (61)..(62): /note="This region represents a CpG dinucleotide"
  misc_feature (61)..(61): /note="Nucleotide may be methylated to form 5-methylcytosine"
ccgctctgctcgcaggtttgggctagtctggggcggggacttgggagcgcctaaaacttgcgaggagggcggggccgcagaccggtcctttaaaggttggaagtggccccgaggcgccggca

SEQ ID NO: 29371 - DNA, 122 bp, Homo sapiens
  misc_feature (61)..(62): /note="This region represents a CpG dinucleotide"
  misc_feature (61)..(61): /note="Nucleotide may be methylated to form 5-methylcytosine"
catgttaagttttcttcccaggccaggctatcgggttacaacttctaataaaccctcctgcgaaaagacatttctttgtctggggaccaccgagaactaaccaaacaaaacaccttcaattg

SEQ ID NO: 29372 - DNA, 122 bp, Homo sapiens
  misc_feature (61)..(62): /note="This region represents a CpG dinucleotide"
  misc_feature (61)..(61): /note="Nucleotide may be methylated to form 5-methylcytosine"
tgttctttctggtcaagctgcatttgattaaaggaaaccgaaatctacttagggttcaggcgattagaataagaggaagagctggcctttctacagcaatgctagcaggaaaatagaaaatg

SEQ ID NO: 29373 - DNA, 122 bp, Homo sapiens
  misc_feature (61)..(62): /note="This region represents a CpG dinucleotide"
  misc_feature (61)..(61): /note="Nucleotide may be methylated to form 5-methylcytosine"
tttaggacttcatgaacttactttcagtttagtttccacataaggagaaacttacagcaacgtagaaaccaagagattgatatgaataaatgatgtgactaactcacaaataccatgtcatt

SEQ ID NO: 29374 - DNA, 122 bp, Homo sapiens
  misc_feature (61)..(62): /note="This region represents a CpG dinucleotide"
  misc_feature (61)..(61): /note="Nucleotide may be methylated to form 5-methylcytosine"
tgtggaaagcacttacttttaaagaggatgaacatttttcaattattacacattgtttttcgggttagtctaaactcgatgggcataacaagactctgtatcatgtctaatattgtttcttc

SEQ ID NO: 29375 - DNA, 122 bp, Homo sapiens
  misc_feature (61)..(62): /note="This region represents a CpG dinucleotide"
  misc_feature (61)..(61): /note="Nucleotide may be methylated to form 5-methylcytosine"
agataagcacaaacttgacaagacactacaccatcaggagaaaaagaacaatttgttgagcgtctacaatgtgccaggtcaaggtgccaggtgctttcagatgtgttaccacatctgtcatt

SEQ ID NO: 29376 - DNA, 122 bp, Homo sapiens
  misc_feature (61)..(62): /note="This region represents a CpG dinucleotide"
  misc_feature (61)..(61): /note="Nucleotide may be methylated to form 5-methylcytosine"
ttatttacatgcgtgttgcagtttttgataatgcgattgctgctgctaatgtgactaacgcgatgccgatgaacatctcggcgttttttggtgcaggataagcgggtgtagactctgtctgt

SEQ ID NO: 29377 - DNA, 122 bp, Homo sapiens
  misc_feature (61)..(62): /note="This region represents a CpG dinucleotide"
  misc_feature (61)..(61): /note="Nucleotide may be methylated to form 5-methylcytosine"
gtggttcgtgaggacgcgtcctgggctgccctgagaagcctacgtctccccttcgaggcccgggaagacctccaaccccgctgacaatgctgggccctcagccagacctgccctgcgtgcca

SEQ ID NO: 29378 - DNA, 122 bp, Homo sapiens
  misc_feature (61)..(62): /note="This region represents a CpG dinucleotide"
  misc_feature (61)..(61): /note="Nucleotide may be methylated to form 5-methylcytosine"
tttctccggaaggttccagaatgcttttgtttgtgaaccctttctgggcaaatgtaagtgcgaaacatgatgtgtgacttaggtcagactgaagaaggaacttcctgctagtcagcaaggcc

SEQ ID NO: 29379 - DNA, 122 bp, Homo sapiens
  misc_feature (61)..(62): /note="This region represents a CpG dinucleotide"
  misc_feature (61)..(61): /note="Nucleotide may be methylated to form 5-methylcytosine"
aggctcaagcgatcgtcctgccttggccttccaaagtgctggcattgcagacatgaaccacggcacccagcaaggtagtttgcttgtgtaaaacaaaaactccaaagtatttggaatgcaaa

SEQ ID NO: 29380 - DNA, 122 bp, Homo sapiens
  misc_feature (61)..(62): /note="This region represents a CpG dinucleotide"
  misc_feature (61)..(61): /note="Nucleotide may be methylated to form 5-methylcytosine"
acacacactcaccctgtcctgccaccattaggtaaagtttcctgccactccttgcacatccgtcattaccaaagagatattaaactagacaactgtaaaaaaataacaccttcagtggcaaa

SEQ ID NO: 29381 - DNA, 122 bp, Homo sapiens
  misc_feature (61)..(62): /note="This region represents a CpG dinucleotide"
  misc_feature (61)..(61): /note="Nucleotide may be methylated to form 5-methylcytosine"
tgcccctgggtcctcgagggttatggcttgtccctggtcagtcctgtctgatcgaggcctcgcctctctgcccctccctgcccagttcctacccacctggctaaggccagtgcccattttta

SEQ ID NO: 29382 - DNA, 122 bp, Homo sapiens
  misc_feature (61)..(62): /note="This region represents a CpG dinucleotide"
  misc_feature (61)..(61): /note="Nucleotide may be methylated to form 5-methylcytosine"
agaaaagaagagctgagcatttcacaaacggagagcaggtgtctggtgtttggtgtgttccggtcgagtgtagtcaggaaaaggaagccgcgttgtctgcggggcgggggcctgtgcttgtg

SEQ ID NO: 29383 - DNA, 122 bp, Homo sapiens
  misc_feature (61)..(62): /note="This region represents a CpG dinucleotide"
  misc_feature (61)..(61): /note="Nucleotide may be methylated to form 5-methylcytosine"
aaaatcacccttcaaatctttacctaaaagatcctgattagtaactaacgtggttcagcccgaaaaatgatcaactgattacttagcatttggaaccaactgtccacagttatagattgtac

SEQ ID NO: 29384 - DNA, 122 bp, Homo sapiens
  misc_feature (61)..(62): /note="This region represents a CpG dinucleotide"
  misc_feature (61)..(61): /note="Nucleotide may be methylated to form 5-methylcytosine"
aagcagggaatgagatgtgctgtgaggtgtaactgactcaggttccatctggcagcctctcggaggagctgccgagtagcccagtccctctctgtcaagcctaattctctccttctctttcc

SEQ ID NO: 29385 - DNA, 122 bp, Homo sapiens
  misc_feature (61)..(62): /note="This region represents a CpG dinucleotide"
  misc_feature (61)..(61): /note="Nucleotide may be methylated to form 5-methylcytosine"
ctgagagttggaagctctgagtcatgactgagttggaagcttacatgttgatttacaaggcgtctttgcccattacatttatttacatgtccagaggtcatggcctgaaaggcttggctcca

SEQ ID NO: 29386 - DNA, 122 bp, Homo sapiens
  misc_feature (61)..(62): /note="This region represents a CpG dinucleotide"
  misc_feature (61)..(61): /note="Nucleotide may be methylated to form 5-methylcytosine"
acaggcttaagccaccgcgcccagcctactctgttttattaaagagaactgaagttctgacgggttcagaacctctcacaaagtggctgaaggaacaccagctttagcagaaactgatgaaa

SEQ ID NO: 29387 - DNA, 122 bp, Homo sapiens
  misc_feature (61)..(62): /note="This region represents a CpG dinucleotide"
  misc_feature (61)..(61): /note="Nucleotide may be methylated to form 5-methylcytosine"
ttatatacagttctcctctactgatatagctgataacaaactctcctgtctctgaataaacgaacagtatatttaagatttgtgttgtgtgagggattatggaaaagaacaaacttaaattg

SEQ ID NO: 29388 - DNA, 122 bp, Homo sapiens
  misc_feature (61)..(62): /note="This region represents a CpG dinucleotide"
  misc_feature (61)..(61): /note="Nucleotide may be methylated to form 5-methylcytosine"
attgttttaaagatttctataatggctgctatttgatagctgtatttgttgagtttgctacggttatcaaatatttatggagcacccattcatttgcggtgaggagttattttaaaatgttt

SEQ ID NO: 29389 - DNA, 122 bp, Homo sapiens
  misc_feature (61)..(62): /note="This region represents a CpG dinucleotide"
  misc_feature (61)..(61): /note="Nucleotide may be methylated to form 5-methylcytosine"
caaaaattagctgggcgtggtggcgcatgcctgtaatcctagctactcgggaggctgaggcgggagactcacttgaaccagggggcagagcttgcagtgagctgaggtcacaccattgcact

SEQ ID NO: 29390 - DNA, 122 bp, Homo sapiens
  misc_feature (61)..(62): /note="This region represents a CpG dinucleotide"
  misc_feature (61)..(61): /note="Nucleotide may be methylated to form 5-methylcytosine"
aaatttatttccccctgcttttctgggtaccaaatcaggtcaaggaaatttcctcctaaccgccccccacccccattaattcatttgcattgtcccaaagaagggatgatagattttctacc

SEQ ID NO: 29391 - DNA, 122 bp, Homo sapiens
  misc_feature (61)..(62): /note="This region represents a CpG dinucleotide"
  misc_feature (61)..(61): /note="Nucleotide may be methylated to form 5-methylcytosine"
gagagagaaccacatatttctctctctccacaccaatgtaatgaagcctgaggctaaagacgtccacagcaactgctgaattataatctgtggaagcagggttacaagagataacctttcag

SEQ ID NO: 29392 - DNA, 122 bp, Homo sapiens
  misc_feature (61)..(62): /note="This region represents a CpG dinucleotide"
  misc_feature (61)..(61): /note="Nucleotide may be methylated to form 5-methylcytosine"
gtgagtaatcggtagtgcgtgcaggccctcggagatccctgaggtgtgattattttcatgcgtacatttctgtcgtcatcctccaaagggtgctttgtcatttccttcactctttcctcact

SEQ ID NO: 29393 - DNA, 122 bp, Homo sapiens
  misc_feature (61)..(62): /note="This region represents a CpG dinucleotide"
  misc_feature (61)..(61): /note="Nucleotide may be methylated to form 5-methylcytosine"
cctcccacctcagccacccaaagtgctgggattactggcatgagccaccacgccctgtcacgggactttaggtcaaacacattattacatttgtagtgacaaatgaaatgtagagatatcag

SEQ ID NO: 29394 - DNA, 122 bp, Homo sapiens
  misc_feature (61)..(62): /note="This region represents a CpG dinucleotide"
  misc_feature (61)..(61): /note="Nucleotide may be methylated to form 5-methylcytosine"
tttatttacttgtctggtttaccgtctgtggctcccaccccactcctagaatatacatttcgtaaatagctagaaaagaaatttcttgcccagggatcttctcccttccttcctctgcatgc

SEQ ID NO: 29395 - DNA, 122 bp, Homo sapiens
  misc_feature (61)..(62): /note="This region represents a CpG dinucleotide"
  misc_feature (61)..(61): /note="Nucleotide may be methylated to form 5-methylcytosine"
gatcagggagttgactgcccaaaggtaggatgatcctgcttggaatgaacataacagaggcggcagatgacaaggcaggaggggttaacgacttttccttttatagaaggcggatccagggt

SEQ ID NO: 29396 - DNA, 122 bp, Homo sapiens
  misc_feature (61)..(62): /note="This region represents a CpG dinucleotide"
  misc_feature (61)..(61): /note="Nucleotide may be methylated to form 5-methylcytosine"
aatgatgacaccagaaccaggctctgtccccagaccctgtggtcattcctgtggggagaacgacacacaacacacaactgaatgcagttaggataatgtcgagtggccagtgctgtgtggaa

SEQ ID NO: 29397 - DNA, 122 bp, Homo sapiens
  misc_feature (61)..(62): /note="This region represents a CpG dinucleotide"
  misc_feature (61)..(61): /note="Nucleotide may be methylated to form 5-methylcytosine"
atgcctgggcagtccaggacttgacttcttactcctagtgctccaaaataatccaatgaccgcaatctaagggactgtgcagatgaagcagggacttactcctgcctcttcctggtagcttt

SEQ ID NO: 29398 - DNA, 122 bp, Homo sapiens
  misc_feature (61)..(62): /note="This region represents a CpG dinucleotide"
  misc_feature (61)..(61): /note="Nucleotide may be methylated to form 5-methylcytosine"
gtattatcatgtgttggtaacaacctcttccctcatagtacttacataagtaagcacttacgtaagtaagcacttacgtaagtacttacataagtaagtacatagtgatgtacttacatcac

SEQ ID NO: 29399 - DNA, 122 bp, Homo sapiens
  misc_feature (61)..(62): /note="This region represents a CpG dinucleotide"
  misc_feature (61)..(61): /note="Nucleotide may be methylated to form 5-methylcytosine"
taagacttacaaaggtcaaggaacttgcctaaagttctacagccagtaactggcaagtcccgccctctttggatttgagcctccagctcttaacctcaaacaagaagactgctggtgcaggt

SEQ ID NO: 29400 - DNA, 122 bp, Homo sapiens
  misc_feature (61)..(62): /note="This region represents a CpG dinucleotide"
  misc_feature (61)..(61): /note="Nucleotide may be methylated to form 5-methylcytosine"
gggcctcagggctcaggaggccgtgatgaagccagcaggtgaactgcaccctggagcctccgacggggcggccacgggcagcgaagaacccggaaaaacaggttcgaggcagacacaagatc

SEQ ID NO: 29401 - DNA, 122 bp, Homo sapiens
  misc_feature (61)..(62): /note="This region represents a CpG dinucleotide"
  misc_feature (61)..(61): /note="Nucleotide may be methylated to form 5-methylcytosine"
ggactgaacaaagaggaagccagagagcagaggagtatgaccctcttgtccacaccctggcgaggcaacaaaggctgggtgtgcccttccaccaaagccttaaggtggtggtggctctgctg

SEQ ID NO: 29402 - DNA, 122 bp, Homo sapiens
  misc_feature (61)..(62): /note="This region represents a CpG dinucleotide"
  misc_feature (61)..(61): /note="Nucleotide may be methylated to form 5-methylcytosine"
tagtattctttatctcataagtaagattgtccccatttcacagatgaaggctcagagtgtcgtgaaagttagagcacccaagttgcacgactggcgagtccagagccggctctgtgtgctgt

SEQ ID NO: 29403 - DNA, 122 bp, Homo sapiens
  misc_feature (61)..(62): /note="This region represents a CpG dinucleotide"
  misc_feature (61)..(61): /note="Nucleotide may be methylated to form 5-methylcytosine"
tccatggatcagccacagtgactcaggggccctcaaaggaggccttactcacatgtagaacggcaaggcctgccagctcaccagagcagggttcctgtaaatcctgccaaccagtagatcta

SEQ ID NO: 29404 - DNA, 122 bp, Homo sapiens
  misc_feature (61)..(62): /note="This region represents a CpG dinucleotide"
  misc_feature (61)..(61): /note="Nucleotide may be methylated to form 5-methylcytosine"
agtcataaataacactttcaaattagagaatgattagttttgtctgggtcttaaaagtaacgaatgtgaagatagacaagatcatttagaaaagatatgttggagaacacaacctatcattg

SEQ ID NO: 29405 - DNA, 122 bp, Homo sapiens
  misc_feature (61)..(62): /note="This region represents a CpG dinucleotide"
  misc_feature (61)..(61): /note="Nucleotide may be methylated to form 5-methylcytosine"
gtgattcaattctaatattttgtccttgtaatcttgtacctgggttaatgcaccagcctccgctggtagagggagccacaagtgcagagatctgagataggacctggcaaagagcctagtaa

SEQ ID NO: 29406 - DNA, 122 bp, Homo sapiens
  misc_feature (61)..(62): /note="This region represents a CpG dinucleotide"
  misc_feature (61)..(61): /note="Nucleotide may be methylated to form 5-methylcytosine"
tcttggttgtctaggaaatgatcagttactaagaaaaaagtaagagagtcagttgcattacgcacagacttgtgctcagaaaaggggtacaaggcagccttatattccaggtaagatggtgg

SEQ ID NO: 29407 - DNA, 122 bp, Homo sapiens
  misc_feature (61)..(62): /note="This region represents a CpG dinucleotide"
  misc_feature (61)..(61): /note="Nucleotide may be methylated to form 5-methylcytosine"
gcttcagcatgcatattattaactagagttccaaatttgtttccagttctttttttctttcgtatgtaaaattaacatacaatgaaattttttcccattgtatgtaaaattaacatacaacg

SEQ ID NO: 29408 - DNA, 122 bp, Homo sapiens
  misc_feature (61)..(62): /note="This region represents a CpG dinucleotide"
  misc_feature (61)..(61): /note="Nucleotide may be methylated to form 5-methylcytosine"
taaaacctttgtgaaggcttctctgtctgtcaggtttacttcagaacaacaccagattcccgtggcatggtctttaccatgtgaccaaaatcatcttcaaagattcagccaggccactggcc

SEQ ID NO: 29409 - DNA, 122 bp, Homo sapiens
  misc_feature (61)..(62): /note="This region represents a CpG dinucleotide"
  misc_feature (61)..(61): /note="Nucleotide may be methylated to form 5-methylcytosine"
acctgtcacacagaattaaacaaaagaagttattaatagttcaatgaaaggtgacactcacgccaaatacttggttttgaggaggatcacatgagataatgcatgcaaaagtgctctgtaaa

SEQ ID NO: 29410 - DNA, 122 bp, Homo sapiens
  misc_feature (61)..(62): /note="This region represents a CpG dinucleotide"
  misc_feature (61)..(61): /note="Nucleotide may be methylated to form 5-methylcytosine"
tcgtcacggtgaccttggaaagcttcccggtgtctgaatcatttccagcaggtgctggtgcgctcacaacatcagaaggggaaggacgtgaagtcatctgagggcagggtgaaatcagcgag

SEQ ID NO: 29411 - DNA, 122 bp, Homo sapiens
  misc_feature (61)..(62): /note="This region represents a CpG dinucleotide"
  misc_feature (61)..(61): /note="Nucleotide may be methylated to form 5-methylcytosine"
aatcggagatcagggtttacagacagctcccaggtgatggtgctgcacagctggggcctccgtatttttcctctgaatgcctgaggaggtgatcctgctgagccgccaaggcggggaacacc

SEQ ID NO: 29412 - DNA, 122 bp, Homo sapiens
  misc_feature (61)..(62): /note="This region represents a CpG dinucleotide"
  misc_feature (61)..(61): /note="Nucleotide may be methylated to form 5-methylcytosine"
tacaggatccagcaagtctttgaagtcatgcatgctcatcttcctggcatctgtcctatgcgcataacacatctgcaactgactggctcagttcaaacctaaggttagcaaattcagagcca

SEQ ID NO: 29413 - DNA, 122 bp, Homo sapiens
  misc_feature (61)..(62): /note="This region represents a CpG dinucleotide"
  misc_feature (61)..(61): /note="Nucleotide may be methylated to form 5-methylcytosine"
cattattctttagttaattgaacaagtgttatttccattttctaaatgaacaaactaaaacgaagacacctaaatcacttgcctaagattacacagctgaactcagactagaactcagaatg

SEQ ID NO: 29414 - DNA, 122 bp, Homo sapiens
  misc_feature (61)..(62): /note="This region represents a CpG dinucleotide"
  misc_feature (61)..(61): /note="Nucleotide may be methylated to form 5-methylcytosine"
acgcagaggtgagtcaccctaaaaactcagtgaagtagtaacagcgccaggcatgaactccgctttcggccaagccaaacaaatagcctggagggaaggggtggtggtgggggtgaggagct

SEQ ID NO: 29415 - DNA, 122 bp, Homo sapiens
  misc_feature (61)..(62): /note="This region represents a CpG dinucleotide"
  misc_feature (61)..(61): /note="Nucleotide may be methylated to form 5-methylcytosine"
tacagcacattacataaagtgaaggcgggagtctcctaggtactttaccctctgtgacctcgttcatactgtttctttagcttaaagtgacctttcccaattctctagtttccaaatcctgt

SEQ ID NO: 29416 - DNA, 122 bp, Homo sapiens
  misc_feature (61)..(62): /note="This region represents a CpG dinucleotide"
  misc_feature (61)..(61): /note="Nucleotide may be methylated to form 5-methylcytosine"
tggttttgtttgtatttaaattgcaagttttgaactgtcagcaacacctaacagagttgacggatcactgggctcctgcctaataaactctgttcaccgacttcacatactcttggttttcc

SEQ ID NO: 29417 - DNA, 122 bp, Homo sapiens
  misc_feature (61)..(62): /note="This region represents a CpG dinucleotide"
  misc_feature (61)..(61): /note="Nucleotide may be methylated to form 5-methylcytosine"
cccatccctcagggtgcttcaagcagcaaacactgagatcgctggtttacgtttcatagacggcctcgagggcacaagcagggcagtggactcattctgatataaacccatgaccctgggaa

SEQ ID NO: 29418 - DNA, 122 bp, Homo sapiens
  misc_feature (61)..(62): /note="This region represents a CpG dinucleotide"
  misc_feature (61)..(61): /note="Nucleotide may be methylated to form 5-methylcytosine"
ttggattttcatgtcttggctttatccaggacacctcccttcttaaagtcatgtttcagtcgtggaaactattcctttgttgaggtggaagaggaggtgataagaagtgggtgcttgttaat

SEQ ID NO: 29419 - DNA, 122 bp, Homo sapiens
  misc_feature (61)..(62): /note="This region represents a CpG dinucleotide"
  misc_feature (61)..(61): /note="Nucleotide may be methylated to form 5-methylcytosine"
tgggtactcagggtgcgatgtgtacacagatctgaatgcagacgcacgtgcccatgagcacgcacgtccagagagacgcacgtctgcttatccacaaggtgcacgcgtgtctggatccgcac

SEQ ID NO: 29420 - DNA, 122 bp, Homo sapiens
  misc_feature (61)..(62): /note="This region represents a CpG dinucleotide"
  misc_feature (61)..(61): /note="Nucleotide may be methylated to form 5-methylcytosine"
tgcctttcactcccaatctacttttaagtacacagatgttataggtccataatatcttaccggaagaagagactttcttatctggttcaactctagatttgaaactcctcacccataattta

SEQ ID NO: 29421 - DNA, 122 bp, Homo sapiens
  misc_feature (61)..(62): /note="This region represents a CpG dinucleotide"
  misc_feature (61)..(61): /note="Nucleotide may be methylated to form 5-methylcytosine"
acttaccaaagctgactttgagacttactacagtattcaagatggtatggcattagtctacggatcaacagactaataaagcagaatacagagcacagaaatagaccacagatatatggtca

SEQ ID NO: 29422 - DNA, 122 bp, Homo sapiens
  misc_feature (61)..(62): /note="This region represents a CpG dinucleotide"
  misc_feature (61)..(61): /note="Nucleotide may be methylated to form 5-methylcytosine"
ctggctggcagcttaagcctgagtcagtcttcttcgccttttgtaattgtcttaagtaggcgtggctacgtggctacaagtgcgtcgtcaaaacggggaatttacagggaagaattcagttt

SEQ ID NO: 29423 - DNA, 122 bp, Homo sapiens
  misc_feature (61)..(62): /note="This region represents a CpG dinucleotide"
  misc_feature (61)..(61): /note="Nucleotide may be methylated to form 5-methylcytosine"
agagaaatgaaactgcagatgcaagaagtcagggcgattctaccccagagcaggacgtgtcgagctacctgtgcaaagccccgagcgtggggtctctccttcaaacgcgagatacttactgc

SEQ ID NO: 29424 - DNA, 122 bp, Homo sapiens
  misc_feature (61)..(62): /note="This region represents a CpG dinucleotide"
  misc_feature (61)..(61): /note="Nucleotide may be methylated to form 5-methylcytosine"
cactcaaaatctggtccaagtcctggtgtggtcctgaaactgttgcttgctggtttaagacgagataagtactgaaactgagagtaagtgtatcttaatctgttcaggctactatagaagaa

SEQ ID NO: 29425 - DNA, 122 bp, Homo sapiens
  misc_feature (61)..(62): /note="This region represents a CpG dinucleotide"
  misc_feature (61)..(61): /note="Nucleotide may be methylated to form 5-methylcytosine"
aagcacaaggctcggcaacacgagacacaggccccagcacacatagccccgaggccgcaacgaggccacccaacacctgccctcagacatacttctggtctgtggccttgtcctttcctcct

SEQ ID NO: 29426 - DNA, 122 bp, Homo sapiens
  misc_feature (61)..(62): /note="This region represents a CpG dinucleotide"
  misc_feature (61)..(61): /note="Nucleotide may be methylated to form 5-methylcytosine"
gccttccttgtttggtggcatctctaaaccaagaatgtcaacttctgcctttagaaaactcgtgatcctgcctgtgccaccttccagtggcatcatccccactgctgtccactaagtttggg

SEQ ID NO: 29427 - DNA, 122 bp, Homo sapiens
  misc_feature (61)..(62): /note="This region represents a CpG dinucleotide"
  misc_feature (61)..(61): /note="Nucleotide may be methylated to form 5-methylcytosine"
tgctcccttccacaagggatggcatcttactcaatcagattgcacaagcctgacacggggcgtcatcccctgccaagcaatggatcttcaactcgttatctattttctcttctgcacatttc

SEQ ID NO: 29428 - DNA, 122 bp, Homo sapiens
  misc_feature (61)..(62): /note="This region represents a CpG dinucleotide"
  misc_feature (61)..(61): /note="Nucleotide may be methylated to form 5-methylcytosine"
aacaatgacagaggacatgggtgagtggcatttggcaagcaggataagtcactatcctttcgtgccttactaaaattagggaggaaaattagttcctatattataaagtagtgtttggcaac

SEQ ID NO: 29429 - DNA, 122 bp, Homo sapiens
  misc_feature (61)..(62): /note="This region represents a CpG dinucleotide"
  misc_feature (61)..(61): /note="Nucleotide may be methylated to form 5-methylcytosine"
tttaattaatttttgtttaaaataagcacatgcagggagcagcactgtgctggacagtgccgttttaggctctgtaaccaacatcagaggactttttccttttcttgtcccacggcaacctt

SEQ ID NO: 29430 - DNA, 122 bp, Homo sapiens
  misc_feature (61)..(62): /note="This region represents a CpG dinucleotide"
  misc_feature (61)..(61): /note="Nucleotide may be methylated to form 5-methylcytosine"
tataaaagcctagacctgatggtagtgtttctcttctagcccttgggagccacgttgctgcgtgatgaagtgatctaagcagaaaccttgcttcatgctctcttccctatcccatccacctc

SEQ ID NO: 29431 - DNA, 122 bp, Homo sapiens
  misc_feature (61)..(62): /note="This region represents a CpG dinucleotide"
  misc_feature (61)..(61): /note="Nucleotide may be methylated to form 5-methylcytosine"
atcaaagcagaattgaaccgcccccttggtagacctgagaaatgtagacagacctgttggcgagccatgaaaatgttgcagagagagtcatcagaggcatctgtagctaaacatgctatgca

SEQ ID NO: 29432 - DNA, 122 bp, Homo sapiens
  misc_feature (61)..(62): /note="This region represents a CpG dinucleotide"
  misc_feature (61)..(61): /note="Nucleotide may be methylated to form 5-methylcytosine"
tatacacatagcctgaaggcagttttatacaatgttttcagtaattttgtgcatgaaacacgtgatgcatcatacaaggtcaggtgtggaattttccacctgctgtgtcatgtgggtgctca

SEQ ID NO: 29433 - DNA, 122 bp, Homo sapiens
  misc_feature (61)..(62): /note="This region represents a CpG dinucleotide"
  misc_feature (61)..(61): /note="Nucleotide may be methylated to form 5-methylcytosine"
cccttccagccgtgatgactgtgcctcagcctgccctttgtcctcgcagctgctgtcacgcgtgtgacacaagagaacactgatgcagccctggccatcaatgggcatcaagccaggcactt

SEQ ID NO: 29434 - DNA, 122 bp, Homo sapiens
  misc_feature (61)..(62): /note="This region represents a CpG dinucleotide"
  misc_feature (61)..(61): /note="Nucleotide may be methylated to form 5-methylcytosine"
aaatgctcattaagtgaaagatgaccagaaatgtacctgctaacttccaactcttcaacacgtcacattgtgatgtcagtgagggcttaaagggaatatggtggttggctgatttcacatcc

SEQ ID NO: 29435 - DNA, 122 bp, Homo sapiens
  misc_feature (61)..(62): /note="This region represents a CpG dinucleotide"
  misc_feature (61)..(61): /note="Nucleotide may be methylated to form 5-methylcytosine"
accgcgcccggcctgcatccagcagcttttgctgggttaggagtaatcacagccctgcctcgttgcttgatttgcaggcagcacccggtacacacccaagacaggcagcaccatctacactg

SEQ ID NO: 29436 - DNA, 122 bp, Homo sapiens
  misc_feature (61)..(62): /note="This region represents a CpG dinucleotide"
  misc_feature (61)..(61): /note="Nucleotide may be methylated to form 5-methylcytosine"
acacccaacaggtagcccaagacaagagaagctgtgttttgtcctctgcccacctagccacgccttcctagctccttccaaggcttaagtgggaagtattcaaaactggtccatgcacatga

SEQ ID NO: 29437 - DNA, 122 bp, Homo sapiens
  misc_feature (61)..(62): /note="This region represents a CpG dinucleotide"
  misc_feature (61)..(61): /note="Nucleotide may be methylated to form 5-methylcytosine"
tagatgacataatcacatgggctgactttttgaccctctttttgactacctcttttaaatcgctttttgcacaaatcacagcctaagtgacagcagataacattttcttcccctctagcacc

SEQ ID NO: 29438 - DNA, 122 bp, Homo sapiens
  misc_feature (61)..(62): /note="This region represents a CpG dinucleotide"
  misc_feature (61)..(61): /note="Nucleotide may be methylated to form 5-methylcytosine"
atctgaggccatgtggccactggatccttgctctcacctgacagactagaggggttatttcgtgtgctccctcaccaaagcctgtgaggtgcctgcaggtgcaaggggcagcatgcctccca

SEQ ID NO: 29439 - DNA, 122 bp, Homo sapiens
  misc_feature (61)..(62): /note="This region represents a CpG dinucleotide"
  misc_feature (61)..(61): /note="Nucleotide may be methylated to form 5-methylcytosine"
gatacagcagcaaacaaaaccgaccatccctgccctcatggagcaaattttgcagtgaagcgagacaggcaataaacaaggaaaatataagtgttgcggaggtaaatgataaactagtaaaa

SEQ ID NO: 29440 - DNA, 122 bp, Homo sapiens
  misc_feature (61)..(62): /note="This region represents a CpG dinucleotide"
  misc_feature (61)..(61): /note="Nucleotide may be methylated to form 5-methylcytosine"
tgtgggtgggcagtaaagccagctgtcagggttgcaggcccggacttggtcctggattgtcgcctgtggatcagtttggcctcacacattctggaaaggcagaacatttttttgctatacaa

SEQ ID NO: 29441 - DNA, 122 bp, Homo sapiens
  misc_feature (61)..(62): /note="This region represents a CpG dinucleotide"
  misc_feature (61)..(61): /note="Nucleotide may be methylated to form 5-methylcytosine"
tggactcactgagttcagccttcactgagaaatgtggaaattgaggctcagagaggtcagcgactcacccaaggccgggtagggcctgaaacccagtcttctgactcctagcccagaacaga

SEQ ID NO: 29442 - DNA, 122 bp, Homo sapiens
  misc_feature (61)..(62): /note="This region represents a CpG dinucleotide"
  misc_feature (61)..(61): /note="Nucleotide may be methylated to form 5-methylcytosine"
gtggccagttgatcccctgtggagacagtaaagattaagaggatcataaactgcgtccagcggctgccccgggagaaatctcctcaagccagagcctgtgctgtgaggggcttcgggacctt

SEQ ID NO: 29443 - DNA, 122 bp, Homo sapiens
  misc_feature (61)..(62): /note="This region represents a CpG dinucleotide"
  misc_feature (61)..(61): /note="Nucleotide may be methylated to form 5-methylcytosine"
ttaaaatgcttagccatcagcgtatgcctctattttttaagggctttttataagcaaatacgggtagaaaaacattggcagtttgagagtaaaataaacatatataactcaccaactgactg

SEQ ID NO: 29444 - DNA, 122 bp, Homo sapiens
  misc_feature (61)..(62): /note="This region represents a CpG dinucleotide"
  misc_feature (61)..(61): /note="Nucleotide may be methylated to form 5-methylcytosine"
ttttgaaaatacctcaaacaacatatataaatcagaccaaggatattaatctcaggccaccgccatagtgaggctttgaagccaggggaaggtggtgagaccttcttgtttgttaaggaaga

SEQ ID NO: 29445 - DNA, 122 bp, Homo sapiens
  misc_feature (61)..(62): /note="This region represents a CpG dinucleotide"
  misc_feature (61)..(61): /note="Nucleotide may be methylated to form 5-methylcytosine"
gagggtgtacacagacacagctcacacaagcacacacccacaggtgtcacactcatggcacgaatagacacacgctcacaaacacacagacccacgagggcagggcagctgactctgcatac

SEQ ID NO: 29446 - DNA, 122 bp, Homo sapiens
  misc_feature (61)..(62): /note="This region represents a CpG dinucleotide"
  misc_feature (61)..(61): /note="Nucleotide may be methylated to form 5-methylcytosine"
ttttcttattaaggaatctggttctatgactgtcctaagcccaggctgagttaagagcgacgagttctggagggaactacttcccactctgagtcttctggttgtaatccttgtcttttctc

SEQ ID NO: 29447 - DNA, 122 bp, Homo sapiens
  misc_feature (61)..(62): /note="This region represents a CpG dinucleotide"
  misc_feature (61)..(61): /note="Nucleotide may be methylated to form 5-methylcytosine"
gaaacccatactctttctactgaatctttcagacacaggtgacagtcaacagagtacaaacgatgtaatcttgaggtgaaaacctgaccctgactgaagctgaagatgataagaaaatataa

SEQ ID NO: 29448 - DNA, 122 bp, Homo sapiens
  misc_feature (61)..(62): /note="This region represents a CpG dinucleotide"
  misc_feature (61)..(61): /note="Nucleotide may be methylated to form 5-methylcytosine"
tcatctttcagaattaaatgaagtgatgcacgtaaaatgcttagtgtagtttctgtcatacggcgaataagggtttatgtgcccagtaagggttatctgctattattattgttctggtgatg

SEQ ID NO: 29449 - DNA, 122 bp, Homo sapiens
  misc_feature (61)..(62): /note="This region represents a CpG dinucleotide"
  misc_feature (61)..(61): /note="Nucleotide may be methylated to form 5-methylcytosine"
acctggggtgaattaactgcaatgctgttggactggatttcctctctgggtaagaattcacgaaatggatggcctttacggtcaattccaagtctaaaagtctagccatccatactaatgga

SEQ ID NO: 29450 - DNA, 122 bp, Homo sapiens
  misc_feature (61)..(62): /note="This region represents a CpG dinucleotide"
  misc_feature (61)..(61): /note="Nucleotide may be methylated to form 5-methylcytosine"
ccccagcaacgttcccgccacctgcccaggccagtgccccgtgcccaaccccagagggtgcgggatgacagactctgacaatcattaaaccagccgggcctgatttcccagcactgcctgct

SEQ ID NO: 29451 - DNA, 122 bp, Homo sapiens
  misc_feature (61)..(62): /note="This region represents a CpG dinucleotide"
  misc_feature (61)..(61): /note="Nucleotide may be methylated to form 5-methylcytosine"
ttgacgcggcctctcatgtcctgcccaagtggcctctgccagcatatgtcaatgaccatgcgccctgccgcccgtcagtgcgctgcctccgtgcacagcagacgtcaagggaggaacagggc

SEQ ID NO: 29452 - DNA, 122 bp, Homo sapiens
  misc_feature (61)..(62): /note="This region represents a CpG dinucleotide"
  misc_feature (61)..(61): /note="Nucleotide may be methylated to form 5-methylcytosine"
taatatttcataaaaatgtctaaagagtcctattatccaagggtttcactagcaaggtcacgatgggggaaaaggcaaatattcaacaaaaataggttttcagatatgagttaaaaattcag

SEQ ID NO: 29453 - DNA, 122 bp, Homo sapiens
  misc_feature (61)..(62): /note="This region represents a CpG dinucleotide"
  misc_feature (61)..(61): /note="Nucleotide may be methylated to form 5-methylcytosine"
gtgagtctatcttgtgtgtctgtgtctaccttgattccactgaatctcattctttagggacgttgggttgaaagaaaatccatccttttttggccaaggaggatgaggcgttagttaattaa

SEQ ID NO: 29454 - DNA, 122 bp, Homo sapiens
  misc_feature (61)..(62): /note="This region represents a CpG dinucleotide"
  misc_feature (61)..(61): /note="Nucleotide may be methylated to form 5-methylcytosine"
ttcctcaacacttttcacagtgcttggcataaagctggctggccctttgtacctgtaaaacgcggaaacacccgcagctcctctttttctctacctactttgtcgcacattacgcaataatg

SEQ ID NO: 29455 - DNA, 122 bp, Homo sapiens
  misc_feature (61)..(62): /note="This region represents a CpG dinucleotide"
  misc_feature (61)..(61): /note="Nucleotide may be methylated to form 5-methylcytosine"
aaaggttgtgagtgacttcagaacacacccactcagttaaattccttatctttgttaccacgcctattcagtgcctacaataagaattccaagcatcaaacatctcatgcttgaatccattc

SEQ ID NO: 29456 - DNA, 122 bp, Homo sapiens
  misc_feature (61)..(62): /note="This region represents a CpG dinucleotide"
  misc_feature (61)..(61): /note="Nucleotide may be methylated to form 5-methylcytosine"
agtctgggcccatagtggacctgagcctttgccacagggggcagggaggctgcaatgccacgctaagacctggcctcagtgcctggagctgaggtcacagaggaaagccagggccagccagc

SEQ ID NO: 29457 - DNA, 122 bp, Homo sapiens
  misc_feature (61)..(62): /note="This region represents a CpG dinucleotide"
  misc_feature (61)..(61): /note="Nucleotide may be methylated to form 5-methylcytosine"
ataacatgcatgtttttctgagggtgtgtgcacgcgtgcgtgtgtgcatcgtgcggtgtgcgttaggtgcacacgtgcatgcgtgtgccttatgttgtgcgtgtgagtgtgtgtgtgtgtgc

SEQ ID NO: 29458 - DNA, 122 bp, Homo sapiens
  misc_feature (61)..(62): /note="This region represents a CpG dinucleotide"
  misc_feature (61)..(61): /note="Nucleotide may be methylated to form 5-methylcytosine"
tagcataatcatcctatccatatagtattccagcaaattgcaatgactcatccaggcctccgctgagtttcctaagctcttgacaactttaagcacagaaacaagcccttcaaaacgccctg

SEQ ID NO: 29459 - DNA, 122 bp, Homo sapiens
  misc_feature (61)..(62): /note="This region represents a CpG dinucleotide"
  misc_feature (61)..(61): /note="Nucleotide may be methylated to form 5-methylcytosine"
aaacaactccaacaggttcatgagcagctcatccaccaggtgctcgtcttggatgttggccgcgatgttggccagggcattaatcactgccagggagcaatgcctgaagaagaaggagtgaa

SEQ ID NO: 29460 - DNA, 122 bp, Homo sapiens
  misc_feature (61)..(62): /note="This region represents a CpG dinucleotide"
  misc_feature (61)..(61): /note="Nucleotide may be methylated to form 5-methylcytosine"
agatgaaagagtttaggacatttttgctctgttcttccactgttccagcatcacttctctcgcactagctgtgttccccataaatacaacccccaccaagctacaggatcatgattttcttc

SEQ ID NO: 29461 - DNA, 122 bp, Homo sapiens
  misc_feature (61)..(62): /note="This region represents a CpG dinucleotide"
  misc_feature (61)..(61): /note="Nucleotide may be methylated to form 5-methylcytosine"
agattgtagcaaatggctctgaagttgaggaagctgtcacagcttggcacctccagtttacgatcaaatgcagatcataccattgcaggggaaagtggggggtgtggagagactcattgagg

SEQ ID NO: 29462 - DNA, 122 bp, Homo sapiens
  misc_feature (61)..(62): /note="This region represents a CpG dinucleotide"
  misc_feature (61)..(61): /note="Nucleotide may be methylated to form 5-methylcytosine"
agctggctcttgagagaacctgtcatcaacatccctgtccccgtgggtgtcaggaaggttcggccttctttaaggtaggcactgtgtcctcatggactgttcattttgggaagaaccttggg

SEQ ID NO: 29463 - DNA, 122 bp, Homo sapiens
  misc_feature (61)..(62): /note="This region represents a CpG dinucleotide"
  misc_feature (61)..(61): /note="Nucleotide may be methylated to form 5-methylcytosine"
tgcgagccccccttaaaaatagcatctgaagtttcattgtagctgagtcactgcttggtgcgatctagggctaggctgcaactggacctgtcagaatgaggccacagtgattcatgatgaag

SEQ ID NO: 29464 - DNA, 122 bp, Homo sapiens
  misc_feature (61)..(62): /note="This region represents a CpG dinucleotide"
  misc_feature (61)..(61): /note="Nucleotide may be methylated to form 5-methylcytosine"
gccactgagatcatatctgtgtgcttggggaagggagagtgccgggattatcagacattgcgttagaactcagtgccctgtcacagtggaatgcaacacagggtggaactcagctggtgccc

SEQ ID NO: 29465 - DNA, 122 bp, Homo sapiens
  misc_feature (61)..(62): /note="This region represents a CpG dinucleotide"
  misc_feature (61)..(61): /note="Nucleotide may be methylated to form 5-methylcytosine"
ctcttccgatagttctggcagagacggctgcggggagacacgggcggaggcgggtccgggcgggccccacgtcgcgcagcctcagcgtgttgcgcctcccgcggctgcggccagagacttcc

SEQ ID NO: 29466 - DNA, 122 bp, Homo sapiens
  misc_feature (61)..(62): /note="This region represents a CpG dinucleotide"
  misc_feature (61)..(61): /note="Nucleotide may be methylated to form 5-methylcytosine"
aacactttggatttatctaggatctttgagctgaataggtctcaagatcttccttcaggacgtgagaaaaatattttaccacctctatgaggcatgcccaacacaccgtctttagctcaaat

SEQ ID NO: 29467 - DNA, 122 bp, Homo sapiens
  misc_feature (61)..(62): /note="This region represents a CpG dinucleotide"
  misc_feature (61)..(61): /note="Nucleotide may be methylated to form 5-methylcytosine"
tatttttacctaagggcttatatgaataagcccaatgactatcaaacacaataaaagctgcgtaactgctacctcacccatggaaaaaatgtatgattaactcattgggcaatgcagaatga

SEQ ID NO: 29468 - DNA, 122 bp, Homo sapiens
  misc_feature (61)..(62): /note="This region represents a CpG dinucleotide"
  misc_feature (61)..(61): /note="Nucleotide may be methylated to form 5-methylcytosine"
caagcacctggaggcggaacctgtgtggccggctacagggtggtcctgtgtatgtgttaccgccttattgttccaaagaacagtctttttcaagtgacaggtagaagacgccccaataacga

SEQ ID NO: 29469 - DNA, 122 bp, Homo sapiens
  misc_feature (61)..(62): /note="This region represents a CpG dinucleotide"
  misc_feature (61)..(61): /note="Nucleotide may be methylated to form 5-methylcytosine"
agggcatcacttagttcatttccatctggccagtgtttattctgtgctttttgtataaggcgagagtgcaaagaggtatgaccagtcctctaggaatccctagccagtaaaaaacttttgtc

SEQ ID NO: 29470 - DNA, 122 bp, Homo sapiens
  misc_feature (61)..(62): /note="This region represents a CpG dinucleotide"
  misc_feature (61)..(61): /note="Nucleotide may be methylated to form 5-methylcytosine"
ttccatgcacacctctgcttggctgcaggcgcttgtggagctgaaggaagtgctgccatgcgctgtgcaggtgtgtcacattatcacccaggcccacttcaaggcaaacagatgaaaacgac

SEQ ID NO: 29471 - DNA, 122 bp, Homo sapiens
  misc_feature (61)..(62): /note="This region represents a CpG dinucleotide"
  misc_feature (61)..(61): /note="Nucleotide may be methylated to form 5-methylcytosine"
attctgatgagacagttatgattctaggaatattcccaggataggagtccaataagtaagcggttttactattaacaagctgtgtgactttgggcaagtgagttattctctataaacctcaa

SEQ ID NO: 29472 - DNA, 122 bp, Homo sapiens
  misc_feature (61)..(62): /note="This region represents a CpG dinucleotide"
  misc_feature (61)..(61): /note="Nucleotide may be methylated to form 5-methylcytosine"
gtttccccctgcccgtgctgagatccttatttggtcaagcttctacctatgccctggcctcggagcgagcccgatagcgctggatcacagcagagggagcgaggcggctgacgtcccatccc

SEQ ID NO: 29473 - DNA, 122 bp, Homo sapiens
  misc_feature (61)..(62): /note="This region represents a CpG dinucleotide"
  misc_feature (61)..(61): /note="Nucleotide may be methylated to form 5-methylcytosine"
tacatggttacatggatggatgataaatgaatggatgggtaggtagacggatggatggatcgatgggtagatgaataatagatggatagataaatgaaagcactccgaactgagaattagga

SEQ ID NO: 29474 - DNA, 122 bp, Homo sapiens
  misc_feature (61)..(62): /note="This region represents a CpG dinucleotide"
  misc_feature (61)..(61): /note="Nucleotide may be methylated to form 5-methylcytosine"
ttgcttgtcaagagtttatgttctctcggttccatttggtggatatggcaggaggccaaccgtgcaagtcagttcaaagcagtaagggaggagcttcactgtgttcagtcaagacaaacggg

SEQ ID NO: 29475 - DNA, 122 bp, Homo sapiens
  misc_feature (61)..(62): /note="This region represents a CpG dinucleotide"
  misc_feature (61)..(61): /note="Nucleotide may be methylated to form 5-methylcytosine"
gcctcttctttccaagacctgggagctgggtaataccagggcacttttatcaatcaacaacgtctagaggagatagtcgagaaccagaaagtcaatagtcaagacacaaagaataatttaga

SEQ ID NO: 29476 - DNA, 122 bp, Homo sapiens
  misc_feature (61)..(62): /note="This region represents a CpG dinucleotide"
  misc_feature (61)..(61): /note="Nucleotide may be methylated to form 5-methylcytosine"
gcagaatgagcaagatcaccgctcagatgtgtcatgaggagtaacgtgtcatgacaccggcgtgtgaagcttcagcgaaaagcccagtcttgagcgtggtcacgagtcattacttcgtggtg

SEQ ID NO: 29477 - DNA, 122 bp, Homo sapiens
  misc_feature (61)..(62): /note="This region represents a CpG dinucleotide"
  misc_feature (61)..(61): /note="Nucleotide may be methylated to form 5-methylcytosine"
gacctccgggctgcacatgacccatttttcaacatcactggccaaagtgcaacaaggtcacgtactgcaaatatttgtgattagaaagattctttcctctaaaagttgccatgagatagttc

SEQ ID NO: 29478 - DNA, 122 bp, Homo sapiens
  misc_feature (61)..(62): /note="This region represents a CpG dinucleotide"
  misc_feature (61)..(61): /note="Nucleotide may be methylated to form 5-methylcytosine"
tagaactctgaatacttaacttccagtactaacagcagccacaacagcctgcaatcatagcgtgcttacataataccaggtactcttgcaaatgcttcatatgtattatctcatttagttct

SEQ ID NO: 29479 - DNA, 122 bp, Homo sapiens
  misc_feature (61)..(62): /note="This region represents a CpG dinucleotide"
  misc_feature (61)..(61): /note="Nucleotide may be methylated to form 5-methylcytosine"
aggtaagaggagcatattgtaagttctggtctcctttttttcaaatggaccctgtgttgccgcagaacccatggtgccacccactcagaaggcttcctggatggctctgtgcatgcttaaga

SEQ ID NO: 29480 - DNA, 122 bp, Homo sapiens
  misc_feature (61)..(62): /note="This region represents a CpG dinucleotide"
  misc_feature (61)..(61): /note="Nucleotide may be methylated to form 5-methylcytosine"
tggaagccttttgagtctagagaagtctttgatgatgttctccttggctgctgcccataacgttttagtccaaatcagtagctgtgactgaacttggcctaactagaagtacctgttgtaaa

SEQ ID NO: 29481 - DNA, 122 bp, Homo sapiens
  misc_feature (61)..(62): /note="This region represents a CpG dinucleotide"
  misc_feature (61)..(61): /note="Nucleotide may be methylated to form 5-methylcytosine"
tgagcatgtcagtattctagtccagtatttgccagtttccaagtaaaagcttttgtgttacgtgtttctgcggtgccggactccctgaggttgggctgggctctgtacattgggagggggta

SEQ ID NO: 29482 - DNA, 122 bp, Homo sapiens
  misc_feature (61)..(62): /note="This region represents a CpG dinucleotide"
  misc_feature (61)..(61): /note="Nucleotide may be methylated to form 5-methylcytosine"
taactttcctagcctttcttgaaagccagatttatcagtgtgcatattgtgtgatagactcgcaccaatggcagatgtgtggttggactctcagctgatgggtaggagtgagtagttaccct

SEQ ID NO: 29483 - DNA, 122 bp, Homo sapiens
  misc_feature (61)..(62): /note="This region represents a CpG dinucleotide"
  misc_feature (61)..(61): /note="Nucleotide may be methylated to form 5-methylcytosine"
accgcctgcacggccagcccgctcctgaggctgctgatttgggtctgggaagaacagtcacggcttctgctggccagcggggtggcgggcaccagccacgaggtgtctgtggtgctggcctc

SEQ ID NO: 29484 - DNA, 122 bp, Homo sapiens
  misc_feature (61)..(62): /note="This region represents a CpG dinucleotide"
  misc_feature (61)..(61): /note="Nucleotide may be methylated to form 5-methylcytosine"
gcaaacacaatctgcaggtaattaacattattgtttcccattttagggagcagtcatgcacgcagatgatcaaaggttggtttctggacaacataagtaaacaagcctgtttgagataaatt

SEQ ID NO: 29485 - DNA, 122 bp, Homo sapiens
  misc_feature (61)..(62): /note="This region represents a CpG dinucleotide"
  misc_feature (61)..(61): /note="Nucleotide may be methylated to form 5-methylcytosine"
aaatgattaatatttgtatttttgttgtaaagctttattttataatgctactgtgtcatacgattccaggaaacacacattgctttaaactatgtgagtactgccccctatgtgtttgtatt

SEQ ID NO: 29486 - DNA, 122 bp, Homo sapiens
  misc_feature (61)..(62): /note="This region represents a CpG dinucleotide"
  misc_feature (61)..(61): /note="Nucleotide may be methylated to form 5-methylcytosine"
tgataacatattggcagcacattaaatgctatctatgtgtgtcttctagctgcttgctgacgtggctttcttccccagtgtataataagcaatctgaggacaggaaattagtcttactcatc

SEQ ID NO: 29487 - DNA, 122 bp, Homo sapiens
  misc_feature (61)..(62): /note="This region represents a CpG dinucleotide"
  misc_feature (61)..(61): /note="Nucleotide may be methylated to form 5-methylcytosine"
ggtcactttcactttgcctggcaccgaaggaaactcaggctatcaaaaacaacaccagtacgtatttcaaatcatgttgtacacaatggatataaacaatttttgtcaacttaaaaattaaa

SEQ ID NO: 29488 - DNA, 122 bp, Homo sapiens
  misc_feature (61)..(62): /note="This region represents a CpG dinucleotide"
  misc_feature (61)..(61): /note="Nucleotide may be methylated to form 5-methylcytosine"
taaagtattttgagaggggaagtgaggcaggatagttagtcaaggaagtgaccatgttctcgggatgcagcattggtggtgacctcacagccaacacaataagccttggcattcacatcata

SEQ ID NO: 29489 - DNA, 122 bp, Homo sapiens
  misc_feature (61)..(62): /note="This region represents a CpG dinucleotide"
  misc_feature (61)..(61): /note="Nucleotide may be methylated to form 5-methylcytosine"
aaatgaattcttcatcaggcgttcaacacctttcttggaattccaaaacctgggtgagggcgcttctcttatttttctgtttcccctcccgcacagggaacaggttttgcagttttatgtcc

SEQ ID NO: 29490 - DNA, 122 bp, Homo sapiens
  misc_feature (61)..(62): /note="This region represents a CpG dinucleotide"
  misc_feature (61)..(61): /note="Nucleotide may be methylated to form 5-methylcytosine"
cgaaggctggaggttcacaggtggagatgttgcccaggggccctggaggcgtggccacagcgtctgggtctctcctgtgccccgaggcccaggcagcagctggagacactcagctccacctt

SEQ ID NO: 29491 - DNA, 122 bp, Homo sapiens
  misc_feature (61)..(62): /note="This region represents a CpG dinucleotide"
  misc_feature (61)..(61): /note="Nucleotide may be methylated to form 5-methylcytosine"
acgtcagtgattggttgtattactgagctactggaaaagctgcagcatctgcagcaattgcggaggctcaggaaacagtaccccagatgacagcctcagaagcaagagcttctctctgctca

SEQ ID NO: 29492 - DNA, 122 bp, Homo sapiens
  misc_feature (61)..(62): /note="This region represents a CpG dinucleotide"
  misc_feature (61)..(61): /note="Nucleotide may be methylated to form 5-methylcytosine"
tgaaacgtgaaccccttcccatggccctggctgtgcagtcctcctggtcggaacatcacacggctgttctccaagagtggttcctgcaaatggcccccgctgtgaagccctgggaagccctg

SEQ ID NO: 29493 - DNA, 122 bp, Homo sapiens
  misc_feature (61)..(62): /note="This region represents a CpG dinucleotide"
  misc_feature (61)..(61): /note="Nucleotide may be methylated to form 5-methylcytosine"
actgcagcctgagtggcagagcaagactctgtctcaaaaaaaaagaattactacagtcttcgcatcaaaaactatgcaagccagaggacaaaggaatgataattttaaacaccaaaaggaca

SEQ ID NO: 29494 - DNA, 122 bp, Homo sapiens
  misc_feature (61)..(62): /note="This region represents a CpG dinucleotide"
  misc_feature (61)..(61): /note="Nucleotide may be methylated to form 5-methylcytosine"
tctggagaatgattctgaatattctctatatgttttctgtgaaaatgtcagcctagtattcgtttctagtagatgtgctttcagcaaaacttgctcttaatgtctctggtgtgcagtcatct

SEQ ID NO: 29495 - DNA, 122 bp, Homo sapiens
  misc_feature (61)..(62): /note="This region represents a CpG dinucleotide"
  misc_feature (61)..(61): /note="Nucleotide may be methylated to form 5-methylcytosine"
ccctgtcttatagaagcagtgccctagggagaaatctgtgagctcctgctgctgaaataccggtgctgctcaatttccatgctttctgagcttagtgttttggctcttccttagattctgtg

SEQ ID NO: 29496 - DNA, 122 bp, Homo sapiens
  misc_feature (61)..(62): /note="This region represents a CpG dinucleotide"
  misc_feature (61)..(61): /note="Nucleotide may be methylated to form 5-methylcytosine"
tccctctcaatttacatgaccatgaggaaactgaaacctagcgaagttaaatgacttgcccggggacggacagctagctagttcctgcttgaactgaggaccatctatttggttaccgggag

SEQ ID NO: 29497 - DNA, 122 bp, Homo sapiens
  misc_feature (61)..(62): /note="This region represents a CpG dinucleotide"
  misc_feature (61)..(61): /note="Nucleotide may be methylated to form 5-methylcytosine"
taaatgactcccaggagctcttccagctgtgctccagaattccttaagcagtgccaacctcgctgttcctccgaccgcttcttccctttccagcccttccctccagcggcttctgttctcta

SEQ ID NO: 29498 - DNA, 122 bp, Homo sapiens
  misc_feature (61)..(62): /note="This region represents a CpG dinucleotide"
  misc_feature (61)..(61): /note="Nucleotide may be methylated to form 5-methylcytosine"
agaggaaatgaatactattgtcagaaccatatctatatagtcaatcatttcctcttttaacgtctgtcttgttctctttttacccaccacatatgtataactatgtgaaaaattatatttgt

SEQ ID NO: 29499 - DNA, 122 bp, Homo sapiens
  misc_feature (61)..(62): /note="This region represents a CpG dinucleotide"
  misc_feature (61)..(61): /note="Nucleotide may be methylated to form 5-methylcytosine"
gcaggaatatttggaagcagtcctgaaaccataacttcacttgtgacacaatcccttttccgtaactctggccaaacagtctaactctctaaggaaccaagagtcaagcaacctcttcctct

SEQ ID NO: 29500 - DNA, 122 bp, Homo sapiens
  misc_feature (61)..(62): /note="This region represents a CpG dinucleotide"
  misc_feature (61)..(61): /note="Nucleotide may be methylated to form 5-methylcytosine"
agataaccatttgggtggcacatttcacaacacagatgcacttcttaagagtcctccatccgtcagcgttgtaaaaaaggaagtggcacgtttgcatgtagttcttctgagacggagattta

SEQ ID NO: 29501 - DNA, 122 bp, Homo sapiens
  misc_feature (61)..(62): /note="This region represents a CpG dinucleotide"
  misc_feature (61)..(61): /note="Nucleotide may be methylated to form 5-methylcytosine"
tattatgaaatgtacatttatctccttaggtcatttcatcacagaatccctattatgaaacgtacattctcccctttgttctagtgaggaggccccaccaatcagagaaaagatctgtttct

SEQ ID NO: 29502 - DNA, 122 bp, Homo sapiens
  misc_feature (61)..(62): /note="This region represents a CpG dinucleotide"
  misc_feature (61)..(61): /note="Nucleotide may be methylated to form 5-methylcytosine"
tcctgtcccggtacttactgacggtgcacatgcggggcttggggaagctgagtgtctaaccgcggtgcagctacggatgggaaattctgggcagggacgagcctgtcttcacctgaggaatt

SEQ ID NO: 29503 - DNA, 122 bp, Homo sapiens
  misc_feature (61)..(62): /note="This region represents a CpG dinucleotide"
  misc_feature (61)..(61): /note="Nucleotide may be methylated to form 5-methylcytosine"
cctttcttgccatgttccggtcttagctaaacaacaagctctgtttccttgtggtcccatcgttggcttgacaacttgatttggattaccagtgtttattactccacttcctctttccttcc

SEQ ID NO: 29504 - DNA, 122 bp, Homo sapiens
  misc_feature (61)..(62): /note="This region represents a CpG dinucleotide"
  misc_feature (61)..(61): /note="Nucleotide may be methylated to form 5-methylcytosine"
ttaggatcaccaggctgactcactgtcatacagattccaactacaaaaatcatctgggagcgccctccgaagtgctaggattctgctggctgttttatgaacagctcatactatgaagtgga

SEQ ID NO: 29505 - DNA, 122 bp, Homo sapiens
  misc_feature (61)..(62): /note="This region represents a CpG dinucleotide"
  misc_feature (61)..(61): /note="Nucleotide may be methylated to form 5-methylcytosine"
aaaggattgagccctttggggaggagtaatagctagttatccgtttattatttgacatgacgggaaatattgactgaaatctgtaagaatggggatgacataagggaagtgatattcgaaag

SEQ ID NO: 29506 - DNA, 122 bp, Homo sapiens
  misc_feature (61)..(62): /note="This region represents a CpG dinucleotide"
  misc_feature (61)..(61): /note="Nucleotide may be methylated to form 5-methylcytosine"
tttgagctttgacttctccccagccaattaagatcaaaagctatggggatgtacacaacccgtagagtttactacacccaataccttttactacacccaatactacactcaataccttcctc

SEQ ID NO: 29507 - DNA, 122 bp, Homo sapiens
  misc_feature (61)..(62): /note="This region represents a CpG dinucleotide"
  misc_feature (61)..(61): /note="Nucleotide may be methylated to form 5-methylcytosine"
ccagtaacaccactcggtggaaagtggcttatggctcttttatacaataggagacacttgcgtggggcactaataactcatgtgagtcagacagacactcttcctgttgggtttaagaatac

SEQ ID NO: 29508 - DNA, 122 bp, Homo sapiens
  misc_feature (61)..(62): /note="This region represents a CpG dinucleotide"
  misc_feature (61)..(61): /note="Nucleotide may be methylated to form 5-methylcytosine"
gtataccatggtagtcccataagattctaatggagctgaaaaattcctattgcctagtgacgttgtcgccattgcagtgtcttagtgcaattcattactcatgtgtttgtggtgatgctggt

SEQ ID NO: 29509 - DNA, 122 bp, Homo sapiens
  misc_feature (61)..(62): /note="This region represents a CpG dinucleotide"
  misc_feature (61)..(61): /note="Nucleotide may be methylated to form 5-methylcytosine"
atttactcttagatccggcctatggtttgttgttttgagccagggtttcactctgttgcccgggctggagggcagtggcatgatcacggctcactgcagcctcaacctccccaggctcaggt

SEQ ID NO: 29510 - DNA, 122 bp, Homo sapiens
  misc_feature (61)..(62): /note="This region represents a CpG dinucleotide"
  misc_feature (61)..(61): /note="Nucleotide may be methylated to form 5-methylcytosine"
gtcacacacacatagttagctatgaggaatatctgcagatgctggttcctccacttcaaacgagtcagctaactctaggtgaagagctttatactttggactatgtggttataaatgatggg

SEQ ID NO: 29511 - DNA, 122 bp, Homo sapiens
  misc_feature (61)..(62): /note="This region represents a CpG dinucleotide"
  misc_feature (61)..(61): /note="Nucleotide may be methylated to form 5-methylcytosine"
tgcactttctatatgtgctggacctcaactaaaaacaaacagtagccaggcgtgctggcacgtgcctgtaatcccagctacccagggggttggggggggaaccgaggcaggagaatcacttg

SEQ ID NO: 29512 - DNA, 122 bp, Homo sapiens
  misc_feature (61)..(62): /note="This region represents a CpG dinucleotide"
  misc_feature (61)..(61): /note="Nucleotide may be methylated to form 5-methylcytosine"
atttattcaccaatatttattagacccttgatatgttcaagaccctgtagctggtgctgtcggagtcactaagatgaactatataaataactactctatgtgtacgaataactaccctacaa

SEQ ID NO: 29513 - DNA, 122 bp, Homo sapiens
  misc_feature (61)..(62): /note="This region represents a CpG dinucleotide"
  misc_feature (61)..(61): /note="Nucleotide may be methylated to form 5-methylcytosine"
atcaacaaacattgtgcttaggaccagtggcctttcctctcctgccaggctttcaaagtacggaaaagcaaacagaacagaacactcgaatttcagctcataggctggaagcaaatagactg

SEQ ID NO: 29514 - DNA, 122 bp, Homo sapiens
  misc_feature (61)..(62): /note="This region represents a CpG dinucleotide"
  misc_feature (61)..(61): /note="Nucleotide may be methylated to form 5-methylcytosine"
agttcttagtaaccaggctgtggccctctgatgtaactttagagaatgattaacatgtcacgtggttagctgggctctgagatgatctctgtaacaaagcagtctacattgttctcccaagg

SEQ ID NO: 29515 - DNA, 122 bp, Homo sapiens
  misc_feature (61)..(62): /note="This region represents a CpG dinucleotide"
  misc_feature (61)..(61): /note="Nucleotide may be methylated to form 5-methylcytosine"
agtggagctaagataaatcattagcaaccagtttctccctcaggatcaatgcagtgattacgaaagagagttgggtcatagtctatgcatgtaactggcctactttcaaacacacctttgcc

SEQ ID NO: 29516 - DNA, 122 bp, Homo sapiens
  misc_feature (61)..(62): /note="This region represents a CpG dinucleotide"
  misc_feature (61)..(61): /note="Nucleotide may be methylated to form 5-methylcytosine"
gcccagctttgtgttgatctactttgtccttccaggtccactcgctacacttcctccctgcgttgggccaggaagctgacttttatgaactatatcagtgggctccctcgcccccggcttcc

SEQ ID NO: 29517 - DNA, 122 bp, Homo sapiens
  misc_feature (61)..(62): /note="This region represents a CpG dinucleotide"
  misc_feature (61)..(61): /note="Nucleotide may be methylated to form 5-methylcytosine"
tgaaaaacgaccaaactgtcttccaaagtagctcttagagacaacctgtccacagaagaacgcagcaagccccctcccctaaatgccctgcagcttatttcttctgagatgctgcccctact

SEQ ID NO: 29518 - DNA, 122 bp, Homo sapiens
  misc_feature (61)..(62): /note="This region represents a CpG dinucleotide"
  misc_feature (61)..(61): /note="Nucleotide may be methylated to form 5-methylcytosine"
ccatctctgtggtttctttgtcttctggtgatccatacctttggggtgtcatatttcacccgcagtgtttcatcaaattaaatttcccaacaaaaacagttcctttcccaagaggaattcca

SEQ ID NO: 29519 - DNA, 122 bp, Homo sapiens
  misc_feature (61)..(62): /note="This region represents a CpG dinucleotide"
  misc_feature (61)..(61): /note="Nucleotide may be methylated to form 5-methylcytosine"
tacagatgtaattattggtagagccacaattcatacctagactcttacctcttagttcagcgttctttctgaatccctatcataatccatatcctgaattgtctctttggtacaggaaccta

SEQ ID NO: 29520 - DNA, 122 bp, Homo sapiens
  misc_feature (61)..(62): /note="This region represents a CpG dinucleotide"
  misc_feature (61)..(61): /note="Nucleotide may be methylated to form 5-methylcytosine"
tattctctttttcttcatatatcatttgcctggtttcctttagctccttgagcatatttacgacagctgttatagatcttgctctactgagtctggtgtgtgtgtttcttcagatactgctt

SEQ ID NO: 29521 - DNA, 122 bp, Homo sapiens
  misc_feature (61)..(62): /note="This region represents a CpG dinucleotide"
  misc_feature (61)..(61): /note="Nucleotide may be methylated to form 5-methylcytosine"
cctaatgatgaaaggtagaattgcacaatgaaggacagcatgagtagtagagactccccacgatgttttcacatggacacagggttttcacatggcatttctgctctcactccttccttatc

SEQ ID NO: 29522 - DNA, 122 bp, Homo sapiens
  misc_feature (61)..(62): /note="This region represents a CpG dinucleotide"
  misc_feature (61)..(61): /note="Nucleotide may be methylated to form 5-methylcytosine"
ccaaccttaggcacacacacgaccgaagagcagccgctgagctcatgaaaaacctgttcgcgcagaaaccgctctgtgccccgtggaggagctacgatgaattattaggtgaaagtaccaca

SEQ ID NO: 29523 - DNA, 122 bp, Homo sapiens
  misc_feature (61)..(62): /note="This region represents a CpG dinucleotide"
  misc_feature (61)..(61): /note="Nucleotide may be methylated to form 5-methylcytosine"
agatacacgggacttgcctagaaaagctgctttttcattgtccttccttttggggcagaacgctttcagtagtcagcaatcatgtggttgagtttgaaactgaccagccaggaggttgtggg

SEQ ID NO: 29524 - DNA, 122 bp, Homo sapiens
  misc_feature (61)..(62): /note="This region represents a CpG dinucleotide"
  misc_feature (61)..(61): /note="Nucleotide may be methylated to form 5-methylcytosine"
cttttgaatgttactattttacatagtatatgaaaatcccaacactgtcagctaccctgtcgcttttcaaatagggagtatgtatgtgtgtttatgactagtgttgggatgtggctggttta

SEQ ID NO: 29525 - DNA, 122 bp, Homo sapiens
  misc_feature (61)..(62): /note="This region represents a CpG dinucleotide"
  misc_feature (61)..(61): /note="Nucleotide may be methylated to form 5-methylcytosine"
tttcagccaggcatggtggctcatacctgtaatcccagcactttgggaggtccaggtgggcgcatcactttacatcaggtgtttgagaccagcctggacaacatggtgaaacaccgtctcta

SEQ ID NO: 29526 - DNA, 122 bp, Homo sapiens
  misc_feature (61)..(62): /note="This region represents a CpG dinucleotide"
  misc_feature (61)..(61): /note="Nucleotide may be methylated to form 5-methylcytosine"
gagggaatggacgaatgaacaaatggaatgatctctcacataccttccaactcaagatctcgtaaaattccaagtcctgctggtcctggaaatccgatgccaattgctgcctgccctgtttc

SEQ ID NO: 29527 - DNA, 122 bp, Homo sapiens
  misc_feature (61)..(62): /note="This region represents a CpG dinucleotide"
  misc_feature (61)..(61): /note="Nucleotide may be methylated to form 5-methylcytosine"
agtaggactttcttatgaaacacattacatcataaattaacccgaatcatgttacagcttcgcttgcacaggctgctgcgttatcggagaatgtgggaagtgtgcaccacagctgaacactg

SEQ ID NO: 29528 - DNA, 122 bp, Homo sapiens
  misc_feature (61)..(62): /note="This region represents a CpG dinucleotide"
  misc_feature (61)..(61): /note="Nucleotide may be methylated to form 5-methylcytosine"
tctattcctgagtaaatcatgattgatgctaggctctggggagcaactcttaccctgtgccgttagtgtgtctcaagcaggcattaacccttggctgtggacaacatcaatacatttactca

SEQ ID NO: 29529 - DNA, 122 bp, Homo sapiens
  misc_feature (61)..(62): /note="This region represents a CpG dinucleotide"
  misc_feature (61)..(61): /note="Nucleotide may be methylated to form 5-methylcytosine"
taagccaaatttgccttcctggatacctcctgctggcgggtgatgaactgccttcagaagcggctgccctgggtttgttagtgtttgtactatcgggtgctgcatctctgtctctgcatgag

SEQ ID NO: 29530 - DNA, 122 bp, Homo sapiens
  misc_feature (61)..(62): /note="This region represents a CpG dinucleotide"
  misc_feature (61)..(61): /note="Nucleotide may be methylated to form 5-methylcytosine"
gttaggcttcacatttccctacattcaaaagtgcctggagtaaggatcatgttctgatggcggcatgtaaatgcctctttcaagagaggaaattgctttgaagttactgtttccctggcttt

SEQ ID NO: 29531 - DNA, 122 bp, Homo sapiens
  misc_feature (61)..(62): /note="This region represents a CpG dinucleotide"
  misc_feature (61)..(61): /note="Nucleotide may be methylated to form 5-methylcytosine"
cccaacagaatgcctctcctgctattttcatttagccccaaggttttagagagatcaatacggatactttccagggaaggaaataagacaggaacatgtgccctagtggaactgcttagaat

SEQ ID NO: 29532 - DNA, 122 bp, Homo sapiens
  misc_feature (61)..(62): /note="This region represents a CpG dinucleotide"
  misc_feature (61)..(61): /note="Nucleotide may be methylated to form 5-methylcytosine"
ccctacttccaatattgagctgactgtttctgttgtatttaccctttgcaatagccatctcgctattttcttaacttacaaaacatcacttagccttctgcctgtagaaatagccctgtata

SEQ ID NO: 29533 - DNA, 122 bp, Homo sapiens
  misc_feature (61)..(62): /note="This region represents a CpG dinucleotide"
  misc_feature (61)..(61): /note="Nucleotide may be methylated to form 5-methylcytosine"
ggaccgcagcgcggcccagccccgggcacccgcctcggacgctcgggcgccaggaggcttcgctggaggggctgggccaaggagattaagaagaaaacgactttctgcaggaggaagagccc

SEQ ID NO: 29534 - DNA, 122 bp, Homo sapiens
  misc_feature (61)..(62): /note="This region represents a CpG dinucleotide"
  misc_feature (61)..(61): /note="Nucleotide may be methylated to form 5-methylcytosine"
ccccttttcccttcactttcagttttctctttgaccctactttctctttccctttctcatcgctcacctactaaagtgaactggcctgtgatttacagtatgtgtgatcaaatcagttgact

SEQ ID NO: 29535 - DNA, 122 bp, Homo sapiens
  misc_feature (61)..(62): /note="This region represents a CpG dinucleotide"
  misc_feature (61)..(61): /note="Nucleotide may be methylated to form 5-methylcytosine"
gggaaatgctcgtttacatttagtgaatggtcctggtagttttgacaaggaaatatattacgaactaatggagaacctgctttggagatctgtgccacatgtgttccattaagcccacttct

SEQ ID NO: 29536 - DNA, 122 bp, Homo sapiens
  misc_feature (61)..(62): /note="This region represents a CpG dinucleotide"
  misc_feature (61)..(61): /note="Nucleotide may be methylated to form 5-methylcytosine"
tgaatcccaggtgacaaagaggctggcatcatataaacgcttaatgacagagtaccacatcgcaagtcattctctcaaggcacagaacccggacacacctgcccaggaacagtatcgtgtcc

SEQ ID NO: 29537 - DNA, 122 bp, Homo sapiens
  misc_feature (61)..(62): /note="This region represents a CpG dinucleotide"
  misc_feature (61)..(61): /note="Nucleotide may be methylated to form 5-methylcytosine"
atgtttatttacccagagatgagaacctggaggccacactatgtggtggttactgtaccacgtaggacagcccagctagcgaagtccctggggttagtgaacaacacacaaaaataaggtta

SEQ ID NO: 29538 - DNA, 122 bp, Homo sapiens
  misc_feature (61)..(62): /note="This region represents a CpG dinucleotide"
  misc_feature (61)..(61): /note="Nucleotide may be methylated to form 5-methylcytosine"
cccaagtttcctgagtgctgatggtaacacagtcaggtgccagcacggagttttgttggacgagcagctcatgagctgaattttgcaatgattggatgattgtgcatggactcatctcatca

SEQ ID NO: 29539 - DNA, 122 bp, Homo sapiens
  misc_feature (61)..(62): /note="This region represents a CpG dinucleotide"
  misc_feature (61)..(61): /note="Nucleotide may be methylated to form 5-methylcytosine"
taggctactactcccaactatgtgacagacacagcagctaagtgactaaagagcaggtaacgtctatggcactgctactctggacacagggatgattcatatcctggacaggtcagggtagg

SEQ ID NO: 29540 - DNA, 122 bp, Homo sapiens
  misc_feature (61)..(62): /note="This region represents a CpG dinucleotide"
  misc_feature (61)..(61): /note="Nucleotide may be methylated to form 5-methylcytosine"
tgttcttccccaggcctggtgactcacgtatcggaaaggcagcagcaaggctgtgacagccgccaggtcagccagagtgggggcctccccggccaagtaggtgtgcagccgaagccactcct

SEQ ID NO: 29541 - DNA, 122 bp, Homo sapiens
  misc_feature (61)..(62): /note="This region represents a CpG dinucleotide"
  misc_feature (61)..(61): /note="Nucleotide may be methylated to form 5-methylcytosine"
gtaacattgtccttggcttggtggccgtgtgccgatcggcatcatcgtcatatctgtaaacgtgttggtccattttcattccagctctgttcttagccaggggagtctgaatccagcccagt

SEQ ID NO: 29542 - DNA, 122 bp, Homo sapiens
  misc_feature (61)..(62): /note="This region represents a CpG dinucleotide"
  misc_feature (61)..(61): /note="Nucleotide may be methylated to form 5-methylcytosine"
tcagcgctgtcccaccaacctattgcagcagctgagcctggtcctgtccaccacagcccacgtctgagcactggaacacacaagagtttgggccctcaagaccactctcagcctgagccctg

SEQ ID NO: 29543 - DNA, 122 bp, Homo sapiens
  misc_feature (61)..(62): /note="This region represents a CpG dinucleotide"
  misc_feature (61)..(61): /note="Nucleotide may be methylated to form 5-methylcytosine"
gcctttttcccccataaatagaacaaacagatgctatctgcaaggcccacagcacatctgcgtggatgaagcagcagcactcaagtgtcctgggaaaggagtgatttgcatgtttgctatct

SEQ ID NO: 29544 - DNA, 122 bp, Homo sapiens
  misc_feature (61)..(62): /note="This region represents a CpG dinucleotide"
  misc_feature (61)..(61): /note="Nucleotide may be methylated to form 5-methylcytosine"
cagacacagatgtgcacacactccgatgggggggggttcttgtctaactgcagacatagacgactgcaaaccccaatgaggggttcctgtccaactgcagacacagatgtgcacacaccctg

SEQ ID NO: 29545 - DNA, 122 bp, Homo sapiens
  misc_feature (61)..(62): /note="This region represents a CpG dinucleotide"
  misc_feature (61)..(61): /note="Nucleotide may be methylated to form 5-methylcytosine"
aaaaccctgaagttaaatgtcactttactaggggttgggggtaataggaggggatcaaaccgaggccagagaggggaggccaggttgtaaagggtctatgaactacttgaggaaatttaaat

SEQ ID NO: 29546 - DNA, 122 bp, Homo sapiens
  misc_feature (61)..(62): /note="This region represents a CpG dinucleotide"
  misc_feature (61)..(61): /note="Nucleotide may be methylated to form 5-methylcytosine"
gtggcctcctctggtcacgtgaggcccgtgatgggacacactgggtgcccctctctgtaacgggttccccaggaccacaggtgctgccaaagatattttgtgtcacataaacttagaaacgt

SEQ ID NO: 29547 - DNA, 122 bp, Homo sapiens
  misc_feature (61)..(62): /note="This region represents a CpG dinucleotide"
  misc_feature (61)..(61): /note="Nucleotide may be methylated to form 5-methylcytosine"
tttacacaccagcatgatgaggaagaagtaagaatgcagatgagaaagagtgggcaatgtcgaaagaggaaaaccacaagagcgttgtcttgaagtcaaaatgaagaaagtatttcaaaaaa

SEQ ID NO: 29548 - DNA, 122 bp, Homo sapiens
  misc_feature (61)..(62): /note="This region represents a CpG dinucleotide"
  misc_feature (61)..(61): /note="Nucleotide may be methylated to form 5-methylcytosine"
ctagaaaatgtgtgaacttaaaacaactatgagtccctgagccacaatctctttctccttcgaggccagcttctcccgtggccttgcttctctctctctcactttgcccatgctgttcgctg

SEQ ID NO: 29549 - DNA, 122 bp, Homo sapiens
  misc_feature (61)..(62): /note="This region represents a CpG dinucleotide"
  misc_feature (61)..(61): /note="Nucleotide may be methylated to form 5-methylcytosine"
gcaggggaaatgagaacagacccttgttcatgtttttgccatctttatcagcctggaggccgttactgtgacgaatgaactcccacaattttcagttttttcttcagtatattattaagtaa

SEQ ID NO: 29550 - DNA, 122 bp, Homo sapiens
  misc_feature (61)..(62): /note="This region represents a CpG dinucleotide"
  misc_feature (61)..(61): /note="Nucleotide may be methylated to form 5-methylcytosine"
agtagatgcaaagggatgacaaccagtatctacaatgaactacgaccatcatcataatagcggcgattgacatttattgagtacttatgctaattcttggtagatatgatcttatttgatcc

SEQ ID NO: 29551 - DNA, 122 bp, Homo sapiens
  misc_feature (61)..(62): /note="This region represents a CpG dinucleotide"
  misc_feature (61)..(61): /note="Nucleotide may be methylated to form 5-methylcytosine"
tcgcgacgcctccagcaggcccggctgccccactgcgcacatgggcacaggcttggcacacgcactgcggcattcacgtatccgcgaacacatgggtatctatttatacatgaagacacgaa

SEQ ID NO: 29552 - DNA, 122 bp, Homo sapiens
  misc_feature (61)..(62): /note="This region represents a CpG dinucleotide"
  misc_feature (61)..(61): /note="Nucleotide may be methylated to form 5-methylcytosine"
gttcatttcttaattccctcctcttcaggctacgactggcaaagatgagggaggctgaagcggcccaggggcaggcaggtaaagaatacacccaccccaccccccaggcccaacacctgaac

SEQ ID NO: 29553 - DNA, 122 bp, Homo sapiens
  misc_feature (61)..(62): /note="This region represents a CpG dinucleotide"
  misc_feature (61)..(61): /note="Nucleotide may be methylated to form 5-methylcytosine"
acgcaatccacaaaggaaaaggttagccatactgggcaagcaagactttcatgcagggcacgacctgcccaatctcaggtagtggccctgtaaactagatactattgtccagcataatccct

SEQ ID NO: 29554 - DNA, 122 bp, Homo sapiens
  misc_feature (61)..(62): /note="This region represents a CpG dinucleotide"
  misc_feature (61)..(61): /note="Nucleotide may be methylated to form 5-methylcytosine"
taaaaatgaagaagacagttaatgacgtctcctccctgtctgcctcactgggtaagcattcgcccagccaacatctggaacatcccagttctgcaaagagccacacccttcccagaaagagc

SEQ ID NO: 29555 - DNA, 122 bp, Homo sapiens
  misc_feature (61)..(62): /note="This region represents a CpG dinucleotide"
  misc_feature (61)..(61): /note="Nucleotide may be methylated to form 5-methylcytosine"
taagctacatcctaaaataacccagagtactatgaccctgtgcatcacattagactcatacgactcatactcttttcccttcccatccctcctgtaatctcaggactcagccaagctcactg

SEQ ID NO: 29556 - DNA, 122 bp, Homo sapiens
  misc_feature (61)..(62): /note="This region represents a CpG dinucleotide"
  misc_feature (61)..(61): /note="Nucleotide may be methylated to form 5-methylcytosine"
cgccgtcttcatggtcaggctgaaatgtcacagtctggttatccagcaggacacggattgcgtcgtgaggctcaaggagccattggacctggaaggagatgggagggggcctgagcccgacc

SEQ ID NO: 29557 - DNA, 122 bp, Homo sapiens
  misc_feature (61)..(62): /note="This region represents a CpG dinucleotide"
  misc_feature (61)..(61): /note="Nucleotide may be methylated to form 5-methylcytosine"
ccttgcttggcagaggaggcagcgcgggcaggccagccaaatgcttgggcgacagggaagcgtggagtctgcgggcttgcggcggatttatcagcgcagccatgccacctccctgctcacaa

SEQ ID NO: 29558 - DNA, 122 bp, Homo sapiens
  misc_feature (61)..(62): /note="This region represents a CpG dinucleotide"
  misc_feature (61)..(61): /note="Nucleotide may be methylated to form 5-methylcytosine"
gtcatgtgggattaactggactcaactgtccagcataccttaggtatgaacatgaaggtgcgcaagatcatgcccaaaggttcactagtagtagatggcttataaaatacctgctcataggc

SEQ ID NO: 29559 - DNA, 122 bp, Homo sapiens
  misc_feature (61)..(62): /note="This region represents a CpG dinucleotide"
  misc_feature (61)..(61): /note="Nucleotide may be methylated to form 5-methylcytosine"
tgcatacttgcactgaccagggtacattaccacactgcagtgcacttgggcacagatgggcgtgttgaccttgtgccttctttgtgtgtgcacaggctcatgttcacacatgtacacaggtt

SEQ ID NO: 29560 - DNA, 122 bp, Homo sapiens
  misc_feature (61)..(62): /note="This region represents a CpG dinucleotide"
  misc_feature (61)..(61): /note="Nucleotide may be methylated to form 5-methylcytosine"
gcttggtggctgctttgagcccctgccagggcagggagcccaggttgaagtacatgagcacgtagcccaggctctccaggtcatctcgacggctttgctctgcacagagagtcaaagactag

SEQ ID NO: 29561 - DNA, 122 bp, Homo sapiens
  misc_feature (61)..(62): /note="This region represents a CpG dinucleotide"
  misc_feature (61)..(61): /note="Nucleotide may be methylated to form 5-methylcytosine"
tgagaaggaacactggatgttgtgggaagtggttagcataggctgtatggttttgtggaacgtgccctggaatatgtaccaataggtgtttttatggtgataatgatagaggatctcaagtg

SEQ ID NO: 29562 - DNA, 122 bp, Homo sapiens
  misc_feature (61)..(62): /note="This region represents a CpG dinucleotide"
  misc_feature (61)..(61): /note="Nucleotide may be methylated to form 5-methylcytosine"
cccgcgccccgcgcccctcgccaacccccggtgcgagcccagggcaccgagccccgcagccgctcaggcccacccggtgcctgcagccagcgcacactgggtgctgggaccagcactgagcg

SEQ ID NO: 29563 - DNA, 122 bp, Homo sapiens
  misc_feature (61)..(62): /note="This region represents a CpG dinucleotide"
  misc_feature (61)..(61): /note="Nucleotide may be methylated to form 5-methylcytosine"
tacttgttacacaacccttatattcctaaaggttttactttatccctttatgatgacaatcgttagactggctagtggttaagagcacagattctggaatcagacaattgatttgaatcttg

SEQ ID NO: 29564 - DNA, 122 bp, Homo sapiens
  misc_feature (61)..(62): /note="This region represents a CpG dinucleotide"
  misc_feature (61)..(61): /note="Nucleotide may be methylated to form 5-methylcytosine"
tagaaaatgatcatcaatggctactacaatcaagagaggaaaggttgatggacacctttacgtggatggatcaggctacaagacctgggttcactaatcaatcttaagattacaaaaagaga

SEQ ID NO: 29565 - DNA, 122 bp, Homo sapiens
  misc_feature (61)..(62): /note="This region represents a CpG dinucleotide"
  misc_feature (61)..(61): /note="Nucleotide may be methylated to form 5-methylcytosine"
atgtcacgactaacagatcactccaggcatagtagttctcatcggctcaatgaacagtcacgacatagcagcatcagagatctcagtaataatcccatgactcatatcacacatggcaccag

SEQ ID NO: 29566 - DNA, 122 bp, Homo sapiens
  misc_feature (61)..(62): /note="This region represents a CpG dinucleotide"
  misc_feature (61)..(61): /note="Nucleotide may be methylated to form 5-methylcytosine"
aaagcccaatatatgacatttacattattatgactctgtaaacgttccctgtcaggccaccgtgatacatgctaagaatatatttctttttctatgggtctaatgaaaacagttaatggtga

SEQ ID NO: 29567 - DNA, 122 bp, Homo sapiens
  misc_feature (61)..(62): /note="This region represents a CpG dinucleotide"
  misc_feature (61)..(61): /note="Nucleotide may be methylated to form 5-methylcytosine"
aagaccaagggactttttacttacttcacattagtctcaaaatgtatgcatttctccaaacgtgaaggctttgtgtcctatttctctgatcttcagaaaaaaacacaagagagcgagtagag

SEQ ID NO: 29568 - DNA, 122 bp, Homo sapiens
  misc_feature (61)..(62): /note="This region represents a CpG dinucleotide"
  misc_feature (61)..(61): /note="Nucleotide may be methylated to form 5-methylcytosine"
taaacagtattttattgtataggtatactacatgtctttctccattcaccagttggtaggcgttgggtttgtctccatctgttggttcttgagaatagtgctactatggacatttacctaaa

SEQ ID NO: 29569 - DNA, 122 bp, Homo sapiens
  misc_feature (61)..(62): /note="This region represents a CpG dinucleotide"
  misc_feature (61)..(61): /note="Nucleotide may be methylated to form 5-methylcytosine"
agaagaagaagaagaagaagaagaagaagaagaagaagaagaagaagaagaagaagaaggcggccaaatagaagcaaatggaaccaagacgtagggagagagaacctacctgatgacatagt

SEQ ID NO: 29570 - DNA, 122 bp, Homo sapiens
  misc_feature (61)..(62): /note="This region represents a CpG dinucleotide"
  misc_feature (61)..(61): /note="Nucleotide may be methylated to form 5-methylcytosine"
gaaaggcatatcagtgttgatagctgtggaggataagaacgctgacaataataatgagtacgataatatcagtgccttggatttatgcagtatcattacttcggggctttgcgtgcctccta

SEQ ID NO: 29571 - DNA, 122 bp, Homo sapiens
  misc_feature (61)..(62): /note="This region represents a CpG dinucleotide"
  misc_feature (61)..(61): /note="Nucleotide may be methylated to form 5-methylcytosine"
ctaactggaacccctctgaaggaccactcatgtcttgtgtgtgagtaacagccatggaaacgtggttgaagaactgaactttaggacctggactacccagagcaacagctactgcattcaag

SEQ ID NO: 29572 - DNA, 122 bp, Homo sapiens
  misc_feature (61)..(62): /note="This region represents a CpG dinucleotide"
  misc_feature (61)..(61): /note="Nucleotide may be methylated to form 5-methylcytosine"
agcagagctgggtcacttgactccacccaatatccctaaatgcaaacatcccctacagaccgaggctggcaccttagagctggagtccatgcccgctctgaccaggagaagccaacctggtc

SEQ ID NO: 29573 - DNA, 122 bp, Homo sapiens
  misc_feature (61)..(62): /note="This region represents a CpG dinucleotide"
  misc_feature (61)..(61): /note="Nucleotide may be methylated to form 5-methylcytosine"
cttgaaccatcactcctcttacatagattcacagaccattcttcagaaagtttggaccaacgatgtcaagtttgccattctatctcctgaatgtgtggcaaacatcactagtcagttattga

SEQ ID NO: 29574 - DNA, 122 bp, Homo sapiens
  misc_feature (61)..(62): /note="This region represents a CpG dinucleotide"
  misc_feature (61)..(61): /note="Nucleotide may be methylated to form 5-methylcytosine"
catttaatcttcacaaccctacaaggaaggtgcatttgtgccattaccacctccattttacggatgaagaagctgagacacagagaaccttctgtattttgttgcattgctttgttttggta

SEQ ID NO: 29575 - DNA, 122 bp, Homo sapiens
  misc_feature (61)..(62): /note="This region represents a CpG dinucleotide"
  misc_feature (61)..(61): /note="Nucleotide may be methylated to form 5-methylcytosine"
gtctgggctgccgcgaggcaggtggcaacgtggcccggggaggccgacacgaggcaagagcggggcccggagagaccgctgtcaggcaggagctgggcttctccaggccaccagggagccga

SEQ ID NO: 29576 - DNA, 122 bp, Homo sapiens
  misc_feature (61)..(62): /note="This region represents a CpG dinucleotide"
  misc_feature (61)..(61): /note="Nucleotide may be methylated to form 5-methylcytosine"
caacaatcggcccacaaaaattcctaaaaatgtaatcagttattgtaagctggtatgtaccggtcccaacaaaccactgactatcaaatattataaaggttacatattttggctctcaagca

SEQ ID NO: 29577 - DNA, 122 bp, Homo sapiens
  misc_feature (61)..(62): /note="This region represents a CpG dinucleotide"
  misc_feature (61)..(61): /note="Nucleotide may be methylated to form 5-methylcytosine"
cttaccagtgataacatctgaccaagataccaggcatttaccctatgcagaaaagtcctgcgtagatggagctgccacttcctcatttgtagtctgctctaatatttcacaatctgtgtagt

SEQ ID NO: 29578 - DNA, 122 bp, Homo sapiens
  misc_feature (61)..(62): /note="This region represents a CpG dinucleotide"
  misc_feature (61)..(61): /note="Nucleotide may be methylated to form 5-methylcytosine"
tctacaacactcttctacgcaccacagtttctggctgaggaggaagtgtgaacaggctggcgtgggcatgtcactctcactgggcctggcagagctggccagctgcaccgcccaatacaggg

SEQ ID NO: 29579 - DNA, 122 bp, Homo sapiens
  misc_feature (61)..(62): /note="This region represents a CpG dinucleotide"
  misc_feature (61)..(61): /note="Nucleotide may be methylated to form 5-methylcytosine"
gccatgattcgtttatgtagattggctgcagtttactgtaattggcaagttttgccacaccgtgtgtatttttttttagttatgtaaatagatgtgtgtttattcatagcttttcatcttta

SEQ ID NO: 29580 - DNA, 122 bp, Homo sapiens
  misc_feature (61)..(62): /note="This region represents a CpG dinucleotide"
  misc_feature (61)..(61): /note="Nucleotide may be methylated to form 5-methylcytosine"
tctctgtaagagttattgcatggatgctgcttctaggggcaggcaggcaggcaggcaaaccgtgctacatatttttaagaatgtcactggggaggaaaagaaagctctctttagacactacc

SEQ ID NO: 29581 - DNA, 122 bp, Homo sapiens
  misc_feature (61)..(62): /note="This region represents a CpG dinucleotide"
  misc_feature (61)..(61): /note="Nucleotide may be methylated to form 5-methylcytosine"
gaacacagcaggatgcaagcacatgatggctctggtggatgacttcatgagggtgtagagcgtagaacagaagagagaattagtcccaagagagaagtcagcatgctctgagcaggcctatt

SEQ ID NO: 29582 - DNA, 122 bp, Homo sapiens
  misc_feature (61)..(62): /note="This region represents a CpG dinucleotide"
  misc_feature (61)..(61): /note="Nucleotide may be methylated to form 5-methylcytosine"
acccccataaagatgcattttctagtaactaataaaaactggtcctgaagacaatagcctcgcgctcatctaaatacccgttgggatattgcaaattaacaccttgtaaagcaacccaatta

SEQ ID NO: 29583 - DNA, 122 bp, Homo sapiens
  misc_feature (61)..(62): /note="This region represents a CpG dinucleotide"
  misc_feature (61)..(61): /note="Nucleotide may be methylated to form 5-methylcytosine"
tcaggcttggttgtccagcatgataatgatgaggtccattaactcaagaaaaagactcaccgattaattcaataaatacctgctctgggccaaaaacattaagtgctgaggatacaaaaaca

SEQ ID NO: 29584 - DNA, 122 bp, Homo sapiens
  misc_feature (61)..(62): /note="This region represents a CpG dinucleotide"
  misc_feature (61)..(61): /note="Nucleotide may be methylated to form 5-methylcytosine"
agctgtgtcttagcaggatccccagggcattgcctcacagtcagggtggtgcaaaagtcccgcctggcatcctggtgagtggaccaggagggggcaggtgaaggcgatattattggtccttc

SEQ ID NO: 29585 - DNA, 122 bp, Homo sapiens
  misc_feature (61)..(62): /note="This region represents a CpG dinucleotide"
  misc_feature (61)..(61): /note="Nucleotide may be methylated to form 5-methylcytosine"
tcatgttttgaagtaagcacccagatcgacctgtcgggcagtgttgggagaatgtctgcacgtaggcgtggtcacgtccgtccctgttgcctgcgctgctccgagaagccccactctgacca

SEQ ID NO: 29586 - DNA, 122 bp, Homo sapiens
  misc_feature (61)..(62): /note="This region represents a CpG dinucleotide"
  misc_feature (61)..(61): /note="Nucleotide may be methylated to form 5-methylcytosine"
ttatgtcatagaaaccaatggaaaaaggaaatcagattccccagattccacccccgccctcgccccaggtagtgaaaagttagtgagacttcttgaaaaacaatagggtgtttccaggttaa

SEQ ID NO: 29587 - DNA, 122 bp, Homo sapiens
  misc_feature (61)..(62): /note="This region represents a CpG dinucleotide"
  misc_feature (61)..(61): /note="Nucleotide may be methylated to form 5-methylcytosine"
attattagaactaatcagcctctacctccctcgaggcagaggctcatctgtcattgaccccgggacacgtctgctccaggcatgctgactctggccttgacgttccccaagcacatggtatc

SEQ ID NO: 29588 - DNA, 122 bp, Homo sapiens
  misc_feature (61)..(62): /note="This region represents a CpG dinucleotide"
  misc_feature (61)..(61): /note="Nucleotide may be methylated to form 5-methylcytosine"
ccttgatctcggacttcccagcctccagaactgtgagcaataaatttgttgtttttaagccgcccagtctgtgatgttttgttttagcatcccagactaagtaagggtttaaaagaggtgat

SEQ ID NO: 29589 - DNA, 122 bp, Homo sapiens
  misc_feature (61)..(62): /note="This region represents a CpG dinucleotide"
  misc_feature (61)..(61): /note="Nucleotide may be methylated to form 5-methylcytosine"
ggaggctgtgatgtgagtgagaaagttccaactctaagctcccaaccaaggttcccacagcgagtcaacttgggtcaggtgcccactccagcttgaacaaggtgtggcaagaaataagagat

SEQ ID NO: 29590 - DNA, 122 bp, Homo sapiens
  misc_feature (61)..(62): /note="This region represents a CpG dinucleotide"
  misc_feature (61)..(61): /note="Nucleotide may be methylated to form 5-methylcytosine"
gtatatgacatgcaaatattttcccccattctgtgggttttctttttactttatggatatcgtcctttgaagcacaaaagttttaaattttgatcaagtccaatttacatattttttctttt

SEQ ID NO: 29591 - DNA, 122 bp, Homo sapiens
  misc_feature (61)..(62): /note="This region represents a CpG dinucleotide"
  misc_feature (61)..(61): /note="Nucleotide may be methylated to form 5-methylcytosine"
agatcaacactttgataatccatcactcaaattgtctcatactatagtatcctaagcctccgtatctttggctgtaaacaagtagacttagcttgtttagatcagatgctatttctctccct

SEQ ID NO: 29592 - DNA, 122 bp, Homo sapiens
  misc_feature (61)..(62): /note="This region represents a CpG dinucleotide"
  misc_feature (61)..(61): /note="Nucleotide may be methylated to form 5-methylcytosine"
ggaaggccagcatttgagtgacagagatgcttgccctatcctgttgctggcttctttctccgtccctgtgtcaagctgtggctagatttctcaatgagggcaaagggcgagaggagtgagaa

SEQ ID NO: 29593 - DNA, 122 bp, Homo sapiens
  misc_feature (61)..(62): /note="This region represents a CpG dinucleotide"
  misc_feature (61)..(61): /note="Nucleotide may be methylated to form 5-methylcytosine"
ctaccatgtataaaacacacagatgcagctcaaagaaactttggtcatcgctccatggctcggttccctcatatgtaaaatgcaaataataatgtatcttcctttgaggaaaactgtgaaga

SEQ ID NO: 29594 - DNA, 122 bp, Homo sapiens
  misc_feature (61)..(62): /note="This region represents a CpG dinucleotide"
  misc_feature (61)..(61): /note="Nucleotide may be methylated to form 5-methylcytosine"
ttcactatccagtaagtttttcagcacttactgaatcattcccatggactaacttcagcccgccttccagtgaatttctcagctgcctactacatactttttgtgaaccagttacaactaaa

SEQ ID NO: 29595 - DNA, 122 bp, Homo sapiens
  misc_feature (61)..(62): /note="This region represents a CpG dinucleotide"
  misc_feature (61)..(61): /note="Nucleotide may be methylated to form 5-methylcytosine"
atagcttattgtttaggtaagaacaacagaacagagaggcagagggattcccgaggtttgcggagcggatcggtaagggtgagccccgaacctgtcttcgctcagttccatagtcgacagcc

SEQ ID NO: 29596 - DNA, 122 bp, Homo sapiens
  misc_feature (61)..(62): /note="This region represents a CpG dinucleotide"
  misc_feature (61)..(61): /note="Nucleotide may be methylated to form 5-methylcytosine"
tagaatagctcactctcttcccctgggtatcagcatgttgcgtggaggaggtactggctgcgtttcactaaggaatcctttataggtgggtgtgaacagagagccacagaaatatgttgaat

SEQ ID NO: 29597 - DNA, 122 bp, Homo sapiens
  misc_feature (61)..(62): /note="This region represents a CpG dinucleotide"
  misc_feature (61)..(61): /note="Nucleotide may be methylated to form 5-methylcytosine"
gtttgttcactgatgaactgaaagcagtgtctggggtagggtagctactcactaaatattcgtgaaatgcctgctggatgagttatttctcttttcctccttggctgagatgaagggagaga

SEQ ID NO: 29598 - DNA, 122 bp, Homo sapiens
  misc_feature (61)..(62): /note="This region represents a CpG dinucleotide"
  misc_feature (61)..(61): /note="Nucleotide may be methylated to form 5-methylcytosine"
aggtgaagttacaatgaaactctgatgttgggggggaaactgacacctgttctatttccacgtcaggtcacaaaaggcagtaccatctgttgccaagtatcagaaacctctctcatccagcc

SEQ ID NO: 29599 - DNA, 122 bp, Homo sapiens
  misc_feature (61)..(62): /note="This region represents a CpG dinucleotide"
  misc_feature (61)..(61): /note="Nucleotide may be methylated to form 5-methylcytosine"
ctccctcttcctttgataggcaggtccacgagatccagtcttgcatgggacgcctggagacggcagacaagcagtctgtgcacagtgagtaattaactgtggagaccagagtcctttctctg

SEQ ID NO: 29600 - DNA, 122 bp, Homo sapiens
  misc_feature (61)..(62): /note="This region represents a CpG dinucleotide"
  misc_feature (61)..(61): /note="Nucleotide may be methylated to form 5-methylcytosine"
gtctctctggaatcagatggaataaatatagacaaataaatataaatatacaccagctcacgcacagagacatcaaatggagtgccgggtttacaaattgctgactgtgttcataaacaaac

SEQ ID NO: 29601 - DNA, 122 bp, Homo sapiens
  misc_feature (61)..(62): /note="This region represents a CpG dinucleotide"
  misc_feature (61)..(61): /note="Nucleotide may be methylated to form 5-methylcytosine"
cccatgctctgagaaggttgggtttgtacaggataacttgtatcatactgagcgtgtggacgcaactctcatgggcaaagggaaaaggcaaattgccctactaaaaggaaaggaaattgcac

SEQ ID NO: 29602 - DNA, 122 bp, Homo sapiens
  misc_feature (61)..(62): /note="This region represents a CpG dinucleotide"
  misc_feature (61)..(61): /note="Nucleotide may be methylated to form 5-methylcytosine"
cagcccctggatatgggcagggcacctaggaaagctgaaaaacaagtagttgcatttggccgggctgtgtttcagatgaagaactggaagacaaccccaaccagagtgacctgattgagcag

SEQ ID NO: 29603 - DNA, 122 bp, Homo sapiens
  misc_feature (61)..(62): /note="This region represents a CpG dinucleotide"
  misc_feature (61)..(61): /note="Nucleotide may be methylated to form 5-methylcytosine"
tagctcaatatatcctctggggaccatcaacatttcctattaaagataactacacctggccgagcgcggtggctaacgcctgtaatcccagaactttgggaagccaaggcgggtggatcaca

SEQ ID NO: 29604 - DNA, 122 bp, Homo sapiens
  misc_feature (61)..(62): /note="This region represents a CpG dinucleotide"
  misc_feature (61)..(61): /note="Nucleotide may be methylated to form 5-methylcytosine"
tgaccgcagagtcatatcaagtccgttgttataagtactttagttttaacagtgcagaaacgtgaaggataggtttactttttaactccaaccctgttcaaagatcacttattggcctctga

SEQ ID NO: 29605 - DNA, 122 bp, Homo sapiens
  misc_feature (61)..(62): /note="This region represents a CpG dinucleotide"
  misc_feature (61)..(61): /note="Nucleotide may be methylated to form 5-methylcytosine"
gaggccaggtggagggatttcactttcagtcactttgctgcagatgtctccgccagtgggcgctggctgccagagaaagtccccagacaaaggatgcaggtgctggacttagaaatcctgca

SEQ ID NO: 29606 - DNA, 122 bp, Homo sapiens
  misc_feature (61)..(62): /note="This region represents a CpG dinucleotide"
  misc_feature (61)..(61): /note="Nucleotide may be methylated to form 5-methylcytosine"
ctctcggaagccaggacatgtgtggactgcgccctccctggaggttacacggagtgctggcgcagcacgctggctccgggccctcccgcttgctctcagggctccttccagcgttcactggg

SEQ ID NO: 29607 - DNA, 122 bp, Homo sapiens
  misc_feature (61)..(62): /note="This region represents a CpG dinucleotide"
  misc_feature (61)..(61): /note="Nucleotide may be methylated to form 5-methylcytosine"
gcgcaggagaggcaaaaatgtaatagtggtgagtttgatatagattgtgatgacatgccccgtgctgcccccaaaggtctttctatgcagtggggacagtgagagctgaggcagagtggcac

SEQ ID NO: 29608 - DNA, 122 bp, Homo sapiens
  misc_feature (61)..(62): /note="This region represents a CpG dinucleotide"
  misc_feature (61)..(61): /note="Nucleotide may be methylated to form 5-methylcytosine"
atgacctcctgtcatagaacattcagggacattgaaagagttcactggcatgggatacagcgtcatatccaccaccagatggacagggaatcagtgaaagatgattccattaagagaaaatt

SEQ ID NO: 29609 - DNA, 122 bp, Homo sapiens
  misc_feature (61)..(62): /note="This region represents a CpG dinucleotide"
  misc_feature (61)..(61): /note="Nucleotide may be methylated to form 5-methylcytosine"
tggattaaaaacagcacatgatatatcaattgcagttcctggtttacagttttaagtaatcgagagtgagttatttaaactgctctttttgataaacatattttaaagagggctttttctcc

SEQ ID NO: 29610 - DNA, 122 bp, Homo sapiens
  misc_feature (61)..(62): /note="This region represents a CpG dinucleotide"
  misc_feature (61)..(61): /note="Nucleotide may be methylated to form 5-methylcytosine"
ctcgtatgactgtctgctccttggcagagtcaccaggtgtccagatcagccttagaaacccggtctgatcagtttcctgggaactacaaggctcctgtgaatcctctctccctctgcaagct

SEQ ID NO: 29611 - DNA, 122 bp, Homo sapiens
  misc_feature (61)..(62): /note="This region represents a CpG dinucleotide"
  misc_feature (61)..(61): /note="Nucleotide may be methylated to form 5-methylcytosine"
aaccccaggtccatgtgtccaaatccccgtagccagggcggcggccagccaaagaaatgccgccccgagcaggcgcgtgcggctcctggcattctgggtttcatacccgtagggctcgggtg

SEQ ID NO: 29612 - DNA, 122 bp, Homo sapiens
  misc_feature (61)..(62): /note="This region represents a CpG dinucleotide"
  misc_feature (61)..(61): /note="Nucleotide may be methylated to form 5-methylcytosine"
agggtcatatgaagaactccataatgttcttgccaagaaaaaagatgattgagtatataacgaacttcagatacagtgtatagaggatgatgcatttgtggcataataaatagttttcagtg

SEQ ID NO: 29613 - DNA, 122 bp, Homo sapiens
  misc_feature (61)..(62): /note="This region represents a CpG dinucleotide"
  misc_feature (61)..(61): /note="Nucleotide may be methylated to form 5-methylcytosine"
actactgacattttcgtttctgccccaagaggatgacagttgaacaaaaccttgaagtcccgatgtacctctgacaactcccagtcagctacatccttgggataattttatttttcccttaa

SEQ ID NO: 29614 - DNA, 122 bp, Homo sapiens
  misc_feature (61)..(62): /note="This region represents a CpG dinucleotide"
  misc_feature (61)..(61): /note="Nucleotide may be methylated to form 5-methylcytosine"
aggtcagggtgtggacacggaggcagccaggcctgatctgctgggggaaccacactgggccgggcgtggagaggaggtttgccgtgtgtgcagcagcttgcagggagccagctgccgagagc

SEQ ID NO: 29615 - DNA, 122 bp, Homo sapiens
  misc_feature (61)..(62): /note="This region represents a CpG dinucleotide"
  misc_feature (61)..(61): /note="Nucleotide may be methylated to form 5-methylcytosine"
gaaatgcagagaggaaataaggagtcagaaaggatgacctggagtagcaggaaagtagcacgaaagacacagagggagcagcatatgcaaagttacaggttaagtgcatgatgcattcagga

SEQ ID NO: 29616 - DNA, 122 bp, Homo sapiens
  misc_feature (61)..(62): /note="This region represents a CpG dinucleotide"
  misc_feature (61)..(61): /note="Nucleotide may be methylated to form 5-methylcytosine"
tactgaagtgttacccgctataactcctatttgtttaaaagaaataagcgactcagagcgcggggtgtgaatactggagaggaagggaaaggtgggctgggcatgtaccggcgaggcaaggg

SEQ ID NO: 29617 - DNA, 122 bp, Homo sapiens
  misc_feature (61)..(62): /note="This region represents a CpG dinucleotide"
  misc_feature (61)..(61): /note="Nucleotide may be methylated to form 5-methylcytosine"
tgtgatgagtgtgcagagcagggggtgggaagactgtgactgcagcctaaggcttggaagcgggtgactagactcaagactctgcatgtatgagatgttttggaattccaaccgttcttttt

SEQ ID NO: 29618 - DNA, 122 bp, Homo sapiens
  misc_feature (61)..(62): /note="This region represents a CpG dinucleotide"
  misc_feature (61)..(61): /note="Nucleotide may be methylated to form 5-methylcytosine"
cccaacctgtctttatgttttataacagctcccttcctgacccttcaggcccaggggtggcgacagtgtcactagcctggagaactgtttccagcacctgccggtagccttgcagagcacta

SEQ ID NO: 29619 - DNA, 122 bp, Homo sapiens
  misc_feature (61)..(62): /note="This region represents a CpG dinucleotide"
  misc_feature (61)..(61): /note="Nucleotide may be methylated to form 5-methylcytosine"
ctcaagagataacaaaagcacccgcctcctaggatgacatgagttcatgtgcacagagtgcgtagaacaagtgagtcagcttactcagtgattacaggaagtgtctacggggttatccctgc

SEQ ID NO: 29620 - DNA, 122 bp, Homo sapiens
  misc_feature (61)..(62): /note="This region represents a CpG dinucleotide"
  misc_feature (61)..(61): /note="Nucleotide may be methylated to form 5-methylcytosine"
gagcgtcctggcagcagacggaaagctcattagtgagctgcttcccctaatagatgagtacgttttgctcagaataaggaagaaggaagtcaacaaaataagagaaggagatgttaagaaac

SEQ ID NO: 29621 - DNA, 122 bp, Homo sapiens
  misc_feature (61)..(62): /note="This region represents a CpG dinucleotide"
  misc_feature (61)..(61): /note="Nucleotide may be methylated to form 5-methylcytosine"
gggaggcaggcttggggactgagccctcagcgaatggtgtctgacccatctccaagtagacggcgtcggaattaaactggaggacacccagctggtgcccgctgcagaactcactgaactca

SEQ ID NO: 29622 - DNA, 122 bp, Homo sapiens
  misc_feature (61)..(62): /note="This region represents a CpG dinucleotide"
  misc_feature (61)..(61): /note="Nucleotide may be methylated to form 5-methylcytosine"
ggctgaagggcacacatgctacttctggggcttggcacgatctctccagagaagtgtgcacgtgggcctaagcaccacggcgttctgcagagaggaggcagcttggcatcagaaacccgggt

SEQ ID NO: 29623 - DNA, 122 bp, Homo sapiens
  misc_feature (61)..(62): /note="This region represents a CpG dinucleotide"
  misc_feature (61)..(61): /note="Nucleotide may be methylated to form 5-methylcytosine"
actgcttctgtttaaatcctttgctgaatatttgtcacccatagccttttaggtctgacccgttctaaactgctgggcctatcaaacaatttatcagggagggcccttctccaataggacag

SEQ ID NO: 29624 - DNA, 122 bp, Homo sapiens
  misc_feature (61)..(62): /note="This region represents a CpG dinucleotide"
  misc_feature (61)..(61): /note="Nucleotide may be methylated to form 5-methylcytosine"
gattagctagttgtgtaacactcattagcatagcaaactggtggacgtgctgacgcaggccgcctgcctcagcagctgggtcggtcagaattgctttaacaatctttgtcctctttttatcc

SEQ ID NO: 29625 - DNA, 122 bp, Homo sapiens
  misc_feature (61)..(62): /note="This region represents a CpG dinucleotide"
  misc_feature (61)..(61): /note="Nucleotide may be methylated to form 5-methylcytosine"
ttttctggtacaaaggtccaggcatcatttagcagaaacctatgctcaccccaatcacgacgattagtttgccctcagtgtaactgacgatctttggccatggaaagtgtgctgagggagct

SEQ ID NO: 29626 - DNA, 122 bp, Homo sapiens
  misc_feature (61)..(62): /note="This region represents a CpG dinucleotide"
  misc_feature (61)..(61): /note="Nucleotide may be methylated to form 5-methylcytosine"
aggggaagagaagaatggaaagttgcaccagctcttaacagcctcaactcagagatgacacgtgtctcttctgctcccaatccctcagccagaattagtaatgtgggctgctgaaaaatgtc

SEQ ID NO: 29627 - DNA, 122 bp, Homo sapiens
  misc_feature (61)..(62): /note="This region represents a CpG dinucleotide"
  misc_feature (61)..(61): /note="Nucleotide may be methylated to form 5-methylcytosine"
gtttcattagcatttggggctcatcctccctccccctcccttgacccacccccctccccccgccggacctctgccaggggcagaagagaaaacagccagttattatacaaacatcctcagtt

SEQ ID NO: 29628 - DNA, 122 bp, Homo sapiens
  misc_feature (61)..(62): /note="This region represents a CpG dinucleotide"
  misc_feature (61)..(61): /note="Nucleotide may be methylated to form 5-methylcytosine"
aacaatacaaaatgacttgcctatgaaagtattgtgatcagagtttgacttcagctttaacggccaagaaacagaagatgtgagtcactgccaaatatgcatattggtttattttgtgtgcg

SEQ ID NO: 29629 - DNA, 122 bp, Homo sapiens
  misc_feature (61)..(62): /note="This region represents a CpG dinucleotide"
  misc_feature (61)..(61): /note="Nucleotide may be methylated to form 5-methylcytosine"
tcatactacgttcccttgcataatattcacaagatcctacttttggagagtggtgttggccgctcctagctggtgaataacacagaaacatcccaaagcctcttctcagcaaggatggggac

SEQ ID NO: 29630 - DNA, 122 bp, Homo sapiens
  misc_feature (61)..(62): /note="This region represents a CpG dinucleotide"
  misc_feature (61)..(61): /note="Nucleotide may be methylated to form 5-methylcytosine"
catgaatattgcagcaaagcagaagctgcctcaccttttctgatttcgctttggaagtcacgtaacatgacttccaccacattctattaattacaagtgagtcatgagcctgctcaaattca

SEQ ID NO: 29631 - DNA, 122 bp, Homo sapiens
  misc_feature (61)..(62): /note="This region represents a CpG dinucleotide"
  misc_feature (61)..(61): /note="Nucleotide may be methylated to form 5-methylcytosine"
tgaaacctattgcacactatttgcaactaaaatacagggtgctctttattaccaattatacgagctctgtatggtcaattacttcttttacaagacaattttgatgaatacaataatgttgc

SEQ ID NO: 29632 - DNA, 122 bp, Homo sapiens
  misc_feature (61)..(62): /note="This region represents a CpG dinucleotide"
  misc_feature (61)..(61): /note="Nucleotide may be methylated to form 5-methylcytosine"
aagttctttggaaatttactaactacaattgtctgggaatcaaaccagaaatcacactagcggacggttcaaatgagcacaaaggagagcagattcaataacactgctgaccaagcaactag

SEQ ID NO: 29633 - DNA, 122 bp, Homo sapiens
  misc_feature (61)..(62): /note="This region represents a CpG dinucleotide"
  misc_feature (61)..(61): /note="Nucleotide may be methylated to form 5-methylcytosine"
ggaatcaagaagatctaggtatcagtcttggctcctctgtgtaggagctgtttgatcttgcgtaatcaacaaaatcagcaacaatgacagcagcagctacattcacttagtgcttgttttgt

SEQ ID NO: 29634 - DNA, 122 bp, Homo sapiens
  misc_feature (61)..(62): /note="This region represents a CpG dinucleotide"
  misc_feature (61)..(61): /note="Nucleotide may be methylated to form 5-methylcytosine"
gaccaggcctctgtttcacacagtcgggtcgtttttagtcagtgatccaagggggccgggcggtgaaccaagtctaacggaggcagtcacagttcagtgacagagttccttcctggttctga

SEQ ID NO: 29635 - DNA, 122 bp, Homo sapiens
  misc_feature (61)..(62): /note="This region represents a CpG dinucleotide"
  misc_feature (61)..(61): /note="Nucleotide may be methylated to form 5-methylcytosine"
tcataccctagcctggaactactaaatctgtctgcattttaaccagatccccaggtgatccgatgcattggaaagtgtgagaaggcctgggcggggataggaggatgaacctgcaacaggaa

SEQ ID NO: 29636 - DNA, 122 bp, Homo sapiens
  misc_feature (61)..(62): /note="This region represents a CpG dinucleotide"
  misc_feature (61)..(61): /note="Nucleotide may be methylated to form 5-methylcytosine"
catgagccacttcacccagcccaatcactgtcttttaattgtggaattttacttggcaagcgtctccttgtcaacatagtaagacttttttcccctacattatttttatatttatataacaa

SEQ ID NO: 29637 - DNA, 122 bp, Homo sapiens
  misc_feature (61)..(62): /note="This region represents a CpG dinucleotide"
  misc_feature (61)..(61): /note="Nucleotide may be methylated to form 5-methylcytosine"
gattaaagagctgttataactctctgtttattttaggaaagattaatggttccccctcctcgtttctcagggacagactttaatctgtctagagtgagtcatgaaatatatcagctcaaccg

SEQ ID NO: 29638 - DNA, 122 bp, Homo sapiens
  misc_feature (61)..(62): /note="This region represents a CpG dinucleotide"
  misc_feature (61)..(61): /note="Nucleotide may be methylated to form 5-methylcytosine"
gtccctgggacgtgagggagggggtggaccctgagcccggaagtcaaggcaccgcctcctcgccccaaaatcttccctgcaagcccagcgacccctgcaaacgctgcctgtttctgccaggg

SEQ ID NO: 29639 - DNA, 122 bp, Homo sapiens
  misc_feature (61)..(62): /note="This region represents a CpG dinucleotide"
  misc_feature (61)..(61): /note="Nucleotide may be methylated to form 5-methylcytosine"
gcctaagatcttcacatgaagccaggagactataatagaagagctcacctaaaacaagttcgtcagagaaagactgggctaggaaaaaaaccactaaggctgggcacggtggctcacggctg

SEQ ID NO: 29640 - DNA, 122 bp, Homo sapiens
  misc_feature (61)..(62): /note="This region represents a CpG dinucleotide"
  misc_feature (61)..(61): /note="Nucleotide may be methylated to form 5-methylcytosine"
gcctgaatcagctttttttttcttccttctctggcctctatctacctagtcctgaaatgacgtcatactctcttaacataaaagtaagtgaacaacattctcaatttctatttgaggctaac

SEQ ID NO: 29641 - DNA, 122 bp, Homo sapiens
  misc_feature (61)..(62): /note="This region represents a CpG dinucleotide"
  misc_feature (61)..(61): /note="Nucleotide may be methylated to form 5-methylcytosine"
gaatctctgtcactggggcaagaaattacagctgtgaacctgctggttagtgttctgtgccgaggccttgaacttatgattaacgtggttgacgtttctgtccagctcatcccatgctcagt

SEQ ID NO: 29642 - DNA, 122 bp, Homo sapiens
  misc_feature (61)..(62): /note="This region represents a CpG dinucleotide"
  misc_feature (61)..(61): /note="Nucleotide may be methylated to form 5-methylcytosine"
cagactgcgggcccagccacagccgtggagactaggcaggggcaggcgcctggggctccgcgaatgcagcatatatcctgctgatggcctaaggaacatacgctatgaagacagcctcacag

SEQ ID NO: 29643 - DNA, 122 bp, Homo sapiens
  misc_feature (61)..(62): /note="This region represents a CpG dinucleotide"
  misc_feature (61)..(61): /note="Nucleotide may be methylated to form 5-methylcytosine"
gcactaggaatccccagttctgactttttttgcctggaaagctcaagtggacaagccctacggcctacccaatgtctgctgacccggcacttagttgaaacagggtgtgctggttccctctc

SEQ ID NO: 29644 - DNA, 122 bp, Homo sapiens
  misc_feature (61)..(62): /note="This region represents a CpG dinucleotide"
  misc_feature (61)..(61): /note="Nucleotide may be methylated to form 5-methylcytosine"
cgagcaccgtgctgtagcttaacacagaaaatcccaatgttaggacagaacactactagccgtagtacagagggccacttcataataataaaacatatttagcaggaagagagaatacttgc

SEQ ID NO: 29645 - DNA, 122 bp, Homo sapiens
  misc_feature (61)..(62): /note="This region represents a CpG dinucleotide"
  misc_feature (61)..(61): /note="Nucleotide may be methylated to form 5-methylcytosine"
cagaagacgcaggcctcctggctcctcactcatttgaaattttaattatctgccagagcacgattcccacagccacccccactaggggtgggtgtgaaagaagctaaatagctccaaaatgc

SEQ ID NO: 29646 - DNA, 122 bp, Homo sapiens
  misc_feature (61)..(62): /note="This region represents a CpG dinucleotide"
  misc_feature (61)..(61): /note="Nucleotide may be methylated to form 5-methylcytosine"
tagctgggattacaggtgtgcaccaccacgcccagacattgttgtatttcttgtagagaccgggttttgccatgttggccaggctgttctcgaattcctgacctcaagtgatccgccgacct

SEQ ID NO: 29647 - DNA, 122 bp, Homo sapiens
  misc_feature (61)..(62): /note="This region represents a CpG dinucleotide"
  misc_feature (61)..(61): /note="Nucleotide may be methylated to form 5-methylcytosine"
ataaggagcaggtggaggaaacagcgtctctgtccagattgatggtccctcggcatgagacgctccacatgtgactttggccgccccacaccctgagctgtgttgccctggctcagaagccc

SEQ ID NO: 29648 - DNA, 122 bp, Homo sapiens
  misc_feature (61)..(62): /note="This region represents a CpG dinucleotide"
  misc_feature (61)..(61): /note="Nucleotide may be methylated to form 5-methylcytosine"
acataagggaggaagagtgtcatatcctttcaattgcttactgcctcctcttgtgagttacgcacactctctacaaaaataagatgtcctcgtgagaattgctttgtcagtattgttacttt

SEQ ID NO: 29649 - DNA, 122 bp, Homo sapiens
  misc_feature (61)..(62): /note="This region represents a CpG dinucleotide"
  misc_feature (61)..(61): /note="Nucleotide may be methylated to form 5-methylcytosine"
ttggaataccagcccttggtgattttatttatcctattcctcatttccctatttactctacgtttcagccatatcaagttacatttccagacatccctgaacatattgtgcactctctcatg

SEQ ID NO: 29650 - DNA, 122 bp, Homo sapiens
  misc_feature (61)..(62): /note="This region represents a CpG dinucleotide"
  misc_feature (61)..(61): /note="Nucleotide may be methylated to form 5-methylcytosine"
cgatgagatggtttaattatctgccttttctccccccacccccacccagcagcttcctgtcggacagactgaagcctggctgggctagtgacggtaaaaatcactgacagcaccagcaaaca

SEQ ID NO: 29651 - DNA, 122 bp, Homo sapiens
  misc_feature (61)..(62): /note="This region represents a CpG dinucleotide"
  misc_feature (61)..(61): /note="Nucleotide may be methylated to form 5-methylcytosine"
ctgaacagaagattgtttacaagattattttcttcttttaacctgcagggtcatgactaccgtacttcctcacactcctctccaggtcttttgttgtcaaaaggggcagctcacttatgtga

SEQ ID NO: 29652 - DNA, 122 bp, Homo sapiens
  misc_feature (61)..(62): /note="This region represents a CpG dinucleotide"
  misc_feature (61)..(61): /note="Nucleotide may be methylated to form 5-methylcytosine"
gaaggagagtggaggaggaagagccagccaagagcccccgggagctgagctgtgagtcaacgccaagtcctgggcggactccagcccagcaatggaacatcatccgctaaaataagcacccc

SEQ ID NO: 29653 - DNA, 122 bp, Homo sapiens
  misc_feature (61)..(62): /note="This region represents a CpG dinucleotide"
  misc_feature (61)..(61): /note="Nucleotide may be methylated to form 5-methylcytosine"
tttaatgaagccttcttataagcaggaattgctccatactttctggccagatataaacctcgcaatttacatcatcacattctatttatgaatcactatttggagtcgagtcacactgagtc

SEQ ID NO: 29654 - DNA, 122 bp, Homo sapiens
  misc_feature (61)..(62): /note="This region represents a CpG dinucleotide"
  misc_feature (61)..(61): /note="Nucleotide may be methylated to form 5-methylcytosine"
tcaacagccattcttcctcttctttgataaaaagaactgtgattttgttgatccttcttacgtttgccaagtccttcaggggaggctcagtgcctatccagccctacgtagtaaatattgat

SEQ ID NO: 29655 - DNA, 122 bp, Homo sapiens
  misc_feature (61)..(62): /note="This region represents a CpG dinucleotide"
  misc_feature (61)..(61): /note="Nucleotide may be methylated to form 5-methylcytosine"
ggactcttaatcttttgccatggctctgcactcacatagaaggcacctgtggcaattgagcgcctgcaatttcactataagctttacttagcagcactcagaatgttaagtagataaacggg

SEQ ID NO: 29656 - DNA, 122 bp, Homo sapiens
  misc_feature (61)..(62): /note="This region represents a CpG dinucleotide"
  misc_feature (61)..(61): /note="Nucleotide may be methylated to form 5-methylcytosine"
tttctggcacctctcaaatcagtccctgtgggtggccaccccctctcccatggaatggctcgccgggaacgggttaacacctcaaacacctaaacacagcgttcagctctgtccagacactc

SEQ ID NO: 29657 - DNA, 122 bp, Homo sapiens
  misc_feature (61)..(62): /note="This region represents a CpG dinucleotide"
  misc_feature (61)..(61): /note="Nucleotide may be methylated to form 5-methylcytosine"
cacaatactcctgtgctttgggtacattgtgaagtaaagtaacagttacctgaacataagcgcggagataccaccacagttgatctaacccagagtgctgctaagtgactaacgagcaggta

SEQ ID NO: 29658 - DNA, 122 bp, Homo sapiens
  misc_feature (61)..(62): /note="This region represents a CpG dinucleotide"
  misc_feature (61)..(61): /note="Nucleotide may be methylated to form 5-methylcytosine"
tcatcctgcctgtcccatttgggacatgaatcatccctttgccagcatctccacgctgtacgtgttcccccatcattagtcacttagtagccgtatcagtcatcaggtgactgctgcagggt

SEQ ID NO: 29659 - DNA, 122 bp, Homo sapiens
  misc_feature (61)..(62): /note="This region represents a CpG dinucleotide"
  misc_feature (61)..(61): /note="Nucleotide may be methylated to form 5-methylcytosine"
gcccctatcaacatgtcttgaaggtgtggccactggccgtttgcatcacctttctgtctacgtagcacctgtcagtgacccctgaccccagagcacctgcccttagccttgagaagcctgta

SEQ ID NO: 29660 - DNA, 122 bp, Homo sapiens
  misc_feature (61)..(62): /note="This region represents a CpG dinucleotide"
  misc_feature (61)..(61): /note="Nucleotide may be methylated to form 5-methylcytosine"
aaaaagagcaaaggaggaggtgctacacacttttaaacacccagatctcatgagaactcacgatcacgagagcagcaagaggcagatgcatcctcacgatctaatcacctcccaccaggccc

SEQ ID NO: 29661 - DNA, 122 bp, Homo sapiens
  misc_feature (61)..(62): /note="This region represents a CpG dinucleotide"
  misc_feature (61)..(61): /note="Nucleotide may be methylated to form 5-methylcytosine"
cacggctttcctctcacatttctaattgtttcctgttcctgtaatatgcaacagcttttccgtctgattacaaaggtaataatgcaaaaaattcacagaagtataacaaaggagggaaaaat

SEQ ID NO: 29662 - DNA, 122 bp, Homo sapiens
  misc_feature (61)..(62): /note="This region represents a CpG dinucleotide"
  misc_feature (61)..(61): /note="Nucleotide may be methylated to form 5-methylcytosine"
gagggaagcttggaggtttgcaggcaaaggagaagacttgaaattttggacacaggcccacgatcaattggctaatagaatgagtgacatcagacactaaacactgggcctatctgtgaagt

SEQ ID NO: 29663 - DNA, 122 bp, Homo sapiens
  misc_feature (61)..(62): /note="This region represents a CpG dinucleotide"
  misc_feature (61)..(61): /note="Nucleotide may be methylated to form 5-methylcytosine"
ggaaggagcccaagagagtcttgtgttttaagtggcctggtttgtcacgtgtcaagtccccgcctacaacaacagcatgttgacactcggtattctgaggggagagattatgtgcattatta

SEQ ID NO: 29664 - DNA, 122 bp, Homo sapiens
  misc_feature (61)..(62): /note="This region represents a CpG dinucleotide"
  misc_feature (61)..(61): /note="Nucleotide may be methylated to form 5-methylcytosine"
aggaattggagcctcagagaagtgaagggatctgacaaagatctcacagctggtaaatcacggagctggagtccatgtgactccagagcttgggctgtttaaccactaatgccctatcgtat

SEQ ID NO: 29665 - DNA, 122 bp, Homo sapiens
  misc_feature (61)..(62): /note="This region represents a CpG dinucleotide"
  misc_feature (61)..(61): /note="Nucleotide may be methylated to form 5-methylcytosine"
cttgaaatatctctgagtcatgcctgtactcttggtgaaaaggttcaaaggttatggaagcgtgggccaggaatgtgtcctataatccacaggcagcaggcattcagtttagggcttaagac

SEQ ID NO: 29666 - DNA, 122 bp, Homo sapiens
  misc_feature (61)..(62): /note="This region represents a CpG dinucleotide"
  misc_feature (61)..(61): /note="Nucleotide may be methylated to form 5-methylcytosine"
tgctcatttcactccagctacattgacctccttgcctttgttgtgttttgaaaacaccggcgtggtcctaccgcaggaattttgtacttactgttccttttgccacattcatcattcatatg

SEQ ID NO: 29667 - DNA, 122 bp, Homo sapiens
  misc_feature (61)..(62): /note="This region represents a CpG dinucleotide"
  misc_feature (61)..(61): /note="Nucleotide may be methylated to form 5-methylcytosine"
tagagttacttaagcgttcgtttactaatagccatttgtattgctcctgttaccagaaagcggtcgtgatccagtccccaagagagagttcttggaccttgctcaagaaaagaattcgggcg

SEQ ID NO: 29668 - DNA, 122 bp, Homo sapiens
  misc_feature (61)..(62): /note="This region represents a CpG dinucleotide"
  misc_feature (61)..(61): /note="Nucleotide may be methylated to form 5-methylcytosine"
gtttctggcaggacttctgatatcctgtgccagactgaccacaagtccctgccttggcatcgtagtgccaatataaaagccagggtaaaatattatctttcaaaatgtaaggctccagtgac

SEQ ID NO: 29669 - DNA, 122 bp, Homo sapiens
  misc_feature (61)..(62): /note="This region represents a CpG dinucleotide"
  misc_feature (61)..(61): /note="Nucleotide may be methylated to form 5-methylcytosine"
catctggagcccattgatcctaaagagcttcttgaggaatgcagggccgtcctgcacacccgacctccccggttccagagggattttgtggatctgaggacagattgccctagtacccaccc

SEQ ID NO: 29670 - DNA, 122 bp, Homo sapiens
  misc_feature (61)..(62): /note="This region represents a CpG dinucleotide"
  misc_feature (61)..(61): /note="Nucleotide may be methylated to form 5-methylcytosine"
atgaaatcaaaactagagaaattagaagtcaatgacctggcattctggcaaccaatgacacgccatgtatctggcagagtcccagtgggaaagagaaatcaacccagatgttgagacttttc

SEQ ID NO: 29671 - DNA, 122 bp, Homo sapiens
  misc_feature (61)..(62): /note="This region represents a CpG dinucleotide"
  misc_feature (61)..(61): /note="Nucleotide may be methylated to form 5-methylcytosine"
aggcactcattgactactatgtcacacctataggccacagagcaccagcttgcatggccacgataccatcaccaggcacacccaggtagctactgagtaaaggctggctgccaaagatgaat

SEQ ID NO: 29672 - DNA, 122 bp, Homo sapiens
  misc_feature (61)..(62): /note="This region represents a CpG dinucleotide"
  misc_feature (61)..(61): /note="Nucleotide may be methylated to form 5-methylcytosine"
atgttgtgtgttatcactgaaacaaacacaagccatccagttgtgcacttcagctacgtgcggcttagcgtacttcgataatgcctccagaaagtcagggaaaggaaatacagaggaagctg

SEQ ID NO: 29673 - DNA, 122 bp, Homo sapiens
  misc_feature (61)..(62): /note="This region represents a CpG dinucleotide"
  misc_feature (61)..(61): /note="Nucleotide may be methylated to form 5-methylcytosine"
tatctgttcatatgtgtctatgaacatgaaggccataagttttctccaaaagagaaaagacgaagaaaagtcataacaacttgttatttagtagatataagtttagtacttagttcagtggg

SEQ ID NO: 29674 - DNA, 122 bp, Homo sapiens
  misc_feature (61)..(62): /note="This region represents a CpG dinucleotide"
  misc_feature (61)..(61): /note="Nucleotide may be methylated to form 5-methylcytosine"
gatgtctgttcttccagtttttggcagtgcagaggagcctggaaagagcttgatgagagacgcaaaaagctcaaagacaaaaatgcaaggccggccaggcgtggtggctcacgcctgtaatc

SEQ ID NO: 29675 - DNA, 122 bp, Homo sapiens
  misc_feature (61)..(62): /note="This region represents a CpG dinucleotide"
  misc_feature (61)..(61): /note="Nucleotide may be methylated to form 5-methylcytosine"
tccatcatgttttgaaaagcaacctgcaatgaggaagacaaataaaaatatagagaaatgcgaagatgaaagactaacagaaagaaaaatgagtgctagcaccatttcgatccttacttact

SEQ ID NO: 29676 - DNA, 122 bp, Homo sapiens
  misc_feature (61)..(62): /note="This region represents a CpG dinucleotide"
  misc_feature (61)..(61): /note="Nucleotide may be methylated to form 5-methylcytosine"
agagcaagctttaccccactacctaaaggggagtgctgatccacatggtctccccatccacgctagaaattgatcccaaacaccaaccgctgcatagacgtcggcgactttggtctgcaccc

SEQ ID NO: 29677 - DNA, 122 bp, Homo sapiens
  misc_feature (61)..(62): /note="This region represents a CpG dinucleotide"
  misc_feature (61)..(61): /note="Nucleotide may be methylated to form 5-methylcytosine"
ctaaattgttattcaaggagtttgatttcagccctgcagaaacagccctgagcccagcatcgctgggacaaaggcagaaggggctatcttctgttcaagacctgctggctgacagttggaat

SEQ ID NO: 29678 - DNA, 122 bp, Homo sapiens
  misc_feature (61)..(62): /note="This region represents a CpG dinucleotide"
  misc_feature (61)..(61): /note="Nucleotide may be methylated to form 5-methylcytosine"
gtgatcctgggatcaggaagctgcagccaccgctgaggttttggttctagagccaggcagcgtgagctccagtcattgcatccacactacaggtataagaaggaggaagggcagaaggttgt

SEQ ID NO: 29679 - DNA, 122 bp, Homo sapiens
  misc_feature (61)..(62): /note="This region represents a CpG dinucleotide"
  misc_feature (61)..(61): /note="Nucleotide may be methylated to form 5-methylcytosine"
ctgttacagtaaaaccttatgaactccaggtccactaattctccatgttgatccttctgacggggtgagcggaagtttacctttatttaaggagtgaaagggttgacaaaacaaataaatat

SEQ ID NO: 29680 - DNA, 122 bp, Homo sapiens
  misc_feature (61)..(62): /note="This region represents a CpG dinucleotide"
  misc_feature (61)..(61): /note="Nucleotide may be methylated to form 5-methylcytosine"
tgtcactaaccccatcaccatcaaatccaatagatggggcaggttttgactttccgagcccgtcccagacatttcactttcaaggaaacacattaaattgcatgaatgtgaagaattacaac

SEQ ID NO: 29681 - DNA, 122 bp, Homo sapiens
  misc_feature (61)..(62): /note="This region represents a CpG dinucleotide"
  misc_feature (61)..(61): /note="Nucleotide may be methylated to form 5-methylcytosine"
cacccaggtgtcccttcatggagatgaactcagtgacttcccacaagaagccactggctacggctctcatcgttcttgttctttggatgaagaggctgagtcactggccatgtggctgggat

SEQ ID NO: 29682 - DNA, 122 bp, Homo sapiens
  misc_feature (61)..(62): /note="This region represents a CpG dinucleotide"
  misc_feature (61)..(61): /note="Nucleotide may be methylated to form 5-methylcytosine"
agagtattattgcatcatacctctggctttttcctttgcatggagccctaatcctcttttcggcctggttaactcctatttattttccaggtctctgcttccttgagaagcctactcctgat

SEQ ID NO: 29683 - DNA, 122 bp, Homo sapiens
  misc_feature (61)..(62): /note="This region represents a CpG dinucleotide"
  misc_feature (61)..(61): /note="Nucleotide may be methylated to form 5-methylcytosine"
agaagctgtctccaatctgcaagcaagtccagaacttcaatgctctgtatgcaatgtacccgccatcaatggttgcaactggaagtgtaggagcagctatctgtggacttcagcaacatgag

SEQ ID NO: 29684 - DNA, 122 bp, Homo sapiens
  misc_feature (61)..(62): /note="This region represents a CpG dinucleotide"
  misc_feature (61)..(61): /note="Nucleotide may be methylated to form 5-methylcytosine"
gaaaacaactattcaccttaataagagagaaattctgtcatttgcaacaacagggatgtacgtgaaggacattatgctaagtgaagtaagcgaggcacaggaagagaaataccacatgttct

SEQ ID NO: 29685 - DNA, 122 bp, Homo sapiens
  misc_feature (61)..(62): /note="This region represents a CpG dinucleotide"
  misc_feature (61)..(61): /note="Nucleotide may be methylated to form 5-methylcytosine"
gagagtaaaatgctaccttatttgattttaatttttggagattatttcatgatgttaaatcgcactggcctggattgtgtgccttctatagtctcattggggacgcaattgtagccccattc

SEQ ID NO: 29686 - DNA, 122 bp, Homo sapiens
  misc_feature (61)..(62): /note="This region represents a CpG dinucleotide"
  misc_feature (61)..(61): /note="Nucleotide may be methylated to form 5-methylcytosine"
ttcttcaagtaaaattgttataacattgggtagtgaagaaattttagctaggacactaagcgcatgaaccataaaagaaaaagagtgataaattggactttattaacattaaaaccttctgc

SEQ ID NO: 29687 - DNA, 122 bp, Homo sapiens
  misc_feature (61)..(62): /note="This region represents a CpG dinucleotide"
  misc_feature (61)..(61): /note="Nucleotide may be methylated to form 5-methylcytosine"
acaaatgatgaacttggtgtagaagcctagctacttctgcaagaggatttctgaccaggtcgccctctagcaatgtggatctggtccagacactggattactcagatttgttctgagcagct

SEQ ID NO: 29688 - DNA, 122 bp, Homo sapiens
  misc_feature (61)..(62): /note="This region represents a CpG dinucleotide"
  misc_feature (61)..(61): /note="Nucleotide may be methylated to form 5-methylcytosine"
atatactatatgattccattttcacaaagtacaaaaacaggctgaactactactctgtggcgttagaaatcaggatagtggttacacttgtcaggaggaagtgactagaagggaagctacaa

SEQ ID NO: 29689 - DNA, 122 bp, Homo sapiens
  misc_feature (61)..(62): /note="This region represents a CpG dinucleotide"
  misc_feature (61)..(61): /note="Nucleotide may be methylated to form 5-methylcytosine"
cagagctggaggtaagaaactcgtgctgtcatatgccacctggcgtgtggcactttgttacgacagccacaggtggggggcgaggaccatctgctgaggaagcttcatttataccgggaggg

SEQ ID NO: 29690 - DNA, 122 bp, Homo sapiens
  misc_feature (61)..(62): /note="This region represents a CpG dinucleotide"
  misc_feature (61)..(61): /note="Nucleotide may be methylated to form 5-methylcytosine"
gcttgtcatcttaactgtgactgggccaggttcccagcacacccatgccagtgtatcccacgctccacccaggcatgacactttggtgtcagaccagggcccatggcagagggcagggcaca

SEQ ID NO: 29691 - DNA, 122 bp, Homo sapiens
  misc_feature (61)..(62): /note="This region represents a CpG dinucleotide"
  misc_feature (61)..(61): /note="Nucleotide may be methylated to form 5-methylcytosine"
ctatggaataattcattctccaacagtggtgtttaaatgaagcaccactgtatttaatgacggtattttaccactgctatcatttgagtaagctaaagaactttggtaaagtaagatataaa

SEQ ID NO: 29692 - DNA, 122 bp, Homo sapiens
  misc_feature (61)..(62): /note="This region represents a CpG dinucleotide"
  misc_feature (61)..(61): /note="Nucleotide may be methylated to form 5-methylcytosine"
gcccctccagcttgacaggtggggggtctagctttctccatccaacctaccatttggtttcgtcaggatttggtctgcccttggccttgtggctctttgtgtctggggcatgacatttattt

SEQ ID NO: 29693 - DNA, 122 bp, Homo sapiens
  misc_feature (61)..(62): /note="This region represents a CpG dinucleotide"
  misc_feature (61)..(61): /note="Nucleotide may be methylated to form 5-methylcytosine"
tgactggcctccaagccctgccttaatgccccggggcggggtgtgtgtgagggccctccccggaggcctctgaggcactggctgcctgcctgtgccacctctccaagcccctcttctccctg

SEQ ID NO: 29694 - DNA, 122 bp, Homo sapiens
  misc_feature (61)..(62): /note="This region represents a CpG dinucleotide"
  misc_feature (61)..(61): /note="Nucleotide may be methylated to form 5-methylcytosine"
ccaaagcccttgtatcttaagtctcaaaagtacttttgagagatttcagaccctggaacacggtatttgataccagccctgtccatgtgtgggtagctttctgagttatgtgaccaatcaac

SEQ ID NO: 29695 - DNA, 122 bp, Homo sapiens
  misc_feature (61)..(62): /note="This region represents a CpG dinucleotide"
  misc_feature (61)..(61): /note="Nucleotide may be methylated to form 5-methylcytosine"
caggcagcaacatcagcctagtcccaaacaggaggagaaagggcaatgttacttagcttccggtgcctagaggatctgcgtgttctctgtccagtcccaatgttaccgggccttggtttact

SEQ ID NO: 29696 - DNA, 122 bp, Homo sapiens
  misc_feature (61)..(62): /note="This region represents a CpG dinucleotide"
  misc_feature (61)..(61): /note="Nucleotide may be methylated to form 5-methylcytosine"
tcttgcatcctagcttctgagaggcgtgcttcttggtgcccggcctttctgccacctccccggctcccctggattgagccctgtttgtctgggagagcccagagtgtcctgtagacacaggt

SEQ ID NO: 29697 - DNA, 122 bp, Homo sapiens
  misc_feature (61)..(62): /note="This region represents a CpG dinucleotide"
  misc_feature (61)..(61): /note="Nucleotide may be methylated to form 5-methylcytosine"
aaacattaggccacctccaaactgtttaatatattaacataaatagagcacgtgacccctcgagtgtcaaatccttattaggtgattatggattttggccttggttacctttaaagttcttg

SEQ ID NO: 29698 - DNA, 122 bp, Homo sapiens
  misc_feature (61)..(62): /note="This region represents a CpG dinucleotide"
  misc_feature (61)..(61): /note="Nucleotide may be methylated to form 5-methylcytosine"
tggggagataagtccaccttctctcttgcaccttacctcagctggtcagcagatggaagccgatttcagagacatatataaccatatggaacaagaaggctttcaggtgtcatctagatcaa

SEQ ID NO: 29699 - DNA, 122 bp, Homo sapiens
  misc_feature (61)..(62): /note="This region represents a CpG dinucleotide"
  misc_feature (61)..(61): /note="Nucleotide may be methylated to form 5-methylcytosine"
gagcattgtgtgtaatgacaaaaacagctacaaactacttagctgttcatcaagagagggcggattaaaatgagtcatggccattcctataaaggaacgctttctaaggggaatgctgtggg

SEQ ID NO: 29700 - DNA, 122 bp, Homo sapiens
  misc_feature (61)..(62): /note="This region represents a CpG dinucleotide"
  misc_feature (61)..(61): /note="Nucleotide may be methylated to form 5-methylcytosine"
gcttgtcggtaagaacacaggtaggcggcgggaagagaggtggcaagcagccccaacgctcgccgagatccccagggttttacaaacggatcgtcctgaagtctccaaaactgtaactacta

SEQ ID NO: 29701 - DNA, 122 bp, Homo sapiens
  misc_feature (61)..(62): /note="This region represents a CpG dinucleotide"
  misc_feature (61)..(61): /note="Nucleotide may be methylated to form 5-methylcytosine"
acagatgacaaaacagccttagagaaggagccaagactgggactcggaagcccagtgacccgtccactagactcggctgcactaactccacccaggaggaggcagggaatggaaccaggcat

SEQ ID NO: 29702 - DNA, 122 bp, Homo sapiens
  misc_feature (61)..(62): /note="This region represents a CpG dinucleotide"
  misc_feature (61)..(61): /note="Nucleotide may be methylated to form 5-methylcytosine"
tgtgatcatggatcacagatctcaagttccagaatgctttggaaggatatttcagggatacgaactcaaaatattttcaggagctggggaaataaagtaactgagtggacccagctgcatgt

SEQ ID NO: 29703 - DNA, 122 bp, Homo sapiens
  misc_feature (61)..(62): /note="This region represents a CpG dinucleotide"
  misc_feature (61)..(61): /note="Nucleotide may be methylated to form 5-methylcytosine"
aaatgtttcagagatgtaatctgaaggtctgatctctctgaaccagccccttagcatcttcgtcttcatgaagctatgcagtttcctctgttgtttcttaagcaatacctcattaagtgatt

SEQ ID NO: 29704 - DNA, 122 bp, Homo sapiens
  misc_feature (61)..(62): /note="This region represents a CpG dinucleotide"
  misc_feature (61)..(61): /note="Nucleotide may be methylated to form 5-methylcytosine"
ctggaaccatttcattggcctattttataaatgcttattagaaataacgcaaacatttgtcgctagcctctttagctcatttaagtgtatacatttttgtatttaaaaattagattttaaat

SEQ ID NO: 29705 - DNA, 122 bp, Homo sapiens
  misc_feature (61)..(62): /note="This region represents a CpG dinucleotide"
  misc_feature (61)..(61): /note="Nucleotide may be methylated to form 5-methylcytosine"
tcctggtaccaggctttctctcctgttatatagaacatcttcctgtctctgacctcagggcgtctctcttaccctggagtctctacttcccatcccccatccacacaacccagaatacaccc

SEQ ID NO: 29706 - DNA, 122 bp, Homo sapiens
  misc_feature (61)..(62): /note="This region represents a CpG dinucleotide"
  misc_feature (61)..(61): /note="Nucleotide may be methylated to form 5-methylcytosine"
ttatcaaactttctggtagttaacactctgatgcattaaaagtggcatggcatatctggtcgggcgtggtggcttacacctataatcccagcactttgggaggctgaggtgggcagatcacc

SEQ ID NO: 29707 - DNA, 122 bp, Homo sapiens
  misc_feature (61)..(62): /note="This region represents a CpG dinucleotide"
  misc_feature (61)..(61): /note="Nucleotide may be methylated to form 5-methylcytosine"
aaagcagactgggttcaagtttgcaaggcctagaaggtcatgactaccagagcctggctacgtttctcctttcctcgcgtgactcagctggactgcattcccccagcttctcccacagttaa

SEQ ID NO: 29708 - DNA, 122 bp, Homo sapiens
  misc_feature (61)..(62): /note="This region represents a CpG dinucleotide"
  misc_feature (61)..(61): /note="Nucleotide may be methylated to form 5-methylcytosine"
gtcaccacccaggtttttttccttgccccctatacactgaaacctaataccacagacacacggtccaacttgcaaatggtctgcttgaaatctaaacctctctaatggaacataaatctgcc

SEQ ID NO: 29709 - DNA, 122 bp, Homo sapiens
  misc_feature (61)..(62): /note="This region represents a CpG dinucleotide"
  misc_feature (61)..(61): /note="Nucleotide may be methylated to form 5-methylcytosine"
aaagcccaaacaataggaccatttatcatttaggtgaagccaaaagctggattgagtagtcggtgacagagggctaacacagatagattctgtgctccactactgcctctttcttcccctgc

SEQ ID NO: 29710 - DNA, 122 bp, Homo sapiens
  misc_feature (61)..(62): /note="This region represents a CpG dinucleotide"
  misc_feature (61)..(61): /note="Nucleotide may be methylated to form 5-methylcytosine"
tgctgaatgaaaatcatgcatcaggcacctccccacaaagcctgccccagtcacctctgccggaagtggccactcctatagagaccccaagaatagggctttgttacacccctgggctgggt

SEQ ID NO: 29711 - DNA, 122 bp, Homo sapiens
  misc_feature (61)..(62): /note="This region represents a CpG dinucleotide"
  misc_feature (61)..(61): /note="Nucleotide may be methylated to form 5-methylcytosine"
ggcggctcactccgttcgggcttggcaggagtcgtggagtgggttcggccacgtggaatccgcgtcctgggaacccgtggaatccgcgtcctgggaacccgtggaatccgcctcctgggaac

SEQ ID NO: 29712 - DNA, 122 bp, Homo sapiens
  misc_feature (61)..(62): /note="This region represents a CpG dinucleotide"
  misc_feature (61)..(61): /note="Nucleotide may be methylated to form 5-methylcytosine"
aactaaaactggtgcctcaagtttcctgcctgacatcatggcagaagtattgaagaaagccgtttctacctcagatttgtggttcattcctactccctgctttcaatgaggtaggaggaccc

SEQ ID NO: 29713 - DNA, 122 bp, Homo sapiens
  misc_feature (61)..(62): /note="This region represents a CpG dinucleotide"
  misc_feature (61)..(61): /note="Nucleotide may be methylated to form 5-methylcytosine"
gcgtggatccgttggacaaagggatgattcatgcctccggttggacagatccagatgcctcgagatttcatcatgctactcagaacaacatgcaattaaaaactttccaactgttcatttct

SEQ ID NO: 29714 - DNA, 122 bp, Homo sapiens
  misc_feature (61)..(62): /note="This region represents a CpG dinucleotide"
  misc_feature (61)..(61): /note="Nucleotide may be methylated to form 5-methylcytosine"
ttttgtagtgttttgatattttagtggttgaaattcttatgttttgttaccgaagctccccgtggtcgctttctgatagaggtgtggagtggggtggtgatcaagattgttagaagaaaatg

SEQ ID NO: 29715 - DNA, 122 bp, Homo sapiens
  misc_feature (61)..(62): /note="This region represents a CpG dinucleotide"
  misc_feature (61)..(61): /note="Nucleotide may be methylated to form 5-methylcytosine"
aatttttctgtatgttgtgttttgtcttttgtgaatgtttgtttagttttctgttcttcgcgtttctattggaatgttaatgtgtgtttttgtattggcttatacagtaaggctattaacct

SEQ ID NO: 29716 - DNA, 122 bp, Homo sapiens
  misc_feature (61)..(62): /note="This region represents a CpG dinucleotide"
  misc_feature (61)..(61): /note="Nucleotide may be methylated to form 5-methylcytosine"
gagcaagtaacaatgctcagtctaactgcttaaatgagataacagtacagttagtccatacgtaatgtagtatggaagagtaaatgaaacaataaatattaagtatttagctctaagccagg

SEQ ID NO: 29717 - DNA, 122 bp, Homo sapiens
  misc_feature (61)..(62): /note="This region represents a CpG dinucleotide"
  misc_feature (61)..(61): /note="Nucleotide may be methylated to form 5-methylcytosine"
atggaaattgttttctctaacagcacaggagcatatgatgtactcgctcattaaagcaaacgcacaaactgaaaatcgaggaagacacaaacacaggaagacaaaggggagaaggcagcgca

SEQ ID NO: 29718 - DNA, 122 bp, Homo sapiens
  misc_feature (61)..(62): /note="This region represents a CpG dinucleotide"
  misc_feature (61)..(61): /note="Nucleotide may be methylated to form 5-methylcytosine"
ctctctgcctttccctctaatctgccttgaagccagcagttatcacctggatgcaccagacggaggatgctgacatgtgagatgctgtccccccaccgggagtgggagactcagtgaggctc

SEQ ID NO: 29719 - DNA, 122 bp, Homo sapiens
  misc_feature (61)..(62): /note="This region represents a CpG dinucleotide"
  misc_feature (61)..(61): /note="Nucleotide may be methylated to form 5-methylcytosine"
gatgccactcacgccatcccagacatgactgcccgtctccctgcctagcacccaccatcccggaaacagggggccccagaggtacggccccgccccacccgcacacctcccatgttgcatct

SEQ ID NO: 29720 - DNA, 122 bp, Homo sapiens
  misc_feature (61)..(62): /note="This region represents a CpG dinucleotide"
  misc_feature (61)..(61): /note="Nucleotide may be methylated to form 5-methylcytosine"
aacccctctgttgggtaacatgaaaagactgtattcctctaagatgttgggattgatatacgtgatttaatctgcaataggtggaataaccaggggaactggttatgaatatgtgaatgcaa

SEQ ID NO: 29721 - DNA, 122 bp, Homo sapiens
  misc_feature (61)..(62): /note="This region represents a CpG dinucleotide"
  misc_feature (61)..(61): /note="Nucleotide may be methylated to form 5-methylcytosine"
tcaactgttttgcactcaacaaagacatacctctgagttggcaaccagcagggtggataacgggccagtggtgataaaatcaaagaataggtaatgaaacaatcatccagttaacaatcagc

SEQ ID NO: 29722 - DNA, 122 bp, Homo sapiens
  misc_feature (61)..(62): /note="This region represents a CpG dinucleotide"
  misc_feature (61)..(61): /note="Nucleotide may be methylated to form 5-methylcytosine"
aacaaaacaagatgaaaattgatacaaatggacccctggggctttcacgtctgcagcctacgtacaggaggccccatcaaaagaaatgacgctttaatttctgctaaggtctacggtctaac

SEQ ID NO: 29723 - DNA, 122 bp, Homo sapiens
  misc_feature (61)..(62): /note="This region represents a CpG dinucleotide"
  misc_feature (61)..(61): /note="Nucleotide may be methylated to form 5-methylcytosine"
tggttttaaggaactcaatctaaagcttgaacctgattttcagggataccattttgctgccgtttcagcccatttctcttgttaagatcgctctctggtagagttgacgtgacactcatttc

SEQ ID NO: 29724 - DNA, 122 bp, Homo sapiens
  misc_feature (61)..(62): /note="This region represents a CpG dinucleotide"
  misc_feature (61)..(61): /note="Nucleotide may be methylated to form 5-methylcytosine"
ttgatacaagatttcatttaaagctgtttaaccagagagggtcgccatgggaaagtaaaccgctgacagaatatattaggttcacattaatttacagtggtagcataatgcttatgaaaaat

SEQ ID NO: 29725 - DNA, 122 bp, Homo sapiens
  misc_feature (61)..(62): /note="This region represents a CpG dinucleotide"
  misc_feature (61)..(61): /note="Nucleotide may be methylated to form 5-methylcytosine"
aaatatgtgaagcaaggtgatgctttctatctcaagccagtcatgaggaggcacgtgggccgctcagcaggcttgtttggtttgcacacagttctttctgcaagggttgcagaggggaacta

SEQ ID NO: 29726 - DNA, 122 bp, Homo sapiens
  misc_feature (61)..(62): /note="This region represents a CpG dinucleotide"
  misc_feature (61)..(61): /note="Nucleotide may be methylated to form 5-methylcytosine"
cgcataactttcctataactacctgcacagttacggaaaacagcaacacccactgaaggacgatatctagcagacatctagctcaccaaaaatgaaagaagatccacaactgcataaaacat

SEQ ID NO: 29727 - DNA, 122 bp, Homo sapiens
  misc_feature (61)..(62): /note="This region represents a CpG dinucleotide"
  misc_feature (61)..(61): /note="Nucleotide may be methylated to form 5-methylcytosine"
attctcctatagtttcttctaagtgttttacagttattttcttcacatttagatgtttaacgacaaaagattctttgcttgtccaaacttcagtcaggtttctgagtcttctcctaagccca

SEQ ID NO: 29728 - DNA, 122 bp, Homo sapiens
  misc_feature (61)..(62): /note="This region represents a CpG dinucleotide"
  misc_feature (61)..(61): /note="Nucleotide may be methylated to form 5-methylcytosine"
tctacctgccacatcacgactgcctcacagacagcagcagctcccttggcatactgaaaacgtgatctgacatgtaacatgtgctgtggcagagattgctagttgcctatcccaacacgcct

SEQ ID NO: 29729 - DNA, 122 bp, Homo sapiens
  misc_feature (61)..(62): /note="This region represents a CpG dinucleotide"
  misc_feature (61)..(61): /note="Nucleotide may be methylated to form 5-methylcytosine"
gtgcatgtatgcatgcattcctgtgaccttctcgtgtgttcacgggtgtgtgggtacagccgcttgctgggtgtgtctgcttggccagggatgtgtatgtggggttctgtctgggacaactg

SEQ ID NO: 29730 - DNA, 122 bp, Homo sapiens
  misc_feature (61)..(62): /note="This region represents a CpG dinucleotide"
  misc_feature (61)..(61): /note="Nucleotide may be methylated to form 5-methylcytosine"
tcagggaatgcatgtaatggacttaactcagtgcctggcacgcagtgaacgataggccgacgttggccaagccagaaaatccgtctgccctgacgtcaggcagggcctaattatagacaccc

SEQ ID NO: 29731 - DNA, 122 bp, Homo sapiens
  misc_feature (61)..(62): /note="This region represents a CpG dinucleotide"
  misc_feature (61)..(61): /note="Nucleotide may be methylated to form 5-methylcytosine"
ggccaaggaggagagacaggctcacctgtttggtgagaagttccatgcagatggcccctccgcccagaacatacctgcatgagaaaggttagtcagctgtgcctgacaaaatctccaagtct

SEQ ID NO: 29732 - DNA, 122 bp, Homo sapiens
  misc_feature (61)..(62): /note="This region represents a CpG dinucleotide"
  misc_feature (61)..(61): /note="Nucleotide may be methylated to form 5-methylcytosine"
cagaactgcccgtcatgatccatcaagtcacgaagttggacaggcccagctatagcctgtcgtaagatgatgggagtggcacattccagattgagcaacagcaggtccagaatgcacaattc

SEQ ID NO: 29733 - DNA, 122 bp, Homo sapiens
  misc_feature (61)..(62): /note="This region represents a CpG dinucleotide"
  misc_feature (61)..(61): /note="Nucleotide may be methylated to form 5-methylcytosine"
ttaaactttagcttgattcatcacttctcaacaaatacttgttgaaccccaccagtaatacgagaagcttggtattctatgaggtgctcaacttccaaagcttagttcagaagaattctggc

SEQ ID NO: 29734 - DNA, 122 bp, Homo sapiens
  misc_feature (61)..(62): /note="This region represents a CpG dinucleotide"
  misc_feature (61)..(61): /note="Nucleotide may be methylated to form 5-methylcytosine"
aacagctgtactagggcgttgccatggaaactgcttgactcatggcagttgtgttagtgacgaagtcattagcagtgtgaaatgtactttgaggttgtcaagtgtaacactccgggaatatt

SEQ ID NO: 29735 - DNA, 122 bp, Homo sapiens
  misc_feature (61)..(62): /note="This region represents a CpG dinucleotide"
  misc_feature (61)..(61): /note="Nucleotide may be methylated to form 5-methylcytosine"
tttatgaatgttgatatgccctaaagggacatgtgttttagacactaaatgacaggtgaacgcagaccagcatgaggaagtagaagtttggccagcccttggtttagctctaggtaggagcc

SEQ ID NO: 29736 - DNA, 122 bp, Homo sapiens
  misc_feature (61)..(62): /note="This region represents a CpG dinucleotide"
  misc_feature (61)..(61): /note="Nucleotide may be methylated to form 5-methylcytosine"
gactgcaccgtgtttattcatgtgtctgacgcctgagcaaagtggagttccttaaagtcccggagctgtgacactcatctccatagcagcagccccaggtccttcaagacagccgtgcctct

SEQ ID NO: 29737 - DNA, 122 bp, Homo sapiens
  misc_feature (61)..(62): /note="This region represents a CpG dinucleotide"
  misc_feature (61)..(61): /note="Nucleotide may be methylated to form 5-methylcytosine"
actgtaacccagacctcctcctccccttcagagccacatatttacatgcttactggacatcgcttcttggatgtcttccaggtacctatcattagcatgtcctaactcatagtctttcccca

SEQ ID NO: 29738 - DNA, 122 bp, Homo sapiens
  misc_feature (61)..(62): /note="This region represents a CpG dinucleotide"
  misc_feature (61)..(61): /note="Nucleotide may be methylated to form 5-methylcytosine"
ctttccttcagtttccagtaacttgttcctcatttctgtataaatcctcaccagaatagccgggcatggtggctcacacctgtaatcccagcactttgggaggctgaggtgggcggattgcc

SEQ ID NO: 29739 - DNA, 122 bp, Homo sapiens
  misc_feature (61)..(62): /note="This region represents a CpG dinucleotide"
  misc_feature (61)..(61): /note="Nucleotide may be methylated to form 5-methylcytosine"
tgcttcagcctcaacaagtgtgtttatgtaaagttaaatgaactctggcagtgagctgcacgttttttaaaattaggaaatgagttagctaatattgaacttgaggttttagtcaatgcaat

SEQ ID NO: 29740 - DNA, 122 bp, Homo sapiens
  misc_feature (61)..(62): /note="This region represents a CpG dinucleotide"
  misc_feature (61)..(61): /note="Nucleotide may be methylated to form 5-methylcytosine"
gtctcactccctccaatcagttctgctcactgctatctaaaatgcaaatccaattcctggcgctcaggcctctgcttcaaccatctcattgctccccatcacccacgacagcatttccctag

SEQ ID NO: 29741 - DNA, 122 bp, Homo sapiens
  misc_feature (61)..(62): /note="This region represents a CpG dinucleotide"
  misc_feature (61)..(61): /note="Nucleotide may be methylated to form 5-methylcytosine"
catctccctaatttacaaagaggaaactgagccacattcccaaggtcacataactagcaacgagtgaagaagccaagattagtgtccagactgaatcattccagacacctgtgacatagtca

SEQ ID NO: 29742 - DNA, 122 bp, Homo sapiens
  misc_feature (61)..(62): /note="This region represents a CpG dinucleotide"
  misc_feature (61)..(61): /note="Nucleotide may be methylated to form 5-methylcytosine"
ggaggctgggaggaaaagccgtgtttggaaaacacaggaaaccgtgaggcttttctgctgcgtctgccccaccctacacaagctctggtgtgggacacgtccacgcagaggcccttctacgc

SEQ ID NO: 29743 - DNA, 122 bp, Homo sapiens
  misc_feature (61)..(62): /note="This region represents a CpG dinucleotide"
  misc_feature (61)..(61): /note="Nucleotide may be methylated to form 5-methylcytosine"
attcaaagcttctgggtttaaggaaggattctgtagcctaaacccatgacaaatgagaggcggcaatgactcgtgagtagctaagactggattgatctctgttgttttgaatattggactta

SEQ ID NO: 29744 - DNA, 122 bp, Homo sapiens
  misc_feature (61)..(62): /note="This region represents a CpG dinucleotide"
  misc_feature (61)..(61): /note="Nucleotide may be methylated to form 5-methylcytosine"
atgggagggcgcacctctctcgcggtggagttacagggtttctctggaaactcagcagtgcgtgctcacatctctgctgggtgggtcaggaaatgtttgaattacttactttaacgaatgtt

SEQ ID NO: 29745 - DNA, 122 bp, Homo sapiens
  misc_feature (61)..(62): /note="This region represents a CpG dinucleotide"
  misc_feature (61)..(61): /note="Nucleotide may be methylated to form 5-methylcytosine"
ggttttcgtgactgcaagaagggggatcccaagcacgggaagcggaaacgaggccggccccgaaagctgagcaaagagtactgggactgtctcgagggcaagaagagcaagcacggtgagct

SEQ ID NO: 29746 - DNA, 122 bp, Homo sapiens
  misc_feature (61)..(62): /note="This region represents a CpG dinucleotide"
  misc_feature (61)..(61): /note="Nucleotide may be methylated to form 5-methylcytosine"
tgctgcaatggaactaggcagccttgccagccatccggcggcagtgccggcccatgctggcggccacctccccgaggctctgactcttggaagggtagccccggagacctggccgtgtcgaa

SEQ ID NO: 29747 - DNA, 122 bp, Homo sapiens
  misc_feature (61)..(62): /note="This region represents a CpG dinucleotide"
  misc_feature (61)..(61): /note="Nucleotide may be methylated to form 5-methylcytosine"
tagcagactgggactcagaggaccctttctcatgccaacggtggctaccacagcctcccacgctgcaagctttggatttcaatggactcctgactcagactggcttgtgtgactgtaaagtt

SEQ ID NO: 29748 - DNA, 122 bp, Homo sapiens
  misc_feature (61)..(62): /note="This region represents a CpG dinucleotide"
  misc_feature (61)..(61): /note="Nucleotide may be methylated to form 5-methylcytosine"
taccaaggctagcagcagagtgagctcaccgggaggcaaggtgccctgattctgagctgccggactaagatgttctggactctgagctgccggagggtaagcccctcagccctgagctcact

SEQ ID NO: 29749 - DNA, 122 bp, Homo sapiens
  misc_feature (61)..(62): /note="This region represents a CpG dinucleotide"
  misc_feature (61)..(61): /note="Nucleotide may be methylated to form 5-methylcytosine"
aatatttaagtcagcactggtatgacactggtatgatcaatggtgtcatttttctccaaccgactttgatttctccctgtcttcctcctccctttctctcccactccatgcactactgatga

SEQ ID NO: 29750 - DNA, 122 bp, Homo sapiens
  misc_feature (61)..(62): /note="This region represents a CpG dinucleotide"
  misc_feature (61)..(61): /note="Nucleotide may be methylated to form 5-methylcytosine"
aatcttcagctctcaagctacagcaaggacttcggaaacgagcagagctgcagctgagatcgaggcagggacttagccctcttgtttcctggactgaccctgctccaactgttcctaaaact

SEQ ID NO: 29751 - DNA, 122 bp, Homo sapiens
  misc_feature (61)..(62): /note="This region represents a CpG dinucleotide"
  misc_feature (61)..(61): /note="Nucleotide may be methylated to form 5-methylcytosine"
aagaagggtcacagcctcccagagacaagctgagaaaacacctttcatactagcctccaacggaaattaaagacgtgtagccgtgtcgccttctggattccataaatccctggctatcgctg

SEQ ID NO: 29752 - DNA, 122 bp, Homo sapiens
  misc_feature (61)..(62): /note="This region represents a CpG dinucleotide"
  misc_feature (61)..(61): /note="Nucleotide may be methylated to form 5-methylcytosine"
cagtgaactttgataacttttaggaaaactgtctgaagataaatataagcaagttgagaccgagaaaacgagaaattcagacagttcagatagttcagtagaaaatctagctaggactttaa

SEQ ID NO: 29753 - DNA, 122 bp, Homo sapiens
  misc_feature (61)..(62): /note="This region represents a CpG dinucleotide"
  misc_feature (61)..(61): /note="Nucleotide may be methylated to form 5-methylcytosine"
tccttctgccctctcttccttgatcacaacaaaagtgttctcttcttgaacttctgggagcgttctcttgttctcagttctttagacatgcctttttttggctagaaagttctttcctccca

SEQ ID NO: 29754 - DNA, 122 bp, Homo sapiens
  misc_feature (61)..(62): /note="This region represents a CpG dinucleotide"
  misc_feature (61)..(61): /note="Nucleotide may be methylated to form 5-methylcytosine"
tgtccagctcaacgtgggcggctctctgtactacaccactgtgcgggccctgacccgccacgacaccatgctcaaggccatgttcagtgggcgcatggaggtgctgaccgacaaagaaggtg

SEQ ID NO: 29755 - DNA, 122 bp, Homo sapiens
  misc_feature (61)..(62): /note="This region represents a CpG dinucleotide"
  misc_feature (61)..(61): /note="Nucleotide may be methylated to form 5-methylcytosine"
tagattttgagaattccttacatgtgagcactgttgtcagtcccagttagtaaccttaggcgtgctgaaagagaagtaagtttcagaccaagggtgaaatttcttggtagtctgtagggcga

SEQ ID NO: 29756 - DNA, 122 bp, Homo sapiens
  misc_feature (61)..(62): /note="This region represents a CpG dinucleotide"
  misc_feature (61)..(61): /note="Nucleotide may be methylated to form 5-methylcytosine"
caaacagccttagccacaccccatatccagatctgaccaatcatcgcttcgctaggacagcggaacaaccaattgacagaatgaccccgcccaggatccttaaggcctttcgagggttgtgg

SEQ ID NO: 29757 - DNA, 122 bp, Homo sapiens
  misc_feature (61)..(62): /note="This region represents a CpG dinucleotide"
  misc_feature (61)..(61): /note="Nucleotide may be methylated to form 5-methylcytosine"
cgtcctcatcacagtttcacctctgcctaataaagcacaaattactcttaagcagtgaggcgctgtgcagttgaagccttttataactccatttgtctgcagtcacctaaatgtcagtggac

SEQ ID NO: 29758 - DNA, 122 bp, Homo sapiens
  misc_feature (61)..(62): /note="This region represents a CpG dinucleotide"
  misc_feature (61)..(61): /note="Nucleotide may be methylated to form 5-methylcytosine"
tcatgcatattccaatgaagctgctgcctcttttcctcatctaccctcactggaggagcacgtttccgtcggctgctcattttcaagttttcttggctggtaactgtgaactctagaggaca

SEQ ID NO: 29759 - DNA, 122 bp, Homo sapiens
  misc_feature (61)..(62): /note="This region represents a CpG dinucleotide"
  misc_feature (61)..(61): /note="Nucleotide may be methylated to form 5-methylcytosine"
agttactcataaactataacttctcatgccttctactcttgaacggaaaggtaatacaaacgaaaaagaaacctggccaatgggcaaggtgttatttctggatggttctaaaagcaacaatt

SEQ ID NO: 29760 - DNA, 122 bp, Homo sapiens
  misc_feature (61)..(62): /note="This region represents a CpG dinucleotide"
  misc_feature (61)..(61): /note="Nucleotide may be methylated to form 5-methylcytosine"
gtggatataaatggctttgacacttccttaccatcaaatgtctaaatagactccactgggcgtaactgggtactaccaaaaaagggcacttgtatgaccccgtgttctggtttcttgagctt

SEQ ID NO: 29761 - DNA, 122 bp, Homo sapiens
  misc_feature (61)..(62): /note="This region represents a CpG dinucleotide"
  misc_feature (61)..(61): /note="Nucleotide may be methylated to form 5-methylcytosine"
gtgtcccaggatgagacactgtgtgtcatactctcagctgttccactgggtttccttcatcgtctctttgccttttttcctgtggatcagtttgtacttaataagtttccttttgaaaattc

SEQ ID NO: 29762 - DNA, 122 bp, Homo sapiens
  misc_feature (61)..(62): /note="This region represents a CpG dinucleotide"
  misc_feature (61)..(61): /note="Nucleotide may be methylated to form 5-methylcytosine"
taccatttctcacatggctgatgtcattctaatcctcctccaggggctgcagagaagctccggcctgctcctcactttacaagcagagccaagcatatcccctccagaaccataccgcctat

SEQ ID NO: 29763 - DNA, 122 bp, Homo sapiens
  misc_feature (61)..(62): /note="This region represents a CpG dinucleotide"
  misc_feature (61)..(61): /note="Nucleotide may be methylated to form 5-methylcytosine"
ctaggtaatggtactgaactatgattgtggttatcttaaataggggcatgaaactataatcgtgtctgtgacaaagaaggaatgttatagtcagagagacggtataaaaagatttgctgaaa

SEQ ID NO: 29764 - DNA, 122 bp, Homo sapiens
  misc_feature (61)..(62): /note="This region represents a CpG dinucleotide"
  misc_feature (61)..(61): /note="Nucleotide may be methylated to form 5-methylcytosine"
caggacaaccagataaaccacattcctttgacagccttctcaaatctgcgtaagctggaacggctggatatatccaacaaccaactgcggatgctgactcaaggggtttttgataatctctc

SEQ ID NO: 29765 - DNA, 122 bp, Homo sapiens
  misc_feature (61)..(62): /note="This region represents a CpG dinucleotide"
  misc_feature (61)..(61): /note="Nucleotide may be methylated to form 5-methylcytosine"
tgccagctgatgctggtgacaacctccaccctacaactccagaataactggacagttcctcgagttcggcaagaatgatggatgatgtgcacaagccacatcttatctgcttctcagcaatg

SEQ ID NO: 29766 - DNA, 122 bp, Homo sapiens
  misc_feature (61)..(62): /note="This region represents a CpG dinucleotide"
  misc_feature (61)..(61): /note="Nucleotide may be methylated to form 5-methylcytosine"
aggtcaggagacaaggcaggaagtcttaaatgagcaacgaacggccagatgatggggctgcggccagcagcaggcatttacattaggaaagataggacctaaatgtgcccgtgtcgatacta

SEQ ID NO: 29767 - DNA, 122 bp, Homo sapiens
  misc_feature (61)..(62): /note="This region represents a CpG dinucleotide"
  misc_feature (61)..(61): /note="Nucleotide may be methylated to form 5-methylcytosine"
agaggcaagatgagtaagtagctgtggattcatttagtttctgcatccctccagcatgaccgtgagtagcacagccgtggtgccagcctcctgagtttaccatctcatcagaggctagctac

SEQ ID NO: 29768 - DNA, 122 bp, Homo sapiens
  misc_feature (61)..(62): /note="This region represents a CpG dinucleotide"
  misc_feature (61)..(61): /note="Nucleotide may be methylated to form 5-methylcytosine"
gggcagaagtatccacacatggagacgggcagggctgaccgcatgcagttatcaggaacacgataactaacccactttgagcccatgctgttatcaggaacaataactaacccactcctaca

SEQ ID NO: 29769 - DNA, 122 bp, Homo sapiens
  misc_feature (61)..(62): /note="This region represents a CpG dinucleotide"
  misc_feature (61)..(61): /note="Nucleotide may be methylated to form 5-methylcytosine"
acatggcagaaggggtaaggggtctgtctttacctctgttgtaggtcactcaacgcccgacgagggctccacattcatgacccaatctgggccaatcatgacccactctgacctttccaaaa

SEQ ID NO: 29770 - DNA, 122 bp, Homo sapiens
  misc_feature (61)..(62): /note="This region represents a CpG dinucleotide"
  misc_feature (61)..(61): /note="Nucleotide may be methylated to form 5-methylcytosine"
ctgagttccgcctttccttcctcacacattccatttgcagcttcctgctaagtcagacggcgatattgggcaacagcaaatcaaacttgacccaagtgcttctccccagggaatgtgagaag

SEQ ID NO: 29771 - DNA, 122 bp, Homo sapiens
  misc_feature (61)..(62): /note="This region represents a CpG dinucleotide"
  misc_feature (61)..(61): /note="Nucleotide may be methylated to form 5-methylcytosine"
gaggatccacttcctggttttacagatggccatcttcttgaatcttcacatgctggagtgcggaaggacggcaagctctcctgtctcttgtcataagggcactaatcccattcatgaggctc

SEQ ID NO: 29772 - DNA, 122 bp, Homo sapiens
  misc_feature (61)..(62): /note="This region represents a CpG dinucleotide"
  misc_feature (61)..(61): /note="Nucleotide may be methylated to form 5-methylcytosine"
caaaagcctggttctgcagttggcactgaggctcattactcaatcaccgtacccgaatcccggccatctgctgaggctgcaaagtgaagcaaaaaatcctaacaagaaattgtatgttggct

SEQ ID NO: 29773 - DNA, 122 bp, Homo sapiens
  misc_feature (61)..(62): /note="This region represents a CpG dinucleotide"
  misc_feature (61)..(61): /note="Nucleotide may be methylated to form 5-methylcytosine"
catgtagaccactatttcccaacctgcaagtgcatcatggcctttggtgtgtcagggacacgccttgggtgtgtgtctcagtctaaagcttcctccttttcacaagcttcctgtttctcatc

SEQ ID NO: 29774 - DNA, 122 bp, Homo sapiens
  misc_feature (61)..(62): /note="This region represents a CpG dinucleotide"
  misc_feature (61)..(61): /note="Nucleotide may be methylated to form 5-methylcytosine"
tttgtttaaacacttttcatcaaattcctagtgcctagtacagagcttttaaccctaatacgtttcctgcgtgtacttattgaaggaataatgacaaactctgccttagattggtgactggc

SEQ ID NO: 29775 - DNA, 122 bp, Homo sapiens
  misc_feature (61)..(62): /note="This region represents a CpG dinucleotide"
  misc_feature (61)..(61): /note="Nucleotide may be methylated to form 5-methylcytosine"
gaaagcaggtgagtgattgccgcagcttggaggaagaaggaaatgggaaatggctgctaacgggtatagggtttctttgtgggatattgaaaatattccagaagtgagtgctaatgattgca

SEQ ID NO: 29776 - DNA, 122 bp, Homo sapiens
  misc_feature (61)..(62): /note="This region represents a CpG dinucleotide"
  misc_feature (61)..(61): /note="Nucleotide may be methylated to form 5-methylcytosine"
gaggggaaactgctcagcattgggtcagttcttaattatccacgaatgggtcagaaactccgtacacagcgttttcctgataccttgaatgtcattggaacttcacagaggagccaacggaa

SEQ ID NO: 29777 - DNA, 122 bp, Homo sapiens
  misc_feature (61)..(62): /note="This region represents a CpG dinucleotide"
  misc_feature (61)..(61): /note="Nucleotide may be methylated to form 5-methylcytosine"
ctgctctcatttttgctaagcagatgactaaatcctggggacaagttttctttaggggatcgctttggactataagccacagtcactggtgttagcataatctctctttttgctatagaaga

SEQ ID NO: 29778 - DNA, 122 bp, Homo sapiens
  misc_feature (61)..(62): /note="This region represents a CpG dinucleotide"
  misc_feature (61)..(61): /note="Nucleotide may be methylated to form 5-methylcytosine"
aagtcctttttgctttaaactactgaatctgatatcacctattataacaccatggtgtatcgtaaaaacacaccaaacaactattttcaaaatagatgtgatacttctccccagttatacaa

SEQ ID NO: 29779 - DNA, 122 bp, Homo sapiens
  misc_feature (61)..(62): /note="This region represents a CpG dinucleotide"
  misc_feature (61)..(61): /note="Nucleotide may be methylated to form 5-methylcytosine"
cgatgtgctgctcttctcaggagagtttcaaatggcaacttcagctttctaaaacccctacgttctgaatatacctgtgtttctgcacagcatacgttttgaaacagcctaggaaatatatt

SEQ ID NO: 29780 - DNA, 122 bp, Homo sapiens
  misc_feature (61)..(62): /note="This region represents a CpG dinucleotide"
  misc_feature (61)..(61): /note="Nucleotide may be methylated to form 5-methylcytosine"
aatccacccagctgatgttgtatatgcctctcaacctgcttggcttgcacaacctgtaagcgcttttgtaatctgcgggcacggctctcaatgtcagcctgtcgccgcagtaaagctgttat

SEQ ID NO: 29781 - DNA, 122 bp, Homo sapiens
  misc_feature (61)..(62): /note="This region represents a CpG dinucleotide"
  misc_feature (61)..(61): /note="Nucleotide may be methylated to form 5-methylcytosine"
gagcagcttgtggcctcccttaggcaagtttaaaagccagatgtcctttttcccagaatgcggagtggtgtgtactattcatcagcttgggctgccacagcaccatgccagactggatggct

SEQ ID NO: 29782 - DNA, 122 bp, Homo sapiens
  misc_feature (61)..(62): /note="This region represents a CpG dinucleotide"
  misc_feature (61)..(61): /note="Nucleotide may be methylated to form 5-methylcytosine"
gttgcaaattcttctgcatttcccatgcaatagcaaagcaagttgatcccataagctatccgtaagcttcaccaaatccaagagaatctatgcatagctgacttaggaaacagtaggtattt

SEQ ID NO: 29783 - DNA, 122 bp, Homo sapiens
  misc_feature (61)..(62): /note="This region represents a CpG dinucleotide"
  misc_feature (61)..(61): /note="Nucleotide may be methylated to form 5-methylcytosine"
aggaggtggagcttgcagtgagctgagatcacgccacagcactctagcctgacaagaggacgagagtccgtctcaaaagaaaaagaagaaaagaaagaaaagaaaaggaaattaattaatct

SEQ ID NO: 29784 - DNA, 122 bp, Homo sapiens
  misc_feature (61)..(62): /note="This region represents a CpG dinucleotide"
  misc_feature (61)..(61): /note="Nucleotide may be methylated to form 5-methylcytosine"
ctctggggcacagacaaaagggaccccagggaggagatggctggggccaggggacctactcggcccccgctccaggccaggctggactggcttcttattattttgatgtcttcactcagact

SEQ ID NO: 29785 - DNA, 122 bp, Homo sapiens
  misc_feature (61)..(62): /note="This region represents a CpG dinucleotide"
  misc_feature (61)..(61): /note="Nucleotide may be methylated to form 5-methylcytosine"
agatgcctgagggtggtaattagcacgtttccagagctctctctttttcaggttaagcaacgtcagttctcttaacctgccattaaagtgctcattttatatacatactctgtctattttta

SEQ ID NO: 29786 - DNA, 122 bp, Homo sapiens
  misc_feature (61)..(62): /note="This region represents a CpG dinucleotide"
  misc_feature (61)..(61): /note="Nucleotide may be methylated to form 5-methylcytosine"
tgcttcaaacttcttctgtctggctttctacagcaattcttagggatagttttattttcccgtttcagatttctgtagcctttatggtcagtacaatgcatttagccccgatcatctgtaac

SEQ ID NO: 29787 - DNA, 122 bp, Homo sapiens
  misc_feature (61)..(62): /note="This region represents a CpG dinucleotide"
  misc_feature (61)..(61): /note="Nucleotide may be methylated to form 5-methylcytosine"
gactaaagcaaatgtggccaattccatctagaaacctccaggccatggggtgggggagttcgggctgggacatgtctggcattttacattttggggaaatttcttctatatttagagattgg

SEQ ID NO: 29788 - DNA, 122 bp, Homo sapiens
  misc_feature (61)..(62): /note="This region represents a CpG dinucleotide"
  misc_feature (61)..(61): /note="Nucleotide may be methylated to form 5-methylcytosine"
tggcaactcagaactgagtgagcaactgtatgatgtgggctatcgggatatagtgaacatcgacatcagtgaggttgtcatcaagcaaatgaaggaatgtaatgccacccgacggccccaga

SEQ ID NO: 29789 - DNA, 122 bp, Homo sapiens
  misc_feature (61)..(62): /note="This region represents a CpG dinucleotide"
  misc_feature (61)..(61): /note="Nucleotide may be methylated to form 5-methylcytosine"
atgttgcatgatgaaaagcaaagtttttgatttcaggtttttggagaaacaagagtgcctcggagctgtccatggtgctgcatgagaccaggccttcattctgcagaattcctgcctcttga

SEQ ID NO: 29790 - DNA, 122 bp, Homo sapiens
  misc_feature (61)..(62): /note="This region represents a CpG dinucleotide"
  misc_feature (61)..(61): /note="Nucleotide may be methylated to form 5-methylcytosine"
gatcatttcaaaattccaaggtttatttttgtggtgaaaacacaatttttatttatttggcgaatgagttatagaaggagttctgactgtacaaagtttcatatgaaccacattcttcaaag

SEQ ID NO: 29791 - DNA, 122 bp, Homo sapiens
  misc_feature (61)..(62): /note="This region represents a CpG dinucleotide"
  misc_feature (61)..(61): /note="Nucleotide may be methylated to form 5-methylcytosine"
cagaccaggaattgaatcctgcctctgcagcttacaaactgcacaccatctatctgtttacgaaaccactgaaagcttccttgtttcatctgttcatgaggatagtattttttacctcacgg

SEQ ID NO: 29792 - DNA, 122 bp, Homo sapiens
  misc_feature (61)..(62): /note="This region represents a CpG dinucleotide"
  misc_feature (61)..(61): /note="Nucleotide may be methylated to form 5-methylcytosine"
tgaattaaagtacagacagatccacattgactttaaatgaatacatgcacggtcagaaaacggtaaccctgggcaggaatctttaagttttcagggctcattagacagtgagcaggtgaggc

SEQ ID NO: 29793 - DNA, 122 bp, Homo sapiens
  misc_feature (61)..(62): /note="This region represents a CpG dinucleotide"
  misc_feature (61)..(61): /note="Nucleotide may be methylated to form 5-methylcytosine"
tgctttggtattgtaaattttcttatgattgatctgacacacctcttttcttcttgatggcggttttcatttggaaaatctataaggaataaagtcttcccacatgctacatgaagtggaat

SEQ ID NO: 29794 - DNA, 122 bp, Homo sapiens
  misc_feature (61)..(62): /note="This region represents a CpG dinucleotide"
  misc_feature (61)..(61): /note="Nucleotide may be methylated to form 5-methylcytosine"
aaatcctctccataaggaaatccatctactccttggctaatactcttacttatctagcaacgggccattttttacccaggcgtggtggctcacacctataatcccagcactttgtggggcca

SEQ ID NO: 29795 - DNA, 122 bp, Homo sapiens
  misc_feature (61)..(62): /note="This region represents a CpG dinucleotide"
  misc_feature (61)..(61): /note="Nucleotide may be methylated to form 5-methylcytosine"
attgtcagccatcaccttgcgcagcacggctttctacttaaagagtgtttattgtgtaggcgaagtgggcacagacaacggacgataatcacaataccagtttaaatactagataaaaggtg

SEQ ID NO: 29796 - DNA, 122 bp, Homo sapiens
  misc_feature (61)..(62): /note="This region represents a CpG dinucleotide"
  misc_feature (61)..(61): /note="Nucleotide may be methylated to form 5-methylcytosine"
gtaaacatccttgcaatgagagtctgtaacacaggacagtcattgcttactcacaagacacgcagaagcacaagagactcatgaagaatagtctcccagcaaagactgctgggaattgaggg

SEQ ID NO: 29797 - DNA, 122 bp, Homo sapiens
  misc_feature (61)..(62): /note="This region represents a CpG dinucleotide"
  misc_feature (61)..(61): /note="Nucleotide may be methylated to form 5-methylcytosine"
ctttggtgaaggaagacagcacccggtgaagggctcagaggtattagtgtggctgagattcgacacccactctgccatcctctgctctcctctagaggaagttgcctcttggggagctgagt

SEQ ID NO: 29798 - DNA, 122 bp, Homo sapiens
  misc_feature (61)..(62): /note="This region represents a CpG dinucleotide"
  misc_feature (61)..(61): /note="Nucleotide may be methylated to form 5-methylcytosine"
tttaaagactttgttaatgccagcagcaagtatgaaatcacgaccattcataatctcttccgtaagctgactcatcgcctcttcaggaggaattttgggtacacactgcggtcagtcaatga

SEQ ID NO: 29799 - DNA, 122 bp, Homo sapiens
  misc_feature (61)..(62): /note="This region represents a CpG dinucleotide"
  misc_feature (61)..(61): /note="Nucleotide may be methylated to form 5-methylcytosine"
aaaatcaaatgtaagatgcagagagccagtccaggctgtccagaggacagggctgagcctcgctccccactccattcccagggcctagcacagggcctggcacagaggccatatcacaagtc

SEQ ID NO: 29800 - DNA, 122 bp, Homo sapiens
  misc_feature (61)..(62): /note="This region represents a CpG dinucleotide"
  misc_feature (61)..(61): /note="Nucleotide may be methylated to form 5-methylcytosine"
aggggcgtgcaaaggcctggcatactttccattccatccacaggatgcttcctgtgtaggcgtggctaaaagagggagcctaatctggagtccctttcagattgtgtgtggatagactgaca

SEQ ID NO: 29801 - DNA, 122 bp, Homo sapiens
  misc_feature (61)..(62): /note="This region represents a CpG dinucleotide"
  misc_feature (61)..(61): /note="Nucleotide may be methylated to form 5-methylcytosine"
ctgatgggaaggtaaaacttcggaaaacagcttggccatttttaaaagttaaatatcagccgggtgtggtggctcacgcctgtaatcccagcactttgggaggccgaggcgggcggatcacc

SEQ ID NO: 29802 - DNA, 122 bp, Homo sapiens
  misc_feature (61)..(62): /note="This region represents a CpG dinucleotide"
  misc_feature (61)..(61): /note="Nucleotide may be methylated to form 5-methylcytosine"
aatctaatcttggcaaatacaacaaacactttcaggcaattattttctccatgtaacacacgtcttactaccatttggaaatgggatttcttgctttgatttaaacaggctttcttaacata

SEQ ID NO: 29803 - DNA, 122 bp, Homo sapiens
  misc_feature (61)..(62): /note="This region represents a CpG dinucleotide"
  misc_feature (61)..(61): /note="Nucleotide may be methylated to form 5-methylcytosine"
caattttcattccttgggggcaatattgcccttattcagaatgcatgctctggagacacacgcacttccagcatgaacgtgtcagtgactcaggatcagctgagtatcactgctcttttaga

SEQ ID NO: 29804 - DNA, 122 bp, Homo sapiens
  misc_feature (61)..(62): /note="This region represents a CpG dinucleotide"
  misc_feature (61)..(61): /note="Nucleotide may be methylated to form 5-methylcytosine"
gaatgatttttcctatttgcacagactttgatattttacaagccttagcttcaagcctgacgaggaagtaaaaccaaatctggagtcaaagaacctagctttggccctaacttggtcgttat

SEQ ID NO: 29805 - DNA, 122 bp, Homo sapiens
  misc_feature (61)..(62): /note="This region represents a CpG dinucleotide"
  misc_feature (61)..(61): /note="Nucleotide may be methylated to form 5-methylcytosine"
aaatcaatctgctcaccctccagactgtgacacagcactatacaaggacaatcataggaccgtgagtcaaggagaagcagggtgagccttgtcagggcagtggcctcctcagcccacccaga

SEQ ID NO: 29806 - DNA, 122 bp, Homo sapiens
  misc_feature (61)..(62): /note="This region represents a CpG dinucleotide"
  misc_feature (61)..(61): /note="Nucleotide may be methylated to form 5-methylcytosine"
gtgtctttctctctctttcccatccgtttttttggtgtggtacattattatttcatttcacgtttctatatcttttactgtttattaaaaatattccacaaaaagcagtgaggtagtttaat

SEQ ID NO: 29807 - DNA, 122 bp, Homo sapiens
  misc_feature (61)..(62): /note="This region represents a CpG dinucleotide"
  misc_feature (61)..(61): /note="Nucleotide may be methylated to form 5-methylcytosine"
tctatgtatagtaaacaccagtccacagcaatatcacacacaattagattaactgataaacgctgaccagagttggcgtgagagccttttcccctccttgcctccagggggaaaattgacag

SEQ ID NO: 29808 - DNA, 122 bp, Homo sapiens
  misc_feature (61)..(62): /note="This region represents a CpG dinucleotide"
  misc_feature (61)..(61): /note="Nucleotide may be methylated to form 5-methylcytosine"
catgtcaaataaataaatacataaataacaaaacaccaggggttcttgctccagatcctccgtttgatagctgtgtggcatttgagcaatatctacaagttgctttttgcatctgtaaattg

SEQ ID NO: 29809 - DNA, 122 bp, Homo sapiens
  misc_feature (61)..(62): /note="This region represents a CpG dinucleotide"
  misc_feature (61)..(61): /note="Nucleotide may be methylated to form 5-methylcytosine"
tcatacctatgaaaattcttcagttattaaataactttgtcagtgctacctatggtaggccggaaacaatgtagattaggaagtttcatgaaaattaacttttggggctatggagaaacagt

SEQ ID NO: 29810 - DNA, 122 bp, Homo sapiens
  misc_feature (61)..(62): /note="This region represents a CpG dinucleotide"
  misc_feature (61)..(61): /note="Nucleotide may be methylated to form 5-methylcytosine"
cagcctgcacttcaggggtgaactccttgccaaagtgagtagccagaataatcaccatcacgttacccaggagctgttaggcaaaagacaaaataacacacaggcatgttgagtagaagttt

SEQ ID NO: 29811 - DNA, 122 bp, Homo sapiens
  misc_feature (61)..(62): /note="This region represents a CpG dinucleotide"
  misc_feature (61)..(61): /note="Nucleotide may be methylated to form 5-methylcytosine"
aggtctcagtagacatcaggatcaatgtcggtgttcttcttctgccagagtaaaccaaagcgagtgtgggcagaaaaggagtcataggaggtgattcatctctcaatgcatctgaaggagca

SEQ ID NO: 29812 - DNA, 122 bp, Homo sapiens
  misc_feature (61)..(62): /note="This region represents a CpG dinucleotide"
  misc_feature (61)..(61): /note="Nucleotide may be methylated to form 5-methylcytosine"
ttcaaggatttagggtgactgcccatcatttccatagtctggaaccaaatcaaacttcagcgtttaactaggcaagtgtaatcttatttaactcaaaattttcagtgacaactcaataatgt

SEQ ID NO: 29813 - DNA, 122 bp, Homo sapiens
  misc_feature (61)..(62): /note="This region represents a CpG dinucleotide"
  misc_feature (61)..(61): /note="Nucleotide may be methylated to form 5-methylcytosine"
agggatgtggccagtccacttggagagcgcttccaggttaacaggcttgatgacctggtccgtggaccgctcgatcctggggagagaggagacgctggagagggtagggcagacccagatgg

SEQ ID NO: 29814 - DNA, 122 bp, Homo sapiens
  misc_feature (61)..(62): /note="This region represents a CpG dinucleotide"
  misc_feature (61)..(61): /note="Nucleotide may be methylated to form 5-methylcytosine"
aattgaagtccgctggtctccagacaggcacggtaacgtgcacgcatcggatgtggttcccggggaatggtgggtgattgtccatcttcctaacagtcctcaaatgaggactcagttccagc

SEQ ID NO: 29815 - DNA, 122 bp, Homo sapiens
  misc_feature (61)..(62): /note="This region represents a CpG dinucleotide"
  misc_feature (61)..(61): /note="Nucleotide may be methylated to form 5-methylcytosine"
agctgaatgctataaaattccagtgctactgcactgctcaacgtgacattagtgagcaaacgttaccagcacccatcaacacagagcagaactgcacagctccctgttgacagaatgagaca

SEQ ID NO: 29816 - DNA, 122 bp, Homo sapiens
  misc_feature (61)..(62): /note="This region represents a CpG dinucleotide"
  misc_feature (61)..(61): /note="Nucleotide may be methylated to form 5-methylcytosine"
aagaagaaaaatgactcccccacgctgctattactcttttctgctttgattccaatgtaacgagagcatgcctattggagcactttcagtacaattaagctggaatgtcctgacattgaatg

SEQ ID NO: 29817 - DNA, 122 bp, Homo sapiens
  misc_feature (61)..(62): /note="This region represents a CpG dinucleotide"
  misc_feature (61)..(61): /note="Nucleotide may be methylated to form 5-methylcytosine"
taaactgacattttcacaacaagaactgcacaccaaagcaaacattagaaatttcaggcccgttcactctgtggaaatatctttacatcctgttaccaaatagataaaagctcagttagaaa

SEQ ID NO: 29818 - DNA, 122 bp, Homo sapiens
  misc_feature (61)..(62): /note="This region represents a CpG dinucleotide"
  misc_feature (61)..(61): /note="Nucleotide may be methylated to form 5-methylcytosine"
tcgtccatggttcctgacttattaactaccacagccctttggcctatgacgtgattttatcgtgtgtgtgtgtgtgtgtgtgtgtgtgtgtgtgtgtgtaggttttcgtccatggttcctga

SEQ ID NO: 29819 - DNA, 122 bp, Homo sapiens
  misc_feature (61)..(62): /note="This region represents a CpG dinucleotide"
  misc_feature (61)..(61): /note="Nucleotide may be methylated to form 5-methylcytosine"
ggtgactagatgggtctgttggtgcaacggtgtctgtggacttacacaattacagccactcgcagatgttatcctggaactggatcctctcagtggtcagactatcatttgacacatctgtt

SEQ ID NO: 29820 - DNA, 122 bp, Homo sapiens
  misc_feature (61)..(62): /note="This region represents a CpG dinucleotide"
  misc_feature (61)..(61): /note="Nucleotide may be methylated to form 5-methylcytosine"
aggccaaggtgtttgtggtgctcgtgggaaacttagaagcacagatcccccaacctgctccggatcctcatgagcacagactggcttgcacatcattgttctcattgccttcccagacacca

SEQ ID NO: 29821 - DNA, 122 bp, Homo sapiens
  misc_feature (61)..(62): /note="This region represents a CpG dinucleotide"
  misc_feature (61)..(61): /note="Nucleotide may be methylated to form 5-methylcytosine"
atgagtaagaaatagtaaacattggccaggaccagaaaatgtgaagccatcttattttagcgtcagtcaatgagacttcccttaccctctctctctccttcctactccaggttccaccttgg

SEQ ID NO: 29822 - DNA, 122 bp, Homo sapiens
  misc_feature (61)..(62): /note="This region represents a CpG dinucleotide"
  misc_feature (61)..(61): /note="Nucleotide may be methylated to form 5-methylcytosine"
cagtagagtggcacagaagaatggtgagttcattgttattaccctcctagcccgtgagaacgcccaccatcccatgagttcctacatctatgccatgaggagcagttgggtttcagcacagc

SEQ ID NO: 29823 - DNA, 122 bp, Homo sapiens
  misc_feature (61)..(62): /note="This region represents a CpG dinucleotide"
  misc_feature (61)..(61): /note="Nucleotide may be methylated to form 5-methylcytosine"
acagcaggctgggcagctggggcagctctgtttcactgcagggcaacctcctctccatcacgggttctgctaggatgtgctcttctcacagcgatggctgcagggcaagagggcaaggctgc

SEQ ID NO: 29824 - DNA, 122 bp, Homo sapiens
  misc_feature (61)..(62): /note="This region represents a CpG dinucleotide"
  misc_feature (61)..(61): /note="Nucleotide may be methylated to form 5-methylcytosine"
tttaaaaggtgcatacagaactctgtaaatgcaatgatgattactgtttgtcaaatgtgtcgttgcttcctgcatgagtcctgtctccagttagctgtggcagtttctgagatgagctggcc

SEQ ID NO: 29825 - DNA, 122 bp, Homo sapiens
  misc_feature (61)..(62): /note="This region represents a CpG dinucleotide"
  misc_feature (61)..(61): /note="Nucleotide may be methylated to form 5-methylcytosine"
ctcttaatccacacattttcaggctggtaacaacacatactggcatctaacttgcagagacgggtgtccttctaacatcaaaatgtcataaaatagaaagtgcctgtagtgaaaactccctg

SEQ ID NO: 29826 - DNA, 122 bp, Homo sapiens
  misc_feature (61)..(62): /note="This region represents a CpG dinucleotide"
  misc_feature (61)..(61): /note="Nucleotide may be methylated to form 5-methylcytosine"
gtttgtttttataatgggtcttgctctgtcatctcagtttagagtacagtgtcatgatcacggctcactgcagcctcaacctcagcctcctgggtagctgggactataggcatgcaccacca

SEQ ID NO: 29827 - DNA, 122 bp, Homo sapiens
  misc_feature (61)..(62): /note="This region represents a CpG dinucleotide"
  misc_feature (61)..(61): /note="Nucleotide may be methylated to form 5-methylcytosine"
agcaaacaatgaatcataaaaacattgcaaaattttcctgtaggcaaaactgtcttcttccgaaatacattaaataattgctaattcatcaatgtgtttatcaaactgtttttccccaaaga

SEQ ID NO: 29828 - DNA, 122 bp, Homo sapiens
  misc_feature (61)..(62): /note="This region represents a CpG dinucleotide"
  misc_feature (61)..(61): /note="Nucleotide may be methylated to form 5-methylcytosine"
gagaggcaagaactggtctagtcacccccgctgccttcaggtctgccttgtacctgacatcgctgcaggaacactgctggaggctggggcttggctgcaaggtggtattctctagcactttc

SEQ ID NO: 29829 - DNA, 122 bp, Homo sapiens
  misc_feature (61)..(62): /note="This region represents a CpG dinucleotide"
  misc_feature (61)..(61): /note="Nucleotide may be methylated to form 5-methylcytosine"
aacccttcacaatctggaactggaaagagatttctagcccccacgaggaacaaagcttgacgatgaggaaatgacaacctcccttgtttgctaactattctcaggctaaaaagagagtgctg

SEQ ID NO: 29830 - DNA, 122 bp, Homo sapiens
  misc_feature (61)..(62): /note="This region represents a CpG dinucleotide"
  misc_feature (61)..(61): /note="Nucleotide may be methylated to form 5-methylcytosine"
ggagataatgtcaagtagggtgtatgtgtcacagcaatcagaagttaatgcctaccactccgggagaactcatactcctgtggtagtgtttaaggaactgctgacacattcttccagcttta

SEQ ID NO: 29831 - DNA, 122 bp, Homo sapiens
  misc_feature (61)..(62): /note="This region represents a CpG dinucleotide"
  misc_feature (61)..(61): /note="Nucleotide may be methylated to form 5-methylcytosine"
ccctgtccgcgcagtcatgacctcactgctcatgcctgtgtttccccctccaaaccctagcgattcgttttggacgaatgccaagatctgagaaagcaaaactgaaagcagaaattcttacc

SEQ ID NO: 29832 - DNA, 122 bp, Homo sapiens
  misc_feature (61)..(62): /note="This region represents a CpG dinucleotide"
  misc_feature (61)..(61): /note="Nucleotide may be methylated to form 5-methylcytosine"
gggattgaggagtggggaaaggtatccatatccagtcttttcatgtttctccaaggttaccgtcctattttggtcagaattgtgtaatctcctttgtgggggttttggatattaaccaacat

SEQ ID NO: 29833 - DNA, 122 bp, Homo sapiens
  misc_feature (61)..(62): /note="This region represents a CpG dinucleotide"
  misc_feature (61)..(61): /note="Nucleotide may be methylated to form 5-methylcytosine"
tgaaaaggatggagctgtgactgaagcaatccagctatttagcctaagcatgtgccaacacgcccagctaattttttgtatctttagtagaggtggggtttcaccatgttggccaagatggt

SEQ ID NO: 29834 - DNA, 122 bp, Homo sapiens
  misc_feature (61)..(62): /note="This region represents a CpG dinucleotide"
  misc_feature (61)..(61): /note="Nucleotide may be methylated to form 5-methylcytosine"
ggcagagaatatttccctgatggattgactttgggcttggcctgtgactcgctatgactccggaatgtaagtggaagtgacaattgccagtttcccttatgtaattctcctcttcctttgag

SEQ ID NO: 29835 - DNA, 122 bp, Homo sapiens
  misc_feature (61)..(62): /note="This region represents a CpG dinucleotide"
  misc_feature (61)..(61): /note="Nucleotide may be methylated to form 5-methylcytosine"
ttgaactcctgacctcaagtgatccaccctcctcggcctccaaaatgctgagattacaggcgtgagctgccatacctggccagaactctgtattttaaaaggtaagacttcagatgcagaaa

SEQ ID NO: 29836 - DNA, 122 bp, Homo sapiens
  misc_feature (61)..(62): /note="This region represents a CpG dinucleotide"
  misc_feature (61)..(61): /note="Nucleotide may be methylated to form 5-methylcytosine"
aacaaatgtgtaagctgtatgctaacacatacagtttaactggacaatcgcttactgaatcgtgtagtaagattgcagatggtatttagggaaggaaaagatcaacagataagtttgcctga

SEQ ID NO: 29837 - DNA, 122 bp, Homo sapiens
  misc_feature (61)..(62): /note="This region represents a CpG dinucleotide"
  misc_feature (61)..(61): /note="Nucleotide may be methylated to form 5-methylcytosine"
tccactctcttcccacttgacctcatttttaaaacaagcagtttcacccacagatccactcgagtgcagtgtgtcatctccctctgggccttctatgcatttgctcatactggttcctgtat

SEQ ID NO: 29838 - DNA, 122 bp, Homo sapiens
  misc_feature (61)..(62): /note="This region represents a CpG dinucleotide"
  misc_feature (61)..(61): /note="Nucleotide may be methylated to form 5-methylcytosine"
gagtccactgctagaaaagcctctgaggtgtttactgataatggcttcctaaaatacccacgcgagaccttcagtcctgcactgtgtacaacagcagaagcctggaaataaggtgctcacca

SEQ ID NO: 29839 - DNA, 122 bp, Homo sapiens
  misc_feature (61)..(62): /note="This region represents a CpG dinucleotide"
  misc_feature (61)..(61): /note="Nucleotide may be methylated to form 5-methylcytosine"
gaaaggttcttgtatcggttggaatcccgagagctccccaacagctaacacgaagcggtgcgttttaacaagagcctgggtgccggcgggctgaggcgtaaaatggcgtcagcccccaaaat

SEQ ID NO: 29840 - DNA, 122 bp, Homo sapiens
  misc_feature (61)..(62): /note="This region represents a CpG dinucleotide"
  misc_feature (61)..(61): /note="Nucleotide may be methylated to form 5-methylcytosine"
ccccacctcctcacacacacccctcgcgtgtacacacacacacacacacacacacgcacacgcaccccttccgccaatgggagccggcgggtgtccctgcgcctatccccggagagatctaa

SEQ ID NO: 29841 - DNA, 122 bp, Homo sapiens
  misc_feature (61)..(62): /note="This region represents a CpG dinucleotide"
  misc_feature (61)..(61): /note="Nucleotide may be methylated to form 5-methylcytosine"
gatttttgtagctggtgggcgttgccatgtataaggaaagggaagacttgggaagaacagcgtgtggaagtaagatcaggagttgggttttgtgcatgttcagtttctgaagcttttggaga

SEQ ID NO: 29842 - DNA, 122 bp, Homo sapiens
  misc_feature (61)..(62): /note="This region represents a CpG dinucleotide"
  misc_feature (61)..(61): /note="Nucleotide may be methylated to form 5-methylcytosine"
tacacctctatggagtacttaactatgtatggagctttcaggcctggaagttgctctgagcgagtcagtgagtggtgagtcagtgtaaaggccttggatgttactgtacaatactgtagact

SEQ ID NO: 29843 - DNA, 122 bp, Homo sapiens
  misc_feature (61)..(62): /note="This region represents a CpG dinucleotide"
  misc_feature (61)..(61): /note="Nucleotide may be methylated to form 5-methylcytosine"
gcatctaatctttatacttcttgtgactttttttcccctgcattttactttgtaatatatcggctttataattttaaaatacactggccgggcgcagtggcccacacctataatcccagcac

SEQ ID NO: 29844 - DNA, 122 bp, Homo sapiens
  misc_feature (61)..(62): /note="This region represents a CpG dinucleotide"
  misc_feature (61)..(61): /note="Nucleotide may be methylated to form 5-methylcytosine"
tgttagctcataccactaattattactaaatcagtattatagttctttgcctcctattttcgccatatctgtcaggtacattcataatcgttccaaatgagcagtcactgaaataatttcag

SEQ ID NO: 29845 - DNA, 122 bp, Homo sapiens
  misc_feature (61)..(62): /note="This region represents a CpG dinucleotide"
  misc_feature (61)..(61): /note="Nucleotide may be methylated to form 5-methylcytosine"
atgtactacatttgcatgccttttgggtttgccttaattcttacctcatttgcatcctatcgatctggaaagagctgttttggatgaatgcagtataaaatgtaaaaaccctgctaaatgac

SEQ ID NO: 29846 - DNA, 122 bp, Homo sapiens
  misc_feature (61)..(62): /note="This region represents a CpG dinucleotide"
  misc_feature (61)..(61): /note="Nucleotide may be methylated to form 5-methylcytosine"
cgtgcccccccatcagcttcggctaggcagcctccatcctcacaccccttatcacatccgcgtggcatgcaccagcagccagggcccctcatcctggacccactggcttcctgtggagacgc

SEQ ID NO: 29847 - DNA, 122 bp, Homo sapiens
  misc_feature (61)..(62): /note="This region represents a CpG dinucleotide"
  misc_feature (61)..(61): /note="Nucleotide may be methylated to form 5-methylcytosine"
cagaaggggcagcttaagcctcacctcaactctgatattaagtgtaaaggataatttcaccgacttttcttcttttcttcctagaaacaagctttcttcagtattcagtatagaattccacc

SEQ ID NO: 29848 - DNA, 122 bp, Homo sapiens
  misc_feature (61)..(62): /note="This region represents a CpG dinucleotide"
  misc_feature (61)..(61): /note="Nucleotide may be methylated to form 5-methylcytosine"
taatatttctaatgtagcttcaaagaagaaacacacattcttcataccactcttttagcacggaaggggtagtgttctattaaaccaagtaataggaccacttattaactttaactcataac

SEQ ID NO: 29849 - DNA, 122 bp, Homo sapiens
  misc_feature (61)..(62): /note="This region represents a CpG dinucleotide"
  misc_feature (61)..(61): /note="Nucleotide may be methylated to form 5-methylcytosine"
ggatgactgtatcagaagcgacattcaggatgtctttgtaacaacatttcctatggactgcgtaacttctggcttctgtgccaacatttctgtagaaagaacacaaaaaatactaataattg

SEQ ID NO: 29850 - DNA, 122 bp, Homo sapiens
  misc_feature (61)..(62): /note="This region represents a CpG dinucleotide"
  misc_feature (61)..(61): /note="Nucleotide may be methylated to form 5-methylcytosine"
actgccccagatgggcgaggtggggtggacacggttcttgggccggccctgatgattttccggggcaaacttggctcgagggctctgtctcgctggagcctggaatcgcagttgcgcttggg

SEQ ID NO: 29851 - DNA, 122 bp, Homo sapiens
  misc_feature (61)..(62): /note="This region represents a CpG dinucleotide"
  misc_feature (61)..(61): /note="Nucleotide may be methylated to form 5-methylcytosine"
acaaagaccaaaccagacagagattcacacaaaatacagcttgtccatcaggaaagttcacgtacacaaacgcatgacagctgctctaaatggtggtgaagataacattaaactgtttcagt

SEQ ID NO: 29852 - DNA, 122 bp, Homo sapiens
  misc_feature (61)..(62): /note="This region represents a CpG dinucleotide"
  misc_feature (61)..(61): /note="Nucleotide may be methylated to form 5-methylcytosine"
ttccttggtctctcttgaccacaaagtccacgattcagtcactctatgatttctatcaaacgttagtctttgatacaggaaaggaatgtaaagatagcatattttattttcagcattgttat

SEQ ID NO: 29853 - DNA, 122 bp, Homo sapiens
  misc_feature (61)..(62): /note="This region represents a CpG dinucleotide"
  misc_feature (61)..(61): /note="Nucleotide may be methylated to form 5-methylcytosine"
atgtgggtggggacgagccagaggagaaggtagttacctctgaaaacgaggcaggaaaggcggttcttgaacaactggtaggtcaagaagtaccacctgctgaagagtcaccagaggtgaca

SEQ ID NO: 29854 - DNA, 122 bp, Homo sapiens
  misc_feature (61)..(62): /note="This region represents a CpG dinucleotide"
  misc_feature (61)..(61): /note="Nucleotide may be methylated to form 5-methylcytosine"
catgcttatctcacccaagctccaaataagtatctcttctgtcatctacatatagttgtccggtcctgagcaaactggacaggaaggggtgggtggggctggggggagctgagcatcctcac

SEQ ID NO: 29855 - DNA, 122 bp, Homo sapiens
  misc_feature (61)..(62): /note="This region represents a CpG dinucleotide"
  misc_feature (61)..(61): /note="Nucleotide may be methylated to form 5-methylcytosine"
taagccacagtgcagaagtggacccattactcacactaccttcaaaggacacagagttctcgctgctcaaaggaaggggttagtcatcacctactgctaagaccaaaagccttggggcatca

SEQ ID NO: 29856 - DNA, 122 bp, Homo sapiens
  misc_feature (61)..(62): /note="This region represents a CpG dinucleotide"
  misc_feature (61)..(61): /note="Nucleotide may be methylated to form 5-methylcytosine"
cagccttgagattcttgccctctctctgttacgtcagtggtggggaacctggggcagattcgcctccgtggcttctcctgcatgactgcgttgggctgagggagatatgccaggttagtgcc

SEQ ID NO: 29857 - DNA, 122 bp, Homo sapiens
  misc_feature (61)..(62): /note="This region represents a CpG dinucleotide"
  misc_feature (61)..(61): /note="Nucleotide may be methylated to form 5-methylcytosine"
ataatatgccttggtaccatattatttggtgtgccattcttagatcttatgttgccataacgacagaatatgtgtgtgtgtttagtagaaagacaatccttttttcttccagtcaatttttt

SEQ ID NO: 29858 - DNA, 122 bp, Homo sapiens
  misc_feature (61)..(62): /note="This region represents a CpG dinucleotide"
  misc_feature (61)..(61): /note="Nucleotide may be methylated to form 5-methylcytosine"
gttgaaagagaacaaggccttttctaacccatgtctggtccctccatacaaaaaatggctcgagacaaaagggagcctgggtgtctgcctagaactgttgttcgacagaacaaaactggctt

SEQ ID NO: 29859 - DNA, 122 bp, Homo sapiens
  misc_feature (61)..(62): /note="This region represents a CpG dinucleotide"
  misc_feature (61)..(61): /note="Nucleotide may be methylated to form 5-methylcytosine"
tattggtcgtgcttcacaggatgcaacaaaaatgtttgaggtcttcgtgtccctgattcacgagacactcaaggacgagtgtcacatgtgcaacagaacaacattctacattttatcataag

SEQ ID NO: 29860 - DNA, 122 bp, Homo sapiens
  misc_feature (61)..(62): /note="This region represents a CpG dinucleotide"
  misc_feature (61)..(61): /note="Nucleotide may be methylated to form 5-methylcytosine"
aggtctatttttaggtttcccatttctcaacagaaggctcccagttttgagttagcgcaacgcagactggactgtgccctagaaggaacaggaatgcttcctctttgtggcttcccctgcat

SEQ ID NO: 29861 - DNA, 122 bp, Homo sapiens
  misc_feature (61)..(62): /note="This region represents a CpG dinucleotide"
  misc_feature (61)..(61): /note="Nucleotide may be methylated to form 5-methylcytosine"
gtgcaagcaaactgctcccggcacacctggttcatgatggagacatcagctgcatgggtccggtaacagtcgtgcacagagacgaaggtcaggcccttcctgtagcagtgcagggtggtgag

SEQ ID NO: 29862 - DNA, 122 bp, Homo sapiens
  misc_feature (61)..(62): /note="This region represents a CpG dinucleotide"
  misc_feature (61)..(61): /note="Nucleotide may be methylated to form 5-methylcytosine"
gggatttaagcgatctctaaacgttcaagtttttacacattgtgaacatcagagcatccccgtgcacgtgcggtgtatgtgttttacacctgacaaaaatgactgatgctttgacttcaaag

SEQ ID NO: 29863 - DNA, 122 bp, Homo sapiens
  misc_feature (61)..(62): /note="This region represents a CpG dinucleotide"
  misc_feature (61)..(61): /note="Nucleotide may be methylated to form 5-methylcytosine"
cagcctttcgagagactcatgaattctgaaaggggggtagtatcagggaaccactgcctgcgcacctgctctggcttgcgcacctgctcaagcgacattgatcttgtggcttcccgtctgtt

SEQ ID NO: 29864 - DNA, 122 bp, Homo sapiens
  misc_feature (61)..(62): /note="This region represents a CpG dinucleotide"
  misc_feature (61)..(61): /note="Nucleotide may be methylated to form 5-methylcytosine"
caataccacattagactggaaacagtggaggtgagcacatgatgccctgtgggtgtataccgttggtaactgctccagcctgggggttcagggaaggcttcctggaagaagaaacaggtgag

SEQ ID NO: 29865 - DNA, 122 bp, Homo sapiens
  misc_feature (61)..(62): /note="This region represents a CpG dinucleotide"
  misc_feature (61)..(61): /note="Nucleotide may be methylated to form 5-methylcytosine"
cttgttgcttgagggcacttatggtctctgtgggccaaatctcctcataagctatctgaccgtcaggtgctggtctcccaggagtcccagggaattgattccaaagctgggaagaggcagtc

SEQ ID NO: 29866 - DNA, 122 bp, Homo sapiens
  misc_feature (61)..(62): /note="This region represents a CpG dinucleotide"
  misc_feature (61)..(61): /note="Nucleotide may be methylated to form 5-methylcytosine"
gcactttgccacaccatatgggtggggaccatacatgatcgcttccagtctcatgccaaacgtggcacagaaacttcattccttatttttattttctgattttcctccacaacttgagatcc

SEQ ID NO: 29867 - DNA, 122 bp, Homo sapiens
  misc_feature (61)..(62): /note="This region represents a CpG dinucleotide"
  misc_feature (61)..(61): /note="Nucleotide may be methylated to form 5-methylcytosine"
tacgaggttgtgcaatgctgagcatagttgggatgtttttctgatccctccttctataggcgctttctaaccatgagcaggaaggctatttcctccttaactattgcccttccaaagcctac

SEQ ID NO: 29868 - DNA, 122 bp, Homo sapiens
  misc_feature (61)..(62): /note="This region represents a CpG dinucleotide"
  misc_feature (61)..(61): /note="Nucleotide may be methylated to form 5-methylcytosine"
aagaagtccctctgggaagaatttcaggccctgtggctgacagccacatgagatggctgccggggagatatttgggcaaggagattgttttctgatttccttaattctatcttgagggtaac

SEQ ID NO: 29869 - DNA, 122 bp, Homo sapiens
  misc_feature (61)..(62): /note="This region represents a CpG dinucleotide"
  misc_feature (61)..(61): /note="Nucleotide may be methylated to form 5-methylcytosine"
tgaatgatgttctggaacatcttttcaatgtgctggtttgtcatttgtatatcctgttttcgtgaaatacctgttcaacttttttgctcattttctaattggatgtttggttgttttgtttt

SEQ ID NO: 29870 - DNA, 122 bp, Homo sapiens
  misc_feature (61)..(62): /note="This region represents a CpG dinucleotide"
  misc_feature (61)..(61): /note="Nucleotide may be methylated to form 5-methylcytosine"
caggctgtggacctgtgggcgtggggcaggggctggccctggggctggcacatgtgctcacgcacctagtcctggggttgcctgtcaattctgcgactgtaattggttttgcttgtctcatt

SEQ ID NO: 29871 - DNA, 122 bp, Homo sapiens
  misc_feature (61)..(62): /note="This region represents a CpG dinucleotide"
  misc_feature (61)..(61): /note="Nucleotide may be methylated to form 5-methylcytosine"
tatatcatggtccactggagagcacccctcaattgtggggaggccatgtatcatttctgccgtccctaagtatgaagaaaaacaagaagaagcacgccaggaactctctgaaccagaaaaaa

SEQ ID NO: 29872 - DNA, 122 bp, Homo sapiens
  misc_feature (61)..(62): /note="This region represents a CpG dinucleotide"
  misc_feature (61)..(61): /note="Nucleotide may be methylated to form 5-methylcytosine"
cagctgcaggaaagagagaaacatcgtctctccgtgcgcctttccttgtatattaatctgcgatcctgctacacatgccactgtcagtcaggccatgctacgaagcctggggagaacagggc

SEQ ID NO: 29873 - DNA, 122 bp, Homo sapiens
  misc_feature (61)..(62): /note="This region represents a CpG dinucleotide"
  misc_feature (61)..(61): /note="Nucleotide may be methylated to form 5-methylcytosine"
tttgttcagcaatgagtaaacacagtctgtgtgcccgttgagaacagatagcatcagaggcgtcctgagcaacaacaggaataggttcagtgctgtcacttaagactgtactctggttttcg

SEQ ID NO: 29874 - DNA, 122 bp, Homo sapiens
  misc_feature (61)..(62): /note="This region represents a CpG dinucleotide"
  misc_feature (61)..(61): /note="Nucleotide may be methylated to form 5-methylcytosine"
ggcacctttcttaccaacttggcaaaagacctagggttaggggtaggggaactgagagcccggggaactagaattgtttcagaccagaacatgcaaattttactgctcagttcgcttactgg

SEQ ID NO: 29875 - DNA, 122 bp, Homo sapiens
  misc_feature (61)..(62): /note="This region represents a CpG dinucleotide"
  misc_feature (61)..(61): /note="Nucleotide may be methylated to form 5-methylcytosine"
cagtgctggtgtaaaccaattctcctcacatggttgagcagtggggcatccttggttttccgtaccttaggaccaaatgtaaatgttcaattcaattaaccttaaaaaaacatatgtggcga

SEQ ID NO: 29876 - DNA, 122 bp, Homo sapiens
  misc_feature (61)..(62): /note="This region represents a CpG dinucleotide"
  misc_feature (61)..(61): /note="Nucleotide may be methylated to form 5-methylcytosine"
gggaaaaaagtattacaagctctctgaatcatcaaacagttttaagtaagatggtaaaaacgaagcagaatccatgctcagtgcagcagacattgattgagcatctgccataggcaaggcac

SEQ ID NO: 29877 - DNA, 122 bp, Homo sapiens
  misc_feature (61)..(62): /note="This region represents a CpG dinucleotide"
  misc_feature (61)..(61): /note="Nucleotide may be methylated to form 5-methylcytosine"
aatgtctgctgtacatctgagtacacaattgtctttcacagaagatggagcaaagtattacggaaagttcattggcttctgagtctgagagaaatgggttcaaatcctgaatacgttcctta

SEQ ID NO: 29878 - DNA, 122 bp, Homo sapiens
  misc_feature (61)..(62): /note="This region represents a CpG dinucleotide"
  misc_feature (61)..(61): /note="Nucleotide may be methylated to form 5-methylcytosine"
cttgcacaggcaggaccaggtcaaaggaagaggacactgatgagggcctggaggctcttacgttgcagattagattaggaaaggccttgaatgccaaactgaggcctacagacttcattacg

SEQ ID NO: 29879 - DNA, 122 bp, Homo sapiens
  misc_feature (61)..(62): /note="This region represents a CpG dinucleotide"
  misc_feature (61)..(61): /note="Nucleotide may be methylated to form 5-methylcytosine"
aaaaacatactaaacagtgaaaatggatgacccagtccttagcctatgttatggagttagcgaagcaagctccagtgccctgtggcttagtcatacaataaatacttactgtcacacagtgg

SEQ ID NO: 29880 - DNA, 122 bp, Homo sapiens
  misc_feature (61)..(62): /note="This region represents a CpG dinucleotide"
  misc_feature (61)..(61): /note="Nucleotide may be methylated to form 5-methylcytosine"
ggctcccgcgtgtcacatagatacgctggctcccgcctgtcacgtagatacgctggctcccgcctgtcacgtagatatgctggctcccacctgccgcgtagctacgctgcctcccgcctgtg

SEQ ID NO: 29881 - DNA, 122 bp, Homo sapiens
  misc_feature (61)..(62): /note="This region represents a CpG dinucleotide"
  misc_feature (61)..(61): /note="Nucleotide may be methylated to form 5-methylcytosine"
tgtcctcttctagctatttcattcagctggctttccagtctatcagaaaaatgccatcatcggctgggtgtggtgactctcacctataatcccaacactttgggaggctgaggtgggcggat

SEQ ID NO: 29882 - DNA, 122 bp, Homo sapiens
  misc_feature (61)..(62): /note="This region represents a CpG dinucleotide"
  misc_feature (61)..(61): /note="Nucleotide may be methylated to form 5-methylcytosine"
tataggctctttaaccacaccacagtgggactaatacagtcactttggttgagctgcactcgctgattcaatgttgaaataaagtgcttcacagattagcttagtctgcagcacgtaaaggt

SEQ ID NO: 29883 - DNA, 122 bp, Homo sapiens
  misc_feature (61)..(62): /note="This region represents a CpG dinucleotide"
  misc_feature (61)..(61): /note="Nucleotide may be methylated to form 5-methylcytosine"
tgagtaagcctccgttcttgtggacagtcgagtggctgggcagggacctagctttgtcaccggcgttgccctaagggtcacaggcaggacagctccctctgtgaagtccagggcgtgtgtgc

SEQ ID NO: 29884 - DNA, 122 bp, Homo sapiens
  misc_feature (61)..(62): /note="This region represents a CpG dinucleotide"
  misc_feature (61)..(61): /note="Nucleotide may be methylated to form 5-methylcytosine"
tctccaacatcaacacctacaccacattagtcaaaccagtacagcaggccctactcccagcgcctcccaggtacctccagaagcatgctgggtccccacccagggagtccccacggctccgc

SEQ ID NO: 29885 - DNA, 122 bp, Homo sapiens
  misc_feature (61)..(62): /note="This region represents a CpG dinucleotide"
  misc_feature (61)..(61): /note="Nucleotide may be methylated to form 5-methylcytosine"
ttttacccatgtgccatgcttcctgcattgtttaaatatggtcattcaggactttttctgcgagcacaaaagcattgagaatatgttagtggctgccaggaaaacttgtcatcattttagtc

SEQ ID NO: 29886 - DNA, 122 bp, Homo sapiens
  misc_feature (61)..(62): /note="This region represents a CpG dinucleotide"
  misc_feature (61)..(61): /note="Nucleotide may be methylated to form 5-methylcytosine"
aagaaacacgtgtggcctcactgggtgactgcctgggcattggcaatcaagtttactttgcgtcatttttacttcctttttcagatttatttttagtaaacaaaagtgaaaaaagagaaaga

SEQ ID NO: 29887 - DNA, 122 bp, Homo sapiens
  misc_feature (61)..(62): /note="This region represents a CpG dinucleotide"
  misc_feature (61)..(61): /note="Nucleotide may be methylated to form 5-methylcytosine"
tatggcctattgctcctaggctgcaaacctgtccagcatgcgactgtactgagtgctgtgcgagtgtacctaaacatagaatggtacagtaagagtacagtacgaaagataaaaaggggtgc

SEQ ID NO: 29888 - DNA, 122 bp, Homo sapiens
  misc_feature (61)..(62): /note="This region represents a CpG dinucleotide"
  misc_feature (61)..(61): /note="Nucleotide may be methylated to form 5-methylcytosine"
cctgcttcaagtgaatctttctgtgataaatttatagaacaactggtgtgacagtttttgcgcctgcctaataaatgtttgtatctgtgcatgagtcagtctgagacttgcttttattacaa

SEQ ID NO: 29889 - DNA, 122 bp, Homo sapiens
  misc_feature (61)..(62): /note="This region represents a CpG dinucleotide"
  misc_feature (61)..(61): /note="Nucleotide may be methylated to form 5-methylcytosine"
ctttccccatccttgcccctctgttaatatctgcctgttgatgttaagactgctaaattacgacattaaattaagatgttaagacatgaattacttcaggtttggaagggacttctgttttg

SEQ ID NO: 29890 - DNA, 122 bp, Homo sapiens
  misc_feature (61)..(62): /note="This region represents a CpG dinucleotide"
  misc_feature (61)..(61): /note="Nucleotide may be methylated to form 5-methylcytosine"
atcttccttcaactgcccggaatgctgcaaagtgggccttttctaggatacatgagtcaccgtttccagaaaaaccagaactgaggacaccttcccagacattcaatgactgacgttcatta

SEQ ID NO: 29891 - DNA, 122 bp, Homo sapiens
  misc_feature (61)..(62): /note="This region represents a CpG dinucleotide"
  misc_feature (61)..(61): /note="Nucleotide may be methylated to form 5-methylcytosine"
agttagcaatgggttaaccaaatttgcagaccactcattttaacttattgtataactgtgcgatctagaaggtggaaagacacagtgtaatggcttatagaggagattataagaattagctc

SEQ ID NO: 29892 - DNA, 122 bp, Homo sapiens
  misc_feature (61)..(62): /note="This region represents a CpG dinucleotide"
  misc_feature (61)..(61): /note="Nucleotide may be methylated to form 5-methylcytosine"
aattaattaaatgatgtataaactgatgaaataatgagtgtataaaacacatctgtgtagcgtgggaaatacaaagaatgtaagaaaacagcagatgaacaatacataacaacagaagaatg

SEQ ID NO: 29893 - DNA, 122 bp, Homo sapiens
  misc_feature (61)..(62): /note="This region represents a CpG dinucleotide"
  misc_feature (61)..(61): /note="Nucleotide may be methylated to form 5-methylcytosine"
gctggcgtctgggccgggctgggaagagtgatcgctccagccgcgtggcagtaacattcccgcacatttaacaacaattagtctgtgccgacgccatggtaggctttcgtgtatgaaaattt

SEQ ID NO: 29894 - DNA, 122 bp, Homo sapiens
  misc_feature (61)..(62): /note="This region represents a CpG dinucleotide"
  misc_feature (61)..(61): /note="Nucleotide may be methylated to form 5-methylcytosine"
caattataatgaggttttacaaagcaggttcagatgccagcgcacctgggctcctcctggcgcactgcgatttaaagcaagttatttcacctctcagggcttagctttagcatcgataagaa

SEQ ID NO: 29895 - DNA, 122 bp, Homo sapiens
  misc_feature (61)..(62): /note="This region represents a CpG dinucleotide"
  misc_feature (61)..(61): /note="Nucleotide may be methylated to form 5-methylcytosine"
tggaaatatttttggttgccaccactgggatggggatgctactggtctctagtaggcagacgccagagatgctgccaaacttcctccaatgaccaggacagcccccacgacaaagaattatc

SEQ ID NO: 29896 - DNA, 122 bp, Homo sapiens
  misc_feature (61)..(62): /note="This region represents a CpG dinucleotide"
  misc_feature (61)..(61): /note="Nucleotide may be methylated to form 5-methylcytosine"
attatactgattccatgggagccatcccatgtattctctgaatctgttccctttttattacgtaatttctaacctacttagtctgattcatatatacagatgtagcaagaggtataaattaa

SEQ ID NO: 29897 - DNA, 122 bp, Homo sapiens
  misc_feature (61)..(62): /note="This region represents a CpG dinucleotide"
  misc_feature (61)..(61): /note="Nucleotide may be methylated to form 5-methylcytosine"
tgacacattgggcgggtttggcagcttaactgtgactgactttcatttttttctgttacacgttgagaaaaaaactaaatgtgatttttccataaaaatgctgatacaaatgtccaaaactt

SEQ ID NO: 29898 - DNA, 122 bp, Homo sapiens
  misc_feature (61)..(62): /note="This region represents a CpG dinucleotide"
  misc_feature (61)..(61): /note="Nucleotide may be methylated to form 5-methylcytosine"
tgtgactgagccctgagcccccaggttaccagccacaccccagtggaatcccgggagctacggggtaaaatggaatcctcttccacagcaagtgcacagaaggcactcagggctggtgggaa

SEQ ID NO: 29899 - DNA, 122 bp, Homo sapiens
  misc_feature (61)..(62): /note="This region represents a CpG dinucleotide"
  misc_feature (61)..(61): /note="Nucleotide may be methylated to form 5-methylcytosine"
catcattgtctagaagttacattctgtatgacacatctgtcagatccctggaagcttcctcgccaccgactgcatggcaggtggtgctcatgtcactcggcccttccttggccccacacagc

SEQ ID NO: 29900 - DNA, 122 bp, Homo sapiens
  misc_feature (61)..(62): /note="This region represents a CpG dinucleotide"
  misc_feature (61)..(61): /note="Nucleotide may be methylated to form 5-methylcytosine"
aaatagccttaaatttgcatattaaaggaaacaactcctttaatcagataacaaaatttacgtcataaggtatgaagagaaagtctggtgagctagaggaaaattaaaacggatttaatggc

SEQ ID NO: 29901 - DNA, 122 bp, Homo sapiens
  misc_feature (61)..(62): /note="This region represents a CpG dinucleotide"
  misc_feature (61)..(61): /note="Nucleotide may be methylated to form 5-methylcytosine"
tccttttccatatactacaggggcggtgtaagaactttcccgagccatcggaggcatcaacgggaatcactggaataataatattagtaaagttgtttttatgaccacttaagtttacaaca

SEQ ID NO: 29902 - DNA, 122 bp, Homo sapiens
  misc_feature (61)..(62): /note="This region represents a CpG dinucleotide"
  misc_feature (61)..(61): /note="Nucleotide may be methylated to form 5-methylcytosine"
caacttcctcatcaccaacgatgaggcatacgctgaggagtttggcaacgagacgtggggcgtaacaaaggtgaggcctggtcctggtcctgatgtcgggggcgggcagggctggcaggggg

SEQ ID NO: 29903 - DNA, 122 bp, Homo sapiens
  misc_feature (61)..(62): /note="This region represents a CpG dinucleotide"
  misc_feature (61)..(61): /note="Nucleotide may be methylated to form 5-methylcytosine"
gagagtatggatggggttggggaggagggggttagtgtggcctagcagaagagtagcagacgaagctgaagatgtaagtagtggccagatcataagggccttaataatctttttaagaagtt

SEQ ID NO: 29904 - DNA, 122 bp, Homo sapiens
  misc_feature (61)..(62): /note="This region represents a CpG dinucleotide"
  misc_feature (61)..(61): /note="Nucleotide may be methylated to form 5-methylcytosine"
gtggagggctaggactgcctctggcctttcctggtaccctgagcagctgtgttctcagcacggtgtctttggaggttctctatagcctggaaagtgctaagcaagtctacttttcttgaccc

SEQ ID NO: 29905 - DNA, 122 bp, Homo sapiens
  misc_feature (61)..(62): /note="This region represents a CpG dinucleotide"
  misc_feature (61)..(61): /note="Nucleotide may be methylated to form 5-methylcytosine"
actgccatctttcatcaaatgtttcagctctgtggaaaataacttaggttttttcctactcgcaaaagaaatgtttccacttgaaacctgttggaaatatggaataggctatatagttccat

SEQ ID NO: 29906 - DNA, 122 bp, Homo sapiens
  misc_feature (61)..(62): /note="This region represents a CpG dinucleotide"
  misc_feature (61)..(61): /note="Nucleotide may be methylated to form 5-methylcytosine"
gtcgcggctgtgtcccagtcattctcggggtaagttccgaagttggaggtgtcgccttcgcgggctatcttgggcacgatgggaggcttcagttttctctgaggaacagcttcccagtccac

SEQ ID NO: 29907 - DNA, 122 bp, Homo sapiens
  misc_feature (61)..(62): /note="This region represents a CpG dinucleotide"
  misc_feature (61)..(61): /note="Nucleotide may be methylated to form 5-methylcytosine"
ttacacttttaggctattgagagtgaaaacaagcactgacatgaacacccaaccagctgccggtgacatcgtccccttctgagatctgaggacatggatacccaaccacctgccggtgacat

SEQ ID NO: 29908 - DNA, 122 bp, Homo sapiens
  misc_feature (61)..(62): /note="This region represents a CpG dinucleotide"
  misc_feature (61)..(61): /note="Nucleotide may be methylated to form 5-methylcytosine"
ccccggcctgagccttcatagggcacaagactggaatgtcagcaagaccggcacaagtggcgtcaactccaggagaccacctggcaggggctggcaccatgggctaagaatcaggcaactta

SEQ ID NO: 29909 - DNA, 122 bp, Homo sapiens
  misc_feature (61)..(62): /note="This region represents a CpG dinucleotide"
  misc_feature (61)..(61): /note="Nucleotide may be methylated to form 5-methylcytosine"
ggggagaggtataaggtgtgcggctaacaagtttatttttctagtcgcagaatttggactcgtgaaagattttagtctaatgcagtttgttcacaaatataaggaggggggcctcagactag

SEQ ID NO: 29910 - DNA, 122 bp, Homo sapiens
  misc_feature (61)..(62): /note="This region represents a CpG dinucleotide"
  misc_feature (61)..(61): /note="Nucleotide may be methylated to form 5-methylcytosine"
aacttaatactattggctgacctgtaccttcaactgagctgggtgagtaatatttaaatgcggagcctgacagctcataacccacggcggcttactccccctgtggcaagctgctgagccag

SEQ ID NO: 29911 - DNA, 122 bp, Homo sapiens
  misc_feature (61)..(62): /note="This region represents a CpG dinucleotide"
  misc_feature (61)..(61): /note="Nucleotide may be methylated to form 5-methylcytosine"
agaacagtgctgtacaatggaaacagtgctgtacaacagaaatctgtcagccacacgtgtcgtttaaacttttctagtaatcacattaaaattgtaaaaagaagccaataaaagtaatttta

SEQ ID NO: 29912 - DNA, 122 bp, Homo sapiens
  misc_feature (61)..(62): /note="This region represents a CpG dinucleotide"
  misc_feature (61)..(61): /note="Nucleotide may be methylated to form 5-methylcytosine"
attcgttcctcaccctgtgaagtaggctggagctcttgataactcttctaaaacaattatcgttgtgtaactgaagccattcagttgcgggctcctctgtttgtttattcgggaggaagtct

SEQ ID NO: 29913 - DNA, 122 bp, Homo sapiens
  misc_feature (61)..(62): /note="This region represents a CpG dinucleotide"
  misc_feature (61)..(61): /note="Nucleotide may be methylated to form 5-methylcytosine"
agatgaacacaagcttaggggaatcctaaagaagttgatcatgccctacttgttcaatgccgttttaccagcccaaggcagatccaagttgggggagataaaaagctttaaatagtataagt

SEQ ID NO: 29914 - DNA, 122 bp, Homo sapiens
  misc_feature (61)..(62): /note="This region represents a CpG dinucleotide"
  misc_feature (61)..(61): /note="Nucleotide may be methylated to form 5-methylcytosine"
aattcaagcctcctccaggacttggactgttgatctccctcctcccatcagactgtgtcccgatatggcactgtgtctctccctaaggtgtgtactctcctgagagacgcttccttggaact

SEQ ID NO: 29915 - DNA, 122 bp, Homo sapiens
  misc_feature (61)..(62): /note="This region represents a CpG dinucleotide"
  misc_feature (61)..(61): /note="Nucleotide may be methylated to form 5-methylcytosine"
ttcccagcttctgagttcttacatggtaattctgcacattccaaacagtctttcaaataccgtctcgtctaagaatgagtgcactttcctaaaaagacaaatatcaagcacttaaaacacac

SEQ ID NO: 29916 - DNA, 122 bp, Homo sapiens
  misc_feature (61)..(62): /note="This region represents a CpG dinucleotide"
  misc_feature (61)..(61): /note="Nucleotide may be methylated to form 5-methylcytosine"
aaggaggtagaagggctgatccctactactgccccctgcagcttgccatcagatgtgagacggaagttttgacttagactggtttggttattttaatatgggacagcaagcctggattggcc

SEQ ID NO: 29917 - DNA, 122 bp, Homo sapiens
  misc_feature (61)..(62): /note="This region represents a CpG dinucleotide"
  misc_feature (61)..(61): /note="Nucleotide may be methylated to form 5-methylcytosine"
actgtaaaacttcccgcaaattgcacacacagagagagaggacaggagacatagtgaccacggatacaaaggaaaggaaaattttgcaacgggttagctggagatccattaccaacacctgg

SEQ ID NO: 29918 - DNA, 122 bp, Homo sapiens
  misc_feature (61)..(62): /note="This region represents a CpG dinucleotide"
  misc_feature (61)..(61): /note="Nucleotide may be methylated to form 5-methylcytosine"
accatggcaggagtgctggaaaggtggtgtcagctaacagttgcttcagccagataaggacggtaacttcagtccaataaaaacctcatcagttaccaactaaatcagggcatggtgttttt

SEQ ID NO: 29919 - DNA, 122 bp, Homo sapiens
  misc_feature (61)..(62): /note="This region represents a CpG dinucleotide"
  misc_feature (61)..(61): /note="Nucleotide may be methylated to form 5-methylcytosine"
ggtagatatcaggccctggtctgcggcttggaagtttcctgtgaataagaaaaacatcatcgcttcttgagtcacaaggatgataggatgagaaaaagaaaggacaaaggcaccagaggagg

SEQ ID NO: 29920 - DNA, 122 bp, Homo sapiens
  misc_feature (61)..(62): /note="This region represents a CpG dinucleotide"
  misc_feature (61)..(61): /note="Nucleotide may be methylated to form 5-methylcytosine"
gaggctctcatttctggagtaatagtgacatacatttgctgcaagaaattgcagcctcatcgcaaatgcctacacgcagtgtctatttcaacatcagaccacatttcattcattaattgtta

SEQ ID NO: 29921 - DNA, 122 bp, Homo sapiens
  misc_feature (61)..(62): /note="This region represents a CpG dinucleotide"
  misc_feature (61)..(61): /note="Nucleotide may be methylated to form 5-methylcytosine"
ttacagagtatctgctttccacggcatctacaaaacaaaggatgacatggcagtgagcaacgcaaataacccagttcaactgccccaacaacatcacagggtcaggagcaggtcgagaaaag

SEQ ID NO: 29922 - DNA, 122 bp, Homo sapiens
  misc_feature (61)..(62): /note="This region represents a CpG dinucleotide"
  misc_feature (61)..(61): /note="Nucleotide may be methylated to form 5-methylcytosine"
cgcagccctcctcagtgacgacggcgggtttggcttcatccccttccatgaagatgagcgcggctccctctcctttgtgttggatctggggccctggggagagctgggcacacggctggtgt

SEQ ID NO: 29923 - DNA, 122 bp, Homo sapiens
  misc_feature (61)..(62): /note="This region represents a CpG dinucleotide"
  misc_feature (61)..(61): /note="Nucleotide may be methylated to form 5-methylcytosine"
catgcctttttgtttgtggttattaaaacctggccttcaagaatagccataccagttttccggggattgtgaaatcttctggaaaacagaggcactcatcaactaagacactgcacaaattt

SEQ ID NO: 29924 - DNA, 122 bp, Homo sapiens
  misc_feature (61)..(62): /note="This region represents a CpG dinucleotide"
  misc_feature (61)..(61): /note="Nucleotide may be methylated to form 5-methylcytosine"
aaagggagactttactccgtttcctctttgttatttcggccggccgggtgatactagggccgaaagaagaggaggtgataaggcaggtgacatttcctcctccttcccgtttttaggctctt

SEQ ID NO: 29925 - DNA, 122 bp, Homo sapiens
  misc_feature (61)..(62): /note="This region represents a CpG dinucleotide"
  misc_feature (61)..(61): /note="Nucleotide may be methylated to form 5-methylcytosine"
aacagaacagtggttgtaaccacaattatggtaagtgttggtctatgctttatggtgttccgttttgtccacaggcaattttaactccccagcgacggtgaacagggagggcaaagctgact

SEQ ID NO: 29926 - DNA, 122 bp, Homo sapiens
  misc_feature (61)..(62): /note="This region represents a CpG dinucleotide"
  misc_feature (61)..(61): /note="Nucleotide may be methylated to form 5-methylcytosine"
gtggtctgagtatggcacggagtttccattattaatggcccttgggtagtcctccagggccgtgggtctctcctgagagggctctgagctgcggctaagcctggccatggtgtgtcgggaag

SEQ ID NO: 29927 - DNA, 122 bp, Homo sapiens
  misc_feature (61)..(62): /note="This region represents a CpG dinucleotide"
  misc_feature (61)..(61): /note="Nucleotide may be methylated to form 5-methylcytosine"
gcaaacaaatgatattgcttcctcatggcagaggactaagtaatcggcacatttatcaaccgctgcttggccttgtggctgttcagatattgtatgtgccacgacatcgtttcctttgtggc

SEQ ID NO: 29928 - DNA, 122 bp, Homo sapiens
  misc_feature (61)..(62): /note="This region represents a CpG dinucleotide"
  misc_feature (61)..(61): /note="Nucleotide may be methylated to form 5-methylcytosine"
ggttgaggtgaaagaaataaaatggtagtgtaaggagaaggaatacaagatggtagaagacgcagcagttgggtcagtaaacttgtaagaccttgagaggaaagttatcatcccccatttga

SEQ ID NO: 29929 - DNA, 122 bp, Homo sapiens
  misc_feature (61)..(62): /note="This region represents a CpG dinucleotide"
  misc_feature (61)..(61): /note="Nucleotide may be methylated to form 5-methylcytosine"
gttcttgttacccacacttgaaaactcagtcattgtttactctttccttgttcacaaatccgtaaagtaaccaccatgtccagtcaattcttccttttctatcttctccattttttgccttt

SEQ ID NO: 29930 - DNA, 122 bp, Homo sapiens
  misc_feature (61)..(62): /note="This region represents a CpG dinucleotide"
  misc_feature (61)..(61): /note="Nucleotide may be methylated to form 5-methylcytosine"
tctcttcaataatcttgcaatcaggaagcctgcccctctagaaccacaaaactgctgccgcgaacaggaaaccactacaatcaggaagccgctactgctgccgggctccagaaccagtgcac

SEQ ID NO: 29931 - DNA, 122 bp, Homo sapiens
  misc_feature (61)..(62): /note="This region represents a CpG dinucleotide"
  misc_feature (61)..(61): /note="Nucleotide may be methylated to form 5-methylcytosine"
gctggagcacaaagacagcgattgttacccaataagcagtagtcacacacttctaccaatcgccttaggagggctggttaccatggaatccaccatctgttcactccccaccggaatgtgat

SEQ ID NO: 29932 - DNA, 122 bp, Homo sapiens
  misc_feature (61)..(62): /note="This region represents a CpG dinucleotide"
  misc_feature (61)..(61): /note="Nucleotide may be methylated to form 5-methylcytosine"
cttctttcctgaggtcatttggagccatgactgtgatttgtcacatttgcttcctagtggcgtttgtccaatcagttggggaggagcacaaatggactgaatggaaggaggatggaaagctc

SEQ ID NO: 29933 - DNA, 122 bp, Homo sapiens
  misc_feature (61)..(62): /note="This region represents a CpG dinucleotide"
  misc_feature (61)..(61): /note="Nucleotide may be methylated to form 5-methylcytosine"
aagaaaggaccggtgatgaacctcagctgtttgtgaatgcatgtggcttgtggagaggagcggaagtgagtttcaggtatttcagtccatcatgactgtgaaattgaactgtaaatgctacc

SEQ ID NO: 29934 - DNA, 122 bp, Homo sapiens
  misc_feature (61)..(62): /note="This region represents a CpG dinucleotide"
  misc_feature (61)..(61): /note="Nucleotide may be methylated to form 5-methylcytosine"
tttaggatacactgtttcaagtatacagtgatttttataaaattaaaattccttacagaacgaaaggttttaaaatgtggcaaaggcatttttgttttgaaactgtgtgcatttatccagat

SEQ ID NO: 29935 - DNA, 122 bp, Homo sapiens
  misc_feature (61)..(62): /note="This region represents a CpG dinucleotide"
  misc_feature (61)..(61): /note="Nucleotide may be methylated to form 5-methylcytosine"
tgtgtatgtaaactgttctggttattttaatataagcgtgccagctgtttcctgttgagacgcccaataatacaccagccttgcctgaaatcagctcaaccttagacatttcatatacgtga

SEQ ID NO: 29936 - DNA, 122 bp, Homo sapiens
  misc_feature (61)..(62): /note="This region represents a CpG dinucleotide"
  misc_feature (61)..(61): /note="Nucleotide may be methylated to form 5-methylcytosine"
aagactccaaatcagtcagggagaggagtggaaggagccaaaacgtccctgcgaggcctgcgctcaccagcccccttacccaaagtcccgggcccctggcgccaggagcaggctcctggagc

SEQ ID NO: 29937 - DNA, 122 bp, Homo sapiens
  misc_feature (61)..(62): /note="This region represents a CpG dinucleotide"
  misc_feature (61)..(61): /note="Nucleotide may be methylated to form 5-methylcytosine"
tccaggaaaggaaggagcctcgctttctccagggcaggggcagcgtggggcggggcaggccgggtgtgtctgtggggagtgggcgcgtgctcacactctttaagctgcgactgcttccttta

SEQ ID NO: 29938 - DNA, 122 bp, Homo sapiens
  misc_feature (61)..(62): /note="This region represents a CpG dinucleotide"
  misc_feature (61)..(61): /note="Nucleotide may be methylated to form 5-methylcytosine"
tgcaaggtcactgactcacccttaacccttcttgtaacatgtcttcttaggcaatcctatcggacagaacccaggataagtcatgcataatttaaagaaatttcataggaattaaaagagat

SEQ ID NO: 29939 - DNA, 122 bp, Homo sapiens
  misc_feature (61)..(62): /note="This region represents a CpG dinucleotide"
  misc_feature (61)..(61): /note="Nucleotide may be methylated to form 5-methylcytosine"
ttctgccatcacctcaatggaatgttactcatagtatccccagcactcccgggttcaccacgcactccacaaacatttcttgagtgaataagtaagggaaggagggtgcttgagggagacaa

SEQ ID NO: 29940 - DNA, 122 bp, Homo sapiens
  misc_feature (61)..(62): /note="This region represents a CpG dinucleotide"
  misc_feature (61)..(61): /note="Nucleotide may be methylated to form 5-methylcytosine"
gtatgtggatagactgttgatgtaaaatttagccataaaaattttttggcttcaaacttacgtaggaaatttgttatagcttgttgaagagcagcgtgaataaaacaggaagcacaaaaaat

SEQ ID NO: 29941 - DNA, 122 bp, Homo sapiens
  misc_feature (61)..(62): /note="This region represents a CpG dinucleotide"
  misc_feature (61)..(61): /note="Nucleotide may be methylated to form 5-methylcytosine"
tcttaaatagatgagggatcctcattgatgccaccttagggatgaagaaatgaggtctagcgatggcaagtaacacacccaaggtcacaaagcgagtcagtggcacagcctgcactagaatc

SEQ ID NO: 29942 - DNA, 122 bp, Homo sapiens
  misc_feature (61)..(62): /note="This region represents a CpG dinucleotide"
  misc_feature (61)..(61): /note="Nucleotide may be methylated to form 5-methylcytosine"
taaccaggcctgggaagattttctaaactgaagagtttctaggatgaggtggagtgctggcggtaaaaacataccagaagaaaacaaaatttaaatgcaccctagcactgccatctgtccaa

SEQ ID NO: 29943 - DNA, 122 bp, Homo sapiens
  misc_feature (61)..(62): /note="This region represents a CpG dinucleotide"
  misc_feature (61)..(61): /note="Nucleotide may be methylated to form 5-methylcytosine"
agaggttggaatgtgtaagatacacatttcatcaatgcaaaaataccagaaggtggcaaacgtggactttggtagaggcatggcacaggaaaattgctgttcataagtccacataggtgtgt

SEQ ID NO: 29944 - DNA, 122 bp, Homo sapiens
  misc_feature (61)..(62): /note="This region represents a CpG dinucleotide"
  misc_feature (61)..(61): /note="Nucleotide may be methylated to form 5-methylcytosine"
agtcaagggcaaaagcttgtgactcagcaacactaccagttaaagagctatcctgtattacgcacttactgtatgccaggtgccacactcaggccttggctttcattactttaattaaccct

SEQ ID NO: 29945 - DNA, 122 bp, Homo sapiens
  misc_feature (61)..(62): /note="This region represents a CpG dinucleotide"
  misc_feature (61)..(61): /note="Nucleotide may be methylated to form 5-methylcytosine"
ctggttgagcccattttcaaaaaactgcccaccccagagctatgccaacaaaatctgttacggagtaaagccctgaagtggtgactcaccagagtaccttgcagctgacagataataggcag

SEQ ID NO: 29946 - DNA, 122 bp, Homo sapiens
  misc_feature (61)..(62): /note="This region represents a CpG dinucleotide"
  misc_feature (61)..(61): /note="Nucleotide may be methylated to form 5-methylcytosine"
cctgtgggtgagaaacatgggtaagcgtgtgcagacgtggagagggcgtggggtgagggacgcccacccctgtgggtgagaaaatgggcaagcatgcgcagacgtggagagggtgtggggga

SEQ ID NO: 29947 - DNA, 122 bp, Homo sapiens
  misc_feature (61)..(62): /note="This region represents a CpG dinucleotide"
  misc_feature (61)..(61): /note="Nucleotide may be methylated to form 5-methylcytosine"
ctctaaatatcaagtaatcacatttgatgtttgcaccactgtattgctttgtagggctgccgtaacagagtaccacaaattgtgtagttttttataataacagaaatctattctgtcacatt

SEQ ID NO: 29948 - DNA, 122 bp, Homo sapiens
  misc_feature (61)..(62): /note="This region represents a CpG dinucleotide"
  misc_feature (61)..(61): /note="Nucleotide may be methylated to form 5-methylcytosine"
aagcttcactaaggctgagaagcaacttaagctgtcaggaataggtgttagtactgaggacggggcagctcactctggccccatgtttagactcctgtcttcattgtcctgactcctgaaga

SEQ ID NO: 29949 - DNA, 122 bp, Homo sapiens
  misc_feature (61)..(62): /note="This region represents a CpG dinucleotide"
  misc_feature (61)..(61): /note="Nucleotide may be methylated to form 5-methylcytosine"
ggcaccatgtttaggggttggacgcacagccacctttacccccaccccccttcaaacccacgttaataattgcagccctagtcacagcactcggggttgctggaaagacttagggagataca

SEQ ID NO: 29950 - DNA, 122 bp, Homo sapiens
  misc_feature (61)..(62): /note="This region represents a CpG dinucleotide"
  misc_feature (61)..(61): /note="Nucleotide may be methylated to form 5-methylcytosine"
ttatgatacggtgaggaaaggcagccatctacataaataacacatacagctaccattcaccgaatcccaggtgctcagggctttagacagattatgtcatttaaccctcacaggcccatgaa

SEQ ID NO: 29951 - DNA, 122 bp, Homo sapiens
  misc_feature (61)..(62): /note="This region represents a CpG dinucleotide"
  misc_feature (61)..(61): /note="Nucleotide may be methylated to form 5-methylcytosine"
agcctgcgacctctgcctgctacaggggtcatcaaatcacctgaatacctgggttgtgggcgctggtgtgggcgtctcaggccgggtgcctgtgaagcaatggcgtcctcaccattcctgtg

SEQ ID NO: 29952 - DNA, 122 bp, Homo sapiens
  misc_feature (61)..(62): /note="This region represents a CpG dinucleotide"
  misc_feature (61)..(61): /note="Nucleotide may be methylated to form 5-methylcytosine"
ggggctggggaggctccttgggccctggcatgtgcagtgggtggacactggtgctgtccccgaggcagaggacagcatgggggagcaggttcatgggaggccaggcatttgttttgagacat

SEQ ID NO: 29953 - DNA, 122 bp, Homo sapiens
  misc_feature (61)..(62): /note="This region represents a CpG dinucleotide"
  misc_feature (61)..(61): /note="Nucleotide may be methylated to form 5-methylcytosine"
acctcgtgacccgcccgcctcggcctcccaaagtgctgggattacaggcgtgagccatcgcgccgagccaggaaaatgtaaggttttaagaactttgtacaagaaccaaatagaacaaaaga

SEQ ID NO: 29954 - DNA, 122 bp, Homo sapiens
  misc_feature (61)..(62): /note="This region represents a CpG dinucleotide"
  misc_feature (61)..(61): /note="Nucleotide may be methylated to form 5-methylcytosine"
tcgttttttctcttgctaggaaagccgggttagtaaagcagttgaagtgatgattcagcacgtagaaaacttgaagaggatgtatgccaaagagcacgctgaattagaagaactgaaacagg

SEQ ID NO: 29955 - DNA, 122 bp, Homo sapiens
  misc_feature (61)..(62): /note="This region represents a CpG dinucleotide"
  misc_feature (61)..(61): /note="Nucleotide may be methylated to form 5-methylcytosine"
tttggcaccttaattatatctgcaataatcctttacagcaatacctagattaatgttccacggaataactagaagatatatgtacactaggagctaagaacttaggggtcatctaagaatcc

SEQ ID NO: 29956 - DNA, 122 bp, Homo sapiens
  misc_feature (61)..(62): /note="This region represents a CpG dinucleotide"
  misc_feature (61)..(61): /note="Nucleotide may be methylated to form 5-methylcytosine"
ttagtactaaaaagcataacaatgttattcatatgcttgctttaaaatttttgatataagcgaggtacagaacagtaggtatactatgctaccactcatataaaatatgggatatttattca

SEQ ID NO: 29957 - DNA, 122 bp, Homo sapiens
  misc_feature (61)..(62): /note="This region represents a CpG dinucleotide"
  misc_feature (61)..(61): /note="Nucleotide may be methylated to form 5-methylcytosine"
tggggatattgggatccctgtctcagtgcggcaacatgggaggcatctagtgcgacagagcggcctcacccaagtgatgtgtcatgatgaggataatgttcatggagactgatttccatttg

SEQ ID NO: 29958 - DNA, 122 bp, Homo sapiens
  misc_feature (61)..(62): /note="This region represents a CpG dinucleotide"
  misc_feature (61)..(61): /note="Nucleotide may be methylated to form 5-methylcytosine"
cgaatgagggtgagatggtaccaggcccacagagaggccgcggctgggtgcgcagaactacgacaccagccctaagaagccaacaggctgttgaatgccaagcctgaactattaatttgcat

SEQ ID NO: 29959 - DNA, 122 bp, Homo sapiens
  misc_feature (61)..(62): /note="This region represents a CpG dinucleotide"
  misc_feature (61)..(61): /note="Nucleotide may be methylated to form 5-methylcytosine"
tgtctgtccctcttccatattctcttccatggctacctttcttcagtagaatctggtacacggaattaatcaaaagctcaattagatgttggaaaaactgggggtttttttttttttttttt

SEQ ID NO: 29960 - DNA, 122 bp, Homo sapiens
  misc_feature (61)..(62): /note="This region represents a CpG dinucleotide"
  misc_feature (61)..(61): /note="Nucleotide may be methylated to form 5-methylcytosine"
ggcatctcctcaagctggctggggttctctgcatctcagctgtggcgcctggtgtgagggcgcacgcttcgcagtgagagtgaaatgcccagttcgcgctggcagagggagaccctgtgaag

SEQ ID NO: 29961 - DNA, 122 bp, Homo sapiens
  misc_feature (61)..(62): /note="This region represents a CpG dinucleotide"
  misc_feature (61)..(61): /note="Nucleotide may be methylated to form 5-methylcytosine"
accagtgtatgtttgtgatgattcattctggacaagtgttgggaacccatcagaaatcaacgggtggttatatcgtgaaatcctctggttttagaaagcctgcatttgtagtaagagattcc

SEQ ID NO: 29962 - DNA, 122 bp, Homo sapiens
  misc_feature (61)..(62): /note="This region represents a CpG dinucleotide"
  misc_feature (61)..(61): /note="Nucleotide may be methylated to form 5-methylcytosine"
atgaatccaggaaattgttcaaaattggactaaaaaaaaaaaaaaaaaaccacaccttaacgtagtattaagattgcaggcattcattctcagaggaagagtgggtttgctgtcatagcaac

SEQ ID NO: 29963 - DNA, 122 bp, Homo sapiens
  misc_feature (61)..(62): /note="This region represents a CpG dinucleotide"
  misc_feature (61)..(61): /note="Nucleotide may be methylated to form 5-methylcytosine"
gggattctaaacggcctagctgcaattcagctctaaacattgtactatcctgtggccaggcgccccaaggaatctgaaggattcagacgggtgaagtgataaccataataatgccttccatt

SEQ ID NO: 29964 - DNA, 122 bp, Homo sapiens
  misc_feature (61)..(62): /note="This region represents a CpG dinucleotide"
  misc_feature (61)..(61): /note="Nucleotide may be methylated to form 5-methylcytosine"
gtaagctgaactagctacttttgttgtggattgtttttgcttaaaatacaacgggcagaccgactgtggttattcaaacttgagtatttggcagacatttcctcataaatgagtgacgtgaa

SEQ ID NO: 29965 - DNA, 122 bp, Homo sapiens
  misc_feature (61)..(62): /note="This region represents a CpG dinucleotide"
  misc_feature (61)..(61): /note="Nucleotide may be methylated to form 5-methylcytosine"
tactcgatgccctgcttggggctgctcagtgtggccagtggggatgtggtatcagctggacggaggcctggctactcctgatctgaggtaccttgacattgaccagcccttgcctggtgtgg

SEQ ID NO: 29966 - DNA, 122 bp, Homo sapiens
  misc_feature (61)..(62): /note="This region represents a CpG dinucleotide"
  misc_feature (61)..(61): /note="Nucleotide may be methylated to form 5-methylcytosine"
attatgatgctttaacatcttagacaccattctggctaaggagggcctgccttcctgaggcgagccaattcttagggcccagaggggagcatgactgatatgcaaactagccacttcagcca

SEQ ID NO: 29967 - DNA, 122 bp, Homo sapiens
  misc_feature (61)..(62): /note="This region represents a CpG dinucleotide"
  misc_feature (61)..(61): /note="Nucleotide may be methylated to form 5-methylcytosine"
ttctgtttgcagcagagcccaggctgtcttttcttcataattctctctgtgcccactcctcgagggcaggaactgtccctgtatcagtgaggcattcggacttgggagatgtttttagaaca

SEQ ID NO: 29968 - DNA, 122 bp, Homo sapiens
  misc_feature (61)..(62): /note="This region represents a CpG dinucleotide"
  misc_feature (61)..(61): /note="Nucleotide may be methylated to form 5-methylcytosine"
ttatgaaaagctcatggggacaatgcccccaagaaaccagcagtttgcaaatggaaaactcgttttaagaagggatgaggccaggcgtggtggctcagcctgtaatcccagcactttgggag

SEQ ID NO: 29969 - DNA, 122 bp, Homo sapiens
  misc_feature (61)..(62): /note="This region represents a CpG dinucleotide"
  misc_feature (61)..(61): /note="Nucleotide may be methylated to form 5-methylcytosine"
aagctagctacctcctatcttatctatgccaaggcccctaggaatgagtattgttaagcacgtcaaaagtcatctgtgtgtttactttgtcactagggttgtggtagaaaaacaatactggt

SEQ ID NO: 29970 - DNA, 122 bp, Homo sapiens
  misc_feature (61)..(62): /note="This region represents a CpG dinucleotide"
  misc_feature (61)..(61): /note="Nucleotide may be methylated to form 5-methylcytosine"
ctcctctttgtcttcagcatctatgcttcttattgctaattaaacttcagctatcccttccgccttctggctcttagtcatgccaagtgtgtggcaactttaggacttttgcaaagctgttc

SEQ ID NO: 29971 - DNA, 122 bp, Homo sapiens
  misc_feature (61)..(62): /note="This region represents a CpG dinucleotide"
  misc_feature (61)..(61): /note="Nucleotide may be methylated to form 5-methylcytosine"
tgtctgcctttgtgctcagagaaggccttcacgcctttggttctcgtaaggtgctcgccacggcaacccaagtgtctaagcagggcatttgcaggggactgtccccacctcacaggcggcta

SEQ ID NO: 29972 - DNA, 122 bp, Homo sapiens
  misc_feature (61)..(62): /note="This region represents a CpG dinucleotide"
  misc_feature (61)..(61): /note="Nucleotide may be methylated to form 5-methylcytosine"
aggaacggggttcttagcctctctggccttggtgcacttgtctgctcccaggacgtttctcgatggctctccccgaggactgggagtacccagcctggtgcctccaccctgtcttagcacag

SEQ ID NO: 29973 - DNA, 122 bp, Homo sapiens
  misc_feature (61)..(62): /note="This region represents a CpG dinucleotide"
  misc_feature (61)..(61): /note="Nucleotide may be methylated to form 5-methylcytosine"
taattgaaagtccagaaagaaacgagaggcctctgatgaacctaaacacagttcacaaatcgtaggtgcattattaataaaaagccctttgggtcttcgcccagaaccgaattgttcttttc

SEQ ID NO: 29974 - DNA, 122 bp, Homo sapiens
  misc_feature (61)..(62): /note="This region represents a CpG dinucleotide"
  misc_feature (61)..(61): /note="Nucleotide may be methylated to form 5-methylcytosine"
aacaaaaaaaaaacaaaaaaaaaacgcactctgctgttgagagctggggcataaatgccacggcagttgctgggcatttatgccccagctcttaacagtggagtgggaatggatctctccag

SEQ ID NO: 29975 - DNA, 122 bp, Homo sapiens
  misc_feature (61)..(62): /note="This region represents a CpG dinucleotide"
  misc_feature (61)..(61): /note="Nucleotide may be methylated to form 5-methylcytosine"
cccaaaaaaatctttttaaaaaaccccacttaattgaggttaagatccttttgaccacttcgcagacatccttttaaagctccttctgattggattaaaaactcctctggcaagcctctagc

SEQ ID NO: 29976 - DNA, 122 bp, Homo sapiens
  misc_feature (61)..(62): /note="This region represents a CpG dinucleotide"
  misc_feature (61)..(61): /note="Nucleotide may be methylated to form 5-methylcytosine"
ctccagcaggtcgatagcaaaacaaacgcactattgaccgccgcgcgcactaaatcctcccggcagacaagatgatgtgagcccgaatcgaatcgactgctgaactcataaccgctggggcc

SEQ ID NO: 29977 - DNA, 122 bp, Homo sapiens
  misc_feature (61)..(62): /note="This region represents a CpG dinucleotide"
  misc_feature (61)..(61): /note="Nucleotide may be methylated to form 5-methylcytosine"
agtgtaactgggtaaataaagatgtattcaatttgcacaatcccccactaactctaccttcgtgactttgtctcttggttccttgcttagtcatcaaatgtcaacatttaaggatacaagct

SEQ ID NO: 29978 - DNA, 122 bp, Homo sapiens
  misc_feature (61)..(62): /note="This region represents a CpG dinucleotide"
  misc_feature (61)..(61): /note="Nucleotide may be methylated to form 5-methylcytosine"
caccgcgcccagccgcaagtgtctttttcatataatgacttatcttattgctggatctaacggtaggtttaattgtagttctttaaggaatatccctactgttttccatagtggttgtgcta

SEQ ID NO: 29979 - DNA, 122 bp, Homo sapiens
  misc_feature (61)..(62): /note="This region represents a CpG dinucleotide"
  misc_feature (61)..(61): /note="Nucleotide may be methylated to form 5-methylcytosine"
tcacttgccaccagacctgagctggctacaggccaatgacagcatagggctggccctgcccgcctcccatctggcagcaaggatccagttccagattgtgacctgtggttgagtctggcaca

SEQ ID NO: 29980 - DNA, 122 bp, Homo sapiens
  misc_feature (61)..(62): /note="This region represents a CpG dinucleotide"
  misc_feature (61)..(61): /note="Nucleotide may be methylated to form 5-methylcytosine"
tactcactatatgccagtagcacaactctctaccctccaccaagttgtaacaaccaaaaacgtatgcagacactgccaaatgttccctgagggtgaaaattgcctccagctgagaactactg

SEQ ID NO: 29981 - DNA, 122 bp, Homo sapiens
  misc_feature (61)..(62): /note="This region represents a CpG dinucleotide"
  misc_feature (61)..(61): /note="Nucleotide may be methylated to form 5-methylcytosine"
ctgtggctgacactgcaaagaatcccggctcagccacgtccttgttcttgtgcaagccagcgccctgcacctgaaggcccttatgtggagggtgactacatgctctgccttgcctgagtcag

SEQ ID NO: 29982 - DNA, 122 bp, Homo sapiens
  misc_feature (61)..(62): /note="This region represents a CpG dinucleotide"
  misc_feature (61)..(61): /note="Nucleotide may be methylated to form 5-methylcytosine"
ctgcccaattcatgaattgctgtctgtttaaataaactctttaacattttaatgtgtttacgtttatcttttaactgtttgttaaccagctgcagacaatcacccagacaaagctaggcatt

SEQ ID NO: 29983 - DNA, 122 bp, Homo sapiens
  misc_feature (61)..(62): /note="This region represents a CpG dinucleotide"
  misc_feature (61)..(61): /note="Nucleotide may be methylated to form 5-methylcytosine"
cagctggacttttccttggttggtcttcattcacgttgcctattatgaggatggcttcctcgtgaactccaagcagctccaaacaggaaacctggtttcctcaaaatgtggtttgtttacaa

SEQ ID NO: 29984 - DNA, 122 bp, Homo sapiens
  misc_feature (61)..(62): /note="This region represents a CpG dinucleotide"
  misc_feature (61)..(61): /note="Nucleotide may be methylated to form 5-methylcytosine"
ctgaaattagtctatggaacacactgatgcaactccccatttacacgtgggttatcagggcgctaggctgctcttgaagagtctactcatccattgtagcataatgaaagcattccttatct

SEQ ID NO: 29985 - DNA, 122 bp, Homo sapiens
  misc_feature (61)..(62): /note="This region represents a CpG dinucleotide"
  misc_feature (61)..(61): /note="Nucleotide may be methylated to form 5-methylcytosine"
tcattcttccaccttcttactctgcaaccaaaccaagtgccccatactacaggtaggtgccgagaaattccgcagcctgaaaaaataatccatgcaggtcaaaggcagaaatttactccggg

SEQ ID NO: 29986 - DNA, 122 bp, Homo sapiens
  misc_feature (61)..(62): /note="This region represents a CpG dinucleotide"
  misc_feature (61)..(61): /note="Nucleotide may be methylated to form 5-methylcytosine"
gaggtttgcatccggttcttccatatgtgacaatacctggtattccctaggtgctgaatacgtgtttgtttagtctcctttctgcctacatgctcacccaagcaggtgtcaggaagcggccc

SEQ ID NO: 29987 - DNA, 122 bp, Homo sapiens
  misc_feature (61)..(62): /note="This region represents a CpG dinucleotide"
  misc_feature (61)..(61): /note="Nucleotide may be methylated to form 5-methylcytosine"
acaaaggtgggggggcccctggaaccctctgtgggctggcagtgtgcttcctgcacccagcgccagcccgccctggggaggggctgaacccgccctgctcgtgataaggcacaagcaagggc

SEQ ID NO: 29988 - DNA, 122 bp, Homo sapiens
  misc_feature (61)..(62): /note="This region represents a CpG dinucleotide"
  misc_feature (61)..(61): /note="Nucleotide may be methylated to form 5-methylcytosine"
ggcctgatgaggggccctggagcattgaggccttctccacatctttccttttcacataggcggccagagaggacagtgaacaaacacaaatggaactcatggcactggttcagcctgtcacc

SEQ ID NO: 29989 - DNA, 122 bp, Homo sapiens
  misc_feature (61)..(62): /note="This region represents a CpG dinucleotide"
  misc_feature (61)..(61): /note="Nucleotide may be methylated to form 5-methylcytosine"
tgaggaggagtcagggtcagggacaggtgaaagagtaaaaacctcccttactgtcccccacgactggctctctcagcccctggggattgaattcattgccatgaattcaaggcaatactcac

SEQ ID NO: 29990 - DNA, 122 bp, Homo sapiens
  misc_feature (61)..(62): /note="This region represents a CpG dinucleotide"
  misc_feature (61)..(61): /note="Nucleotide may be methylated to form 5-methylcytosine"
cacggaggacgctggagaatgagggcggctcccgtcccgttcctgagcacgctcgagtcccgcctccacctcacagcagctcttccgtgcggtaagcgggagactcccattttcaaggccaa

SEQ ID NO: 29991 - DNA, 122 bp, Homo sapiens
  misc_feature (61)..(62): /note="This region represents a CpG dinucleotide"
  misc_feature (61)..(61): /note="Nucleotide may be methylated to form 5-methylcytosine"
caccccaaaacatcctaatttctctccccggtgtccagccagagagcacccagaggatgacgacccacagcagggagtgacaaagctggctcagtttctgtgatgaccccttcccctgctca

SEQ ID NO: 29992 - DNA, 122 bp, Homo sapiens
  misc_feature (61)..(62): /note="This region represents a CpG dinucleotide"
  misc_feature (61)..(61): /note="Nucleotide may be methylated to form 5-methylcytosine"
tgttgagtaataggaaaccattgaaggttttagagaatgaagggaaggttaatggatagccggagtaggcagagatagtgaattaggaagctattttagtcagcagaggaagagatgatagg

SEQ ID NO: 29993 - DNA, 122 bp, Homo sapiens
  misc_feature (61)..(62): /note="This region represents a CpG dinucleotide"
  misc_feature (61)..(61): /note="Nucleotide may be methylated to form 5-methylcytosine"
cccctccttaccccagctcagggtgaggggctcttgcagcccctcgtgctgcatatggcacgtgtatctctgctcttgtccagaaggcaccaccacagctgcccacttctggaaggttccat

SEQ ID NO: 29994 - DNA, 122 bp, Homo sapiens
  misc_feature (61)..(62): /note="This region represents a CpG dinucleotide"
  misc_feature (61)..(61): /note="Nucleotide may be methylated to form 5-methylcytosine"
tttctacatcaaggacttgatctctcaaaagcttttgattttactaaacatacgataccccgccgccccacctatactgcaaacacacacaaaaaacactttgctggtctgaagaagttttc

SEQ ID NO: 29995 - DNA, 122 bp, Homo sapiens
  misc_feature (61)..(62): /note="This region represents a CpG dinucleotide"
  misc_feature (61)..(61): /note="Nucleotide may be methylated to form 5-methylcytosine"
tttctgaaatttgttaccaggtgaactctgtgtaggcaagtatggaggctcttctaattacggattacaagcaagaatgactacctagatcagagttgatataagcgatgcccaaccattca

SEQ ID NO: 29996 - DNA, 122 bp, Homo sapiens
  misc_feature (61)..(62): /note="This region represents a CpG dinucleotide"
  misc_feature (61)..(61): /note="Nucleotide may be methylated to form 5-methylcytosine"
tggcccatgtcactggcctgttcctgctgtaagtttcataacactgctgctagcataaaccgcttgggtatcagattgtgtctgcatttatctttgacacaaatcataccgaaggggagaag

SEQ ID NO: 29997 - DNA, 122 bp, Homo sapiens
  misc_feature (61)..(62): /note="This region represents a CpG dinucleotide"
  misc_feature (61)..(61): /note="Nucleotide may be methylated to form 5-methylcytosine"
cagagagtggatcacactgtcgggctcagcacgaaagactgacagtctgggcacagcacccggtcctccctcccagcgctgactgcaatcccggccagggctgaggaaaccgcaggaccatg

SEQ ID NO: 29998 - DNA, 122 bp, Homo sapiens
  misc_feature (61)..(62): /note="This region represents a CpG dinucleotide"
  misc_feature (61)..(61): /note="Nucleotide may be methylated to form 5-methylcytosine"
tggatggtgtgaagcaatctgttttctagcccgagcctgcatagctggtggatcctggaccgtgattaagtgcatcacctaggcttcaatgagatggagtcactgtgtgtccaaacagtggg

SEQ ID NO: 29999 - DNA, 122 bp, Homo sapiens
  misc_feature (61)..(62): /note="This region represents a CpG dinucleotide"
  misc_feature (61)..(61): /note="Nucleotide may be methylated to form 5-methylcytosine"
caccctttccacacagcagcatcgcctggtctgactacagaacagtagcctagtagcaggcgtggatccgtgcccttgctctggggaatgccttccttcctcgcagcccgaacctcgtccct

SEQ ID NO: 30000 - DNA, 122 bp, Homo sapiens
  misc_feature (61)..(62): /note="This region represents a CpG dinucleotide"
  misc_feature (61)..(61): /note="Nucleotide may be methylated to form 5-methylcytosine"
accaggggatggacaggtgtcctaggtatgcccaagaatgatgcaacatccccagccatgcgcatgatggctgaggaatctggggacagctattgtgtggaaagaaaatcttacaaagggaa

SEQ ID NO: 30001 - DNA, 122 bp, Homo sapiens
  misc_feature (61)..(62): /note="This region represents a CpG dinucleotide"
  misc_feature (61)..(61): /note="Nucleotide may be methylated to form 5-methylcytosine"
tgattcccctcacccataaatccacccccttctccttgttgtagttagagttgagccctccgctattgcactaggtgcaatagtcttgagtaaagttttccttaccattttaacaagtatca

SEQ ID NO: 30002 - DNA, 122 bp, Homo sapiens
  misc_feature (61)..(62): /note="This region represents a CpG dinucleotide"
  misc_feature (61)..(61): /note="Nucleotide may be methylated to form 5-methylcytosine"
gaaggcctccacagcagcccggactgacagagcctgcggtctctggataagccactgggacgggcttgccatccttcacattggcctgttccacggtgacttttacagaatactatcgctgc

SEQ ID NO: 30003 - DNA, 122 bp, Homo sapiens
  misc_feature (61)..(62): /note="This region represents a CpG dinucleotide"
  misc_feature (61)..(61): /note="Nucleotide may be methylated to form 5-methylcytosine"
gttcatttcaacatcatcttaatcccatgtaactaacagcggtagaatcaataaaacccacgtgtaatgggaagaccacaaatctatttacctgtttgaatcaggcaagtacctaccctgtt

SEQ ID NO: 30004 - DNA, 122 bp, Homo sapiens
  misc_feature (61)..(62): /note="This region represents a CpG dinucleotide"
  misc_feature (61)..(61): /note="Nucleotide may be methylated to form 5-methylcytosine"
gtacatgggtgtggatccacttatacgtgggtttggtctgcctgggagctattcctggtgcgtgattatcaagctaatagccattaaaaatctactaatcagctccatcccagaacttgctt

SEQ ID NO: 30005 - DNA, 122 bp, Homo sapiens
  misc_feature (61)..(62): /note="This region represents a CpG dinucleotide"
  misc_feature (61)..(61): /note="Nucleotide may be methylated to form 5-methylcytosine"
cagccagtttcgaatcatgattctgggttgactcaagtctccagcgtggagctccaggggcgcgcagctcatggagtgcggtacggattaacaaggccatgtggtaggcgctcttcccccca

SEQ ID NO: 30006 - DNA, 122 bp, Homo sapiens
  misc_feature (61)..(62): /note="This region represents a CpG dinucleotide"
  misc_feature (61)..(61): /note="Nucleotide may be methylated to form 5-methylcytosine"
aagagtagaaataactgccaataattatatgctccctagcatttcttttttcttgttgttcgtttgtttttgttttttttgagacagagtcttgctcttgttgcccaggctggagtacagtg

SEQ ID NO: 30007 - DNA, 122 bp, Homo sapiens
  misc_feature (61)..(62): /note="This region represents a CpG dinucleotide"
  misc_feature (61)..(61): /note="Nucleotide may be methylated to form 5-methylcytosine"
gaagaaagaaaggtaggaaggaaggaaaaataaaaccaaaaaagttcagggaacatcactcgcactgatgatcaaaggtcagttcctggtcaataaaagtaaacaagcctgtttaagataaa

SEQ ID NO: 30008 - DNA, 122 bp, Homo sapiens
  misc_feature (61)..(62): /note="This region represents a CpG dinucleotide"
  misc_feature (61)..(61): /note="Nucleotide may be methylated to form 5-methylcytosine"
tggggtttggagctggctaggctggagcccactgggaattcctggatgaggctgagccagcgccagagtactcaggtggttagggctgggccaagaagctctgtttaccttgaggttgacaa

SEQ ID NO: 30009 - DNA, 122 bp, Homo sapiens
  misc_feature (61)..(62): /note="This region represents a CpG dinucleotide"
  misc_feature (61)..(61): /note="Nucleotide may be methylated to form 5-methylcytosine"
ttaaaggcaggctcgagccaagagacgtgatgaattgcaagaatgtgttgtgttcatagccggggagctggcagaaatagcccagctaaaggactaggatggaagggttttttttgttgttg

SEQ ID NO: 30010 - DNA, 122 bp, Homo sapiens
  misc_feature (61)..(62): /note="This region represents a CpG dinucleotide"
  misc_feature (61)..(61): /note="Nucleotide may be methylated to form 5-methylcytosine"
gcttgttatttgttggctgtttggaccttagcagttctttactgggcttctgtaattgttcgttggacaaactcttgaggctcaggatccacagtaccccacatttctggatttctttttca

SEQ ID NO: 30011 - DNA, 122 bp, Homo sapiens
  misc_feature (61)..(62): /note="This region represents a CpG dinucleotide"
  misc_feature (61)..(61): /note="Nucleotide may be methylated to form 5-methylcytosine"
tagcttaaggaagagctccatgtcataactcttaacttaaagggcttactacttagattacggctgccaatcatcaattcacttttcatttttttcttaaagggacagcttacaaagcaaat

SEQ ID NO: 30012 - DNA, 122 bp, Homo sapiens
  misc_feature (61)..(62): /note="This region represents a CpG dinucleotide"
  misc_feature (61)..(61): /note="Nucleotide may be methylated to form 5-methylcytosine"
tgattatttagatcctctatgtctttgattatcttttcatctaatgggttggtcaaattccgatagaggtgtattaaagttctccttgtaattctaacagtttttgctttatctgtttagtt

SEQ ID NO: 30013 - DNA, 122 bp, Homo sapiens
  misc_feature (61)..(62): /note="This region represents a CpG dinucleotide"
  misc_feature (61)..(61): /note="Nucleotide may be methylated to form 5-methylcytosine"
tttttaaatcaactccataagcctaggcagattcctgtgcccatgaatgtggaactggctcgcggatctcacagctcctggtgtttccttggcagggaatccactctccaggtgtgtgttat

SEQ ID NO: 30014 - DNA, 122 bp, Homo sapiens
  misc_feature (61)..(62): /note="This region represents a CpG dinucleotide"
  misc_feature (61)..(61): /note="Nucleotide may be methylated to form 5-methylcytosine"
tgatttaatgcctttcggtgcgatttattcacagtgttgtcccttatctttcataatctccgttattttttgaccttaacaaaagaatgaaaggaaaaccgcatccttgccttcccttgtta

SEQ ID NO: 30015 - DNA, 122 bp, Homo sapiens
  misc_feature (61)..(62): /note="This region represents a CpG dinucleotide"
  misc_feature (61)..(61): /note="Nucleotide may be methylated to form 5-methylcytosine"
atgggcagccccaggcagctctggggtgtgggcggtcagcagtgctgacttattagtcagcgtaagtcagcgctgagagatgctacaccctctgacagggcatgcattcattaaacgaattc

SEQ ID NO: 30016 - DNA, 122 bp, Homo sapiens
  misc_feature (61)..(62): /note="This region represents a CpG dinucleotide"
  misc_feature (61)..(61): /note="Nucleotide may be methylated to form 5-methylcytosine"
ctagtgaaattttttaaggttcatcttttcctctcaagttcatttctaaagttctcagatcgccattttcagaaacgaagtgtctttgctgtttctcagaacaccctgtgttgataggcagt

SEQ ID NO: 30017 - DNA, 122 bp, Homo sapiens
  misc_feature (61)..(62): /note="This region represents a CpG dinucleotide"
  misc_feature (61)..(61): /note="Nucleotide may be methylated to form 5-methylcytosine"
ccctgctgggggtgagggggtatttttctgtctcttcaataaaccagaagcggccgggcgcggtggcttctgcctgtaatcctagcactctgggaggcagaggcgggtggatcacctgagat

SEQ ID NO: 30018 - DNA, 122 bp, Homo sapiens
  misc_feature (61)..(62): /note="This region represents a CpG dinucleotide"
  misc_feature (61)..(61): /note="Nucleotide may be methylated to form 5-methylcytosine"
gaaagcaaaatgcagcaaaacaaaaacaaaaccaaaaccatcgtgctcctggacagcatgcgaaccacaaagctgcagaatgcgaaagctgaatgcaggctgcaaatccttgtttctatgaa

SEQ ID NO: 30019 - DNA, 122 bp, Homo sapiens
  misc_feature (61)..(62): /note="This region represents a CpG dinucleotide"
  misc_feature (61)..(61): /note="Nucleotide may be methylated to form 5-methylcytosine"
tgatacttcgggagccacagtaagggacattcatggtgatgggagtgagcagaaagccatcgagggagcccccaaaccaggcaccagcagccagcaaaagacacttcttgcggttcatcagg

SEQ ID NO: 30020 - DNA, 122 bp, Homo sapiens
  misc_feature (61)..(62): /note="This region represents a CpG dinucleotide"
  misc_feature (61)..(61): /note="Nucleotide may be methylated to form 5-methylcytosine"
gattttctcttagagtagaatgtatggttggttttacatttgtcattccattcccagggacgtgcgggagacagacgccttcctcttatctcaaccgcattgaggccttcttctttcactaa

SEQ ID NO: 30021 - DNA, 122 bp, Homo sapiens
  misc_feature (61)..(62): /note="This region represents a CpG dinucleotide"
  misc_feature (61)..(61): /note="Nucleotide may be methylated to form 5-methylcytosine"
gccatagtaacaatgcgttcagccaggtttccttagctacacactagtgacaggacaggacgctgccctaaagtgcctgccgctgactcagggaggaggcttggaacacacagcgggaggtg

SEQ ID NO: 30022 - DNA, 122 bp, Homo sapiens
  misc_feature (61)..(62): /note="This region represents a CpG dinucleotide"
  misc_feature (61)..(61): /note="Nucleotide may be methylated to form 5-methylcytosine"
catttatgcaaatgcctcctaagaagttacactttttcacatttttgtctccctcaaattcgttctctctagtgccactaaaataatctccagtaatgtcactgcttaaaacccttcagcag

SEQ ID NO: 30023 - DNA, 122 bp, Homo sapiens
  misc_feature (61)..(62): /note="This region represents a CpG dinucleotide"
  misc_feature (61)..(61): /note="Nucleotide may be methylated to form 5-methylcytosine"
gacagcgggtgagtcggggtgggctgtgcacagagagctgagcctgaacacaggccaggtcgtcctagcaggggcaggacatgggctgctgaaggaaaccagtcctccttcaggcccagcag

SEQ ID NO: 30024 - DNA, 122 bp, Homo sapiens
  misc_feature (61)..(62): /note="This region represents a CpG dinucleotide"
  misc_feature (61)..(61): /note="Nucleotide may be methylated to form 5-methylcytosine"
atgaaaacaaatagaacacataattaatattcttcctgcagcttctgaaaggcctttaggcggaacatcagtgctcattttactatctatattcaggctgcgttttgacaccatgatatttt

SEQ ID NO: 30025 - DNA, 122 bp, Homo sapiens
  misc_feature (61)..(62): /note="This region represents a CpG dinucleotide"
  misc_feature (61)..(61): /note="Nucleotide may be methylated to form 5-methylcytosine"
atggattaatcaagggccaccagttgcattactgattactaactttgcagaaatgaaacacggtatgttgggtcaaggttcagtgaggctggttttcataacattccaggcaataaacaggc

SEQ ID NO: 30026 - DNA, 122 bp, Homo sapiens
  misc_feature (61)..(62): /note="This region represents a CpG dinucleotide"
  misc_feature (61)..(61): /note="Nucleotide may be methylated to form 5-methylcytosine"
gctctgagagtcacaataaggccggaacacccctgcagttgtgagcccaaaatgtccttacggcacatgggccagagagtctcctccttcccgaaacagggtcttcgccaggcctttatatt

SEQ ID NO: 30027 - DNA, 122 bp, Homo sapiens
  misc_feature (61)..(62): /note="This region represents a CpG dinucleotide"
  misc_feature (61)..(61): /note="Nucleotide may be methylated to form 5-methylcytosine"
tgcagttttgaaaactgaaatctctggacaatttcaactagtcataacttggaaccacaccgaccatgggaagtccttgtcaaccggcacagatcaaaatgtcactccttgactctcaaagc

SEQ ID NO: 30028 - DNA, 122 bp, Homo sapiens
  misc_feature (61)..(62): /note="This region represents a CpG dinucleotide"
  misc_feature (61)..(61): /note="Nucleotide may be methylated to form 5-methylcytosine"
tgcagacttagcggatcccatgagattttgactaccgtctgtgctcagaacagtttgagccgtatggaggaagtctccgcaccagtcttactgttggtggtcaccaggaagccagcagtgtg

SEQ ID NO: 30029 - DNA, 122 bp, Homo sapiens
  misc_feature (61)..(62): /note="This region represents a CpG dinucleotide"
  misc_feature (61)..(61): /note="Nucleotide may be methylated to form 5-methylcytosine"
cggggattccccctttgggaatttcagtttcctcatctaaaaataattggctctggtgggcgcggtggctcactgttgtaatcccagcactttgggaggccgggtagggaggatcgtttgag

SEQ ID NO: 30030 - DNA, 122 bp, Homo sapiens
  misc_feature (61)..(62): /note="This region represents a CpG dinucleotide"
  misc_feature (61)..(61): /note="Nucleotide may be methylated to form 5-methylcytosine"
gagagctgccaaaacaactaaaataacagcctaacctttcattttcattttctccttgagcgggaatgtgaaacattgcagcttttatctgggttgtgtgttcaagtttatttgcttgcttg

SEQ ID NO: 30031 - DNA, 122 bp, Homo sapiens
  misc_feature (61)..(62): /note="This region represents a CpG dinucleotide"
  misc_feature (61)..(61): /note="Nucleotide may be methylated to form 5-methylcytosine"
tgtgtgtgtgtgtggagggtcgtgtgtgtgtggagggtcccctttctttctctgttctatcgtctcttttctaccgtaagagaagctctttctgtagcacagaggtggcccccatgcgtgcc

SEQ ID NO: 30032 - DNA, 122 bp, Homo sapiens
  misc_feature (61)..(62): /note="This region represents a CpG dinucleotide"
  misc_feature (61)..(61): /note="Nucleotide may be methylated to form 5-methylcytosine"
tatgtatgattttttatacaaagcataaagatgatttgtaccaaactcaggacactgtggcgagcttaacacgagggtattgaatcatacgtaagtggtaattcctagattatgcaatctcc

SEQ ID NO: 30033 - DNA, 122 bp, Homo sapiens
  misc_feature (61)..(62): /note="This region represents a CpG dinucleotide"
  misc_feature (61)..(61): /note="Nucleotide may be methylated to form 5-methylcytosine"
aagaataaaaagcttttaaggtatcatatattgttttttatagttcctttgcttaactgacgttttggtttgctaaaaaactaccaatcacatcagattacaagtactttcactgtaaaaat

SEQ ID NO: 30034 - DNA, 122 bp, Homo sapiens
  misc_feature (61)..(62): /note="This region represents a CpG dinucleotide"
  misc_feature (61)..(61): /note="Nucleotide may be methylated to form 5-methylcytosine"
caatgtctactgtggttaactttatttatcagctgccataaaatatgcaccaggatcagtcgctgtgttcaaggaccatctcttgaaaacaagaacatgaaattctgactcaccgatagttg

SEQ ID NO: 30035 - DNA, 122 bp, Homo sapiens
  misc_feature (61)..(62): /note="This region represents a CpG dinucleotide"
  misc_feature (61)..(61): /note="Nucleotide may be methylated to form 5-methylcytosine"
taccctgtgtacagtatgcgtgtatgtatgtgtgtgtgtgtgtgtgcccgtgtgtaattacgccctaccactcaatgctgtgtgcttgctctgtgctgggctctgggcaggtgcctgcaggg

SEQ ID NO: 30036 - DNA, 122 bp, Homo sapiens
  misc_feature (61)..(62): /note="This region represents a CpG dinucleotide"
  misc_feature (61)..(61): /note="Nucleotide may be methylated to form 5-methylcytosine"
gtgaaattttcttagcttaaagagtgtagaaaagcaccacaataaagatggttttcaaaacgttcaatgaaataggttaacttaaaataaggaggggaaattaagttaactgttattagttt

SEQ ID NO: 30037 - DNA, 122 bp, Homo sapiens
  misc_feature (61)..(62): /note="This region represents a CpG dinucleotide"
  misc_feature (61)..(61): /note="Nucleotide may be methylated to form 5-methylcytosine"
atccatgtaaaaaagtactgagatgggtacattctttttttgtactatgtctttgaaacccggtgcgaacggagtgcttccatcccactcagtttggacgagtctcgctgcaagttgctcaa

SEQ ID NO: 30038 - DNA, 122 bp, Homo sapiens
  misc_feature (61)..(62): /note="This region represents a CpG dinucleotide"
  misc_feature (61)..(61): /note="Nucleotide may be methylated to form 5-methylcytosine"
gctccgctgagctctccacatgcatcgagtagatgatgtcaaagaaatcttccaccacagcgacccgcttcagagagatgccctctggctccgacaggccatctgccccctgcgacagggtg

SEQ ID NO: 30039 - DNA, 122 bp, Homo sapiens
  misc_feature (61)..(62): /note="This region represents a CpG dinucleotide"
  misc_feature (61)..(61): /note="Nucleotide may be methylated to form 5-methylcytosine"
caacacagagcaaaggatcaactgagagagaaagaaagaatttcctgggtaacaggcggccgctgcaggcacttgctgcgtgtgtattgacagagggaacacttgccttctgctccacactc

SEQ ID NO: 30040 - DNA, 122 bp, Homo sapiens
  misc_feature (61)..(62): /note="This region represents a CpG dinucleotide"
  misc_feature (61)..(61): /note="Nucleotide may be methylated to form 5-methylcytosine"
ggccactaagtatagtaagtataaattagaaaggcagatttcagttgatgataagcatgtcgcaccatccagaagtggaaatggctgctacatgtgagctccctctcattggaagtatggaa

SEQ ID NO: 30041 - DNA, 122 bp, Homo sapiens
  misc_feature (61)..(62): /note="This region represents a CpG dinucleotide"
  misc_feature (61)..(61): /note="Nucleotide may be methylated to form 5-methylcytosine"
atgcacagtggttctcattaggattaggatgcaagcaccttagaagcaccctttgccttgcggatgcctgtggctaatcctcacgcagagagaaaggccgagggaaggtcaggacaaacagc

SEQ ID NO: 30042 - DNA, 122 bp, Homo sapiens
  misc_feature (61)..(62): /note="This region represents a CpG dinucleotide"
  misc_feature (61)..(61): /note="Nucleotide may be methylated to form 5-methylcytosine"
ccagaccatctgaatcagtctcagggggcagagcctgagccctggcacttgttcaaggcccgcaggagagtttcacacatacagggtggagaatcactgtcatgaagggagggggttttgca

SEQ ID NO: 30043 - DNA, 122 bp, Homo sapiens
  misc_feature (61)..(62): /note="This region represents a CpG dinucleotide"
  misc_feature (61)..(61): /note="Nucleotide may be methylated to form 5-methylcytosine"
ccagatccagcttcccagagattacagtcagctcatctggaaaggagcctgtgagatcggcgaagtcctagtgtaacacattccaaggaacacctctgattcattactctttggagactggc

SEQ ID NO: 30044 - DNA, 122 bp, Homo sapiens
  misc_feature (61)..(62): /note="This region represents a CpG dinucleotide"
  misc_feature (61)..(61): /note="Nucleotide may be methylated to form 5-methylcytosine"
acttccaccaaatgctgtgttttgttattgttgccattattctattcatcattcattcaacgcttctgagtatcctcagtgattcacttggcattgtgctagggactcactccacaccctta

SEQ ID NO: 30045 - DNA, 122 bp, Homo sapiens
  misc_feature (61)..(62): /note="This region represents a CpG dinucleotide"
  misc_feature (61)..(61): /note="Nucleotide may be methylated to form 5-methylcytosine"
aattcattcagcctctgttagcaatggtgcaatcaaatgactccaggaattctgaaataacgtattgacctgcagggaccagaaattgctatcaggcactgggaacctctctcaggcaatgg

SEQ ID NO: 30046 - DNA, 122 bp, Homo sapiens
  misc_feature (61)..(62): /note="This region represents a CpG dinucleotide"
  misc_feature (61)..(61): /note="Nucleotide may be methylated to form 5-methylcytosine"
aaaagagacacagagattttctacaatacagtgtcagaggattagtctttgtttccttttcgtgggaaatatttacaagcggataacacatcttcttaaaagcgccatttaatgctttgtca

SEQ ID NO: 30047 - DNA, 122 bp, Homo sapiens
  misc_feature (61)..(62): /note="This region represents a CpG dinucleotide"
  misc_feature (61)..(61): /note="Nucleotide may be methylated to form 5-methylcytosine"
gaggcgtgcctgccctgctgcactccctcccgagcaggccttatatcctgccacggggcacgcggagaccacggccacagcagctgaaacagcctatcacccagcgtacaccgcatcaacac

SEQ ID NO: 30048 - DNA, 122 bp, Homo sapiens
  misc_feature (61)..(62): /note="This region represents a CpG dinucleotide"
  misc_feature (61)..(61): /note="Nucleotide may be methylated to form 5-methylcytosine"
agattgaagaaattacacacacacgcacacacacacacagcagtctacaactggcctgtgcgttagggcaaggatactggtgttggactccatccaacatgtagccctgagtaatatagtct

SEQ ID NO: 30049 - DNA, 122 bp, Homo sapiens
  misc_feature (61)..(62): /note="This region represents a CpG dinucleotide"
  misc_feature (61)..(61): /note="Nucleotide may be methylated to form 5-methylcytosine"
aagtttgtgtcattcagtgccatgggggttcttcagtttcaggagatgtcccccaccccccggcagggtgctaaccatggagggcaaccactgatgcctccagcagcttctggacagaagat

SEQ ID NO: 30050 - DNA, 122 bp, Homo sapiens
  misc_feature (61)..(62): /note="This region represents a CpG dinucleotide"
  misc_feature (61)..(61): /note="Nucleotide may be methylated to form 5-methylcytosine"
cagcttaaaaaattaaatttctaaagccacatctgagataacagcacttctctattttgacgtaatgagctgcacatagggtgggaagtaaattatccttccccatgtttactttagataaa

SEQ ID NO: 30051 - DNA, 122 bp, Homo sapiens
  misc_feature (61)..(62): /note="This region represents a CpG dinucleotide"
  misc_feature (61)..(61): /note="Nucleotide may be methylated to form 5-methylcytosine"
gaactaacagcagagtctcaggaagggtttgctcactgaatggagaggtcaggactgggacggagcttagcagcagccgctgggcagcagcccctgcgctccccagctgccctgtgctcctg

SEQ ID NO: 30052 - DNA, 122 bp, Homo sapiens
  misc_feature (61)..(62): /note="This region represents a CpG dinucleotide"
  misc_feature (61)..(61): /note="Nucleotide may be methylated to form 5-methylcytosine"
tagcttcttgtacactctcctgctgcctgcccgacactaccgagcggagagagaaaggaacgtggctcatgagttcattgaaatgaaatctctaggccgggtgtggtggctcatgcctgtac

SEQ ID NO: 30053 - DNA, 122 bp, Homo sapiens
  misc_feature (61)..(62): /note="This region represents a CpG dinucleotide"
  misc_feature (61)..(61): /note="Nucleotide may be methylated to form 5-methylcytosine"
cttgctgggttgcttataacctggccccaggacagcttcctggtagcctccagatacgcacggggacaaatttgttagtttcatgggcaaagagaagaaaaaatacaataccttactgttaa

SEQ ID NO: 30054 - DNA, 122 bp, Homo sapiens
  misc_feature (61)..(62): /note="This region represents a CpG dinucleotide"
  misc_feature (61)..(61): /note="Nucleotide may be methylated to form 5-methylcytosine"
agctcatatgtcttggaatgctttgactcatgaattgtttctcctgataatgttacatcacgtaactacctctgtctaattggttagtatctgctggaagagacaggcagccagcctaatga

SEQ ID NO: 30055 - DNA, 122 bp, Homo sapiens
  misc_feature (61)..(62): /note="This region represents a CpG dinucleotide"
  misc_feature (61)..(61): /note="Nucleotide may be methylated to form 5-methylcytosine"
catgtttttttgactctgcttgaagagactgcacaactttgatcaacaaaaagatactcccgcagatccagacttgccacccagatttataatatagggcttcctctagatgtcttttttct

SEQ ID NO: 30056 - DNA, 122 bp, Homo sapiens
  misc_feature (61)..(62): /note="This region represents a CpG dinucleotide"
  misc_feature (61)..(61): /note="Nucleotide may be methylated to form 5-methylcytosine"
ttgcaccattttgagtagcatggtgaaatagcacggcatcctacatcatcctgctcaggacgtgaatcacccctttgtctagcacatccatgctgtagaggcttcctgcccattagtcactt

SEQ ID NO: 30057 - DNA, 122 bp, Homo sapiens
  misc_feature (61)..(62): /note="This region represents a CpG dinucleotide"
  misc_feature (61)..(61): /note="Nucleotide may be methylated to form 5-methylcytosine"
gactgtcatatttccagcttcatgatgaattgggctgcgggtatctgacatctctgagctcgggtggctggtgacatcaccgcagggcatctgcacgctgtctaaaatgacaaggcctgaca

SEQ ID NO: 30058 - DNA, 122 bp, Homo sapiens
  misc_feature (61)..(62): /note="This region represents a CpG dinucleotide"
  misc_feature (61)..(61): /note="Nucleotide may be methylated to form 5-methylcytosine"
gactagaaaagaaagagctatgtcagtgcagcgctgaaattcctcctgtcctctaactgccgcctgactggctgaaggaagaagggtcaagaaatcagatttcaagaaagtgaacataaggc

SEQ ID NO: 30059 - DNA, 122 bp, Homo sapiens
  misc_feature (61)..(62): /note="This region represents a CpG dinucleotide"
  misc_feature (61)..(61): /note="Nucleotide may be methylated to form 5-methylcytosine"
gctaagtgctgcaataaagcaataaacacagtaggcatagtgactacccatgcaaattcccgtggcaatgggaaggacaggaaataaaagaggtgtcatggggacaggaaaggctggcaaaa

SEQ ID NO: 30060 - DNA, 122 bp, Homo sapiens
  misc_feature (61)..(62): /note="This region represents a CpG dinucleotide"
  misc_feature (61)..(61): /note="Nucleotide may be methylated to form 5-methylcytosine"
agcgaaactccatctcaaaaaaaaaaaagtgtcttgttcactgcagcatgcccagtgccacgcacaggtgctgacctatagtaagtgcttaacatttgttgaataggggaaagaaatttccg

SEQ ID NO: 30061 - DNA, 122 bp, Homo sapiens
  misc_feature (61)..(62): /note="This region represents a CpG dinucleotide"
  misc_feature (61)..(61): /note="Nucleotide may be methylated to form 5-methylcytosine"
aatgttgggcctcctcctatgtggttttcctgaattcttgatgcaacctagaagaactaacgttaaaaagtaaagagcacagtacagacagtaagagttctgtttgtgaagactaatacagg

SEQ ID NO: 30062 - DNA, 122 bp, Homo sapiens
  misc_feature (61)..(62): /note="This region represents a CpG dinucleotide"
  misc_feature (61)..(61): /note="Nucleotide may be methylated to form 5-methylcytosine"
agaaaatggggtaagttagttgcattttatccatcacagaaaaagtgatcatgcctgagacggcctttactgaaataacagtcaatgaggctgaaaaagaaaacaaaaaacacaaataaaga

SEQ ID NO: 30063 - DNA, 122 bp, Homo sapiens
  misc_feature (61)..(62): /note="This region represents a CpG dinucleotide"
  misc_feature (61)..(61): /note="Nucleotide may be methylated to form 5-methylcytosine"
cctaagcacttactaagtgccaggccaagcactcctgcaaggagctggagggtgagtcaccgacaatacgcgagccttataagggaactaacaattaaaactgtggccttctaaacaaaacg

SEQ ID NO: 30064 - DNA, 122 bp, Homo sapiens
  misc_feature (61)..(62): /note="This region represents a CpG dinucleotide"
  misc_feature (61)..(61): /note="Nucleotide may be methylated to form 5-methylcytosine"
acaggaagcaagtgcctcctcatacaggaagcactggcattaggaacaccctgtatttctcgcctgcagctgcactgtgtcactcactgatgtcattctcctatctgaagggctcagggtcc

SEQ ID NO: 30065 - DNA, 122 bp, Homo sapiens
  misc_feature (61)..(62): /note="This region represents a CpG dinucleotide"
  misc_feature (61)..(61): /note="Nucleotide may be methylated to form 5-methylcytosine"
gaacaagccctgggatgattgtgatcttcccttttcaattcctgagttgattttcactaacgtgatgcaacgatctcattcactttgcagatgaaaaataaggcacagagaagtttcaagat

SEQ ID NO: 30066 - DNA, 122 bp, Homo sapiens
  misc_feature (61)..(62): /note="This region represents a CpG dinucleotide"
  misc_feature (61)..(61): /note="Nucleotide may be methylated to form 5-methylcytosine"
ttgataagcctaagtttttaaagaatcagggaaggaccaggatttgctaaacactagtggcgtgccagtccctggactaagtagataggtacttggcatgtgtcttgatttaatcctcacaa

SEQ ID NO: 30067 - DNA, 122 bp, Homo sapiens
  misc_feature (61)..(62): /note="This region represents a CpG dinucleotide"
  misc_feature (61)..(61): /note="Nucleotide may be methylated to form 5-methylcytosine"
aaagacaaggaagtgatatgaaaccacctctgttacaatgatgtccgtgcctctgaaatgcgtccacgcagaggatcgcgcagaggcagaaggaggcttggggggtgtgaaggaagaatgca

SEQ ID NO: 30068 - DNA, 122 bp, Homo sapiens
  misc_feature (61)..(62): /note="This region represents a CpG dinucleotide"
  misc_feature (61)..(61): /note="Nucleotide may be methylated to form 5-methylcytosine"
tggggaacagcatgaccagaatttacagctgaaccaactctgcctcggagctgtcctttgcgcaactgcttgggcagcatcagaatcacctgaaaggtttgctggacccattcctggaggtc

SEQ ID NO: 30069 - DNA, 122 bp, Homo sapiens
  misc_feature (61)..(62): /note="This region represents a CpG dinucleotide"
  misc_feature (61)..(61): /note="Nucleotide may be methylated to form 5-methylcytosine"
acgggcactagagtcagacaaatggctggttcaagtgctgtctttgtccctcgctgactgcggcatcttggtcaagtttctgatcctgtgagcctcaatgatttcaatggagaaatagaaga

SEQ ID NO: 30070 - DNA, 122 bp, Homo sapiens
  misc_feature (61)..(62): /note="This region represents a CpG dinucleotide"
  misc_feature (61)..(61): /note="Nucleotide may be methylated to form 5-methylcytosine"
tgttgtccaaatccacattgacagtaagttttggacatgagtctttaatctagcaatatccgactttagagtgtgttcttaagcactactctataagttttaagcagctcctttatgatgtc

SEQ ID NO: 30071 - DNA, 122 bp, Homo sapiens
  misc_feature (61)..(62): /note="This region represents a CpG dinucleotide"
  misc_feature (61)..(61): /note="Nucleotide may be methylated to form 5-methylcytosine"
aagataacgataacgatgacaatgctggtaatagtgatgacaaaagttagaaccttctgacgcagcttttgacttatgtgctacatccagtgttggagcttggtttttatgggctgggtaag

SEQ ID NO: 30072 - DNA, 122 bp, Homo sapiens
  misc_feature (61)..(62): /note="This region represents a CpG dinucleotide"
  misc_feature (61)..(61): /note="Nucleotide may be methylated to form 5-methylcytosine"
tgactggtccccagatgccatacaacacttaaatgcagcccagtaatggttcctgaccaccgcacctccactccaagaacacatagctgatgcagctgccgagctatttcctagcctaatta

SEQ ID NO: 30073 - DNA, 122 bp, Homo sapiens
  misc_feature (61)..(62): /note="This region represents a CpG dinucleotide"
  misc_feature (61)..(61): /note="Nucleotide may be methylated to form 5-methylcytosine"
tgcacaaaacatttgagaagtaaatacttgtctggcagtacataaactgtaggctttcaacgtgatggtgtatagtgtatcaggaaggcaaactcaaaaagatctggattctgggggaatgg

SEQ ID NO: 30074 - DNA, 122 bp, Homo sapiens
  misc_feature (61)..(62): /note="This region represents a CpG dinucleotide"
  misc_feature (61)..(61): /note="Nucleotide may be methylated to form 5-methylcytosine"
tcattccgagggaaaatttttgtagaaattacaaacaccaacttgagacttctataaaaacgacatgaaacacattggaaatggtaggcctacgtaggttactgccaaatttctaattcaca

SEQ ID NO: 30075 - DNA, 122 bp, Homo sapiens
  misc_feature (61)..(62): /note="This region represents a CpG dinucleotide"
  misc_feature (61)..(61): /note="Nucleotide may be methylated to form 5-methylcytosine"
tggtggttatgcaaggctgcacgtatgtgatacaactgcactgtgctctacacacacgagcgcgtgtataactcaggaattctggatattgattggagcaatgccacttgaaacaatgcatt

SEQ ID NO: 30076 - DNA, 122 bp, Homo sapiens
  misc_feature (61)..(62): /note="This region represents a CpG dinucleotide"
  misc_feature (61)..(61): /note="Nucleotide may be methylated to form 5-methylcytosine"
agattaagatgacattttgaaaagggcacctcattaagcagcctcgtccccactgcagcgcgcactcccgcacagtagccagctgcctgtttatcttatggtgatgaggtgtcacctcccct

SEQ ID NO: 30077 - DNA, 122 bp, Homo sapiens
  misc_feature (61)..(62): /note="This region represents a CpG dinucleotide"
  misc_feature (61)..(61): /note="Nucleotide may be methylated to form 5-methylcytosine"
aggcttgtagagcttggattttctccaccagattccgcaacagcgagttgaacctgattgcgttcttccttacggaagttttgcagaggggacatttgaaaaatccacatgatgtttcccca

SEQ ID NO: 30078 - DNA, 122 bp, Homo sapiens
  misc_feature (61)..(62): /note="This region represents a CpG dinucleotide"
  misc_feature (61)..(61): /note="Nucleotide may be methylated to form 5-methylcytosine"
gctattctcaagctgatcgacatgagagatttcaacacatgtgtcagcagccagactaaacgtggaagaaaatcagaagcatttgaaactgtaaagctcaataactttcctcctcctgagaa

SEQ ID NO: 30079 - DNA, 122 bp, Homo sapiens
  misc_feature (61)..(62): /note="This region represents a CpG dinucleotide"
  misc_feature (61)..(61): /note="Nucleotide may be methylated to form 5-methylcytosine"
tctgaacgtggccaagagccaaaggatcgtatctggagcaagcagaccgattttcagaaacgcacattgggtaggttacccgtggtgacgcaaaccagacttacttgatctaaatctccttt

SEQ ID NO: 30080 - DNA, 122 bp, Homo sapiens
  misc_feature (61)..(62): /note="This region represents a CpG dinucleotide"
  misc_feature (61)..(61): /note="Nucleotide may be methylated to form 5-methylcytosine"
tgagagccaactccttcctttcaataaattcttattttctatcataatattgctttgtaccgcacaaaatacaattataatttttaatagtcaaagaaattttaagttatcaaacattagtt

SEQ ID NO: 30081 - DNA, 122 bp, Homo sapiens
  misc_feature (61)..(62): /note="This region represents a CpG dinucleotide"
  misc_feature (61)..(61): /note="Nucleotide may be methylated to form 5-methylcytosine"
gaagaagaggagactgagaagagccagcaatttctggctaaagccctgcgtactgagcagcgtcaggtgtgtgtcaaagaaccatatcaataaacaaaatgtagatgggagcagtcaggagg

SEQ ID NO: 30082 - DNA, 122 bp, Homo sapiens
  misc_feature (61)..(62): /note="This region represents a CpG dinucleotide"
  misc_feature (61)..(61): /note="Nucleotide may be methylated to form 5-methylcytosine"
tgatgatctctaatctgcctaattccagtcccacaagatctatcagcacaaggcctgtcccggtacctaaatttaaaaaagaacctcccttaactgactggatcaggcagcatctcctattc

SEQ ID NO: 30083 - DNA, 122 bp, Homo sapiens
  misc_feature (61)..(62): /note="This region represents a CpG dinucleotide"
  misc_feature (61)..(61): /note="Nucleotide may be methylated to form 5-methylcytosine"
ctttgacctttgtcttttccctttgcttttagattttggctctctatttgacttggagcacgacttaccagatgaattaatcaactctacagaattgggactaaccaatggtggtgatatta

SEQ ID NO: 30084 - DNA, 122 bp, Homo sapiens
  misc_feature (61)..(62): /note="This region represents a CpG dinucleotide"
  misc_feature (61)..(61): /note="Nucleotide may be methylated to form 5-methylcytosine"
tccgttcccttctcttccctttcaggtaattttcacactacagtgagcactgtcagaaaccgcagggtaaaccagctgcacacaacagcttacatttctatggagtttttctacataatcaa

SEQ ID NO: 30085 - DNA, 122 bp, Homo sapiens
  misc_feature (61)..(62): /note="This region represents a CpG dinucleotide"
  misc_feature (61)..(61): /note="Nucleotide may be methylated to form 5-methylcytosine"
taggaattttatggagaaaatataaaagagtctcctgattatgaaaggatcatcaatcttcgtcattttaagaggatactaagtttgcttgaaggacaaaagatagcttttggtggggagac

SEQ ID NO: 30086 - DNA, 122 bp, Homo sapiens
  misc_feature (61)..(62): /note="This region represents a CpG dinucleotide"
  misc_feature (61)..(61): /note="Nucleotide may be methylated to form 5-methylcytosine"
ttctgtttggaatttgctttcctacttcggtggttatctgcttgcccttggtatccagtgcgtttggattgaattttgtagctctgggagtacagcagtggcaatatgggccccaggtgatg

SEQ ID NO: 30087 - DNA, 122 bp, Homo sapiens
  misc_feature (61)..(62): /note="This region represents a CpG dinucleotide"
  misc_feature (61)..(61): /note="Nucleotide may be methylated to form 5-methylcytosine"
accatatatcttacttttcagtctttcaaagcagggattatcatctactttagtccctaccgtaccccagtgcatagtacagttcctggtacacaaaatttctcaaaaagtattagctgaat

SEQ ID NO: 30088 - DNA, 122 bp, Homo sapiens
  misc_feature (61)..(62): /note="This region represents a CpG dinucleotide"
  misc_feature (61)..(61): /note="Nucleotide may be methylated to form 5-methylcytosine"
cagtcattgagaggaataataatttccagattgcacaatgtatggacttcattctagcaccgggtgctattgctcatacttgtgactgctatagctaattataatcagtctgcactggatac

SEQ ID NO: 30089 - DNA, 122 bp, Homo sapiens
  misc_feature (61)..(62): /note="This region represents a CpG dinucleotide"
  misc_feature (61)..(61): /note="Nucleotide may be methylated to form 5-methylcytosine"
ctcgaaaatataagtacaacttataacaaagacacaaaaccgcttagtatctactcaagacggtttgggactagtttgctttagactaagttctgatgacatattttgctcttattgaacac

SEQ ID NO: 30090 - DNA, 122 bp, Homo sapiens
  misc_feature (61)..(62): /note="This region represents a CpG dinucleotide"
  misc_feature (61)..(61): /note="Nucleotide may be methylated to form 5-methylcytosine"
acaaaatcaaccttaagaaccctgtttcctaatgtggaaaggatcaacaaagacctccagcgatgcgtcactcttgctgccggtcgctgccaagcccagccacccagctagcgggacgcaca

SEQ ID NO: 30091 - DNA, 122 bp, Homo sapiens
  misc_feature (61)..(62): /note="This region represents a CpG dinucleotide"
  misc_feature (61)..(61): /note="Nucleotide may be methylated to form 5-methylcytosine"
aggtcacaaagtcacggagactgggcctctgaagactagacgtagaactccagctgcagccggagacaaaggcccccatattccggaagctgtcttgcccgctccagctgcgtggctgattg

SEQ ID NO: 30092 - DNA, 122 bp, Homo sapiens
  misc_feature (61)..(62): /note="This region represents a CpG dinucleotide"
  misc_feature (61)..(61): /note="Nucleotide may be methylated to form 5-methylcytosine"
tggttctccaagagcaggtagcctgacccctggttaagtgcagactccaggtggctcagccggcacctgatggtcagcagcacacatcagacacgcagctcaaccgtccagttcctccggat

SEQ ID NO: 30093 - DNA, 122 bp, Homo sapiens
  misc_feature (61)..(62): /note="This region represents a CpG dinucleotide"
  misc_feature (61)..(61): /note="Nucleotide may be methylated to form 5-methylcytosine"
agatgctatatgcaactctattatctggccatctttcattgaattgtaggcttcctaagacgtaatttgttttacttttttttcaaaaggttaaggaataaacagcttaaaaaatggcagat

SEQ ID NO: 30094 - DNA, 122 bp, Homo sapiens
  misc_feature (61)..(62): /note="This region represents a CpG dinucleotide"
  misc_feature (61)..(61): /note="Nucleotide may be methylated to form 5-methylcytosine"
tggtaacttttcctccaagtgtgcagctgtctgaaaatatatttgctcttgatgtgtcaccgggtcatgagtagttatctgagaaatactttacacatgggtgtctcctgagcccaggcagt

SEQ ID NO: 30095 - DNA, 122 bp, Homo sapiens
  misc_feature (61)..(62): /note="This region represents a CpG dinucleotide"
  misc_feature (61)..(61): /note="Nucleotide may be methylated to form 5-methylcytosine"
cttttgtataagacgtcagttatgtcttcctaccagactgtagaccacatgaggacaagacgcgcctccttgtcatctgtgtccaccagtctactagaaaagctgaaaaaaggaaaggggat

SEQ ID NO: 30096 - DNA, 122 bp, Homo sapiens
  misc_feature (61)..(62): /note="This region represents a CpG dinucleotide"
  misc_feature (61)..(61): /note="Nucleotide may be methylated to form 5-methylcytosine"
cagtgattaagaatgtggactttggagtctggcagggctggatttatccctcagctcagccgtgtgaccttggccctctaccagcccagccctccccagcctgtagttcctgccccagcctt

SEQ ID NO: 30097 - DNA, 122 bp, Homo sapiens
  misc_feature (61)..(62): /note="This region represents a CpG dinucleotide"
  misc_feature (61)..(61): /note="Nucleotide may be methylated to form 5-methylcytosine"
ctgtctcctccgggcggcgtggcaggtggctgggccaagatggctgcagcgcttcctgggcgctgctgcgtgttgaaacccgtctgtgacgtggccagcggtgttgaaataagtgcctgtgc

SEQ ID NO: 30098 - DNA, 122 bp, Homo sapiens
  misc_feature (61)..(62): /note="This region represents a CpG dinucleotide"
  misc_feature (61)..(61): /note="Nucleotide may be methylated to form 5-methylcytosine"
aagggaagtaacaacacctgagtcacaggagtgtgggactccacagagggtgataatccacgtaaagtgcatcactcagcctggctcacagtcagcactcagtgaggtcactcatgaccatc

SEQ ID NO: 30099 - DNA, 122 bp, Homo sapiens
  misc_feature (61)..(62): /note="This region represents a CpG dinucleotide"
  misc_feature (61)..(61): /note="Nucleotide may be methylated to form 5-methylcytosine"
tgaatgagcatgttgtaagtagaatgtataattttgttagtgtacccctcagaggttggccgatgagtagcagcaatgcagtaacaatataaagctgtcacttggtggagctagaatactat

SEQ ID NO: 30100 - DNA, 122 bp, Homo sapiens
  misc_feature (61)..(62): /note="This region represents a CpG dinucleotide"
  misc_feature (61)..(61): /note="Nucleotide may be methylated to form 5-methylcytosine"
ctggtccaggctttgtagaccgtgcaggcggctgcatccccgacctgacccaggcctgctcgctctggtgtgcaccgacctgccagctttgtggcactttgtggcatggggctcaggccgat

SEQ ID NO: 30101 - DNA, 122 bp, Homo sapiens
  misc_feature (61)..(62): /note="This region represents a CpG dinucleotide"
  misc_feature (61)..(61): /note="Nucleotide may be methylated to form 5-methylcytosine"
ttctgctccacgcagatctgccccacgcgggccagcaggtcatgagggggcataaagacccgggagctcaggagaaaggtgaagatgtacgtcctctgaaggcaggagacggagagagggcg

SEQ ID NO: 30102 - DNA, 122 bp, Homo sapiens
  misc_feature (61)..(62): /note="This region represents a CpG dinucleotide"
  misc_feature (61)..(61): /note="Nucleotide may be methylated to form 5-methylcytosine"
ctcagtaacatggaggaactgatgaagatgaaaattaacccaagaaaaccaccacattagcggggacctccatcaacacacaaaacccctgagaataagaatgagataaagaaccaacaatt

SEQ ID NO: 30103 - DNA, 122 bp, Homo sapiens
  misc_feature (61)..(62): /note="This region represents a CpG dinucleotide"
  misc_feature (61)..(61): /note="Nucleotide may be methylated to form 5-methylcytosine"
ctcaggtgatccacccaccttggcctcccaaagtgttgaaattacaggtgtgagccactgcgcttggcctaaaggacattttgggaaccggtgttaatgtctattgaaaccttttatttttg

SEQ ID NO: 30104 - DNA, 122 bp, Homo sapiens
  misc_feature (61)..(62): /note="This region represents a CpG dinucleotide"
  misc_feature (61)..(61): /note="Nucleotide may be methylated to form 5-methylcytosine"
cgttttccttttatcaggtcctagagccaccagtcactgtttctggtctggacaaggctgcgtcacctacagagccacaggcctggttcactctccccaggcatctctgctgggttcctcct

SEQ ID NO: 30105 - DNA, 122 bp, Homo sapiens
  misc_feature (61)..(62): /note="This region represents a CpG dinucleotide"
  misc_feature (61)..(61): /note="Nucleotide may be methylated to form 5-methylcytosine"
gtctttgccacactctcatacaatctattctccatagtcatcagagtttctttaaaggcacggttcagacaatggcaccctctgttccaaaccctccagggcttcctatttcacttagcata

SEQ ID NO: 30106 - DNA, 122 bp, Homo sapiens
  misc_feature (61)..(62): /note="This region represents a CpG dinucleotide"
  misc_feature (61)..(61): /note="Nucleotide may be methylated to form 5-methylcytosine"
cgtgatccgcccaccttggcctcccaaagcgctgggattacaggcgtgagccaccgcgcccggccatacatggcaagtttctacatggtgtttcagacttagctgatcaccctctaccctca

SEQ ID NO: 30107 - DNA, 122 bp, Homo sapiens
  misc_feature (61)..(62): /note="This region represents a CpG dinucleotide"
  misc_feature (61)..(61): /note="Nucleotide may be methylated to form 5-methylcytosine"
gtaggactaaaggatagacatgcagaaatgcattttaaaaatctgttagctggaccagaccgacaatgtaacataattgccaaagctttggttcgtgacctgaggttatgtttggtatgaaa

SEQ ID NO: 30108 - DNA, 122 bp, Homo sapiens
  misc_feature (61)..(62): /note="This region represents a CpG dinucleotide"
  misc_feature (61)..(61): /note="Nucleotide may be methylated to form 5-methylcytosine"
gcactggggaaagacattcaaaacagccaggtgatttcaataggctgcaaagctgagagccggagctccaggccatgccatggcctcttatctgggagcctcaccacgcaggtgtccaggtg

SEQ ID NO: 30109 - DNA, 122 bp, Homo sapiens
  misc_feature (61)..(62): /note="This region represents a CpG dinucleotide"
  misc_feature (61)..(61): /note="Nucleotide may be methylated to form 5-methylcytosine"
tgtacttaatacacttctgtattaagtctcaggttgtgcctaagttagcttgatgaatctcggttctgtatttgagattatttctagtttttgtaagtcattaaaatgcacttcttaaaaaa

SEQ ID NO: 30110 - DNA, 122 bp, Homo sapiens
  misc_feature (61)..(62): /note="This region represents a CpG dinucleotide"
  misc_feature (61)..(61): /note="Nucleotide may be methylated to form 5-methylcytosine"
tcaggctcttccccctgggacagctgcaaccatgacatttctggtgtgtgcaacttggctcgtgggcagtgctggcaatgtggcggcagaggtgggaatcgtgcctatctggcagaagcaag

SEQ ID NO: 30111 - DNA, 122 bp, Homo sapiens
  misc_feature (61)..(62): /note="This region represents a CpG dinucleotide"
  misc_feature (61)..(61): /note="Nucleotide may be methylated to form 5-methylcytosine"
tgaagcaacccaaagttgtatagctgtttctttcttccaccgaaggtatgcccagcatctcgtaggtagcttggtgacatatcatggtgatgttttacaagttggttttggcaatagtcaca

SEQ ID NO: 30112 - DNA, 122 bp, Homo sapiens
  misc_feature (61)..(62): /note="This region represents a CpG dinucleotide"
  misc_feature (61)..(61): /note="Nucleotide may be methylated to form 5-methylcytosine"
gttgcaatgttgtttttggaagaaatggctttaggcttcatgctattttttctcagaaaacgtatccaaggagagttttctggctcacagatgccattatcatcagctttaacaaccatgta

SEQ ID NO: 30113 - DNA, 122 bp, Homo sapiens
  misc_feature (61)..(62): /note="This region represents a CpG dinucleotide"
  misc_feature (61)..(61): /note="Nucleotide may be methylated to form 5-methylcytosine"
ttcagaattagaaagtagggtggattccaaggaagtggcccctagtgtgtgctggatgaacgcttacctgctttggtagatatctggtcctgctcaggaacagctgtcctgatgggtcagcg

SEQ ID NO: 30114 - DNA, 122 bp, Homo sapiens
  misc_feature (61)..(62): /note="This region represents a CpG dinucleotide"
  misc_feature (61)..(61): /note="Nucleotide may be methylated to form 5-methylcytosine"
agaaggccagtgactcagacctgcctacttcccactatctcctcaacacactcataaaagcgtttgttgccactccactgaaaaggcttcaaccaaggtcagcagctgtttacattttgcca

SEQ ID NO: 30115 - DNA, 122 bp, Homo sapiens
  misc_feature (61)..(62): /note="This region represents a CpG dinucleotide"
  misc_feature (61)..(61): /note="Nucleotide may be methylated to form 5-methylcytosine"
ccttctaccccaggaaaaacattaaaaaattctaccctaaactcttcacatacacagagacgcaataacagaattgtgaagtactgtgccaaaagagaggccatgcttctcaccagaggaag

SEQ ID NO: 30116 - DNA, 122 bp, Homo sapiens
  misc_feature (61)..(62): /note="This region represents a CpG dinucleotide"
  misc_feature (61)..(61): /note="Nucleotide may be methylated to form 5-methylcytosine"
atttctttaaaaagggtgagaaactggccactgtcttgcattttgacttctgactcacggcgaatatttcaaggcttatagactcaatctatttttccatatcttggtcaatttattaacca

SEQ ID NO: 30117 - DNA, 122 bp, Homo sapiens
  misc_feature (61)..(62): /note="This region represents a CpG dinucleotide"
  misc_feature (61)..(61): /note="Nucleotide may be methylated to form 5-methylcytosine"
ctgggccagtacatccacaggaagagggtgcctggtcagaccagacaggcccaatgggcccgggaggagaggcattagatacagccccacagctcaggcaggcatcctgtcctttagctcta

SEQ ID NO: 30118 - DNA, 122 bp, Homo sapiens
  misc_feature (61)..(62): /note="This region represents a CpG dinucleotide"
  misc_feature (61)..(61): /note="Nucleotide may be methylated to form 5-methylcytosine"
cccctctttctgttgcagaaactgaacaggttaagttagtgcctgtggccagatttaatccggccagatttatttatttatcaaataaataaaatgtaaaaactccctaattgggagttctg

SEQ ID NO: 30119 - DNA, 122 bp, Homo sapiens
  misc_feature (61)..(62): /note="This region represents a CpG dinucleotide"
  misc_feature (61)..(61): /note="Nucleotide may be methylated to form 5-methylcytosine"
gtctgaattcattaaagcgcaaaacaaatgcttggtatcaccacaacagtatccccttcacgttctccagatgctgctcagccttgccttcctcaggttgtataaacagggatggatttccc

SEQ ID NO: 30120 - DNA, 122 bp, Homo sapiens
  misc_feature (61)..(62): /note="This region represents a CpG dinucleotide"
  misc_feature (61)..(61): /note="Nucleotide may be methylated to form 5-methylcytosine"
accacactggcatcctgatctggaacttccagtgtctagaactgtttgaaataggccacgcgcagcggctcatggctgtaatcccagccctttgggaggccaaggccggtgaatcatctgaa

SEQ ID NO: 30121 - DNA, 122 bp, Homo sapiens
  misc_feature (61)..(62): /note="This region represents a CpG dinucleotide"
  misc_feature (61)..(61): /note="Nucleotide may be methylated to form 5-methylcytosine"
ggggtgcaggaaggcttatcaggatccatatcgcagcttgtaaagtcaccacaatcaccacgccaacagacggaacgcctggaagtaaacagaacttctagaacagtagaacatcaaagggt

SEQ ID NO: 30122 - DNA, 122 bp, Homo sapiens
  misc_feature (61)..(62): /note="This region represents a CpG dinucleotide"
  misc_feature (61)..(61): /note="Nucleotide may be methylated to form 5-methylcytosine"
ctatcatttcaaggattcaggggtggtggtgggagaggtaacaaatggataggacagaaacgtgtggagatgtttgtgctgcaatttgcaattactgaagaatacagaaatctaaccgaaaa

SEQ ID NO: 30123 - DNA, 122 bp, Homo sapiens
  misc_feature (61)..(62): /note="This region represents a CpG dinucleotide"
  misc_feature (61)..(61): /note="Nucleotide may be methylated to form 5-methylcytosine"
acctcgtgatctgcctgcctctgcctccgaaagtgctgggattataggcatgagccaccacgcctgggctggatttcttaaatatggtgattcagtgacattttgctgtgtaattattggca

SEQ ID NO: 30124 - DNA, 122 bp, Homo sapiens
  misc_feature (61)..(62): /note="This region represents a CpG dinucleotide"
  misc_feature (61)..(61): /note="Nucleotide may be methylated to form 5-methylcytosine"
gcagtggcttccagcactctagacccaaggccctgggtgagcaagctggtcttcctggggcgccctggctggattcttgttacttcagctgttgcaacagctgtctcactgggtccccagct

SEQ ID NO: 30125 - DNA, 122 bp, Homo sapiens
  misc_feature (61)..(62): /note="This region represents a CpG dinucleotide"
  misc_feature (61)..(61): /note="Nucleotide may be methylated to form 5-methylcytosine"
agagccatggagctggtataagcagattccagccagacagcccaagccagctatgggagccgctactgaaacagatggcaaagaaagcagcctgtgcactcacctctctctgaattgttcct

SEQ ID NO: 30126 - DNA, 122 bp, Homo sapiens
  misc_feature (61)..(62): /note="This region represents a CpG dinucleotide"
  misc_feature (61)..(61): /note="Nucleotide may be methylated to form 5-methylcytosine"
cccaaccgaaaccttttctatcttagggtttttccttttatctcttcccacctgacaacccgaccccctctcacttaccctgtgtgtcttgccccacaccctttccactactgtccttgaca

SEQ ID NO: 30127 - DNA, 122 bp, Homo sapiens
  misc_feature (61)..(62): /note="This region represents a CpG dinucleotide"
  misc_feature (61)..(61): /note="Nucleotide may be methylated to form 5-methylcytosine"
aataaattgcgaaaataacaaaaacaaaatccatctactggctagctctttaaaatcctgcgggggagcccagtggcccaacggcgaagtttagcccatcttgccctttctggtcagtgtac

SEQ ID NO: 30128 - DNA, 122 bp, Homo sapiens
  misc_feature (61)..(62): /note="This region represents a CpG dinucleotide"
  misc_feature (61)..(61): /note="Nucleotide may be methylated to form 5-methylcytosine"
gggctggggtatctgaagtcaactttcctccctctttctggggcctcaggcctttagtgacggggcttagaggaagggacactggcaggctgggagtccaggggtcagagccacgagggccc

SEQ ID NO: 30129 - DNA, 122 bp, Homo sapiens
  misc_feature (61)..(62): /note="This region represents a CpG dinucleotide"
  misc_feature (61)..(61): /note="Nucleotide may be methylated to form 5-methylcytosine"
ttaggaagctgcggatcggtttcaggtgttttctcttaggagcctgcctttccctggcagcgcctgtgaccaattattattttagagaaacagttgacagctgcctgaccatcacatgatgg

SEQ ID NO: 30130 - DNA, 122 bp, Homo sapiens
  misc_feature (61)..(62): /note="This region represents a CpG dinucleotide"
  misc_feature (61)..(61): /note="Nucleotide may be methylated to form 5-methylcytosine"
gaatgtacagtccttaagcatcacgaactgccactcccaaggccacgcatgtatcaacaacgccttatcaatcccaatgatgttatggggagtccagagacaggcagacaacgtggataaga

SEQ ID NO: 30131 - DNA, 122 bp, Homo sapiens
  misc_feature (61)..(62): /note="This region represents a CpG dinucleotide"
  misc_feature (61)..(61): /note="Nucleotide may be methylated to form 5-methylcytosine"
attgcattagggttgctcaacccaagggtcatgatgcataactctctggccatggagaatcgtttgtgtggctagaatttcctgctgtgcccccagcccaatgccaggaaatctctcctctg

SEQ ID NO: 30132 - DNA, 122 bp, Homo sapiens
  misc_feature (61)..(62): /note="This region represents a CpG dinucleotide"
  misc_feature (61)..(61): /note="Nucleotide may be methylated to form 5-methylcytosine"
tgagtattaagcgacattcacttgcaaggctgtgttgtagtcagagctcagtcatgcagccgttactgtggctgctaaccgcttcagagtctccgggtaaggatttctcaatctagatcaaa

SEQ ID NO: 30133 - DNA, 122 bp, Homo sapiens
  misc_feature (61)..(62): /note="This region represents a CpG dinucleotide"
  misc_feature (61)..(61): /note="Nucleotide may be methylated to form 5-methylcytosine"
tgggcagccttcgcacttaatctcagcccatccctgttccccctcccagtcagctttcagcgcagccaatgaaaactaacctagggggagggggtgactgtgcagcgtgttcctttcccagt

SEQ ID NO: 30134 - DNA, 122 bp, Homo sapiens
  misc_feature (61)..(62): /note="This region represents a CpG dinucleotide"
  misc_feature (61)..(61): /note="Nucleotide may be methylated to form 5-methylcytosine"
atttgagctgtggaaatgctggaatgtgtttttgtgcttttcctgaacaagggaattcaacgggtaaattacagtcatttactgggagtgtaatttactgagagcctttaggcaaatgcagg

SEQ ID NO: 30135 - DNA, 122 bp, Homo sapiens
  misc_feature (61)..(62): /note="This region represents a CpG dinucleotide"
  misc_feature (61)..(61): /note="Nucleotide may be methylated to form 5-methylcytosine"
tataaacagttcttgactttccacatatgattatattttcttgcctttttcctagcagtccgtataaaacggaggagttaacattcagcatttttatggattgctctcctttttgtgttttg

SEQ ID NO: 30136 - DNA, 122 bp, Homo sapiens
  misc_feature (61)..(62): /note="This region represents a CpG dinucleotide"
  misc_feature (61)..(61): /note="Nucleotide may be methylated to form 5-methylcytosine"
tcagagatgcattctaaagggtcttctctattgctttttctcccaaatttaaacttaattcggtttgtctgtgtgcatttgcgtgaagaagtgaactgttgttttcatacgttaatgacagt

SEQ ID NO: 30137 - DNA, 122 bp, Homo sapiens
  misc_feature (61)..(62): /note="This region represents a CpG dinucleotide"
  misc_feature (61)..(61): /note="Nucleotide may be methylated to form 5-methylcytosine"
gagaaggggtagagaaaatcttccctttactcaaacaagtcagctatcaaatgtgctttccgagttgatctgttgaatgagcctaattggtggcatccacatcaatattagagaatgtttgc

SEQ ID NO: 30138 - DNA, 122 bp, Homo sapiens
  misc_feature (61)..(62): /note="This region represents a CpG dinucleotide"
  misc_feature (61)..(61): /note="Nucleotide may be methylated to form 5-methylcytosine"
tagaacacagattccccctcccacgtgctgttgatttccctttgctacacagggagggaacgatgtcagacatgagcagccagggactgcccgctccgcactcaaatctggaatgtgtccat

SEQ ID NO: 30139 - DNA, 122 bp, Homo sapiens
  misc_feature (61)..(62): /note="This region represents a CpG dinucleotide"
  misc_feature (61)..(61): /note="Nucleotide may be methylated to form 5-methylcytosine"
ttctcacttgccaaacggaggtgacaacacctactcccacctacacctcagggcattgggcgtaacaggagggagctctgccggttttgcacgcgagagcttccacacgtgtgcacagggtg

SEQ ID NO: 30140 - DNA, 122 bp, Homo sapiens
  misc_feature (61)..(62): /note="This region represents a CpG dinucleotide"
  misc_feature (61)..(61): /note="Nucleotide may be methylated to form 5-methylcytosine"
agaaggtgatgtcatcagggttcagacccaggctctacggctggagtcactgggctatagcggtggtaccatttccaccaagtggccagtagcttatccccactggggtctctcgcctgact

SEQ ID NO: 30141 - DNA, 122 bp, Homo sapiens
  misc_feature (61)..(62): /note="This region represents a CpG dinucleotide"
  misc_feature (61)..(61): /note="Nucleotide may be methylated to form 5-methylcytosine"
ggctgaaccccttgctctttaaaagaatggccactggggagggcagcaggttgtccctgccggcagcctgagcacaatggagacaaaccagagggggagccgccctgacacaccacccggtc

SEQ ID NO: 30142 - DNA, 122 bp, Homo sapiens
  misc_feature (61)..(62): /note="This region represents a CpG dinucleotide"
  misc_feature (61)..(61): /note="Nucleotide may be methylated to form 5-methylcytosine"
agaagccagaagcagacactggacattgttcaggcacctggatcaagccacacctgaaggcggacatccctgaactttccatataactttcatgattcaggctccacccagtttgtctgggt

SEQ ID NO: 30143 - DNA, 122 bp, Homo sapiens
  misc_feature (61)..(62): /note="This region represents a CpG dinucleotide"
  misc_feature (61)..(61): /note="Nucleotide may be methylated to form 5-methylcytosine"
cctgccatagagaggaagcttagcaaagagatttagatcagtattcagaggaagttgaggcgtgagaaaagagagagcacgtggcagtgttggctcccagttgcaggtgtccagggtcacac

SEQ ID NO: 30144 - DNA, 122 bp, Homo sapiens
  misc_feature (61)..(62): /note="This region represents a CpG dinucleotide"
  misc_feature (61)..(61): /note="Nucleotide may be methylated to form 5-methylcytosine"
atgtggctttaagcaagccaatttatctccctatcggtaaaaggtgacacttggctggctcgatattctgttatgtgtcccagccccagaaatgcacagactggtttccatttttagtggag

SEQ ID NO: 30145 - DNA, 122 bp, Homo sapiens
  misc_feature (61)..(62): /note="This region represents a CpG dinucleotide"
  misc_feature (61)..(61): /note="Nucleotide may be methylated to form 5-methylcytosine"
taatggcagttcattccagtgtgactcaacaatttccaacaaagccttgaaaaatactcccggaatattagggattcatggagtcactgaatcataacaaggttaattgccagggttgttga

SEQ ID NO: 30146 - DNA, 122 bp, Homo sapiens
  misc_feature (61)..(62): /note="This region represents a CpG dinucleotide"
  misc_feature (61)..(61): /note="Nucleotide may be methylated to form 5-methylcytosine"
gggctgcctgccacccgccagccacaggcacctgtcaggctatattaagagacattgtcacgctgaggactctccttcctgggaagaactgtccttcctccccaacagaatccacctttctt

SEQ ID NO: 30147 - DNA, 122 bp, Homo sapiens
  misc_feature (61)..(62): /note="This region represents a CpG dinucleotide"
  misc_feature (61)..(61): /note="Nucleotide may be methylated to form 5-methylcytosine"
cagtccgttggtgtgagggaggctgctgacaccccccagattcatttccagtttgtttgacgttggcatgtatgtctgtgtaacatgactgaagaacgagtcattagtgagctgtccaaagt

SEQ ID NO: 30148 - DNA, 122 bp, Homo sapiens
  misc_feature (61)..(62): /note="This region represents a CpG dinucleotide"
  misc_feature (61)..(61): /note="Nucleotide may be methylated to form 5-methylcytosine"
aattagtctgaatgctacatctggcatggttacatcatttgaactctctgacaacactaacgaccaatctggagaacaggaatctgagtatgaacaagaacaaggagaggatgaactggttt

SEQ ID NO: 30149 - DNA, 122 bp, Homo sapiens
  misc_feature (61)..(62): /note="This region represents a CpG dinucleotide"
  misc_feature (61)..(61): /note="Nucleotide may be methylated to form 5-methylcytosine"
ccattctgtatcttaccctaagatctggttcttccctccccatccccaccccccacccaccgcctgccagctcacactaatagatgattcttaattgccaaatgtgttagagtttgtatatc

SEQ ID NO: 30150 - DNA, 122 bp, Homo sapiens
  misc_feature (61)..(62): /note="This region represents a CpG dinucleotide"
  misc_feature (61)..(61): /note="Nucleotide may be methylated to form 5-methylcytosine"
tcagctcctcccatgggcagtggggagctgctgggccctgtggaactggttctgctccgccgcccagtctcacccctggccgttccctgccctggctccacatcatcatgggcgtccctgcc

SEQ ID NO: 30151 - DNA, 122 bp, Homo sapiens
  misc_feature (61)..(62): /note="This region represents a CpG dinucleotide"
  misc_feature (61)..(61): /note="Nucleotide may be methylated to form 5-methylcytosine"
tctcagtgtgtttgcagctgctccaggttatgtggagattgtctgccctgcacacaatgacgtcaaggttataatgtctgcacaacaaacccactgagtctgccagacagggtggttctaca

SEQ ID NO: 30152 - DNA, 122 bp, Homo sapiens
  misc_feature (61)..(62): /note="This region represents a CpG dinucleotide"
  misc_feature (61)..(61): /note="Nucleotide may be methylated to form 5-methylcytosine"
ggtagcaacagtcagaggtcattctcagcagggattcactgactgcttaagctggatgagcgaccagggtgtgaccgtgtaagcatccggcaccaacagtccataggaactgtgtcgaaaca

SEQ ID NO: 30153 - DNA, 122 bp, Homo sapiens
  misc_feature (61)..(62): /note="This region represents a CpG dinucleotide"
  misc_feature (61)..(61): /note="Nucleotide may be methylated to form 5-methylcytosine"
tccccttgtccctgatgggcaccatgctcagttgtgtcttgatttcattgccaccagtctcgtactgcccagactgtgctacattctggctgccagcttctgtgtgcctggaggataccctt

SEQ ID NO: 30154 - DNA, 122 bp, Homo sapiens
  misc_feature (61)..(62): /note="This region represents a CpG dinucleotide"
  misc_feature (61)..(61): /note="Nucleotide may be methylated to form 5-methylcytosine"
gtgcactctgactacatcacagatgatagttcagtcctgcacctacaaactggcaggctccgtgctgggctctgggcatatgaaaataagcaccacaggcaaaatgcctgctcttgtgagat

SEQ ID NO: 30155 - DNA, 122 bp, Homo sapiens
  misc_feature (61)..(62): /note="This region represents a CpG dinucleotide"
  misc_feature (61)..(61): /note="Nucleotide may be methylated to form 5-methylcytosine"
tgctgaatactgaccaatctctaattccaagtggcaatgtcttcggtgttttacaaaaggcgctagctatctaaggcatctgctctaaaggactaacaaaacaaatcccagaaacaggaagt

SEQ ID NO: 30156 - DNA, 122 bp, Homo sapiens
  misc_feature (61)..(62): /note="This region represents a CpG dinucleotide"
  misc_feature (61)..(61): /note="Nucleotide may be methylated to form 5-methylcytosine"
gcggtcttttcaacttactgtcaagggtgattacactggacagaaaaccacatcctctatcgccttttttattttgagacagagtctcgctctgtcgcccaggctgaagtgcagtggcatga

SEQ ID NO: 30157 - DNA, 122 bp, Homo sapiens
  misc_feature (61)..(62): /note="This region represents a CpG dinucleotide"
  misc_feature (61)..(61): /note="Nucleotide may be methylated to form 5-methylcytosine"
tttcaaatgagggtgtggattttggggaagaacaccacagaggtgattgccctatcatcacgtcattgcagggcgtacatgatattgatatgtcttattcatggtgatgtcagccagacctc

SEQ ID NO: 30158 - DNA, 122 bp, Homo sapiens
  misc_feature (61)..(62): /note="This region represents a CpG dinucleotide"
  misc_feature (61)..(61): /note="Nucleotide may be methylated to form 5-methylcytosine"
cagattgaatctctcccctcataacagtcccattaaatgaggtaaagtcaactatacttgcgagtcttactccatgaactcatgcaagaaacataattttactcaagggatgatttttaaat

SEQ ID NO: 30159 - DNA, 122 bp, Homo sapiens
  misc_feature (61)..(62): /note="This region represents a CpG dinucleotide"
  misc_feature (61)..(61): /note="Nucleotide may be methylated to form 5-methylcytosine"
ccaaagcggcgcggaccccggcagggcaccgtcggaaacacgctccgcgggcgccgagcccgagacactgacagacccacggagaacgtttccaaacaggattatagcttttaaccgggcct

SEQ ID NO: 30160 - DNA, 122 bp, Homo sapiens
  misc_feature (61)..(62): /note="This region represents a CpG dinucleotide"
  misc_feature (61)..(61): /note="Nucleotide may be methylated to form 5-methylcytosine"
gagagccaatattggtaatgtatcagtgaggctgcttttctcttgtgcagcagttgtgaacgtcatgtttatattaagattaacttcagtttagaaactgcaagtctaaaggatcctaactt

SEQ ID NO: 30161 - DNA, 122 bp, Homo sapiens
  misc_feature (61)..(62): /note="This region represents a CpG dinucleotide"
  misc_feature (61)..(61): /note="Nucleotide may be methylated to form 5-methylcytosine"
tgtctccgcgcctctccctccacccagtctcagctgcaaaggcccgctctgcgaggagagcgggtgagggggcggacacgctcacacacacagacaataactgccatggaaactaaccaaca

SEQ ID NO: 30162 - DNA, 122 bp, Homo sapiens
  misc_feature (61)..(62): /note="This region represents a CpG dinucleotide"
  misc_feature (61)..(61): /note="Nucleotide may be methylated to form 5-methylcytosine"
agaggtgacactgatttacagctgcatctcttcttcttcctgtccctccaagccagcctgcggtctgttcaaagcacactcaagggaaagagagaccaatgaatctgcccaattgggaagtg

SEQ ID NO: 30163 - DNA, 122 bp, Homo sapiens
  misc_feature (61)..(62): /note="This region represents a CpG dinucleotide"
  misc_feature (61)..(61): /note="Nucleotide may be methylated to form 5-methylcytosine"
ggaacttcatgcactccaatcttgctgagaaaaagtgaggctgaagagtcaggcaggatgcgataacaaagccttactaagacgcctgggatttagcctgcaggcaggcagtgggaaggcaa

SEQ ID NO: 30164 - DNA, 122 bp, Homo sapiens
  misc_feature (61)..(62): /note="This region represents a CpG dinucleotide"
  misc_feature (61)..(61): /note="Nucleotide may be methylated to form 5-methylcytosine"
gagaggctatacataatgcctgtgaacaaacaaaagtcaccttggttattgactcattgccgcatgcatagctttttaatacaatgtgtatttggatgtattttaaatttattcacttgatc

SEQ ID NO: 30165 - DNA, 122 bp, Homo sapiens
  misc_feature (61)..(62): /note="This region represents a CpG dinucleotide"
  misc_feature (61)..(61): /note="Nucleotide may be methylated to form 5-methylcytosine"
ctcagggtgactgtctcctgtatttttgctcttatgactcagtgcaatttaaaatatccccgggtttaatacaaactttctcagaagccgatttccaatggacagtaatccccttcaaatac

SEQ ID NO: 30166 - DNA, 122 bp, Homo sapiens
  misc_feature (61)..(62): /note="This region represents a CpG dinucleotide"
  misc_feature (61)..(61): /note="Nucleotide may be methylated to form 5-methylcytosine"
gtgaaggatcccaaaggtaaacaggctcacatcatcattcaaagtcacaaagacaaccaacgcaaaagcgagtcactggactattaaaaacttagagaagacagtggataaaaggggtactt

SEQ ID NO: 30167 - DNA, 122 bp, Homo sapiens
  misc_feature (61)..(62): /note="This region represents a CpG dinucleotide"
  misc_feature (61)..(61): /note="Nucleotide may be methylated to form 5-methylcytosine"
acttaacattcctgtcctacaattaagactgcaaacggtggccaaataattgggccacaacgttgaacaaactaatgagtattatatacaaccagttttaaaagactagtagtaggaattaa

SEQ ID NO: 30168 - DNA, 122 bp, Homo sapiens
  misc_feature (61)..(62): /note="This region represents a CpG dinucleotide"
  misc_feature (61)..(61): /note="Nucleotide may be methylated to form 5-methylcytosine"
tcagggtgctcctgaggctatgagcagctggcagttccctgtctgagaggtccttcgtaccgcaggagaggcagctctcacctgaaggcctccctggacaccggtctcaactttgtgtgtta

SEQ ID NO: 30169 - DNA, 122 bp, Homo sapiens
  misc_feature (61)..(62): /note="This region represents a CpG dinucleotide"
  misc_feature (61)..(61): /note="Nucleotide may be methylated to form 5-methylcytosine"
taagataagagtggcttggggaggtgcaaaattcctggtacttctggctctgtgcatgtgcgggtaaagtgttccagtaacctgagggaaatattccaaagaaaagttcatagtcacaagtc

SEQ ID NO: 30170 - DNA, 122 bp, Homo sapiens
  misc_feature (61)..(62): /note="This region represents a CpG dinucleotide"
  misc_feature (61)..(61): /note="Nucleotide may be methylated to form 5-methylcytosine"
agccgccgggagtgccagtcacccagtgctctgctctcctcccccccaacagtctgcacacgcagtttttatttgtgtacttttctcaaggctctaagctgttggcaggcattactcatgac

SEQ ID NO: 30171 - DNA, 122 bp, Homo sapiens
  misc_feature (61)..(62): /note="This region represents a CpG dinucleotide"
  misc_feature (61)..(61): /note="Nucleotide may be methylated to form 5-methylcytosine"
agcccttctagaaactccaaggacgtattaaattcactcactaaaatattttgggcatagcgtagttgctgatcatctccatgattacttctttgaagtctttcctttgaacattttttaag

SEQ ID NO: 30172 - DNA, 122 bp, Homo sapiens
  misc_feature (61)..(62): /note="This region represents a CpG dinucleotide"
  misc_feature (61)..(61): /note="Nucleotide may be methylated to form 5-methylcytosine"
tggaacctggactaaaatcaatcccagctcaaggtaattacaggacatgtgctaccaccccggcagggcaagtcagaggctgagctgctctcctagggcagccgtggcgattagttaggaat

SEQ ID NO: 30173 - DNA, 122 bp, Homo sapiens
  misc_feature (61)..(62): /note="This region represents a CpG dinucleotide"
  misc_feature (61)..(61): /note="Nucleotide may be methylated to form 5-methylcytosine"
gaggataaaaagccagaactcactttggtggcgcctgcagacctctgcactgtaatgacacgagtgcaagctgcactgggtgcaagtcagcatgactcagccaccctccccacggggtgaga

SEQ ID NO: 30174 - DNA, 122 bp, Homo sapiens
  misc_feature (61)..(62): /note="This region represents a CpG dinucleotide"
  misc_feature (61)..(61): /note="Nucleotide may be methylated to form 5-methylcytosine"
gtggctcccctgggtccaggccaggcccagcaggagcaggagcagagcagaggcagtggccggcttcatgttcatgtgcttgtggaggccccagccctcggcctcggcttttatgctaggga

SEQ ID NO: 30175 - DNA, 122 bp, Homo sapiens
  misc_feature (61)..(62): /note="This region represents a CpG dinucleotide"
  misc_feature (61)..(61): /note="Nucleotide may be methylated to form 5-methylcytosine"
cacaataaagatctttgctctcatgaatcttactttctacttgaggagaaggactataaacgcaatgtttaaataacagtagatctgatgcaattaagacggatagagagtgacttattgtt

SEQ ID NO: 30176 - DNA, 122 bp, Homo sapiens
  misc_feature (61)..(62): /note="This region represents a CpG dinucleotide"
  misc_feature (61)..(61): /note="Nucleotide may be methylated to form 5-methylcytosine"
tgtattcacttggtaagaattaatgctgactgtggtccatttcaggtcttgatggtgatgcgtatgtctcaggaatgttaactccagttcattctctctggctctcactgctgaaacatctg

SEQ ID NO: 30177 - DNA, 122 bp, Homo sapiens
  misc_feature (61)..(62): /note="This region represents a CpG dinucleotide"
  misc_feature (61)..(61): /note="Nucleotide may be methylated to form 5-methylcytosine"
attatagcttttcctttgaataggctgaaacatggtagagcaattagccacttcaatatacgtagctgatgtttacttgaaagtgtcctttaaggcttattttcctttcacgatcagtcttc

SEQ ID NO: 30178 - DNA, 122 bp, Homo sapiens
  misc_feature (61)..(62): /note="This region represents a CpG dinucleotide"
  misc_feature (61)..(61): /note="Nucleotide may be methylated to form 5-methylcytosine"
gatctaggcgaagtcagagagaaagcatcatagcagcctgtgctcagaagtccctgggaacgtcctgaaccttccgagggtgaccctggagaaaacactcaccactgagtgactcacagcct

SEQ ID NO: 30179 - DNA, 122 bp, Homo sapiens
  misc_feature (61)..(62): /note="This region represents a CpG dinucleotide"
  misc_feature (61)..(61): /note="Nucleotide may be methylated to form 5-methylcytosine"
atgatctcttccctaaaagtgttaccaatgaaagccatgctaacacttgttttcaagcaacggcatcaaaataaactggagaagtgggtgttgcaaaatactcatgaaaacgacgcctcctt

SEQ ID NO: 30180 - DNA, 122 bp, Homo sapiens
  misc_feature (61)..(62): /note="This region represents a CpG dinucleotide"
  misc_feature (61)..(61): /note="Nucleotide may be methylated to form 5-methylcytosine"
gccgcactttttgtatgtgagcatgtgtggtttactgtggcgctgctcagccctgaactccgctgagcaggtgttaatagatcactcagtccatgggacacagggtgggtgagtatgtagct

SEQ ID NO: 30181 - DNA, 122 bp, Homo sapiens
  misc_feature (61)..(62): /note="This region represents a CpG dinucleotide"
  misc_feature (61)..(61): /note="Nucleotide may be methylated to form 5-methylcytosine"
ctctcgagggcctgagctgtagcttgcacaatggtgccttgactccagaagcaaccagaacgctgtgcatgactgtcagtcatccacgtgttaacagggaggaggcttagagaaagcagcca

SEQ ID NO: 30182 - DNA, 122 bp, Homo sapiens
  misc_feature (61)..(62): /note="This region represents a CpG dinucleotide"
  misc_feature (61)..(61): /note="Nucleotide may be methylated to form 5-methylcytosine"
tgtgttaagtagattctggttggatatagaaacacaggcaccccaggcggaatgcagatacgcctcaacatgtggattaagtaagagccaggaagcagagtaatgaagcaaaaataagacgt

SEQ ID NO: 30183 - DNA, 122 bp, Homo sapiens
  misc_feature (61)..(62): /note="This region represents a CpG dinucleotide"
  misc_feature (61)..(61): /note="Nucleotide may be methylated to form 5-methylcytosine"
cagcatgagaaacaagaactcttggtcaagaactgagttcagattccaatacttccatctcgagaggacctgtcattttattataaacacttaacagagagaagggcaatctgcctagtata

SEQ ID NO: 30184 - DNA, 122 bp, Homo sapiens
  misc_feature (61)..(62): /note="This region represents a CpG dinucleotide"
  misc_feature (61)..(61): /note="Nucleotide may be methylated to form 5-methylcytosine"
ttgcatctctttatctgcacaatgcggataatatttaacacaggattatgataaagattacgtgaaaagtgacgtctgtaaaatgtccagctctaattgaccttcacaaatgatagcaaacc

SEQ ID NO: 30185 - DNA, 122 bp, Homo sapiens
  misc_feature (61)..(62): /note="This region represents a CpG dinucleotide"
  misc_feature (61)..(61): /note="Nucleotide may be methylated to form 5-methylcytosine"
acagccatctcagtcagcagtgtgtcctttgctctctgaaagtgaaagctctatgagatccgaatgagcagcatccggcctcagagctaatctgtcagattttgcgtctgagtcagaactta

SEQ ID NO: 30186 - DNA, 122 bp, Homo sapiens
  misc_feature (61)..(62): /note="This region represents a CpG dinucleotide"
  misc_feature (61)..(61): /note="Nucleotide may be methylated to form 5-methylcytosine"
gacacagcactttccctaataggggattagttgtgaaaacaagcaatgaaagaatgtttacgttttgacccagttggaatcatagtcctcactcagtaccagagttgatccttactgtccat

SEQ ID NO: 30187 - DNA, 122 bp, Homo sapiens
  misc_feature (61)..(62): /note="This region represents a CpG dinucleotide"
  misc_feature (61)..(61): /note="Nucleotide may be methylated to form 5-methylcytosine"
tgggtcatgtgacaactctgtgtttaaccttttgaggaactgtcaggctgtgaaagctgccgtaccattttactttcccaccagcagcatatgaggtttccagttcctgcacattcttgcca

SEQ ID NO: 30188 - DNA, 122 bp, Homo sapiens
  misc_feature (61)..(62): /note="This region represents a CpG dinucleotide"
  misc_feature (61)..(61): /note="Nucleotide may be methylated to form 5-methylcytosine"
accatcccttatcctaaacatcaccacctcatcatgaattatctttgccgaccacagttccggtcctaccaactgcaagagctgctagggagatacctcccagaaatcctcagccgggcaga

SEQ ID NO: 30189 - DNA, 122 bp, Homo sapiens
  misc_feature (61)..(62): /note="This region represents a CpG dinucleotide"
  misc_feature (61)..(61): /note="Nucleotide may be methylated to form 5-methylcytosine"
acaggcgttgcaagaatcagattcactttggacgactcttcacattccaagtcatcattgcgttaggcagcacaattccatctctggttgatgggcagaaaaagtgggcagcttgccaggta

SEQ ID NO: 30190 - DNA, 122 bp, Homo sapiens
  misc_feature (61)..(62): /note="This region represents a CpG dinucleotide"
  misc_feature (61)..(61): /note="Nucleotide may be methylated to form 5-methylcytosine"
gcaggtcaggaaacttccctccgaacagtcaaccgttgcttacactggggctgagtcacccgacaggaagttcctacaaaccttactggcatcattgaaaacagacagctccatggtacctt

SEQ ID NO: 30191 - DNA, 122 bp, Homo sapiens
  misc_feature (61)..(62): /note="This region represents a CpG dinucleotide"
  misc_feature (61)..(61): /note="Nucleotide may be methylated to form 5-methylcytosine"
ctccaaccaagaaagatgcgagcaagaggctgtggtgctcatttcagaaatctgttatcacggaaaagggaatcagaaaggtagtcctgaaaatgactacaagaagatcaactgtcctagtg

SEQ ID NO: 30192 - DNA, 122 bp, Homo sapiens
  misc_feature (61)..(62): /note="This region represents a CpG dinucleotide"
  misc_feature (61)..(61): /note="Nucleotide may be methylated to form 5-methylcytosine"
cccacacgtcatgaggcctgtggcaccccgatggggactgagcattcactcttctgcccacgtgaggaaccaacaaaagctggcaaggacaccccaggataacacccaaacacgtcgactcg

SEQ ID NO: 30193 - DNA, 122 bp, Homo sapiens
  misc_feature (61)..(62): /note="This region represents a CpG dinucleotide"
  misc_feature (61)..(61): /note="Nucleotide may be methylated to form 5-methylcytosine"
cttgaactcctgaccttgtgatccacccgcctcggcctcccaaagtgctgggattacaggcgtgagccactgtgcctggcagtactaactttcttaaaagtggatgtatttaacagagacac

SEQ ID NO: 30194 - DNA, 122 bp, Homo sapiens
  misc_feature (61)..(62): /note="This region represents a CpG dinucleotide"
  misc_feature (61)..(61): /note="Nucleotide may be methylated to form 5-methylcytosine"
tctgaagagtgcttgtctctgagcagtgtcatttttagttctgcttttcattttaaaaaacgatactgattacttttgatcagtgtacacaggaatgcctaaaatgaattaggaaaactaat

SEQ ID NO: 30195 - DNA, 122 bp, Homo sapiens
  misc_feature (61)..(62): /note="This region represents a CpG dinucleotide"
  misc_feature (61)..(61): /note="Nucleotide may be methylated to form 5-methylcytosine"
cagctactgcgggaggctctgggaggccagcggaaggcgcagcgcgcggtggacggtgctcgggcgtagagggggagagcggccggtagagggggagagcagaccagcccggccgccggcga

SEQ ID NO: 30196 - DNA, 122 bp, Homo sapiens
  misc_feature (61)..(62): /note="This region represents a CpG dinucleotide"
  misc_feature (61)..(61): /note="Nucleotide may be methylated to form 5-methylcytosine"
acaatcttctgaagcaaccctttgaggcatagggattttctgagtaaatgagtcaggtctcggtattgagcaatggctgctacaaggaaaccttgaggccccattgcaaatgtcatgctcct

SEQ ID NO: 30197 - DNA, 122 bp, Homo sapiens
  misc_feature (61)..(62): /note="This region represents a CpG dinucleotide"
  misc_feature (61)..(61): /note="Nucleotide may be methylated to form 5-methylcytosine"
acaaacttaagccctcaaatcttctggcatatatgttaaaattatctcctttgtttataccgtccctcccttccagcatttatcttgggaattattcactttttccagatctaatccacacc

SEQ ID NO: 30198 - DNA, 122 bp, Homo sapiens
  misc_feature (61)..(62): /note="This region represents a CpG dinucleotide"
  misc_feature (61)..(61): /note="Nucleotide may be methylated to form 5-methylcytosine"
acatgttgagactttgttgcctgttcctggcactcttaggatctgtgctctggtcccttgcgtaagtggcagagaacagcaccagaagaaaaggggtatggggagattgaaaattgtttttg

SEQ ID NO: 30199 - DNA, 122 bp, Homo sapiens
  misc_feature (61)..(62): /note="This region represents a CpG dinucleotide"
  misc_feature (61)..(61): /note="Nucleotide may be methylated to form 5-methylcytosine"
ccagtacctactgttgcttgaggtttcttataatagagcaggatgagcaacacgacttctcgttttgtaatttggcacatatgtatatgttttatacatacatgctatgtgtctatatgtac

SEQ ID NO: 30200 - DNA, 122 bp, Homo sapiens
  misc_feature (61)..(62): /note="This region represents a CpG dinucleotide"
  misc_feature (61)..(61): /note="Nucleotide may be methylated to form 5-methylcytosine"
gggccggggctgggtcctgagcatgcaacaggccttggcacctgcagcctgtggcagggccgccctcttcaaagcactggcggcaaagccatctgggccccacagaataacttcacatgttt

SEQ ID NO: 30201 - DNA, 122 bp, Homo sapiens
  misc_feature (61)..(62): /note="This region represents a CpG dinucleotide"
  misc_feature (61)..(61): /note="Nucleotide may be methylated to form 5-methylcytosine"
ccttctgagtcaaaaacaattcagctgcaggtgctgctatgggaaaaaaatgcaaaggggcggcagcttttcaaaaagtcagatggctttgtccaaatttaacgtgtccaacatttcaagtt

SEQ ID NO: 30202 - DNA, 122 bp, Homo sapiens
  misc_feature (61)..(62): /note="This region represents a CpG dinucleotide"
  misc_feature (61)..(61): /note="Nucleotide may be methylated to form 5-methylcytosine"
ttgaaatactatcttccacgtattctttcccatatgcaaaattaacaactgcctgattaacgcaatgagaaatgtacaattccagtacattgcagcaggtgtcagtataaggcagtgacata

SEQ ID NO: 30203 - DNA, 122 bp, Homo sapiens
  misc_feature (61)..(62): /note="This region represents a CpG dinucleotide"
  misc_feature (61)..(61): /note="Nucleotide may be methylated to form 5-methylcytosine"
gtgaaggtgcacgaggaagatgaagctgggatcgagcagggcagggcctgggagaggaagcgcgggactcctgcctggcgtccacgagctgcccatgggcatccctgccccctgggggacca

SEQ ID NO: 30204 - DNA, 122 bp, Homo sapiens
  misc_feature (61)..(62): /note="This region represents a CpG dinucleotide"
  misc_feature (61)..(61): /note="Nucleotide may be methylated to form 5-methylcytosine"
gtcaacactattgtaagggagctacagtttgaaagacacgattactaagcaaaggagagacgctgcaagactcaggtgaacagaactggctaaaggcctaccaatgaaaacaaatgcatatg

SEQ ID NO: 30205 - DNA, 122 bp, Homo sapiens
  misc_feature (61)..(62): /note="This region represents a CpG dinucleotide"
  misc_feature (61)..(61): /note="Nucleotide may be methylated to form 5-methylcytosine"
tatgtttttctctctcccgggaactctcctcttccttgaaagtataaattctgctaagtgcgctactgccttacttctggtaaaccttctctattacctaggctgaattaggtgacttgctg

SEQ ID NO: 30206 - DNA, 122 bp, Homo sapiens
  misc_feature (61)..(62): /note="This region represents a CpG dinucleotide"
  misc_feature (61)..(61): /note="Nucleotide may be methylated to form 5-methylcytosine"
tatgacagtgcagctttagccagtatgggtacataagttatgacatccttaatgtttctccggtgagtctaggcacttggtgatttaaagtagagttgttctcagtataaagaatttatgtg

SEQ ID NO: 30207 - DNA, 122 bp, Homo sapiens
  misc_feature (61)..(62): /note="This region represents a CpG dinucleotide"
  misc_feature (61)..(61): /note="Nucleotide may be methylated to form 5-methylcytosine"
agtagctatactggtttgcattcccactaggaatgaatcaaagttcccactgctgctgggcgtggtagctcacgcctgtaatcccagcactttgggaggccgaggcaggcagatcacttgag

SEQ ID NO: 30208 - DNA, 122 bp, Homo sapiens
  misc_feature (61)..(62): /note="This region represents a CpG dinucleotide"
  misc_feature (61)..(61): /note="Nucleotide may be methylated to form 5-methylcytosine"
attgaatgaacactctttccctctttgtctcagtggccattctcagtaaatgcagccagacggccagactggcctggttttcttaaatagattctgacagttttacttggcagctcatgaag

SEQ ID NO: 30209 - DNA, 122 bp, Homo sapiens
  misc_feature (61)..(62): /note="This region represents a CpG dinucleotide"
  misc_feature (61)..(61): /note="Nucleotide may be methylated to form 5-methylcytosine"
ccattttcaccactagtcttgactccagtttttctggtcctcaggctcctacactattcacgaggatagtaattctgccctaggcagtagaggaatctctaggacttaaaacactatgtgct

SEQ ID NO: 30210 - DNA, 122 bp, Homo sapiens
  misc_feature (61)..(62): /note="This region represents a CpG dinucleotide"
  misc_feature (61)..(61): /note="Nucleotide may be methylated to form 5-methylcytosine"
cagcctctgttaatttcaaacaactctctccgccttgaggaacaaaatgccatagagaagcggggtgagaatctggctgaattaaatttatatgccctcagagacataatctacttcacttt

SEQ ID NO: 30211 - DNA, 122 bp, Homo sapiens
  misc_feature (61)..(62): /note="This region represents a CpG dinucleotide"
  misc_feature (61)..(61): /note="Nucleotide may be methylated to form 5-methylcytosine"
caggacctcatatccttgtcaacagggctgcaggcagccacatggagtcctaggagttcacggtacagatggactctgtttgctgaggtgacttctcagtagtttcactctagctctacaca

SEQ ID NO: 30212 - DNA, 122 bp, Homo sapiens
  misc_feature (61)..(62): /note="This region represents a CpG dinucleotide"
  misc_feature (61)..(61): /note="Nucleotide may be methylated to form 5-methylcytosine"
ctgactgaatcagaagctttgttaatacctctgttagagcatgtgttatgctgctgttcacgctggaagctgagctccttatagcgacacttgcagcatgttgatctctatattcccagcac

SEQ ID NO: 30213 - DNA, 122 bp, Homo sapiens
  misc_feature (61)..(62): /note="This region represents a CpG dinucleotide"
  misc_feature (61)..(61): /note="Nucleotide may be methylated to form 5-methylcytosine"
ggagtcaaggatacaacttaagcctactcataattcccaatgtcaagaatctacatgctacgttcagtcaacatagctaaatataacctaagctgctctattaggctttggttctcttggtt

SEQ ID NO: 30214 - DNA, 122 bp, Homo sapiens
  misc_feature (61)..(62): /note="This region represents a CpG dinucleotide"
  misc_feature (61)..(61): /note="Nucleotide may be methylated to form 5-methylcytosine"
ataacaggctttagtcaggcagatctggcttgaaacctaaagtcattctgcagctgtttgcgtttggacaaatgccttgacctctctgagtatgtttgttctcatctgaaaaatggacataa

SEQ ID NO: 30215 - DNA, 122 bp, Homo sapiens
  misc_feature (61)..(62): /note="This region represents a CpG dinucleotide"
  misc_feature (61)..(61): /note="Nucleotide may be methylated to form 5-methylcytosine"
caccactgtgtcattagttcctggattcccatagggaaagcattctctacctcccggggtcgcagcctccagggattcagcatgatgggaaattatttttcctcctggccagcactgagctg

SEQ ID NO: 30216 - DNA, 122 bp, Homo sapiens
  misc_feature (61)..(62): /note="This region represents a CpG dinucleotide"
  misc_feature (61)..(61): /note="Nucleotide may be methylated to form 5-methylcytosine"
atatgtaagacctgaatgaaggtgactgaagtaattgggtacatggttagtggtggaatccggatgtgaacctgagtcatggtcttgccattgttccttgaagacaggaaatatttgtaaat

SEQ ID NO: 30217 - DNA, 122 bp, Homo sapiens
  misc_feature (61)..(62): /note="This region represents a CpG dinucleotide"
  misc_feature (61)..(61): /note="Nucleotide may be methylated to form 5-methylcytosine"
gtctcacaaatatgtgccctggcaaaaacagccgggcaatgagtctggcagatcaacgtacggtcatttatactagtagacagcattgcaaacttgtttatgaagtgtcactgatctctcta

SEQ ID NO: 30218 - DNA, 122 bp, Homo sapiens
  misc_feature (61)..(62): /note="This region represents a CpG dinucleotide"
  misc_feature (61)..(61): /note="Nucleotide may be methylated to form 5-methylcytosine"
aagcataaagagcagaataagaattctttatctgcaacaggattccctatggtattcttccgtaatgtataggtctgtaacagatattcaacaagagaatttaagacaagatatcatttaac

SEQ ID NO: 30219 - DNA, 122 bp, Homo sapiens
  misc_feature (61)..(62): /note="This region represents a CpG dinucleotide"
  misc_feature (61)..(61): /note="Nucleotide may be methylated to form 5-methylcytosine"
gaagggattcattttcctgtttaggaaatgtgatgtcgagctccatgaggctgatgagcacgctgggtgggaccacaaacaggccccagtgaaatcaattatgtgggtgtcttaggacaaaa

SEQ ID NO: 30220 - DNA, 122 bp, Homo sapiens
  misc_feature (61)..(62): /note="This region represents a CpG dinucleotide"
  misc_feature (61)..(61): /note="Nucleotide may be methylated to form 5-methylcytosine"
cgtggttccctggtaacgtgctgtggagctgcaggtgggcccgctgctggccctgggctgcgagttccttaagggctgtgtcttgttcctagatctggccacagcgcacagcatggcacctg

SEQ ID NO: 30221 - DNA, 122 bp, Homo sapiens
  misc_feature (61)..(62): /note="This region represents a CpG dinucleotide"
  misc_feature (61)..(61): /note="Nucleotide may be methylated to form 5-methylcytosine"
ctgagcagaaggatagctgcctctggacctcaatacaaataattctccaggagtgagagccgtggttttgtggcttcctcaacctagccttcctcactgtctctgaagcctatctataaatg

SEQ ID NO: 30222 - DNA, 122 bp, Homo sapiens
  misc_feature (61)..(62): /note="This region represents a CpG dinucleotide"
  misc_feature (61)..(61): /note="Nucleotide may be methylated to form 5-methylcytosine"
tggcgcatgcgcatcatgacgaggctctcgtagtccctctctgacagcactgagccctgtcggacagggcagggacagggaggggtcagggacagcagggcacagcctcacagactccgagt

SEQ ID NO: 30223 - DNA, 122 bp, Homo sapiens
  misc_feature (61)..(62): /note="This region represents a CpG dinucleotide"
  misc_feature (61)..(61): /note="Nucleotide may be methylated to form 5-methylcytosine"
tacagttctcaatgtttgctgttctgcgtcaccctcagagttacagatgactgtgactcacgcctggagaagcagcaaggtggggtgagaaaggccaggtggtgacctttgtccaaccatgg

SEQ ID NO: 30224 - DNA, 122 bp, Homo sapiens
  misc_feature (61)..(62): /note="This region represents a CpG dinucleotide"
  misc_feature (61)..(61): /note="Nucleotide may be methylated to form 5-methylcytosine"
ttggaggtgttgtggacaggaaacacattgatactggaggagaaattatttttggcaatacggtaacttaccaccttgtgcacacaagcactgcccatgtgcagggacgttttacttgtcaa

SEQ ID NO: 30225 - DNA, 122 bp, Homo sapiens
  misc_feature (61)..(62): /note="This region represents a CpG dinucleotide"
  misc_feature (61)..(61): /note="Nucleotide may be methylated to form 5-methylcytosine"
acaggcacgcccagaggccctcacagcaggctggaagcccgttgctctgcagttaccacccgtgtgctgatgtggctcagccctgggggccctctctgtccttcacctttctgctgctggtc

SEQ ID NO: 30226 - DNA, 122 bp, Homo sapiens
  misc_feature (61)..(62): /note="This region represents a CpG dinucleotide"
  misc_feature (61)..(61): /note="Nucleotide may be methylated to form 5-methylcytosine"
tcaggaactgggttatggtaaggcttcctaccctcaaaaccacaggggggagggcaagggcgagaggccccgcagtttgtggtcatggcaatacaatgataataacactcctcattccttat

SEQ ID NO: 30227 - DNA, 122 bp, Homo sapiens
  misc_feature (61)..(62): /note="This region represents a CpG dinucleotide"
  misc_feature (61)..(61): /note="Nucleotide may be methylated to form 5-methylcytosine"
gaacttgtgcttaatctcctagtgacagtgagacttctgccctttgtggctggatctgcacgtgacttgttgaatgattttaagtctgtgtcaccctgtgttatgattactcctaagtgggt

SEQ ID NO: 30228 - DNA, 122 bp, Homo sapiens
  misc_feature (61)..(62): /note="This region represents a CpG dinucleotide"
  misc_feature (61)..(61): /note="Nucleotide may be methylated to form 5-methylcytosine"
tgtctcaaaaaaaaaaaaaaaaaaaaaaaaaaagaggagggcattgtgtgggcaaaagtgcggaggaggaaaagtatagggtgtgtttgtggaacagtcctggtgcaattaatggctaagcc

SEQ ID NO: 30229 - DNA, 122 bp, Homo sapiens
  misc_feature (61)..(62): /note="This region represents a CpG dinucleotide"
  misc_feature (61)..(61): /note="Nucleotide may be methylated to form 5-methylcytosine"
gcaacatagcacatgctgctgctcaccaggctcacctgggatgacggtgtggatctgagtcgctggccacgtggcgacgtctgccctgccctagtgtccaaggacggtgaagggtcgggtgt

SEQ ID NO: 30230 - DNA, 122 bp, Homo sapiens
  misc_feature (61)..(62): /note="This region represents a CpG dinucleotide"
  misc_feature (61)..(61): /note="Nucleotide may be methylated to form 5-methylcytosine"
ttgctcaagttctcacagttacaaaacggtagatttggaattccatctcatgctgtctgacgccttaagcttaccactataaattcaatgtgtactcagtggttttaaaaaagatacaaagc

SEQ ID NO: 30231 - DNA, 122 bp, Homo sapiens
  misc_feature (61)..(62): /note="This region represents a CpG dinucleotide"
  misc_feature (61)..(61): /note="Nucleotide may be methylated to form 5-methylcytosine"
aagactctctgatagtgtggacaagaacctggtaactgtggttgtttctgggaaaggaatcgtagatagcaccagatttatttatttgcaaagaagtaaagccaataaagtttaccggatga

SEQ ID NO: 30232 - DNA, 122 bp, Homo sapiens
  misc_feature (61)..(62): /note="This region represents a CpG dinucleotide"
  misc_feature (61)..(61): /note="Nucleotide may be methylated to form 5-methylcytosine"
tgattattgtgagctcagttcccactgaggcctctcatgggggcaagtgtgtgcagggcgcgttgtcctgcctggggctgcctgggtggctaagcaggcttccctctccttgcttggtggcg

SEQ ID NO: 30233 - DNA, 122 bp, Homo sapiens
  misc_feature (61)..(62): /note="This region represents a CpG dinucleotide"
  misc_feature (61)..(61): /note="Nucleotide may be methylated to form 5-methylcytosine"
ctgatggctttgaattcaggggctcaatatttaacttcctctttttatgatatctttgttcgtcttttcttggtgacttccagttgacaacttctaactctgcttctctgtttgtttcccag

SEQ ID NO: 30234 - DNA, 122 bp, Homo sapiens
  misc_feature (61)..(62): /note="This region represents a CpG dinucleotide"
  misc_feature (61)..(61): /note="Nucleotide may be methylated to form 5-methylcytosine"
gctgtgcccagtagaaaaaaatgcgctcatatatttttcttccatgagcaaaaaaatccccgccgagatcacctcccctcagaatgtagggcacgaatgtgttctcacatgagttcaagaac

SEQ ID NO: 30235 - DNA, 122 bp, Homo sapiens
  misc_feature (61)..(62): /note="This region represents a CpG dinucleotide"
  misc_feature (61)..(61): /note="Nucleotide may be methylated to form 5-methylcytosine"
ctaaaatgacaaaagccccaaatacgttctcagtccttctcaacctttcagagcatggcacgcatagaattgagaatattctgagattcactgtagtaagctgacaaggcagcttctagcca

SEQ ID NO: 30236 - DNA, 122 bp, Homo sapiens
  misc_feature (61)..(62): /note="This region represents a CpG dinucleotide"
  misc_feature (61)..(61): /note="Nucleotide may be methylated to form 5-methylcytosine"
aggactggacggttttccagtcaaatcactccacctatgagccagtgctgctggccaagacgcgctcgtctgagtccatcccacacctgggcgcagacgccggcctgcatgctgcactgcac

SEQ ID NO: 30237 - DNA, 122 bp, Homo sapiens
  misc_feature (61)..(62): /note="This region represents a CpG dinucleotide"
  misc_feature (61)..(61): /note="Nucleotide may be methylated to form 5-methylcytosine"
gccccagaagaatccagacatgcagcagcacaattgaaatcctcattgaggacttcaggtcgttgcactgtactatacaggggattcgtgtggaatgagttgattgctgctgctcttgcccc

SEQ ID NO: 30238 - DNA, 122 bp, Homo sapiens
  misc_feature (61)..(62): /note="This region represents a CpG dinucleotide"
  misc_feature (61)..(61): /note="Nucleotide may be methylated to form 5-methylcytosine"
gacctgcctggttcctggccctcacagccctctccccaataactagggcaacatgacttccgcttgttgactcaatgctagacccaagccccaggactaatcctgttcccagtctggagaga

SEQ ID NO: 30239 - DNA, 122 bp, Homo sapiens
  misc_feature (61)..(62): /note="This region represents a CpG dinucleotide"
  misc_feature (61)..(61): /note="Nucleotide may be methylated to form 5-methylcytosine"
gctgtcgcagggccgacaggggcgactgaaaaagtgactttcgtccccttttacaaaatgcgtcccagcagggttcccccctaccccggggcaaaaggccgtgcgtggtgctcggcgtcctc

SEQ ID NO: 30240 - DNA, 122 bp, Homo sapiens
  misc_feature (61)..(62): /note="This region represents a CpG dinucleotide"
  misc_feature (61)..(61): /note="Nucleotide may be methylated to form 5-methylcytosine"
ctttcctctgtccagctcttcccgtgccccggggctggggaaagcgtccggcagccccgccgctccctggccccgtcccaggagccaccccaccgtagggctccagccagggtccaggcgtg

SEQ ID NO: 30241 - DNA, 122 bp, Homo sapiens
  misc_feature (61)..(62): /note="This region represents a CpG dinucleotide"
  misc_feature (61)..(61): /note="Nucleotide may be methylated to form 5-methylcytosine"
tgaaattgtcagtgaggatgccggacaagagggctttatcccgtctgatttataagtgggcggctgcattgcttcttgacctggctgcacagaagaatcacttgagagcattaaaaacatgc

SEQ ID NO: 30242 - DNA, 122 bp, Homo sapiens
  misc_feature (61)..(62): /note="This region represents a CpG dinucleotide"
  misc_feature (61)..(61): /note="Nucleotide may be methylated to form 5-methylcytosine"
gtaggtgctcaataaatgcaccttgaattcatgaggctaactctaccctcctgtgtgggacgggatgcagaaccaaatgacctgggtcctgaccctgccactcaaggttctgtggtctgtgg

SEQ ID NO: 30243 - DNA, 122 bp, Homo sapiens
  misc_feature (61)..(62): /note="This region represents a CpG dinucleotide"
  misc_feature (61)..(61): /note="Nucleotide may be methylated to form 5-methylcytosine"
gcagcatagataatggttaaggaatgtggccattgcattcgattacctggattcaaattacgatacctacactaaaaagctgtgagactgtgaatcatggatttgacctctatctgcctcat

SEQ ID NO: 30244 - DNA, 122 bp, Homo sapiens
  misc_feature (61)..(62): /note="This region represents a CpG dinucleotide"
  misc_feature (61)..(61): /note="Nucleotide may be methylated to form 5-methylcytosine"
atgaggacccaggagaattcaggccccggctctgggacggctgtgcacccccaccctggccgtggctggcacctcagaaggcacagctgtccttcactcgcacggagcaacctcgggacaga

SEQ ID NO: 30245 - DNA, 122 bp, Homo sapiens
  misc_feature (61)..(62): /note="This region represents a CpG dinucleotide"
  misc_feature (61)..(61): /note="Nucleotide may be methylated to form 5-methylcytosine"
gccttgctctgcatttcccctcaagcctctgcttggagcaccctcaggaagtggaacaggcgtggcacagggactgtttttttcttatggtttaagatccgtatcacatgctttgatgtcat

SEQ ID NO: 30246 - DNA, 122 bp, Homo sapiens
  misc_feature (61)..(62): /note="This region represents a CpG dinucleotide"
  misc_feature (61)..(61): /note="Nucleotide may be methylated to form 5-methylcytosine"
tgaacacagtcatataaatgaagtggtttctgctctgctgacaaataaatgccctttgtccgttttaattctttcaacatatggaacaataaaatgaatgaaagatggtatgcaaatgagtc

SEQ ID NO: 30247 - DNA, 122 bp, Homo sapiens
  misc_feature (61)..(62): /note="This region represents a CpG dinucleotide"
  misc_feature (61)..(61): /note="Nucleotide may be methylated to form 5-methylcytosine"
gaggcaggagcagctccagggcaggtgtcactggggccctggacagaagcattggtgggccgtgactccacatgcctgagtcaccaggctcagaccagtgcctccttcctgttccaccctac

SEQ ID NO: 30248 - DNA, 122 bp, Homo sapiens
  misc_feature (61)..(62): /note="This region represents a CpG dinucleotide"
  misc_feature (61)..(61): /note="Nucleotide may be methylated to form 5-methylcytosine"
agaattctgcctaaacattcacctcggtcacctccaggacaaccgcatccagggtggctacgagaacgtgccgactattgacatccacatgaaccagatcggctttgagcgggagtggcaca

SEQ ID NO: 30249 - DNA, 122 bp, Homo sapiens
  misc_feature (61)..(62): /note="This region represents a CpG dinucleotide"
  misc_feature (61)..(61): /note="Nucleotide may be methylated to form 5-methylcytosine"
tgcacaggccccaagtccctgaaacttttccttttttatttattctctaaccaaaaatgacgtctatattacagagcttataagctgtggctcctctagccaatacagcttggtagaagcat

SEQ ID NO: 30250 - DNA, 122 bp, Homo sapiens
  misc_feature (61)..(62): /note="This region represents a CpG dinucleotide"
  misc_feature (61)..(61): /note="Nucleotide may be methylated to form 5-methylcytosine"
aaaaaatgtgattcactgcatgaacagaatcaaaagcaaaatccacatgatcatctcaatcgacacagaaaaagctttagataaaatccagtatcccttcatgacaaaaaccctcaccaaac

SEQ ID NO: 30251 - DNA, 122 bp, Homo sapiens
  misc_feature (61)..(62): /note="This region represents a CpG dinucleotide"
  misc_feature (61)..(61): /note="Nucleotide may be methylated to form 5-methylcytosine"
ccccagaactcgctgtgttaagtagattctggttggatatagaaacacaggcaccccaggcggaatgcagatacgcctcaacatgtggattaagtaagagccaggaagcagagtaatgaagc

SEQ ID NO: 30252 - DNA, 122 bp, Homo sapiens
  misc_feature (61)..(62): /note="This region represents a CpG dinucleotide"
  misc_feature (61)..(61): /note="Nucleotide may be methylated to form 5-methylcytosine"
agccctaaacaaccgctgaaccacttcctgtcactgtagatttgcccattgtgaatacttcgtataattataatatgtagtcttttttaaccaacttgtttcacttaacgtgttttcaaggt

SEQ ID NO: 30253 - DNA, 122 bp, Homo sapiens
  misc_feature (61)..(62): /note="This region represents a CpG dinucleotide"
  misc_feature (61)..(61): /note="Nucleotide may be methylated to form 5-methylcytosine"
aatctctcaactgtatttgaaatatttgttttgtccggtgccctatttaagtggctaagccgtggtctcagatatgagattgtagagtttcaacttccttttctcttatttttttacttttt

SEQ ID NO: 30254 - DNA, 122 bp, Homo sapiens
  misc_feature (61)..(62): /note="This region represents a CpG dinucleotide"
  misc_feature (61)..(61): /note="Nucleotide may be methylated to form 5-methylcytosine"
agttcgctcacccaaaattgtggttttaggaggaatgtttgaaaagataatgagatgaaacgaagatgttggttggagtggccaaagttattaatgttaacagcattattttcagccttgga

SEQ ID NO: 30255 - DNA, 122 bp, Homo sapiens
  misc_feature (61)..(62): /note="This region represents a CpG dinucleotide"
  misc_feature (61)..(61): /note="Nucleotide may be methylated to form 5-methylcytosine"
tcccagtgtcttgaagagctgtcaagaccacagcctcctgaagctgtgattaaaggcacacggtgccagcagcacttagaattccctgcctccagtagcttacacttcagtgtctccaccct

SEQ ID NO: 30256 - DNA, 122 bp, Homo sapiens
  misc_feature (61)..(62): /note="This region represents a CpG dinucleotide"
  misc_feature (61)..(61): /note="Nucleotide may be methylated to form 5-methylcytosine"
attgcctgtaatttgtttcagtttacagtggtttttgccctgggcaatctgctactcagacggaataaagacagccttgcaactgggtcttccagggaaccttgagacaaatctttgacagt

SEQ ID NO: 30257 - DNA, 122 bp, Homo sapiens
  misc_feature (61)..(62): /note="This region represents a CpG dinucleotide"
  misc_feature (61)..(61): /note="Nucleotide may be methylated to form 5-methylcytosine"
ggtcaagatctacagtgttatgttctaggctaaggaggatggactataccccatggaaaacgctgaactcttacagacttttaagctcttagggcatgtgaaagatggcatgagcaaggggc

SEQ ID NO: 30258 - DNA, 122 bp, Homo sapiens
  misc_feature (61)..(62): /note="This region represents a CpG dinucleotide"
  misc_feature (61)..(61): /note="Nucleotide may be methylated to form 5-methylcytosine"
gtagaaagtatgagtcaaagtcaaatcatgggtagattccgtcactaacaaagtgagccacgccagaacacattaaaaacaactttgtgtgatatgaatgtttgaagcagtaaagcttgctt

SEQ ID NO: 30259 - DNA, 122 bp, Homo sapiens
  misc_feature (61)..(62): /note="This region represents a CpG dinucleotide"
  misc_feature (61)..(61): /note="Nucleotide may be methylated to form 5-methylcytosine"
tatggagcttgtcacattcagtggaatggaagcaggccagaaagtatcaataaagcaccacggactgtcagagatttcacatcagtctttccacagaatacaactctgaccataggccctta

SEQ ID NO: 30260 - DNA, 122 bp, Homo sapiens
  misc_feature (61)..(62): /note="This region represents a CpG dinucleotide"
  misc_feature (61)..(61): /note="Nucleotide may be methylated to form 5-methylcytosine"
gacccagaggaaggctgctgtccctttgcacacaggttctgaaagtgcgtggagagaggacgatccctcggtccctgcagaaccaggctcttgaagcatatagcagaggttctctacccagg

SEQ ID NO: 30261 - DNA, 122 bp, Homo sapiens
  misc_feature (61)..(62): /note="This region represents a CpG dinucleotide"
  misc_feature (61)..(61): /note="Nucleotide may be methylated to form 5-methylcytosine"
gcccaggtggctgtaatctaggcttgctcaagcttatcttgtgtccttcactgtgtcacccggatggaaagcaggaacttacagaaaccagccacagaaaacaggaatttgcaaacttacaa

SEQ ID NO: 30262 - DNA, 122 bp, Homo sapiens
  misc_feature (61)..(62): /note="This region represents a CpG dinucleotide"
  misc_feature (61)..(61): /note="Nucleotide may be methylated to form 5-methylcytosine"
caggtggggtaacagatgtccagagattcaagcaagttgctcagagccacatggtagagccgtgactcagccagaaccaaatcctggtcttgcaacttctaaccaaggtcccttttgatcat

SEQ ID NO: 30263 - DNA, 122 bp, Homo sapiens
  misc_feature (61)..(62): /note="This region represents a CpG dinucleotide"
  misc_feature (61)..(61): /note="Nucleotide may be methylated to form 5-methylcytosine"
taatcacagtatttctcctgacaggtaattatgaggtacttgcgtgaccccagcaatccccggtgccgcccacatcattgcaagtgcgggtaactcctgaaatgactctaattggactttat

SEQ ID NO: 30264 - DNA, 122 bp, Homo sapiens
  misc_feature (61)..(62): /note="This region represents a CpG dinucleotide"
  misc_feature (61)..(61): /note="Nucleotide may be methylated to form 5-methylcytosine"
catctggatgcacgccaagacaagacgtcagtcatttcctggtgaaatgaaagaaagccacgcttcctccacgcccattgggtcacgaaatccttgctaatcctggccggggcactggagga

SEQ ID NO: 30265 - DNA, 122 bp, Homo sapiens
  misc_feature (61)..(62): /note="This region represents a CpG dinucleotide"
  misc_feature (61)..(61): /note="Nucleotide may be methylated to form 5-methylcytosine"
ctttgagacttgtagggaaggaaagccagtaaagagtttaagaactgtgctgcagggaaacgtgtgccagtgattctgcagggcaagggaaatgctaaagctgtactttcactgtattcatg

SEQ ID NO: 30266 - DNA, 122 bp, Homo sapiens
  misc_feature (61)..(62): /note="This region represents a CpG dinucleotide"
  misc_feature (61)..(61): /note="Nucleotide may be methylated to form 5-methylcytosine"
atttgttccaagatgcaatgttctgccttcccttccaagcacaggcatctccaaggaaggcgagaaaaatcagaaacagagcgcctccgctgtgcccctaagcttggccaggagttggcctc

SEQ ID NO: 30267 - DNA, 122 bp, Homo sapiens
  misc_feature (61)..(62): /note="This region represents a CpG dinucleotide"
  misc_feature (61)..(61): /note="Nucleotide may be methylated to form 5-methylcytosine"
ttcaagtggtcctcccaccctggcctctcaaagtgttgggcttacaggtgtgggccactgcgcccagcctagttgctggatcttgactgtggttagtctgtctcactgtgccaagtgaaatg

SEQ ID NO: 30268 - DNA, 122 bp, Homo sapiens
  misc_feature (61)..(62): /note="This region represents a CpG dinucleotide"
  misc_feature (61)..(61): /note="Nucleotide may be methylated to form 5-methylcytosine"
agaggagaagctgaggagctgactgctctgagctgttctgtttcctagggctgtgctctgcgtctgtgtgtattgtgaccttgtggctccacctcttctggatgctgctacagcagaggcct

SEQ ID NO: 30269 - DNA, 122 bp, Homo sapiens
  misc_feature (61)..(62): /note="This region represents a CpG dinucleotide"
  misc_feature (61)..(61): /note="Nucleotide may be methylated to form 5-methylcytosine"
tgcttagttttctcattcagattgtggctgagaagttgtcatttatcgtctgtacaataacgcagatgtgtatgtgacttcccccttttcagcagtggagacactgaagcggcctgaggtta

SEQ ID NO: 30270 - DNA, 122 bp, Homo sapiens
  misc_feature (61)..(62): /note="This region represents a CpG dinucleotide"
  misc_feature (61)..(61): /note="Nucleotide may be methylated to form 5-methylcytosine"
tgcagcctgatcatgccacttcctttcttaagccttcaatgccttccattgtccaaactccgaagcttgggtcttaatcccccgagacctggctctccttccaccttcatcctcacctccca

SEQ ID NO: 30271 - DNA, 122 bp, Homo sapiens
  misc_feature (61)..(62): /note="This region represents a CpG dinucleotide"
  misc_feature (61)..(61): /note="Nucleotide may be methylated to form 5-methylcytosine"
agttatgtttctcacttccaattaatatatctgctttaagcatcagttccttttgccagccggcttcttacatattcatgtgtttgtctcatcaatggagtggtggagtttctgcataggag

SEQ ID NO: 30272 - DNA, 122 bp, Homo sapiens
  misc_feature (61)..(62): /note="This region represents a CpG dinucleotide"
  misc_feature (61)..(61): /note="Nucleotide may be methylated to form 5-methylcytosine"
gtgacatcatgtaactactaagagtaggtcacagaaagcacagcttccgccttgcttgctcgctcactcttgaatcaccagctgccatgtaacagcctgacttcctggagcctgccattttg

SEQ ID NO: 30273 - DNA, 122 bp, Homo sapiens
  misc_feature (61)..(62): /note="This region represents a CpG dinucleotide"
  misc_feature (61)..(61): /note="Nucleotide may be methylated to form 5-methylcytosine"
aaggcctgaggcaaaaccgtcaaccccatacagcagagtcagacctgatctgatgccagacgccaaatcccaaatgtattgttttaaggcatatttaatatgagctcagatttcacagatat

SEQ ID NO: 30274 - DNA, 122 bp, Homo sapiens
  misc_feature (61)..(62): /note="This region represents a CpG dinucleotide"
  misc_feature (61)..(61): /note="Nucleotide may be methylated to form 5-methylcytosine"
ttgacttgtttcaggcactcattttatttgacccttgcgagtagcaacgtctgtttcttgcgtacttttccacctgtgtttaaaaaacccccaagacgtgcaaaagttgggcttcgccaata

SEQ ID NO: 30275 - DNA, 122 bp, Homo sapiens
  misc_feature (61)..(62): /note="This region represents a CpG dinucleotide"
  misc_feature (61)..(61): /note="Nucleotide may be methylated to form 5-methylcytosine"
gctttctattgtgctattctagcttcatcacaaatgatgtatcatacctgggaatgtgcccggtgaactataaggtattacgtaaatagagaattaggagctgtgccattaataataatgtc

SEQ ID NO: 30276 - DNA, 122 bp, Homo sapiens
  misc_feature (61)..(62): /note="This region represents a CpG dinucleotide"
  misc_feature (61)..(61): /note="Nucleotide may be methylated to form 5-methylcytosine"
tcctctgaaggctgagacgtgcggccttgcctcggctttgcctgcttgtaagacacagtccgcactctctacctccaaggaaccccggggttcctcctgcccggcttcaccctcctatttcc

SEQ ID NO: 30277 - DNA, 122 bp, Homo sapiens
  misc_feature (61)..(62): /note="This region represents a CpG dinucleotide"
  misc_feature (61)..(61): /note="Nucleotide may be methylated to form 5-methylcytosine"
atgtttactagttgccaccccaggggtcatctgtcaaaaggccagatgaatcatcaaaagcgtcagatgaattaattgtgaaaaatagagtagataaagtgaatcacacacagaactactga

SEQ ID NO: 30278 - DNA, 122 bp, Homo sapiens
  misc_feature (61)..(62): /note="This region represents a CpG dinucleotide"
  misc_feature (61)..(61): /note="Nucleotide may be methylated to form 5-methylcytosine"
cgcggcctctgctgctcaccaccagcacatacctggcccaggagtggctgccagtcaatgcgcagcagccctttgcaggacctgcccttgggctgcttttgagtttctgagcatccaagtct

SEQ ID NO: 30279 - DNA, 122 bp, Homo sapiens
  misc_feature (61)..(62): /note="This region represents a CpG dinucleotide"
  misc_feature (61)..(61): /note="Nucleotide may be methylated to form 5-methylcytosine"
agcctactccacagcttctccgcagccaggaaggttcctttctgcttgcttgcttttctacgcggccactgaaagcagctgtgacgatatgtaggtcatactaaccacaaatattaccaaga

SEQ ID NO: 30280 - DNA, 122 bp, Homo sapiens
  misc_feature (61)..(62): /note="This region represents a CpG dinucleotide"
  misc_feature (61)..(61): /note="Nucleotide may be methylated to form 5-methylcytosine"
gtccagtagaggggactagtttttccagattaactgtcagctttgccatgctatagccaccgccttaataaggttcacctttcagcctcttgtgcaactttctcagagcacgaatgtgtctt

SEQ ID NO: 30281 - DNA, 122 bp, Homo sapiens
  misc_feature (61)..(62): /note="This region represents a CpG dinucleotide"
  misc_feature (61)..(61): /note="Nucleotide may be methylated to form 5-methylcytosine"
tcttaaacatacattgcttaatcccttgctttgtgcatggtgaatactcaaagccttcatcgtaggaatgactaaatgacaagtggatgaaacacagacctatcacagcttgatcctgtcca

SEQ ID NO: 30282 - DNA, 122 bp, Homo sapiens
  misc_feature (61)..(62): /note="This region represents a CpG dinucleotide"
  misc_feature (61)..(61): /note="Nucleotide may be methylated to form 5-methylcytosine"
gcatccacaaagaatttacagaccataaataacacttgtctgaggcattaatgattgacacggtcaaaaagcaaatctgctggctgggtaatcagatcagcactcctgacaccatgcccact

SEQ ID NO: 30283 - DNA, 122 bp, Homo sapiens
  misc_feature (61)..(62): /note="This region represents a CpG dinucleotide"
  misc_feature (61)..(61): /note="Nucleotide may be methylated to form 5-methylcytosine"
gcagccctgactccagctaatgcgatttctggtcttctttccacaggtgtgtagctgggacggtgctggtctgagctggaccttgtctgatggcttcctccaaccctcctccacagcctgcc

SEQ ID NO: 30284 - DNA, 122 bp, Homo sapiens
  misc_feature (61)..(62): /note="This region represents a CpG dinucleotide"
  misc_feature (61)..(61): /note="Nucleotide may be methylated to form 5-methylcytosine"
agcacgatgtgcatgtggttccaaacacatttaattctgtagctattcttttgttgaaggcgctcaccacaaaacatcctggagggggattacggggcaggtgcaacagacaagggtgtttc

SEQ ID NO: 30285 - DNA, 122 bp, Homo sapiens
  misc_feature (61)..(62): /note="This region represents a CpG dinucleotide"
  misc_feature (61)..(61): /note="Nucleotide may be methylated to form 5-methylcytosine"
aacatctctgggtctgttgttacacatacttacatcactctgaatttgattgacattcctcgtatgctcaagactcatggcgtcaggtaggtatgtgtaatgatgcaatggctgtttgtagt

SEQ ID NO: 30286 - DNA, 122 bp, Homo sapiens
  misc_feature (61)..(62): /note="This region represents a CpG dinucleotide"
  misc_feature (61)..(61): /note="Nucleotide may be methylated to form 5-methylcytosine"
aaggaggggtcccgtgtggagtgtgtggacatcaggcatgaggccaggccaggtggtagacggagccttcacaatacaagaagaggaacgtttcttttaggtttctcactgcttgtgacgta

SEQ ID NO: 30287 - DNA, 122 bp, Homo sapiens
  misc_feature (61)..(62): /note="This region represents a CpG dinucleotide"
  misc_feature (61)..(61): /note="Nucleotide may be methylated to form 5-methylcytosine"
ccaggagacctcagttcccccatcactcctggattgtgggaagggtctgaggttgaactgcgatgcacggcctggcttcccagcctgtttccccatctatggagtgagcccaaagatgccct

SEQ ID NO: 30288 - DNA, 122 bp, Homo sapiens
  misc_feature (61)..(62): /note="This region represents a CpG dinucleotide"
  misc_feature (61)..(61): /note="Nucleotide may be methylated to form 5-methylcytosine"
ctacctagctgtgtgacactgggcaagccacttaaattacctggaggaggcaggtggggacgtagacttaagatgattttggatggctcagagatgtggcattaaattatatattgaaaaag

SEQ ID NO: 30289 - DNA, 122 bp, Homo sapiens
  misc_feature (61)..(62): /note="This region represents a CpG dinucleotide"
  misc_feature (61)..(61): /note="Nucleotide may be methylated to form 5-methylcytosine"
gcaaagaatgattcattaatcgtgcagcctcccaagccagagtaggcttaggaactccagcgcagccatgtggtagaagatttatagacaggaaaaggaaagtaatgcacagaaaatggaaa

SEQ ID NO: 30290 - DNA, 122 bp, Homo sapiens
  misc_feature (61)..(62): /note="This region represents a CpG dinucleotide"
  misc_feature (61)..(61): /note="Nucleotide may be methylated to form 5-methylcytosine"
aaagttattacttgtaacaagcaggaagcaacttgttagaaaataacatatattaatttgcgttcattatagcattttacagacaatatagtgttagacttggaaaacatgttagaggtcct

SEQ ID NO: 30291 - DNA, 122 bp, Homo sapiens
  misc_feature (61)..(62): /note="This region represents a CpG dinucleotide"
  misc_feature (61)..(61): /note="Nucleotide may be methylated to form 5-methylcytosine"
aactatatacccaagtcaaaaccacttcctgccagagtaactacaacatacccatcagagcgctgtaaaatcattacttgcaaagtaaagagtaagacagacttctcctctcattaataata

SEQ ID NO: 30292 - DNA, 122 bp, Homo sapiens
  misc_feature (61)..(62): /note="This region represents a CpG dinucleotide"
  misc_feature (61)..(61): /note="Nucleotide may be methylated to form 5-methylcytosine"
aaaggactgcaaacaacacaaatgtcattaatttagggactggttgagtaagtgatgctacgtccacagtggagcactatgcagctgcaaaaggaaagaataagacctgtatatactcctgt

SEQ ID NO: 30293 - DNA, 122 bp, Homo sapiens
  misc_feature (61)..(62): /note="This region represents a CpG dinucleotide"
  misc_feature (61)..(61): /note="Nucleotide may be methylated to form 5-methylcytosine"
ctcaccactctcagtctctgtggtacacagctggctctgtggaaactccttaccgacatccgtgaggtaacagacacaagacgttacaaggatcacaccctgccagccttgtggttgactgg

SEQ ID NO: 30294 - DNA, 122 bp, Homo sapiens
  misc_feature (61)..(62): /note="This region represents a CpG dinucleotide"
  misc_feature (61)..(61): /note="Nucleotide may be methylated to form 5-methylcytosine"
taccctgctgttctgtgtgcctcgggtcatggaagcaatgactcacacattctgcatggccgccaaggcctccttgataccagatggaccaaacctgtaccttccggtatatcccttttatg

SEQ ID NO: 30295 - DNA, 122 bp, Homo sapiens
  misc_feature (61)..(62): /note="This region represents a CpG dinucleotide"
  misc_feature (61)..(61): /note="Nucleotide may be methylated to form 5-methylcytosine"
ctccagatccaacaatcttattacacattcataagaatggtggaaaggaagaaaaaaagccggcacagttctgtctgtttatctgtttatctagcttgaactcaccttacaaaaaggttgtt

SEQ ID NO: 30296 - DNA, 122 bp, Homo sapiens
  misc_feature (61)..(62): /note="This region represents a CpG dinucleotide"
  misc_feature (61)..(61): /note="Nucleotide may be methylated to form 5-methylcytosine"
catgcaacctctccaggactgtgttatcattcatacaacgggtcaataataccatactaacgccttagcaggcatataccgagtggtagttctcttctctcctctagttagaagacatatat

SEQ ID NO: 30297 - DNA, 122 bp, Homo sapiens
  misc_feature (61)..(62): /note="This region represents a CpG dinucleotide"
  misc_feature (61)..(61): /note="Nucleotide may be methylated to form 5-methylcytosine"
gatcacatgtgactataccctgtgagtatgagtgacttaaatcacagtgacggtcctggacgtcaagtgatattgttttccctggtcttgctgcaaaggttgttaataacataaggacagag

SEQ ID NO: 30298 - DNA, 122 bp, Homo sapiens
  misc_feature (61)..(62): /note="This region represents a CpG dinucleotide"
  misc_feature (61)..(61): /note="Nucleotide may be methylated to form 5-methylcytosine"
ccagcggtgagcgtggaggacgtacttggccacccggtccagctcttcagctgtcacagccggctttcaccccgcagcgtgatcatctgagacacgttttcactcacagagatcaggatgct

SEQ ID NO: 30299 - DNA, 122 bp, Homo sapiens
  misc_feature (61)..(62): /note="This region represents a CpG dinucleotide"
  misc_feature (61)..(61): /note="Nucleotide may be methylated to form 5-methylcytosine"
gtttccctgggggtctgcccacttcctgggaggggcgccaggcctgggtggagcgctctgcggcagagcccagcaccttatacctatgtatgggatagaggtaaaatcttaaaaaaaaaaaa

SEQ ID NO: 30300 - DNA, 122 bp, Homo sapiens
  misc_feature (61)..(62): /note="This region represents a CpG dinucleotide"
  misc_feature (61)..(61): /note="Nucleotide may be methylated to form 5-methylcytosine"
gagcaaggagtgctacaatgactccttagtgttgtcacatcgtttactagacacatttctcgcttgggagcctgacttcctgtttacacagttcttatttgtatttttttgtttatagctcc

SEQ ID NO: 30301 - DNA, 122 bp, Homo sapiens
  misc_feature (61)..(62): /note="This region represents a CpG dinucleotide"
  misc_feature (61)..(61): /note="Nucleotide may be methylated to form 5-methylcytosine"
cctattagttcagtcatcataattaaaccatattacaggggtagctaagcaggagtctggcgttatacttcagatatgggtggtacatgggttttgtttatagtggaaaggctgagatggcc

SEQ ID NO: 30302 - DNA, 122 bp, Homo sapiens
  misc_feature (61)..(62): /note="This region represents a CpG dinucleotide"
  misc_feature (61)..(61): /note="Nucleotide may be methylated to form 5-methylcytosine"
tgcagctcaccacggccaactgtgtgacatagtaacagttaacctccactgactggtcaccgtgctccaggcactgtcttaagtggcttgtattcattcctttaatcctcataacaccctga

SEQ ID NO: 30303 - DNA, 122 bp, Homo sapiens
  misc_feature (61)..(62): /note="This region represents a CpG dinucleotide"
  misc_feature (61)..(61): /note="Nucleotide may be methylated to form 5-methylcytosine"
tggtgagactccatctctacccaaaatacaaaaaataagctgggtgtggtggttcgcgcccgtagtcccagctactggggaggctgaggcaggattgcttgagccccagaaccagaggttgc

SEQ ID NO: 30304 - DNA, 122 bp, Homo sapiens
  misc_feature (61)..(62): /note="This region represents a CpG dinucleotide"
  misc_feature (61)..(61): /note="Nucleotide may be methylated to form 5-methylcytosine"
agtaggacgtcaggcttgcaagctctgggattaggccgaccagagcccatatcccagtcccgcctcttactgcctgcttgatctcaagcaagaccgctttgttcatgggcgaaaggagcgcc

SEQ ID NO: 30305 - DNA, 122 bp, Homo sapiens
  misc_feature (61)..(62): /note="This region represents a CpG dinucleotide"
  misc_feature (61)..(61): /note="Nucleotide may be methylated to form 5-methylcytosine"
caggggagctcagaggacacctggcctccttcaatccaggactcactgttgaagtggagccggggccctcgcaggaaagaatgagctgtgggagggccactggtccaccacagggagtctgt

SEQ ID NO: 30306 - DNA, 122 bp, Homo sapiens
  misc_feature (61)..(62): /note="This region represents a CpG dinucleotide"
  misc_feature (61)..(61): /note="Nucleotide may be methylated to form 5-methylcytosine"
tttctaggttctgaatcccacctcaccccaacccttctgcatcctagctcataggatgtacgaatgactcccgtgcctggactagtggctttacataggtaatggtggctcctcagagcaca

SEQ ID NO: 30307 - DNA, 122 bp, Homo sapiens
  misc_feature (61)..(62): /note="This region represents a CpG dinucleotide"
  misc_feature (61)..(61): /note="Nucleotide may be methylated to form 5-methylcytosine"
gttgcacgtgtcacttaccacccccatacggccctcttcctgactgtcgcctcccttcctcgcttacagaccagttacttaatctgccacatgacgagatggtatctgggatctctaacggc

SEQ ID NO: 30308 - DNA, 122 bp, Homo sapiens
  misc_feature (61)..(62): /note="This region represents a CpG dinucleotide"
  misc_feature (61)..(61): /note="Nucleotide may be methylated to form 5-methylcytosine"
ttattcacattcctagggggaggggcctcctggcaggaagcagactccagaaggcaggagcgaaactggccacaaggatgcacagtcagtctgaagacacaggcagtagcttaggatgggga

SEQ ID NO: 30309 - DNA, 122 bp, Homo sapiens
  misc_feature (61)..(62): /note="This region represents a CpG dinucleotide"
  misc_feature (61)..(61): /note="Nucleotide may be methylated to form 5-methylcytosine"
taactgtttgtttaaatagcaaacagaaggcggcaatggaggtgtggaaaactgaggatccgatgtcacttgaaagtaatgagatcacataacattgagggaatgtcctaagaggagtggca

SEQ ID NO: 30310 - DNA, 122 bp, Homo sapiens
  misc_feature (61)..(62): /note="This region represents a CpG dinucleotide"
  misc_feature (61)..(61): /note="Nucleotide may be methylated to form 5-methylcytosine"
gttgaaaagttatgataacatttacaatttccttttaaaaacttcaagcctcagaccaggcgcggtggctcacacctgtaatcctagcactttgagaggctgaggagggcagatcacctgag

SEQ ID NO: 30311 - DNA, 122 bp, Homo sapiens
  misc_feature (61)..(62): /note="This region represents a CpG dinucleotide"
  misc_feature (61)..(61): /note="Nucleotide may be methylated to form 5-methylcytosine"
cacttgcaatttgctaggctggcaactgcacactctggctctagggaggatcactggggacgcaattcctggctggttcctgttttgaaagagagacagtaggacttgatgggtcggggcca

SEQ ID NO: 30312 - DNA, 122 bp, Homo sapiens
  misc_feature (61)..(62): /note="This region represents a CpG dinucleotide"
  misc_feature (61)..(61): /note="Nucleotide may be methylated to form 5-methylcytosine"
gatggtaggcctatctctgtgatgagctgtttttttttctcaaagtttgatgagattcgccgtagaattccttctcacatagtcttgggcaagattttacccgatcttccaacacatgagtc

SEQ ID NO: 30313 - DNA, 122 bp, Homo sapiens
  misc_feature (61)..(62): /note="This region represents a CpG dinucleotide"
  misc_feature (61)..(61): /note="Nucleotide may be methylated to form 5-methylcytosine"
tctgtaactggttgtgatcggttacctgtaaacaccactgcacttggaccagccagcagccgaattttcctaataaaagttgacacgcttttttaaaatttggtgacttggtaggaaggaaa

SEQ ID NO: 30314 - DNA, 122 bp, Homo sapiens
  misc_feature (61)..(62): /note="This region represents a CpG dinucleotide"
  misc_feature (61)..(61): /note="Nucleotide may be methylated to form 5-methylcytosine"
ggatattaatgacataaaagataatgcacccagattaaaacacacaatactggtgtcacccgctacacaccctaaccaacagagctaacctacagaaagtatttaaggtaagcagtaaagaa

SEQ ID NO: 30315 - DNA, 122 bp, Homo sapiens
  misc_feature (61)..(62): /note="This region represents a CpG dinucleotide"
  misc_feature (61)..(61): /note="Nucleotide may be methylated to form 5-methylcytosine"
ctcacagccctatgcactctagtttctgtttaccaggcacatgggccaatacccttgtttcgaaaacaggaagagcattgctgtgaatgagaagtcagtggggactttggaaggaaactaat

SEQ ID NO: 30316 - DNA, 122 bp, Homo sapiens
  misc_feature (61)..(62): /note="This region represents a CpG dinucleotide"
  misc_feature (61)..(61): /note="Nucleotide may be methylated to form 5-methylcytosine"
ttgaaaaacagtcttcatccccagctccatttcagttttctggcatctctcactttcccacgtttctcaagagcaaaacaaacttttctcatgcgggcacctgagtcattcttctgcttctt

SEQ ID NO: 30317 - DNA, 122 bp, Homo sapiens
  misc_feature (61)..(62): /note="This region represents a CpG dinucleotide"
  misc_feature (61)..(61): /note="Nucleotide may be methylated to form 5-methylcytosine"
ccccaggcacctcaaagggtcctcggtgttcaacaacaggaagtgctggcaggcttccctcgctagggaactgaaagtggtgacaacagaggatgtgttcttcaggctatcagataaagccc

SEQ ID NO: 30318 - DNA, 122 bp, Homo sapiens
  misc_feature (61)..(62): /note="This region represents a CpG dinucleotide"
  misc_feature (61)..(61): /note="Nucleotide may be methylated to form 5-methylcytosine"
acttagaatacaagaaaaagtgatttcatttctttcatcgtagctccaagtgtgctgtatcgtgtctgaaatagataaactgctctaagcagtttcaagtttatctcaatctctgtccttct

SEQ ID NO: 30319 - DNA, 122 bp, Homo sapiens
  misc_feature (61)..(62): /note="This region represents a CpG dinucleotide"
  misc_feature (61)..(61): /note="Nucleotide may be methylated to form 5-methylcytosine"
tggtatgaatgacaggcacattatttctaatcctttttattggttctgtcccaggccttgcgtagtttctttgcatgcatgcaccggtcagtactcagctgaatattaaaggaggttctctg

SEQ ID NO: 30320 - DNA, 122 bp, Homo sapiens
  misc_feature (61)..(62): /note="This region represents a CpG dinucleotide"
  misc_feature (61)..(61): /note="Nucleotide may be methylated to form 5-methylcytosine"
gtcaggccgaagaggtgggaagcccagggcgctgtggaatccccaaggaagtgcctcattcgtgggagggctgggcaggcgacctggaggatgtgggtttcgtgggagggctgggcaggcga

SEQ ID NO: 30321 - DNA, 122 bp, Homo sapiens
  misc_feature (61)..(62): /note="This region represents a CpG dinucleotide"
  misc_feature (61)..(61): /note="Nucleotide may be methylated to form 5-methylcytosine"
cctgatagagactttgtagaataaatcagccattgcccggatggcttctagaaggggtggcggggctcagacggtgttctcaatgttgaggatgtgatgcaggaatcagaaagcatctagag

SEQ ID NO: 30322 - DNA, 122 bp, Homo sapiens
  misc_feature (61)..(62): /note="This region represents a CpG dinucleotide"
  misc_feature (61)..(61): /note="Nucleotide may be methylated to form 5-methylcytosine"
agtttagtaattccttacactaaacttcctgtttaaattcctttgtggtttttgtctcctcgtttgacccagactgacactgtttaattctcatttctgaattcatatagtcatctactctt

SEQ ID NO: 30323 - DNA, 122 bp, Homo sapiens
  misc_feature (61)..(62): /note="This region represents a CpG dinucleotide"
  misc_feature (61)..(61): /note="Nucleotide may be methylated to form 5-methylcytosine"
cctattcagtgcaacaaacctgagaagagattgtatcagtcttgaaccttttcattttcacgagacagcaaggccaactcaaagcagcttagccaaaaaaggaaggtttttgtctcatgccc

SEQ ID NO: 30324 - DNA, 122 bp, Homo sapiens
  misc_feature (61)..(62): /note="This region represents a CpG dinucleotide"
  misc_feature (61)..(61): /note="Nucleotide may be methylated to form 5-methylcytosine"
taaataaaaaccacttgccaggaccctaggggggcttatttgccatctagtcctagtactcgagatcatttaaaattctctctctcctgcttctcactcacttactcattcaaacaaacaaa

SEQ ID NO: 30325 - DNA, 122 bp, Homo sapiens
  misc_feature (61)..(62): /note="This region represents a CpG dinucleotide"
  misc_feature (61)..(61): /note="Nucleotide may be methylated to form 5-methylcytosine"
gtgtacacagtccaagcagacatacatatccagacacacacacagaatacacaacacacacgtggatatgtatgagtgtgtattcctgcaaacccttgtggctgccttgcacacgtgggcac

SEQ ID NO: 30326 - DNA, 122 bp, Homo sapiens
  misc_feature (61)..(62): /note="This region represents a CpG dinucleotide"
  misc_feature (61)..(61): /note="Nucleotide may be methylated to form 5-methylcytosine"
agctcaagttcaaatgtctctcatccttgactttgatgtaaaaacatgtcatatttcactcgcggattgcatgtgaataagcaatatcagttctcagagaatggaaccacagcgaaagggaa

SEQ ID NO: 30327 - DNA, 122 bp, Homo sapiens
  misc_feature (61)..(62): /note="This region represents a CpG dinucleotide"
  misc_feature (61)..(61): /note="Nucleotide may be methylated to form 5-methylcytosine"
agagagagagagagggagaaatttaaaagtattaagtcacccatcctacctgagcacccacgagctgcagcaatgctgagttcacagggaggagctcaatgtctgtattgatagtggtctgg

SEQ ID NO: 30328 - DNA, 122 bp, Homo sapiens
  misc_feature (61)..(62): /note="This region represents a CpG dinucleotide"
  misc_feature (61)..(61): /note="Nucleotide may be methylated to form 5-methylcytosine"
agggtgaagtcatccaggtttatttataaatgtgctatgagagcgccaaattatctacaacgccgtgtaggttttgaagaatgattcattatttgggctgactggaaatatattaatacatg

SEQ ID NO: 30329 - DNA, 122 bp, Homo sapiens
  misc_feature (61)..(62): /note="This region represents a CpG dinucleotide"
  misc_feature (61)..(61): /note="Nucleotide may be methylated to form 5-methylcytosine"
aagacagaattatttagacaaatggctttcagaagttccgtcacagatataccccatgttcgtttacagtgagtttcacccaacatttgagtctatttactgagaaatggttgggaaggagc

SEQ ID NO: 30330 - DNA, 122 bp, Homo sapiens
  misc_feature (61)..(62): /note="This region represents a CpG dinucleotide"
  misc_feature (61)..(61): /note="Nucleotide may be methylated to form 5-methylcytosine"
tgaatgtgctttctctttactcttttagtggaatttgatcagtgtttaaggaactgtagccgattcccagcccacttcaaagcaaaagcccttcactgtgcctatttgcaaaattacctttg

SEQ ID NO: 30331 - DNA, 122 bp, Homo sapiens
  misc_feature (61)..(62): /note="This region represents a CpG dinucleotide"
  misc_feature (61)..(61): /note="Nucleotide may be methylated to form 5-methylcytosine"
gtgagtcatccataacctctttgaccctgctggaattctgaattagttccctatttatgccgctggagttcccagctctaatgaatggcagtggttggagcctccttgcgactcatggcttg

SEQ ID NO: 30332 - DNA, 122 bp, Homo sapiens
  misc_feature (61)..(62): /note="This region represents a CpG dinucleotide"
  misc_feature (61)..(61): /note="Nucleotide may be methylated to form 5-methylcytosine"
gctgggatacgatgcaagcctcattgctatcagcccagggctctgtccactataccacagcggtcagagaacacttcagagaggtaagagtttgaactggatccttcaggtgaatcaccatg

SEQ ID NO: 30333 - DNA, 122 bp, Homo sapiens
  misc_feature (61)..(62): /note="This region represents a CpG dinucleotide"
  misc_feature (61)..(61): /note="Nucleotide may be methylated to form 5-methylcytosine"
gcattttgttttcattttttgtaaagtggatgtgcgttgaaagcagtctaggaggacatacgctaaaatgctgagtatctctgaatggcagcattgagggtgaggttttcagtttgtacttt

SEQ ID NO: 30334 - DNA, 122 bp, Homo sapiens
  misc_feature (61)..(62): /note="This region represents a CpG dinucleotide"
  misc_feature (61)..(61): /note="Nucleotide may be methylated to form 5-methylcytosine"
cttgccgggacccagacatagtttggtctaagtggcctgggatgtggctggggctggaggcggcctgttgaggggtgggtggagggtgggggggttggtgtgcgatttggggaggcccagca

SEQ ID NO: 30335 - DNA, 122 bp, Homo sapiens
  misc_feature (61)..(62): /note="This region represents a CpG dinucleotide"
  misc_feature (61)..(61): /note="Nucleotide may be methylated to form 5-methylcytosine"
tgaacattaaacaaaactaagtagtggtaagtgttctttctatgccagtagcccctgagacgttaaggatcctagcaacagacaagatatctatcatctagtagatttagtagactgtatgt

SEQ ID NO: 30336 - DNA, 122 bp, Homo sapiens
  misc_feature (61)..(62): /note="This region represents a CpG dinucleotide"
  misc_feature (61)..(61): /note="Nucleotide may be methylated to form 5-methylcytosine"
atttaagctacagcagctcaaagaaggcctgtttttaaagcttagcagaagcccattctccgctgaagcctgttctttgtggaagcctggctggggggcagtgggggcggtgccactgtcga

SEQ ID NO: 30337 - DNA, 122 bp, Homo sapiens
  misc_feature (61)..(62): /note="This region represents a CpG dinucleotide"
  misc_feature (61)..(61): /note="Nucleotide may be methylated to form 5-methylcytosine"
tacatggatcactcactttcccccagccatgtgtgcaatccctcctccaccttcaaaccccggactttcctacaagagaataacgtgcaagaactagctgtttgtcttgcccacttcctagt

SEQ ID NO: 30338 - DNA, 122 bp, Homo sapiens
  misc_feature (61)..(62): /note="This region represents a CpG dinucleotide"
  misc_feature (61)..(61): /note="Nucleotide may be methylated to form 5-methylcytosine"
atttctaactcttctaaagttaaaccaagagttcacccagtgtattttccctggggttgacgaactaccacctgtgtcctgagagcaaagatttttttttcttttttacatttttaagtgta

SEQ ID NO: 30339 - DNA, 122 bp, Homo sapiens
  misc_feature (61)..(62): /note="This region represents a CpG dinucleotide"
  misc_feature (61)..(61): /note="Nucleotide may be methylated to form 5-methylcytosine"
cccaggagttggagagcaacatcacaacaccccatttctactaataatcaaaaaattggccgggcatggtggcatgtgcctgtagtcccagctacttgggaggctgaggcaggagaatcgct

SEQ ID NO: 30340 - DNA, 122 bp, Homo sapiens
  misc_feature (61)..(62): /note="This region represents a CpG dinucleotide"
  misc_feature (61)..(61): /note="Nucleotide may be methylated to form 5-methylcytosine"
gttataggtcccatgtgttgggtcttcctgcgaggccttcacaaagatgattttgtcattcgctgaaagcgtgaagtgaatcaacggcctcctcttgctccgcagcactttattcacactgt

SEQ ID NO: 30341 - DNA, 122 bp, Homo sapiens
  misc_feature (61)..(62): /note="This region represents a CpG dinucleotide"
  misc_feature (61)..(61): /note="Nucleotide may be methylated to form 5-methylcytosine"
cctttaaagatgcaaatagattgaaactgacatgatacaaaaaaaaaaattccctgcaaacggaaatcgaaataaagtggaggtagctttacttacatcagatagaatagacattatatcaa

SEQ ID NO: 30342 - DNA, 122 bp, Homo sapiens
  misc_feature (61)..(62): /note="This region represents a CpG dinucleotide"
  misc_feature (61)..(61): /note="Nucleotide may be methylated to form 5-methylcytosine"
cttggccaagtcttctttgccacctgtgaacaacagatgtgaagctgttgggccaccctgcgggttttggtgctggtgtcagcctttgcccaactgtttgtcctcagaactgcagggtgact

SEQ ID NO: 30343 - DNA, 122 bp, Homo sapiens
  misc_feature (61)..(62): /note="This region represents a CpG dinucleotide"
  misc_feature (61)..(61): /note="Nucleotide may be methylated to form 5-methylcytosine"
gagtctcagccccctccccgtccaggccggggccagcacaggaaatggggctatggggcccgcacagggaaacagacgatccatcacatgggccagttgtgagagtgggggatgagggggtg

SEQ ID NO: 30344 - DNA, 122 bp, Homo sapiens
  misc_feature (61)..(62): /note="This region represents a CpG dinucleotide"
  misc_feature (61)..(61): /note="Nucleotide may be methylated to form 5-methylcytosine"
gtggagcagtcccttgtaaatctctgggaccttttacagcatatacttaagcaagcacatcgcctcctgggaggctttctaagagttttaatgactgtgggctgctgaaagatccaggcctt

SEQ ID NO: 30345 - DNA, 122 bp, Homo sapiens
  misc_feature (61)..(62): /note="This region represents a CpG dinucleotide"
  misc_feature (61)..(61): /note="Nucleotide may be methylated to form 5-methylcytosine"
gtacgatgattttgtccatttatgtgaaagttagggtggggtggcctaatgttttcacagcggctatggtaacatttttgtaaattcagaactgctactgtgaatttcaggattttacagaa

SEQ ID NO: 30346 - DNA, 122 bp, Homo sapiens
  misc_feature (61)..(62): /note="This region represents a CpG dinucleotide"
  misc_feature (61)..(61): /note="Nucleotide may be methylated to form 5-methylcytosine"
cttcgagagcagatggaacgacatctaaatctgtgaataaagcagcaggcctgtcctggccggttggcttgactctctcctgtcagaatgcaacctggctttatgcacctagatgtccccag

SEQ ID NO: 30347 - DNA, 122 bp, Homo sapiens
  misc_feature (61)..(62): /note="This region represents a CpG dinucleotide"
  misc_feature (61)..(61): /note="Nucleotide may be methylated to form 5-methylcytosine"
aatgcctttaattaaattacccatacttctcttggaggctttgtttcgtaatttgtgaaccgggactattacttgctttccttctctcatgaagttgagttatgagaatataggatgatggt

SEQ ID NO: 30348 - DNA, 122 bp, Homo sapiens
  misc_feature (61)..(62): /note="This region represents a CpG dinucleotide"
  misc_feature (61)..(61): /note="Nucleotide may be methylated to form 5-methylcytosine"
aggaatgtgcccaagatttacatagctcataaagtattctgtctatgtaaatctagagaccgtatcattaaacttataatgcatttttttctgtagtgcttatccactaagcaattttaaaa

SEQ ID NO: 30349 - DNA, 122 bp, Homo sapiens
  misc_feature (61)..(62): /note="This region represents a CpG dinucleotide"
  misc_feature (61)..(61): /note="Nucleotide may be methylated to form 5-methylcytosine"
taagcctccccagctgagcaggagatgagcgataaggatcactcccaccctaccggagatcggcctatttccagtgacactgaagctccaagctggaggccagcctcccacataacagtggg

SEQ ID NO: 30350 - DNA, 122 bp, Homo sapiens
  misc_feature (61)..(62): /note="This region represents a CpG dinucleotide"
  misc_feature (61)..(61): /note="Nucleotide may be methylated to form 5-methylcytosine"
ctggaggctgctgcccaaactccttcctgccccgccccttccctgctgtgatcgaggatgcgccaaattcattacagatcatctcccgagggatgggtggctgggggtgcagagagggcctt

SEQ ID NO: 30351 - DNA, 122 bp, Homo sapiens
  misc_feature (61)..(62): /note="This region represents a CpG dinucleotide"
  misc_feature (61)..(61): /note="Nucleotide may be methylated to form 5-methylcytosine"
atcgagtgatcctttgcctccctcttctaaaacagcagcatttctgctcagtgttgtactcgaatgtgctgtggactgtgctgaagcctcaacatttctcaatctctacacagaaccctaat

SEQ ID NO: 30352 - DNA, 122 bp, Homo sapiens
  misc_feature (61)..(62): /note="This region represents a CpG dinucleotide"
  misc_feature (61)..(61): /note="Nucleotide may be methylated to form 5-methylcytosine"
cagcttttcttttctatgtatagacacacaaatacttaccattgtgttacaactggctaccgtagccagtacagtaccatgctgtacaggtttgcagctcaggagcaacaggccatatcgtg

SEQ ID NO: 30353 - DNA, 122 bp, Homo sapiens
  misc_feature (61)..(62): /note="This region represents a CpG dinucleotide"
  misc_feature (61)..(61): /note="Nucleotide may be methylated to form 5-methylcytosine"
atgtgagctcctgtcctcagaaattcttgaagatttctaaacccttctgcggcacggtcgcggctgtgtcccagtcattctcggggtaagttccgaagttggaggtgtcgccttcgcgggct

SEQ ID NO: 30354 - DNA, 122 bp, Homo sapiens
  misc_feature (61)..(62): /note="This region represents a CpG dinucleotide"
  misc_feature (61)..(61): /note="Nucleotide may be methylated to form 5-methylcytosine"
tccctgggaggagaaggcccaaggtttcccctccacttcaagatctgggctccgaggctccggagcccccttcactgggccgcgtttcttgtgccacctcttccttaggctccttctgcagg

SEQ ID NO: 30355 - DNA, 122 bp, Homo sapiens
  misc_feature (61)..(62): /note="This region represents a CpG dinucleotide"
  misc_feature (61)..(61): /note="Nucleotide may be methylated to form 5-methylcytosine"
aacccacacttgttgagggcctatataggaccatgaactggggacacaaactcaacctcacgatagcactgatgaggcatgttctactaagctcattttacagtgaggaaagagaggaccag

SEQ ID NO: 30356 - DNA, 122 bp, Homo sapiens
  misc_feature (61)..(62): /note="This region represents a CpG dinucleotide"
  misc_feature (61)..(61): /note="Nucleotide may be methylated to form 5-methylcytosine"
tcagaggcgctcagtaactgggtgagaatgccgctgaggccgagaccttgctcagagcagcgtgactcgtgcccaaggcaggtcactccgtctggcctctcccttccgccaacactgcccag

SEQ ID NO: 30357 - DNA, 122 bp, Homo sapiens
  misc_feature (61)..(62): /note="This region represents a CpG dinucleotide"
  misc_feature (61)..(61): /note="Nucleotide may be methylated to form 5-methylcytosine"
tatttggcggaaaaattgaaccaatgagtctctacactctacgactctggacacaatagacgacagtaggactaaggggaagtctgcactgtgacctgcaaaacatgtgcccctgtccaata

SEQ ID NO: 30358 - DNA, 122 bp, Homo sapiens
  misc_feature (61)..(62): /note="This region represents a CpG dinucleotide"
  misc_feature (61)..(61): /note="Nucleotide may be methylated to form 5-methylcytosine"
gtatctgtgtgtgtatatgtaagaggcagaggaaaagcattgcacaaagagaaagctgcacgcaggcaaaggctatggtattctcagaaaaggtgtgcctggccctctcggtaaagaggcca

SEQ ID NO: 30359 - DNA, 122 bp, Homo sapiens
  misc_feature (61)..(62): /note="This region represents a CpG dinucleotide"
  misc_feature (61)..(61): /note="Nucleotide may be methylated to form 5-methylcytosine"
aaatccaatctcatcagatgctctggggctgtaggtcttcattccatgtcaggaatgccccgctttgagaggacttgtgattgtggtaatttatgacaccagctgctgtgaaaatgactggg

SEQ ID NO: 30360 - DNA, 122 bp, Homo sapiens
  misc_feature (61)..(62): /note="This region represents a CpG dinucleotide"
  misc_feature (61)..(61): /note="Nucleotide may be methylated to form 5-methylcytosine"
aagaggaaggaacggggttcttagcctctctggccttggtgcacttgtctgctcccaggacgtttctcgatggctctccccgaggactgggagtacccagcctggtgcctccaccctgtctt

SEQ ID NO: 30361 - DNA, 122 bp, Homo sapiens
  misc_feature (61)..(62): /note="This region represents a CpG dinucleotide"
  misc_feature (61)..(61): /note="Nucleotide may be methylated to form 5-methylcytosine"
aggattcctggggttaaaaattatctaaaaataaagaaagacacaggccagctcgggcaacggcacaggcctggcccagttctggaggactgtttactgctgagtctgacatgttattcctc

SEQ ID NO: 30362 - DNA, 122 bp, Homo sapiens
  misc_feature (61)..(62): /note="This region represents a CpG dinucleotide"
  misc_feature (61)..(61): /note="Nucleotide may be methylated to form 5-methylcytosine"
catgacctgctgaagatagtatagctctgggggtcaaatcaagacctaaaccaggccaggcgcggtcagacgtggtggctcacgcctgtaatcccaacactttgagaggccaaggcaggtga

SEQ ID NO: 30363 - DNA, 122 bp, Homo sapiens
  misc_feature (61)..(62): /note="This region represents a CpG dinucleotide"
  misc_feature (61)..(61): /note="Nucleotide may be methylated to form 5-methylcytosine"
aggcactgacccagaaggctgccacagaaacactgactcatgggccctgttcctgtgtctcgggctcagggataaatttggttacagataccaagcctctagaaaaacaaaagacaaaggta

SEQ ID NO: 30364 - DNA, 122 bp, Homo sapiens
  misc_feature (61)..(62): /note="This region represents a CpG dinucleotide"
  misc_feature (61)..(61): /note="Nucleotide may be methylated to form 5-methylcytosine"
ccttttcacccctccctctctccgtcatccagtctgactgggctaaaaacgatggaataacgctattcctgccctccaggaaatcttcaacactaaaactacaatgtaaattgagtgtgtta

SEQ ID NO: 30365 - DNA, 122 bp, Homo sapiens
  misc_feature (61)..(62): /note="This region represents a CpG dinucleotide"
  misc_feature (61)..(61): /note="Nucleotide may be methylated to form 5-methylcytosine"
cccagctgctttggtcattgctacattctgggaatcctctgaagactctaagaccaaactcgtaccaaagggtcacagctgctggaataaaacggctcccaagattgcaggctggagggtgc

SEQ ID NO: 30366 - DNA, 122 bp, Homo sapiens
  misc_feature (61)..(62): /note="This region represents a CpG dinucleotide"
  misc_feature (61)..(61): /note="Nucleotide may be methylated to form 5-methylcytosine"
tagtaacagcaacaacaacaataaggccaactgtctttgctcaagctgttaactcttctccgcttgtagctatagcaccacctggagggagagtgggaacgtgagtctggaattgaattatt

SEQ ID NO: 30367 - DNA, 122 bp, Homo sapiens
  misc_feature (61)..(62): /note="This region represents a CpG dinucleotide"
  misc_feature (61)..(61): /note="Nucleotide may be methylated to form 5-methylcytosine"
gggcccatggcagtaatgtgcgtctgtggatccctttgctatgaggcttgacttcttgatcgggttcacaaggctggtgggcagcctgagatctttgcttatttcctacgtcttctgaaagg

SEQ ID NO: 30368 - DNA, 122 bp, Homo sapiens
  misc_feature (61)..(62): /note="This region represents a CpG dinucleotide"
  misc_feature (61)..(61): /note="Nucleotide may be methylated to form 5-methylcytosine"
ggaggcagccttctcgtttccatcacaggaagccattgctgtcaatgtgtgtctgaataccgtttattcccttcttgagtaatttcacttatttccctacacaatgtaaacatggaaaccaa

SEQ ID NO: 30369 - DNA, 122 bp, Homo sapiens
  misc_feature (61)..(62): /note="This region represents a CpG dinucleotide"
  misc_feature (61)..(61): /note="Nucleotide may be methylated to form 5-methylcytosine"
ctactatgacaccttcaaaggagatgactacaatgaggagaatcctactgaacccggcagcgacggcaccatgtcagacaaggaaattactcatgatgtcaaaggtaaccccatgtagagcc

SEQ ID NO: 30370 - DNA, 122 bp, Homo sapiens
  misc_feature (61)..(62): /note="This region represents a CpG dinucleotide"
  misc_feature (61)..(61): /note="Nucleotide may be methylated to form 5-methylcytosine"
ggataatgcctgagccttctggagtccgtcaggtgtgaagtgagcgctggagctgatgctcgctctgcttcagggcggttttcctggtgtgttcgcagtgtgacaggaaaatcaccttgcct

SEQ ID NO: 30371 - DNA, 122 bp, Homo sapiens
  misc_feature (61)..(62): /note="This region represents a CpG dinucleotide"
  misc_feature (61)..(61): /note="Nucleotide may be methylated to form 5-methylcytosine"
gactttatctcggtgagcactgtgccagcttgagtggtgtgtttccgattcggttgaaagcgtatttcctttccgtggaggggcggcggtggtagtgcctgcaagaacactgcagcttgaga

SEQ ID NO: 30372 - DNA, 122 bp, Homo sapiens
  misc_feature (61)..(62): /note="This region represents a CpG dinucleotide"
  misc_feature (61)..(61): /note="Nucleotide may be methylated to form 5-methylcytosine"
ttctcctcttgcaatgttttttatgacctagtcttggaagtcacaccttgtcgcttctaccgtagtctattcattagaaacaagtcattaggccaggtgtggtggctcatgcctgtaatccc

SEQ ID NO: 30373 - DNA, 122 bp, Homo sapiens
  misc_feature (61)..(62): /note="This region represents a CpG dinucleotide"
  misc_feature (61)..(61): /note="Nucleotide may be methylated to form 5-methylcytosine"
ctcctatttattgcacacagctcaattcctgattcattcttgtcatgttggcatcctgtccgcttgcttcactgctttatccaaagggcagacatagccatctttcttcattactcacaaat

SEQ ID NO: 30374 - DNA, 122 bp, Homo sapiens
  misc_feature (61)..(62): /note="This region represents a CpG dinucleotide"
  misc_feature (61)..(61): /note="Nucleotide may be methylated to form 5-methylcytosine"
ggactgtggctttatccctgaggccaggcttcatgtccagatggccatgccagaggttgacgtggcagagaaggagtgtgacacaggccagtggagcgagtggagccagcctgtgtgcttcc

SEQ ID NO: 30375 - DNA, 122 bp, Homo sapiens
  misc_feature (61)..(62): /note="This region represents a CpG dinucleotide"
  misc_feature (61)..(61): /note="Nucleotide may be methylated to form 5-methylcytosine"
tcctacaaattaacttaagacctaaatcaaggtctaacttttgcttgtccaagtgccagccggaagaacagctccgtgaagccagctaaccaaccaaccaaaaccctgctgctgccccaggg

SEQ ID NO: 30376 - DNA, 122 bp, Homo sapiens
  misc_feature (61)..(62): /note="This region represents a CpG dinucleotide"
  misc_feature (61)..(61): /note="Nucleotide may be methylated to form 5-methylcytosine"
ttactcctctcaaccaagcaatcaaacttagtatcacaaataatgggactgcacagtgtacgtctcctaatgggaggcatataaaatatattaaatcacttattaggtattcttgtccaaaa

SEQ ID NO: 30377 - DNA, 122 bp, Homo sapiens
  misc_feature (61)..(62): /note="This region represents a CpG dinucleotide"
  misc_feature (61)..(61): /note="Nucleotide may be methylated to form 5-methylcytosine"
tctggggctgggactgggacagtgacaatgactgggatagtgctgtgctggccctcctggcgctggctgtggtggctgccacagcgctggccttacactggtttggctccgggcacgatcaa

SEQ ID NO: 30378 - DNA, 122 bp, Homo sapiens
  misc_feature (61)..(62): /note="This region represents a CpG dinucleotide"
  misc_feature (61)..(61): /note="Nucleotide may be methylated to form 5-methylcytosine"
cctcgacagcctagcactggggccagattatcgagaggacatctcctgggaaaacaggcccgagctccttgggggcaggcagggctctggattttattatcttcttatcttcagtattgtgc

SEQ ID NO: 30379 - DNA, 122 bp, Homo sapiens
  misc_feature (61)..(62): /note="This region represents a CpG dinucleotide"
  misc_feature (61)..(61): /note="Nucleotide may be methylated to form 5-methylcytosine"
tctttctcaatagtttccaaaaaatctcaggcctgagtcttattggccacggttgggacacgtgccatccccagagccagggataaggagtgagtcccagccagatcgaggtgttaatagcc

SEQ ID NO: 30380 - DNA, 122 bp, Homo sapiens
  misc_feature (61)..(62): /note="This region represents a CpG dinucleotide"
  misc_feature (61)..(61): /note="Nucleotide may be methylated to form 5-methylcytosine"
ctgtgaggaagttagcagccttccttctgacctgactgcttccgcttctggtggtggcagcgctgtcaagcctcattactggaaagttcatcttgttaaatttccacttagagcaggggatg

SEQ ID NO: 30381 - DNA, 122 bp, Homo sapiens
  misc_feature (61)..(62): /note="This region represents a CpG dinucleotide"
  misc_feature (61)..(61): /note="Nucleotide may be methylated to form 5-methylcytosine"
acctgctgtaatttcgctgtggttcgtgaggacgcgtcctgggctgccctgagaagcctacgtctccccttcgaggcccgggaagacctccaaccccgctgacaatgctgggccctcagcca

SEQ ID NO: 30382 - DNA, 122 bp, Homo sapiens
  misc_feature (61)..(62): /note="This region represents a CpG dinucleotide"
  misc_feature (61)..(61): /note="Nucleotide may be methylated to form 5-methylcytosine"
gggggagcacccctatacaatgacatacacccatgtctttctctcatacacacacacacacgcacacttaatgtagtagttgctggcgagagcctttgactctgaaccccacctgaacccgt

SEQ ID NO: 30383 - DNA, 122 bp, Homo sapiens
  misc_feature (61)..(62): /note="This region represents a CpG dinucleotide"
  misc_feature (61)..(61): /note="Nucleotide may be methylated to form 5-methylcytosine"
gtagtggaggagactgacacagtgaataaaacaatccaaaacctgaaagctggctccagccgaggcctgatgatgtaaccatcctgtccccaaatcactggaacaaactccaagcacaacta

SEQ ID NO: 30384 - DNA, 122 bp, Homo sapiens
  misc_feature (61)..(62): /note="This region represents a CpG dinucleotide"
  misc_feature (61)..(61): /note="Nucleotide may be methylated to form 5-methylcytosine"
aatttttctgcctatctttaatatgatacatgagatttgcttttaaaaaaacaagcggggcggagagaggaaatggaagattatagttggctgaatcaaaattggcaatccattcattgtta

SEQ ID NO: 30385 - DNA, 122 bp, Homo sapiens
  misc_feature (61)..(62): /note="This region represents a CpG dinucleotide"
  misc_feature (61)..(61): /note="Nucleotide may be methylated to form 5-methylcytosine"
tggcaaataagatttcactgtcttaacttccctgcacataataattcactcctttccttgcgctccagccaaactccaggtggttttgctatcacatttaaaacactgtctaagttactgca

SEQ ID NO: 30386 - DNA, 122 bp, Homo sapiens
  misc_feature (61)..(62): /note="This region represents a CpG dinucleotide"
  misc_feature (61)..(61): /note="Nucleotide may be methylated to form 5-methylcytosine"
acccagtagggctgcctgaggcagagcgcgacggaaccgagcctacaggccacagcggtacgagaccggcccaatccaaccccgacccctgcaaacttcacgccagccctccagaaaactta

SEQ ID NO: 30387 - DNA, 122 bp, Homo sapiens
  misc_feature (61)..(62): /note="This region represents a CpG dinucleotide"
  misc_feature (61)..(61): /note="Nucleotide may be methylated to form 5-methylcytosine"
acttcaataagaacagaaataaagctgtttttcacttccttttcaaactccagttcatctcgtaaagccaactgctgcaccagctcctcagagtactccttaatggcagtctcaatttcttc

SEQ ID NO: 30388 - DNA, 122 bp, Homo sapiens
  misc_feature (61)..(62): /note="This region represents a CpG dinucleotide"
  misc_feature (61)..(61): /note="Nucleotide may be methylated to form 5-methylcytosine"
tgtgcacttaaccaggttttttttctaattttatttcaggttataccttattggtgtggacgttgtctaaatttcggtagccatggcacaagaatatagtaagtactatgccatacttccta

SEQ ID NO: 30389 - DNA, 122 bp, Homo sapiens
  misc_feature (61)..(62): /note="This region represents a CpG dinucleotide"
  misc_feature (61)..(61): /note="Nucleotide may be methylated to form 5-methylcytosine"
tcaggacctcacccctccccaaagccctcttcaagccggtgactcacagatgtacaggggcgagttgctgggctctgagaagtcatccacataggagatcccaaatggctgaataggcactg

SEQ ID NO: 30390 - DNA, 122 bp, Homo sapiens
  misc_feature (61)..(62): /note="This region represents a CpG dinucleotide"
  misc_feature (61)..(61): /note="Nucleotide may be methylated to form 5-methylcytosine"
atgttacatcagaaatattgactcactaagaagagactgcaggccgtgtgtggtgactcacgtaatccccagcactttgggaggctgaggcggatgggtcacttgagtaaggagttcgagac

SEQ ID NO: 30391 - DNA, 122 bp, Homo sapiens
  misc_feature (61)..(62): /note="This region represents a CpG dinucleotide"
  misc_feature (61)..(61): /note="Nucleotide may be methylated to form 5-methylcytosine"
gacttacctggggataagctgagctgggggcaggggtggagggtggagaagagcccatcccgtaggtgctccaacctgtttggctgtttggtctagcaagcacagagcaggtgagtgatgca

SEQ ID NO: 30392 - DNA, 122 bp, Homo sapiens
  misc_feature (61)..(62): /note="This region represents a CpG dinucleotide"
  misc_feature (61)..(61): /note="Nucleotide may be methylated to form 5-methylcytosine"
ctaggtgctttagatttggacctggctgtgtccctactttattaaaattctcatgtggcgcgcgctgtcttctctcttctctctctctctctctcacacacacacgcacatacacacacagc

SEQ ID NO: 30393 - DNA, 122 bp, Homo sapiens
  misc_feature (61)..(62): /note="This region represents a CpG dinucleotide"
  misc_feature (61)..(61): /note="Nucleotide may be methylated to form 5-methylcytosine"
cacacccacaaatctttctgagataatctcttctctatctggaagctcactgagtacttccgtgggtcagtgcccttgatattcttagaagacctgtggttttgcttccttgaaaagaccta

SEQ ID NO: 30394 - DNA, 122 bp, Homo sapiens
  misc_feature (61)..(62): /note="This region represents a CpG dinucleotide"
  misc_feature (61)..(61): /note="Nucleotide may be methylated to form 5-methylcytosine"
ttctggccctgaggtgagtgtgctggagccctgttagaggccaaggtcacatagttgcagcgtgagcctcgggtttgtctcgtggcctcagactacacctcacactagtcacaccgctggtg

SEQ ID NO: 30395 - DNA, 122 bp, Homo sapiens
  misc_feature (61)..(62): /note="This region represents a CpG dinucleotide"
  misc_feature (61)..(61): /note="Nucleotide may be methylated to form 5-methylcytosine"
aagaggaaatcagatggagaggaccgttaggagtgttggttgggttggaggcacatattacgcatttgaactagtgtttgactgagtttttgaggtggttctaaatgacttccaggtggcct

SEQ ID NO: 30396 - DNA, 122 bp, Homo sapiens
  misc_feature (61)..(62): /note="This region represents a CpG dinucleotide"
  misc_feature (61)..(61): /note="Nucleotide may be methylated to form 5-methylcytosine"
catcctgatacaatccatttgatgtctctgggtccaggagggagtaggcagcctatgaaacgctgagatgctgtgattttatgacccagtctgggccctgcttccatcccctccccggggat

SEQ ID NO: 30397 - DNA, 122 bp, Homo sapiens
  misc_feature (61)..(62): /note="This region represents a CpG dinucleotide"
  misc_feature (61)..(61): /note="Nucleotide may be methylated to form 5-methylcytosine"
caaataaccggcagttgagggagccttggtaagggggaaatagggactcacatcactttacgtttcaagatctgcagggaagtgctaggtggcaggagtcctctgaacttcccagtgcacct

SEQ ID NO: 30398 - DNA, 122 bp, Homo sapiens
  misc_feature (61)..(62): /note="This region represents a CpG dinucleotide"
  misc_feature (61)..(61): /note="Nucleotide may be methylated to form 5-methylcytosine"
cagcatgtgacaagactaatgactccctgcctgaaaaatcttcccttttcattcatttggcgtttagcctaccatcccctcttctttgtactctgacctcagtagggacgactttgctggaa

SEQ ID NO: 30399 - DNA, 122 bp, Homo sapiens
  misc_feature (61)..(62): /note="This region represents a CpG dinucleotide"
  misc_feature (61)..(61): /note="Nucleotide may be methylated to form 5-methylcytosine"
tgtacgttttgtgaaaactcaaacatgggcctcaccttttggttttatggatgtgaaccacgtccctgcagtcatcagagtggaatgctgctagcggctggccctaggctgagtgtttgacc

SEQ ID NO: 30400 - DNA, 122 bp, Homo sapiens
  misc_feature (61)..(62): /note="This region represents a CpG dinucleotide"
  misc_feature (61)..(61): /note="Nucleotide may be methylated to form 5-methylcytosine"
aagaatatatgacagaggctgtatgcagtgactcaacaccattgcagtcccaccccagagcgtggggagagccaggctgcagggtgcaaagccccaggccacttcctgctgactgtggctgc

SEQ ID NO: 30401 - DNA, 122 bp, Homo sapiens
  misc_feature (61)..(62): /note="This region represents a CpG dinucleotide"
  misc_feature (61)..(61): /note="Nucleotide may be methylated to form 5-methylcytosine"
agcatgaaggctgaagaatcagagcttcacaacacagctggcttgcattgttcctctcctcgcccacagtggggaaactcatctgccctcaggccgatgtacaatcagtagcttctttacct

SEQ ID NO: 30402 - DNA, 122 bp, Homo sapiens
  misc_feature (61)..(62): /note="This region represents a CpG dinucleotide"
  misc_feature (61)..(61): /note="Nucleotide may be methylated to form 5-methylcytosine"
tgaatggggtacgatattctatcgcaataacaacagctgacatttattgactagttcctacgttagtccataaaggacatgattaatgtcatttaaccctcataacaactctatggagttga

SEQ ID NO: 30403 - DNA, 122 bp, Homo sapiens
  misc_feature (61)..(62): /note="This region represents a CpG dinucleotide"
  misc_feature (61)..(61): /note="Nucleotide may be methylated to form 5-methylcytosine"
gggtttagcgtgggtgcatcctagctgtgggtctgatcgatgatacaacctggtattaaccgctgggcttccaactggtcctgtccccttgaagacttgattctgactggggatagggtggg

SEQ ID NO: 30404 - DNA, 122 bp, Homo sapiens
  misc_feature (61)..(62): /note="This region represents a CpG dinucleotide"
  misc_feature (61)..(61): /note="Nucleotide may be methylated to form 5-methylcytosine"
ctgctctctcctctgacagtccgtaattgagcaggtctcgtgggatacctgaaatgcacccgcttcccggcccatgcaggaggtaaaccgcctctcccaccgcctgcatgcactgctcacac

SEQ ID NO: 30405 - DNA, 122 bp, Homo sapiens
  misc_feature (61)..(62): /note="This region represents a CpG dinucleotide"
  misc_feature (61)..(61): /note="Nucleotide may be methylated to form 5-methylcytosine"
gtaaagatatagagactttgagtagcacagttaataagctgtattgtacacaaaacagggcgtgttaactattttggcattacagatgttaggcaaggtcagaggaaaagcttagataagaa

SEQ ID NO: 30406 - DNA, 122 bp, Homo sapiens
  misc_feature (61)..(62): /note="This region represents a CpG dinucleotide"
  misc_feature (61)..(61): /note="Nucleotide may be methylated to form 5-methylcytosine"
attccagatgaagaaacatggtctcagagaagttaagtttattttgctccttgctgttctcgaaagatttgaggtatttaacaaaagtgcttatgattcaaaaggaaaacaatacaggcttg

SEQ ID NO: 30407 - DNA, 122 bp, Homo sapiens
  misc_feature (61)..(62): /note="This region represents a CpG dinucleotide"
  misc_feature (61)..(61): /note="Nucleotide may be methylated to form 5-methylcytosine"
gcattgtctgttctccatagacaatagggcagactgcttcctccttgggactggtagttacgtttatgtttctgacaaccagctggccactgaagaagcgtggagccaacagctgcaaggga

SEQ ID NO: 30408 - DNA, 122 bp, Homo sapiens
  misc_feature (61)..(62): /note="This region represents a CpG dinucleotide"
  misc_feature (61)..(61): /note="Nucleotide may be methylated to form 5-methylcytosine"
cttgatttacagtctagtgaggatttagtcaagttaacaggcaataccttgtaagtgctacgatgtggggcgtgcacagaggactgagggaacacataagattcacatgtcataggttccag

SEQ ID NO: 30409 - DNA, 122 bp, Homo sapiens
  misc_feature (61)..(62): /note="This region represents a CpG dinucleotide"
  misc_feature (61)..(61): /note="Nucleotide may be methylated to form 5-methylcytosine"
tttagccacatagttatctcgatatcccatttatcctgggctgacactttgtcattagcacgctcctgctatacaatggctggttcacagacagggaaaagaggttgcattttttcagcact

SEQ ID NO: 30410 - DNA, 122 bp, Homo sapiens
  misc_feature (61)..(62): /note="This region represents a CpG dinucleotide"
  misc_feature (61)..(61): /note="Nucleotide may be methylated to form 5-methylcytosine"
cagcttgtttattactcaggtacggagctggactatcttactgagcctgttctcctggggcggcctcggctgctgctcctctgagggctcggccctgggtggggtgcaatcacctttggtgg

SEQ ID NO: 30411 - DNA, 122 bp, Homo sapiens
  misc_feature (61)..(62): /note="This region represents a CpG dinucleotide"
  misc_feature (61)..(61): /note="Nucleotide may be methylated to form 5-methylcytosine"
caactggttaggcaagttgccagtgtcaccaatgacggacagttgacttggctaatttgccgtttgctattcatgttacaggtattatatgatgcttctggggttcttgagaaaaatagaga

SEQ ID NO: 30412 - DNA, 122 bp, Homo sapiens
  misc_feature (61)..(62): /note="This region represents a CpG dinucleotide"
  misc_feature (61)..(61): /note="Nucleotide may be methylated to form 5-methylcytosine"
tactttgtgtctaacaaaaagaatcctatggatgactgactacacagctgcaattggtaacgaagtaatacaataggtgaaattggctcttgcagaacagaaatagagtttcagtttactat

SEQ ID NO: 30413 - DNA, 122 bp, Homo sapiens
  misc_feature (61)..(62): /note="This region represents a CpG dinucleotide"
  misc_feature (61)..(61): /note="Nucleotide may be methylated to form 5-methylcytosine"
ctcaggtgatccacccacctcggcctcccaaaatgctgggattacaggcgtaagctaccgcgcccagcccatgtttacattataaggctaagaaaaatactgttttctagtgacatttagtt

SEQ ID NO: 30414 - DNA, 122 bp, Homo sapiens
  misc_feature (61)..(62): /note="This region represents a CpG dinucleotide"
  misc_feature (61)..(61): /note="Nucleotide may be methylated to form 5-methylcytosine"
ctgtatcctcatttcagcttcctgtggcccatttgtatgtttcatcattttttccagcaacggtcgacttgtgagctgcctagcatgtgactataaaggtcccacactgacgcctacagctc

SEQ ID NO: 30415 - DNA, 122 bp, Homo sapiens
  misc_feature (61)..(62): /note="This region represents a CpG dinucleotide"
  misc_feature (61)..(61): /note="Nucleotide may be methylated to form 5-methylcytosine"
ctgggttaatgacgccacctggtggctggtgtcggggtgggcgagtcccctgcatttttgcgcttcagttctagaatcaggagtccgtcagcaaacaaagaggaaatgtataatcagggcca

SEQ ID NO: 30416 - DNA, 122 bp, Homo sapiens
  misc_feature (61)..(62): /note="This region represents a CpG dinucleotide"
  misc_feature (61)..(61): /note="Nucleotide may be methylated to form 5-methylcytosine"
atccatggggctttagagactttgccaaagcagtgcgactgctcccaggttgttgtcagccgtcaagagtgagtgcacctccctgggcagacttctgctgccccagtgcccaggaataggca

SEQ ID NO: 30417 - DNA, 122 bp, Homo sapiens
  misc_feature (61)..(62): /note="This region represents a CpG dinucleotide"
  misc_feature (61)..(61): /note="Nucleotide may be methylated to form 5-methylcytosine"
gacaggaaatataacagcacacttcttgacactgtgataaacaatactgttttgagtccccgtgtaaacactattcattgatttacaaagttacagacaaagatgatggaattacaattaga

SEQ ID NO: 30418 - DNA, 122 bp, Homo sapiens
  misc_feature (61)..(62): /note="This region represents a CpG dinucleotide"
  misc_feature (61)..(61): /note="Nucleotide may be methylated to form 5-methylcytosine"
acaggtgagcaggtccgggtgagcaggttcaacaggagggaaccccaggatgggatgcatcgccacagaccaaatatctggagggtgtcccggagaacctgtgcttttttggaattcccttg

SEQ ID NO: 30419 - DNA, 122 bp, Homo sapiens
  misc_feature (61)..(62): /note="This region represents a CpG dinucleotide"
  misc_feature (61)..(61): /note="Nucleotide may be methylated to form 5-methylcytosine"
gggtttctatatcaaagacaagagtcatgagcctggaagggaataaataagggacaatgacgcaaacattagcagtattggtgagtcattaccatcctccaggctggccagtccaaggagag

SEQ ID NO: 30420 - DNA, 122 bp, Homo sapiens
  misc_feature (61)..(62): /note="This region represents a CpG dinucleotide"
  misc_feature (61)..(61): /note="Nucleotide may be methylated to form 5-methylcytosine"
ttgccctttggaacaactccttcaggaagctgaggcctgtgatttggtaacagacctgctcggtaggccatcttcacacacccctcaatcttgcagttctcttcccgtcataggcctgtgat

SEQ ID NO: 30421 - DNA, 122 bp, Homo sapiens
  misc_feature (61)..(62): /note="This region represents a CpG dinucleotide"
  misc_feature (61)..(61): /note="Nucleotide may be methylated to form 5-methylcytosine"
ctgacttgctgtttctgttgctgtcatttcagtctcagtgtggacattgttttaacttctcgtgttgagtaattgccatttaaaatattttcttagttgttgttttcacatcttcatttaga

SEQ ID NO: 30422 - DNA, 122 bp, Homo sapiens
  misc_feature (61)..(62): /note="This region represents a CpG dinucleotide"
  misc_feature (61)..(61): /note="Nucleotide may be methylated to form 5-methylcytosine"
gcatttaacacatcctattgtgattgattatatgtttgactcctcaccagacaagatctccgttaattcagtcattcgttcacacattcattcagcgcatactgagccttttctgtgtcagg

SEQ ID NO: 30423 - DNA, 122 bp, Homo sapiens
  misc_feature (61)..(62): /note="This region represents a CpG dinucleotide"
  misc_feature (61)..(61): /note="Nucleotide may be methylated to form 5-methylcytosine"
aagagcagaagcaggagacagtggcctttctgagccttacacaagggctctctgggatgccgctcatctggactgtttgtcttcacagaaagccaatgatggttttcagggactacagctga

SEQ ID NO: 30424 - DNA, 122 bp, Homo sapiens
  misc_feature (61)..(62): /note="This region represents a CpG dinucleotide"
  misc_feature (61)..(61): /note="Nucleotide may be methylated to form 5-methylcytosine"
cacgcccggcacaagccatctcctgcactgccaaagttatgggattacaagtgtgacttacggcttctgcattttgtgttgtagtaagagatgcttttacattctgaggtttttaaataatt

SEQ ID NO: 30425 - DNA, 122 bp, Homo sapiens
  misc_feature (61)..(62): /note="This region represents a CpG dinucleotide"
  misc_feature (61)..(61): /note="Nucleotide may be methylated to form 5-methylcytosine"
tgttgctattttttttttttaatctccagtgatctatgatcatgcctcattgaacctgaccgatcagcagcctttgatccagctaattattacctgcttttgaagcactgtcttcacagtac

SEQ ID NO: 30426 - DNA, 122 bp, Homo sapiens
  misc_feature (61)..(62): /note="This region represents a CpG dinucleotide"
  misc_feature (61)..(61): /note="Nucleotide may be methylated to form 5-methylcytosine"
aagcaaacagattagcaaatccagggagacatccaccctgcctgggcagcttctataaaacgaaacccagcgccttgagaaacaaagtgagctgagtcaatcattcctgctttatatttaaa

SEQ ID NO: 30427 - DNA, 122 bp, Homo sapiens
  misc_feature (61)..(62): /note="This region represents a CpG dinucleotide"
  misc_feature (61)..(61): /note="Nucleotide may be methylated to form 5-methylcytosine"
acaatgaggcaggaggcatgggaaattctgctcggttttctctaaatcactgggatttggcggcctgctgtcctcagacacacccagactgtgactctaattgccctggtggtgtaaagtaa

SEQ ID NO: 30428 - DNA, 122 bp, Homo sapiens
  misc_feature (61)..(62): /note="This region represents a CpG dinucleotide"
  misc_feature (61)..(61): /note="Nucleotide may be methylated to form 5-methylcytosine"
aagttgaaaatactcccaggaaccttttctcctaacctaaccactgggcatttttgaggacgattcaacagtagaagggagggaccttgaggaaggtgcctgtcacatcatgatgcagacag

SEQ ID NO: 30429 - DNA, 122 bp, Homo sapiens
  misc_feature (61)..(62): /note="This region represents a CpG dinucleotide"
  misc_feature (61)..(61): /note="Nucleotide may be methylated to form 5-methylcytosine"
cctgaccataaccaccagtaaagtcaatggccaatctgcctttagttggtccatttgatccgtataatcatgtaaattaatgctacttttctccttcgtgtaataacagaacactgctgatc

SEQ ID NO: 30430 - DNA, 122 bp, Homo sapiens
  misc_feature (61)..(62): /note="This region represents a CpG dinucleotide"
  misc_feature (61)..(61): /note="Nucleotide may be methylated to form 5-methylcytosine"
gtcacattcctccccaacttccttgactgcagtcattttagtttccagattaaatggaaacgtaaggattcatctgatcaaactgacagagtcatgagagcctccagagaggtcctctagac

SEQ ID NO: 30431 - DNA, 122 bp, Homo sapiens
  misc_feature (61)..(62): /note="This region represents a CpG dinucleotide"
  misc_feature (61)..(61): /note="Nucleotide may be methylated to form 5-methylcytosine"
gggacggtcattatcagctttctggacacacagacagagacagacaggatggacttcctccggctatacctccctgggctgcaccaggccttgaggggggcactggtgagaagggcagacag

SEQ ID NO: 30432 - DNA, 122 bp, Homo sapiens
  misc_feature (61)..(62): /note="This region represents a CpG dinucleotide"
  misc_feature (61)..(61): /note="Nucleotide may be methylated to form 5-methylcytosine"
ccctcctaccgaatatagtgcgagcctcaatggtgggtctgtcctggggcctgggcagggcgccgggtctccggactcaggcaagcaccttctcctaaccgcaagcgaagcgaggaggagcg

SEQ ID NO: 30433 - DNA, 122 bp, Homo sapiens
  misc_feature (61)..(62): /note="This region represents a CpG dinucleotide"
  misc_feature (61)..(61): /note="Nucleotide may be methylated to form 5-methylcytosine"
atttcacaccttaaatgctaaaaacttctaacttgctttaggaattgggggcagtgaacacgcaacccgaatccctctcacttatccatcgtgttgaggagcatttcacaggtcacgccttc

SEQ ID NO: 30434 - DNA, 122 bp, Homo sapiens
  misc_feature (61)..(62): /note="This region represents a CpG dinucleotide"
  misc_feature (61)..(61): /note="Nucleotide may be methylated to form 5-methylcytosine"
ttattcaagaaattgtgcagaataggtgtcctcttcagtaagtgccatgctaggggcatacgactgtgaacaagacaagcagggcgtctgccttactgagcttccagaatgactaataagca

SEQ ID NO: 30435 - DNA, 122 bp, Homo sapiens
  misc_feature (61)..(62): /note="This region represents a CpG dinucleotide"
  misc_feature (61)..(61): /note="Nucleotide may be methylated to form 5-methylcytosine"
gactgtatcaggagatgaccttttatgcagaagcatcactgtaagttaaaagaagtgtgccgccccataaaagcagggcaacaaatagtttaacatgttaaccattgttgatgaaagcatta

SEQ ID NO: 30436 - DNA, 122 bp, Homo sapiens
  misc_feature (61)..(62): /note="This region represents a CpG dinucleotide"
  misc_feature (61)..(61): /note="Nucleotide may be methylated to form 5-methylcytosine"
caaacaggagctcctaagaggaaagacagaaagacacagagaactggacaaacagagaggcggggcctggggggagtgtcatctaggaagcatttactgagctcctgagccaggctctggga

SEQ ID NO: 30437 - DNA, 122 bp, Homo sapiens
  misc_feature (61)..(62): /note="This region represents a CpG dinucleotide"
  misc_feature (61)..(61): /note="Nucleotide may be methylated to form 5-methylcytosine"
aaggatctggaaaaggcagtttcctgagcccatgttattcccccagccatccaggccctgcgctctgtgctcaatgccttctctgtggtgaaccggaaaaacatgtttgtttaccaggagcg

SEQ ID NO: 30438 - DNA, 122 bp, Homo sapiens
  misc_feature (61)..(62): /note="This region represents a CpG dinucleotide"
  misc_feature (61)..(61): /note="Nucleotide may be methylated to form 5-methylcytosine"
tacatctaatgtgtacattctcatatatattataattataatggaattataaatagtccacgataatataatatatgcatgacgtttccaggcatcaagaagatttacagctataaagccag

SEQ ID NO: 30439 - DNA, 122 bp, Homo sapiens
  misc_feature (61)..(62): /note="This region represents a CpG dinucleotide"
  misc_feature (61)..(61): /note="Nucleotide may be methylated to form 5-methylcytosine"
cctctctcccaggtctgaaacacaatagagacttttaaagggacacttctgtgtattctacgactgacccatgaaattcactgggaaggagcctgcaagagagctcagactcttttcacttc

SEQ ID NO: 30440 - DNA, 122 bp, Homo sapiens
  misc_feature (61)..(62): /note="This region represents a CpG dinucleotide"
  misc_feature (61)..(61): /note="Nucleotide may be methylated to form 5-methylcytosine"
tcaatcttgatttttgaaaaggtccaaggatgattacgacgtgcgtaggttgcgaaccatcgaaaagcacccaccaatgtgtcaacctggcaactcaggaaaaagccaataaggagcctgac

SEQ ID NO: 30441 - DNA, 122 bp, Homo sapiens
  misc_feature (61)..(62): /note="This region represents a CpG dinucleotide"
  misc_feature (61)..(61): /note="Nucleotide may be methylated to form 5-methylcytosine"
ataagaaggaataaagatgaggagagaaagaaaaggggtttgtgcccaaggctagaataacgacagcagtggaatacaggcaagtctgtctgcactttagtgatagcccaggggctgggcta

SEQ ID NO: 30442 - DNA, 122 bp, Homo sapiens
  misc_feature (61)..(62): /note="This region represents a CpG dinucleotide"
  misc_feature (61)..(61): /note="Nucleotide may be methylated to form 5-methylcytosine"
ttctgctaggttcatttgcatttctgattctgtttcttcatctgtaaacaggctgctgttcgtacctgcctcatggttttcttggggaggatcaatgaggtagaacctgcaaagggcttagc

SEQ ID NO: 30443 - DNA, 122 bp, Homo sapiens
  misc_feature (61)..(62): /note="This region represents a CpG dinucleotide"
  misc_feature (61)..(61): /note="Nucleotide may be methylated to form 5-methylcytosine"
gccaccagagccacggggccgtgtccctgaccatgtgtaagctcacctcagggaagcatccgaactgcaggtacaaagagaagcgacagaacaagtcttacgtagtggcctgtaagcctccc

SEQ ID NO: 30444 - DNA, 122 bp, Homo sapiens
  misc_feature (61)..(62): /note="This region represents a CpG dinucleotide"
  misc_feature (61)..(61): /note="Nucleotide may be methylated to form 5-methylcytosine"
cgtccctctcagtggcgccgctgagtgaggcggaagggccggcgggtggcgggtggcgggcggcgggcagtggccgggcgctgaggccagaggggcggagcggccgagctgctggggcgggg

SEQ ID NO: 30445 - DNA, 122 bp, Homo sapiens
  misc_feature (61)..(62): /note="This region represents a CpG dinucleotide"
  misc_feature (61)..(61): /note="Nucleotide may be methylated to form 5-methylcytosine"
tgttttctttgatgcaggaagggttgtatttgaatggttctattaagttgatggattttacgctatcagtaagattctccagtgctggatgaaacgtgaaaaagtatatatagcaccgcttc

SEQ ID NO: 30446 - DNA, 122 bp, Homo sapiens
  misc_feature (61)..(62): /note="This region represents a CpG dinucleotide"
  misc_feature (61)..(61): /note="Nucleotide may be methylated to form 5-methylcytosine"
cagacagcctgaggcacagctgattctctccacatcaggcagtgccgccagatggacagacggtgaagtgtaacaagaagcgaactcttaagttttgggtcctgacaacaagccaagaggct

SEQ ID NO: 30447 - DNA, 122 bp, Homo sapiens
  misc_feature (61)..(62): /note="This region represents a CpG dinucleotide"
  misc_feature (61)..(61): /note="Nucleotide may be methylated to form 5-methylcytosine"
tgcttgtgcctacaagaatacatgctgtacgattccctttggatccagcacaagaaaaggcgtaactaatctacacccttcgaagccgggacagggaagagaaagaggaggcaggcaggaag

SEQ ID NO: 30448 - DNA, 122 bp, Homo sapiens
  misc_feature (61)..(62): /note="This region represents a CpG dinucleotide"
  misc_feature (61)..(61): /note="Nucleotide may be methylated to form 5-methylcytosine"
acatacggctgtgcaagctgcatactggacaagggtgctgtatccgagacattattcccacggtagctgtcatagatttgcatgtttattgtgttgattttctggaggacaccaggaaagta

SEQ ID NO: 30449 - DNA, 122 bp, Homo sapiens
  misc_feature (61)..(62): /note="This region represents a CpG dinucleotide"
  misc_feature (61)..(61): /note="Nucleotide may be methylated to form 5-methylcytosine"
agagatctagtaacaatgaaaagagatgtgaccctgttaagatttatgtaaaaatgtatgcgcatgtgtgtgttggctctaggataaagtgcaaatgttccatggtgtaaaaggaccttcac

SEQ ID NO: 30450 - DNA, 122 bp, Homo sapiens
  misc_feature (61)..(62): /note="This region represents a CpG dinucleotide"
  misc_feature (61)..(61): /note="Nucleotide may be methylated to form 5-methylcytosine"
aggctggaagtcccagatcagggccccagcatggttggtttctggttccttgtgtcctgtcgcatgctgctgacctcatgacctaatcacctcccaaaggcccacctcctaataccatcacg

SEQ ID NO: 30451 - DNA, 122 bp, Homo sapiens
  misc_feature (61)..(62): /note="This region represents a CpG dinucleotide"
  misc_feature (61)..(61): /note="Nucleotide may be methylated to form 5-methylcytosine"
cttcctctctctccttccggactgagattcaagccgagatgccttgtggggcaaaggagccggcggtgaggttccctccttcagttgcttcagcaggcacatagctccttctgatcttggac

SEQ ID NO: 30452 - DNA, 122 bp, Homo sapiens
  misc_feature (61)..(62): /note="This region represents a CpG dinucleotide"
  misc_feature (61)..(61): /note="Nucleotide may be methylated to form 5-methylcytosine"
ccagcttgggtgacagagcaaggcacttctcaaaaacaaagacaaaacagctgagtctctcgttaaggggagactacaacttctggtaccagcagtttttattttcttcttgtaaatgactt

SEQ ID NO: 30453 - DNA, 122 bp, Homo sapiens
  misc_feature (61)..(62): /note="This region represents a CpG dinucleotide"
  misc_feature (61)..(61): /note="Nucleotide may be methylated to form 5-methylcytosine"
caggacataaaacaggaacgtgtaggagcttcctgttgaaaatgggactgatttatgttgcgccaccctaccttccagtggagtaatctgagccagcagagaagaaacttccctgctggttg

SEQ ID NO: 30454 - DNA, 122 bp, Homo sapiens
  misc_feature (61)..(62): /note="This region represents a CpG dinucleotide"
  misc_feature (61)..(61): /note="Nucleotide may be methylated to form 5-methylcytosine"
ttgtaatattgtgcaattgtcttctccttgtttccttctaatctttttcttatgtgtgtacgttttacttttacaattataatatgcatatgttgtgtccaatgttttatttactaccattt

SEQ ID NO: 30455 - DNA, 122 bp, Homo sapiens
  misc_feature (61)..(62): /note="This region represents a CpG dinucleotide"
  misc_feature (61)..(61): /note="Nucleotide may be methylated to form 5-methylcytosine"
ttcataaagtaaatatctttttcattgctctccagcacatgctaagaatttagcttccaccgccttaagtaaacactctgcgataccagtcctaaaaaagtcactgtggcaggggctgtggt

SEQ ID NO: 30456 - DNA, 122 bp, Homo sapiens
  misc_feature (61)..(62): /note="This region represents a CpG dinucleotide"
  misc_feature (61)..(61): /note="Nucleotide may be methylated to form 5-methylcytosine"
actacagtgtggtggtgaagagcgtggtttcagtcccaggcagacccagtcccagttcctcggctgccactcactggccacagaatgcaagcaagtgacttaatctctccggcctccagttt

SEQ ID NO: 30457 - DNA, 122 bp, Homo sapiens
  misc_feature (61)..(62): /note="This region represents a CpG dinucleotide"
  misc_feature (61)..(61): /note="Nucleotide may be methylated to form 5-methylcytosine"
gtgcccggagaacaagaaagggggcttaggaacggagcatatgataaccacaattaaacacgcaatagacgggttggaagataaagactaggaatctctcagcagaataaacaacagtggaa

SEQ ID NO: 30458 - DNA, 122 bp, Homo sapiens
  misc_feature (61)..(62): /note="This region represents a CpG dinucleotide"
  misc_feature (61)..(61): /note="Nucleotide may be methylated to form 5-methylcytosine"
gaccacatcattacatgattgcaacatcctgaacaaactcattctgcagcaccattgccacgtccacagaagcaagcattgcagccctgtgtgtagaccatactgcactgtgatgtcctgag

SEQ ID NO: 30459 - DNA, 122 bp, Homo sapiens
  misc_feature (61)..(62): /note="This region represents a CpG dinucleotide"
  misc_feature (61)..(61): /note="Nucleotide may be methylated to form 5-methylcytosine"
gttagtgcagcgaattcctgtataccctttatatactttctcttgcttgtaaatgtcttacgtaattatggtatatttaaaatgaagaaattaacgttggtacaatactgttaactacagac

SEQ ID NO: 30460 - DNA, 122 bp, Homo sapiens
  misc_feature (61)..(62): /note="This region represents a CpG dinucleotide"
  misc_feature (61)..(61): /note="Nucleotide may be methylated to form 5-methylcytosine"
cacacacctccctgcagcctggcactggaaactgctgagccatgcagggcagcctggtggcggctaggacacttctgcagaggacctggagttgggctgctcccggggctcccatctcttgc

SEQ ID NO: 30461 - DNA, 122 bp, Homo sapiens
  misc_feature (61)..(62): /note="This region represents a CpG dinucleotide"
  misc_feature (61)..(61): /note="Nucleotide may be methylated to form 5-methylcytosine"
tccacagtctggcttccagagtgacttcattgttctaaattttattccttactagagccgcgtggggaggccattgctattttgctgttatgtggcttgtgtccctgcagcctcttccaatt

SEQ ID NO: 30462 - DNA, 122 bp, Homo sapiens
  misc_feature (61)..(62): /note="This region represents a CpG dinucleotide"
  misc_feature (61)..(61): /note="Nucleotide may be methylated to form 5-methylcytosine"
gattagattgaggttatgcagtcttagccagatcccaactgacttcaattctgactttgacgttcagcaattttagaacgaggtcccagcattcaatcataccttcccctggcaggtgatcc

SEQ ID NO: 30463 - DNA, 122 bp, Homo sapiens
  misc_feature (61)..(62): /note="This region represents a CpG dinucleotide"
  misc_feature (61)..(61): /note="Nucleotide may be methylated to form 5-methylcytosine"
ggagcagagcagaggcagtggccggcttcatgttcatgtgcttgtggaggccccagccctcggcctcggcttttatgctagggaggtcctcccaccctgctcctcagtgactcacggcttct

SEQ ID NO: 30464 - DNA, 122 bp, Homo sapiens
  misc_feature (61)..(62): /note="This region represents a CpG dinucleotide"
  misc_feature (61)..(61): /note="Nucleotide may be methylated to form 5-methylcytosine"
ggtgcgcctggcctctttttacttttttaatgtagctgctagaaaatgtaaaattacatacgtgacttgcattatatgtatggacgatgccaccctaggaagctgacattttccagaaatca

SEQ ID NO: 30465 - DNA, 122 bp, Homo sapiens
  misc_feature (61)..(62): /note="This region represents a CpG dinucleotide"
  misc_feature (61)..(61): /note="Nucleotide may be methylated to form 5-methylcytosine"
taaataaaataagtaaaggaaaataagttgcatgatgtattgcagagatatatcacaccccggcaaatggggaactgaaaccctccagcagaagcacttagcacacttcatttgattcccat

SEQ ID NO: 30466 - DNA, 122 bp, Homo sapiens
  misc_feature (61)..(62): /note="This region represents a CpG dinucleotide"
  misc_feature (61)..(61): /note="Nucleotide may be methylated to form 5-methylcytosine"
aaactcaaagctgatactgtgtgtgtatgttgtcgttccagtgcctcatggcgtgggagtcgattattccactactgcaggagaaacaagaggccaagtaaagttctttcttgggacggaga

SEQ ID NO: 30467 - DNA, 122 bp, Homo sapiens
  misc_feature (61)..(62): /note="This region represents a CpG dinucleotide"
  misc_feature (61)..(61): /note="Nucleotide may be methylated to form 5-methylcytosine"
ctaactgaattctgttgacctattcaaccactaggaagagctacagcttttctctgtggacgttcttcctcccgaggctgtttaggtttctcctcctcccctgtgccttaggtagtgtttct

SEQ ID NO: 30468 - DNA, 122 bp, Homo sapiens
  misc_feature (61)..(62): /note="This region represents a CpG dinucleotide"
  misc_feature (61)..(61): /note="Nucleotide may be methylated to form 5-methylcytosine"
ccagtatcttgcccacattctcctacttattactcttcaattccatttcagagtctgttacgtgaacataattacccttatccctcttgcacaaatctttctttaatctgttggatgactct

SEQ ID NO: 30469 - DNA, 122 bp, Homo sapiens
  misc_feature (61)..(62): /note="This region represents a CpG dinucleotide"
  misc_feature (61)..(61): /note="Nucleotide may be methylated to form 5-methylcytosine"
cctgagacctcagcactgattagtagccctggaggcaaaagtagatgtggagctgagcctcgaaaccccatacaccttgtgcctacagcttggggtgggtggggactgggattttgtcctca

SEQ ID NO: 30470 - DNA, 122 bp, Homo sapiens
  misc_feature (61)..(62): /note="This region represents a CpG dinucleotide"
  misc_feature (61)..(61): /note="Nucleotide may be methylated to form 5-methylcytosine"
aaaaaaaaaaaaaaaaaaaaagtgggttttttttggttttctttttttggtcatacaaaacgtagttgtgaaaggaaaagaaaatgccagccctgtttgacagacattagatttatgatcgt

SEQ ID NO: 30471 - DNA, 122 bp, Homo sapiens
  misc_feature (61)..(62): /note="This region represents a CpG dinucleotide"
  misc_feature (61)..(61): /note="Nucleotide may be methylated to form 5-methylcytosine"
atttccagattgacacccagaccaaccctgacctggtgatcccctaggactgtctctgggcgatgtacacattaactgtgatgaactcagcgggctagattagtctctcgagtaaaccacag

SEQ ID NO: 30472 - DNA, 122 bp, Homo sapiens
  misc_feature (61)..(62): /note="This region represents a CpG dinucleotide"
  misc_feature (61)..(61): /note="Nucleotide may be methylated to form 5-methylcytosine"
ttgagctttttacaattctacaaaaagctaaaccaatatacactagggtataagaagaagcgacagaaattgactcaggagcgtttagtaaactaactgaaggcaatgattatgctttcaat

SEQ ID NO: 30473 - DNA, 122 bp, Homo sapiens
  misc_feature (61)..(62): /note="This region represents a CpG dinucleotide"
  misc_feature (61)..(61): /note="Nucleotide may be methylated to form 5-methylcytosine"
tgggaattagttgccattgtgctgttgggactggtgacagaactcttggattgagaatgccgagatggtgcacggaagattctgtgtgctctttcagaccaggaggaggatgaggaggagga

SEQ ID NO: 30474 - DNA, 122 bp, Homo sapiens
  misc_feature (61)..(62): /note="This region represents a CpG dinucleotide"
  misc_feature (61)..(61): /note="Nucleotide may be methylated to form 5-methylcytosine"
gcagtaacaactcttcacggggacacagacaggtaaccggggcacaggtgtcctgaacaccgcgaggcagccccctcctccgagctccctctctctctcctctctcctgccgtggctccccc

SEQ ID NO: 30475 - DNA, 122 bp, Homo sapiens
  misc_feature (61)..(62): /note="This region represents a CpG dinucleotide"
  misc_feature (61)..(61): /note="Nucleotide may be methylated to form 5-methylcytosine"
ctgggagaagcgtttctgttcgcggaacctgaacttcaggttcggagacgaggaggtggccgtcccccgtcccgcccccaacccgatgagggcgttgtcagccagggggcctgccaggtgtt

SEQ ID NO: 30476 - DNA, 122 bp, Homo sapiens
  misc_feature (61)..(62): /note="This region represents a CpG dinucleotide"
  misc_feature (61)..(61): /note="Nucleotide may be methylated to form 5-methylcytosine"
tgtgcccagtcctttgagtttgacacatgctaggcaggaaaaaggtatgaaaagagtggacgtagaggtgaagggaagatgttaaatcttaagtatttacaagatagtgccttataaatttt

SEQ ID NO: 30477 - DNA, 122 bp, Homo sapiens
  misc_feature (61)..(62): /note="This region represents a CpG dinucleotide"
  misc_feature (61)..(61): /note="Nucleotide may be methylated to form 5-methylcytosine"
acagccttttctttccagtgacacagtgggaggaaagttctcccctgtacacatctatcccgtgctgagaatgtaatccccatgatgaatatcaagtgagtgatacatgctagaatctcaaa

SEQ ID NO: 30478 - DNA, 122 bp, Homo sapiens
  misc_feature (61)..(62): /note="This region represents a CpG dinucleotide"
  misc_feature (61)..(61): /note="Nucleotide may be methylated to form 5-methylcytosine"
agtccttggaaaagccctctgtttctaggagctggggatggcaggagctgaatgtccccccgccaccccaacttctcttctgagactgggatttgtttagactcttcaccaaggaggccagc

SEQ ID NO: 30479 - DNA, 122 bp, Homo sapiens
  misc_feature (61)..(62): /note="This region represents a CpG dinucleotide"
  misc_feature (61)..(61): /note="Nucleotide may be methylated to form 5-methylcytosine"
atcaattattcatgaagaaaactccttactctagccaaattctctctaggatgcatgctacgagccaaatctcacaagccaagagacaagagagctgtcgtgattcatgagatgaatcaatt

SEQ ID NO: 30480 - DNA, 122 bp, Homo sapiens
  misc_feature (61)..(62): /note="This region represents a CpG dinucleotide"
  misc_feature (61)..(61): /note="Nucleotide may be methylated to form 5-methylcytosine"
actcatatcctttttgcctagaatgttcagatcctaggaactgacatctgtcatgtcctccgtagaacttctgtttatgaagtgcatatatgacttgtcatccgatccttttttactcttga

SEQ ID NO: 30481 - DNA, 122 bp, Homo sapiens
  misc_feature (61)..(62): /note="This region represents a CpG dinucleotide"
  misc_feature (61)..(61): /note="Nucleotide may be methylated to form 5-methylcytosine"
actggcttcaggagtgaaggtgcagaccttcgcggtgagtgttacagctcataaaggcggcgcacacccagagagtgagcagcagcaagatttattgcaaacagttaaagaacaaagcttcc

SEQ ID NO: 30482 - DNA, 122 bp, Homo sapiens
  misc_feature (61)..(62): /note="This region represents a CpG dinucleotide"
  misc_feature (61)..(61): /note="Nucleotide may be methylated to form 5-methylcytosine"
gacacacacccacgtgccctgggctttctggattggcctgcagtgactggcagacagtgacggcagaacaccctgtgacatcacccatgccacggggagctcaccgtgtcacctgctctgac

SEQ ID NO: 30483 - DNA, 122 bp, Homo sapiens
  misc_feature (61)..(62): /note="This region represents a CpG dinucleotide"
  misc_feature (61)..(61): /note="Nucleotide may be methylated to form 5-methylcytosine"
ttaatcttcctttggtcaatgccacaaaactaaccacatctatgttaactttcttttctccgccatctgcctcaacaaatgtcatgtccctcatctttctgatggctaatcactccctttgt

SEQ ID NO: 30484 - DNA, 122 bp, Homo sapiens
  misc_feature (61)..(62): /note="This region represents a CpG dinucleotide"
  misc_feature (61)..(61): /note="Nucleotide may be methylated to form 5-methylcytosine"
ctcagttctccattctagaaaccacaacctcaaggcacagtctatatgctgggctcatgtcgtgtgcagctagtctagcttctctgtgtccgtgagcctgtcactgttaaccatgatccacg

SEQ ID NO: 30485 - DNA, 122 bp, Homo sapiens
  misc_feature (61)..(62): /note="This region represents a CpG dinucleotide"
  misc_feature (61)..(61): /note="Nucleotide may be methylated to form 5-methylcytosine"
aagttaaaagaataacaatacgatacgggacaggccaggttctttctgttccagaacccacgtgtcaaagaagaggccatatgtatctctacaacatgaatgttgctatccattcatcaaat

SEQ ID NO: 30486 - DNA, 122 bp, Homo sapiens
  misc_feature (61)..(62): /note="This region represents a CpG dinucleotide"
  misc_feature (61)..(61): /note="Nucleotide may be methylated to form 5-methylcytosine"
ccagaccaaaatgtcagtagtgccaaggctgagaagccctagtagagactgcaaatgaaacgcgagcttttaggaacttcacctgaagtcttcctccctcctccttccctggctactctgac

SEQ ID NO: 30487 - DNA, 122 bp, Homo sapiens
  misc_feature (61)..(62): /note="This region represents a CpG dinucleotide"
  misc_feature (61)..(61): /note="Nucleotide may be methylated to form 5-methylcytosine"
gagacccattctgtgttagtttcctcctctctgcagtggtattgctcactctgtttacttcgtagctttgatgtcagaatcaaatgaaatggtggttttgaaagagctttggaagtcccagg

SEQ ID NO: 30488 - DNA, 122 bp, Homo sapiens
  misc_feature (61)..(62): /note="This region represents a CpG dinucleotide"
  misc_feature (61)..(61): /note="Nucleotide may be methylated to form 5-methylcytosine"
tgaaagagagaaacaggcactaaacactaagctttgtgtgaagctgtgactaaggaactgcggttagctgtcttgttccccaagtgagctcataacctgccatgggcaagttttatatcagg

SEQ ID NO: 30489 - DNA, 122 bp, Homo sapiens
  misc_feature (61)..(62): /note="This region represents a CpG dinucleotide"
  misc_feature (61)..(61): /note="Nucleotide may be methylated to form 5-methylcytosine"
accttctcagctgtccagtatctgcagagcagcagtacatgctggagtggttcgaaatcacggtggttatgttgatgtaatgcctgtggacaaaagaaagacctacattgcttcttttcaga

SEQ ID NO: 30490 - DNA, 122 bp, Homo sapiens
  misc_feature (61)..(62): /note="This region represents a CpG dinucleotide"
  misc_feature (61)..(61): /note="Nucleotide may be methylated to form 5-methylcytosine"
actgtggttctgagaagtgagagtcagctacctcctccaagggggcctccacagtgagagcgcacacagttgtccgtctgcaagaactgttggtacttaccatagcaaacatgtacggacag

SEQ ID NO: 30491 - DNA, 122 bp, Homo sapiens
  misc_feature (61)..(62): /note="This region represents a CpG dinucleotide"
  misc_feature (61)..(61): /note="Nucleotide may be methylated to form 5-methylcytosine"
gcagaccattcccaggaatcagagcagcttgcacattcctgagaagtagccctggcacgtcgtcactaactctagcttgaaattggtggctcttggatgggtgtggtggctcacgcctgtaa

SEQ ID NO: 30492 - DNA, 122 bp, Homo sapiens
  misc_feature (61)..(62): /note="This region represents a CpG dinucleotide"
  misc_feature (61)..(61): /note="Nucleotide may be methylated to form 5-methylcytosine"
agaacacaatcacatagcaacctgttctatcagcagttgctctgtagggtaaatcccagacgtatcaactgaaagccatctccacagtgagtctattaggactgctgggaagctgaattagc

SEQ ID NO: 30493 - DNA, 122 bp, Homo sapiens
  misc_feature (61)..(62): /note="This region represents a CpG dinucleotide"
  misc_feature (61)..(61): /note="Nucleotide may be methylated to form 5-methylcytosine"
acagcctgttttctcttccagatgctcgactgacctctactggaataaaggggcagaatgcgtcagctggaaatcagatcagtactttctagagaggtccaagatgatacaatgggatggag

SEQ ID NO: 30494 - DNA, 122 bp, Homo sapiens
  misc_feature (61)..(62): /note="This region represents a CpG dinucleotide"
  misc_feature (61)..(61): /note="Nucleotide may be methylated to form 5-methylcytosine"
cctcacccagctgtccccagctctgcttacgagaagaacacatggtactccaggtcctgacgaggtgaacgggtgtactctgagaagacgtagacaccagtcacagcaaaaatgtagaagaa

SEQ ID NO: 30495 - DNA, 122 bp, Homo sapiens
  misc_feature (61)..(62): /note="This region represents a CpG dinucleotide"
  misc_feature (61)..(61): /note="Nucleotide may be methylated to form 5-methylcytosine"
gcggggcgcgtggagggggccgccccaacccgggccctgcggtgccacgcggtgcccacgcgtgccttgtcatctgcttgacccagaccctgaggggcgagctgcgcttcgacatcaggaag

SEQ ID NO: 30496 - DNA, 122 bp, Homo sapiens
  misc_feature (61)..(62): /note="This region represents a CpG dinucleotide"
  misc_feature (61)..(61): /note="Nucleotide may be methylated to form 5-methylcytosine"
tatctcagctcctatgtcagctggcagggctgacagtggggacatttcaaaggaagataacgtaacccataaagcagagcgttagggaagcacagagtaattcactgccagtctctgcccac

SEQ ID NO: 30497 - DNA, 122 bp, Homo sapiens
  misc_feature (61)..(62): /note="This region represents a CpG dinucleotide"
  misc_feature (61)..(61): /note="Nucleotide may be methylated to form 5-methylcytosine"
agccctccagaagttaagaggactttgttaagactcaataattgttgatactttccttgccgggaagtcctagaaggcctcatttgcatagttcaaccctgtgtcaatggagaactaaggag

SEQ ID NO: 30498 - DNA, 122 bp, Homo sapiens
  misc_feature (61)..(62): /note="This region represents a CpG dinucleotide"
  misc_feature (61)..(61): /note="Nucleotide may be methylated to form 5-methylcytosine"
aacttgtgatccggagccagttaacttcacagctaatgtgctgagcagcattccagccagcgtctgaagccagagcagggaggcggacgggccccaggagttcgaggtccgggaagccgaag

SEQ ID NO: 30499 - DNA, 122 bp, Homo sapiens
  misc_feature (61)..(62): /note="This region represents a CpG dinucleotide"
  misc_feature (61)..(61): /note="Nucleotide may be methylated to form 5-methylcytosine"
atcaatatctgtgagatgggaaacacagaagaggaaggcagagcatcagagcaaaggtttcgttcagggcttgacatggtatgatcctgggaaacctgatgaagcagtaaggttaggaagag

SEQ ID NO: 30500 - DNA, 122 bp, Homo sapiens
  misc_feature (61)..(62): /note="This region represents a CpG dinucleotide"
  misc_feature (61)..(61): /note="Nucleotide may be methylated to form 5-methylcytosine"
aaaatccaaccaggtttgtaggtaaccagttacgtttcaaatgtgatcttaagcccaccccgagtgagtgaacctcaacatgagagtagaagactctggaagggaagatgtgagaagataaa

SEQ ID NO: 30501 - DNA, 122 bp, Homo sapiens
  misc_feature (61)..(62): /note="This region represents a CpG dinucleotide"
  misc_feature (61)..(61): /note="Nucleotide may be methylated to form 5-methylcytosine"
actgtgcctgggccttcaccattagcctgccttggctgcttggttccagggagactccctcgatgctattccagcctttcagatggcctgttgtgtgacgctggctgtgtctcaatttccgg

SEQ ID NO: 30502 - DNA, 122 bp, Homo sapiens
  misc_feature (61)..(62): /note="This region represents a CpG dinucleotide"
  misc_feature (61)..(61): /note="Nucleotide may be methylated to form 5-methylcytosine"
gcttccgggaaagccctggaggtcagttttgctgcagatatgacggtgcagaatcactgacgtgtgaagtgaaagttttggttttagaagctccagcccctgctacaagtctctggggcaac

SEQ ID NO: 30503 - DNA, 122 bp, Homo sapiens
  misc_feature (61)..(62): /note="This region represents a CpG dinucleotide"
  misc_feature (61)..(61): /note="Nucleotide may be methylated to form 5-methylcytosine"
gcaggacagtgacctaaaggaatatatggaccacacccaccattcagcacatagggcttccgtacaagctctttaggcctctcctctatgtccacctccatggccttcacctgcagagaaca

SEQ ID NO: 30504 - DNA, 122 bp, Homo sapiens
  misc_feature (61)..(62): /note="This region represents a CpG dinucleotide"
  misc_feature (61)..(61): /note="Nucleotide may be methylated to form 5-methylcytosine"
atgagtttccagccctcaagggaactgtttgctaaagattggcaggagcccacaagactacgacacagtctttgatgagctggctctccaagtgtgggcagacttttgtttctaagttattg

SEQ ID NO: 30505 - DNA, 122 bp, Homo sapiens
  misc_feature (61)..(62): /note="This region represents a CpG dinucleotide"
  misc_feature (61)..(61): /note="Nucleotide may be methylated to form 5-methylcytosine"
ggcgtgggaagggctgccgggccagcactgtggggctggccgcatgtgtgggctgctgtgcgtgtttgcaggtgtgtgtggacgtcttgtgtctgtggctgtgtgatgtgtctttgcggact

SEQ ID NO: 30506 - DNA, 122 bp, Homo sapiens
  misc_feature (61)..(62): /note="This region represents a CpG dinucleotide"
  misc_feature (61)..(61): /note="Nucleotide may be methylated to form 5-methylcytosine"
aaaatcattaggttccagtcagcaatttttaaaattacatgggctggtcgcagtggttcacgcctgtaatcccagcactttgagaggccaaggtgggcggatcacgggaggcagaggcacca

SEQ ID NO: 30507 - DNA, 122 bp, Homo sapiens
  misc_feature (61)..(62): /note="This region represents a CpG dinucleotide"
  misc_feature (61)..(61): /note="Nucleotide may be methylated to form 5-methylcytosine"
tcattttttattaggaactcttatcgagctatgtccctcatcctcacagcattgtttgaacgactatgtttcttccactagcccttaagatccatgagagaccttgtcttatttgctggcac

SEQ ID NO: 30508 - DNA, 122 bp, Homo sapiens
  misc_feature (61)..(62): /note="This region represents a CpG dinucleotide"
  misc_feature (61)..(61): /note="Nucleotide may be methylated to form 5-methylcytosine"
gtgtttgtgagagaggatggtttggaaagctctgccaacatccgcggaagtgtaacatgacggaagaacaaagcaagaatctgtgtgaatcagcagatggcatattgtgctcggggaagggt

SEQ ID NO: 30509 - DNA, 122 bp, Homo sapiens
  misc_feature (61)..(62): /note="This region represents a CpG dinucleotide"
  misc_feature (61)..(61): /note="Nucleotide may be methylated to form 5-methylcytosine"
agttaaatattgggcaattgattaacacccgaatttcatcattgtggcccaagcttctgacgtacccatcacctctcagggagccaacactgtcctccacctcaataatttctgacttttgt

SEQ ID NO: 30510 - DNA, 122 bp, Homo sapiens
  misc_feature (61)..(62): /note="This region represents a CpG dinucleotide"
  misc_feature (61)..(61): /note="Nucleotide may be methylated to form 5-methylcytosine"
attcccaacaggaaaaagtcaccacccagggtctggttggccagccgcatgctgtatgatcggctgaagtggctttacctggaggacaaaagtaaactttatttataatcatgtgtgtacca

SEQ ID NO: 30511 - DNA, 122 bp, Homo sapiens
  misc_feature (61)..(62): /note="This region represents a CpG dinucleotide"
  misc_feature (61)..(61): /note="Nucleotide may be methylated to form 5-methylcytosine"
ttagtgggaaggcttctggctgcaaagccagtgctctttctgactaattgtgctgctcctcgttcaagtctagggtactggttaaaggcatggattttggaaggacagaccctaagattatt

SEQ ID NO: 30512 - DNA, 122 bp, Homo sapiens
  misc_feature (61)..(62): /note="This region represents a CpG dinucleotide"
  misc_feature (61)..(61): /note="Nucleotide may be methylated to form 5-methylcytosine"
aattctatcatgggcggttaggagtgtacctgccacggagctgtcatgaaggttaaatcacgcgagttgtataaagcacagagcagaatccctggcacactcttaagggctcttacacgcat

SEQ ID NO: 30513 - DNA, 122 bp, Homo sapiens
  misc_feature (61)..(62): /note="This region represents a CpG dinucleotide"
  misc_feature (61)..(61): /note="Nucleotide may be methylated to form 5-methylcytosine"
tcaccttttttgctctttgccagatagacagagccttcaccatgttgctgggtggtgtgacgtttcccagaactccctcctgcgtgtttctggttagggtgagccacaagagattcccatgc

SEQ ID NO: 30514 - DNA, 122 bp, Homo sapiens
  misc_feature (61)..(62): /note="This region represents a CpG dinucleotide"
  misc_feature (61)..(61): /note="Nucleotide may be methylated to form 5-methylcytosine"
tagcttagaagaggatctgttcctgaccagtcccatggaaattgtgactcagcaggacatcgtcctctcagacgcagagaacaaggtaagtctcctccagggaatgacttgatggctcataa

SEQ ID NO: 30515 - DNA, 122 bp, Homo sapiens
  misc_feature (61)..(62): /note="This region represents a CpG dinucleotide"
  misc_feature (61)..(61): /note="Nucleotide may be methylated to form 5-methylcytosine"
cctgctgaattcttttaatgtccagctgtgtttgtactgttcagcacactgctccacagccggtgttcatcattagtgtcactggggataaagttggcagaaaaaagctgccccaatccaaa

SEQ ID NO: 30516 - DNA, 122 bp, Homo sapiens
  misc_feature (61)..(62): /note="This region represents a CpG dinucleotide"
  misc_feature (61)..(61): /note="Nucleotide may be methylated to form 5-methylcytosine"
ctggttttgagggaggatgaccttaaactctctcactcccaagctgggtgcaaaggtgaccgagctcaaagcccagcctccaagtatcacgactgccctgttctagaaatcatttctgggag

SEQ ID NO: 30517 - DNA, 122 bp, Homo sapiens
  misc_feature (61)..(62): /note="This region represents a CpG dinucleotide"
  misc_feature (61)..(61): /note="Nucleotide may be methylated to form 5-methylcytosine"
atttccttcaaatctcagaatccctgggagcttgtaaggaacatttagtaaccccatccccgtcgctaccctcaatggtcctgcctttcggagatatcataccattttccttttctcaatga

SEQ ID NO: 30518 - DNA, 122 bp, Homo sapiens
  misc_feature (61)..(62): /note="This region represents a CpG dinucleotide"
  misc_feature (61)..(61): /note="Nucleotide may be methylated to form 5-methylcytosine"
ctgctcccaaatagggacagtgtcacaaggtggctcgaggcagaccagacacacactggccgtgggagcttgtgggcggggtttcttcctgttgtgaatacgtgcagaagtgtcactccggc

SEQ ID NO: 30519 - DNA, 122 bp, Homo sapiens
  misc_feature (61)..(62): /note="This region represents a CpG dinucleotide"
  misc_feature (61)..(61): /note="Nucleotide may be methylated to form 5-methylcytosine"
acagcagtgcagacacatttccaggtggagggtttgcagcctgctctaacttaatgttcccgctcccacactccactcccagtctgaaatgcatttcgaggagaacaagtaaaacctgccct

SEQ ID NO: 30520 - DNA, 122 bp, Homo sapiens
  misc_feature (61)..(62): /note="This region represents a CpG dinucleotide"
  misc_feature (61)..(61): /note="Nucleotide may be methylated to form 5-methylcytosine"
ttgcagtatcgtggtgttgagtcacttgcgatctttccggttcagtgactcctcagtgtgcgtggattggggccctccagagatgctctctgtctgtgtgtgtcatcgcagccctctgctgt

SEQ ID NO: 30521 - DNA, 122 bp, Homo sapiens
  misc_feature (61)..(62): /note="This region represents a CpG dinucleotide"
  misc_feature (61)..(61): /note="Nucleotide may be methylated to form 5-methylcytosine"
ttgtaatttgtttgaaaccccaaacagtgactgtactttctattttaatcttgctactaccgttatacacatatagtgtacagccagaccagattaaacttcatatgtaatctctaggaagt

SEQ ID NO: 30522 - DNA, 122 bp, Homo sapiens
  misc_feature (61)..(62): /note="This region represents a CpG dinucleotide"
  misc_feature (61)..(61): /note="Nucleotide may be methylated to form 5-methylcytosine"
ctgtggaaacttgttgactcagaatgagaaatagaactgttagctcttcactctgactgacgtattttgtccctaaggaaagctatatggaaacattaaaaccagaaaatcccttgatgaat

SEQ ID NO: 30523 - DNA, 122 bp, Homo sapiens
  misc_feature (61)..(62): /note="This region represents a CpG dinucleotide"
  misc_feature (61)..(61): /note="Nucleotide may be methylated to form 5-methylcytosine"
tacattattggtatggttggatttgtatctgtcattttagtgtctgttttctgtttatcccgtctactcttttgttcctctatttcttctttcctctcttttgttgtgctagtgtggatgaa

SEQ ID NO: 30524 - DNA, 122 bp, Homo sapiens
  misc_feature (61)..(62): /note="This region represents a CpG dinucleotide"
  misc_feature (61)..(61): /note="Nucleotide may be methylated to form 5-methylcytosine"
ctccgttcagaattagctcgacttgagtcacaggatgaagcttaccaaaaggaatttccacgtccaaggaaggaaccaagatcactgagaggttatagtatgaaaagtgaagagaaaaaacc

SEQ ID NO: 30525 - DNA, 122 bp, Homo sapiens
  misc_feature (61)..(62): /note="This region represents a CpG dinucleotide"
  misc_feature (61)..(61): /note="Nucleotide may be methylated to form 5-methylcytosine"
tccgcccccgataatgtcccatacacgctcctggctgtgggcagtgcagcccatgggtagcgcccccaaccagcccccagccatggggagtgatgcctcggataacacacccaacaagttcc

SEQ ID NO: 30526 - DNA, 122 bp, Homo sapiens
  misc_feature (61)..(62): /note="This region represents a CpG dinucleotide"
  misc_feature (61)..(61): /note="Nucleotide may be methylated to form 5-methylcytosine"
tgagaaaacaagcctagaagtaacaataacttgctcaagtacaccctgtttgtgcaggcacgccctgcttgggatctctgcactccagcctgatggcttcgacagtcagatggtggcgcaca

SEQ ID NO: 30527 - DNA, 122 bp, Homo sapiens
  misc_feature (61)..(62): /note="This region represents a CpG dinucleotide"
  misc_feature (61)..(61): /note="Nucleotide may be methylated to form 5-methylcytosine"
ctgtgccaagacccctattgatgtcctctgtgcagctgtggagctgttgcatgaagctgacgccctcctcttctggctcagcaggtacccgggttggggtgacgagtgagggactattgtca

SEQ ID NO: 30528 - DNA, 122 bp, Homo sapiens
  misc_feature (61)..(62): /note="This region represents a CpG dinucleotide"
  misc_feature (61)..(61): /note="Nucleotide may be methylated to form 5-methylcytosine"
aatctcattttaagccttctaataacttatgactccagttttgtcctccaaattcaactacgttattcattaattccacaaacaatggctgagattatactctgtatcaggcagtgttctag

SEQ ID NO: 30529 - DNA, 122 bp, Homo sapiens
  misc_feature (61)..(62): /note="This region represents a CpG dinucleotide"
  misc_feature (61)..(61): /note="Nucleotide may be methylated to form 5-methylcytosine"
cagagtcagacagagacacccagagatggagagactgctagtgactggcaggaacacacacgcctgccgacacatacaggcgcacatgcacagacccaccgcaactcacgggcacatgcagc

SEQ ID NO: 30530 - DNA, 122 bp, Homo sapiens
  misc_feature (61)..(62): /note="This region represents a CpG dinucleotide"
  misc_feature (61)..(61): /note="Nucleotide may be methylated to form 5-methylcytosine"
aataggaattgagtttgcaaggttgaggctggagatgaaaaactagagaaagcgtaactacgatagctgaagagacaagaagaattgccaaaggatagtgaaataataataatattcggcta

SEQ ID NO: 30531 - DNA, 122 bp, Homo sapiens
  misc_feature (61)..(62): /note="This region represents a CpG dinucleotide"
  misc_feature (61)..(61): /note="Nucleotide may be methylated to form 5-methylcytosine"
tcagtggaaaagaagaaagaagcaaaatcatgaaagcccactccattacttccaaggctacgcagtaaagggaactaactgctgagtcaccgtgggcctcattcctatcaggcttccattaa

SEQ ID NO: 30532 - DNA, 122 bp, Homo sapiens
  misc_feature (61)..(62): /note="This region represents a CpG dinucleotide"
  misc_feature (61)..(61): /note="Nucleotide may be methylated to form 5-methylcytosine"
ctcaaaggtcaacttgaccttgcagggaaagtgagcagggagcaagcacctctgaggacacggcagacagctgcagtgtggctttgacatttacaagaaatgaaagcatctctatttagaaa

SEQ ID NO: 30533 - DNA, 122 bp, Homo sapiens
  misc_feature (61)..(62): /note="This region represents a CpG dinucleotide"
  misc_feature (61)..(61): /note="Nucleotide may be methylated to form 5-methylcytosine"
gccttggggacattcaccttgggctccacaacctgtcagaaatgcccccaagcccaaaggcgtcgagagaatggccaggttgtttcagattgacacatatcctaatgtacaagtcagcccac

SEQ ID NO: 30534 - DNA, 122 bp, Homo sapiens
  misc_feature (61)..(62): /note="This region represents a CpG dinucleotide"
  misc_feature (61)..(61): /note="Nucleotide may be methylated to form 5-methylcytosine"
ggccccgcgctgacagtgtgcaggatttgctcttacacagctctttctctctgtccctgccggtcccccgcagacgaatcggcagccgaaacaggccagagcttcctgttcgacgtgtccag

SEQ ID NO: 30535 - DNA, 122 bp, Homo sapiens
  misc_feature (61)..(62): /note="This region represents a CpG dinucleotide"
  misc_feature (61)..(61): /note="Nucleotide may be methylated to form 5-methylcytosine"
gctcataacctaggggagtcacagtgaaattacttgctttaaaattctttaatcactctgcgagttgttaggaaaagctgacacatctgatttggaaactcccactccagtggactgttgtg

SEQ ID NO: 30536 - DNA, 122 bp, Homo sapiens
  misc_feature (61)..(62): /note="This region represents a CpG dinucleotide"
  misc_feature (61)..(61): /note="Nucleotide may be methylated to form 5-methylcytosine"
ctgaaacctgacttacacgaaactagagctgagagtaaaagtcagctcagaaaggaactgcgagatagcatgcttatattagagtagcattttagaaggaagaaaatttgaaaacagctaag

SEQ ID NO: 30537 - DNA, 122 bp, Homo sapiens
  misc_feature (61)..(62): /note="This region represents a CpG dinucleotide"
  misc_feature (61)..(61): /note="Nucleotide may be methylated to form 5-methylcytosine"
ctcgggacatctgagttcatttcgagaacctacgatccccagcaaacatcgcttgcaaaacgtatgctggcaaggcaagaccttcgcagaagcatcaaggcgctctagacacaccggacact

SEQ ID NO: 30538 - DNA, 122 bp, Homo sapiens
  misc_feature (61)..(62): /note="This region represents a CpG dinucleotide"
  misc_feature (61)..(61): /note="Nucleotide may be methylated to form 5-methylcytosine"
ttaaaggagattaaaattcttttctattactgggtatctcaaataaagatattcctgtaccgtaaagggttatggtttaaaaaaaaaaaactcagacacacttaaagtaacacatttcaaac

SEQ ID NO: 30539 - DNA, 122 bp, Homo sapiens
  misc_feature (61)..(62): /note="This region represents a CpG dinucleotide"
  misc_feature (61)..(61): /note="Nucleotide may be methylated to form 5-methylcytosine"
aacctgctgtcaaatatatggccagagctctctttaggtaggtaagtatcagaactttcccggcctacatgtgtataggaatacattcataagagctacgtatttagtccgaatctgttgag

SEQ ID NO: 30540 - DNA, 122 bp, Homo sapiens
  misc_feature (61)..(62): /note="This region represents a CpG dinucleotide"
  misc_feature (61)..(61): /note="Nucleotide may be methylated to form 5-methylcytosine"
aatccctgtcctcaaggagtgtgcagtccagtataaggagagtcacatgaataaattcaccgtgagagatgcaataatataaatatgtatgacataaggattttaatctgtctcgatacagt

SEQ ID NO: 30541 - DNA, 122 bp, Homo sapiens
  misc_feature (61)..(62): /note="This region represents a CpG dinucleotide"
  misc_feature (61)..(61): /note="Nucleotide may be methylated to form 5-methylcytosine"
tgttcgagtgtcattagtaatagcacctcctctctcaaaagtgccttatttgaggctgggcgtggtgactcacacccataatcccagcactttgggaggccagggtgggaggatcacttgaa

SEQ ID NO: 30542 - DNA, 122 bp, Homo sapiens
  misc_feature (61)..(62): /note="This region represents a CpG dinucleotide"
  misc_feature (61)..(61): /note="Nucleotide may be methylated to form 5-methylcytosine"
ccttttctcaagctcactcctctggtattgaatggtttttctctccttttgctcttgcaacgttctctacagtcctgttaatttccaggccagctcttcccccaccggccccgcaagccttc

SEQ ID NO: 30543 - DNA, 122 bp, Homo sapiens
  misc_feature (61)..(62): /note="This region represents a CpG dinucleotide"
  misc_feature (61)..(61): /note="Nucleotide may be methylated to form 5-methylcytosine"
gggctgtgcttactcaagtcaaatagcaaattagttgtagagcactgggcctcaggccaccgtatttcagttgtgttgggactcctcaccaacctccgtaaggtgagtgaaggtgccctata

SEQ ID NO: 30544 - DNA, 122 bp, Homo sapiens
  misc_feature (61)..(62): /note="This region represents a CpG dinucleotide"
  misc_feature (61)..(61): /note="Nucleotide may be methylated to form 5-methylcytosine"
gtgtttcgtaattaaccagagacagacatgaaaatccctaagcaaatcttcggcctcagtcgagcattcactggacttaatccacttgactcaatagtaatcatttatgaataaataagcca

SEQ ID NO: 30545 - DNA, 122 bp, Homo sapiens
  misc_feature (61)..(62): /note="This region represents a CpG dinucleotide"
  misc_feature (61)..(61): /note="Nucleotide may be methylated to form 5-methylcytosine"
aaaaagaaaaactcatgtcggccccagccctgaggctacctgacctgacaaaactctttacgctctatgtgtcagaaacaaaaaaaatggcagttagagttttaacccagactgtagggccc

SEQ ID NO: 30546 - DNA, 122 bp, Homo sapiens
  misc_feature (61)..(62): /note="This region represents a CpG dinucleotide"
  misc_feature (61)..(61): /note="Nucleotide may be methylated to form 5-methylcytosine"
cacttcgggcgggagtacaggagcccttccttgggcaccatgcgaaggctgctcaagtagcggcccctgccctcccttcccctgtccccgtccccgtctccgtctccccgtccctgtccccc

SEQ ID NO: 30547 - DNA, 122 bp, Homo sapiens
  misc_feature (61)..(62): /note="This region represents a CpG dinucleotide"
  misc_feature (61)..(61): /note="Nucleotide may be methylated to form 5-methylcytosine"
atcaagacaatgggagaatgactccaaaggcacttcagagatctttgaggctgccactctcgtcacaggcccggagtgctagggccttgagggaagaacgtttcaaaggagatcccagggca

SEQ ID NO: 30548 - DNA, 122 bp, Homo sapiens
  misc_feature (61)..(62): /note="This region represents a CpG dinucleotide"
  misc_feature (61)..(61): /note="Nucleotide may be methylated to form 5-methylcytosine"
attgaattgacatggtgaaaccacgcctagtagaggggagaagtggtggtgtggactagacgagtatacattttggtcagacatggctggattccagtcactttgtagttttgtgaccttgg

SEQ ID NO: 30549 - DNA, 122 bp, Homo sapiens
  misc_feature (61)..(62): /note="This region represents a CpG dinucleotide"
  misc_feature (61)..(61): /note="Nucleotide may be methylated to form 5-methylcytosine"
attattttcagtgtactactggactccaaatacagacatcatgagatgtccacttgcccacgtgtggacacacaggcaggagcggcccagatcctcccttgtctgtggcctggtctttccat

SEQ ID NO: 30550 - DNA, 122 bp, Homo sapiens
  misc_feature (61)..(62): /note="This region represents a CpG dinucleotide"
  misc_feature (61)..(61): /note="Nucleotide may be methylated to form 5-methylcytosine"
gaatgtgatttcaccaagtgttgcaggcccaggcacgttcagggcagtgaggatggcacacgctcgggagggcctggcctgtttgccctgtatgtgtttatcaaatgcctgctctccacgag

SEQ ID NO: 30551 - DNA, 122 bp, Homo sapiens
  misc_feature (61)..(62): /note="This region represents a CpG dinucleotide"
  misc_feature (61)..(61): /note="Nucleotide may be methylated to form 5-methylcytosine"
ggattacagttgtcccatccatacactggtctgtgttggcttttgtcacctgggcatgtgcggccaccatcttgactgctcagctagttctgtacctgggttctagaatgatgtcataatga

SEQ ID NO: 30552 - DNA, 122 bp, Homo sapiens
  misc_feature (61)..(62): /note="This region represents a CpG dinucleotide"
  misc_feature (61)..(61): /note="Nucleotide may be methylated to form 5-methylcytosine"
ttgcagacctttctttgtcacttattaataataattatgggccatttaacttctgtaagtcgacatttcctgaccttggactctacctcacagggatgatttaaggataaataagataatac

SEQ ID NO: 30553 - DNA, 122 bp, Homo sapiens
  misc_feature (61)..(62): /note="This region represents a CpG dinucleotide"
  misc_feature (61)..(61): /note="Nucleotide may be methylated to form 5-methylcytosine"
cactggtgaaagagcaaataaatccttccccactatatttcctgcttcaggcccaggggccgtggtggacagtgttgccaggttagcataacttgaggtctgagcacgtagacacccactta

SEQ ID NO: 30554 - DNA, 122 bp, Homo sapiens
  misc_feature (61)..(62): /note="This region represents a CpG dinucleotide"
  misc_feature (61)..(61): /note="Nucleotide may be methylated to form 5-methylcytosine"
taattcatggtggaggcaaggcaggcttgctttctctggcattcctctaggcttctcactcgccagcttttggctgcttctgttatctaggccaagcagagtcaatgaccctgagatgtgga

SEQ ID NO: 30555 - DNA, 122 bp, Homo sapiens
  misc_feature (61)..(62): /note="This region represents a CpG dinucleotide"
  misc_feature (61)..(61): /note="Nucleotide may be methylated to form 5-methylcytosine"
gagcgctcttctagccctagattctataaaactgtccttacctgctgtggaaaacaggtgcggactgagtgctctgtgtaaccaaaagatggcccttcaaagacagctgttgggagcttcag

SEQ ID NO: 30556 - DNA, 122 bp, Homo sapiens
  misc_feature (61)..(62): /note="This region represents a CpG dinucleotide"
  misc_feature (61)..(61): /note="Nucleotide may be methylated to form 5-methylcytosine"
gcatgaagaaagattctcatgttgctaagatttcttgcaccgctcttaagcttctgattacgcagaagctggattaactatctcacagtagcagggcagacagtagcatggcagacagcatg

SEQ ID NO: 30557 - DNA, 122 bp, Homo sapiens
  misc_feature (61)..(62): /note="This region represents a CpG dinucleotide"
  misc_feature (61)..(61): /note="Nucleotide may be methylated to form 5-methylcytosine"
aacaaaagctgagaactcaggggaagcttttccaaaaggttgatgctatgtttttgcatgcgaaaattttgctttggggttgtgaactctttaaaacaaacagttgaggtcattgttaatgg

SEQ ID NO: 30558 - DNA, 122 bp, Homo sapiens
  misc_feature (61)..(62): /note="This region represents a CpG dinucleotide"
  misc_feature (61)..(61): /note="Nucleotide may be methylated to form 5-methylcytosine"
ctgaagagctcttctgagccagggcctgcctaagcacattcaatgctcatatgagcctgtcgcccaggctggagtgcaatggcacgatcttggctcactgcaacctccgcctcccgggttca

SEQ ID NO: 30559 - DNA, 122 bp, Homo sapiens
  misc_feature (61)..(62): /note="This region represents a CpG dinucleotide"
  misc_feature (61)..(61): /note="Nucleotide may be methylated to form 5-methylcytosine"
cccacgactataaatctcatatgtaaacatgatttactattactgctactaaacttgttccgtctttacttgccccctcccacccaccaccccccttaaatataaaattggaaacatttcct

SEQ ID NO: 30560 - DNA, 122 bp, Homo sapiens
  misc_feature (61)..(62): /note="This region represents a CpG dinucleotide"
  misc_feature (61)..(61): /note="Nucleotide may be methylated to form 5-methylcytosine"
caatcctgcctgtccatctcaatgacatctactatccctgatcaacacggcaccttaaggcgcccttcacagtgaaagcaacttatttccaaagcaggcattttgccttccattgctcctcc

SEQ ID NO: 30561 - DNA, 122 bp, Homo sapiens
  misc_feature (61)..(62): /note="This region represents a CpG dinucleotide"
  misc_feature (61)..(61): /note="Nucleotide may be methylated to form 5-methylcytosine"
aggctgcctgcttccagcccctccattcattctgtctgtccacctgcagaccttttgtcacgccccatgctccatcgccactgctcttagtcaggcatgggatctgggagctgagaccctcc

SEQ ID NO: 30562 - DNA, 122 bp, Homo sapiens
  misc_feature (61)..(62): /note="This region represents a CpG dinucleotide"
  misc_feature (61)..(61): /note="Nucleotide may be methylated to form 5-methylcytosine"
atgaataatagcctggtagaacaagactaacatgtctctatatgtgtgtgccttgacctccgttacagagtcctagagtctatattttctccccctgtgggagacaaagaaactgagactga

SEQ ID NO: 30563 - DNA, 122 bp, Homo sapiens
  misc_feature (61)..(62): /note="This region represents a CpG dinucleotide"
  misc_feature (61)..(61): /note="Nucleotide may be methylated to form 5-methylcytosine"
ctgtcatgcgatgccatactggagtcaggttggcactcggtgtcttgttgctacagagtccgctgggtcagtcttaggatctctgctttaatgataatgtgggactgttgtgcctgaattcc

SEQ ID NO: 30564 - DNA, 122 bp, Homo sapiens
  misc_feature (61)..(62): /note="This region represents a CpG dinucleotide"
  misc_feature (61)..(61): /note="Nucleotide may be methylated to form 5-methylcytosine"
gaggccaagctcagccaaactttatccgagcaacaatgccaattaatctggcgcttgtcgcggctactccctcagggcaggtgtgagggtcagcgaccaagctccatcctgagtggcactga

SEQ ID NO: 30565 - DNA, 122 bp, Homo sapiens
  misc_feature (61)..(62): /note="This region represents a CpG dinucleotide"
  misc_feature (61)..(61): /note="Nucleotide may be methylated to form 5-methylcytosine"
ctggctggccaggcccagggcctgggctcatgggctatattgagggctgagtcaccagcccgcgcctgggtcaggctgagtgtcactggctgctggggcctgagtcaggccccgatttatcc

SEQ ID NO: 30566 - DNA, 122 bp, Homo sapiens
  misc_feature (61)..(62): /note="This region represents a CpG dinucleotide"
  misc_feature (61)..(61): /note="Nucleotide may be methylated to form 5-methylcytosine"
tgcaaatgaaatcattttccctcactatccagttcaatgtttttgcttctggttccatttcgatggacagaaaaattattacttctgcttgttctttggacagctgtccctaaaatgtttat

SEQ ID NO: 30567 - DNA, 122 bp, Homo sapiens
  misc_feature (61)..(62): /note="This region represents a CpG dinucleotide"
  misc_feature (61)..(61): /note="Nucleotide may be methylated to form 5-methylcytosine"
ctttttttttttttttttgagacagggtctcactctgctgcccaggctggagtacagagacgtgatcacagcacacggcgacctacctacacctcccgggctcaagctatgctcctgcctca

SEQ ID NO: 30568 - DNA, 122 bp, Homo sapiens
  misc_feature (61)..(62): /note="This region represents a CpG dinucleotide"
  misc_feature (61)..(61): /note="Nucleotide may be methylated to form 5-methylcytosine"
ccaggctctggtcatgtgggtgacttcacattcctgttggttactggggacagccagctgcgggcaggcggggcccagctctgctccgtgcggaggctgtgttctgccctctccctgcccac

SEQ ID NO: 30569 - DNA, 122 bp, Homo sapiens
  misc_feature (61)..(62): /note="This region represents a CpG dinucleotide"
  misc_feature (61)..(61): /note="Nucleotide may be methylated to form 5-methylcytosine"
ttaggctatgaaggtacgttgttttcacttttctgtgttacagtttataacaaaatcacacgtcctcttcatatttcattgttttgcctttgagatgaggaagaatgtaggcacgagcctta

SEQ ID NO: 30570 - DNA, 122 bp, Homo sapiens
  misc_feature (61)..(62): /note="This region represents a CpG dinucleotide"
  misc_feature (61)..(61): /note="Nucleotide may be methylated to form 5-methylcytosine"
ggtttcctctcttcctacacctccaaacggtgagaacctgaaggtgccatatggctgttgcgtgagtaagccttaggttttcctgaaaagtgagttgcctgtgtgccacatcaatggagatc

SEQ ID NO: 30571 - DNA, 122 bp, Homo sapiens
  misc_feature (61)..(62): /note="This region represents a CpG dinucleotide"
  misc_feature (61)..(61): /note="Nucleotide may be methylated to form 5-methylcytosine"
aatacctactggatccactgtccagtttgcctaaattgtagctgtttcttaagttaaattcgtctggatatttggttccttctggagtagttttcctttgactaacacttgaagaataattt

SEQ ID NO: 30572 - DNA, 122 bp, Homo sapiens
  misc_feature (61)..(62): /note="This region represents a CpG dinucleotide"
  misc_feature (61)..(61): /note="Nucleotide may be methylated to form 5-methylcytosine"
aggaaaaccatgaagtgttagcactgttctgattttacttcctccttcaggctatgggcgcgtgccaactgacagggcagggactgccatggctagtggctattacctaaactccagcccag

SEQ ID NO: 30573 - DNA, 122 bp, Homo sapiens
  misc_feature (61)..(62): /note="This region represents a CpG dinucleotide"
  misc_feature (61)..(61): /note="Nucleotide may be methylated to form 5-methylcytosine"
agaaaatacatttacattaattcaacttaaaaaaggttataaaatatcattagagtgtaacgatattttggttaaaaaatagaaaaaagtcgtagaagatgatacaaaaaggtcttaacact

SEQ ID NO: 30574 - DNA, 122 bp, Homo sapiens
  misc_feature (61)..(62): /note="This region represents a CpG dinucleotide"
  misc_feature (61)..(61): /note="Nucleotide may be methylated to form 5-methylcytosine"
tggacttcaaagtgctggctgctgtgctaacgaggagagatttgcataaggccctaatcacgcgcatactgattaagcttcattatggaaactgccagctgcaatctttgtttctattttat

SEQ ID NO: 30575 - DNA, 122 bp, Homo sapiens
  misc_feature (61)..(62): /note="This region represents a CpG dinucleotide"
  misc_feature (61)..(61): /note="Nucleotide may be methylated to form 5-methylcytosine"
caatgttttagaatgagtgagataaatatttatcaaataatgacacagataattatagaccgtaataaatgctatgaaaataaagtacagagtgctatgagaacaagtggggggcgggaagt

SEQ ID NO: 30576 - DNA, 122 bp, Homo sapiens
  misc_feature (61)..(62): /note="This region represents a CpG dinucleotide"
  misc_feature (61)..(61): /note="Nucleotide may be methylated to form 5-methylcytosine"
tacccctccctctcttccctctgcaagtcaaaaagcaagccacagtgctaaacaggaagacggtcacaggacagtgtttatggtaaaaccaaagtatctcagagattggatattttgcaata

SEQ ID NO: 30577 - DNA, 122 bp, Homo sapiens
  misc_feature (61)..(62): /note="This region represents a CpG dinucleotide"
  misc_feature (61)..(61): /note="Nucleotide may be methylated to form 5-methylcytosine"
gatcaatgtgagacaaaaatttctgccctgtggaacttagattctagtatagataaacaacgagacacatgaaaaaacatgtagtatgctggatagtgataaggaggaaaaaataaagacca

SEQ ID NO: 30578 - DNA, 122 bp, Homo sapiens
  misc_feature (61)..(62): /note="This region represents a CpG dinucleotide"
  misc_feature (61)..(61): /note="Nucleotide may be methylated to form 5-methylcytosine"
tgcctccagttctgaccattcctagcccatcttgtcagctcattgagtcatttgtcttgccgggtcatcttggtttcttactaactcttgtttgcagtatgcttgaccttgatgtgtgtcca

SEQ ID NO: 30579 - DNA, 122 bp, Homo sapiens
  misc_feature (61)..(62): /note="This region represents a CpG dinucleotide"
  misc_feature (61)..(61): /note="Nucleotide may be methylated to form 5-methylcytosine"
tggatgcgtgggagccacatcaaagtccccccacaagtgcctggggctccccgctgatttcgaggtctacagaatgggtttcttgcaactcacatccttcagctggaggaccccagaaaggc

SEQ ID NO: 30580 - DNA, 122 bp, Homo sapiens
  misc_feature (61)..(62): /note="This region represents a CpG dinucleotide"
  misc_feature (61)..(61): /note="Nucleotide may be methylated to form 5-methylcytosine"
aggagtttcctccaacggtggtgggggtcagcttagctctttcagacaggattagaggagcgtatccaaagtgtgagagctacaaagaggaaaaaggagctctgagtgattttgacacagat

SEQ ID NO: 30581 - DNA, 122 bp, Homo sapiens
  misc_feature (61)..(62): /note="This region represents a CpG dinucleotide"
  misc_feature (61)..(61): /note="Nucleotide may be methylated to form 5-methylcytosine"
ccctgcagctgagcctgtctctcacgggaccgggaagctggagagagccccaaccctgcccgctggggccgagctccctgctcctgcagcagtcccatgccccacactctgagtctgcccta

SEQ ID NO: 30582 - DNA, 122 bp, Homo sapiens
  misc_feature (61)..(62): /note="This region represents a CpG dinucleotide"
  misc_feature (61)..(61): /note="Nucleotide may be methylated to form 5-methylcytosine"
ggtataaactgttactccattctctattacatatctgattaaatgtttctgccctgtcttcgtgatctgtgcatataaatccatgtcagtgtctttattaagaatatgtttatggcagggac

SEQ ID NO: 30583 - DNA, 122 bp, Homo sapiens
  misc_feature (61)..(62): /note="This region represents a CpG dinucleotide"
  misc_feature (61)..(61): /note="Nucleotide may be methylated to form 5-methylcytosine"
ttacttccttcctccccgtccaggcttccagcacagaggagcttcggggaggctggattgcgcctgtgtctaaaaataaacaggtagcaggacgatagacacacagatagacagatggaact

SEQ ID NO: 30584 - DNA, 122 bp, Homo sapiens
  misc_feature (61)..(62): /note="This region represents a CpG dinucleotide"
  misc_feature (61)..(61): /note="Nucleotide may be methylated to form 5-methylcytosine"
agctgcatttaagtggactgtctcccagtgacagaggcgggcggctgcacttagctgtgccgtgggcttactcacagggggtggagacaagatgacatcacaccctttcccacacacaccaa

SEQ ID NO: 30585 - DNA, 122 bp, Homo sapiens
  misc_feature (61)..(62): /note="This region represents a CpG dinucleotide"
  misc_feature (61)..(61): /note="Nucleotide may be methylated to form 5-methylcytosine"
atttaaaaggcactgactagctggaggttcttagcaaactgtactctttgctgctaacaacgtgttttttcttgatgggagatctgagtggtgcatctttgtggatgccatagttcttctga

SEQ ID NO: 30586 - DNA, 122 bp, Homo sapiens
  misc_feature (61)..(62): /note="This region represents a CpG dinucleotide"
  misc_feature (61)..(61): /note="Nucleotide may be methylated to form 5-methylcytosine"
agaagtttggaatgtcagacaaggaggaagtgaagctaaatcctggaaccacaggggctacgtctgcacagatgccataactgagagctacatcccttgagaagaaatggaaagcaaaagta

SEQ ID NO: 30587 - DNA, 122 bp, Homo sapiens
  misc_feature (61)..(62): /note="This region represents a CpG dinucleotide"
  misc_feature (61)..(61): /note="Nucleotide may be methylated to form 5-methylcytosine"
aaaaaaatatgttattaacacattgaaagtatttctacatgccagggctagggtaccattcgttaccatatctccagcagccagtgcagcattgactcctaacaaatatgctttgaaccaaa

SEQ ID NO: 30588 - DNA, 122 bp, Homo sapiens
  misc_feature (61)..(62): /note="This region represents a CpG dinucleotide"
  misc_feature (61)..(61): /note="Nucleotide may be methylated to form 5-methylcytosine"
agccagtactctgtcctcaggcatgggtgttggggacgtcttgtggccataccagccaggcgtggtggaagccgcagaggtggggccaggtgagaacacccagttgtgccttgctcatcctg

SEQ ID NO: 30589 - DNA, 122 bp, Homo sapiens
  misc_feature (61)..(62): /note="This region represents a CpG dinucleotide"
  misc_feature (61)..(61): /note="Nucleotide may be methylated to form 5-methylcytosine"
agtcttcttttgcagactgacaaattgtttgtaatttattatagagaaatgtagctctctcgccatccagtgctgcttaccagaccacacccagaaggacctagactttctcaacttgagtg

SEQ ID NO: 30590 - DNA, 122 bp, Homo sapiens
  misc_feature (61)..(62): /note="This region represents a CpG dinucleotide"
  misc_feature (61)..(61): /note="Nucleotide may be methylated to form 5-methylcytosine"
gtggtttctctcgtcctctaagaacactcctgttggacgagtgggaagaatgactaacatcggtcacaatctttgagcacttaatgctgtgcatgtcacactctgacctgctgacaaatgtg

SEQ ID NO: 30591 - DNA, 122 bp, Homo sapiens
  misc_feature (61)..(62): /note="This region represents a CpG dinucleotide"
  misc_feature (61)..(61): /note="Nucleotide may be methylated to form 5-methylcytosine"
atttacgcgtctcagccaatttgctggcctagagttacactgtgcagatgctctgccttacggcttgcttttgtctcggaggccgtaagcagatagcataaccctgcttaccattagacatt

SEQ ID NO: 30592 - DNA, 122 bp, Homo sapiens
  misc_feature (61)..(62): /note="This region represents a CpG dinucleotide"
  misc_feature (61)..(61): /note="Nucleotide may be methylated to form 5-methylcytosine"
ataggtgtgtctcattacaatgagcagcatatctaataacaaggcatccaggtaatagagcggctggaggttgtaaggctgcccaggtaatagccaaattactttttaaaggtactcaaaac

SEQ ID NO: 30593 - DNA, 122 bp, Homo sapiens
  misc_feature (61)..(62): /note="This region represents a CpG dinucleotide"
  misc_feature (61)..(61): /note="Nucleotide may be methylated to form 5-methylcytosine"
caaaatagcatggtgctatctgtgtaaatcatattctgcctgcagcaatgtagcttacctcgaattatttcagaatcatctaaaatgactcatttttctattaaaatgatgaatgggctaaa

SEQ ID NO: 30594 - DNA, 122 bp, Homo sapiens
  misc_feature (61)..(62): /note="This region represents a CpG dinucleotide"
  misc_feature (61)..(61): /note="Nucleotide may be methylated to form 5-methylcytosine"
aaaactttcacccgtgctaataatctaacctatctcagattcttggctttgacagtagtccgtaggctaaccgcagacaacggtgcttctacacaaaacacgaattgggaggaaataaactc

SEQ ID NO: 30595 - DNA, 122 bp, Homo sapiens
  misc_feature (61)..(62): /note="This region represents a CpG dinucleotide"
  misc_feature (61)..(61): /note="Nucleotide may be methylated to form 5-methylcytosine"
aataatccccaagccagggagaggggaaggaagcctttgctggatgcaaaggcccagctacgtaacctccaaatgagcatgaaaaaaatcacatataagaagagaggctttaaagacacatg

SEQ ID NO: 30596 - DNA, 122 bp, Homo sapiens
  misc_feature (61)..(62): /note="This region represents a CpG dinucleotide"
  misc_feature (61)..(61): /note="Nucleotide may be methylated to form 5-methylcytosine"
agaaaacatcatccttttatctgatcctgtgcaaaatgagtggagcagacactgtaccagcgataagatgattgctaaatgactcttctcacattctatcgatgggctgatgaaagaaatta

SEQ ID NO: 30597 - DNA, 122 bp, Homo sapiens
  misc_feature (61)..(62): /note="This region represents a CpG dinucleotide"
  misc_feature (61)..(61): /note="Nucleotide may be methylated to form 5-methylcytosine"
aggaaaaattttaactaatgcagttagatttgaactatgcaaatctccatcaatttctcacgtctcctttttttcctccttctctttctcttttgttttctgctcaccaacctgcttgtcat

SEQ ID NO: 30598 - DNA, 122 bp, Homo sapiens
  misc_feature (61)..(62): /note="This region represents a CpG dinucleotide"
  misc_feature (61)..(61): /note="Nucleotide may be methylated to form 5-methylcytosine"
gctgacctctggcctcaagctaggatcatggtgtggtgtgatttatgctctacaactctgcgcaggttcaggctgaaactagactacagtggagactccttctttgattagctccttccctt

SEQ ID NO: 30599 - DNA, 122 bp, Homo sapiens
  misc_feature (61)..(62): /note="This region represents a CpG dinucleotide"
  misc_feature (61)..(61): /note="Nucleotide may be methylated to form 5-methylcytosine"
taaacagcccagcgtggtgattcctattcacttagtagcctccccatctagaatatactccgtgatctttcttgatggccagactgtgtaaaattcatacagtgtttactacagggatcccc

SEQ ID NO: 30600 - DNA, 122 bp, Homo sapiens
  misc_feature (61)..(62): /note="This region represents a CpG dinucleotide"
  misc_feature (61)..(61): /note="Nucleotide may be methylated to form 5-methylcytosine"
tcatgtgagtcagctttgaagcgaatcctccagcccagtcaggttttcagacaactccagcgttggccaaaatcttgactacaacctcaggagaaaccctggccagaactacccagataagc

SEQ ID NO: 30601 - DNA, 122 bp, Homo sapiens
  misc_feature (61)..(62): /note="This region represents a CpG dinucleotide"
  misc_feature (61)..(61): /note="Nucleotide may be methylated to form 5-methylcytosine"
tgatcactgcggttcaaatcctggcttcatcacttattaggtgagtgatcgtgagaagatcgttctgtgcctatctgtgcctgttttctctattaaaatagggatgatagtaatagtaccta

SEQ ID NO: 30602 - DNA, 122 bp, Homo sapiens
  misc_feature (61)..(62): /note="This region represents a CpG dinucleotide"
  misc_feature (61)..(61): /note="Nucleotide may be methylated to form 5-methylcytosine"
ctgcgtttctttgcctgtcctgggtgggactgcccctcgttgctgctatccggttgggggcgggaaggtgggtggctgggtgggcagatggcacctgccagccccagtgaccagatgggggc

SEQ ID NO: 30603 - DNA, 122 bp, Homo sapiens
  misc_feature (61)..(62): /note="This region represents a CpG dinucleotide"
  misc_feature (61)..(61): /note="Nucleotide may be methylated to form 5-methylcytosine"
agttgctttgagtggtgttgttctcccttgcaacctttgacctattatgaagataaataacggatgctggcaaggtggtggagaaaagggaacacttacacgcttccagttagaacactctt

SEQ ID NO: 30604 - DNA, 122 bp, Homo sapiens
  misc_feature (61)..(62): /note="This region represents a CpG dinucleotide"
  misc_feature (61)..(61): /note="Nucleotide may be methylated to form 5-methylcytosine"
tccagcccttatcaaaattaggctgacttgagcctcttacccagcaagggtgtgttccttcgtggaacagaaccagctggctgctgcttaggcgatctttgaccagagctttccctgagagt

SEQ ID NO: 30605 - DNA, 122 bp, Homo sapiens
  misc_feature (61)..(62): /note="This region represents a CpG dinucleotide"
  misc_feature (61)..(61): /note="Nucleotide may be methylated to form 5-methylcytosine"
catcagtatcctctgccatgatgacgatatctacacatctgaatcacccaggacatttttcgtacaatcagactttacaaacctggctgtagatttttgtttttgtttttttttttagtgta

SEQ ID NO: 30606 - DNA, 122 bp, Homo sapiens
  misc_feature (61)..(62): /note="This region represents a CpG dinucleotide"
  misc_feature (61)..(61): /note="Nucleotide may be methylated to form 5-methylcytosine"
gattaaattataagaggctgtgactttgccttacagataatctccaccctgttgttctctcgcttgctcactctaataaagcaagctgctatgttgcaagctgcccagtggaaaggtccctc

SEQ ID NO: 30607 - DNA, 122 bp, Homo sapiens
  misc_feature (61)..(62): /note="This region represents a CpG dinucleotide"
  misc_feature (61)..(61): /note="Nucleotide may be methylated to form 5-methylcytosine"
cgatgtctgcatggagctggcatttgactggcaattgcccatcttgagcagggttttcatcgagggctcggagctttagaggtgcagcgtcactcaggttcaaggtgctcagcaactctgtg

SEQ ID NO: 30608 - DNA, 122 bp, Homo sapiens
  misc_feature (61)..(62): /note="This region represents a CpG dinucleotide"
  misc_feature (61)..(61): /note="Nucleotide may be methylated to form 5-methylcytosine"
agacggctaaactctcccattcttctttatagtggtgactattgtccttatttggtgtttcgcatacccagtaatgtttttatattttagtacttaggtttgtgctatttatatgcatttta

SEQ ID NO: 30609 - DNA, 122 bp, Homo sapiens
  misc_feature (61)..(62): /note="This region represents a CpG dinucleotide"
  misc_feature (61)..(61): /note="Nucleotide may be methylated to form 5-methylcytosine"
catatacaatgtggtatcactgtgcaccctaattctctacaaaagtcttggcaggtgaggcgttatgtgggaagcccacgggaattaccctaaacctgaccaagagaataaataaggcagtc

SEQ ID NO: 30610 - DNA, 122 bp, Homo sapiens
  misc_feature (61)..(62): /note="This region represents a CpG dinucleotide"
  misc_feature (61)..(61): /note="Nucleotide may be methylated to form 5-methylcytosine"
cggctttagatctacgagagacacagctgcggctcatcagcaaatgttctttggctctgacgtgagcttgactaacttatgtctactgaacctgctggggtacatcctgtagagtgtgctta

SEQ ID NO: 30611 - DNA, 122 bp, Homo sapiens
  misc_feature (61)..(62): /note="This region represents a CpG dinucleotide"
  misc_feature (61)..(61): /note="Nucleotide may be methylated to form 5-methylcytosine"
atgtttagatacctgtcatgaagatttaagcacaatgaatgagacactggagaagctctgcgtttgaagtcaacaaaactggattctggtcctccatgacattaaaaagtctcacaattttt

SEQ ID NO: 30612 - DNA, 122 bp, Homo sapiens
  misc_feature (61)..(62): /note="This region represents a CpG dinucleotide"
  misc_feature (61)..(61): /note="Nucleotide may be methylated to form 5-methylcytosine"
aatttggctacagttttctgtctgcagaaaggctcccaaagggaagacgccaggctggaacgagagtgactcatcccgggccctcattgtgcctgattcacccagaggaagctttgtgtgga

SEQ ID NO: 30613 - DNA, 122 bp, Homo sapiens
  misc_feature (61)..(62): /note="This region represents a CpG dinucleotide"
  misc_feature (61)..(61): /note="Nucleotide may be methylated to form 5-methylcytosine"
aggctgcagtcttttgtaggcaagggataggcagatgctcctaaactataaatgcctgtgcgcgtattaaaaacagatacttctttggtgagactactgaaaaaacagtgctctttgatctg

SEQ ID NO: 30614 - DNA, 122 bp, Homo sapiens
  misc_feature (61)..(62): /note="This region represents a CpG dinucleotide"
  misc_feature (61)..(61): /note="Nucleotide may be methylated to form 5-methylcytosine"
ggcacaagccaaggaagaggggaaaggagaaacctgacggacacgtctgcgacaaatccccggggaaaatcccccccaggcacgtccctcaggaagccagtggagaaacgcttctcaggacc

SEQ ID NO: 30615 - DNA, 122 bp, Homo sapiens
  misc_feature (61)..(62): /note="This region represents a CpG dinucleotide"
  misc_feature (61)..(61): /note="Nucleotide may be methylated to form 5-methylcytosine"
gagctcagagtcactggaagctccgcctgtgagtgcattggtgactggcttcattcattccgcatcgtgtcatccactatgtggataaacgtgtaagtgctccatccctttttgtgggtgaa

SEQ ID NO: 30616 - DNA, 122 bp, Homo sapiens
  misc_feature (61)..(62): /note="This region represents a CpG dinucleotide"
  misc_feature (61)..(61): /note="Nucleotide may be methylated to form 5-methylcytosine"
cacatcccctcctctgtatggccttccccaagcacaggcccctccctaaagtgtgtgcggcgttatcagattggtgtgaatgttaatctctttaaaggaagcaggaatttatctgtactcca

SEQ ID NO: 30617 - DNA, 122 bp, Homo sapiens
  misc_feature (61)..(62): /note="This region represents a CpG dinucleotide"
  misc_feature (61)..(61): /note="Nucleotide may be methylated to form 5-methylcytosine"
tctggcctcttgttaaatgtgacatactgagtcagaggcagacgtccttctgtggttattcgcttcctgtctgattaatttgttgtttgttgttccttcctcctttgctgcagaaaaagaaa

SEQ ID NO: 30618 - DNA, 122 bp, Homo sapiens
  misc_feature (61)..(62): /note="This region represents a CpG dinucleotide"
  misc_feature (61)..(61): /note="Nucleotide may be methylated to form 5-methylcytosine"
ccaggcactcagtggtgtcacctcaggaggttccgatgacctcacatcaaggtggtgtgccgatgcaggagcaatgcaggccctgaatgttgccccacctgatgcggccactcagctgaccg

SEQ ID NO: 30619 - DNA, 122 bp, Homo sapiens
  misc_feature (61)..(62): /note="This region represents a CpG dinucleotide"
  misc_feature (61)..(61): /note="Nucleotide may be methylated to form 5-methylcytosine"
gtgcgatcttggctcactgcaacctccgcctcctgggttcaagcaattctcctgcctcagcgccccaggtagctaggattacaagcgtctgccaccaagcccagctaatttttgtattctta

SEQ ID NO: 30620 - DNA, 122 bp, Homo sapiens
  misc_feature (61)..(62): /note="This region represents a CpG dinucleotide"
  misc_feature (61)..(61): /note="Nucleotide may be methylated to form 5-methylcytosine"
tgcacaccatgacggttgtgcatgattcatttattagggagacagaccagatgcgtgggacggccctgctcaccatcaaggcagatctgtgggcagacagagcattgggttctgctgtgggt

SEQ ID NO: 30621 - DNA, 122 bp, Homo sapiens
  misc_feature (61)..(62): /note="This region represents a CpG dinucleotide"
  misc_feature (61)..(61): /note="Nucleotide may be methylated to form 5-methylcytosine"
tattatccccattttacagatgagaaaactgaggcacagacggtcaagtaacatgctcaacgtcatagagataagtagcagagcaggattcacatcagctggcttggatccagaggctaagc

SEQ ID NO: 30622 - DNA, 122 bp, Homo sapiens
  misc_feature (61)..(62): /note="This region represents a CpG dinucleotide"
  misc_feature (61)..(61): /note="Nucleotide may be methylated to form 5-methylcytosine"
aaactctaaagtacaaaaaaaacccaccaaaaacccaaagtaactacaaagctaatgtaacgtaaatgcaatataacaggcatttttattactcttttctaatgtgggctattaaatttcaa

SEQ ID NO: 30623 - DNA, 122 bp, Homo sapiens
  misc_feature (61)..(62): /note="This region represents a CpG dinucleotide"
  misc_feature (61)..(61): /note="Nucleotide may be methylated to form 5-methylcytosine"
caagaatgtgtgaagcaaaagaactttcatactgtttactatgtaaagtgaggggattcgcgttaatctgtaacttttggttggactatcctgaatcttaaagacaggaagactcaagtttg

SEQ ID NO: 30624 - DNA, 122 bp, Homo sapiens
  misc_feature (61)..(62): /note="This region represents a CpG dinucleotide"
  misc_feature (61)..(61): /note="Nucleotide may be methylated to form 5-methylcytosine"
aaatgcatgccctgctgagcatgagtcagggtaagggcagacttataggcaatctcattccgggctttctatttttttccatctggcttctcttcctgagtttgttttgcctttcgcttttt

SEQ ID NO: 30625 - DNA, 122 bp, Homo sapiens
  misc_feature (61)..(62): /note="This region represents a CpG dinucleotide"
  misc_feature (61)..(61): /note="Nucleotide may be methylated to form 5-methylcytosine"
gtcacccccagctcactggggaatctaggccatgccagtggcaagctggccccagtcccccggcttgctggagtagcaggaaagggcaagaacaaaacccagaccccagctggttctggaaa

SEQ ID NO: 30626 - DNA, 122 bp, Homo sapiens
  misc_feature (61)..(62): /note="This region represents a CpG dinucleotide"
  misc_feature (61)..(61): /note="Nucleotide may be methylated to form 5-methylcytosine"
ttcctgccactctgctgctccctcaggctgctctgtagttattcacaaatacttgctaagcgcaaccatgcatagggcaacacttccgacaataaggctggggaggggaagtgaacaaagca

SEQ ID NO: 30627 - DNA, 122 bp, Homo sapiens
  misc_feature (61)..(62): /note="This region represents a CpG dinucleotide"
  misc_feature (61)..(61): /note="Nucleotide may be methylated to form 5-methylcytosine"
cagatttagctaccttcccccgaaagcctcaaagttctgcaaactcacagccaagcaaaacgcagctgcagtcgagccagcctcgaaaggtcttacaactttctgcagtggccagcttgttc

SEQ ID NO: 30628 - DNA, 122 bp, Homo sapiens
  misc_feature (61)..(62): /note="This region represents a CpG dinucleotide"
  misc_feature (61)..(61): /note="Nucleotide may be methylated to form 5-methylcytosine"
tcagaccactgtgcaggccagtgacggcctggaggggcctggcccctacccgtgacttcacgtgccctgcagagattcagccatgggtgtgagccacagaggaggccaatacggaggctcgg

SEQ ID NO: 30629 - DNA, 122 bp, Homo sapiens
  misc_feature (61)..(62): /note="This region represents a CpG dinucleotide"
  misc_feature (61)..(61): /note="Nucleotide may be methylated to form 5-methylcytosine"
ttcagtagcctgagtcccttcttctttttctttcacgttactagggcagttgttcgctgacgccttaattctggaacacgttccttgcccagattcttggtggctgcttgttcccttctcat

SEQ ID NO: 30630 - DNA, 122 bp, Homo sapiens
  misc_feature (61)..(62): /note="This region represents a CpG dinucleotide"
  misc_feature (61)..(61): /note="Nucleotide may be methylated to form 5-methylcytosine"
tcattgacgaagatgaacacgatgctcacctctggcaggctgtcaggaaatgagaggttacggcacctgcaaagaacagccaagcgcttagatttgtgactcagctggagtcatctcaggag

SEQ ID NO: 30631 - DNA, 122 bp, Homo sapiens
  misc_feature (61)..(62): /note="This region represents a CpG dinucleotide"
  misc_feature (61)..(61): /note="Nucleotide may be methylated to form 5-methylcytosine"
tgagagggaaataattttctggatgtgacagggggtctctaagagcaaccccaggttctgcgattcactaggagaactcacaggactcagcatatagttgtattcatggctaagatttacta

SEQ ID NO: 30632 - DNA, 122 bp, Homo sapiens
  misc_feature (61)..(62): /note="This region represents a CpG dinucleotide"
  misc_feature (61)..(61): /note="Nucleotide may be methylated to form 5-methylcytosine"
ataagggactgtgacatctgtcttgctagcagaatctctctattgccttctgagctggcacgatttgatgaagcaagaatctgtgttggagaagcccacatgacaaaaaaaagagggtggag

SEQ ID NO: 30633 - DNA, 122 bp, Homo sapiens
  misc_feature (61)..(62): /note="This region represents a CpG dinucleotide"
  misc_feature (61)..(61): /note="Nucleotide may be methylated to form 5-methylcytosine"
ctctgtgttctcagcggtcagggattggatgcaggaaagagcaatggggccaggcaggcacgcttcaggagtaagcaccgtgtgcatggcacgctgtcaagctcagacctattactgaatac

SEQ ID NO: 30634 - DNA, 122 bp, Homo sapiens
  misc_feature (61)..(62): /note="This region represents a CpG dinucleotide"
  misc_feature (61)..(61): /note="Nucleotide may be methylated to form 5-methylcytosine"
ctgcctcgggatcccaggcagggctggcggggcgagcgcggtcagcatggtggggccggacgccgtgcactatctccctcgcattcgcctccgctggtggcgccggcactgtccccgccccg

SEQ ID NO: 30635 - DNA, 122 bp, Homo sapiens
  misc_feature (61)..(62): /note="This region represents a CpG dinucleotide"
  misc_feature (61)..(61): /note="Nucleotide may be methylated to form 5-methylcytosine"
cccacccgtcttcctgaaccatcgagaaattacgtcttaccaaatcctactgaggactggcgaagaacaaaagggaaccaaatcacagatagatgtgaaggcagatagacaattcaactgtt

SEQ ID NO: 30636 - DNA, 122 bp, Homo sapiens
  misc_feature (61)..(62): /note="This region represents a CpG dinucleotide"
  misc_feature (61)..(61): /note="Nucleotide may be methylated to form 5-methylcytosine"
cctgcttggatggagggtcttggctgactcccaaggagtgctttcagctgcacttggggccgcttctctcccttctgttgcaggctttctttcagagagctaggcgaggctgggctggtgtg

SEQ ID NO: 30637 - DNA, 122 bp, Homo sapiens
  misc_feature (61)..(62): /note="This region represents a CpG dinucleotide"
  misc_feature (61)..(61): /note="Nucleotide may be methylated to form 5-methylcytosine"
tggctctcagccagggagttccccatccagctgctgtgtgtgcatcacaggtctaaagagcgcccacggcctataacactgatcagtctgagtctcagtccatcctgccatgggttgcagac

SEQ ID NO: 30638 - DNA, 122 bp, Homo sapiens
  misc_feature (61)..(62): /note="This region represents a CpG dinucleotide"
  misc_feature (61)..(61): /note="Nucleotide may be methylated to form 5-methylcytosine"
aactagttgttagtcacttttaatgattcagttgtcaggcagttttgggttgtgcatttgcgagttgccaccagaatgactaagtgtgataatttaatgactcctgactgacctccactgcc

SEQ ID NO: 30639 - DNA, 122 bp, Homo sapiens
  misc_feature (61)..(62): /note="This region represents a CpG dinucleotide"
  misc_feature (61)..(61): /note="Nucleotide may be methylated to form 5-methylcytosine"
agggttgagatccagagctgtgtctgagtgttgtctgtgtcctccctggagaacatccttcgttttctggttcggagtgtatattgattggcataataaccactactcatcagtaaacctgt

SEQ ID NO: 30640 - DNA, 122 bp, Homo sapiens
  misc_feature (61)..(62): /note="This region represents a CpG dinucleotide"
  misc_feature (61)..(61): /note="Nucleotide may be methylated to form 5-methylcytosine"
tgcccggtggcaccaggcagctgagcaggccctaatcctgtctagggcagccttactcaccggcagatggctgactggctgtaggctggaccttccgttgcagtcagagcctgacccacctg

SEQ ID NO: 30641 - DNA, 122 bp, Homo sapiens
  misc_feature (61)..(62): /note="This region represents a CpG dinucleotide"
  misc_feature (61)..(61): /note="Nucleotide may be methylated to form 5-methylcytosine"
ggtgagaccaagaacccaccaattccagacgtaattacacagcggggcctgtcggggagtcggggaaaagggaagggagagcattataacaaaaacctaacacatgccgggtttaaaaccta

SEQ ID NO: 30642 - DNA, 122 bp, Homo sapiens
  misc_feature (61)..(62): /note="This region represents a CpG dinucleotide"
  misc_feature (61)..(61): /note="Nucleotide may be methylated to form 5-methylcytosine"
ttttttgtcctcccccatgtcaggtttctcttcttagtttctccttgtggcaggtacagtcgctgcagggccagccgtcatgtttgcatatagcctgcaagaaggaggaaaaagggcacacc

SEQ ID NO: 30643 - DNA, 122 bp, Homo sapiens
  misc_feature (61)..(62): /note="This region represents a CpG dinucleotide"
  misc_feature (61)..(61): /note="Nucleotide may be methylated to form 5-methylcytosine"
catggcccctgcacgttccacctcatctcccaggatgtccagacaccagtgggtcagctccgtgagggcaggcagttagctgttttgttcactactatatcctcagcaactagagactacca

SEQ ID NO: 30644 - DNA, 122 bp, Homo sapiens
  misc_feature (61)..(62): /note="This region represents a CpG dinucleotide"
  misc_feature (61)..(61): /note="Nucleotide may be methylated to form 5-methylcytosine"
tagtgccctgtgctaaattctttgcagacgttatgttatctccccctgtaaacacagacccgcaccatccccttttccaggcaaaataaaccaagatcttccagctgttctttgtgtgattg

SEQ ID NO: 30645 - DNA, 122 bp, Homo sapiens
  misc_feature (61)..(62): /note="This region represents a CpG dinucleotide"
  misc_feature (61)..(61): /note="Nucleotide may be methylated to form 5-methylcytosine"
tggccatggagcatgtggtccagggcacagatagcagcagctctggttccaaaggcagtgcgtcctgccaaagccttctctctctgcatctcaaggtcacaataatagattacgaaagagtg

SEQ ID NO: 30646 - DNA, 122 bp, Homo sapiens
  misc_feature (61)..(62): /note="This region represents a CpG dinucleotide"
  misc_feature (61)..(61): /note="Nucleotide may be methylated to form 5-methylcytosine"
ggtaggaaattattattttttctcatcaagttatacaaaatgacactgaacgaaaaaatgcgattcaaggacctgctgtactgtactttttgctctgccagtcaggtgcgatcgctggcttt

SEQ ID NO: 30647 - DNA, 122 bp, Homo sapiens
  misc_feature (61)..(62): /note="This region represents a CpG dinucleotide"
  misc_feature (61)..(61): /note="Nucleotide may be methylated to form 5-methylcytosine"
actttcctagacaggccagattagctgttctacacgaacgagtaggaccttaaaacacaccgctccccaccttccttctgtgaagaactcaatgcgagattgatcatagtggtgatgacatg

SEQ ID NO: 30648 - DNA, 122 bp, Homo sapiens
  misc_feature (61)..(62): /note="This region represents a CpG dinucleotide"
  misc_feature (61)..(61): /note="Nucleotide may be methylated to form 5-methylcytosine"
caaaacaaataagactctccccagttactcacctagaccaccctgacaaatgtctgtgcgcgtggctccaccaacgataaactgagggctgggacacaactcctgaaagtaatttggaacaa

SEQ ID NO: 30649 - DNA, 122 bp, Homo sapiens
  misc_feature (61)..(62): /note="This region represents a CpG dinucleotide"
  misc_feature (61)..(61): /note="Nucleotide may be methylated to form 5-methylcytosine"
ccaatccatttttggaaacatctaggcgtttcttgattaccatgctctggatggccaaatcggggggttttcatgcagtatcacacctggacttcgagccacaagtgaacacttctctgggc

SEQ ID NO: 30650 - DNA, 122 bp, Homo sapiens
  misc_feature (61)..(62): /note="This region represents a CpG dinucleotide"
  misc_feature (61)..(61): /note="Nucleotide may be methylated to form 5-methylcytosine"
tcgtcgaggctcccaggtagccgggatgggtcacagagaagccgctgtgccggatctgctcggtccagtcgagctggctgaggctgtgttcccccaggcgcacccagtacctgctgccggtg

SEQ ID NO: 30651 - DNA, 122 bp, Homo sapiens
  misc_feature (61)..(62): /note="This region represents a CpG dinucleotide"
  misc_feature (61)..(61): /note="Nucleotide may be methylated to form 5-methylcytosine"
ccgccttcttgtttcagctctgccactgacttccctgtttcatatggcccttaagcacagcgctgacatggtatcgagtgtttttaaccacaagaaggctatgatgtgccttacagagaaaa

SEQ ID NO: 30652 - DNA, 122 bp, Homo sapiens
  misc_feature (61)..(62): /note="This region represents a CpG dinucleotide"
  misc_feature (61)..(61): /note="Nucleotide may be methylated to form 5-methylcytosine"
cctggcctgggaacatgggcctctgagtcagggggccttgggttcttgcctgaatgctgccgttgtctagctgtgtaaccttgggcgtcctgccgaaatggcttcctccctcccttgtggac

SEQ ID NO: 30653 - DNA, 122 bp, Homo sapiens
  misc_feature (61)..(62): /note="This region represents a CpG dinucleotide"
  misc_feature (61)..(61): /note="Nucleotide may be methylated to form 5-methylcytosine"
atgactccaggtggcaatgatgcaatgggctttgcttaattagcccattagcagccagcacggctgtgggtggaagagaaaacaactctcagtttggggtgaaatgaaaatgcatactgtac

SEQ ID NO: 30654 - DNA, 122 bp, Homo sapiens
  misc_feature (61)..(62): /note="This region represents a CpG dinucleotide"
  misc_feature (61)..(61): /note="Nucleotide may be methylated to form 5-methylcytosine"
aagatctcaccaaggctttcctagttcttccactcaagtctgatttagtgctcagctgggcgcttaacgaattcatgcctgttgtgaaagccctaatccaggatttcattgtacctaaatga

SEQ ID NO: 30655 - DNA, 122 bp, Homo sapiens
  misc_feature (61)..(62): /note="This region represents a CpG dinucleotide"
  misc_feature (61)..(61): /note="Nucleotide may be methylated to form 5-methylcytosine"
gacagaagctttcaacaaacttcttaaactcctgtttatactcttaaattgcttggtaaacgcctccttctaaggtactttaaaaggtcaagttttgcccaagtctcctctctgaaaactaa

SEQ ID NO: 30656 - DNA, 122 bp, Homo sapiens
  misc_feature (61)..(62): /note="This region represents a CpG dinucleotide"
  misc_feature (61)..(61): /note="Nucleotide may be methylated to form 5-methylcytosine"
cacaagaaaaggtcacatggtagagtggcattctgccagtgtatgacaactcagtgattgcgatttttcaaccgtattattctgaggacactgtggtaatcaagaactatccataactaatg

SEQ ID NO: 30657 - DNA, 122 bp, Homo sapiens
  misc_feature (61)..(62): /note="This region represents a CpG dinucleotide"
  misc_feature (61)..(61): /note="Nucleotide may be methylated to form 5-methylcytosine"
agacggggtttcaccatgttagccaggacttcctctaattctcccatcaaatgcagagggcgtccttttctgcacccatagtttctaccctatattgtattacaatgcttgtggtggccctg

SEQ ID NO: 30658 - DNA, 122 bp, Homo sapiens
  misc_feature (61)..(62): /note="This region represents a CpG dinucleotide"
  misc_feature (61)..(61): /note="Nucleotide may be methylated to form 5-methylcytosine"
ggcagccttttgttcaagatcaaatggatgtgatttgccttgtggaggtggcatcctgcccgggcggaggaggggatggttcctggagctccatcttgaggatctgggaggccaggaagaca

SEQ ID NO: 30659 - DNA, 122 bp, Homo sapiens
  misc_feature (61)..(62): /note="This region represents a CpG dinucleotide"
  misc_feature (61)..(61): /note="Nucleotide may be methylated to form 5-methylcytosine"
aaaatattttctaaccagttctaggacgctttggctttccccctctggtagttgtggttccggatgaatttcttgcccctgagtagataagaatccctggagggatctgtgtgtttcacttc

SEQ ID NO: 30660 - DNA, 122 bp, Homo sapiens
  misc_feature (61)..(62): /note="This region represents a CpG dinucleotide"
  misc_feature (61)..(61): /note="Nucleotide may be methylated to form 5-methylcytosine"
gctcagcaccggcacccggggactgttgctgatggaggctccaccgtctgaggatgtcaacgtctctgtgtgtgcttccacggtcactgcagcagggcagaaaggacatgagcacgggcact

SEQ ID NO: 30661 - DNA, 122 bp, Homo sapiens
  misc_feature (61)..(62): /note="This region represents a CpG dinucleotide"
  misc_feature (61)..(61): /note="Nucleotide may be methylated to form 5-methylcytosine"
ggcgggatgggatggggtgggatgggatgggactgggagagccagcagggggcctctgagcggaggaaagactagcaaggtcatgagtgcagactcttcctataaggggcagatagtgagta

SEQ ID NO: 30662 - DNA, 122 bp, Homo sapiens
  misc_feature (61)..(62): /note="This region represents a CpG dinucleotide"
  misc_feature (61)..(61): /note="Nucleotide may be methylated to form 5-methylcytosine"
gaagttaagcagcttgccacaggtgacacagttggtaggtggtgatgcagactggagcgacggcttcacctgctgcatgaacctgctctctgtaagggctgcgagagaaaggcccaggcctg

SEQ ID NO: 30663 - DNA, 122 bp, Homo sapiens
  misc_feature (61)..(62): /note="This region represents a CpG dinucleotide"
  misc_feature (61)..(61): /note="Nucleotide may be methylated to form 5-methylcytosine"
ggcactggcattaggctggttccccacttctgtaggttattatgctggacataaagcctgcgtttgctgtcgagccgccctctttctgtgtgtgtgtgtgtgtgtgtgtgtgtctttcttta

SEQ ID NO: 30664 - DNA, 122 bp, Homo sapiens
  misc_feature (61)..(62): /note="This region represents a CpG dinucleotide"
  misc_feature (61)..(61): /note="Nucleotide may be methylated to form 5-methylcytosine"
ccacttcacatgcaccttctgcctgcgcccgctcaccaaggggtccttccaggagcgcgccggcaagccctactgccagccctgcttcctgaagctcttcggctgacagcccgctcggctcg

SEQ ID NO: 30665 - DNA, 122 bp, Homo sapiens
  misc_feature (61)..(62): /note="This region represents a CpG dinucleotide"
  misc_feature (61)..(61): /note="Nucleotide may be methylated to form 5-methylcytosine"
tttgcaataatttattgagcaagtactatgtgcaagaccttgtgctatgtactaggaacacgaaaggggatatgacacagtctgtgccttcagagctcataatgcattgggtaagatgggtg

SEQ ID NO: 30666 - DNA, 122 bp, Homo sapiens
  misc_feature (61)..(62): /note="This region represents a CpG dinucleotide"
  misc_feature (61)..(61): /note="Nucleotide may be methylated to form 5-methylcytosine"
tgaagtcaaagcgagtcacttcttggtggccgtactgctggatgctgatgagctggccctcgtataccacaccaggcttcaggcctttgatggtgtaggagtttaagtggcctggtatggta

SEQ ID NO: 30667 - DNA, 122 bp, Homo sapiens
  misc_feature (61)..(62): /note="This region represents a CpG dinucleotide"
  misc_feature (61)..(61): /note="Nucleotide may be methylated to form 5-methylcytosine"
gggctcctcaagtgccgccaaagtgggagcccaggcagaggaggcgccgagagcgagcgacggctatgaggactgccaacccgctgtcacctctcagcaggaaaacaagcttggggctccca

SEQ ID NO: 30668 - DNA, 122 bp, Homo sapiens
  misc_feature (61)..(62): /note="This region represents a CpG dinucleotide"
  misc_feature (61)..(61): /note="Nucleotide may be methylated to form 5-methylcytosine"
aaaaaaagaccaaaacaaacaaacaaacaaacaaaaaacagtcccatggctgaaacgtgccgtgacatattcggtgcacacactgtttacacccacaggtagacacgtgagttgctttctgt

SEQ ID NO: 30669 - DNA, 122 bp, Homo sapiens
  misc_feature (61)..(62): /note="This region represents a CpG dinucleotide"
  misc_feature (61)..(61): /note="Nucleotide may be methylated to form 5-methylcytosine"
aagtgattaaagatgcataatgtgaatgatgcctaaaatttccacccttacagaagctgccgtaaaatgccatactctagttaagcttatggagagggaaactagctctagagaaaagtact

SEQ ID NO: 30670 - DNA, 122 bp, Homo sapiens
  misc_feature (61)..(62): /note="This region represents a CpG dinucleotide"
  misc_feature (61)..(61): /note="Nucleotide may be methylated to form 5-methylcytosine"
aatcagagcgcgctgcttaacacgctcccgggtgactcgtacgtagtcagtgctgggaagcgctggtctacagtcatgtttctcaagcttgaatgcacatccgaatcccccggaaggtttgc

SEQ ID NO: 30671 - DNA, 122 bp, Homo sapiens
  misc_feature (61)..(62): /note="This region represents a CpG dinucleotide"
  misc_feature (61)..(61): /note="Nucleotide may be methylated to form 5-methylcytosine"
atcattaagcagtttcttggctatgttcccatcatggtgaaatccaagctttgcaacttacgtaaccttcccccacaagccctcattgagcaccatgaggaggcagaggtaatgacgggcgt

SEQ ID NO: 30672 - DNA, 122 bp, Homo sapiens
  misc_feature (61)..(62): /note="This region represents a CpG dinucleotide"
  misc_feature (61)..(61): /note="Nucleotide may be methylated to form 5-methylcytosine"
gcagatgttcttgttccaaaaggttcactagccatgcagctccccgtctcttcaaagctgcggagagagtgactctccgatgagtcacagctgcttctttgctgattggtatggccacaagg

SEQ ID NO: 30673 - DNA, 122 bp, Homo sapiens
  misc_feature (61)..(62): /note="This region represents a CpG dinucleotide"
  misc_feature (61)..(61): /note="Nucleotide may be methylated to form 5-methylcytosine"
agggttagaaatggcaacactccataaggattagcttgtgggggttaaggaaaggacctacgctcttctgggatgactagcaagttttgaacttgaaaaagggtggtgtcatttatgaaact

SEQ ID NO: 30674 - DNA, 122 bp, Homo sapiens
  misc_feature (61)..(62): /note="This region represents a CpG dinucleotide"
  misc_feature (61)..(61): /note="Nucleotide may be methylated to form 5-methylcytosine"
ctggatgatgcctccgacgagtacaagatcatcatgctcaaccggcgccacctcagcttccgagtcatcaaggttgggccggccccacctgccctaagccctgccccaaacccccttgggcc

SEQ ID NO: 30675 - DNA, 122 bp, Homo sapiens
  misc_feature (61)..(62): /note="This region represents a CpG dinucleotide"
  misc_feature (61)..(61): /note="Nucleotide may be methylated to form 5-methylcytosine"
gctgaatgaaacagaatattctctcagctcagtggagctggagcttagtgaggtagtttccgtaatacatagaaaaagcttacagtcataaaattatttgaatataatagctcaaaatccat

SEQ ID NO: 30676 - DNA, 122 bp, Homo sapiens
  misc_feature (61)..(62): /note="This region represents a CpG dinucleotide"
  misc_feature (61)..(61): /note="Nucleotide may be methylated to form 5-methylcytosine"
ttactgagccttttggaaaatcaaccaaaagtcttcgctgcttggagtctgattgagaagcgacagccagtgagggtgaagacgcagaaaccttcacagtagctcctcctcttagggtttta

SEQ ID NO: 30677 - DNA, 122 bp, Homo sapiens
  misc_feature (61)..(62): /note="This region represents a CpG dinucleotide"
  misc_feature (61)..(61): /note="Nucleotide may be methylated to form 5-methylcytosine"
gccagcacgcagatgacactcatgtaacagcagccatccaggtgagaatgccacttaccacgtgagatcttgctggttatcctgggtgctgccaccactggttttagtcatacagacagttt

SEQ ID NO: 30678 - DNA, 122 bp, Homo sapiens
  misc_feature (61)..(62): /note="This region represents a CpG dinucleotide"
  misc_feature (61)..(61): /note="Nucleotide may be methylated to form 5-methylcytosine"
gcaggtcatcagtgttttacatccaacaaactaatggtcatttgctgctttataaagagccgatataattttgtcttccttgttattaaaggatcaagcaagggtgtttctgtaccagttca

SEQ ID NO: 30679 - DNA, 122 bp, Homo sapiens
  misc_feature (61)..(62): /note="This region represents a CpG dinucleotide"
  misc_feature (61)..(61): /note="Nucleotide may be methylated to form 5-methylcytosine"
cctggcctgagaggtggggctgactgaggatggccacgaggtacccagctgtcctaagctcgtgaatgatagaggggtaggtggtgtcacctttctcattagaatgtgctgggctgttgtgt

SEQ ID NO: 30680 - DNA, 122 bp, Homo sapiens
  misc_feature (61)..(62): /note="This region represents a CpG dinucleotide"
  misc_feature (61)..(61): /note="Nucleotide may be methylated to form 5-methylcytosine"
ggaagtggtggaagttgcaatcactgtcagcttctgctgctttaatcatttctaaaaaagcgagggagaggaaacatgaatcaaaatagttcaaaataaaaacaataccattctacaagaag

SEQ ID NO: 30681 - DNA, 122 bp, Homo sapiens
  misc_feature (61)..(62): /note="This region represents a CpG dinucleotide"
  misc_feature (61)..(61): /note="Nucleotide may be methylated to form 5-methylcytosine"
gctttaacaaggctatacttcccaatctcaagtcaggtgaacacaatggacacttccacacgtcatctaaagataaacagaacctgacaaactgtcctcacttccaagaagaaagggctaaa

SEQ ID NO: 30682 - DNA, 122 bp, Homo sapiens
  misc_feature (61)..(62): /note="This region represents a CpG dinucleotide"
  misc_feature (61)..(61): /note="Nucleotide may be methylated to form 5-methylcytosine"
agaaagagactcaggaggagattgtgtccttctctttctctggatcttgttgtttacattcgaaacctggtcacactgcagtcgtcttagcaccggtttgaagatgaagccaactcagaggg

SEQ ID NO: 30683 - DNA, 122 bp, Homo sapiens
  misc_feature (61)..(62): /note="This region represents a CpG dinucleotide"
  misc_feature (61)..(61): /note="Nucleotide may be methylated to form 5-methylcytosine"
actagaggtgtgtggcttgtgggattctgccaccctgtgtgcagcccttgagacgtggctcgtgcagcaaggccaagtccctgattgttctctcgttttaggctttgccattggggtgcagc

SEQ ID NO: 30684 - DNA, 122 bp, Homo sapiens
  misc_feature (61)..(62): /note="This region represents a CpG dinucleotide"
  misc_feature (61)..(61): /note="Nucleotide may be methylated to form 5-methylcytosine"
tgcaattggtatgggaaatagggagcagtcttggggcctgagccttcaacttggatctgacgctatctctaggtaaatagtgctggaattaaatgggaagtcccctggctggtgtccgctgc

SEQ ID NO: 30685 - DNA, 122 bp, Homo sapiens
  misc_feature (61)..(62): /note="This region represents a CpG dinucleotide"
  misc_feature (61)..(61): /note="Nucleotide may be methylated to form 5-methylcytosine"
acctgattttgttcttttgtattacccactgttcccagatgtgggaactgaggctcacagcggttatctcagcaggtttatgagccagagttgtcccacccaggagagttttggaagtgaga

SEQ ID NO: 30686 - DNA, 122 bp, Homo sapiens
  misc_feature (61)..(62): /note="This region represents a CpG dinucleotide"
  misc_feature (61)..(61): /note="Nucleotide may be methylated to form 5-methylcytosine"
tgccaggacaactgatgtaaactggtactgtcctaggaaaacaaggcatatggtcagcttcgctgtggtcatgggattaaagcataaggaaaacgtgaagaagctgatgaaactgcatttga

SEQ ID NO: 30687 - DNA, 122 bp, Homo sapiens
  misc_feature (61)..(62): /note="This region represents a CpG dinucleotide"
  misc_feature (61)..(61): /note="Nucleotide may be methylated to form 5-methylcytosine"
tattatggaaggaagaggtctctctctctctccctctctttctctctctctctgtgtgaacgtgcaccaaagaaaggcatgtgaccatgttgcaagacgacaaatgtgtgcaagccagaaag

SEQ ID NO: 30688 - DNA, 122 bp, Homo sapiens
  misc_feature (61)..(62): /note="This region represents a CpG dinucleotide"
  misc_feature (61)..(61): /note="Nucleotide may be methylated to form 5-methylcytosine"
aaggccccgtattccgaggtgggctcagggccatggccagggctgcgtattcagatgtggcgtttggatttcccgttacgagctaaagtatttttgtggttttagtgctgacatcaaatggc

SEQ ID NO: 30689 - DNA, 122 bp, Homo sapiens
  misc_feature (61)..(62): /note="This region represents a CpG dinucleotide"
  misc_feature (61)..(61): /note="Nucleotide may be methylated to form 5-methylcytosine"
atatctatatagacaacaataaaaacagactgtaattgtagttgcagtgattacaacatacgttagaagcctcaggaaataagtcatcctagagtggctcaatgtctttagagtaagacata

SEQ ID NO: 30690 - DNA, 122 bp, Homo sapiens
  misc_feature (61)..(62): /note="This region represents a CpG dinucleotide"
  misc_feature (61)..(61): /note="Nucleotide may be methylated to form 5-methylcytosine"
tggcctcacagacggccctcctctagatgcagtgggcccagagggtgagacggagtgttgcgggccgccagtgggccagctgctcctgccctgcgcaggctctgcccctcctttgaggaagt

SEQ ID NO: 30691 - DNA, 122 bp, Homo sapiens
  misc_feature (61)..(62): /note="This region represents a CpG dinucleotide"
  misc_feature (61)..(61): /note="Nucleotide may be methylated to form 5-methylcytosine"
gcaagctcagaagcagaaatgtcatgcaaatgtcatggtatgccctaattttaatgattccgcagtcctatgaggtgactttaatctcactgtaatttatatcagcagcaaaggatttgagt

SEQ ID NO: 30692 - DNA, 122 bp, Homo sapiens
  misc_feature (61)..(62): /note="This region represents a CpG dinucleotide"
  misc_feature (61)..(61): /note="Nucleotide may be methylated to form 5-methylcytosine"
gtctcccctcccctaggccacaggcttgttttgtcagttttgttcactgctgtgtcccagcggctagaacaacgcttgacactagttgaccttggctgaatgaatgagtgaatgaatgagca

SEQ ID NO: 30693 - DNA, 122 bp, Homo sapiens
  misc_feature (61)..(62): /note="This region represents a CpG dinucleotide"
  misc_feature (61)..(61): /note="Nucleotide may be methylated to form 5-methylcytosine"
aatgacttttgcttggaggctctctgcccctcttagggggctgcatggattctccatgggcgctgttgcccatgcatcttctctgtgcagcttcctgtgcctgactgtttagacctcaccgc

SEQ ID NO: 30694 - DNA, 122 bp, Homo sapiens
  misc_feature (61)..(62): /note="This region represents a CpG dinucleotide"
  misc_feature (61)..(61): /note="Nucleotide may be methylated to form 5-methylcytosine"
taattaatcctttaaaccactcagagctagcaataattcagcataatagttgggtccagccgtttctttcaatgtcgcacacagactttttgttttggctgagatcatcatggtgctgagag

SEQ ID NO: 30695 - DNA, 122 bp, Homo sapiens
  misc_feature (61)..(62): /note="This region represents a CpG dinucleotide"
  misc_feature (61)..(61): /note="Nucleotide may be methylated to form 5-methylcytosine"
ggattattttagagatttatgacaattccatttgttcctatataggggatctgagcttgacgcttgatgctggatttgactaactccctgcaaagccagcagggtgtagatgtgtattacca

SEQ ID NO: 30696 - DNA, 122 bp, Homo sapiens
  misc_feature (61)..(62): /note="This region represents a CpG dinucleotide"
  misc_feature (61)..(61): /note="Nucleotide may be methylated to form 5-methylcytosine"
atacatttttgacttatgatattttcaatgtatgatgggtttatcaggatgtaactgcatcgtgagttaaggtgcagttgtattctaagacctctacaaaaaacattgacagcctattgctg

SEQ ID NO: 30697 - DNA, 122 bp, Homo sapiens
  misc_feature (61)..(62): /note="This region represents a CpG dinucleotide"
  misc_feature (61)..(61): /note="Nucleotide may be methylated to form 5-methylcytosine"
aaaatgaaaaatgcaaaactgggtcctaactgaatatttacttaaagtgagaaaagaaatcgcagtgcattgcagatttttttaaagttggaaaacactacaactgttatgaaatccaaatt

SEQ ID NO: 30698 - DNA, 122 bp, Homo sapiens
  misc_feature (61)..(62): /note="This region represents a CpG dinucleotide"
  misc_feature (61)..(61): /note="Nucleotide may be methylated to form 5-methylcytosine"
tcgcttctgccgaggtgtccctggtaagtagtggaagagcccctgcactggttggctctgcggactccgcgtccgtctgtgacaccccctgcacacttacccaatccttttagatgccaaga

SEQ ID NO: 30699 - DNA, 122 bp, Homo sapiens
  misc_feature (61)..(62): /note="This region represents a CpG dinucleotide"
  misc_feature (61)..(61): /note="Nucleotide may be methylated to form 5-methylcytosine"
gtcaccaaggaatggcatacagtgcaggcagggccaagtcctcagctccaggtctcctgccgatgctgtttgcttgacaacaccacgtggctgggtcaacatgcaccacatggagagcttgg

SEQ ID NO: 30700 - DNA, 122 bp, Homo sapiens
  misc_feature (61)..(62): /note="This region represents a CpG dinucleotide"
  misc_feature (61)..(61): /note="Nucleotide may be methylated to form 5-methylcytosine"
cagacatgcgggtgcatatgcctgggggtgtgagcacagcagagcccagaggcctgcaggcgtgtgcacacatccacaaagtgtccacacatccacaaagtgtcacaaatacacacaagtgt

SEQ ID NO: 30701 - DNA, 122 bp, Homo sapiens
  misc_feature (61)..(62): /note="This region represents a CpG dinucleotide"
  misc_feature (61)..(61): /note="Nucleotide may be methylated to form 5-methylcytosine"
gtgcattaacattctatctttatcttcttaaccctaatccagctcatgtactcataattccgttgtaaaacagaagcctgggtatatgcatggctagattcaccaatcatgttagttgttaa

SEQ ID NO: 30702 - DNA, 122 bp, Homo sapiens
  misc_feature (61)..(62): /note="This region represents a CpG dinucleotide"
  misc_feature (61)..(61): /note="Nucleotide may be methylated to form 5-methylcytosine"
atcaataatgagtagcgactgttattatccccattttacagatatgaaactgaggtatgacgtaattacttaacttgcttgaggtcacacaggttgtaatggaagagcgaggatttatacca

SEQ ID NO: 30703 - DNA, 122 bp, Homo sapiens
  misc_feature (61)..(62): /note="This region represents a CpG dinucleotide"
  misc_feature (61)..(61): /note="Nucleotide may be methylated to form 5-methylcytosine"
tagacattctaattgcacaagacaccaatgtgagtcagagttggagctgaacactgggtacgtgtttctagggtgatacagatgaggattaatttattttggtattcattagtgcttaaaaa

SEQ ID NO: 30704 - DNA, 122 bp, Homo sapiens
  misc_feature (61)..(62): /note="This region represents a CpG dinucleotide"
  misc_feature (61)..(61): /note="Nucleotide may be methylated to form 5-methylcytosine"
ctttttccagggctcccgtgttaggcccccaccaggaggctttggggtggcgtttgggaacgccgtttggatcccttctcagtttgacatcctaggtggcagctccagttttgtttggtgaa

SEQ ID NO: 30705 - DNA, 122 bp, Homo sapiens
  misc_feature (61)..(62): /note="This region represents a CpG dinucleotide"
  misc_feature (61)..(61): /note="Nucleotide may be methylated to form 5-methylcytosine"
atggttatttatagctcatgattcatccaaggactgagttattctccccatgaggctaaccggcctctttcccaacacttaatcatggcagccaggatgggtgaatgatgaaagctcttctg

SEQ ID NO: 30706 - DNA, 122 bp, Homo sapiens
  misc_feature (61)..(62): /note="This region represents a CpG dinucleotide"
  misc_feature (61)..(61): /note="Nucleotide may be methylated to form 5-methylcytosine"
ctcattaaatcttgtttgcttttcaaaggaggaggaagagggaaaagacattgaagaaggcgctattgtgaatcctggtagagacagtgctacaaaccaaatcaggaaaaaggaaccccaga

SEQ ID NO: 30707 - DNA, 122 bp, Homo sapiens
  misc_feature (61)..(62): /note="This region represents a CpG dinucleotide"
  misc_feature (61)..(61): /note="Nucleotide may be methylated to form 5-methylcytosine"
aaagagctctagcccagtaacatttttaaaacctgaaattagtcatgcatagcataacgacgtttcactcaacgacagaccacatgacagtaatcccgtaagattataatgctgtattatta

SEQ ID NO: 30708 - DNA, 122 bp, Homo sapiens
  misc_feature (61)..(62): /note="This region represents a CpG dinucleotide"
  misc_feature (61)..(61): /note="Nucleotide may be methylated to form 5-methylcytosine"
cccaagcaaacctcccacctcagcctcccgagtatctgggatcacaggcatgtgccaccacgcctgactaatttaaaaaacttttttgtacagatggggtcttgctatgtggcccaggctgg

SEQ ID NO: 30709 - DNA, 122 bp, Homo sapiens
  misc_feature (61)..(62): /note="This region represents a CpG dinucleotide"
  misc_feature (61)..(61): /note="Nucleotide may be methylated to form 5-methylcytosine"
agctggcttagtcccatgaagggtttccaacaagataagtttttaggaggaaaaggtagacgttaggtgagcaggaaaaggcctctaagtccctcaacatttgggaagtccgtttgtttggg

SEQ ID NO: 30710 - DNA, 122 bp, Homo sapiens
  misc_feature (61)..(62): /note="This region represents a CpG dinucleotide"
  misc_feature (61)..(61): /note="Nucleotide may be methylated to form 5-methylcytosine"
tgaattctttgactctcctttcctttcatcaaggggaggagtttatgtcctttgaaatgacgtagacttttgtgactgcctcagtgaacagattatgacagaacaatgctttgtaacttccc

SEQ ID NO: 30711 - DNA, 122 bp, Homo sapiens
  misc_feature (61)..(62): /note="This region represents a CpG dinucleotide"
  misc_feature (61)..(61): /note="Nucleotide may be methylated to form 5-methylcytosine"
ttgggggaaatgaggggcccaagagaaggtcagagctatcttgccagcttgggcaacatacgtcttagttatggccccactgtatagacacacatcattgaacaacagggataagttctgag

SEQ ID NO: 30712 - DNA, 122 bp, Homo sapiens
  misc_feature (61)..(62): /note="This region represents a CpG dinucleotide"
  misc_feature (61)..(61): /note="Nucleotide may be methylated to form 5-methylcytosine"
ttttcaccctcctccttattatcagagtaatagtatgtttattgtaggacccttgaaaaacgcagaagagctgaaaggaaaaacagttgtttgtaacctacaactcagagataaccactgat

SEQ ID NO: 30713 - DNA, 122 bp, Homo sapiens
  misc_feature (61)..(62): /note="This region represents a CpG dinucleotide"
  misc_feature (61)..(61): /note="Nucleotide may be methylated to form 5-methylcytosine"
caggtcacaaagaactgaggaactcaaggactcacactcaccaggttctccaaagcagatcggtgctagagtaccaggagtttaagagttgtgcagcagggaacctctttataggacgttct

SEQ ID NO: 30714 - DNA, 122 bp, Homo sapiens
  misc_feature (61)..(62): /note="This region represents a CpG dinucleotide"
  misc_feature (61)..(61): /note="Nucleotide may be methylated to form 5-methylcytosine"
cactcacttcatgtggacttggagctacagaccttttacatccatcacagattggctggacgggttgcaattgctatgcacagcctgattggcactgcaggtttttagagccattttgagtt

SEQ ID NO: 30715 - DNA, 122 bp, Homo sapiens
  misc_feature (61)..(62): /note="This region represents a CpG dinucleotide"
  misc_feature (61)..(61): /note="Nucleotide may be methylated to form 5-methylcytosine"
attcgagccaatactggatcttaacccagtgtttactattctgtgcagtgttccattattcgtggattgctaacaatgaaagaaagcatagaaatgatatagttcaacctccttattttaaa

SEQ ID NO: 30716 - DNA, 122 bp, Homo sapiens
  misc_feature (61)..(62): /note="This region represents a CpG dinucleotide"
  misc_feature (61)..(61): /note="Nucleotide may be methylated to form 5-methylcytosine"
agggctgcttgcgccaatctcattcccacaggatgcaagtacagaagcagagcggacgcccggaaggggtcacagagagacaggcggggcggttgaccagctgactggactcactttggaga

SEQ ID NO: 30717 - DNA, 122 bp, Homo sapiens
  misc_feature (61)..(62): /note="This region represents a CpG dinucleotide"
  misc_feature (61)..(61): /note="Nucleotide may be methylated to form 5-methylcytosine"
gcttttgtgtgtctgaacaagtatttgcctttgcttgtgaatgatatttcactgggcctacggttttaggttgttgttttttttttctttcagtactttatgttgtttcactgtattctagc

SEQ ID NO: 30718 - DNA, 122 bp, Homo sapiens
  misc_feature (61)..(62): /note="This region represents a CpG dinucleotide"
  misc_feature (61)..(61): /note="Nucleotide may be methylated to form 5-methylcytosine"
actaagagagttgggagttgagcattgtgcctcatgatagactcaggaatgtagaagtctcggtttctactcagcctttgctggaatggatgggggtagggtaaagttttttctgagtggtt

SEQ ID NO: 30719 - DNA, 122 bp, Homo sapiens
  misc_feature (61)..(62): /note="This region represents a CpG dinucleotide"
  misc_feature (61)..(61): /note="Nucleotide may be methylated to form 5-methylcytosine"
ggaaagttattgttcatagagcttttgcgagcttgccacctctgccattgataccaggcacgccatattttgtagagccagctttatttttattttgaagtggcttccccctttctgaaaag

SEQ ID NO: 30720 - DNA, 122 bp, Homo sapiens
  misc_feature (61)..(62): /note="This region represents a CpG dinucleotide"
  misc_feature (61)..(61): /note="Nucleotide may be methylated to form 5-methylcytosine"
taataccaataatttactattaatgggctcccagcacttgctaagtaagctgttgtcttccgatttagggaatatcaactatagaagcttgtggacaaaggtgttttgttaacttgttacca

SEQ ID NO: 30721 - DNA, 122 bp, Homo sapiens
  misc_feature (61)..(62): /note="This region represents a CpG dinucleotide"
  misc_feature (61)..(61): /note="Nucleotide may be methylated to form 5-methylcytosine"
agaaaagtctgatcaaagaaaactatacttgtaatagtgctaaccaatgggtaatgctagcgttggggggaaaatatttccctaacaataattgtggaacaaaaattaggttggatagaaca

SEQ ID NO: 30722 - DNA, 122 bp, Homo sapiens
  misc_feature (61)..(62): /note="This region represents a CpG dinucleotide"
  misc_feature (61)..(61): /note="Nucleotide may be methylated to form 5-methylcytosine"
gactagttaagaatatttcatctatgtaagataatgaccagtagagttggacatgtcccccgaacagggatgacgtgacgctgaaaaggagagttgagacctgccatcacatgaaggaagca

SEQ ID NO: 30723 - DNA, 122 bp, Homo sapiens
  misc_feature (61)..(62): /note="This region represents a CpG dinucleotide"
  misc_feature (61)..(61): /note="Nucleotide may be methylated to form 5-methylcytosine"
gtgaggacacaggccgtcctccggcggggagcacggtggggtcagggtgctgtgtggtcccgcaaagaggcagctgagcttgggcctcaggtcgttccacaccttgctcatctgaaagggaa

SEQ ID NO: 30724 - DNA, 122 bp, Homo sapiens
  misc_feature (61)..(62): /note="This region represents a CpG dinucleotide"
  misc_feature (61)..(61): /note="Nucleotide may be methylated to form 5-methylcytosine"
ttagtaagcgaatcctggtgggaaaagtcaagcattaacagactgcagaaccacttttaacggcaataatgcaggaaaagaatcaaaggaaacaacagaatgattagaatgtccttttcttc

SEQ ID NO: 30725 - DNA, 122 bp, Homo sapiens
  misc_feature (61)..(62): /note="This region represents a CpG dinucleotide"
  misc_feature (61)..(61): /note="Nucleotide may be methylated to form 5-methylcytosine"
agaggagtgggggagggttaagaggttgcctccaacactgagtagcttctcaccaggaaacgcctgaaagtttgacagaaacaaaagaccagggaccagcagaactcttacccaggtagatt

SEQ ID NO: 30726 - DNA, 122 bp, Homo sapiens
  misc_feature (61)..(62): /note="This region represents a CpG dinucleotide"
  misc_feature (61)..(61): /note="Nucleotide may be methylated to form 5-methylcytosine"
aatttccccttcccctctccacagtgggcaaggccacctcttcccaccccctggaacctccgtcggtcagggtaggccctcttgggagtttctgctggcccagtactggtcccgggggactt

SEQ ID NO: 30727 - DNA, 122 bp, Homo sapiens
  misc_feature (61)..(62): /note="This region represents a CpG dinucleotide"
  misc_feature (61)..(61): /note="Nucleotide may be methylated to form 5-methylcytosine"
attcaccccaatcctgggacaaactctctctcattgagtcctatgagaatggaatagtctcgcccatcaggtgagagtgtaaacaatcacgtatgacatcacatcacaacaccaccttgggg

SEQ ID NO: 30728 - DNA, 122 bp, Homo sapiens
  misc_feature (61)..(62): /note="This region represents a CpG dinucleotide"
  misc_feature (61)..(61): /note="Nucleotide may be methylated to form 5-methylcytosine"
actactgtccctatgctggaaggacaatgggaagatatgatgttattgaagcccagaggccgacttcattcagggaagctggaaccacagcaggcctgtggttcagaggggagtagaacact

SEQ ID NO: 30729 - DNA, 122 bp, Homo sapiens
  misc_feature (61)..(62): /note="This region represents a CpG dinucleotide"
  misc_feature (61)..(61): /note="Nucleotide may be methylated to form 5-methylcytosine"
ttaaaaaagctttgaaacagaaaacatcagtgctccattctcaaaaccctgcactgtttacgatgaataaagtatgtaagaatcatagataatgtctgttagttagttggccaatggtcaac
